United States Patent Application Publication US 2014/0004565 A1 - sequence listing, part 86

SEQ ID NO: 2119437 - RNA, 19 nt, Artificial Sequence
  Description of Artificial Sequence: Synthetic oligonucleotide
ccacuuaccccacagucaa

SEQ ID NO: 2119438 - RNA, 19 nt, Artificial Sequence
  Description of Artificial Sequence: Synthetic oligonucleotide
ccgccgguuguucugcagg

SEQ ID NO: 2119439 - RNA, 19 nt, Artificial Sequence
  Description of Artificial Sequence: Synthetic oligonucleotide
ggugccgccggccgacucc

SEQ ID NO: 2119440 - RNA, 19 nt, Artificial Sequence
  Description of Artificial Sequence: Synthetic oligonucleotide
ugacccuggcagggauggg

SEQ ID NO: 2119441 - RNA, 19 nt, Artificial Sequence
  Description of Artificial Sequence: Synthetic oligonucleotide
ccaauucauuucccaucgc

SEQ ID NO: 2119442 - RNA, 19 nt, Artificial Sequence
  Description of Artificial Sequence: Synthetic oligonucleotide
gucgccgccgccgccgccg

SEQ ID NO: 2119443 - RNA, 19 nt, Artificial Sequence
  Description of Artificial Sequence: Synthetic oligonucleotide
ccaguccucucugaggaug

SEQ ID NO: 2119444 - RNA, 19 nt, Artificial Sequence
  Description of Artificial Sequence: Synthetic oligonucleotide
cccacuuaccccacaguca

SEQ ID NO: 2119445 - RNA, 19 nt, Artificial Sequence
  Description of Artificial Sequence: Synthetic oligonucleotide
ggcuaccccacauauccua

SEQ ID NO: 2119446 - RNA, 19 nt, Artificial Sequence
  Description of Artificial Sequence: Synthetic oligonucleotide
uaaucacguggugguuaaa

SEQ ID NO: 2119447 - RNA, 19 nt, Artificial Sequence
  Description of Artificial Sequence: Synthetic oligonucleotide
ccgaccauaaucacguggu

SEQ ID NO: 2119448 - RNA, 19 nt, Artificial Sequence
  Description of Artificial Sequence: Synthetic oligonucleotide
ucguaaggacuggcuucca

SEQ ID NO: 2119449 - RNA, 19 nt, Artificial Sequence
  Description of Artificial Sequence: Synthetic oligonucleotide
ugccugccgcgcugcuccg

SEQ ID NO: 2119450 - RNA, 19 nt, Artificial Sequence
  Description of Artificial Sequence: Synthetic oligonucleotide
cucauggagcgcugcacgu

SEQ ID NO: 2119451 - RNA, 19 nt, Artificial Sequence
  Description of Artificial Sequence: Synthetic oligonucleotide
ggguauuggacagcaccca

SEQ ID NO: 2119452 - RNA, 19 nt, Artificial Sequence
  Description of Artificial Sequence: Synthetic oligonucleotide
cguaaggacuggcuuccag

SEQ ID NO: 2119453 - RNA, 19 nt, Artificial Sequence
  Description of Artificial Sequence: Synthetic oligonucleotide
caccgaccauaaucacgug

SEQ ID NO: 2119454 - RNA, 19 nt, Artificial Sequence
  Description of Artificial Sequence: Synthetic oligonucleotide
ccucucugaggauguugag

SEQ ID NO: 2119455 - RNA, 19 nt, Artificial Sequence
  Description of Artificial Sequence: Synthetic oligonucleotide
ggauccggagcugcgccgc

SEQ ID NO: 2119456 - RNA, 19 nt, Artificial Sequence
  Description of Artificial Sequence: Synthetic oligonucleotide
gcgcugcacguuuuguuca

SEQ ID NO: 2119457 - RNA, 19 nt, Artificial Sequence
  Description of Artificial Sequence: Synthetic oligonucleotide
gagcgcugcacguuuuguu

SEQ ID NO: 2119458 - RNA, 19 nt, Artificial Sequence
  Description of Artificial Sequence: Synthetic oligonucleotide
gggguggguugccugggac

SEQ ID NO: 2119459 - RNA, 19 nt, Artificial Sequence
  Description of Artificial Sequence: Synthetic oligonucleotide
cagccgccgguuguucugc

SEQ ID NO: 2119460 - RNA, 19 nt, Artificial Sequence
  Description of Artificial Sequence: Synthetic oligonucleotide
caaaguagguggacccgau

SEQ ID NO: 2119461 - RNA, 19 nt, Artificial Sequence
  Description of Artificial Sequence: Synthetic oligonucleotide
ggggucauguggauaaccu

SEQ ID NO: 2119462 - RNA, 19 nt, Artificial Sequence
  Description of Artificial Sequence: Synthetic oligonucleotide
caguccucucugaggaugu

SEQ ID NO: 2119463 - RNA, 19 nt, Artificial Sequence
  Description of Artificial Sequence: Synthetic oligonucleotide
ccucgaggucaauguuagg

SEQ ID NO: 2119464 - RNA, 19 nt, Artificial Sequence
  Description of Artificial Sequence: Synthetic oligonucleotide
aggcuaccccacauauccu

SEQ ID NO: 2119465 - RNA, 19 nt, Artificial Sequence
  Description of Artificial Sequence: Synthetic oligonucleotide
cugcaggaccucggcggcc

SEQ ID NO: 2119466 - RNA, 19 nt, Artificial Sequence
  Description of Artificial Sequence: Synthetic oligonucleotide
cauggagcgcugcacguuu

SEQ ID NO: 2119467 - RNA, 19 nt, Artificial Sequence
  Description of Artificial Sequence: Synthetic oligonucleotide
ggauaaccuugucccaccu

SEQ ID NO: 2119468 - RNA, 19 nt, Artificial Sequence
  Description of Artificial Sequence: Synthetic oligonucleotide
ggaggagagguaaggccaa

SEQ ID NO: 2119469 - RNA, 19 nt, Artificial Sequence
  Description of Artificial Sequence: Synthetic oligonucleotide
guggguugccugggaccag

SEQ ID NO: 2119470 - RNA, 19 nt, Artificial Sequence
  Description of Artificial Sequence: Synthetic oligonucleotide
gcgagaacagcuugaucau

SEQ ID NO: 2119471 - RNA, 19 nt, Artificial Sequence
  Description of Artificial Sequence: Synthetic oligonucleotide
agccgccgguuguucugca

SEQ ID NO: 2119472 - RNA, 19 nt, Artificial Sequence
  Description of Artificial Sequence: Synthetic oligonucleotide
cugccgcgcugcuccgcgc

SEQ ID NO: 2119473 - RNA, 19 nt, Artificial Sequence
  Description of Artificial Sequence: Synthetic oligonucleotide
gccgccgguuguucugcag

SEQ ID NO: 2119474 - RNA, 19 nt, Artificial Sequence
  Description of Artificial Sequence: Synthetic oligonucleotide
cgaccauaaucacguggug

SEQ ID NO: 2119475 - RNA, 19 nt, Artificial Sequence
  Description of Artificial Sequence: Synthetic oligonucleotide
gccgccggccgacuccucc

SEQ ID NO: 2119476 - RNA, 19 nt, Artificial Sequence
  Description of Artificial Sequence: Synthetic oligonucleotide
gccaaggcuaccccacaua

SEQ ID NO: 2119477 - RNA, 19 nt, Artificial Sequence
  Description of Artificial Sequence: Synthetic oligonucleotide
ggcuuccaguccucucuga

SEQ ID NO: 2119478 - RNA, 19 nt, Artificial Sequence
  Description of Artificial Sequence: Synthetic oligonucleotide
gggaccagugacccaggcu

SEQ ID NO: 2119479 - RNA, 19 nt, Artificial Sequence
  Description of Artificial Sequence: Synthetic oligonucleotide
ggccgacuccuccuccuuc

SEQ ID NO: 2119480 - RNA, 19 nt, Artificial Sequence
  Description of Artificial Sequence: Synthetic oligonucleotide
gcagguucagcucguuaau

SEQ ID NO: 2119481 - RNA, 19 nt, Artificial Sequence
  Description of Artificial Sequence: Synthetic oligonucleotide
ccgauguaaccaccucuca

SEQ ID NO: 2119482 - RNA, 19 nt, Artificial Sequence
  Description of Artificial Sequence: Synthetic oligonucleotide
ucccaucgcugagcagguc

SEQ ID NO: 2119483 - RNA, 19 nt, Artificial Sequence
  Description of Artificial Sequence: Synthetic oligonucleotide
cugcugcuucagcgagaac

SEQ ID NO: 2119484 - RNA, 19 nt, Artificial Sequence
  Description of Artificial Sequence: Synthetic oligonucleotide
ucgccgccgccgccgccgc

SEQ ID NO: 2119485 - RNA, 19 nt, Artificial Sequence
  Description of Artificial Sequence: Synthetic oligonucleotide
ggguauuugcuaacccuau

SEQ ID NO: 2119486 - RNA, 19 nt, Artificial Sequence
  Description of Artificial Sequence: Synthetic oligonucleotide
cagcacccagcgggagggg

SEQ ID NO: 2119487 - RNA, 19 nt, Artificial Sequence
  Description of Artificial Sequence: Synthetic oligonucleotide
ccucucauggagcgcugca

SEQ ID NO: 2119488 - RNA, 19 nt, Artificial Sequence
  Description of Artificial Sequence: Synthetic oligonucleotide
uuggugccgccggccgacu

SEQ ID NO: 2119489 - RNA, 19 nt, Artificial Sequence
  Description of Artificial Sequence: Synthetic oligonucleotide
gcccucgaggucaauguua

SEQ ID NO: 2119490 - RNA, 19 nt, Artificial Sequence
  Description of Artificial Sequence: Synthetic oligonucleotide
ggggaugccugggcuggug

SEQ ID NO: 2119491 - RNA, 19 nt, Artificial Sequence
  Description of Artificial Sequence: Synthetic oligonucleotide
gcgcucaaaguagguggac

SEQ ID NO: 2119492 - RNA, 19 nt, Artificial Sequence
  Description of Artificial Sequence: Synthetic oligonucleotide
gccgacuccuccuccuucu

SEQ ID NO: 2119493 - RNA, 19 nt, Artificial Sequence
  Description of Artificial Sequence: Synthetic oligonucleotide
auggagcgcugcacguuuu

SEQ ID NO: 2119494 - RNA, 19 nt, Artificial Sequence
  Description of Artificial Sequence: Synthetic oligonucleotide
caaacagccgccgguuguu

SEQ ID NO: 2119495 - RNA, 19 nt, Artificial Sequence
  Description of Artificial Sequence: Synthetic oligonucleotide
ggacccgauguaaccaccu

SEQ ID NO: 2119496 - RNA, 19 nt, Artificial Sequence
  Description of Artificial Sequence: Synthetic oligonucleotide
gccggccgacuccuccucc

SEQ ID NO: 2119497 - RNA, 19 nt, Artificial Sequence
  Description of Artificial Sequence: Synthetic oligonucleotide
aggggaugccugggcuggu

SEQ ID NO: 2119498 - RNA, 19 nt, Artificial Sequence
  Description of Artificial Sequence: Synthetic oligonucleotide
gccgccgccgccgccgccg

SEQ ID NO: 2119499 - RNA, 19 nt, Artificial Sequence
  Description of Artificial Sequence: Synthetic oligonucleotide
ggggcgcuaaacaggccaa

SEQ ID NO: 2119500 - RNA, 19 nt, Artificial Sequence
  Description of Artificial Sequence: Synthetic oligonucleotide
guggguccucgggguuggg

SEQ ID NO: 2119501 - RNA, 19 nt, Artificial Sequence
  Description of Artificial Sequence: Synthetic oligonucleotide
gcccucaucaggacagaua

SEQ ID NO: 2119502 - RNA, 19 nt, Artificial Sequence
  Description of Artificial Sequence: Synthetic oligonucleotide
gcuucagcgagaacagcuu

SEQ ID NO: 2119503 - RNA, 19 nt, Artificial Sequence
  Description of Artificial Sequence: Synthetic oligonucleotide
caggcucauugcccacuua

SEQ ID NO: 2119504 - RNA, 19 nt, Artificial Sequence
  Description of Artificial Sequence: Synthetic oligonucleotide
cgauguaaccaccucucau

SEQ ID NO: 2119505 - RNA, 19 nt, Artificial Sequence
  Description of Artificial Sequence: Synthetic oligonucleotide
cggagcugcgccgccgacg

SEQ ID NO: 2119506 - RNA, 19 nt, Artificial Sequence
  Description of Artificial Sequence: Synthetic oligonucleotide
ggagcgcugcacguuuugu

SEQ ID NO: 2119507 - RNA, 19 nt, Artificial Sequence
  Description of Artificial Sequence: Synthetic oligonucleotide
gccauaaauuauggaguuu

SEQ ID NO: 2119508 - RNA, 19 nt, Artificial Sequence
  Description of Artificial Sequence: Synthetic oligonucleotide
cgggguugggcuccaagaa

SEQ ID NO: 2119509 - RNA, 19 nt, Artificial Sequence
  Description of Artificial Sequence: Synthetic oligonucleotide
gcugcacguuuuguucaaa

SEQ ID NO: 2119510 - RNA, 19 nt, Artificial Sequence
  Description of Artificial Sequence: Synthetic oligonucleotide
ggcgcuaaacaggccaauu

SEQ ID NO: 2119511 - RNA, 19 nt, Artificial Sequence
  Description of Artificial Sequence: Synthetic oligonucleotide
ggcagcgcucaaaguaggu

SEQ ID NO: 2119512 - RNA, 19 nt, Artificial Sequence
  Description of Artificial Sequence: Synthetic oligonucleotide
cagucaagagugggguauu

SEQ ID NO: 2119513 - RNA, 19 nt, Artificial Sequence
  Description of Artificial Sequence: Synthetic oligonucleotide
gccgccgccgccgccgccc

SEQ ID NO: 2119514 - RNA, 19 nt, Artificial Sequence
  Description of Artificial Sequence: Synthetic oligonucleotide
gccugggaccagugaccca

SEQ ID NO: 2119515 - RNA, 19 nt, Artificial Sequence
  Description of Artificial Sequence: Synthetic oligonucleotide
gccgccgccgccgcccgcc

SEQ ID NO: 2119516 - RNA, 19 nt, Artificial Sequence
  Description of Artificial Sequence: Synthetic oligonucleotide
cugcgccgccgacgccuuc

SEQ ID NO: 2119517 - RNA, 19 nt, Artificial Sequence
  Description of Artificial Sequence: Synthetic oligonucleotide
cgcugcacguuuuguucaa

SEQ ID NO: 2119518 - RNA, 19 nt, Artificial Sequence
  Description of Artificial Sequence: Synthetic oligonucleotide
gccugccgcgcugcuccgc

SEQ ID NO: 2119519 - RNA, 19 nt, Artificial Sequence
  Description of Artificial Sequence: Synthetic oligonucleotide
ccggagcugcgccgccgac

SEQ ID NO: 2119520 - RNA, 19 nt, Artificial Sequence
  Description of Artificial Sequence: Synthetic oligonucleotide
ccgccgacgccuucuugcu

SEQ ID NO: 2119521 - RNA, 19 nt, Artificial Sequence
  Description of Artificial Sequence: Synthetic oligonucleotide
cgcccgcccggccugccug

SEQ ID NO: 2119522 - RNA, 19 nt, Artificial Sequence
  Description of Artificial Sequence: Synthetic oligonucleotide
gggcgcuaaacaggccaau

SEQ ID NO: 2119523 - RNA, 19 nt, Artificial Sequence
  Description of Artificial Sequence: Synthetic oligonucleotide
ccauaaucacguggugguu

SEQ ID NO: 2119524 - RNA, 19 nt, Artificial Sequence
  Description of Artificial Sequence: Synthetic oligonucleotide
ccgccgccgccgccgcccg

SEQ ID NO: 2119525 - RNA, 19 nt, Artificial Sequence
  Description of Artificial Sequence: Synthetic oligonucleotide
cgccggccgacuccuccuc

SEQ ID NO: 2119526 - RNA, 19 nt, Artificial Sequence
  Description of Artificial Sequence: Synthetic oligonucleotide
cgacgccuucuugcugcug

SEQ ID NO: 2119527 - RNA, 19 nt, Artificial Sequence
  Description of Artificial Sequence: Synthetic oligonucleotide
cgccgccgacgccuucuug

SEQ ID NO: 2119528 - RNA, 19 nt, Artificial Sequence
  Description of Artificial Sequence: Synthetic oligonucleotide
ccgacgccuucuugcugcu

SEQ ID NO: 2119529 - RNA, 19 nt, Artificial Sequence
  Description of Artificial Sequence: Synthetic oligonucleotide
ccgccgccgccgccgccgc

SEQ ID NO: 2119530 - RNA, 19 nt, Artificial Sequence
  Description of Artificial Sequence: Synthetic oligonucleotide
ccggccugccugccgcgcu

SEQ ID NO: 2119531 - RNA, 19 nt, Artificial Sequence
  Description of Artificial Sequence: Synthetic oligonucleotide
ccgacuccuccuccuucuu

SEQ ID NO: 2119532 - RNA, 19 nt, Artificial Sequence
  Description of Artificial Sequence: Synthetic oligonucleotide
cgccgccgccgccgccgcc

SEQ ID NO: 2119533 - RNA, 19 nt, Artificial Sequence
  Description of Artificial Sequence: Synthetic oligonucleotide
cgccgccgccgccgcccgc

SEQ ID NO: 2119534 - RNA, 19 nt, Artificial Sequence
  Description of Artificial Sequence: Synthetic oligonucleotide
cggccgacuccuccuccuu

SEQ ID NO: 2119535 - RNA, 19 nt, Artificial Sequence
  Description of Artificial Sequence: Synthetic oligonucleotide
aaucuuuuagucuuguugg

SEQ ID NO: 2119536 - RNA, 19 nt, Artificial Sequence
  Description of Artificial Sequence: Synthetic oligonucleotide
uaugauagaauccaaucgg

SEQ ID NO: 2119537 - RNA, 19 nt, Artificial Sequence
  Description of Artificial Sequence: Synthetic oligonucleotide
auagaagucaaucagauga

SEQ ID NO: 2119538 - RNA, 19 nt, Artificial Sequence
  Description of Artificial Sequence: Synthetic oligonucleotide
aaaggcaguccccagaugg

SEQ ID NO: 2119539 - RNA, 19 nt, Artificial Sequence
  Description of Artificial Sequence: Synthetic oligonucleotide
auaccuggaauuuauauuc

SEQ ID NO: 2119540 - RNA, 19 nt, Artificial Sequence
  Description of Artificial Sequence: Synthetic oligonucleotide
auaugauagaauccaaucg

SEQ ID NO: 2119541 - RNA, 19 nt, Artificial Sequence
  Description of Artificial Sequence: Synthetic oligonucleotide
  modified_base (4)..(4): a, c, u, g, unknown or other
uccnguuugacugagcucg

SEQ ID NO: 2119542 - RNA, 19 nt, Artificial Sequence
  Description of Artificial Sequence: Synthetic oligonucleotide
ucuuaacagauauaguuag

SEQ ID NO: 2119543 - RNA, 19 nt, Artificial Sequence
  Description of Artificial Sequence: Synthetic oligonucleotide
aaauuguuugagcuuggac

SEQ ID NO: 2119544 - RNA, 19 nt, Artificial Sequence
  Description of Artificial Sequence: Synthetic oligonucleotide
uuucauuuaaaggagggag

SEQ ID NO: 2119545 - RNA, 19 nt, Artificial Sequence
  Description of Artificial Sequence: Synthetic oligonucleotide
gaacauagaagucaaucag

SEQ ID NO: 2119546 - RNA, 19 nt, Artificial Sequence
  Description of Artificial Sequence: Synthetic oligonucleotide
ugaacauagaagucaauca

SEQ ID NO: 2119547 - RNA, 19 nt, Artificial Sequence
  Description of Artificial Sequence: Synthetic oligonucleotide
aauuccggcagauuggugu

SEQ ID NO: 2119548 - RNA, 19 nt, Artificial Sequence
  Description of Artificial Sequence: Synthetic oligonucleotide
agauauaguuaguagguag

SEQ ID NO: 2119549 - RNA, 19 nt, Artificial Sequence
  Description of Artificial Sequence: Synthetic oligonucleotide
ucucuaaucaagaaaguuc

SEQ ID NO: 2119550 - RNA, 19 nt, Artificial Sequence
  Description of Artificial Sequence: Synthetic oligonucleotide
guuaauggcaagucgacag

SEQ ID NO: 2119551 - RNA, 19 nt, Artificial Sequence
  Description of Artificial Sequence: Synthetic oligonucleotide
gacgucuuaacagauauag

SEQ ID NO: 2119552 - RNA, 19 nt, Artificial Sequence
  Description of Artificial Sequence: Synthetic oligonucleotide
  modified_base (10)..(10): a, c, u, g, unknown or other
guaccauccnguuugacug

SEQ ID NO: 2119553 - RNA, 19 nt, Artificial Sequence
  Description of Artificial Sequence: Synthetic oligonucleotide
ugacacauaugauagaauc

SEQ ID NO: 2119554 - RNA, 19 nt, Artificial Sequence
  Description of Artificial Sequence: Synthetic oligonucleotide
aaucaagaaaguuccuucu

SEQ ID NO: 2119555 - RNA, 19 nt, Artificial Sequence
  Description of Artificial Sequence: Synthetic oligonucleotide
uuuuguuuuguuuuguuuu

SEQ ID NO: 2119556 - RNA, 19 nt, Artificial Sequence
  Description of Artificial Sequence: Synthetic oligonucleotide
cauaugauagaauccaauc

SEQ ID NO: 2119557 - RNA, 19 nt, Artificial Sequence
  Description of Artificial Sequence: Synthetic oligonucleotide
uuguuucauuuaaaggagg

SEQ ID NO: 2119558 - RNA, 19 nt, Artificial Sequence
  Description of Artificial Sequence: Synthetic oligonucleotide
caagguaucccaaaacgag

SEQ ID NO: 2119559 - RNA, 19 nt, Artificial Sequence
  Description of Artificial Sequence: Synthetic oligonucleotide
uuuguuuuguuuuguuuug

SEQ ID NO: 2119560 - RNA, 19 nt, Artificial Sequence
  Description of Artificial Sequence: Synthetic oligonucleotide
aaaacgagucucugcgggg

SEQ ID NO: 2119561 - RNA, 19 nt, Artificial Sequence
  Description of Artificial Sequence: Synthetic oligonucleotide
uaaucaagaaaguuccuuc

SEQ ID NO: 2119562 - RNA, 19 nt, Artificial Sequence
  Description of Artificial Sequence: Synthetic oligonucleotide
uucauuuaaaggagggaga

SEQ ID NO: 2119563 - RNA, 19 nt, Artificial Sequence
  Description of Artificial Sequence: Synthetic oligonucleotide
ugcacaucugaacauagaa

SEQ ID NO: 2119564 - RNA, 19 nt, Artificial Sequence
  Description of Artificial Sequence: Synthetic oligonucleotide
gucagauacaaguggacag

SEQ ID NO: 2119565 - RNA, 19 nt, Artificial Sequence
  Description of Artificial Sequence: Synthetic oligonucleotide
auagaauccaaucggaauu

SEQ ID NO: 2119566 - RNA, 19 nt, Artificial Sequence
  Description of Artificial Sequence: Synthetic oligonucleotide
ugaaucaacacgccagaga

SEQ ID NO: 2119567 - RNA, 19 nt, Artificial Sequence
  Description of Artificial Sequence: Synthetic oligonucleotide
uccaaguaaucuuuuaguc

SEQ ID NO: 2119568 - RNA, 19 nt, Artificial Sequence
  Description of Artificial Sequence: Synthetic oligonucleotide
cagagguuuggucagauac

SEQ ID NO: 2119569 - RNA, 19 nt, Artificial Sequence
  Description of Artificial Sequence: Synthetic oligonucleotide
uuauaccuggaauuuauau

SEQ ID NO: 2119570 - RNA, 19 nt, Artificial Sequence
  Description of Artificial Sequence: Synthetic oligonucleotide
caauccgcagguuagucgg

SEQ ID NO: 2119571 - RNA, 19 nt, Artificial Sequence
  Description of Artificial Sequence: Synthetic oligonucleotide
ucaauccgcagguuagucg

SEQ ID NO: 2119572 - RNA, 19 nt, Artificial Sequence
  Description of Artificial Sequence: Synthetic oligonucleotide
agauugguguggcaaaguc

SEQ ID NO: 2119573 - RNA, 19 nt, Artificial Sequence
  Description of Artificial Sequence: Synthetic oligonucleotide
aucaacacgccagagacag

SEQ ID NO: 2119574 - RNA, 19 nt, Artificial Sequence
  Description of Artificial Sequence: Synthetic oligonucleotide
agaugaaccacacugucaa

SEQ ID NO: 2119575 - RNA, 19 nt, Artificial Sequence
  Description of Artificial Sequence: Synthetic oligonucleotide
ugcgaacuaucucuaauca

SEQ ID NO: 2119576 - RNA, 19 nt, Artificial Sequence
  Description of Artificial Sequence: Synthetic oligonucleotide
caaaacgagucucugcggg

SEQ ID NO: 2119577 - RNA, 19 nt, Artificial Sequence
  Description of Artificial Sequence: Synthetic oligonucleotide
uuccaaguaaucuuuuagu

SEQ ID NO: 2119578 - RNA, 19 nt, Artificial Sequence
  Description of Artificial Sequence: Synthetic oligonucleotide
uuaacagauauaguuagua

SEQ ID NO: 2119579 - RNA, 19 nt, Artificial Sequence
  Description of Artificial Sequence: Synthetic oligonucleotide
ucaaauuguuugagcuugg

SEQ ID NO: 2119580 - RNA, 19 nt, Artificial Sequence
  Description of Artificial Sequence: Synthetic oligonucleotide
aauccaaucggaauuucca

SEQ ID NO: 2119581 - RNA, 19 nt, Artificial Sequence
  Description of Artificial Sequence: Synthetic oligonucleotide
cuucucuccaaauuccggc

SEQ ID NO: 2119582 - RNA, 19 nt, Artificial Sequence
  Description of Artificial Sequence: Synthetic oligonucleotide
agaugaaucaacacgccag

SEQ ID NO: 2119583 - RNA, 19 nt, Artificial Sequence
  Description of Artificial Sequence: Synthetic oligonucleotide
gacacauaugauagaaucc

SEQ ID NO: 2119584 - RNA, 19 nt, Artificial Sequence
  Description of Artificial Sequence: Synthetic oligonucleotide
uguaguguacagagguuug

SEQ ID NO: 2119585 - RNA, 19 nt, Artificial Sequence
  Description of Artificial Sequence: Synthetic oligonucleotide
acacauaugauagaaucca

SEQ ID NO: 2119586 - RNA, 19 nt, Artificial Sequence
  Description of Artificial Sequence: Synthetic oligonucleotide
uguccguuuauccuugcac

SEQ ID NO: 2119587 - RNA, 19 nt, Artificial Sequence
  Description of Artificial Sequence: Synthetic oligonucleotide
auauaguuaguagguaguc

SEQ ID NO: 2119588 - RNA, 19 nt, Artificial Sequence
  Description of Artificial Sequence: Synthetic oligonucleotide
auuguuugagcuuggacuu

SEQ ID NO: 2119589 - RNA, 19 nt, Artificial Sequence
  Description of Artificial Sequence: Synthetic oligonucleotide
ucaaucagaugaaccacac

SEQ ID NO: 2119590 - RNA, 19 nt, Artificial Sequence
  Description of Artificial Sequence: Synthetic oligonucleotide
gaaccacacugucaaauug

SEQ ID NO: 2119591 - RNA, 19 nt, Artificial Sequence
  Description of Artificial Sequence: Synthetic oligonucleotide
uuaauggcaagucgacaga

SEQ ID NO: 2119592 - RNA, 19 nt, Artificial Sequence
  Description of Artificial Sequence: Synthetic oligonucleotide
aagcccaaggcccgcgagc

SEQ ID NO: 2119593 - RNA, 19 nt, Artificial Sequence
  Description of Artificial Sequence: Synthetic oligonucleotide
ugauagaauccaaucggaa

SEQ ID NO: 2119594 - RNA, 19 nt, Artificial Sequence
  Description of Artificial Sequence: Synthetic oligonucleotide
auuaacagucauacuuccc

SEQ ID NO: 2119595 - RNA, 19 nt, Artificial Sequence
  Description of Artificial Sequence: Synthetic oligonucleotide
ucuggaguccgcacgcccg

SEQ ID NO: 2119596 - RNA, 19 nt, Artificial Sequence
  Description of Artificial Sequence: Synthetic oligonucleotide
gagggagacacuuauaccu

SEQ ID NO: 2119597 - RNA, 19 nt, Artificial Sequence
  Description of Artificial Sequence: Synthetic oligonucleotide
cuuggacucaauccgcagg

SEQ ID NO: 2119598 - RNA, 19 nt, Artificial Sequence
  Description of Artificial Sequence: Synthetic oligonucleotide
ugagcuuggacuugacaca

SEQ ID NO: 2119599 - RNA, 19 nt, Artificial Sequence
  Description of Artificial Sequence: Synthetic oligonucleotide
uuggacucaauccgcaggu

SEQ ID NO: 2119600 - RNA, 19 nt, Artificial Sequence
  Description of Artificial Sequence: Synthetic oligonucleotide
uacauuuguuaauggcaag

SEQ ID NO: 2119601 - RNA, 19 nt, Artificial Sequence
  Description of Artificial Sequence: Synthetic oligonucleotide
aucaagaaaguuccuucug

SEQ ID NO: 2119602 - RNA, 19 nt, Artificial Sequence
  Description of Artificial Sequence: Synthetic oligonucleotide
uauaguuaguagguagucu

SEQ ID NO: 2119603 - RNA, 19 nt, Artificial Sequence
  Description of Artificial Sequence: Synthetic oligonucleotide
ucacaagguaucccaaaac

SEQ ID NO: 2119604 - RNA, 19 nt, Artificial Sequence
  Description of Artificial Sequence: Synthetic oligonucleotide
gaugaaucaacacgccaga

SEQ ID NO: 2119605 - RNA, 19 nt, Artificial Sequence
  Description of Artificial Sequence: Synthetic oligonucleotide
gaauuuccaucuuggacuc

SEQ ID NO: 2119606 - RNA, 19 nt, Artificial Sequence
  Description of Artificial Sequence: Synthetic oligonucleotide
guguacagagguuugguca

SEQ ID NO: 2119607 - RNA, 19 nt, Artificial Sequence
  Description of Artificial Sequence: Synthetic oligonucleotide
uccagcugacgucuuaaca

SEQ ID NO: 2119608 - RNA, 19 nt, Artificial Sequence
  Description of Artificial Sequence: Synthetic oligonucleotide
uggcaagucgacagaagug

SEQ ID NO: 2119609 - RNA, 19 nt, Artificial Sequence
  Description of Artificial Sequence: Synthetic oligonucleotide
ucuaaucaagaaaguuccu

SEQ ID NO: 2119610 - RNA, 19 nt, Artificial Sequence
  Description of Artificial Sequence: Synthetic oligonucleotide
ucgacagaagugcugcaga

SEQ ID NO: 2119611 - RNA, 19 nt, Artificial Sequence
  Description of Artificial Sequence: Synthetic oligonucleotide
gaauccaaucggaauuucc

SEQ ID NO: 2119612 - RNA, 19 nt, Artificial Sequence
  Description of Artificial Sequence: Synthetic oligonucleotide
uaguuaguagguagucuga

SEQ ID NO: 2119613 - RNA, 19 nt, Artificial Sequence
  Description of Artificial Sequence: Synthetic oligonucleotide
uuaaaggagggagacacuu

SEQ ID NO: 2119614 - RNA, 19 nt, Artificial Sequence
  Description of Artificial Sequence: Synthetic oligonucleotide
agauacaaguggacagucc

SEQ ID NO: 2119615 - RNA, 19 nt, Artificial Sequence
  Description of Artificial Sequence: Synthetic oligonucleotide
gauagaauccaaucggaau

SEQ ID NO: 2119616 - RNA, 19 nt, Artificial Sequence
  Description of Artificial Sequence: Synthetic oligonucleotide
aguccgcacgcccggagcc

SEQ ID NO: 2119617 - RNA, 19 nt, Artificial Sequence
  Description of Artificial Sequence: Synthetic oligonucleotide
gacucaauccgcagguuag

SEQ ID NO: 2119618 - RNA, 19 nt, Artificial Sequence
  Description of Artificial Sequence: Synthetic oligonucleotide
agguaucccaaaacgaguc

SEQ ID NO: 2119619 - RNA, 19 nt, Artificial Sequence
  Description of Artificial Sequence: Synthetic oligonucleotide
caucuuggacucaauccgc

SEQ ID NO: 2119620 - RNA, 19 nt, Artificial Sequence
  Description of Artificial Sequence: Synthetic oligonucleotide
uccaaucggaauuuccauc

SEQ ID NO: 2119621 - RNA, 19 nt, Artificial Sequence
  Description of Artificial Sequence: Synthetic oligonucleotide
aagguaucccaaaacgagu

SEQ ID NO: 2119622 - RNA, 19 nt, Artificial Sequence
  Description of Artificial Sequence: Synthetic oligonucleotide
ggcaaagucucucacaguc

SEQ ID NO: 2119623 - RNA, 19 nt, Artificial Sequence
  Description of Artificial Sequence: Synthetic oligonucleotide
aaggcaguccccagauggc

SEQ ID NO: 2119624 - RNA, 19 nt, Artificial Sequence
  Description of Artificial Sequence: Synthetic oligonucleotide
aguuaguagguagucugag

SEQ ID NO: 2119625 - RNA, 19 nt, Artificial Sequence
  Description of Artificial Sequence: Synthetic oligonucleotide
  modified_base (17)..(17): a, c, u, g, unknown or other
uuccccaguaccauccngu

SEQ ID NO: 2119626 - RNA, 19 nt, Artificial Sequence
  Description of Artificial Sequence: Synthetic oligonucleotide
ucuuggacucaauccgcag

SEQ ID NO: 2119627 - RNA, 19 nt, Artificial Sequence
  Description of Artificial Sequence: Synthetic oligonucleotide
uguuaauggcaagucgaca

SEQ ID NO: 2119628 - RNA, 19 nt, Artificial Sequence
  Description of Artificial Sequence: Synthetic oligonucleotide
uugguaaaggcagucccca

SEQ ID NO: 2119629 - RNA, 19 nt, Artificial Sequence
  Description of Artificial Sequence: Synthetic oligonucleotide
accgguacauuuguuaaug

SEQ ID NO: 2119630 - RNA, 19 nt, Artificial Sequence
  Description of Artificial Sequence: Synthetic oligonucleotide
  modified_base (5)..(5): a, c, u, g, unknown or other
auccnguuugacugagcuc

SEQ ID NO: 2119631 - RNA, 19 nt, Artificial Sequence
  Description of Artificial Sequence: Synthetic oligonucleotide
agugcgaacuaucucuaau

SEQ ID NO: 2119632 - RNA, 19 nt, Artificial Sequence
  Description of Artificial Sequence: Synthetic oligonucleotide
acaagguaucccaaaacga

SEQ ID NO: 2119633 - RNA, 19 nt, Artificial Sequence
  Description of Artificial Sequence: Synthetic oligonucleotide
guaguguacagagguuugg

SEQ ID NO: 2119634 - RNA, 19 nt, Artificial Sequence
  Description of Artificial Sequence: Synthetic oligonucleotide
gauauaguuaguagguagu

SEQ ID NO: 2119635 - RNA, 19 nt, Artificial Sequence
  Description of Artificial Sequence: Synthetic oligonucleotide
aggcucaugcuucaaggga

SEQ ID NO: 2119636 - RNA, 19 nt, Artificial Sequence
  Description of Artificial Sequence: Synthetic oligonucleotide
auacaaguggacagucccg

SEQ ID NO: 2119637 - RNA, 19 nt, Artificial Sequence
  Description of Artificial Sequence: Synthetic oligonucleotide
guuccggggagccucuggg

SEQ ID NO: 2119638 - RNA, 19 nt, Artificial Sequence
  Description of Artificial Sequence: Synthetic oligonucleotide
aaacgagucucugcggggu

SEQ ID NO: 2119639 - RNA, 19 nt, Artificial Sequence
  Description of Artificial Sequence: Synthetic oligonucleotide
caaguaaucuuuuagucuu

SEQ ID NO: 2119640 - RNA, 19 nt, Artificial Sequence
  Description of Artificial Sequence: Synthetic oligonucleotide
gugcgaacuaucucuaauc

SEQ ID NO: 2119641 - RNA, 19 nt, Artificial Sequence
  Description of Artificial Sequence: Synthetic oligonucleotide
ggcaagucgacagaagugc

SEQ ID NO: 2119642 - RNA, 19 nt, Artificial Sequence
  Description of Artificial Sequence: Synthetic oligonucleotide
caagucgacagaagugcug

SEQ ID NO: 2119643 - RNA, 19 nt, Artificial Sequence
  Description of Artificial Sequence: Synthetic oligonucleotide
augauagaauccaaucgga

SEQ ID NO: 2119644 - RNA, 19 nt, Artificial Sequence
  Description of Artificial Sequence: Synthetic oligonucleotide
gguuagucgguccagcuga

SEQ ID NO: 2119645 - RNA, 19 nt, Artificial Sequence
  Description of Artificial Sequence: Synthetic oligonucleotide
cugagugcgaacuaucucu

SEQ ID NO: 2119646 - RNA, 19 nt, Artificial Sequence
  Description of Artificial Sequence: Synthetic oligonucleotide
agguuagucgguccagcug

SEQ ID NO: 2119647 - RNA, 19 nt, Artificial Sequence
  Description of Artificial Sequence: Synthetic oligonucleotide
auccaaucggaauuuccau

SEQ ID NO: 2119648 - RNA, 19 nt, Artificial Sequence
  Description of Artificial Sequence: Synthetic oligonucleotide
ugagugcgaacuaucucua

SEQ ID NO: 2119649 - RNA, 19 nt, Artificial Sequence
  Description of Artificial Sequence: Synthetic oligonucleotide
uccguuuauccuugcacau

SEQ ID NO: 2119650 - RNA, 19 nt, Artificial Sequence
  Description of Artificial Sequence: Synthetic oligonucleotide
acaagggaucuggaguccg

SEQ ID NO: 2119651 - RNA, 19 nt, Artificial Sequence
  Description of Artificial Sequence: Synthetic oligonucleotide
agguagucugagugcgaac

SEQ ID NO: 2119652 - RNA, 19 nt, Artificial Sequence
  Description of Artificial Sequence: Synthetic oligonucleotide
aacgagucucugcggggug

SEQ ID NO: 2119653 - RNA, 19 nt, Artificial Sequence
  Description of Artificial Sequence: Synthetic oligonucleotide
gggaucuggaguccgcacg

SEQ ID NO: 2119654 - RNA, 19 nt, Artificial Sequence
  Description of Artificial Sequence: Synthetic oligonucleotide
gucuuaacagauauaguua

SEQ ID NO: 2119655 - RNA, 19 nt, Artificial Sequence
  Description of Artificial Sequence: Synthetic oligonucleotide
agacgcgccgccucugggg

SEQ ID NO: 2119656 - RNA, 19 nt, Artificial Sequence
  Description of Artificial Sequence: Synthetic oligonucleotide
ucugcgggguguccgaaau

SEQ ID NO: 2119657 - RNA, 19 nt, Artificial Sequence
  Description of Artificial Sequence: Synthetic oligonucleotide
acuggcuccgcguccuguc

SEQ ID NO: 2119658 - RNA, 19 nt, Artificial Sequence
  Description of Artificial Sequence: Synthetic oligonucleotide
augaaucaacacgccagag

SEQ ID NO: 2119659 - RNA, 19 nt, Artificial Sequence
  Description of Artificial Sequence: Synthetic oligonucleotide
gggguguccgaaauggugg

SEQ ID NO: 2119660 - RNA, 19 nt, Artificial Sequence
  Description of Artificial Sequence: Synthetic oligonucleotide
ggacuugacacauaugaua

SEQ ID NO: 2119661 - RNA, 19 nt, Artificial Sequence
  Description of Artificial Sequence: Synthetic oligonucleotide
auggcaccgguacauuugu

SEQ ID NO: 2119662 - RNA, 19 nt, Artificial Sequence
  Description of Artificial Sequence: Synthetic oligonucleotide
gucacaagguaucccaaaa

SEQ ID NO: 2119663 - RNA, 19 nt, Artificial Sequence
  Description of Artificial Sequence: Synthetic oligonucleotide
guguccgaaaugguggcag

SEQ ID NO: 2119664 - RNA, 19 nt, Artificial Sequence
  Description of Artificial Sequence: Synthetic oligonucleotide
aucgccugccgcaagcuuc

SEQ ID NO: 2119665 - RNA, 19 nt, Artificial Sequence
  Description of Artificial Sequence: Synthetic oligonucleotide
cuuggacuugacacauaug

SEQ ID NO: 2119666 - RNA, 19 nt, Artificial Sequence
  Description of Artificial Sequence: Synthetic oligonucleotide
ggagggagacacuuauacc

SEQ ID NO: 2119667 - RNA, 19 nt, Artificial Sequence
  Description of Artificial Sequence: Synthetic oligonucleotide
agguggucgcccgagcugg

SEQ ID NO: 2119668 - RNA, 19 nt, Artificial Sequence
  Description of Artificial Sequence: Synthetic oligonucleotide
acacuuauaccuggaauuu

SEQ ID NO: 2119669 - RNA, 19 nt, Artificial Sequence
  Description of Artificial Sequence: Synthetic oligonucleotide
agucccguuccggggagcc

SEQ ID NO: 2119670 - RNA, 19 nt, Artificial Sequence
  Description of Artificial Sequence: Synthetic oligonucleotide
accgacagaucgccugccg

SEQ ID NO: 2119671 - RNA, 19 nt, Artificial Sequence
  Description of Artificial Sequence: Synthetic oligonucleotide
cucgcgcagggccuuagcc

SEQ ID NO: 2119672 - RNA, 19 nt, Artificial Sequence
  Description of Artificial Sequence: Synthetic oligonucleotide
acagguggucgcccgagcu

SEQ ID NO: 2119673 - RNA, 19 nt, Artificial Sequence
  Description of Artificial Sequence: Synthetic oligonucleotide
ggacacaagggaucuggag

SEQ ID NO: 2119674 - RNA, 19 nt, Artificial Sequence
  Description of Artificial Sequence: Synthetic oligonucleotide
uuagucgguccagcugacg

SEQ ID NO: 2119675 - RNA, 19 nt, Artificial Sequence
  Description of Artificial Sequence: Synthetic oligonucleotide
guaucccaaaacgagucuc

SEQ ID NO: 2119676 - RNA, 19 nt, Artificial Sequence
  Description of Artificial Sequence: Synthetic oligonucleotide
uguccgaaaugguggcaga

SEQ ID NO: 2119677 - RNA, 19 nt, Artificial Sequence
  Description of Artificial Sequence: Synthetic oligonucleotide
  modified_base (9)..(9): a, c, u, g, unknown or other
uaccauccnguuugacuga

SEQ ID NO: 2119678 - RNA, 19 nt, Artificial Sequence
  Description of Artificial Sequence: Synthetic oligonucleotide
uccuugcacaucugaacau

SEQ ID NO: 2119679 - RNA, 19 nt, Artificial Sequence
  Description of Artificial Sequence: Synthetic oligonucleotide
aguggacagucccguuccg

SEQ ID NO: 2119680 - RNA, 19 nt, Artificial Sequence
  Description of Artificial Sequence: Synthetic oligonucleotide
uccgcagguuagucggucc

SEQ ID NO: 2119681 - RNA, 19 nt, Artificial Sequence
  Description of Artificial Sequence: Synthetic oligonucleotide
uccuguccgcgccauuccc

SEQ ID NO: 2119682 - RNA, 19 nt, Artificial Sequence
  Description of Artificial Sequence: Synthetic oligonucleotide
caagggaucuggaguccgc

SEQ ID NO: 2119683 - RNA, 19 nt, Artificial Sequence
  Description of Artificial Sequence: Synthetic oligonucleotide
acggucaccgacagaucgc

SEQ ID NO: 2119684 - RNA, 19 nt, Artificial Sequence
  Description of Artificial Sequence: Synthetic oligonucleotide
uccgcguccuguccgcgcc

SEQ ID NO: 2119685 - RNA, 19 nt, Artificial Sequence
  Description of Artificial Sequence: Synthetic oligonucleotide
ccugccgcaagcuuccggg

SEQ ID NO: 2119686 - RNA, 19 nt, Artificial Sequence
  Description of Artificial Sequence: Synthetic oligonucleotide
gacagucccguuccgggga

SEQ ID NO: 2119687 - RNA, 19 nt, Artificial Sequence
  Description of Artificial Sequence: Synthetic oligonucleotide
ggaucuggaguccgcacgc

SEQ ID NO: 2119688 - RNA, 19 nt, Artificial Sequence
  Description of Artificial Sequence: Synthetic oligonucleotide
uggggacugcuccuccgcc

SEQ ID NO: 2119689 - RNA, 19 nt, Artificial Sequence
  Description of Artificial Sequence: Synthetic oligonucleotide
  modified_base (6)..(6): a, c, u, g, unknown or other
cauccnguuugacugagcu

SEQ ID NO: 2119690 - RNA, 19 nt, Artificial Sequence
  Description of Artificial Sequence: Synthetic oligonucleotide
guuuuguuuuguuuuguuu

SEQ ID NO: 2119691 - RNA, 19 nt, Artificial Sequence
  Description of Artificial Sequence: Synthetic oligonucleotide
uuguuugagcuuggacuug

SEQ ID NO: 2119692 - RNA, 19 nt, Artificial Sequence
  Description of Artificial Sequence: Synthetic oligonucleotide
ugccgcaagcuuccgggcu

SEQ ID NO: 2119693 - RNA, 19 nt, Artificial Sequence
  Description of Artificial Sequence: Synthetic oligonucleotide
aaauuccggcagauuggug

SEQ ID NO: 2119694 - RNA, 19 nt, Artificial Sequence
  Description of Artificial Sequence: Synthetic oligonucleotide
cagaucgccugccgcaagc

SEQ ID NO: 2119695 - RNA, 19 nt, Artificial Sequence
  Description of Artificial Sequence: Synthetic oligonucleotide
agggagacacuuauaccug

SEQ ID NO: 2119696 - RNA, 19 nt, Artificial Sequence
  Description of Artificial Sequence: Synthetic oligonucleotide
ugacgucuuaacagauaua

SEQ ID NO: 2119697 - RNA, 19 nt, Artificial Sequence
  Description of Artificial Sequence: Synthetic oligonucleotide
  modified_base (16)..(16): a, c, u, g, unknown or other
uccccaguaccauccnguu

SEQ ID NO: 2119698 - RNA, 19 nt, Artificial Sequence
  Description of Artificial Sequence: Synthetic oligonucleotide
cugacgucuuaacagauau

SEQ ID NO: 2119699 - RNA, 19 nt, Artificial Sequence
  Description of Artificial Sequence: Synthetic oligonucleotide
guuaguagguagucugagu

SEQ ID NO: 2119700 - RNA, 19 nt, Artificial Sequence
  Description of Artificial Sequence: Synthetic oligonucleotide
  modified_base (8)..(8): a, c, u, g, unknown or other
accauccnguuugacugag

SEQ ID NO: 2119701 - RNA, 19 nt, Artificial Sequence
  Description of Artificial Sequence: Synthetic oligonucleotide
cuggaguccgcacgcccgg

SEQ ID NO: 2119702 - RNA, 19 nt, Artificial Sequence
  Description of Artificial Sequence: Synthetic oligonucleotide
guccgaaaugguggcagag

SEQ ID NO: 2119703 - RNA, 19 nt, Artificial Sequence
  Description of Artificial Sequence: Synthetic oligonucleotide
ccaaaacgagucucugcgg

SEQ ID NO: 2119704 - RNA, 19 nt, Artificial Sequence
  Description of Artificial Sequence: Synthetic oligonucleotide
acagaucgccugccgcaag

SEQ ID NO: 2119705 - RNA, 19 nt, Artificial Sequence
  Description of Artificial Sequence: Synthetic oligonucleotide
ggagaugaaucaacacgcc

SEQ ID NO: 2119706 - RNA, 19 nt, Artificial Sequence
  Description of Artificial Sequence: Synthetic oligonucleotide
  modified_base (2)..(2): a, c, u, g, unknown or other
cnguuugacugagcucgcg

SEQ ID NO: 2119707 - RNA, 19 nt, Artificial Sequence
  Description of Artificial Sequence: Synthetic oligonucleotide
guggacagucccguuccgg

SEQ ID NO: 2119708 - RNA, 19 nt, Artificial Sequence
  Description of Artificial Sequence: Synthetic oligonucleotide
uccggcagauugguguggc

SEQ ID NO: 2119709 - RNA, 19 nt, Artificial Sequence
  Description of Artificial Sequence: Synthetic oligonucleotide
acagucccguuccggggag

SEQ ID NO: 2119710 - RNA, 19 nt, Artificial Sequence
  Description of Artificial Sequence: Synthetic oligonucleotide
aauuuccaucuuggacuca

SEQ ID NO: 2119711 - RNA, 19 nt, Artificial Sequence
  Description of Artificial Sequence: Synthetic oligonucleotide
ggacagucccguuccgggg

SEQ ID NO: 2119712 - RNA, 19 nt, Artificial Sequence
  Description of Artificial Sequence: Synthetic oligonucleotide
cuggggacugcuccuccgc

SEQ ID NO: 2119713 - RNA, 19 nt, Artificial Sequence
  Description of Artificial Sequence: Synthetic oligonucleotide
uacagagguuuggucagau

SEQ ID NO: 2119714 - RNA, 19 nt, Artificial Sequence
  Description of Artificial Sequence: Synthetic oligonucleotide
ggcggcgagacuuggcaag

SEQ ID NO: 2119715 - RNA, 19 nt, Artificial Sequence
  Description of Artificial Sequence: Synthetic oligonucleotide
gacagguggucgcccgagc

SEQ ID NO: 2119716 - RNA, 19 nt, Artificial Sequence
  Description of Artificial Sequence: Synthetic oligonucleotide
cucaauccgcagguuaguc

SEQ ID NO: 2119717 - RNA, 19 nt, Artificial Sequence
  Description of Artificial Sequence: Synthetic oligonucleotide
guccgcgccauucccggag

SEQ ID NO: 2119718 - RNA, 19 nt, Artificial Sequence
  Description of Artificial Sequence: Synthetic oligonucleotide
cacaagggaucuggagucc

SEQ ID NO: 2119719 - RNA, 19 nt, Artificial Sequence
  Description of Artificial Sequence: Synthetic oligonucleotide
aggcaccgcagggucaugg

SEQ ID NO: 2119720 - RNA, 19 nt, Artificial Sequence
  Description of Artificial Sequence: Synthetic oligonucleotide
uuagccagacgcgccgccu

SEQ ID NO: 2119721 - RNA, 19 nt, Artificial Sequence
  Description of Artificial Sequence: Synthetic oligonucleotide
gccuuagccagacgcgccg

SEQ ID NO: 2119722 - RNA, 19 nt, Artificial Sequence
  Description of Artificial Sequence: Synthetic oligonucleotide
ccgguacauuuguuaaugg

SEQ ID NO: 2119723 - RNA, 19 nt, Artificial Sequence
  Description of Artificial Sequence: Synthetic oligonucleotide
acgucuuaacagauauagu

SEQ ID NO: 2119724 - RNA, 19 nt, Artificial Sequence
  Description of Artificial Sequence: Synthetic oligonucleotide
cuaaucaagaaaguuccuu

SEQ ID NO: 2119725 - RNA, 19 nt, Artificial Sequence
  Description of Artificial Sequence: Synthetic oligonucleotide
acgccagagacaggugguc

SEQ ID NO: 2119726 - RNA, 19 nt, Artificial Sequence
  Description of Artificial Sequence: Synthetic oligonucleotide
acucaauccgcagguuagu

SEQ ID NO: 2119727 - RNA, 19 nt, Artificial Sequence
  Description of Artificial Sequence: Synthetic oligonucleotide
caaauuguuugagcuugga

SEQ ID NO: 2119728 - RNA, 19 nt, Artificial Sequence
  Description of Artificial Sequence: Synthetic oligonucleotide
gguagucugagugcgaacu

SEQ ID NO: 2119729 - RNA, 19 nt, Artificial Sequence
  Description of Artificial Sequence: Synthetic oligonucleotide
ggguguccgaaaugguggc

SEQ ID NO: 2119730 - RNA, 19 nt, Artificial Sequence
  Description of Artificial Sequence: Synthetic oligonucleotide
cagguggucgcccgagcug

SEQ ID NO: 2119731 - RNA, 19 nt, Artificial Sequence
  Description of Artificial Sequence: Synthetic oligonucleotide
uagccagacgcgccgccuc

SEQ ID NO: 2119732 - RNA, 19 nt, Artificial Sequence
  Description of Artificial Sequence: Synthetic oligonucleotide
guccuguccgcgccauucc

SEQ ID NO: 2119733 - RNA, 19 nt, Artificial Sequence
  Description of Artificial Sequence: Synthetic oligonucleotide
gacgcgccgccucugggga

SEQ ID NO: 2119734 - RNA, 19 nt, Artificial Sequence
  Description of Artificial Sequence: Synthetic oligonucleotide
cuggcuccgcguccugucc

SEQ ID NO: 2119735 - RNA, 19 nt, Artificial Sequence
  Description of Artificial Sequence: Synthetic oligonucleotide
ggcaccgguacauuuguua

SEQ ID NO: 2119736 - RNA, 19 nt, Artificial Sequence
  Description of Artificial Sequence: Synthetic oligonucleotide
gucaugggagaugaaucaa

SEQ ID NO: 2119737 - RNA, 19 nt, Artificial Sequence
  Description of Artificial Sequence: Synthetic oligonucleotide
aauccgcagguuagucggu

SEQ ID NO: 2119738 - RNA, 19 nt, Artificial Sequence
  Description of Artificial Sequence: Synthetic oligonucleotide
gagugcgaacuaucucuaa

SEQ ID NO: 2119739 - RNA, 19 nt, Artificial Sequence
  Description of Artificial Sequence: Synthetic oligonucleotide
cugccgcaagcuuccgggc

SEQ ID NO: 2119740 - RNA, 19 nt, Artificial Sequence
  Description of Artificial Sequence: Synthetic oligonucleotide
guccagcugacgucuuaac

SEQ ID NO: 2119741 - RNA, 19 nt, Artificial Sequence
  Description of Artificial Sequence: Synthetic oligonucleotide
ccaaucggaauuuccaucu

SEQ ID NO: 2119742 - RNA, 19 nt, Artificial Sequence
  Description of Artificial Sequence: Synthetic oligonucleotide
gcaccgguacauuuguuaa

SEQ ID NO: 2119743 - RNA, 19 nt, Artificial Sequence
  Description of Artificial Sequence: Synthetic oligonucleotide
ggcaccgcagggucauggg

SEQ ID NO: 2119744 - RNA, 19 nt, Artificial Sequence
  Description of Artificial Sequence: Synthetic oligonucleotide
caguccccagauggcaccg

SEQ ID NO: 2119745 - RNA, 19 nt, Artificial Sequence
  Description of Artificial Sequence: Synthetic oligonucleotide
cagauauaguuaguaggua

SEQ ID NO: 2119746 - RNA, 19 nt, Artificial Sequence
  Description of Artificial Sequence: Synthetic oligonucleotide
ucccguuccggggagccuc

SEQ ID NO: 2119747 - RNA, 19 nt, Artificial Sequence
  Description of Artificial Sequence: Synthetic oligonucleotide
ggacucaauccgcagguua

SEQ ID NO: 2119748 - RNA, 19 nt, Artificial Sequence
  Description of Artificial Sequence: Synthetic oligonucleotide
ccuguccgcgccauucccg

SEQ ID NO: 2119749 - RNA, 19 nt, Artificial Sequence
  Description of Artificial Sequence: Synthetic oligonucleotide
agaucgccugccgcaagcu

SEQ ID NO: 2119750 - RNA, 19 nt, Artificial Sequence
  Description of Artificial Sequence: Synthetic oligonucleotide
gcgaacuaucucuaaucaa

SEQ ID NO: 2119751 - RNA, 19 nt, Artificial Sequence
  Description of Artificial Sequence: Synthetic oligonucleotide
gcucaugcuucaagggaag

SEQ ID NO: 2119752 - RNA, 19 nt, Artificial Sequence
  Description of Artificial Sequence: Synthetic oligonucleotide
caaauuccggcagauuggu

SEQ ID NO: 2119753 - RNA, 19 nt, Artificial Sequence
  Description of Artificial Sequence: Synthetic oligonucleotide
gcuuggacuugacacauau

SEQ ID NO: 2119754 - RNA, 19 nt, Artificial Sequence
  Description of Artificial Sequence: Synthetic oligonucleotide
agcugacgucuuaacagau

SEQ ID NO: 2119755 - RNA, 19 nt, Artificial Sequence
  Description of Artificial Sequence: Synthetic oligonucleotide
guuagucgguccagcugac

SEQ ID NO: 2119756 - RNA, 19 nt, Artificial Sequence
  Description of Artificial Sequence: Synthetic oligonucleotide
gacagaucgccugccgcaa

SEQ ID NO: 2119757 - RNA, 19 nt, Artificial Sequence
  Description of Artificial Sequence: Synthetic oligonucleotide
gacugagcucgcgcagggc

SEQ ID NO: 2119758 - RNA, 19 nt, Artificial Sequence
  Description of Artificial Sequence: Synthetic oligonucleotide
  modified_base (7)..(7): a, c, u, g, unknown or other
ccauccnguuugacugagc

SEQ ID NO: 2119759 - RNA, 19 nt, Artificial Sequence
  Description of Artificial Sequence: Synthetic oligonucleotide
cuccgcguccuguccgcgc

SEQ ID NO: 2119760 - RNA, 19 nt, Artificial Sequence
  Description of Artificial Sequence: Synthetic oligonucleotide
cuguaguguacagagguuu

SEQ ID NO: 2119761 - RNA, 19 nt, Artificial Sequence
  Description of Artificial Sequence: Synthetic oligonucleotide
acgagucucugcggggugu

SEQ ID NO: 2119762 - RNA, 19 nt, Artificial Sequence
  Description of Artificial Sequence: Synthetic oligonucleotide
cuguccguuuauccuugca

SEQ ID NO: 2119763 - RNA, 19 nt, Artificial Sequence
  Description of Artificial Sequence: Synthetic oligonucleotide
ccgacagaucgccugccgc

SEQ ID NO: 2119764 - RNA, 19 nt, Artificial Sequence
  Description of Artificial Sequence: Synthetic oligonucleotide
gggcucgggacacaaggga

SEQ ID NO: 2119765 - RNA, 19 nt, Artificial Sequence
  Description of Artificial Sequence: Synthetic oligonucleotide
ggagggaaggcucaugcuu

SEQ ID NO: 2119766 - RNA, 19 nt, Artificial Sequence
  Description of Artificial Sequence: Synthetic oligonucleotide
  modified_base (3)..(3): a, c, u, g, unknown or other
ccnguuugacugagcucgc

SEQ ID NO: 2119767 - RNA, 19 nt, Artificial Sequence
  Description of Artificial Sequence: Synthetic oligonucleotide
uguccgcgccauucccgga

SEQ ID NO: 2119768 - RNA, 19 nt, Artificial Sequence
  Description of Artificial Sequence: Synthetic oligonucleotide
gguaucccaaaacgagucu

SEQ ID NO: 2119769 - RNA, 19 nt, Artificial Sequence
  Description of Artificial Sequence: Synthetic oligonucleotide
caaucagaugaaccacacu

SEQ ID NO: 2119770 - RNA, 19 nt, Artificial Sequence
  Description of Artificial Sequence: Synthetic oligonucleotide
gggccuuagccagacgcgc

SEQ ID NO: 2119771 - RNA, 19 nt, Artificial Sequence
  Description of Artificial Sequence: Synthetic oligonucleotide
gucucugcgggguguccga

SEQ ID NO: 2119772 - RNA, 19 nt, Artificial Sequence
  Description of Artificial Sequence: Synthetic oligonucleotide
cugcgggguguccgaaaug

SEQ ID NO: 2119773 - RNA, 19 nt, Artificial Sequence
  Description of Artificial Sequence: Synthetic oligonucleotide
cuguccgcgccccgcgcag

SEQ ID NO: 2119774 - RNA, 19 nt, Artificial Sequence
  Description of Artificial Sequence: Synthetic oligonucleotide
  modified_base (12)..(12): a, c, u, g, unknown or other
caguaccauccnguuugac

SEQ ID NO: 2119775 - RNA, 19 nt, Artificial Sequence
  Description of Artificial Sequence: Synthetic oligonucleotide
cgggguguccgaaauggug

SEQ ID NO: 2119776 - RNA, 19 nt, Artificial Sequence
  Description of Artificial Sequence: Synthetic oligonucleotide
gcacuguccgcgccccgcg

SEQ ID NO: 2119777 - RNA, 19 nt, Artificial Sequence
  Description of Artificial Sequence: Synthetic oligonucleotide
acgcgccgccucuggggac

SEQ ID NO: 2119778 - RNA, 19 nt, Artificial Sequence
  Description of Artificial Sequence: Synthetic oligonucleotide
caccgacagaucgccugcc

SEQ ID NO: 2119779 - RNA, 19 nt, Artificial Sequence
  Description of Artificial Sequence: Synthetic oligonucleotide
cacgccagagacagguggu

SEQ ID NO: 2119780 - RNA, 19 nt, Artificial Sequence
  Description of Artificial Sequence: Synthetic oligonucleotide
cguuuauccuugcacaucu

SEQ ID NO: 2119781 - RNA, 19 nt, Artificial Sequence
  Description of Artificial Sequence: Synthetic oligonucleotide
ucucugcgggguguccgaa

SEQ ID NO: 2119782 - RNA, 19 nt, Artificial Sequence
  Description of Artificial Sequence: Synthetic oligonucleotide
ggccuuagccagacgcgcc

SEQ ID NO: 2119783 - RNA, 19 nt, Artificial Sequence
  Description of Artificial Sequence: Synthetic oligonucleotide
uggaguccgcacgcccgga

SEQ ID NO: 2119784 - RNA, 19 nt, Artificial Sequence
  Description of Artificial Sequence: Synthetic oligonucleotide
gccagcggaccucgagucc

SEQ ID NO: 2119785 - RNA, 19 nt, Artificial Sequence
  Description of Artificial Sequence: Synthetic oligonucleotide
gggaagcccaaggcccgcg

SEQ ID NO: 2119786 - RNA, 19 nt, Artificial Sequence
  Description of Artificial Sequence: Synthetic oligonucleotide
gccgcaagcuuccgggcuc

SEQ ID NO: 2119787 - RNA, 19 nt, Artificial Sequence
  Description of Artificial Sequence: Synthetic oligonucleotide
ggcuccgcguccuguccgc

SEQ ID NO: 2119788 - RNA, 19 nt, Artificial Sequence
  Description of Artificial Sequence: Synthetic oligonucleotide
gccuguccguuuauccuug

SEQ ID NO: 2119789 - RNA, 19 nt, Artificial Sequence
  Description of Artificial Sequence: Synthetic oligonucleotide
ugcgggagggaaggcucau

SEQ ID NO: 2119790 - RNA, 19 nt, Artificial Sequence
  Description of Artificial Sequence: Synthetic oligonucleotide
ccagacgcgccgccucugg

SEQ ID NO: 2119791 - RNA, 19 nt, Artificial Sequence
  Description of Artificial Sequence: Synthetic oligonucleotide
gggccuguccguuuauccu

SEQ ID NO: 2119792 - RNA, 19 nt, Artificial Sequence
  Description of Artificial Sequence: Synthetic oligonucleotide
cagcggaccucgaguccuc

SEQ ID NO: 2119793 - RNA, 19 nt, Artificial Sequence
  Description of Artificial Sequence: Synthetic oligonucleotide
ccuguccguuuauccuugc

SEQ ID NO: 2119794 - RNA, 19 nt, Artificial Sequence
  Description of Artificial Sequence: Synthetic oligonucleotide
gggugcuguaguguacaga

SEQ ID NO: 2119795 - RNA, 19 nt, Artificial Sequence
  Description of Artificial Sequence: Synthetic oligonucleotide
ggcgagacuuggcaagagu

SEQ ID NO: 2119796 - RNA, 19 nt, Artificial Sequence
  Description of Artificial Sequence: Synthetic oligonucleotide
caccgguacauuuguuaau

SEQ ID NO: 2119797 - RNA, 19 nt, Artificial Sequence
  Description of Artificial Sequence: Synthetic oligonucleotide
guccgcacgcccggagccc

SEQ ID NO: 2119798 - RNA, 19 nt, Artificial Sequence
  Description of Artificial Sequence: Synthetic oligonucleotide
gguguccgaaaugguggca

SEQ ID NO: 2119799 - RNA, 19 nt, Artificial Sequence
  Description of Artificial Sequence: Synthetic oligonucleotide
gaucgccugccgcaagcuu

SEQ ID NO: 2119800 - RNA, 19 nt, Artificial Sequence
  Description of Artificial Sequence: Synthetic oligonucleotide
gggacacaagggaucugga

SEQ ID NO: 2119801 - RNA, 19 nt, Artificial Sequence
  Description of Artificial Sequence: Synthetic oligonucleotide
cgacagaucgccugccgca

SEQ ID NO: 2119802 - RNA, 19 nt, Artificial Sequence
  Description of Artificial Sequence: Synthetic oligonucleotide
uggggccagcggaccucga

SEQ ID NO: 2119803 - RNA, 19 nt, Artificial Sequence
  Description of Artificial Sequence: Synthetic oligonucleotide
ccucgaguccuccuuggaa

SEQ ID NO: 2119804 - RNA, 19 nt, Artificial Sequence
  Description of Artificial Sequence: Synthetic oligonucleotide
cagcggcggcgagacuugg

SEQ ID NO: 2119805 - RNA, 19 nt, Artificial Sequence
  Description of Artificial Sequence: Synthetic oligonucleotide
gcugacgucuuaacagaua

SEQ ID NO: 2119806 - RNA, 19 nt, Artificial Sequence
  Description of Artificial Sequence: Synthetic oligonucleotide
cgagacuuggcaagaguua

SEQ ID NO: 2119807 - RNA, 19 nt, Artificial Sequence
  Description of Artificial Sequence: Synthetic oligonucleotide
gcgagacuuggcaagaguu

SEQ ID NO: 2119808 - RNA, 19 nt, Artificial Sequence
  Description of Artificial Sequence: Synthetic oligonucleotide
  modified_base (13)..(13): a, c, u, g, unknown or other
ccaguaccauccnguuuga

SEQ ID NO: 2119809 - RNA, 19 nt, Artificial Sequence
  Description of Artificial Sequence: Synthetic oligonucleotide
cagucccguuccggggagc

SEQ ID NO: 2119810 - RNA, 19 nt, Artificial Sequence
  Description of Artificial Sequence: Synthetic oligonucleotide
caaucggaauuuccaucuu

SEQ ID NO: 2119811 - RNA, 19 nt, Artificial Sequence
  Description of Artificial Sequence: Synthetic oligonucleotide
gcaagucgacagaagugcu

SEQ ID NO: 2119812 - RNA, 19 nt, Artificial Sequence
  Description of Artificial Sequence: Synthetic oligonucleotide
gcucgcgcagggccuuagc

SEQ ID NO: 2119813 - RNA, 19 nt, Artificial Sequence
  Description of Artificial Sequence: Synthetic oligonucleotide
gccccgcgcagcguuggcg

SEQ ID NO: 2119814 - RNA, 19 nt, Artificial Sequence
  Description of Artificial Sequence: Synthetic oligonucleotide
agcuuggacuugacacaua

SEQ ID NO: 2119815 - RNA, 19 nt, Artificial Sequence
  Description of Artificial Sequence: Synthetic oligonucleotide
gcgcgcacuguccgcgccc

SEQ ID NO: 2119816 - RNA, 19 nt, Artificial Sequence
  Description of Artificial Sequence: Synthetic oligonucleotide
gggccagcggaccucgagu

SEQ ID NO: 2119817 - RNA, 19 nt, Artificial Sequence
  Description of Artificial Sequence: Synthetic oligonucleotide
ccgcaagcuuccgggcucg

SEQ ID NO: 2119818 - RNA, 19 nt, Artificial Sequence
  Description of Artificial Sequence: Synthetic oligonucleotide
gucgcccgagcuggggcca

SEQ ID NO: 2119819 - RNA, 19 nt, Artificial Sequence
  Description of Artificial Sequence: Synthetic oligonucleotide
ccgcagguuagucggucca

SEQ ID NO: 2119820 - RNA, 19 nt, Artificial Sequence
  Description of Artificial Sequence: Synthetic oligonucleotide
gcuccgcguccuguccgcg

SEQ ID NO: 2119821 - RNA, 19 nt, Artificial Sequence
  Description of Artificial Sequence: Synthetic oligonucleotide
gcggcgagacuuggcaaga

SEQ ID NO: 2119822 - RNA, 19 nt, Artificial Sequence
  Description of Artificial Sequence: Synthetic oligonucleotide
gcgccauucccggagggcu

SEQ ID NO: 2119823 - RNA, 19 nt, Artificial Sequence
  Description of Artificial Sequence: Synthetic oligonucleotide
cccgcgcagcguuggcggc

SEQ ID NO: 2119824 - RNA, 19 nt, Artificial Sequence
  Description of Artificial Sequence: Synthetic oligonucleotide
gcgcacuguccgcgccccg

SEQ ID NO: 2119825 - RNA, 19 nt, Artificial Sequence
  Description of Artificial Sequence: Synthetic oligonucleotide
caggcaccgcagggucaug

SEQ ID NO: 2119826 - RNA, 19 nt, Artificial Sequence
  Description of Artificial Sequence: Synthetic oligonucleotide
gccccggcgcgcacugucc

SEQ ID NO: 2119827 - RNA, 19 nt, Artificial Sequence
  Description of Artificial Sequence: Synthetic oligonucleotide
gccagacgcgccgccucug

SEQ ID NO: 2119828 - RNA, 19 nt, Artificial Sequence
  Description of Artificial Sequence: Synthetic oligonucleotide
ccagcggaccucgaguccu

SEQ ID NO: 2119829 - RNA, 19 nt, Artificial Sequence
  Description of Artificial Sequence: Synthetic oligonucleotide
ccgccucuggggacugcuc

SEQ ID NO: 2119830 - RNA, 19 nt, Artificial Sequence
  Description of Artificial Sequence: Synthetic oligonucleotide
ccggcagauugguguggca

SEQ ID NO: 2119831 - RNA, 19 nt, Artificial Sequence
  Description of Artificial Sequence: Synthetic oligonucleotide
cguuggcggcugcgggagg

SEQ ID NO: 2119832 - RNA, 19 nt, Artificial Sequence
  Description of Artificial Sequence: Synthetic oligonucleotide
cgagucucugcgggguguc

SEQ ID NO: 2119833 - RNA, 19 nt, Artificial Sequence
  Description of Artificial Sequence: Synthetic oligonucleotide
cggcgagacuuggcaagag

SEQ ID NO: 2119834 - RNA, 19 nt, Artificial Sequence
  Description of Artificial Sequence: Synthetic oligonucleotide
gcggaccucgaguccuccu

SEQ ID NO: 2119835 - RNA, 19 nt, Artificial Sequence
  Description of Artificial Sequence: Synthetic oligonucleotide
gucccguuccggggagccu

SEQ ID NO: 2119836 - RNA, 19 nt, Artificial Sequence
  Description of Artificial Sequence: Synthetic oligonucleotide
cgcgcagcguuggcggcug

SEQ ID NO: 2119837 - RNA, 19 nt, Artificial Sequence
  Description of Artificial Sequence: Synthetic oligonucleotide
gcgggguguccgaaauggu

SEQ ID NO: 2119838 - RNA, 19 nt, Artificial Sequence
  Description of Artificial Sequence: Synthetic oligonucleotide
cgcaagcuuccgggcucgg

SEQ ID NO: 2119839 - RNA, 19 nt, Artificial Sequence
  Description of Artificial Sequence: Synthetic oligonucleotide
cgcacgcccggagccccgg

SEQ ID NO: 2119840 - RNA, 19 nt, Artificial Sequence
  Description of Artificial Sequence: Synthetic oligonucleotide
gcgccgccucuggggacug

SEQ ID NO: 2119841 - RNA, 19 nt, Artificial Sequence
  Description of Artificial Sequence: Synthetic oligonucleotide
ccguuccggggagccucug

SEQ ID NO: 2119842 - RNA, 19 nt, Artificial Sequence
  Description of Artificial Sequence: Synthetic oligonucleotide
cggaccucgaguccuccuu

SEQ ID NO: 2119843 - RNA, 19 nt, Artificial Sequence
  Description of Artificial Sequence: Synthetic oligonucleotide
cgccccgcgcagcguuggc

SEQ ID NO: 2119844 - RNA, 19 nt, Artificial Sequence
  Description of Artificial Sequence: Synthetic oligonucleotide
ccgcguccuguccgcgcca

SEQ ID NO: 2119845 - RNA, 19 nt, Artificial Sequence
  Description of Artificial Sequence: Synthetic oligonucleotide
ccgcagggucaugggagau

SEQ ID NO: 2119846 - RNA, 19 nt, Artificial Sequence
  Description of Artificial Sequence: Synthetic oligonucleotide
gcguccuguccgcgccauu

SEQ ID NO: 2119847 - RNA, 19 nt, Artificial Sequence
  Description of Artificial Sequence: Synthetic oligonucleotide
ccgcgccccgcgcagcguu

SEQ ID NO: 2119848 - RNA, 19 nt, Artificial Sequence
  Description of Artificial Sequence: Synthetic oligonucleotide
aaccuuauuacccagaugu

SEQ ID NO: 2119849 - RNA, 19 nt, Artificial Sequence
  Description of Artificial Sequence: Synthetic oligonucleotide
ucuaggaucacaaagucag

SEQ ID NO: 2119850 - RNA, 19 nt, Artificial Sequence
  Description of Artificial Sequence: Synthetic oligonucleotide
auagaauucuuucaauucc

SEQ ID NO: 2119851 - RNA, 19 nt, Artificial Sequence
  Description of Artificial Sequence: Synthetic oligonucleotide
uuaaucuccucacagaagc

SEQ ID NO: 2119852 - RNA, 19 nt, Artificial Sequence
  Description of Artificial Sequence: Synthetic oligonucleotide
uaccgcaugacccagaucc

SEQ ID NO: 2119853 - RNA, 19 nt, Artificial Sequence
  Description of Artificial Sequence: Synthetic oligonucleotide
uacaaucagaagcagaaag

SEQ ID NO: 2119854 - RNA, 19 nt, Artificial Sequence
  Description of Artificial Sequence: Synthetic oligonucleotide
uguguuagagcuaauccag

SEQ ID NO: 2119855 - RNA, 19 nt, Artificial Sequence
  Description of Artificial Sequence: Synthetic oligonucleotide
agugaagugagcuuuguag

SEQ ID NO: 2119856 - RNA, 19 nt, Artificial Sequence
  Description of Artificial Sequence: Synthetic oligonucleotide
agcagcguuaauuaagagc

SEQ ID NO: 2119857 - RNA, 19 nt, Artificial Sequence
  Description of Artificial Sequence: Synthetic oligonucleotide
aaaugacgcgaacacacac

SEQ ID NO: 2119858 - RNA, 19 nt, Artificial Sequence
  Description of Artificial Sequence: Synthetic oligonucleotide
gauguaacaguccccaggg

SEQ ID NO: 2119859 - RNA, 19 nt, Artificial Sequence
  Description of Artificial Sequence: Synthetic oligonucleotide
uguacuuagagguucuucc

SEQ ID NO: 2119860 - RNA, 19 nt, Artificial Sequence
  Description of Artificial Sequence: Synthetic oligonucleotide
acacacauaugagagaucc

SEQ ID NO: 2119861 - RNA, 19 nt, Artificial Sequence
  Description of Artificial Sequence: Synthetic oligonucleotide
cuuccgagaacucagaagc

SEQ ID NO: 2119862 - RNA, 19 nt, Artificial Sequence
  Description of Artificial Sequence: Synthetic oligonucleotide
uagaauucuuucaauuccg

SEQ ID NO: 2119863 - RNA, 19 nt, Artificial Sequence
  Description of Artificial Sequence: Synthetic oligonucleotide
uuucgcguauaucugauag

SEQ ID NO: 2119864 - RNA, 19 nt, Artificial Sequence
  Description of Artificial Sequence: Synthetic oligonucleotide
acagcugaaccuuauuacc

SEQ ID NO: 2119865 - RNA, 19 nt, Artificial Sequence
  Description of Artificial Sequence: Synthetic oligonucleotide
ucuaucuggagccacagcu

SEQ ID NO: 2119866 - RNA, 19 nt, Artificial Sequence
  Description of Artificial Sequence: Synthetic oligonucleotide
aauucccagaucucagagc

SEQ ID NO: 2119867 - RNA, 19 nt, Artificial Sequence
  Description of Artificial Sequence: Synthetic oligonucleotide
acagagaugaagcagccuc

SEQ ID NO: 2119868 - RNA, 19 nt, Artificial Sequence
  Description of Artificial Sequence: Synthetic oligonucleotide
acauaugagagauccauag

SEQ ID NO: 2119869 - RNA, 19 nt, Artificial Sequence
  Description of Artificial Sequence: Synthetic oligonucleotide
uggguuacagagaugaagc

SEQ ID NO: 2119870 - RNA, 19 nt, Artificial Sequence
  Description of Artificial Sequence: Synthetic oligonucleotide
uguaacaguccccagggcc

SEQ ID NO: 2119871 - RNA, 19 nt, Artificial Sequence
  Description of Artificial Sequence: Synthetic oligonucleotide
acuucuguuguacuuagag

SEQ ID NO: 2119872 - RNA, 19 nt, Artificial Sequence
  Description of Artificial Sequence: Synthetic oligonucleotide
uuagagcuaauccagucca

SEQ ID NO: 2119873 - RNA, 19 nt, Artificial Sequence
  Description of Artificial Sequence: Synthetic oligonucleotide
aauacucuagugaagugag

SEQ ID NO: 2119874 - RNA, 19 nt, Artificial Sequence
  Description of Artificial Sequence: Synthetic oligonucleotide
gcguauaucugauagaccg

SEQ ID NO: 2119875 - RNA, 19 nt, Artificial Sequence
  Description of Artificial Sequence: Synthetic oligonucleotide
aaagucagugccaaacgac

SEQ ID NO: 2119876 - RNA, 19 nt, Artificial Sequence
  Description of Artificial Sequence: Synthetic oligonucleotide
ugauagaccgcuugggucc

SEQ ID NO: 2119877 - RNA, 19 nt, Artificial Sequence
  Description of Artificial Sequence: Synthetic oligonucleotide
agauguaacaguccccagg

SEQ ID NO: 2119878 - RNA, 19 nt, Artificial Sequence
  Description of Artificial Sequence: Synthetic oligonucleotide
cuuauuacccagauguaac

SEQ ID NO: 2119879 - RNA, 19 nt, Artificial Sequence
  Description of Artificial Sequence: Synthetic oligonucleotide
aguaugggcaccgaauacc

SEQ ID NO: 2119880 - RNA, 19 nt, Artificial Sequence
  Description of Artificial Sequence: Synthetic oligonucleotide
uuuaaucuccucacagaag

SEQ ID NO: 2119881 - RNA, 19 nt, Artificial Sequence
  Description of Artificial Sequence: Synthetic oligonucleotide
cugcguucaaagcagaugc

SEQ ID NO: 2119882 - RNA, 19 nt, Artificial Sequence
  Description of Artificial Sequence: Synthetic oligonucleotide
acaaagucagugccaaacg

SEQ ID NO: 2119883 - RNA, 19 nt, Artificial Sequence
  Description of Artificial Sequence: Synthetic oligonucleotide
aggagcaauucccagaucu

SEQ ID NO: 2119884 - RNA, 19 nt, Artificial Sequence
  Description of Artificial Sequence: Synthetic oligonucleotide
ugcuuguucuaucuggagc

SEQ ID NO: 2119885 - RNA, 19 nt, Artificial Sequence
  Description of Artificial Sequence: Synthetic oligonucleotide
aagugagcuuuguaggaag

SEQ ID NO: 2119886 - RNA, 19 nt, Artificial Sequence
  Description of Artificial Sequence: Synthetic oligonucleotide
gaugaagcagccucaggag

SEQ ID NO: 2119887 - RNA, 19 nt, Artificial Sequence
  Description of Artificial Sequence: Synthetic oligonucleotide
aauuccgagaguucaucca

SEQ ID NO: 2119888 - RNA, 19 nt, Artificial Sequence
  Description of Artificial Sequence: Synthetic oligonucleotide
cuuacaaucagaagcagaa

SEQ ID NO: 2119889 - RNA, 19 nt, Artificial Sequence
  Description of Artificial Sequence: Synthetic oligonucleotide
cuucuguuguacuuagagg

SEQ ID NO: 2119890 - RNA, 19 nt, Artificial Sequence
  Description of Artificial Sequence: Synthetic oligonucleotide
ucagaagcgaagccuagug

SEQ ID NO: 2119891 - RNA, 19 nt, Artificial Sequence
  Description of Artificial Sequence: Synthetic oligonucleotide
agaagcgaagccuagugcu

SEQ ID NO: 2119892 - RNA, 19 nt, Artificial Sequence
  Description of Artificial Sequence: Synthetic oligonucleotide
accgaauaccgcaugaccc

SEQ ID NO: 2119893 - RNA, 19 nt, Artificial Sequence
  Description of Artificial Sequence: Synthetic oligonucleotide
agcgacguccagcaaaucg

SEQ ID NO: 2119894 - RNA, 19 nt, Artificial Sequence
  Description of Artificial Sequence: Synthetic oligonucleotide
caggagugcagacacaagg

SEQ ID NO: 2119895 - RNA, 19 nt, Artificial Sequence
  Description of Artificial Sequence: Synthetic oligonucleotide
caggcuuuuguccucauag

SEQ ID NO: 2119896 - RNA, 19 nt, Artificial Sequence
  Description of Artificial Sequence: Synthetic oligonucleotide
uuucaauuccgagaguuca

SEQ ID NO: 2119897 - RNA, 19 nt, Artificial Sequence
  Description of Artificial Sequence: Synthetic oligonucleotide
ugagcuuuguaggaagggg

SEQ ID NO: 2119898 - RNA, 19 nt, Artificial Sequence
  Description of Artificial Sequence: Synthetic oligonucleotide
uuucgggacaguuuguaga

SEQ ID NO: 2119899 - RNA, 19 nt, Artificial Sequence
  Description of Artificial Sequence: Synthetic oligonucleotide
uuggguuacagagaugaag

SEQ ID NO: 2119900 - RNA, 19 nt, Artificial Sequence
  Description of Artificial Sequence: Synthetic oligonucleotide
guuagagcuaauccagucc

SEQ ID NO: 2119901 - RNA, 19 nt, Artificial Sequence
  Description of Artificial Sequence: Synthetic oligonucleotide
ucuuccgagaacucagaag

SEQ ID NO: 2119902 - RNA, 19 nt, Artificial Sequence
  Description of Artificial Sequence: Synthetic oligonucleotide
auaucugauagaccgcuug

SEQ ID NO: 2119903 - RNA, 19 nt, Artificial Sequence
  Description of Artificial Sequence: Synthetic oligonucleotide
uuacccagauguaacaguc

SEQ ID NO: 2119904 - RNA, 19 nt, Artificial Sequence
  Description of Artificial Sequence: Synthetic oligonucleotide
gaagcagaaagugaacccc

SEQ ID NO: 2119905 - RNA, 19 nt, Artificial Sequence
  Description of Artificial Sequence: Synthetic oligonucleotide
aaaucgcgcagccggcagc

SEQ ID NO: 2119906 - RNA, 19 nt, Artificial Sequence
  Description of Artificial Sequence: Synthetic oligonucleotide
uuacagcacagguacagca

SEQ ID NO: 2119907 - RNA, 19 nt, Artificial Sequence
  Description of Artificial Sequence: Synthetic oligonucleotide
ugccaaacgaccucaggag

SEQ ID NO: 2119908 - RNA, 19 nt, Artificial Sequence
  Description of Artificial Sequence: Synthetic oligonucleotide
caugacuggagccaggcac

SEQ ID NO: 2119909 - RNA, 19 nt, Artificial Sequence
  Description of Artificial Sequence: Synthetic oligonucleotide
acagaagcgaggguggucg

SEQ ID NO: 2119910 - RNA, 19 nt, Artificial Sequence
  Description of Artificial Sequence: Synthetic oligonucleotide
guacuuagagguucuuccg

SEQ ID NO: 2119911 - RNA, 19 nt, Artificial Sequence
  Description of Artificial Sequence: Synthetic oligonucleotide
uauuacccagauguaacag

SEQ ID NO: 2119912 - RNA, 19 nt, Artificial Sequence
  Description of Artificial Sequence: Synthetic oligonucleotide
uaugagagauccauaggua

SEQ ID NO: 2119913 - RNA, 19 nt, Artificial Sequence
  Description of Artificial Sequence: Synthetic oligonucleotide
cagcaaaucgcgcagccgg

SEQ ID NO: 2119914 - RNA, 19 nt, Artificial Sequence
  Description of Artificial Sequence: Synthetic oligonucleotide
cacagcagcguuaauuaag

SEQ ID NO: 2119915 - RNA, 19 nt, Artificial Sequence
  Description of Artificial Sequence: Synthetic oligonucleotide
gguguguuagagcuaaucc

SEQ ID NO: 2119916 - RNA, 19 nt, Artificial Sequence
  Description of Artificial Sequence: Synthetic oligonucleotide
caaucagaagcagaaagug

SEQ ID NO: 2119917 - RNA, 19 nt, Artificial Sequence
  Description of Artificial Sequence: Synthetic oligonucleotide
uuccuuuuaaucuccucac

SEQ ID NO: 2119918 - RNA, 19 nt, Artificial Sequence
  Description of Artificial Sequence: Synthetic oligonucleotide
uuguagacguggaaugucu

SEQ ID NO: 2119919 - RNA, 19 nt, Artificial Sequence
  Description of Artificial Sequence: Synthetic oligonucleotide
ucucguguccguuagcgac

SEQ ID NO: 2119920 - RNA, 19 nt, Artificial Sequence
  Description of Artificial Sequence: Synthetic oligonucleotide
gaauacucuagugaaguga

SEQ ID NO: 2119921 - RNA, 19 nt, Artificial Sequence
  Description of Artificial Sequence: Synthetic oligonucleotide
agaguucauccaucauucc

SEQ ID NO: 2119922 - RNA, 19 nt, Artificial Sequence
  Description of Artificial Sequence: Synthetic oligonucleotide
aagcagaaagugaaccccg

SEQ ID NO: 2119923 - RNA, 19 nt, Artificial Sequence
  Description of Artificial Sequence: Synthetic oligonucleotide
ugggucauagaauucuuuc

SEQ ID NO: 2119924 - RNA, 19 nt, Artificial Sequence
  Description of Artificial Sequence: Synthetic oligonucleotide
gagaguucauccaucauuc

SEQ ID NO: 2119925 - RNA, 19 nt, Artificial Sequence
  Description of Artificial Sequence: Synthetic oligonucleotide
uacuuagagguucuuccga

SEQ ID NO: 2119926 - RNA, 19 nt, Artificial Sequence
  Description of Artificial Sequence: Synthetic oligonucleotide
ggacuuacagcacagguac

SEQ ID NO: 2119927 - RNA, 19 nt, Artificial Sequence
  Description of Artificial Sequence: Synthetic oligonucleotide
uccuggcccauccaucucg

SEQ ID NO: 2119928 - RNA, 19 nt, Artificial Sequence
  Description of Artificial Sequence: Synthetic oligonucleotide
cagcugaaccuuauuaccc

SEQ ID NO: 2119929 - RNA, 19 nt, Artificial Sequence
  Description of Artificial Sequence: Synthetic oligonucleotide
aauaccgcaugacccagau

SEQ ID NO: 2119930 - RNA, 19 nt, Artificial Sequence
  Description of Artificial Sequence: Synthetic oligonucleotide
uguuagagcuaauccaguc

SEQ ID NO: 2119931 - RNA, 19 nt, Artificial Sequence
  Description of Artificial Sequence: Synthetic oligonucleotide
cuuucuugguguguuagag

SEQ ID NO: 2119932 - RNA, 19 nt, Artificial Sequence
  Description of Artificial Sequence: Synthetic oligonucleotide
auuacccagauguaacagu

SEQ ID NO: 2119933 - RNA, 19 nt, Artificial Sequence
  Description of Artificial Sequence: Synthetic oligonucleotide
ucuuucaauuccgagaguu

SEQ ID NO: 2119934 - RNA, 19 nt, Artificial Sequence
  Description of Artificial Sequence: Synthetic oligonucleotide
aggagugcagacacaaggc

SEQ ID NO: 2119935 - RNA, 19 nt, Artificial Sequence
  Description of Artificial Sequence: Synthetic oligonucleotide
ucgcguauaucugauagac

SEQ ID NO: 2119936 - RNA, 19 nt, Artificial Sequence
  Description of Artificial Sequence: Synthetic oligonucleotide
uuccgagaacucagaagcg

SEQ ID NO: 2119937 - RNA, 19 nt, Artificial Sequence
  Description of Artificial Sequence: Synthetic oligonucleotide
agcuaauccaguccaucag

SEQ ID NO: 2119938 - RNA, 19 nt, Artificial Sequence
  Description of Artificial Sequence: Synthetic oligonucleotide
gucggcaggucucaagucg

SEQ ID NO: 2119939 - RNA, 19 nt, Artificial Sequence
  Description of Artificial Sequence: Synthetic oligonucleotide
ucggcaggucucaagucgg

SEQ ID NO: 2119940 - RNA, 19 nt, Artificial Sequence
  Description of Artificial Sequence: Synthetic oligonucleotide
gcagcguuaauuaagagca

SEQ ID NO: 2119941 - RNA, 19 nt, Artificial Sequence
  Description of Artificial Sequence: Synthetic oligonucleotide
ucagccugcacgguguggg

SEQ ID NO: 2119942 - RNA, 19 nt, Artificial Sequence
  Description of Artificial Sequence: Synthetic oligonucleotide
caauuccgagaguucaucc

SEQ ID NO: 2119943 - RNA, 19 nt, Artificial Sequence
  Description of Artificial Sequence: Synthetic oligonucleotide
uccaucauucccuggccag

SEQ ID NO: 2119944 - RNA, 19 nt, Artificial Sequence
  Description of Artificial Sequence: Synthetic oligonucleotide
gacgcgaacacacacauau

SEQ ID NO: 2119945 - RNA, 19 nt, Artificial Sequence
  Description of Artificial Sequence: Synthetic oligonucleotide
uucgggacaguuuguagac

SEQ ID NO: 2119946 - RNA, 19 nt, Artificial Sequence
  Description of Artificial Sequence: Synthetic oligonucleotide
uguuguacuuagagguucu

SEQ ID NO: 2119947 - RNA, 19 nt, Artificial Sequence
  Description of Artificial Sequence: Synthetic oligonucleotide
ucauagugugggugguugg

SEQ ID NO: 2119948 - RNA, 19 nt, Artificial Sequence
  Description of Artificial Sequence: Synthetic oligonucleotide
uccaucucguguccguuag

SEQ ID NO: 2119949 - RNA, 19 nt, Artificial Sequence
  Description of Artificial Sequence: Synthetic oligonucleotide
aaccccgagauccggguug

SEQ ID NO: 2119950 - RNA, 19 nt, Artificial Sequence
  Description of Artificial Sequence: Synthetic oligonucleotide
cuaucuucuaggaucacaa

SEQ ID NO: 2119951 - RNA, 19 nt, Artificial Sequence
  Description of Artificial Sequence: Synthetic oligonucleotide
acguggaaugucuuguucu

SEQ ID NO: 2119952 - RNA, 19 nt, Artificial Sequence
  Description of Artificial Sequence: Synthetic oligonucleotide
cugcacaggccaaaugacg

SEQ ID NO: 2119953 - RNA, 19 nt, Artificial Sequence
  Description of Artificial Sequence: Synthetic oligonucleotide
agcaacugcaugcucccag

SEQ ID NO: 2119954 - RNA, 19 nt, Artificial Sequence
  Description of Artificial Sequence: Synthetic oligonucleotide
agccucaggagcaauuccc

SEQ ID NO: 2119955 - RNA, 19 nt, Artificial Sequence
  Description of Artificial Sequence: Synthetic oligonucleotide
uuagcgacguccagcaaau

SEQ ID NO: 2119956 - RNA, 19 nt, Artificial Sequence
  Description of Artificial Sequence: Synthetic oligonucleotide
guaugggcaccgaauaccg

SEQ ID NO: 2119957 - RNA, 19 nt, Artificial Sequence
  Description of Artificial Sequence: Synthetic oligonucleotide
uccuuuuaaucuccucaca

SEQ ID NO: 2119958 - RNA, 19 nt, Artificial Sequence
  Description of Artificial Sequence: Synthetic oligonucleotide
caucucguguccguuagcg

SEQ ID NO: 2119959 - RNA, 19 nt, Artificial Sequence
  Description of Artificial Sequence: Synthetic oligonucleotide
aaugacgcgaacacacaca

SEQ ID NO: 2119960 - RNA, 19 nt, Artificial Sequence
  Description of Artificial Sequence: Synthetic oligonucleotide
acacauaugagagauccau

SEQ ID NO: 2119961 - RNA, 19 nt, Artificial Sequence
  Description of Artificial Sequence: Synthetic oligonucleotide
uccagcaaaucgcgcagcc

SEQ ID NO: 2119962 - RNA, 19 nt, Artificial Sequence
  Description of Artificial Sequence: Synthetic oligonucleotide
acaaucagaagcagaaagu

SEQ ID NO: 2119963 - RNA, 19 nt, Artificial Sequence
  Description of Artificial Sequence: Synthetic oligonucleotide
augggcaccgaauaccgca

SEQ ID NO: 2119964 - RNA, 19 nt, Artificial Sequence
  Description of Artificial Sequence: Synthetic oligonucleotide
auguaacaguccccagggc

SEQ ID NO: 2119965 - RNA, 19 nt, Artificial Sequence
  Description of Artificial Sequence: Synthetic oligonucleotide
gagugcacuuccucugggg

SEQ ID NO: 2119966 - RNA, 19 nt, Artificial Sequence
  Description of Artificial Sequence: Synthetic oligonucleotide
ugggugguuggucaggguc

SEQ ID NO: 2119967 - RNA, 19 nt, Artificial Sequence
  Description of Artificial Sequence: Synthetic oligonucleotide
aacugcaugcucccagcga

SEQ ID NO: 2119968 - RNA, 19 nt, Artificial Sequence
  Description of Artificial Sequence: Synthetic oligonucleotide
uggucggcaggucucaagu

SEQ ID NO: 2119969 - RNA, 19 nt, Artificial Sequence
  Description of Artificial Sequence: Synthetic oligonucleotide
caugcucccagcgaacacg

SEQ ID NO: 2119970 - RNA, 19 nt, Artificial Sequence
  Description of Artificial Sequence: Synthetic oligonucleotide
uuggaccaugacuggagcc

SEQ ID NO: 2119971 - RNA, 19 nt, Artificial Sequence
  Description of Artificial Sequence: Synthetic oligonucleotide
agcugaaccuuauuaccca

SEQ ID NO: 2119972 - RNA, 19 nt, Artificial Sequence
  Description of Artificial Sequence: Synthetic oligonucleotide
cuuucgggacaguuuguag

SEQ ID NO: 2119973 - RNA, 19 nt, Artificial Sequence
  Description of Artificial Sequence: Synthetic oligonucleotide
cuuucaauuccgagaguuc

SEQ ID NO: 2119974 - RNA, 19 nt, Artificial Sequence
  Description of Artificial Sequence: Synthetic oligonucleotide
guagacguggaaugucuug

SEQ ID NO: 2119975 - RNA, 19 nt, Artificial Sequence
  Description of Artificial Sequence: Synthetic oligonucleotide
uguccguuagcgacgucca

SEQ ID NO: 2119976 - RNA, 19 nt, Artificial Sequence
  Description of Artificial Sequence: Synthetic oligonucleotide
gacccagauccucuuuggg

SEQ ID NO: 2119977 - RNA, 19 nt, Artificial Sequence
  Description of Artificial Sequence: Synthetic oligonucleotide
augacgcgaacacacacau

SEQ ID NO: 2119978 - RNA, 19 nt, Artificial Sequence
  Description of Artificial Sequence: Synthetic oligonucleotide
uggaccaugacuggagcca

SEQ ID NO: 2119979 - RNA, 19 nt, Artificial Sequence
  Description of Artificial Sequence: Synthetic oligonucleotide
uacccagauguaacagucc

SEQ ID NO: 2119980 - RNA, 19 nt, Artificial Sequence
  Description of Artificial Sequence: Synthetic oligonucleotide
auuccgagaguucauccau

SEQ ID NO: 2119981 - RNA, 19 nt, Artificial Sequence
  Description of Artificial Sequence: Synthetic oligonucleotide
gaaccuuauuacccagaug

SEQ ID NO: 2119982 - RNA, 19 nt, Artificial Sequence
  Description of Artificial Sequence: Synthetic oligonucleotide
uguccucauagugugggug

SEQ ID NO: 2119983 - RNA, 19 nt, Artificial Sequence
  Description of Artificial Sequence: Synthetic oligonucleotide
caccgaauaccgcaugacc

SEQ ID NO: 2119984 - RNA, 19 nt, Artificial Sequence
  Description of Artificial Sequence: Synthetic oligonucleotide
accgcuuggguccucucuc

SEQ ID NO: 2119985 - RNA, 19 nt, Artificial Sequence
  Description of Artificial Sequence: Synthetic oligonucleotide
uggcccauccaucucgugu

SEQ ID NO: 2119986 - RNA, 19 nt, Artificial Sequence
  Description of Artificial Sequence: Synthetic oligonucleotide
guaacaguccccagggccc

SEQ ID NO: 2119987 - RNA, 19 nt, Artificial Sequence
  Description of Artificial Sequence: Synthetic oligonucleotide
uuuguagacguggaauguc

SEQ ID NO: 2119988 - RNA, 19 nt, Artificial Sequence
  Description of Artificial Sequence: Synthetic oligonucleotide
gguuacagagaugaagcag

SEQ ID NO: 2119989 - RNA, 19 nt, Artificial Sequence
  Description of Artificial Sequence: Synthetic oligonucleotide
guuagcgacguccagcaaa

SEQ ID NO: 2119990 - RNA, 19 nt, Artificial Sequence
  Description of Artificial Sequence: Synthetic oligonucleotide
uucgcguauaucugauaga

SEQ ID NO: 2119991 - RNA, 19 nt, Artificial Sequence
  Description of Artificial Sequence: Synthetic oligonucleotide
uucaauuccgagaguucau

SEQ ID NO: 2119992 - RNA, 19 nt, Artificial Sequence
  Description of Artificial Sequence: Synthetic oligonucleotide
agcguuaauuaagagcacu

SEQ ID NO: 2119993 - RNA, 19 nt, Artificial Sequence
  Description of Artificial Sequence: Synthetic oligonucleotide
ucaggguccgucccgugca

SEQ ID NO: 2119994 - RNA, 19 nt, Artificial Sequence
  Description of Artificial Sequence: Synthetic oligonucleotide
cucguguccguuagcgacg

SEQ ID NO: 2119995 - RNA, 19 nt, Artificial Sequence
  Description of Artificial Sequence: Synthetic oligonucleotide
cagaagcgaagccuagugc

SEQ ID NO: 2119996 - RNA, 19 nt, Artificial Sequence
  Description of Artificial Sequence: Synthetic oligonucleotide
gaucucagagcugcacagg

SEQ ID NO: 2119997 - RNA, 19 nt, Artificial Sequence
  Description of Artificial Sequence: Synthetic oligonucleotide
gaagccuagugcuuguucu

SEQ ID NO: 2119998 - RNA, 19 nt, Artificial Sequence
  Description of Artificial Sequence: Synthetic oligonucleotide
acguccagcaaaucgcgca

SEQ ID NO: 2119999 - RNA, 19 nt, Artificial Sequence
  Description of Artificial Sequence: Synthetic oligonucleotide
gaguaugggcaccgaauac

SEQ ID NO: 2120000 - RNA, 19 nt, Artificial Sequence
  Description of Artificial Sequence: Synthetic oligonucleotide
uccguuagcgacguccagc

SEQ ID NO: 2120001 - RNA, 19 nt, Artificial Sequence
  Description of Artificial Sequence: Synthetic oligonucleotide
cuugaagcucugaggaguc

SEQ ID NO: 2120002 - RNA, 19 nt, Artificial Sequence
  Description of Artificial Sequence: Synthetic oligonucleotide
uccgagaacucagaagcga

SEQ ID NO: 2120003 - RNA, 19 nt, Artificial Sequence
  Description of Artificial Sequence: Synthetic oligonucleotide
cuccucacagaagcgaggg

SEQ ID NO: 2120004 - RNA, 19 nt, Artificial Sequence
  Description of Artificial Sequence: Synthetic oligonucleotide
uucuuccgagaacucagaa

SEQ ID NO: 2120005 - RNA, 19 nt, Artificial Sequence
  Description of Artificial Sequence: Synthetic oligonucleotide
aagcgaagccuagugcuug

SEQ ID NO: 2120006 - RNA, 19 nt, Artificial Sequence
  Description of Artificial Sequence: Synthetic oligonucleotide
ccaaacgaccucaggagcg

SEQ ID NO: 2120007 - RNA, 19 nt, Artificial Sequence
  Description of Artificial Sequence: Synthetic oligonucleotide
guuggaccaugacuggagc

SEQ ID NO: 2120008 - RNA, 19 nt, Artificial Sequence
  Description of Artificial Sequence: Synthetic oligonucleotide
acuuacaaucagaagcaga

SEQ ID NO: 2120009 - RNA, 19 nt, Artificial Sequence
  Description of Artificial Sequence: Synthetic oligonucleotide
ggugccugcguucaaagca

SEQ ID NO: 2120010 - RNA, 19 nt, Artificial Sequence
  Description of Artificial Sequence: Synthetic oligonucleotide
ucaauuccgagaguucauc

SEQ ID NO: 2120011 - RNA, 19 nt, Artificial Sequence
  Description of Artificial Sequence: Synthetic oligonucleotide
guguccguuagcgacgucc

SEQ ID NO: 2120012 - RNA, 19 nt, Artificial Sequence
  Description of Artificial Sequence: Synthetic oligonucleotide
ggacaguuuguagacgugg

SEQ ID NO: 2120013 - RNA, 19 nt, Artificial Sequence
  Description of Artificial Sequence: Synthetic oligonucleotide
gugagcuuuguaggaaggg

SEQ ID NO: 2120014 - RNA, 19 nt, Artificial Sequence
  Description of Artificial Sequence: Synthetic oligonucleotide
ucucaagucggggucacuc

SEQ ID NO: 2120015 - RNA, 19 nt, Artificial Sequence
  Description of Artificial Sequence: Synthetic oligonucleotide
gacguggaaugucuuguuc

SEQ ID NO: 2120016 - RNA, 19 nt, Artificial Sequence
  Description of Artificial Sequence: Synthetic oligonucleotide
agucacagcagcguuaauu

SEQ ID NO: 2120017 - RNA, 19 nt, Artificial Sequence
  Description of Artificial Sequence: Synthetic oligonucleotide
agagcacuucuguuguacu

SEQ ID NO: 2120018 - RNA, 19 nt, Artificial Sequence
  Description of Artificial Sequence: Synthetic oligonucleotide
aacucagaagcgaagccua

SEQ ID NO: 2120019 - RNA, 19 nt, Artificial Sequence
  Description of Artificial Sequence: Synthetic oligonucleotide
ccagcuucagccugcacgg

SEQ ID NO: 2120020 - RNA, 19 nt, Artificial Sequence
  Description of Artificial Sequence: Synthetic oligonucleotide
agagaugaagcagccucag

SEQ ID NO: 2120021 - RNA, 19 nt, Artificial Sequence
  Description of Artificial Sequence: Synthetic oligonucleotide
agcaauucccagaucucag

SEQ ID NO: 2120022 - RNA, 19 nt, Artificial Sequence
  Description of Artificial Sequence: Synthetic oligonucleotide
auacucuagugaagugagc

SEQ ID NO: 2120023 - RNA, 19 nt, Artificial Sequence
  Description of Artificial Sequence: Synthetic oligonucleotide
ccggguuggaccaugacug

SEQ ID NO: 2120024 - RNA, 19 nt, Artificial Sequence
  Description of Artificial Sequence: Synthetic oligonucleotide
uuguacuuagagguucuuc

SEQ ID NO: 2120025 - RNA, 19 nt, Artificial Sequence
  Description of Artificial Sequence: Synthetic oligonucleotide
gcgaacacggccuuucuug

SEQ ID NO: 2120026 - RNA, 19 nt, Artificial Sequence
  Description of Artificial Sequence: Synthetic oligonucleotide
ucuuuggguuacagagaug

SEQ ID NO: 2120027 - RNA, 19 nt, Artificial Sequence
  Description of Artificial Sequence: Synthetic oligonucleotide
ugaaccccgagauccgggu

SEQ ID NO: 2120028 - RNA, 19 nt, Artificial Sequence
  Description of Artificial Sequence: Synthetic oligonucleotide
cuguuguacuuagagguuc

SEQ ID NO: 2120029 - RNA, 19 nt, Artificial Sequence
  Description of Artificial Sequence: Synthetic oligonucleotide
uaauccaguccaucagcuc

SEQ ID NO: 2120030 - RNA, 19 nt, Artificial Sequence
  Description of Artificial Sequence: Synthetic oligonucleotide
gccggauugcagcaggugg

SEQ ID NO: 2120031 - RNA, 19 nt, Artificial Sequence
  Description of Artificial Sequence: Synthetic oligonucleotide
agaugcuaucuucuaggau

SEQ ID NO: 2120032 - RNA, 19 nt, Artificial Sequence
  Description of Artificial Sequence: Synthetic oligonucleotide
uaucuucuaggaucacaaa

SEQ ID NO: 2120033 - RNA, 19 nt, Artificial Sequence
  Description of Artificial Sequence: Synthetic oligonucleotide
ugcguucaaagcagaugcu

SEQ ID NO: 2120034 - RNA, 19 nt, Artificial Sequence
  Description of Artificial Sequence: Synthetic oligonucleotide
agugcagacacaaggcagu

SEQ ID NO: 2120035 - RNA, 19 nt, Artificial Sequence
  Description of Artificial Sequence: Synthetic oligonucleotide
agucggggucacucucucc

SEQ ID NO: 2120036 - RNA, 19 nt, Artificial Sequence
  Description of Artificial Sequence: Synthetic oligonucleotide
gauccucuuuggguuacag

SEQ ID NO: 2120037 - RNA, 19 nt, Artificial Sequence
  Description of Artificial Sequence: Synthetic oligonucleotide
aucauucccuggccaggac

SEQ ID NO: 2120038 - RNA, 19 nt, Artificial Sequence
  Description of Artificial Sequence: Synthetic oligonucleotide
gagcaauucccagaucuca

SEQ ID NO: 2120039 - RNA, 19 nt, Artificial Sequence
  Description of Artificial Sequence: Synthetic oligonucleotide
aagcagaugcuaucuucua

SEQ ID NO: 2120040 - RNA, 19 nt, Artificial Sequence
  Description of Artificial Sequence: Synthetic oligonucleotide
uguagacguggaaugucuu

SEQ ID NO: 2120041 - RNA, 19 nt, Artificial Sequence
  Description of Artificial Sequence: Synthetic oligonucleotide
ugguguguuagagcuaauc

SEQ ID NO: 2120042 - RNA, 19 nt, Artificial Sequence
  Description of Artificial Sequence: Synthetic oligonucleotide
cagggcccaaacagcaagg

SEQ ID NO: 2120043 - RNA, 19 nt, Artificial Sequence
  Description of Artificial Sequence: Synthetic oligonucleotide
caacugcaugcucccagcg

SEQ ID NO: 2120044 - RNA, 19 nt, Artificial Sequence
  Description of Artificial Sequence: Synthetic oligonucleotide
uauaucugauagaccgcuu

SEQ ID NO: 2120045 - RNA, 19 nt, Artificial Sequence
  Description of Artificial Sequence: Synthetic oligonucleotide
cuggagccacagcugaacc

SEQ ID NO: 2120046 - RNA, 19 nt, Artificial Sequence
  Description of Artificial Sequence: Synthetic oligonucleotide
agaauucuuucaauuccga

SEQ ID NO: 2120047 - RNA, 19 nt, Artificial Sequence
  Description of Artificial Sequence: Synthetic oligonucleotide
agcaaaucgcgcagccggc

SEQ ID NO: 2120048 - RNA, 19 nt, Artificial Sequence
  Description of Artificial Sequence: Synthetic oligonucleotide
ggaauacucuagugaagug

SEQ ID NO: 2120049 - RNA, 19 nt, Artificial Sequence
  Description of Artificial Sequence: Synthetic oligonucleotide
aggcuuuuguccucauagu

SEQ ID NO: 2120050 - RNA, 19 nt, Artificial Sequence
  Description of Artificial Sequence: Synthetic oligonucleotide
aagccuagugcuuguucua

SEQ ID NO: 2120051 - RNA, 19 nt, Artificial Sequence
  Description of Artificial Sequence: Synthetic oligonucleotide
ucacagcagcguuaauuaa

SEQ ID NO: 2120052 - RNA, 19 nt, Artificial Sequence
  Description of Artificial Sequence: Synthetic oligonucleotide
cuugguguguuagagcuaa

SEQ ID NO: 2120053 - RNA, 19 nt, Artificial Sequence
  Description of Artificial Sequence: Synthetic oligonucleotide
agcgugaguaugggcaccg

SEQ ID NO: 2120054 - RNA, 19 nt, Artificial Sequence
  Description of Artificial Sequence: Synthetic oligonucleotide
uucuuucaauuccgagagu

SEQ ID NO: 2120055 - RNA, 19 nt, Artificial Sequence
  Description of Artificial Sequence: Synthetic oligonucleotide
ggccaaaugacgcgaacac

SEQ ID NO: 2120056 - RNA, 19 nt, Artificial Sequence
  Description of Artificial Sequence: Synthetic oligonucleotide
aagcgaggguggucggcag

SEQ ID NO: 2120057 - RNA, 19 nt, Artificial Sequence
  Description of Artificial Sequence: Synthetic oligonucleotide
caaaucgcgcagccggcag

SEQ ID NO: 2120058 - RNA, 19 nt, Artificial Sequence
  Description of Artificial Sequence: Synthetic oligonucleotide
aaacgaccucaggagcgag

SEQ ID NO: 2120059 - RNA, 19 nt, Artificial Sequence
  Description of Artificial Sequence: Synthetic oligonucleotide
acucuagugaagugagcuu

SEQ ID NO: 2120060 - RNA, 19 nt, Artificial Sequence
  Description of Artificial Sequence: Synthetic oligonucleotide
aggccaaaugacgcgaaca

SEQ ID NO: 2120061 - RNA, 19 nt, Artificial Sequence
  Description of Artificial Sequence: Synthetic oligonucleotide
uuuucgcguauaucugaua

SEQ ID NO: 2120062 - RNA, 19 nt, Artificial Sequence
  Description of Artificial Sequence: Synthetic oligonucleotide
guauaucugauagaccgcu

SEQ ID NO: 2120063 - RNA, 19 nt, Artificial Sequence
  Description of Artificial Sequence: Synthetic oligonucleotide
caaaugacgcgaacacaca

SEQ ID NO: 2120064 - RNA, 19 nt, Artificial Sequence
  Description of Artificial Sequence: Synthetic oligonucleotide
cuuagagguucuuccgaga

SEQ ID NO: 2120065 - RNA, 19 nt, Artificial Sequence
  Description of Artificial Sequence: Synthetic oligonucleotide
cuaauccaguccaucagcu

SEQ ID NO: 2120066 - RNA, 19 nt, Artificial Sequence
  Description of Artificial Sequence: Synthetic oligonucleotide
uuggguccucucucucagg

SEQ ID NO: 2120067 - RNA, 19 nt, Artificial Sequence
  Description of Artificial Sequence: Synthetic oligonucleotide
cagaugcuaucuucuagga

SEQ ID NO: 2120068 - RNA, 19 nt, Artificial Sequence
  Description of Artificial Sequence: Synthetic oligonucleotide
accuuuucgcguauaucug

SEQ ID NO: 2120069 - RNA, 19 nt, Artificial Sequence
  Description of Artificial Sequence: Synthetic oligonucleotide
cagagaugaagcagccuca

SEQ ID NO: 2120070 - RNA, 19 nt, Artificial Sequence
  Description of Artificial Sequence: Synthetic oligonucleotide
ucuugguguguuagagcua

SEQ ID NO: 2120071 - RNA, 19 nt, Artificial Sequence
  Description of Artificial Sequence: Synthetic oligonucleotide
auaccgcaugacccagauc

SEQ ID NO: 2120072 - RNA, 19 nt, Artificial Sequence
  Description of Artificial Sequence: Synthetic oligonucleotide
gucagugccaaacgaccuc

SEQ ID NO: 2120073 - RNA, 19 nt, Artificial Sequence
  Description of Artificial Sequence: Synthetic oligonucleotide
gguuggaccaugacuggag

SEQ ID NO: 2120074 - RNA, 19 nt, Artificial Sequence
  Description of Artificial Sequence: Synthetic oligonucleotide
gucaggguccgucccgugc

SEQ ID NO: 2120075 - RNA, 19 nt, Artificial Sequence
  Description of Artificial Sequence: Synthetic oligonucleotide
agucagugccaaacgaccu

SEQ ID NO: 2120076 - RNA, 19 nt, Artificial Sequence
  Description of Artificial Sequence: Synthetic oligonucleotide
ccgagauccggguuggacc

SEQ ID NO: 2120077 - RNA, 19 nt, Artificial Sequence
  Description of Artificial Sequence: Synthetic oligonucleotide
ggagugcagacacaaggca

SEQ ID NO: 2120078 - RNA, 19 nt, Artificial Sequence
  Description of Artificial Sequence: Synthetic oligonucleotide
cagcagcguuaauuaagag

SEQ ID NO: 2120079 - RNA, 19 nt, Artificial Sequence
  Description of Artificial Sequence: Synthetic oligonucleotide
gccaaacgaccucaggagc

SEQ ID NO: 2120080 - RNA, 19 nt, Artificial Sequence
  Description of Artificial Sequence: Synthetic oligonucleotide
gaagcgaggguggucggca

SEQ ID NO: 2120081 - RNA, 19 nt, Artificial Sequence
  Description of Artificial Sequence: Synthetic oligonucleotide
aggacuuacagcacaggua

SEQ ID NO: 2120082 - RNA, 19 nt, Artificial Sequence
  Description of Artificial Sequence: Synthetic oligonucleotide
ucaggcuuuuguccucaua

SEQ ID NO: 2120083 - RNA, 19 nt, Artificial Sequence
  Description of Artificial Sequence: Synthetic oligonucleotide
aucucguguccguuagcga

SEQ ID NO: 2120084 - RNA, 19 nt, Artificial Sequence
  Description of Artificial Sequence: Synthetic oligonucleotide
uuguccucauagugugggu

SEQ ID NO: 2120085 - RNA, 19 nt, Artificial Sequence
  Description of Artificial Sequence: Synthetic oligonucleotide
ugggcaccgaauaccgcau

SEQ ID NO: 2120086 - RNA, 19 nt, Artificial Sequence
  Description of Artificial Sequence: Synthetic oligonucleotide
uccucacagaagcgagggu

SEQ ID NO: 2120087 - RNA, 19 nt, Artificial Sequence
  Description of Artificial Sequence: Synthetic oligonucleotide
gcgaacacacacauaugag

SEQ ID NO: 2120088 - RNA, 19 nt, Artificial Sequence
  Description of Artificial Sequence: Synthetic oligonucleotide
ucgcgcagccggcagcccc

SEQ ID NO: 2120089 - RNA, 19 nt, Artificial Sequence
  Description of Artificial Sequence: Synthetic oligonucleotide
cagcguuaauuaagagcac

SEQ ID NO: 2120090 - RNA, 19 nt, Artificial Sequence
  Description of Artificial Sequence: Synthetic oligonucleotide
ccucacagaagcgagggug

SEQ ID NO: 2120091 - RNA, 19 nt, Artificial Sequence
  Description of Artificial Sequence: Synthetic oligonucleotide
gcgacguccagcaaaucgc

SEQ ID NO: 2120092 - RNA, 19 nt, Artificial Sequence
  Description of Artificial Sequence: Synthetic oligonucleotide
gguuggucaggguccgucc

SEQ ID NO: 2120093 - RNA, 19 nt, Artificial Sequence
  Description of Artificial Sequence: Synthetic oligonucleotide
gucauagaauucuuucaau

SEQ ID NO: 2120094 - RNA, 19 nt, Artificial Sequence
  Description of Artificial Sequence: Synthetic oligonucleotide
caggagcgagugcacuucc

SEQ ID NO: 2120095 - RNA, 19 nt, Artificial Sequence
  Description of Artificial Sequence: Synthetic oligonucleotide
cucuccuggcccauccauc

SEQ ID NO: 2120096 - RNA, 19 nt, Artificial Sequence
  Description of Artificial Sequence: Synthetic oligonucleotide
guggucggcaggucucaag

SEQ ID NO: 2120097 - RNA, 19 nt, Artificial Sequence
  Description of Artificial Sequence: Synthetic oligonucleotide
ccggauugcagcagguggc

SEQ ID NO: 2120098 - RNA, 19 nt, Artificial Sequence
  Description of Artificial Sequence: Synthetic oligonucleotide
acucagaagcgaagccuag

SEQ ID NO: 2120099 - RNA, 19 nt, Artificial Sequence
  Description of Artificial Sequence: Synthetic oligonucleotide
agcgaagccuagugcuugu

SEQ ID NO: 2120100 - RNA, 19 nt, Artificial Sequence
  Description of Artificial Sequence: Synthetic oligonucleotide
cacauaugagagauccaua

SEQ ID NO: 2120101 - RNA, 19 nt, Artificial Sequence
  Description of Artificial Sequence: Synthetic oligonucleotide
ucccgugcacagcuucacu

SEQ ID NO: 2120102 - RNA, 19 nt, Artificial Sequence
  Description of Artificial Sequence: Synthetic oligonucleotide
cguauaucugauagaccgc

SEQ ID NO: 2120103 - RNA, 19 nt, Artificial Sequence
  Description of Artificial Sequence: Synthetic oligonucleotide
agacguggaaugucuuguu

SEQ ID NO: 2120104 - RNA, 19 nt, Artificial Sequence
  Description of Artificial Sequence: Synthetic oligonucleotide
ugguuggucaggguccguc

SEQ ID NO: 2120105 - RNA, 19 nt, Artificial Sequence
  Description of Artificial Sequence: Synthetic oligonucleotide
gacguccagcaaaucgcgc

SEQ ID NO: 2120106 - RNA, 19 nt, Artificial Sequence
  Description of Artificial Sequence: Synthetic oligonucleotide
aacgaccucaggagcgagu

SEQ ID NO: 2120107 - RNA, 19 nt, Artificial Sequence
  Description of Artificial Sequence: Synthetic oligonucleotide
gucggggucacucucuccu

SEQ ID NO: 2120108 - RNA, 19 nt, Artificial Sequence
  Description of Artificial Sequence: Synthetic oligonucleotide
cagaagcgaggguggucgg

SEQ ID NO: 2120109 - RNA, 19 nt, Artificial Sequence
  Description of Artificial Sequence: Synthetic oligonucleotide
gaggccuacagggcuccag

SEQ ID NO: 2120110 - RNA, 19 nt, Artificial Sequence
  Description of Artificial Sequence: Synthetic oligonucleotide
cacacauaugagagaucca

SEQ ID NO: 2120111 - RNA, 19 nt, Artificial Sequence
  Description of Artificial Sequence: Synthetic oligonucleotide
aggguggucggcaggucuc

SEQ ID NO: 2120112 - RNA, 19 nt, Artificial Sequence
  Description of Artificial Sequence: Synthetic oligonucleotide
ugccggauugcagcaggug

SEQ ID NO: 2120113 - RNA, 19 nt, Artificial Sequence
  Description of Artificial Sequence: Synthetic oligonucleotide
ggguuacagagaugaagca

SEQ ID NO: 2120114 - RNA, 19 nt, Artificial Sequence
  Description of Artificial Sequence: Synthetic oligonucleotide
guacagcagcgugaguaug

SEQ ID NO: 2120115 - RNA, 19 nt, Artificial Sequence
  Description of Artificial Sequence: Synthetic oligonucleotide
ggcccauccaucucguguc

SEQ ID NO: 2120116 - RNA, 19 nt, Artificial Sequence
  Description of Artificial Sequence: Synthetic oligonucleotide
caggccaaaugacgcgaac

SEQ ID NO: 2120117 - RNA, 19 nt, Artificial Sequence
  Description of Artificial Sequence: Synthetic oligonucleotide
cucucaggcuuuuguccuc

SEQ ID NO: 2120118 - RNA, 19 nt, Artificial Sequence
  Description of Artificial Sequence: Synthetic oligonucleotide
ggugguuggucaggguccg

SEQ ID NO: 2120119 - RNA, 19 nt, Artificial Sequence
  Description of Artificial Sequence: Synthetic oligonucleotide
cagcagguggcucccaaga

SEQ ID NO: 2120120 - RNA, 19 nt, Artificial Sequence
  Description of Artificial Sequence: Synthetic oligonucleotide
auccaucucguguccguua

SEQ ID NO: 2120121 - RNA, 19 nt, Artificial Sequence
  Description of Artificial Sequence: Synthetic oligonucleotide
agcgaacacggccuuucuu

SEQ ID NO: 2120122 - RNA, 19 nt, Artificial Sequence
  Description of Artificial Sequence: Synthetic oligonucleotide
cgaacacggccuuucuugg

SEQ ID NO: 2120123 - RNA, 19 nt, Artificial Sequence
  Description of Artificial Sequence: Synthetic oligonucleotide
ggagcgagugcacuuccuc

SEQ ID NO: 2120124 - RNA, 19 nt, Artificial Sequence
  Description of Artificial Sequence: Synthetic oligonucleotide
ucguguccguuagcgacgu

SEQ ID NO: 2120125 - RNA, 19 nt, Artificial Sequence
  Description of Artificial Sequence: Synthetic oligonucleotide
cuuuucgcguauaucugau

SEQ ID NO: 2120126 - RNA, 19 nt, Artificial Sequence
  Description of Artificial Sequence: Synthetic oligonucleotide
ccugccggauugcagcagg

SEQ ID NO: 2120127 - RNA, 19 nt, Artificial Sequence
  Description of Artificial Sequence: Synthetic oligonucleotide
ugacgcgaacacacacaua

SEQ ID NO: 2120128 - RNA, 19 nt, Artificial Sequence
  Description of Artificial Sequence: Synthetic oligonucleotide
gugcagacacaaggcagug

SEQ ID NO: 2120129 - RNA, 19 nt, Artificial Sequence
  Description of Artificial Sequence: Synthetic oligonucleotide
aggucucaagucgggguca

SEQ ID NO: 2120130 - RNA, 19 nt, Artificial Sequence
  Description of Artificial Sequence: Synthetic oligonucleotide
ccuuuucgcguauaucuga

SEQ ID NO: 2120131 - RNA, 19 nt, Artificial Sequence
  Description of Artificial Sequence: Synthetic oligonucleotide
gggguuccuuuuaaucucc

SEQ ID NO: 2120132 - RNA, 19 nt, Artificial Sequence
  Description of Artificial Sequence: Synthetic oligonucleotide
agccuagugcuuguucuau

SEQ ID NO: 2120133 - RNA, 19 nt, Artificial Sequence
  Description of Artificial Sequence: Synthetic oligonucleotide
gaauaccgcaugacccaga

SEQ ID NO: 2120134 - RNA, 19 nt, Artificial Sequence
  Description of Artificial Sequence: Synthetic oligonucleotide
cuuguucuaucuggagcca

SEQ ID NO: 2120135 - RNA, 19 nt, Artificial Sequence
  Description of Artificial Sequence: Synthetic oligonucleotide
cuucagccugcacggugug

SEQ ID NO: 2120136 - RNA, 19 nt, Artificial Sequence
  Description of Artificial Sequence: Synthetic oligonucleotide
cacaggccaaaugacgcga

SEQ ID NO: 2120137 - RNA, 19 nt, Artificial Sequence
  Description of Artificial Sequence: Synthetic oligonucleotide
cagauccucuuuggguuac

SEQ ID NO: 2120138 - RNA, 19 nt, Artificial Sequence
  Description of Artificial Sequence: Synthetic oligonucleotide
uccaccgugucugggucau

SEQ ID NO: 2120139 - RNA, 19 nt, Artificial Sequence
  Description of Artificial Sequence: Synthetic oligonucleotide
guccguuagcgacguccag

SEQ ID NO: 2120140 - RNA, 19 nt, Artificial Sequence
  Description of Artificial Sequence: Synthetic oligonucleotide
uagaccgcuuggguccucu

SEQ ID NO: 2120141 - RNA, 19 nt, Artificial Sequence
  Description of Artificial Sequence: Synthetic oligonucleotide
caaacgaccucaggagcga

SEQ ID NO: 2120142 - RNA, 19 nt, Artificial Sequence
  Description of Artificial Sequence: Synthetic oligonucleotide
ggcaccgaauaccgcauga

SEQ ID NO: 2120143 - RNA, 19 nt, Artificial Sequence
  Description of Artificial Sequence: Synthetic oligonucleotide
ggcaggucucaagucgggg

SEQ ID NO: 2120144 - RNA, 19 nt, Artificial Sequence
  Description of Artificial Sequence: Synthetic oligonucleotide
cgcgaacacacacauauga

SEQ ID NO: 2120145 - RNA, 19 nt, Artificial Sequence
  Description of Artificial Sequence: Synthetic oligonucleotide
gacuuacagcacagguaca

SEQ ID NO: 2120146 - RNA, 19 nt, Artificial Sequence
  Description of Artificial Sequence: Synthetic oligonucleotide
guucuuccgagaacucaga

SEQ ID NO: 2120147 - RNA, 19 nt, Artificial Sequence
  Description of Artificial Sequence: Synthetic oligonucleotide
caucauucccuggccagga

SEQ ID NO: 2120148 - RNA, 19 nt, Artificial Sequence
  Description of Artificial Sequence: Synthetic oligonucleotide
ccucaggagcaauucccag

SEQ ID NO: 2120149 - RNA, 19 nt, Artificial Sequence
  Description of Artificial Sequence: Synthetic oligonucleotide
cgacguccagcaaaucgcg

SEQ ID NO: 2120150 - RNA, 19 nt, Artificial Sequence
  Description of Artificial Sequence: Synthetic oligonucleotide
ggguccgucccgugcacag

SEQ ID NO: 2120151 - RNA, 19 nt, Artificial Sequence
  Description of Artificial Sequence: Synthetic oligonucleotide
gagcacuucuguuguacuu

SEQ ID NO: 2120152 - RNA, 19 nt, Artificial Sequence
  Description of Artificial Sequence: Synthetic oligonucleotide
gugaggccuacagggcucc

SEQ ID NO: 2120153 - RNA, 19 nt, Artificial Sequence
  Description of Artificial Sequence: Synthetic oligonucleotide
cccgugcacagcuucacuc

SEQ ID NO: 2120154 - RNA, 19 nt, Artificial Sequence
  Description of Artificial Sequence: Synthetic oligonucleotide
gugaguaugggcaccgaau

SEQ ID NO: 2120155 - RNA, 19 nt, Artificial Sequence
  Description of Artificial Sequence: Synthetic oligonucleotide
gggucacucucuccuggcc

SEQ ID NO: 2120156 - RNA, 19 nt, Artificial Sequence
  Description of Artificial Sequence: Synthetic oligonucleotide
guccagcaaaucgcgcagc

SEQ ID NO: 2120157 - RNA, 19 nt, Artificial Sequence
  Description of Artificial Sequence: Synthetic oligonucleotide
ccgaauaccgcaugaccca

SEQ ID NO: 2120158 - RNA, 19 nt, Artificial Sequence
  Description of Artificial Sequence: Synthetic oligonucleotide
cucccagcgaacacggccu

SEQ ID NO: 2120159 - RNA, 19 nt, Artificial Sequence
  Description of Artificial Sequence: Synthetic oligonucleotide
uugguguguuagagcuaau

SEQ ID NO: 2120160 - RNA, 19 nt, Artificial Sequence
  Description of Artificial Sequence: Synthetic oligonucleotide
ggagcaauucccagaucuc

SEQ ID NO: 2120161 - RNA, 19 nt, Artificial Sequence
  Description of Artificial Sequence: Synthetic oligonucleotide
cagcgugaguaugggcacc

SEQ ID NO: 2120162 - RNA, 19 nt, Artificial Sequence
  Description of Artificial Sequence: Synthetic oligonucleotide
ggggucacucucuccuggc

SEQ ID NO: 2120163 - RNA, 19 nt, Artificial Sequence
  Description of Artificial Sequence: Synthetic oligonucleotide
ggagucacagcagcguuaa

SEQ ID NO: 2120164 - RNA, 19 nt, Artificial Sequence
  Description of Artificial Sequence: Synthetic oligonucleotide
ugcuaucuucuaggaucac

SEQ ID NO: 2120165 - RNA, 19 nt, Artificial Sequence
  Description of Artificial Sequence: Synthetic oligonucleotide
acgcgaacacacacauaug

SEQ ID NO: 2120166 - RNA, 19 nt, Artificial Sequence
  Description of Artificial Sequence: Synthetic oligonucleotide
cgcguauaucugauagacc

SEQ ID NO: 2120167 - RNA, 19 nt, Artificial Sequence
  Description of Artificial Sequence: Synthetic oligonucleotide
accuuauuacccagaugua

SEQ ID NO: 2120168 - RNA, 19 nt, Artificial Sequence
  Description of Artificial Sequence: Synthetic oligonucleotide
gcuuggguccucucucuca

SEQ ID NO: 2120169 - RNA, 19 nt, Artificial Sequence
  Description of Artificial Sequence: Synthetic oligonucleotide
cuaggaucacaaagucagu

SEQ ID NO: 2120170 - RNA, 19 nt, Artificial Sequence
  Description of Artificial Sequence: Synthetic oligonucleotide
cucaagucggggucacucu

SEQ ID NO: 2120171 - RNA, 19 nt, Artificial Sequence
  Description of Artificial Sequence: Synthetic oligonucleotide
ccguuagcgacguccagca

SEQ ID NO: 2120172 - RNA, 19 nt, Artificial Sequence
  Description of Artificial Sequence: Synthetic oligonucleotide
ccagcaaaucgcgcagccg

SEQ ID NO: 2120173 - RNA, 19 nt, Artificial Sequence
  Description of Artificial Sequence: Synthetic oligonucleotide
aggagucacagcagcguua

SEQ ID NO: 2120174 - RNA, 19 nt, Artificial Sequence
  Description of Artificial Sequence: Synthetic oligonucleotide
uggggaccuuuucgcguau

SEQ ID NO: 2120175 - RNA, 19 nt, Artificial Sequence
  Description of Artificial Sequence: Synthetic oligonucleotide
cauucccuggccaggacuu

SEQ ID NO: 2120176 - RNA, 19 nt, Artificial Sequence
  Description of Artificial Sequence: Synthetic oligonucleotide
ccuagugcuuguucuaucu

SEQ ID NO: 2120177 - RNA, 19 nt, Artificial Sequence
  Description of Artificial Sequence: Synthetic oligonucleotide
gggacaguuuguagacgug

SEQ ID NO: 2120178 - RNA, 19 nt, Artificial Sequence
  Description of Artificial Sequence: Synthetic oligonucleotide
accugccggauugcagcag

SEQ ID NO: 2120179 - RNA, 19 nt, Artificial Sequence
  Description of Artificial Sequence: Synthetic oligonucleotide
ggucggcaggucucaaguc

SEQ ID NO: 2120180 - RNA, 19 nt, Artificial Sequence
  Description of Artificial Sequence: Synthetic oligonucleotide
caccugccggauugcagca

SEQ ID NO: 2120181 - RNA, 19 nt, Artificial Sequence
  Description of Artificial Sequence: Synthetic oligonucleotide
ucccagcgaacacggccuu

SEQ ID NO: 2120182 - RNA, 19 nt, Artificial Sequence
  Description of Artificial Sequence: Synthetic oligonucleotide
guguuagagcuaauccagu

SEQ ID NO: 2120183 - RNA, 19 nt, Artificial Sequence
  Description of Artificial Sequence: Synthetic oligonucleotide
ccaggacuuacagcacagg

SEQ ID NO: 2120184 - RNA, 19 nt, Artificial Sequence
  Description of Artificial Sequence: Synthetic oligonucleotide
agauccucuuuggguuaca

SEQ ID NO: 2120185 - RNA, 19 nt, Artificial Sequence
  Description of Artificial Sequence: Synthetic oligonucleotide
gaagcgaagccuagugcuu

SEQ ID NO: 2120186 - RNA, 19 nt, Artificial Sequence
  Description of Artificial Sequence: Synthetic oligonucleotide
acaggccaaaugacgcgaa

SEQ ID NO: 2120187 - RNA, 19 nt, Artificial Sequence
  Description of Artificial Sequence: Synthetic oligonucleotide
gucccgugcacagcuucac

SEQ ID NO: 2120188 - RNA, 19 nt, Artificial Sequence
  Description of Artificial Sequence: Synthetic oligonucleotide
accgcaugacccagauccu

SEQ ID NO: 2120189 - RNA, 19 nt, Artificial Sequence
  Description of Artificial Sequence: Synthetic oligonucleotide
ccgagaacucagaagcgaa

SEQ ID NO: 2120190 - RNA, 19 nt, Artificial Sequence
  Description of Artificial Sequence: Synthetic oligonucleotide
auagaccgcuuggguccuc

SEQ ID NO: 2120191 - RNA, 19 nt, Artificial Sequence
  Description of Artificial Sequence: Synthetic oligonucleotide
gccuagugcuuguucuauc

SEQ ID NO: 2120192 - RNA, 19 nt, Artificial Sequence
  Description of Artificial Sequence: Synthetic oligonucleotide
aguggccaccugccggauu

SEQ ID NO: 2120193 - RNA, 19 nt, Artificial Sequence
  Description of Artificial Sequence: Synthetic oligonucleotide
cgagauccggguuggacca

SEQ ID NO: 2120194 - RNA, 19 nt, Artificial Sequence
  Description of Artificial Sequence: Synthetic oligonucleotide
cugggucauagaauucuuu

SEQ ID NO: 2120195 - RNA, 19 nt, Artificial Sequence
  Description of Artificial Sequence: Synthetic oligonucleotide
gcguucaaagcagaugcua

SEQ ID NO: 2120196 - RNA, 19 nt, Artificial Sequence
  Description of Artificial Sequence: Synthetic oligonucleotide
caggguccgucccgugcac

SEQ ID NO: 2120197 - RNA, 19 nt, Artificial Sequence
  Description of Artificial Sequence: Synthetic oligonucleotide
ccagcgaacacggccuuuc

SEQ ID NO: 2120198 - RNA, 19 nt, Artificial Sequence
  Description of Artificial Sequence: Synthetic oligonucleotide
gggcaccgaauaccgcaug

SEQ ID NO: 2120199 - RNA, 19 nt, Artificial Sequence
  Description of Artificial Sequence: Synthetic oligonucleotide
gccaccugccggauugcag

SEQ ID NO: 2120200 - RNA, 19 nt, Artificial Sequence
  Description of Artificial Sequence: Synthetic oligonucleotide
cucaggagcgagugcacuu

SEQ ID NO: 2120201 - RNA, 19 nt, Artificial Sequence
  Description of Artificial Sequence: Synthetic oligonucleotide
cgaagccuagugcuuguuc

SEQ ID NO: 2120202 - RNA, 19 nt, Artificial Sequence
  Description of Artificial Sequence: Synthetic oligonucleotide
cucucuccuggcccaucca

SEQ ID NO: 2120203 - RNA, 19 nt, Artificial Sequence
  Description of Artificial Sequence: Synthetic oligonucleotide
uccgucccgugcacagcuu

SEQ ID NO: 2120204 - RNA, 19 nt, Artificial Sequence
  Description of Artificial Sequence: Synthetic oligonucleotide
agccacagcugaaccuuau

SEQ ID NO: 2120205 - RNA, 19 nt, Artificial Sequence
  Description of Artificial Sequence: Synthetic oligonucleotide
ggguuggaccaugacugga

SEQ ID NO: 2120206 - RNA, 19 nt, Artificial Sequence
  Description of Artificial Sequence: Synthetic oligonucleotide
gcuuucgggacaguuugua

SEQ ID NO: 2120207 - RNA, 19 nt, Artificial Sequence
  Description of Artificial Sequence: Synthetic oligonucleotide
cgaauaccgcaugacccag

SEQ ID NO: 2120208 - RNA, 19 nt, Artificial Sequence
  Description of Artificial Sequence: Synthetic oligonucleotide
cggggucacucucuccugg

SEQ ID NO: 2120209 - RNA, 19 nt, Artificial Sequence
  Description of Artificial Sequence: Synthetic oligonucleotide
ccaucucguguccguuagc

SEQ ID NO: 2120210 - RNA, 19 nt, Artificial Sequence
  Description of Artificial Sequence: Synthetic oligonucleotide
aggguccgucccgugcaca

SEQ ID NO: 2120211 - RNA, 19 nt, Artificial Sequence
  Description of Artificial Sequence: Synthetic oligonucleotide
uagcgacguccagcaaauc

SEQ ID NO: 2120212 - RNA, 19 nt, Artificial Sequence
  Description of Artificial Sequence: Synthetic oligonucleotide
gagccacagcugaaccuua

SEQ ID NO: 2120213 - RNA, 19 nt, Artificial Sequence
  Description of Artificial Sequence: Synthetic oligonucleotide
gaaccccgagauccggguu

SEQ ID NO: 2120214 - RNA, 19 nt, Artificial Sequence
  Description of Artificial Sequence: Synthetic oligonucleotide
gggaccuuuucgcguauau

SEQ ID NO: 2120215 - RNA, 19 nt, Artificial Sequence
  Description of Artificial Sequence: Synthetic oligonucleotide
cguucaaagcagaugcuau

SEQ ID NO: 2120216 - RNA, 19 nt, Artificial Sequence
  Description of Artificial Sequence: Synthetic oligonucleotide
cagcaaggagugaggccua

SEQ ID NO: 2120217 - RNA, 19 nt, Artificial Sequence
  Description of Artificial Sequence: Synthetic oligonucleotide
gguccgucccgugcacagc

SEQ ID NO: 2120218 - RNA, 19 nt, Artificial Sequence
  Description of Artificial Sequence: Synthetic oligonucleotide
cagccagcaacugcaugcu

SEQ ID NO: 2120219 - RNA, 19 nt, Artificial Sequence
  Description of Artificial Sequence: Synthetic oligonucleotide
cgggacaguuuguagacgu

SEQ ID NO: 2120220 - RNA, 19 nt, Artificial Sequence
  Description of Artificial Sequence: Synthetic oligonucleotide
ggccuacagggcuccagcu

SEQ ID NO: 2120221 - RNA, 19 nt, Artificial Sequence
  Description of Artificial Sequence: Synthetic oligonucleotide
ccgcaugacccagauccuc

SEQ ID NO: 2120222 - RNA, 19 nt, Artificial Sequence
  Description of Artificial Sequence: Synthetic oligonucleotide
cgugcacagcuucacucca

SEQ ID NO: 2120223 - RNA, 19 nt, Artificial Sequence
  Description of Artificial Sequence: Synthetic oligonucleotide
cugccggauugcagcaggu

SEQ ID NO: 2120224 - RNA, 19 nt, Artificial Sequence
  Description of Artificial Sequence: Synthetic oligonucleotide
ccaugacuggagccaggca

SEQ ID NO: 2120225 - RNA, 19 nt, Artificial Sequence
  Description of Artificial Sequence: Synthetic oligonucleotide
cagcaacugcaugcuccca

SEQ ID NO: 2120226 - RNA, 19 nt, Artificial Sequence
  Description of Artificial Sequence: Synthetic oligonucleotide
cgugaguaugggcaccgaa

SEQ ID NO: 2120227 - RNA, 19 nt, Artificial Sequence
  Description of Artificial Sequence: Synthetic oligonucleotide
cagcgaacacggccuuucu

SEQ ID NO: 2120228 - RNA, 19 nt, Artificial Sequence
  Description of Artificial Sequence: Synthetic oligonucleotide
ccauccaucucguguccgu

SEQ ID NO: 2120229 - RNA, 19 nt, Artificial Sequence
  Description of Artificial Sequence: Synthetic oligonucleotide
cccagaucucagagcugca

SEQ ID NO: 2120230 - RNA, 19 nt, Artificial Sequence
  Description of Artificial Sequence: Synthetic oligonucleotide
cgcaugacccagauccucu

SEQ ID NO: 2120231 - RNA, 19 nt, Artificial Sequence
  Description of Artificial Sequence: Synthetic oligonucleotide
gccuacagggcuccagcuu

SEQ ID NO: 2120232 - RNA, 19 nt, Artificial Sequence
  Description of Artificial Sequence: Synthetic oligonucleotide
gcaugacccagauccucuu

SEQ ID NO: 2120233 - RNA, 19 nt, Artificial Sequence
  Description of Artificial Sequence: Synthetic oligonucleotide
gagauccggguuggaccau

SEQ ID NO: 2120234 - RNA, 19 nt, Artificial Sequence
  Description of Artificial Sequence: Synthetic oligonucleotide
gccacagcugaaccuuauu

SEQ ID NO: 2120235 - RNA, 19 nt, Artificial Sequence
  Description of Artificial Sequence: Synthetic oligonucleotide
ggcuuucgggacaguuugu

SEQ ID NO: 2120236 - RNA, 19 nt, Artificial Sequence
  Description of Artificial Sequence: Synthetic oligonucleotide
cccaaacagcaaggaguga

SEQ ID NO: 2120237 - RNA, 19 nt, Artificial Sequence
  Description of Artificial Sequence: Synthetic oligonucleotide
gcgugaguaugggcaccga

SEQ ID NO: 2120238 - RNA, 19 nt, Artificial Sequence
  Description of Artificial Sequence: Synthetic oligonucleotide
ggggaccuuuucgcguaua

SEQ ID NO: 2120239 - RNA, 19 nt, Artificial Sequence
  Description of Artificial Sequence: Synthetic oligonucleotide
gccugcguucaaagcagau

SEQ ID NO: 2120240 - RNA, 19 nt, Artificial Sequence
  Description of Artificial Sequence: Synthetic oligonucleotide
ggcucccaagagggcugga

SEQ ID NO: 2120241 - RNA, 19 nt, Artificial Sequence
  Description of Artificial Sequence: Synthetic oligonucleotide
cggauugcagcagguggcu

SEQ ID NO: 2120242 - RNA, 19 nt, Artificial Sequence
  Description of Artificial Sequence: Synthetic oligonucleotide
gcgaagccuagugcuuguu

SEQ ID NO: 2120243 - RNA, 19 nt, Artificial Sequence
  Description of Artificial Sequence: Synthetic oligonucleotide
caguggccaccugccggau

SEQ ID NO: 2120244 - RNA, 19 nt, Artificial Sequence
  Description of Artificial Sequence: Synthetic oligonucleotide
cgcgcagccggcagccccu

SEQ ID NO: 2120245 - RNA, 19 nt, Artificial Sequence
  Description of Artificial Sequence: Synthetic oligonucleotide
cccagcgaacacggccuuu

SEQ ID NO: 2120246 - RNA, 19 nt, Artificial Sequence
  Description of Artificial Sequence: Synthetic oligonucleotide
aggacagucggauaaagcc

SEQ ID NO: 2120247 - RNA, 19 nt, Artificial Sequence
  Description of Artificial Sequence: Synthetic oligonucleotide
aaccauuagggccagcagg

SEQ ID NO: 2120248 - RNA, 19 nt, Artificial Sequence
  Description of Artificial Sequence: Synthetic oligonucleotide
acacauacaugcaugaacc

SEQ ID NO: 2120249 - RNA, 19 nt, Artificial Sequence
  Description of Artificial Sequence: Synthetic oligonucleotide
acuacaacagcaucggcuc

SEQ ID NO: 2120250 - RNA, 19 nt, Artificial Sequence
  Description of Artificial Sequence: Synthetic oligonucleotide
aaacccagcagcaagacug

SEQ ID NO: 2120251 - RNA, 19 nt, Artificial Sequence
  Description of Artificial Sequence: Synthetic oligonucleotide
aaugucaggggcucagagg

SEQ ID NO: 2120252 - RNA, 19 nt, Artificial Sequence
  Description of Artificial Sequence: Synthetic oligonucleotide
ugauacagcagcaaaccca

SEQ ID NO: 2120253 - RNA, 19 nt, Artificial Sequence
  Description of Artificial Sequence: Synthetic oligonucleotide
uucaggaucagacucacau

SEQ ID NO: 2120254 - RNA, 19 nt, Artificial Sequence
  Description of Artificial Sequence: Synthetic oligonucleotide
uacacauacaugcaugaac

SEQ ID NO: 2120255 - RNA, 19 nt, Artificial Sequence
  Description of Artificial Sequence: Synthetic oligonucleotide
uaaagccucauucaggauc

SEQ ID NO: 2120256 - RNA, 19 nt, Artificial Sequence
  Description of Artificial Sequence: Synthetic oligonucleotide
gucgccauucaccagagcg

SEQ ID NO: 2120257 - RNA, 19 nt, Artificial Sequence
  Description of Artificial Sequence: Synthetic oligonucleotide
acuagcagcacaaagccac

SEQ ID NO: 2120258 - RNA, 19 nt, Artificial Sequence
  Description of Artificial Sequence: Synthetic oligonucleotide
uacuacaacagcaucggcu

SEQ ID NO: 2120259 - RNA, 19 nt, Artificial Sequence
  Description of Artificial Sequence: Synthetic oligonucleotide
caguacuacaacagcaucg

SEQ ID NO: 2120260 - RNA, 19 nt, Artificial Sequence
  Description of Artificial Sequence: Synthetic oligonucleotide
ggugcagcugcacagaucg

SEQ ID NO: 2120261 - RNA, 19 nt, Artificial Sequence
  Description of Artificial Sequence: Synthetic oligonucleotide
aguacuacaacagcaucgg

SEQ ID NO: 2120262 - RNA, 19 nt, Artificial Sequence
  Description of Artificial Sequence: Synthetic oligonucleotide
acccacacccaccugauac

SEQ ID NO: 2120263 - RNA, 19 nt, Artificial Sequence
  Description of Artificial Sequence: Synthetic oligonucleotide
agaggggugucuaucaugc

SEQ ID NO: 2120264 - RNA, 19 nt, Artificial Sequence
  Description of Artificial Sequence: Synthetic oligonucleotide
uuagaagaugaaugucagg

SEQ ID NO: 2120265 - RNA, 19 nt, Artificial Sequence
  Description of Artificial Sequence: Synthetic oligonucleotide
uauccugcacagcagagcu

SEQ ID NO: 2120266 - RNA, 19 nt, Artificial Sequence
  Description of Artificial Sequence: Synthetic oligonucleotide
agugacuagcagcacaaag

SEQ ID NO: 2120267 - RNA, 19 nt, Artificial Sequence
  Description of Artificial Sequence: Synthetic oligonucleotide
caugcaugaaccugugccg

SEQ ID NO: 2120268 - RNA, 19 nt, Artificial Sequence
  Description of Artificial Sequence: Synthetic oligonucleotide
acaaguuccggggacaccg

SEQ ID NO: 2120269 - RNA, 19 nt, Artificial Sequence
  Description of Artificial Sequence: Synthetic oligonucleotide
guucauauccugcacagca

SEQ ID NO: 2120270 - RNA, 19 nt, Artificial Sequence
  Description of Artificial Sequence: Synthetic oligonucleotide
ugucuaucaugccugggug

SEQ ID NO: 2120271 - RNA, 19 nt, Artificial Sequence
  Description of Artificial Sequence: Synthetic oligonucleotide
ugugccggccacaaguucc

SEQ ID NO: 2120272 - RNA, 19 nt, Artificial Sequence
  Description of Artificial Sequence: Synthetic oligonucleotide
ucggauaaagccucauuca

SEQ ID NO: 2120273 - RNA, 19 nt, Artificial Sequence
  Description of Artificial Sequence: Synthetic oligonucleotide
cucauucaggaucagacuc

SEQ ID NO: 2120274 - RNA, 19 nt, Artificial Sequence
  Description of Artificial Sequence: Synthetic oligonucleotide
cugagcaguacuacaacag

SEQ ID NO: 2120275 - RNA, 19 nt, Artificial Sequence
  Description of Artificial Sequence: Synthetic oligonucleotide
ucauauccugcacagcaga

SEQ ID NO: 2120276 - RNA, 19 nt, Artificial Sequence
  Description of Artificial Sequence: Synthetic oligonucleotide
gacaacugucccgagaugc

SEQ ID NO: 2120277 - RNA, 19 nt, Artificial Sequence
  Description of Artificial Sequence: Synthetic oligonucleotide
uccuguccaguccaguccg

SEQ ID NO: 2120278 - RNA, 19 nt, Artificial Sequence
  Description of Artificial Sequence: Synthetic oligonucleotide
uucauauccugcacagcag

SEQ ID NO: 2120279 - RNA, 19 nt, Artificial Sequence
  Description of Artificial Sequence: Synthetic oligonucleotide
ucgccauucaccagagcgg

SEQ ID NO: 2120280 - RNA, 19 nt, Artificial Sequence
  Description of Artificial Sequence: Synthetic oligonucleotide
guuagaagaugaaugucag

SEQ ID NO: 2120281 - RNA, 19 nt, Artificial Sequence
  Description of Artificial Sequence: Synthetic oligonucleotide
accauuagggccagcaggc

SEQ ID NO: 2120282 - RNA, 19 nt, Artificial Sequence
  Description of Artificial Sequence: Synthetic oligonucleotide
cuuguugggacauggcuug

SEQ ID NO: 2120283 - RNA, 19 nt, Artificial Sequence
  Description of Artificial Sequence: Synthetic oligonucleotide
ugggacauggcuuggucag

SEQ ID NO: 2120284 - RNA, 19 nt, Artificial Sequence
  Description of Artificial Sequence: Synthetic oligonucleotide
augcuaaagaugcugcugu

SEQ ID NO: 2120285 - RNA, 19 nt, Artificial Sequence
  Description of Artificial Sequence: Synthetic oligonucleotide
agcaagacugagcccaagg

SEQ ID NO: 2120286 - RNA, 19 nt, Artificial Sequence
  Description of Artificial Sequence: Synthetic oligonucleotide
gucggauaaagccucauuc

SEQ ID NO: 2120287 - RNA, 19 nt, Artificial Sequence
  Description of Artificial Sequence: Synthetic oligonucleotide
guccaguccaguccgaggg

SEQ ID NO: 2120288 - RNA, 19 nt, Artificial Sequence
  Description of Artificial Sequence: Synthetic oligonucleotide
aaagccucauucaggauca

SEQ ID NO: 2120289 - RNA, 19 nt, Artificial Sequence
  Description of Artificial Sequence: Synthetic oligonucleotide
gugacuagcagcacaaagc

SEQ ID NO: 2120290 - RNA, 19 nt, Artificial Sequence
  Description of Artificial Sequence: Synthetic oligonucleotide
acacccaccugauacagca

SEQ ID NO: 2120291 - RNA, 19 nt, Artificial Sequence
  Description of Artificial Sequence: Synthetic oligonucleotide
ucaggcagggucagguuag

SEQ ID NO: 2120292 - RNA, 19 nt, Artificial Sequence
  Description of Artificial Sequence: Synthetic oligonucleotide
gagcacagugcccacggcg

SEQ ID NO: 2120293 - RNA, 19 nt, Artificial Sequence
  Description of Artificial Sequence: Synthetic oligonucleotide
cccgagaugcuaaagaugc

SEQ ID NO: 2120294 - RNA, 19 nt, Artificial Sequence
  Description of Artificial Sequence: Synthetic oligonucleotide
ucaccagaaccauuagggc

SEQ ID NO: 2120295 - RNA, 19 nt, Artificial Sequence
  Description of Artificial Sequence: Synthetic oligonucleotide
gcguaugcaguucauaucc

SEQ ID NO: 2120296 - RNA, 19 nt, Artificial Sequence
  Description of Artificial Sequence: Synthetic oligonucleotide
acucacauggccucagcug

SEQ ID NO: 2120297 - RNA, 19 nt, Artificial Sequence
  Description of Artificial Sequence: Synthetic oligonucleotide
ucaccugguuagcagcuag

SEQ ID NO: 2120298 - RNA, 19 nt, Artificial Sequence
  Description of Artificial Sequence: Synthetic oligonucleotide
aggucaugggaagaagggc

SEQ ID NO: 2120299 - RNA, 19 nt, Artificial Sequence
  Description of Artificial Sequence: Synthetic oligonucleotide
uaaagaugcugcuguuagc

SEQ ID NO: 2120300 - RNA, 19 nt, Artificial Sequence
  Description of Artificial Sequence: Synthetic oligonucleotide
agaugcugcuguuagcacu

SEQ ID NO: 2120301 - RNA, 19 nt, Artificial Sequence
  Description of Artificial Sequence: Synthetic oligonucleotide
agcagcuagaggcccaguc

SEQ ID NO: 2120302 - RNA, 19 nt, Artificial Sequence
  Description of Artificial Sequence: Synthetic oligonucleotide
caggccagugacuagcagc

SEQ ID NO: 2120303 - RNA, 19 nt, Artificial Sequence
  Description of Artificial Sequence: Synthetic oligonucleotide
accgcugcgcagcaaggcc

SEQ ID NO: 2120304 - RNA, 19 nt, Artificial Sequence
  Description of Artificial Sequence: Synthetic oligonucleotide
ggguaaugcccacagacag

SEQ ID NO: 2120305 - RNA, 19 nt, Artificial Sequence
  Description of Artificial Sequence: Synthetic oligonucleotide
agcugucaaugcugggucc

SEQ ID NO: 2120306 - RNA, 19 nt, Artificial Sequence
  Description of Artificial Sequence: Synthetic oligonucleotide
ucccgagaugcuaaagaug

SEQ ID NO: 2120307 - RNA, 19 nt, Artificial Sequence
  Description of Artificial Sequence: Synthetic oligonucleotide
acauggcuuggucaggcag

SEQ ID NO: 2120308 - RNA, 19 nt, Artificial Sequence
  Description of Artificial Sequence: Synthetic oligonucleotide
aagaugaaugucaggggcu

SEQ ID NO: 2120309 - RNA, 19 nt, Artificial Sequence
  Description of Artificial Sequence: Synthetic oligonucleotide
uguuuuggguggagggugc

SEQ ID NO: 2120310 - RNA, 19 nt, Artificial Sequence
  Description of Artificial Sequence: Synthetic oligonucleotide
accugauacagcagcaaac

SEQ ID NO: 2120311 - RNA, 19 nt, Artificial Sequence
  Description of Artificial Sequence: Synthetic oligonucleotide
agacugagcccaaggaagc

SEQ ID NO: 2120312 - RNA, 19 nt, Artificial Sequence
  Description of Artificial Sequence: Synthetic oligonucleotide
gaggcuuguugggacaugg

SEQ ID NO: 2120313 - RNA, 19 nt, Artificial Sequence
  Description of Artificial Sequence: Synthetic oligonucleotide
agaugaaugucaggggcuc

SEQ ID NO: 2120314 - RNA, 19 nt, Artificial Sequence
  Description of Artificial Sequence: Synthetic oligonucleotide
cugcuguuagcacuguggc

SEQ ID NO: 2120315 - RNA, 19 nt, Artificial Sequence
  Description of Artificial Sequence: Synthetic oligonucleotide
uccaguccgagggagcugg

SEQ ID NO: 2120316 - RNA, 19 nt, Artificial Sequence
  Description of Artificial Sequence: Synthetic oligonucleotide
gaugggacagaggacaguc

SEQ ID NO: 2120317 - RNA, 19 nt, Artificial Sequence
  Description of Artificial Sequence: Synthetic oligonucleotide
uggcguaugcaguucauau

SEQ ID NO: 2120318 - RNA, 19 nt, Artificial Sequence
  Description of Artificial Sequence: Synthetic oligonucleotide
agacgguccuguccagucc

SEQ ID NO: 2120319 - RNA, 19 nt, Artificial Sequence
  Description of Artificial Sequence: Synthetic oligonucleotide
accugugccggccacaagu

SEQ ID NO: 2120320 - RNA, 19 nt, Artificial Sequence
  Description of Artificial Sequence: Synthetic oligonucleotide
ugcucugccagcacaucug

SEQ ID NO: 2120321 - RNA, 19 nt, Artificial Sequence
  Description of Artificial Sequence: Synthetic oligonucleotide
aguucauauccugcacagc

SEQ ID NO: 2120322 - RNA, 19 nt, Artificial Sequence
  Description of Artificial Sequence: Synthetic oligonucleotide
uccugcacagcagagcuca

SEQ ID NO: 2120323 - RNA, 19 nt, Artificial Sequence
  Description of Artificial Sequence: Synthetic oligonucleotide
accaccauagcuccaccug

SEQ ID NO: 2120324 - RNA, 19 nt, Artificial Sequence
  Description of Artificial Sequence: Synthetic oligonucleotide
uugggacauggcuugguca

SEQ ID NO: 2120325 - RNA, 19 nt, Artificial Sequence
  Description of Artificial Sequence: Synthetic oligonucleotide
ucuagugcuggcugucucu

SEQ ID NO: 2120326 - RNA, 19 nt, Artificial Sequence
  Description of Artificial Sequence: Synthetic oligonucleotide
auccagacgguccugucca

SEQ ID NO: 2120327 - RNA, 19 nt, Artificial Sequence
  Description of Artificial Sequence: Synthetic oligonucleotide
ggaucagacucacauggcc

SEQ ID NO: 2120328 - RNA, 19 nt, Artificial Sequence
  Description of Artificial Sequence: Synthetic oligonucleotide
uguccacccacacccaccu

SEQ ID NO: 2120329 - RNA, 19 nt, Artificial Sequence
  Description of Artificial Sequence: Synthetic oligonucleotide
ggauaaagccucauucagg

SEQ ID NO: 2120330 - RNA, 19 nt, Artificial Sequence
  Description of Artificial Sequence: Synthetic oligonucleotide
accgagucaggucauggga

SEQ ID NO: 2120331 - RNA, 19 nt, Artificial Sequence
  Description of Artificial Sequence: Synthetic oligonucleotide
ggcuguuuuggguggaggg

SEQ ID NO: 2120332 - RNA, 19 nt, Artificial Sequence
  Description of Artificial Sequence: Synthetic oligonucleotide
ucuaucaugccuggguguc

SEQ ID NO: 2120333 - RNA, 19 nt, Artificial Sequence
  Description of Artificial Sequence: Synthetic oligonucleotide
augcaugaaccugugccgg

SEQ ID NO: 2120334 - RNA, 19 nt, Artificial Sequence
  Description of Artificial Sequence: Synthetic oligonucleotide
agacucacauggccucagc

SEQ ID NO: 2120335 - RNA, 19 nt, Artificial Sequence
  Description of Artificial Sequence: Synthetic oligonucleotide
cauccagacgguccugucc

SEQ ID NO: 2120336 - RNA, 19 nt, Artificial Sequence
  Description of Artificial Sequence: Synthetic oligonucleotide
uacaugcaugaaccugugc

SEQ ID NO: 2120337 - RNA, 19 nt, Artificial Sequence
  Description of Artificial Sequence: Synthetic oligonucleotide
auggccucagcugucaaug

SEQ ID NO: 2120338 - RNA, 19 nt, Artificial Sequence
  Description of Artificial Sequence: Synthetic oligonucleotide
uaucaugccuggguguccc

SEQ ID NO: 2120339 - RNA, 19 nt, Artificial Sequence
  Description of Artificial Sequence: Synthetic oligonucleotide
gacagucggauaaagccuc

SEQ ID NO: 2120340 - RNA, 19 nt, Artificial Sequence
  Description of Artificial Sequence: Synthetic oligonucleotide
aagccaggguaaugcccac

SEQ ID NO: 2120341 - RNA, 19 nt, Artificial Sequence
  Description of Artificial Sequence: Synthetic oligonucleotide
cagccaguggccgagcugg

SEQ ID NO: 2120342 - RNA, 19 nt, Artificial Sequence
  Description of Artificial Sequence: Synthetic oligonucleotide
aaugcuggagguggucuca

SEQ ID NO: 2120343 - RNA, 19 nt, Artificial Sequence
  Description of Artificial Sequence: Synthetic oligonucleotide
ggucucaugacgcuggcca

SEQ ID NO: 2120344 - RNA, 19 nt, Artificial Sequence
  Description of Artificial Sequence: Synthetic oligonucleotide
cugucucugucauccagac

SEQ ID NO: 2120345 - RNA, 19 nt, Artificial Sequence
  Description of Artificial Sequence: Synthetic oligonucleotide
aggaucagacucacauggc

SEQ ID NO: 2120346 - RNA, 19 nt, Artificial Sequence
  Description of Artificial Sequence: Synthetic oligonucleotide
acggcgagucgccauucac

SEQ ID NO: 2120347 - RNA, 19 nt, Artificial Sequence
  Description of Artificial Sequence: Synthetic oligonucleotide
augaaccugugccggccac

SEQ ID NO: 2120348 - RNA, 19 nt, Artificial Sequence
  Description of Artificial Sequence: Synthetic oligonucleotide
cuguuuuggguggagggug

SEQ ID NO: 2120349 - RNA, 19 nt, Artificial Sequence
  Description of Artificial Sequence: Synthetic oligonucleotide
gaaacagagcaaggagcgc

SEQ ID NO: 2120350 - RNA, 19 nt, Artificial Sequence
  Description of Artificial Sequence: Synthetic oligonucleotide
ugcuguuagcacuguggcu

SEQ ID NO: 2120351 - RNA, 19 nt, Artificial Sequence
  Description of Artificial Sequence: Synthetic oligonucleotide
accugguuagcagcuagag

SEQ ID NO: 2120352 - RNA, 19 nt, Artificial Sequence
  Description of Artificial Sequence: Synthetic oligonucleotide
caccgagucaggucauggg

SEQ ID NO: 2120353 - RNA, 19 nt, Artificial Sequence
  Description of Artificial Sequence: Synthetic oligonucleotide
ugcaugaaccugugccggc

SEQ ID NO: 2120354 - RNA, 19 nt, Artificial Sequence
  Description of Artificial Sequence: Synthetic oligonucleotide
acugaggcuuguugggaca

SEQ ID NO: 2120355 - RNA, 19 nt, Artificial Sequence
  Description of Artificial Sequence: Synthetic oligonucleotide
ucaugggaagaagggcucc

SEQ ID NO: 2120356 - RNA, 19 nt, Artificial Sequence
  Description of Artificial Sequence: Synthetic oligonucleotide
acaccgagucaggucaugg

SEQ ID NO: 2120357 - RNA, 19 nt, Artificial Sequence
  Description of Artificial Sequence: Synthetic oligonucleotide
agcagugccacgccaccug

SEQ ID NO: 2120358 - RNA, 19 nt, Artificial Sequence
  Description of Artificial Sequence: Synthetic oligonucleotide
agcaggcagagcacagugc

SEQ ID NO: 2120359 - RNA, 19 nt, Artificial Sequence
  Description of Artificial Sequence: Synthetic oligonucleotide
cagaggggugucuaucaug

SEQ ID NO: 2120360 - RNA, 19 nt, Artificial Sequence
  Description of Artificial Sequence: Synthetic oligonucleotide
cacugagcaguacuacaac

SEQ ID NO: 2120361 - RNA, 19 nt, Artificial Sequence
  Description of Artificial Sequence: Synthetic oligonucleotide
gggacaccgagucagguca

SEQ ID NO: 2120362 - RNA, 19 nt, Artificial Sequence
  Description of Artificial Sequence: Synthetic oligonucleotide
auuagggccagcaggcaga

SEQ ID NO: 2120363 - RNA, 19 nt, Artificial Sequence
  Description of Artificial Sequence: Synthetic oligonucleotide
gacgguccuguccagucca

SEQ ID NO: 2120364 - RNA, 19 nt, Artificial Sequence
  Description of Artificial Sequence: Synthetic oligonucleotide
gaggacaacugucccgaga

SEQ ID NO: 2120365 - RNA, 19 nt, Artificial Sequence
  Description of Artificial Sequence: Synthetic oligonucleotide
ucucugucauccagacggu

SEQ ID NO: 2120366 - RNA, 19 nt, Artificial Sequence
  Description of Artificial Sequence: Synthetic oligonucleotide
gccacugaggcuuguuggg

SEQ ID NO: 2120367 - RNA, 19 nt, Artificial Sequence
  Description of Artificial Sequence: Synthetic oligonucleotide
gcuggugccacaguggaug

SEQ ID NO: 2120368 - RNA, 19 nt, Artificial Sequence
  Description of Artificial Sequence: Synthetic oligonucleotide
aucaugccugggugucccc

SEQ ID NO: 2120369 - RNA, 19 nt, Artificial Sequence
  Description of Artificial Sequence: Synthetic oligonucleotide
ggagguggucucaugacgc

SEQ ID NO: 2120370 - RNA, 19 nt, Artificial Sequence
  Description of Artificial Sequence: Synthetic oligonucleotide
guugggacauggcuugguc

SEQ ID NO: 2120371 - RNA, 19 nt, Artificial Sequence
  Description of Artificial Sequence: Synthetic oligonucleotide
gucucaugacgcuggccag

SEQ ID NO: 2120372 - RNA, 19 nt, Artificial Sequence
  Description of Artificial Sequence: Synthetic oligonucleotide
cauucaccagagcggcugc

SEQ ID NO: 2120373 - RNA, 19 nt, Artificial Sequence
  Description of Artificial Sequence: Synthetic oligonucleotide
ugacgcuggccagaggaca

SEQ ID NO: 2120374 - RNA, 19 nt, Artificial Sequence
  Description of Artificial Sequence: Synthetic oligonucleotide
guacuacaacagcaucggc

SEQ ID NO: 2120375 - RNA, 19 nt, Artificial Sequence
  Description of Artificial Sequence: Synthetic oligonucleotide
agucgccauucaccagagc

SEQ ID NO: 2120376 - RNA, 19 nt, Artificial Sequence
  Description of Artificial Sequence: Synthetic oligonucleotide
auaaagccucauucaggau

SEQ ID NO: 2120377 - RNA, 19 nt, Artificial Sequence
  Description of Artificial Sequence: Synthetic oligonucleotide
agucggauaaagccucauu

SEQ ID NO: 2120378 - RNA, 19 nt, Artificial Sequence
  Description of Artificial Sequence: Synthetic oligonucleotide
ccagaggacaacugucccg

SEQ ID NO: 2120379 - RNA, 19 nt, Artificial Sequence
  Description of Artificial Sequence: Synthetic oligonucleotide
gugucuaucaugccugggu

SEQ ID NO: 2120380 - RNA, 19 nt, Artificial Sequence
  Description of Artificial Sequence: Synthetic oligonucleotide
agggucagguuagaagaug

SEQ ID NO: 2120381 - RNA, 19 nt, Artificial Sequence
  Description of Artificial Sequence: Synthetic oligonucleotide
caaugcuggagguggucuc

SEQ ID NO: 2120382 - RNA, 19 nt, Artificial Sequence
  Description of Artificial Sequence: Synthetic oligonucleotide
ggcuuggucaggcaggguc

SEQ ID NO: 2120383 - RNA, 19 nt, Artificial Sequence
  Description of Artificial Sequence: Synthetic oligonucleotide
ucagacucacauggccuca

SEQ ID NO: 2120384 - RNA, 19 nt, Artificial Sequence
  Description of Artificial Sequence: Synthetic oligonucleotide
cagacgguccuguccaguc

SEQ ID NO: 2120385 - RNA, 19 nt, Artificial Sequence
  Description of Artificial Sequence: Synthetic oligonucleotide
aggguaaugcccacagaca

SEQ ID NO: 2120386 - RNA, 19 nt, Artificial Sequence
  Description of Artificial Sequence: Synthetic oligonucleotide
cucaugacgcuggccagag

SEQ ID NO: 2120387 - RNA, 19 nt, Artificial Sequence
  Description of Artificial Sequence: Synthetic oligonucleotide
ugaaugucaggggcucaga

SEQ ID NO: 2120388 - RNA, 19 nt, Artificial Sequence
  Description of Artificial Sequence: Synthetic oligonucleotide
aguccaguccgagggagcu

SEQ ID NO: 2120389 - RNA, 19 nt, Artificial Sequence
  Description of Artificial Sequence: Synthetic oligonucleotide
guccgagggagcuggugcc

SEQ ID NO: 2120390 - RNA, 19 nt, Artificial Sequence
  Description of Artificial Sequence: Synthetic oligonucleotide
uguccccaucaccugguua

SEQ ID NO: 2120391 - RNA, 19 nt, Artificial Sequence
  Description of Artificial Sequence: Synthetic oligonucleotide
uagcagcacaaagccacug

SEQ ID NO: 2120392 - RNA, 19 nt, Artificial Sequence
  Description of Artificial Sequence: Synthetic oligonucleotide
cagcaaggccacgugcugg

SEQ ID NO: 2120393 - RNA, 19 nt, Artificial Sequence
  Description of Artificial Sequence: Synthetic oligonucleotide
ucugucagaugaggcuggc

SEQ ID NO: 2120394 - RNA, 19 nt, Artificial Sequence
  Description of Artificial Sequence: Synthetic oligonucleotide
ugcuaaagaugcugcuguu

SEQ ID NO: 2120395 - RNA, 19 nt, Artificial Sequence
  Description of Artificial Sequence: Synthetic oligonucleotide
ccacaguggaugaugggac

SEQ ID NO: 2120396 - RNA, 19 nt, Artificial Sequence
  Description of Artificial Sequence: Synthetic oligonucleotide
cuaucaugccugggugucc

SEQ ID NO: 2120397 - RNA, 19 nt, Artificial Sequence
  Description of Artificial Sequence: Synthetic oligonucleotide
uguugggacauggcuuggu

SEQ ID NO: 2120398 - RNA, 19 nt, Artificial Sequence
  Description of Artificial Sequence: Synthetic oligonucleotide
ggcgagucgccauucacca

SEQ ID NO: 2120399 - RNA, 19 nt, Artificial Sequence
  Description of Artificial Sequence: Synthetic oligonucleotide
auacaugcaugaaccugug

SEQ ID NO: 2120400 - RNA, 19 nt, Artificial Sequence
  Description of Artificial Sequence: Synthetic oligonucleotide
gacucacauggccucagcu

SEQ ID NO: 2120401 - RNA, 19 nt, Artificial Sequence
  Description of Artificial Sequence: Synthetic oligonucleotide
caccgccacagagaaacag

SEQ ID NO: 2120402 - RNA, 19 nt, Artificial Sequence
  Description of Artificial Sequence: Synthetic oligonucleotide
cacacccaccugauacagc

SEQ ID NO: 2120403 - RNA, 19 nt, Artificial Sequence
  Description of Artificial Sequence: Synthetic oligonucleotide
aacccagcagcaagacuga

SEQ ID NO: 2120404 - RNA, 19 nt, Artificial Sequence
  Description of Artificial Sequence: Synthetic oligonucleotide
gagucgccauucaccagag

SEQ ID NO: 2120405 - RNA, 19 nt, Artificial Sequence
  Description of Artificial Sequence: Synthetic oligonucleotide
caguggccgagcuggggcc

SEQ ID NO: 2120406 - RNA, 19 nt, Artificial Sequence
  Description of Artificial Sequence: Synthetic oligonucleotide
gguaaugcccacagacagc

SEQ ID NO: 2120407 - RNA, 19 nt, Artificial Sequence
  Description of Artificial Sequence: Synthetic oligonucleotide
cugccccacagccagccac

SEQ ID NO: 2120408 - RNA, 19 nt, Artificial Sequence
  Description of Artificial Sequence: Synthetic oligonucleotide
gcuggagguggucucauga

SEQ ID NO: 2120409 - RNA, 19 nt, Artificial Sequence
  Description of Artificial Sequence: Synthetic oligonucleotide
gcugggaccaccauagcuc

SEQ ID NO: 2120410 - RNA, 19 nt, Artificial Sequence
  Description of Artificial Sequence: Synthetic oligonucleotide
acaacugucccgagaugcu

SEQ ID NO: 2120411 - RNA, 19 nt, Artificial Sequence
  Description of Artificial Sequence: Synthetic oligonucleotide
ugaaccugugccggccaca

SEQ ID NO: 2120412 - RNA, 19 nt, Artificial Sequence
  Description of Artificial Sequence: Synthetic oligonucleotide
cucuagugcuggcugucuc

SEQ ID NO: 2120413 - RNA, 19 nt, Artificial Sequence
  Description of Artificial Sequence: Synthetic oligonucleotide
gcaguacuacaacagcauc

SEQ ID NO: 2120414 - RNA, 19 nt, Artificial Sequence
  Description of Artificial Sequence: Synthetic oligonucleotide
gaugaaugucaggggcuca

SEQ ID NO: 2120415 - RNA, 19 nt, Artificial Sequence
  Description of Artificial Sequence: Synthetic oligonucleotide
cuuggucaggcagggucag

SEQ ID NO: 2120416 - RNA, 19 nt, Artificial Sequence
  Description of Artificial Sequence: Synthetic oligonucleotide
ggcguaugcaguucauauc

SEQ ID NO: 2120417 - RNA, 19 nt, Artificial Sequence
  Description of Artificial Sequence: Synthetic oligonucleotide
gucaugggaagaagggcuc

SEQ ID NO: 2120418 - RNA, 19 nt, Artificial Sequence
  Description of Artificial Sequence: Synthetic oligonucleotide
ccaucucugucagaugagg

SEQ ID NO: 2120419 - RNA, 19 nt, Artificial Sequence
  Description of Artificial Sequence: Synthetic oligonucleotide
gguuagcagcuagaggccc

SEQ ID NO: 2120420 - RNA, 19 nt, Artificial Sequence
  Description of Artificial Sequence: Synthetic oligonucleotide
agggucaggccagugacua

SEQ ID NO: 2120421 - RNA, 19 nt, Artificial Sequence
  Description of Artificial Sequence: Synthetic oligonucleotide
cuauggcuaccaucaccuc

SEQ ID NO: 2120422 - RNA, 19 nt, Artificial Sequence
  Description of Artificial Sequence: Synthetic oligonucleotide
ugcuggagguggucucaug

SEQ ID NO: 2120423 - RNA, 19 nt, Artificial Sequence
  Description of Artificial Sequence: Synthetic oligonucleotide
gguccuguccaguccaguc

SEQ ID NO: 2120424 - RNA, 19 nt, Artificial Sequence
  Description of Artificial Sequence: Synthetic oligonucleotide
uguggcuguuuugggugga

SEQ ID NO: 2120425 - RNA, 19 nt, Artificial Sequence
  Description of Artificial Sequence: Synthetic oligonucleotide
acugucccgagaugcuaaa

SEQ ID NO: 2120426 - RNA, 19 nt, Artificial Sequence
  Description of Artificial Sequence: Synthetic oligonucleotide
uguccaggcuauggcuacc

SEQ ID NO: 2120427 - RNA, 19 nt, Artificial Sequence
  Description of Artificial Sequence: Synthetic oligonucleotide
gagucaggucaugggaaga

SEQ ID NO: 2120428 - RNA, 19 nt, Artificial Sequence
  Description of Artificial Sequence: Synthetic oligonucleotide
gugccggccacaaguuccg

SEQ ID NO: 2120429 - RNA, 19 nt, Artificial Sequence
  Description of Artificial Sequence: Synthetic oligonucleotide
agaggcccagucuccuccu

SEQ ID NO: 2120430 - RNA, 19 nt, Artificial Sequence
  Description of Artificial Sequence: Synthetic oligonucleotide
aguggccgagcuggggccg

SEQ ID NO: 2120431 - RNA, 19 nt, Artificial Sequence
  Description of Artificial Sequence: Synthetic oligonucleotide
gucccgagaugcuaaagau

SEQ ID NO: 2120432 - RNA, 19 nt, Artificial Sequence
  Description of Artificial Sequence: Synthetic oligonucleotide
cagcagcaagacugagccc

SEQ ID NO: 2120433 - RNA, 19 nt, Artificial Sequence
  Description of Artificial Sequence: Synthetic oligonucleotide
ugaggcuuguugggacaug

SEQ ID NO: 2120434 - RNA, 19 nt, Artificial Sequence
  Description of Artificial Sequence: Synthetic oligonucleotide
cgagaugcuaaagaugcug

SEQ ID NO: 2120435 - RNA, 19 nt, Artificial Sequence
  Description of Artificial Sequence: Synthetic oligonucleotide
agggugcagcugcacagau

SEQ ID NO: 2120436 - RNA, 19 nt, Artificial Sequence
  Description of Artificial Sequence: Synthetic oligonucleotide
ggucaugggaagaagggcu

SEQ ID NO: 2120437 - RNA, 19 nt, Artificial Sequence
  Description of Artificial Sequence: Synthetic oligonucleotide
ggagcgccggggcugcugg

SEQ ID NO: 2120438 - RNA, 19 nt, Artificial Sequence
  Description of Artificial Sequence: Synthetic oligonucleotide
gccagugacuagcagcaca

SEQ ID NO: 2120439 - RNA, 19 nt, Artificial Sequence
  Description of Artificial Sequence: Synthetic oligonucleotide
uuccggggacaccgaguca

SEQ ID NO: 2120440 - RNA, 19 nt, Artificial Sequence
  Description of Artificial Sequence: Synthetic oligonucleotide
gggucagguuagaagauga

SEQ ID NO: 2120441 - RNA, 19 nt, Artificial Sequence
  Description of Artificial Sequence: Synthetic oligonucleotide
ugggaccaccauagcucca

SEQ ID NO: 2120442 - RNA, 19 nt, Artificial Sequence
  Description of Artificial Sequence: Synthetic oligonucleotide
gucuaucaugccugggugu

SEQ ID NO: 2120443 - RNA, 19 nt, Artificial Sequence
  Description of Artificial Sequence: Synthetic oligonucleotide
cagacucacauggccucag

SEQ ID NO: 2120444 - RNA, 19 nt, Artificial Sequence
  Description of Artificial Sequence: Synthetic oligonucleotide
gacaccgagucaggucaug

SEQ ID NO: 2120445 - RNA, 19 nt, Artificial Sequence
  Description of Artificial Sequence: Synthetic oligonucleotide
cagugccacgccaccugcc

SEQ ID NO: 2120446 - RNA, 19 nt, Artificial Sequence
  Description of Artificial Sequence: Synthetic oligonucleotide
cacaaguuccggggacacc

SEQ ID NO: 2120447 - RNA, 19 nt, Artificial Sequence
  Description of Artificial Sequence: Synthetic oligonucleotide
cucuguccaggcuauggcu

SEQ ID NO: 2120448 - RNA, 19 nt, Artificial Sequence
  Description of Artificial Sequence: Synthetic oligonucleotide
agccucauucaggaucaga

SEQ ID NO: 2120449 - RNA, 19 nt, Artificial Sequence
  Description of Artificial Sequence: Synthetic oligonucleotide
gaccaccauagcuccaccu

SEQ ID NO: 2120450 - RNA, 19 nt, Artificial Sequence
  Description of Artificial Sequence: Synthetic oligonucleotide
ccaggcuauggcuaccauc

SEQ ID NO: 2120451 - RNA, 19 nt, Artificial Sequence
  Description of Artificial Sequence: Synthetic oligonucleotide
guggaggacagcagugcca

SEQ ID NO: 2120452 - RNA, 19 nt, Artificial Sequence
  Description of Artificial Sequence: Synthetic oligonucleotide
caugaaccugugccggcca

SEQ ID NO: 2120453 - RNA, 19 nt, Artificial Sequence
  Description of Artificial Sequence: Synthetic oligonucleotide
gagggugcagcugcacaga

SEQ ID NO: 2120454 - RNA, 19 nt, Artificial Sequence
  Description of Artificial Sequence: Synthetic oligonucleotide
caccgcugcgcagcaaggc

SEQ ID NO: 2120455 - RNA, 19 nt, Artificial Sequence
  Description of Artificial Sequence: Synthetic oligonucleotide
caaggagcgccggggcugc

SEQ ID NO: 2120456 - RNA, 19 nt, Artificial Sequence
  Description of Artificial Sequence: Synthetic oligonucleotide
gcagcaaggccacgugcug

SEQ ID NO: 2120457 - RNA, 19 nt, Artificial Sequence
  Description of Artificial Sequence: Synthetic oligonucleotide
ggggauacacauacaugca

SEQ ID NO: 2120458 - RNA, 19 nt, Artificial Sequence
  Description of Artificial Sequence: Synthetic oligonucleotide
gcaugaaccugugccggcc

SEQ ID NO: 2120459 - RNA, 19 nt, Artificial Sequence
  Description of Artificial Sequence: Synthetic oligonucleotide
gacgcuggccagaggacaa

SEQ ID NO: 2120460 - RNA, 19 nt, Artificial Sequence
  Description of Artificial Sequence: Synthetic oligonucleotide
cugugccggccacaaguuc

SEQ ID NO: 2120461 - RNA, 19 nt, Artificial Sequence
  Description of Artificial Sequence: Synthetic oligonucleotide
cucugucauccagacgguc

SEQ ID NO: 2120462 - RNA, 19 nt, Artificial Sequence
  Description of Artificial Sequence: Synthetic oligonucleotide
guggcuguuuuggguggag

SEQ ID NO: 2120463 - RNA, 19 nt, Artificial Sequence
  Description of Artificial Sequence: Synthetic oligonucleotide
ggacaacugucccgagaug

SEQ ID NO: 2120464 - RNA, 19 nt, Artificial Sequence
  Description of Artificial Sequence: Synthetic oligonucleotide
auucaccagagcggcugcu

SEQ ID NO: 2120465 - RNA, 19 nt, Artificial Sequence
  Description of Artificial Sequence: Synthetic oligonucleotide
gggaccaccauagcuccac

SEQ ID NO: 2120466 - RNA, 19 nt, Artificial Sequence
  Description of Artificial Sequence: Synthetic oligonucleotide
ccagugacuagcagcacaa

SEQ ID NO: 2120467 - RNA, 19 nt, Artificial Sequence
  Description of Artificial Sequence: Synthetic oligonucleotide
caccugguuagcagcuaga

SEQ ID NO: 2120468 - RNA, 19 nt, Artificial Sequence
  Description of Artificial Sequence: Synthetic oligonucleotide
ggggacaccgagucagguc

SEQ ID NO: 2120469 - RNA, 19 nt, Artificial Sequence
  Description of Artificial Sequence: Synthetic oligonucleotide
cccaccgcugcgcagcaag

SEQ ID NO: 2120470 - RNA, 19 nt, Artificial Sequence
  Description of Artificial Sequence: Synthetic oligonucleotide
ggacagucggauaaagccu

SEQ ID NO: 2120471 - RNA, 19 nt, Artificial Sequence
  Description of Artificial Sequence: Synthetic oligonucleotide
acauggccucagcugucaa

SEQ ID NO: 2120472 - RNA, 19 nt, Artificial Sequence
  Description of Artificial Sequence: Synthetic oligonucleotide
gcagugccacgccaccugc

SEQ ID NO: 2120473 - RNA, 19 nt, Artificial Sequence
  Description of Artificial Sequence: Synthetic oligonucleotide
acgugcugggccuggcgua

SEQ ID NO: 2120474 - RNA, 19 nt, Artificial Sequence
  Description of Artificial Sequence: Synthetic oligonucleotide
gcugucucugucauccaga

SEQ ID NO: 2120475 - RNA, 19 nt, Artificial Sequence
  Description of Artificial Sequence: Synthetic oligonucleotide
gcagcuagaggcccagucu

SEQ ID NO: 2120476 - RNA, 19 nt, Artificial Sequence
  Description of Artificial Sequence: Synthetic oligonucleotide
caaguuccggggacaccga

SEQ ID NO: 2120477 - RNA, 19 nt, Artificial Sequence
  Description of Artificial Sequence: Synthetic oligonucleotide
auucaggaucagacucaca

SEQ ID NO: 2120478 - RNA, 19 nt, Artificial Sequence
  Description of Artificial Sequence: Synthetic oligonucleotide
ccagagcggcugcuggugg

SEQ ID NO: 2120479 - RNA, 19 nt, Artificial Sequence
  Description of Artificial Sequence: Synthetic oligonucleotide
ugccggccacaaguuccgg

SEQ ID NO: 2120480 - RNA, 19 nt, Artificial Sequence
  Description of Artificial Sequence: Synthetic oligonucleotide
ggaccaccauagcuccacc

SEQ ID NO: 2120481 - RNA, 19 nt, Artificial Sequence
  Description of Artificial Sequence: Synthetic oligonucleotide
cuagcagcacaaagccacu

SEQ ID NO: 2120482 - RNA, 19 nt, Artificial Sequence
  Description of Artificial Sequence: Synthetic oligonucleotide
cggcgagucgccauucacc

SEQ ID NO: 2120483 - RNA, 19 nt, Artificial Sequence
  Description of Artificial Sequence: Synthetic oligonucleotide
cagcaagacugagcccaag

SEQ ID NO: 2120484 - RNA, 19 nt, Artificial Sequence
  Description of Artificial Sequence: Synthetic oligonucleotide
caccauagcuccaccugcu

SEQ ID NO: 2120485 - RNA, 19 nt, Artificial Sequence
  Description of Artificial Sequence: Synthetic oligonucleotide
cgagucgccauucaccaga

SEQ ID NO: 2120486 - RNA, 19 nt, Artificial Sequence
  Description of Artificial Sequence: Synthetic oligonucleotide
ggcccaccgccacagagaa

SEQ ID NO: 2120487 - RNA, 19 nt, Artificial Sequence
  Description of Artificial Sequence: Synthetic oligonucleotide
aucaccugguuagcagcua

SEQ ID NO: 2120488 - RNA, 19 nt, Artificial Sequence
  Description of Artificial Sequence: Synthetic oligonucleotide
gcuggccagaggacaacug

SEQ ID NO: 2120489 - RNA, 19 nt, Artificial Sequence
  Description of Artificial Sequence: Synthetic oligonucleotide
cgccauucaccagagcggc

SEQ ID NO: 2120490 - RNA, 19 nt, Artificial Sequence
  Description of Artificial Sequence: Synthetic oligonucleotide
ccgagucaggucaugggaa

SEQ ID NO: 2120491 - RNA, 19 nt, Artificial Sequence
  Description of Artificial Sequence: Synthetic oligonucleotide
gcgagucgccauucaccag

SEQ ID NO: 2120492 - RNA, 19 nt, Artificial Sequence
  Description of Artificial Sequence: Synthetic oligonucleotide
cagugcccacggcgagucg

SEQ ID NO: 2120493 - RNA, 19 nt, Artificial Sequence
  Description of Artificial Sequence: Synthetic oligonucleotide
ccaccgcugcgcagcaagg

SEQ ID NO: 2120494 - RNA, 19 nt, Artificial Sequence
  Description of Artificial Sequence: Synthetic oligonucleotide
uguuagcacuguggcuguu

SEQ ID NO: 2120495 - RNA, 19 nt, Artificial Sequence
  Description of Artificial Sequence: Synthetic oligonucleotide
caacugucccgagaugcua

SEQ ID NO: 2120496 - RNA, 19 nt, Artificial Sequence
  Description of Artificial Sequence: Synthetic oligonucleotide
ggucagguuagaagaugaa

SEQ ID NO: 2120497 - RNA, 19 nt, Artificial Sequence
  Description of Artificial Sequence: Synthetic oligonucleotide
gccuggcguaugcaguuca

SEQ ID NO: 2120498 - RNA, 19 nt, Artificial Sequence
  Description of Artificial Sequence: Synthetic oligonucleotide
acgguccuguccaguccag

SEQ ID NO: 2120499 - RNA, 19 nt, Artificial Sequence
  Description of Artificial Sequence: Synthetic oligonucleotide
cacgugcugggccuggcgu

SEQ ID NO: 2120500 - RNA, 19 nt, Artificial Sequence
  Description of Artificial Sequence: Synthetic oligonucleotide
gcuuguugggacauggcuu

SEQ ID NO: 2120501 - RNA, 19 nt, Artificial Sequence
  Description of Artificial Sequence: Synthetic oligonucleotide
guggccgagcuggggccgg

SEQ ID NO: 2120502 - RNA, 19 nt, Artificial Sequence
  Description of Artificial Sequence: Synthetic oligonucleotide
cagggucagguuagaagau

SEQ ID NO: 2120503 - RNA, 19 nt, Artificial Sequence
  Description of Artificial Sequence: Synthetic oligonucleotide
augcuggagguggucucau

SEQ ID NO: 2120504 - RNA, 19 nt, Artificial Sequence
  Description of Artificial Sequence: Synthetic oligonucleotide
caccugccccacagccagc

SEQ ID NO: 2120505 - RNA, 19 nt, Artificial Sequence
  Description of Artificial Sequence: Synthetic oligonucleotide
agccaguggccgagcuggg

SEQ ID NO: 2120506 - RNA, 19 nt, Artificial Sequence
  Description of Artificial Sequence: Synthetic oligonucleotide
ggcaaugcuggaggugguc

SEQ ID NO: 2120507 - RNA, 19 nt, Artificial Sequence
  Description of Artificial Sequence: Synthetic oligonucleotide
cuggcguaugcaguucaua

SEQ ID NO: 2120508 - RNA, 19 nt, Artificial Sequence
  Description of Artificial Sequence: Synthetic oligonucleotide
uagcagcuagaggcccagu

SEQ ID NO: 2120509 - RNA, 19 nt, Artificial Sequence
  Description of Artificial Sequence: Synthetic oligonucleotide
guuagcacuguggcuguuu

SEQ ID NO: 2120510 - RNA, 19 nt, Artificial Sequence
  Description of Artificial Sequence: Synthetic oligonucleotide
ccacgugcugggccuggcg

SEQ ID NO: 2120511 - RNA, 19 nt, Artificial Sequence
  Description of Artificial Sequence: Synthetic oligonucleotide
gcuguuuuggguggagggu

SEQ ID NO: 2120512 - RNA, 19 nt, Artificial Sequence
  Description of Artificial Sequence: Synthetic oligonucleotide
gccaguggccgagcugggg

SEQ ID NO: 2120513 - RNA, 19 nt, Artificial Sequence
  Description of Artificial Sequence: Synthetic oligonucleotide
cccacacccaccugauaca

SEQ ID NO: 2120514 - RNA, 19 nt, Artificial Sequence
  Description of Artificial Sequence: Synthetic oligonucleotide
cagaaccauuagggccagc

SEQ ID NO: 2120515 - RNA, 19 nt, Artificial Sequence
  Description of Artificial Sequence: Synthetic oligonucleotide
agcuggugccacaguggau

SEQ ID NO: 2120516 - RNA, 19 nt, Artificial Sequence
  Description of Artificial Sequence: Synthetic oligonucleotide
gcugucaaugcuggguccu

SEQ ID NO: 2120517 - RNA, 19 nt, Artificial Sequence
  Description of Artificial Sequence: Synthetic oligonucleotide
ccaucaccucucuagugcu

SEQ ID NO: 2120518 - RNA, 19 nt, Artificial Sequence
  Description of Artificial Sequence: Synthetic oligonucleotide
ccauagcuccaccugcucu

SEQ ID NO: 2120519 - RNA, 19 nt, Artificial Sequence
  Description of Artificial Sequence: Synthetic oligonucleotide
caugccuggguguccccau

SEQ ID NO: 2120520 - RNA, 19 nt, Artificial Sequence
  Description of Artificial Sequence: Synthetic oligonucleotide
cagugacuagcagcacaaa

SEQ ID NO: 2120521 - RNA, 19 nt, Artificial Sequence
  Description of Artificial Sequence: Synthetic oligonucleotide
aaggagcgccggggcugcu

SEQ ID NO: 2120522 - RNA, 19 nt, Artificial Sequence
  Description of Artificial Sequence: Synthetic oligonucleotide
aggccacgugcugggccug

SEQ ID NO: 2120523 - RNA, 19 nt, Artificial Sequence
  Description of Artificial Sequence: Synthetic oligonucleotide
cugaggcuuguugggacau

SEQ ID NO: 2120524 - RNA, 19 nt, Artificial Sequence
  Description of Artificial Sequence: Synthetic oligonucleotide
cugcgcagcaaggccacgu

SEQ ID NO: 2120525 - RNA, 19 nt, Artificial Sequence
  Description of Artificial Sequence: Synthetic oligonucleotide
gcugcgcagcaaggccacg

SEQ ID NO: 2120526 - RNA, 19 nt, Artificial Sequence
  Description of Artificial Sequence: Synthetic oligonucleotide
cgcugcgcagcaaggccac

SEQ ID NO: 2120527 - RNA, 19 nt, Artificial Sequence
  Description of Artificial Sequence: Synthetic oligonucleotide
ggcuaccaucaccucucua

SEQ ID NO: 2120528 - RNA, 19 nt, Artificial Sequence
  Description of Artificial Sequence: Synthetic oligonucleotide
ggccagugacuagcagcac

SEQ ID NO: 2120529 - RNA, 19 nt, Artificial Sequence
  Description of Artificial Sequence: Synthetic oligonucleotide
gcgccggggcugcugggac

SEQ ID NO: 2120530 - RNA, 19 nt, Artificial Sequence
  Description of Artificial Sequence: Synthetic oligonucleotide
gcagcaagacugagcccaa

SEQ ID NO: 2120531 - RNA, 19 nt, Artificial Sequence
  Description of Artificial Sequence: Synthetic oligonucleotide
ccucucuagugcuggcugu

SEQ ID NO: 2120532 - RNA, 19 nt, Artificial Sequence
  Description of Artificial Sequence: Synthetic oligonucleotide
ggcucagaggggugucuau

SEQ ID NO: 2120533 - RNA, 19 nt, Artificial Sequence
  Description of Artificial Sequence: Synthetic oligonucleotide
ggccuggcguaugcaguuc

SEQ ID NO: 2120534 - RNA, 19 nt, Artificial Sequence
  Description of Artificial Sequence: Synthetic oligonucleotide
cacccacacccaccugaua

SEQ ID NO: 2120535 - RNA, 19 nt, Artificial Sequence
  Description of Artificial Sequence: Synthetic oligonucleotide
cagcagugccacgccaccu

SEQ ID NO: 2120536 - RNA, 19 nt, Artificial Sequence
  Description of Artificial Sequence: Synthetic oligonucleotide
cagucggauaaagccucau

SEQ ID NO: 2120537 - RNA, 19 nt, Artificial Sequence
  Description of Artificial Sequence: Synthetic oligonucleotide
gggcucagaggggugucua

SEQ ID NO: 2120538 - RNA, 19 nt, Artificial Sequence
  Description of Artificial Sequence: Synthetic oligonucleotide
gccacgugcugggccuggc

SEQ ID NO: 2120539 - RNA, 19 nt, Artificial Sequence
  Description of Artificial Sequence: Synthetic oligonucleotide
ccgagaugcuaaagaugcu

SEQ ID NO: 2120540 - RNA, 19 nt, Artificial Sequence
  Description of Artificial Sequence: Synthetic oligonucleotide
ccccaucaccugguuagca

SEQ ID NO: 2120541 - RNA, 19 nt, Artificial Sequence
  Description of Artificial Sequence: Synthetic oligonucleotide
ccaccgccacagagaaaca

SEQ ID NO: 2120542 - RNA, 19 nt, Artificial Sequence
  Description of Artificial Sequence: Synthetic oligonucleotide
ccacggcgagucgccauuc

SEQ ID NO: 2120543 - RNA, 19 nt, Artificial Sequence
  Description of Artificial Sequence: Synthetic oligonucleotide
ccugugccggccacaaguu

SEQ ID NO: 2120544 - RNA, 19 nt, Artificial Sequence
  Description of Artificial Sequence: Synthetic oligonucleotide
ccuggcguaugcaguucau

SEQ ID NO: 2120545 - RNA, 19 nt, Artificial Sequence
  Description of Artificial Sequence: Synthetic oligonucleotide
gccacgccaccugccccac

SEQ ID NO: 2120546 - RNA, 19 nt, Artificial Sequence
  Description of Artificial Sequence: Synthetic oligonucleotide
cggccacaaguuccgggga

SEQ ID NO: 2120547 - RNA, 19 nt, Artificial Sequence
  Description of Artificial Sequence: Synthetic oligonucleotide
ggacaccgagucaggucau

SEQ ID NO: 2120548 - RNA, 19 nt, Artificial Sequence
  Description of Artificial Sequence: Synthetic oligonucleotide
ccagacgguccuguccagu

SEQ ID NO: 2120549 - RNA, 19 nt, Artificial Sequence
  Description of Artificial Sequence: Synthetic oligonucleotide
gcccacggcgagucgccau

SEQ ID NO: 2120550 - RNA, 19 nt, Artificial Sequence
  Description of Artificial Sequence: Synthetic oligonucleotide
cccacggcgagucgccauu

SEQ ID NO: 2120551 - RNA, 19 nt, Artificial Sequence
  Description of Artificial Sequence: Synthetic oligonucleotide
gcccaccgccacagagaaa

SEQ ID NO: 2120552 - RNA, 19 nt, Artificial Sequence
  Description of Artificial Sequence: Synthetic oligonucleotide
cggggacaccgagucaggu

SEQ ID NO: 2120553 - RNA, 19 nt, Artificial Sequence
  Description of Artificial Sequence: Synthetic oligonucleotide
aaacuuuuccauuaguugc

SEQ ID NO: 2120554 - RNA, 19 nt, Artificial Sequence
  Description of Artificial Sequence: Synthetic oligonucleotide
aaagucaggacucucaccc

SEQ ID NO: 2120555 - RNA, 19 nt, Artificial Sequence
  Description of Artificial Sequence: Synthetic oligonucleotide
uguuauauggauuucaaag

SEQ ID NO: 2120556 - RNA, 19 nt, Artificial Sequence
  Description of Artificial Sequence: Synthetic oligonucleotide
aauuggauaaccaucagac

SEQ ID NO: 2120557 - RNA, 19 nt, Artificial Sequence
  Description of Artificial Sequence: Synthetic oligonucleotide
aaaucuaagucaucuugcc

SEQ ID NO: 2120558 - RNA, 19 nt, Artificial Sequence
  Description of Artificial Sequence: Synthetic oligonucleotide
ucuagugucuucaucaucc

SEQ ID NO: 2120559 - RNA, 19 nt, Artificial Sequence
  Description of Artificial Sequence: Synthetic oligonucleotide
aucuaagucaucuugccgg

SEQ ID NO: 2120560 - RNA, 19 nt, Artificial Sequence
  Description of Artificial Sequence: Synthetic oligonucleotide
uaaacuuuuccauuaguug

SEQ ID NO: 2120561 - RNA, 19 nt, Artificial Sequence
  Description of Artificial Sequence: Synthetic oligonucleotide
aaucuaagucaucuugccg

SEQ ID NO: 2120562 - RNA, 19 nt, Artificial Sequence
  Description of Artificial Sequence: Synthetic oligonucleotide
uucacguaggucaggaugg

SEQ ID NO: 2120563 - RNA, 19 nt, Artificial Sequence
  Description of Artificial Sequence: Synthetic oligonucleotide
aguucugaugcacuggucg

SEQ ID NO: 2120564 - RNA, 19 nt, Artificial Sequence
  Description of Artificial Sequence: Synthetic oligonucleotide
ugugucuggagccugcucg

SEQ ID NO: 2120565 - RNA, 19 nt, Artificial Sequence
  Description of Artificial Sequence: Synthetic oligonucleotide
auccaaguuaaacuuuucc

SEQ ID NO: 2120566 - RNA, 19 nt, Artificial Sequence
  Description of Artificial Sequence: Synthetic oligonucleotide
cuaagaaggaggaaguggc

SEQ ID NO: 2120567 - RNA, 19 nt, Artificial Sequence
  Description of Artificial Sequence: Synthetic oligonucleotide
uucuccuucacguagguca

SEQ ID NO: 2120568 - RNA, 19 nt, Artificial Sequence
  Description of Artificial Sequence: Synthetic oligonucleotide
uuguccauuauuucuuucg

SEQ ID NO: 2120569 - RNA, 19 nt, Artificial Sequence
  Description of Artificial Sequence: Synthetic oligonucleotide
ucacaagauguuuauauca

SEQ ID NO: 2120570 - RNA, 19 nt, Artificial Sequence
  Description of Artificial Sequence: Synthetic oligonucleotide
uuauauggauuucaaaguc

SEQ ID NO: 2120571 - RNA, 19 nt, Artificial Sequence
  Description of Artificial Sequence: Synthetic oligonucleotide
ucuaagaaggaggaagugg

SEQ ID NO: 2120572 - RNA, 19 nt, Artificial Sequence
  Description of Artificial Sequence: Synthetic oligonucleotide
agauguuuauaucaucauc

SEQ ID NO: 2120573 - RNA, 19 nt, Artificial Sequence
  Description of Artificial Sequence: Synthetic oligonucleotide
aacuuuuccauuaguugcc

SEQ ID NO: 2120574 - RNA, 19 nt, Artificial Sequence
  Description of Artificial Sequence: Synthetic oligonucleotide
aaauuggauaaccaucaga

SEQ ID NO: 2120575 - RNA, 19 nt, Artificial Sequence
  Description of Artificial Sequence: Synthetic oligonucleotide
uguuuauaucaucaucugc

SEQ ID NO: 2120576 - RNA, 19 nt, Artificial Sequence
  Description of Artificial Sequence: Synthetic oligonucleotide
ugauuggucauucuccuug

SEQ ID NO: 2120577 - RNA, 19 nt, Artificial Sequence
  Description of Artificial Sequence: Synthetic oligonucleotide
aauccuccgagcaacauuc

SEQ ID NO: 2120578 - RNA, 19 nt, Artificial Sequence
  Description of Artificial Sequence: Synthetic oligonucleotide
uauauggauuucaaaguca

SEQ ID NO: 2120579 - RNA, 19 nt, Artificial Sequence
  Description of Artificial Sequence: Synthetic oligonucleotide
uugaccaacgcauuucuag

SEQ ID NO: 2120580 - RNA, 19 nt, Artificial Sequence
  Description of Artificial Sequence: Synthetic oligonucleotide
auuggauaaccaucagacc

SEQ ID NO: 2120581 - RNA, 19 nt, Artificial Sequence
  Description of Artificial Sequence: Synthetic oligonucleotide
uuaaacuuuuccauuaguu

SEQ ID NO: 2120582 - RNA, 19 nt, Artificial Sequence
  Description of Artificial Sequence: Synthetic oligonucleotide
ucuucaaacucccgagugg

SEQ ID NO: 2120583 - RNA, 19 nt, Artificial Sequence
  Description of Artificial Sequence: Synthetic oligonucleotide
caaaucuaagucaucuugc

SEQ ID NO: 2120584 - RNA, 19 nt, Artificial Sequence
  Description of Artificial Sequence: Synthetic oligonucleotide
ucuaggauguacugcgugg

SEQ ID NO: 2120585 - RNA, 19 nt, Artificial Sequence
  Description of Artificial Sequence: Synthetic oligonucleotide
ugauuuugauggcaguucc

SEQ ID NO: 2120586 - RNA, 19 nt, Artificial Sequence
  Description of Artificial Sequence: Synthetic oligonucleotide
uuucuuucggaauucaauc

SEQ ID NO: 2120587 - RNA, 19 nt, Artificial Sequence
  Description of Artificial Sequence: Synthetic oligonucleotide
uguguggaaacuuuuggcu

SEQ ID NO: 2120588 - RNA, 19 nt, Artificial Sequence
  Description of Artificial Sequence: Synthetic oligonucleotide
gacucuaagaaggaggaag

SEQ ID NO: 2120589 - RNA, 19 nt, Artificial Sequence
  Description of Artificial Sequence: Synthetic oligonucleotide
aaggcguugccugugaccg

SEQ ID NO: 2120590 - RNA, 19 nt, Artificial Sequence
  Description of Artificial Sequence: Synthetic oligonucleotide
cuugccgggaccaaauugg

SEQ ID NO: 2120591 - RNA, 19 nt, Artificial Sequence
  Description of Artificial Sequence: Synthetic oligonucleotide
aggacucucacccaccacg

SEQ ID NO: 2120592 - RNA, 19 nt, Artificial Sequence
  Description of Artificial Sequence: Synthetic oligonucleotide
cuuguguggaaacuuuugg

SEQ ID NO: 2120593 - RNA, 19 nt, Artificial Sequence
  Description of Artificial Sequence: Synthetic oligonucleotide
cagucuaggauguacugcg

SEQ ID NO: 2120594 - RNA, 19 nt, Artificial Sequence
  Description of Artificial Sequence: Synthetic oligonucleotide
uucuuucggaauucaaucc

SEQ ID NO: 2120595 - RNA, 19 nt, Artificial Sequence
  Description of Artificial Sequence: Synthetic oligonucleotide
uucuucaaacucccgagug

SEQ ID NO: 2120596 - RNA, 19 nt, Artificial Sequence
  Description of Artificial Sequence: Synthetic oligonucleotide
ucuuucggaauucaauccu

SEQ ID NO: 2120597 - RNA, 19 nt, Artificial Sequence
  Description of Artificial Sequence: Synthetic oligonucleotide
auggauuucaaagucagga

SEQ ID NO: 2120598 - RNA, 19 nt, Artificial Sequence
  Description of Artificial Sequence: Synthetic oligonucleotide
gauguuuauaucaucaucu

SEQ ID NO: 2120599 - RNA, 19 nt, Artificial Sequence
  Description of Artificial Sequence: Synthetic oligonucleotide
ucuaagucaucuugccggg

SEQ ID NO: 2120600 - RNA, 19 nt, Artificial Sequence
  Description of Artificial Sequence: Synthetic oligonucleotide
uuguguggaaacuuuuggc

SEQ ID NO: 2120601 - RNA, 19 nt, Artificial Sequence
  Description of Artificial Sequence: Synthetic oligonucleotide
uucauuaucuuguccauua

SEQ ID NO: 2120602 - RNA, 19 nt, Artificial Sequence
  Description of Artificial Sequence: Synthetic oligonucleotide
uccuuuugcaaaucuaagu

SEQ ID NO: 2120603 - RNA, 19 nt, Artificial Sequence
  Description of Artificial Sequence: Synthetic oligonucleotide
uauggauuucaaagucagg

SEQ ID NO: 2120604 - RNA, 19 nt, Artificial Sequence
  Description of Artificial Sequence: Synthetic oligonucleotide
uuccgcuugagcuucuggg

SEQ ID NO: 2120605 - RNA, 19 nt, Artificial Sequence
  Description of Artificial Sequence: Synthetic oligonucleotide
accaaauuggauaaccauc

SEQ ID NO: 2120606 - RNA, 19 nt, Artificial Sequence
  Description of Artificial Sequence: Synthetic oligonucleotide
aguuaaacuuuuccauuag

SEQ ID NO: 2120607 - RNA, 19 nt, Artificial Sequence
  Description of Artificial Sequence: Synthetic oligonucleotide
uuuugaccaacgcauuucu

SEQ ID NO: 2120608 - RNA, 19 nt, Artificial Sequence
  Description of Artificial Sequence: Synthetic oligonucleotide
uuucggaauucaauccucc

SEQ ID NO: 2120609 - RNA, 19 nt, Artificial Sequence
  Description of Artificial Sequence: Synthetic oligonucleotide
aauucaauccuccgagcaa

SEQ ID NO: 2120610 - RNA, 19 nt, Artificial Sequence
  Description of Artificial Sequence: Synthetic oligonucleotide
auaaccaucagaccuccga

SEQ ID NO: 2120611 - RNA, 19 nt, Artificial Sequence
  Description of Artificial Sequence: Synthetic oligonucleotide
aagauguuuauaucaucau

SEQ ID NO: 2120612 - RNA, 19 nt, Artificial Sequence
  Description of Artificial Sequence: Synthetic oligonucleotide
acagauccaaguuaaacuu

SEQ ID NO: 2120613 - RNA, 19 nt, Artificial Sequence
  Description of Artificial Sequence: Synthetic oligonucleotide
uguucucuuguucuguggu

SEQ ID NO: 2120614 - RNA, 19 nt, Artificial Sequence
  Description of Artificial Sequence: Synthetic oligonucleotide
gauuggucauucuccuugg

SEQ ID NO: 2120615 - RNA, 19 nt, Artificial Sequence
  Description of Artificial Sequence: Synthetic oligonucleotide
ucaaagucaggacucucac

SEQ ID NO: 2120616 - RNA, 19 nt, Artificial Sequence
  Description of Artificial Sequence: Synthetic oligonucleotide
auauggauuucaaagucag

SEQ ID NO: 2120617 - RNA, 19 nt, Artificial Sequence
  Description of Artificial Sequence: Synthetic oligonucleotide
uugcaaaucuaagucaucu

SEQ ID NO: 2120618 - RNA, 19 nt, Artificial Sequence
  Description of Artificial Sequence: Synthetic oligonucleotide
uguggaaacuuuuggcucu

SEQ ID NO: 2120619 - RNA, 19 nt, Artificial Sequence
  Description of Artificial Sequence: Synthetic oligonucleotide
auguuuauaucaucaucug

SEQ ID NO: 2120620 - RNA, 19 nt, Artificial Sequence
  Description of Artificial Sequence: Synthetic oligonucleotide
cuucacguaggucaggaug

SEQ ID NO: 2120621 - RNA, 19 nt, Artificial Sequence
  Description of Artificial Sequence: Synthetic oligonucleotide
ugcucggucagucccagcc

SEQ ID NO: 2120622 - RNA, 19 nt, Artificial Sequence
  Description of Artificial Sequence: Synthetic oligonucleotide
uucggaauucaauccuccg

SEQ ID NO: 2120623 - RNA, 19 nt, Artificial Sequence
  Description of Artificial Sequence: Synthetic oligonucleotide
ucggaauucaauccuccga

SEQ ID NO: 2120624 - RNA, 19 nt, Artificial Sequence
  Description of Artificial Sequence: Synthetic oligonucleotide
uccgcguucguguagguga

SEQ ID NO: 2120625 - RNA, 19 nt, Artificial Sequence
  Description of Artificial Sequence: Synthetic oligonucleotide
ggaucaucaucacacauug

SEQ ID NO: 2120626 - RNA, 19 nt, Artificial Sequence
  Description of Artificial Sequence: Synthetic oligonucleotide
augauuuugauggcaguuc

SEQ ID NO: 2120627 - RNA, 19 nt, Artificial Sequence
  Description of Artificial Sequence: Synthetic oligonucleotide
agaaggaggaaguggccuc

SEQ ID NO: 2120628 - RNA, 19 nt, Artificial Sequence
  Description of Artificial Sequence: Synthetic oligonucleotide
ucuugccgggaccaaauug

SEQ ID NO: 2120629 - RNA, 19 nt, Artificial Sequence
  Description of Artificial Sequence: Synthetic oligonucleotide
auaguucugaugcacuggu

SEQ ID NO: 2120630 - RNA, 19 nt, Artificial Sequence
  Description of Artificial Sequence: Synthetic oligonucleotide
uuaucuuguccauuauuuc

SEQ ID NO: 2120631 - RNA, 19 nt, Artificial Sequence
  Description of Artificial Sequence: Synthetic oligonucleotide
uaagucaucuugccgggac

SEQ ID NO: 2120632 - RNA, 19 nt, Artificial Sequence
  Description of Artificial Sequence: Synthetic oligonucleotide
acugucgacagauccaagu

SEQ ID NO: 2120633 - RNA, 19 nt, Artificial Sequence
  Description of Artificial Sequence: Synthetic oligonucleotide
guacuugugcuccuggccc

SEQ ID NO: 2120634 - RNA, 19 nt, Artificial Sequence
  Description of Artificial Sequence: Synthetic oligonucleotide
uggucgguuuccaugguca

SEQ ID NO: 2120635 - RNA, 19 nt, Artificial Sequence
  Description of Artificial Sequence: Synthetic oligonucleotide
uggauaaccaucagaccuc

SEQ ID NO: 2120636 - RNA, 19 nt, Artificial Sequence
  Description of Artificial Sequence: Synthetic oligonucleotide
cacuggucgguuuccaugg

SEQ ID NO: 2120637 - RNA, 19 nt, Artificial Sequence
  Description of Artificial Sequence: Synthetic oligonucleotide
aggauggccacgucguccg

SEQ ID NO: 2120638 - RNA, 19 nt, Artificial Sequence
  Description of Artificial Sequence: Synthetic oligonucleotide
ucuucaggcaagucuggug

SEQ ID NO: 2120639 - RNA, 19 nt, Artificial Sequence
  Description of Artificial Sequence: Synthetic oligonucleotide
uccgaccagacucuaagaa

SEQ ID NO: 2120640 - RNA, 19 nt, Artificial Sequence
  Description of Artificial Sequence: Synthetic oligonucleotide
cuucaaacucccgaguggc

SEQ ID NO: 2120641 - RNA, 19 nt, Artificial Sequence
  Description of Artificial Sequence: Synthetic oligonucleotide
ugaccaacgcauuucuagu

SEQ ID NO: 2120642 - RNA, 19 nt, Artificial Sequence
  Description of Artificial Sequence: Synthetic oligonucleotide
caucgcuuuccacaaggcg

SEQ ID NO: 2120643 - RNA, 19 nt, Artificial Sequence
  Description of Artificial Sequence: Synthetic oligonucleotide
agccugcucggucaguccc

SEQ ID NO: 2120644 - RNA, 19 nt, Artificial Sequence
  Description of Artificial Sequence: Synthetic oligonucleotide
aggugcuugagguagcggu

SEQ ID NO: 2120645 - RNA, 19 nt, Artificial Sequence
  Description of Artificial Sequence: Synthetic oligonucleotide
agcgagcucuucuccaucg

SEQ ID NO: 2120646 - RNA, 19 nt, Artificial Sequence
  Description of Artificial Sequence: Synthetic oligonucleotide
uuguuauauggauuucaaa

SEQ ID NO: 2120647 - RNA, 19 nt, Artificial Sequence
  Description of Artificial Sequence: Synthetic oligonucleotide
cuuguucugugguuccccg

SEQ ID NO: 2120648 - RNA, 19 nt, Artificial Sequence
  Description of Artificial Sequence: Synthetic oligonucleotide
ccagacucuaagaaggagg

SEQ ID NO: 2120649 - RNA, 19 nt, Artificial Sequence
  Description of Artificial Sequence: Synthetic oligonucleotide
guucguguaggugaggcgc

SEQ ID NO: 2120650 - RNA, 19 nt, Artificial Sequence
  Description of Artificial Sequence: Synthetic oligonucleotide
cauaguucugaugcacugg

SEQ ID NO: 2120651 - RNA, 19 nt, Artificial Sequence
  Description of Artificial Sequence: Synthetic oligonucleotide
guagcgguccuugagagac

SEQ ID NO: 2120652 - RNA, 19 nt, Artificial Sequence
  Description of Artificial Sequence: Synthetic oligonucleotide
uuggucauucuccuugguc

SEQ ID NO: 2120653 - RNA, 19 nt, Artificial Sequence
  Description of Artificial Sequence: Synthetic oligonucleotide
gaccaacgcauuucuagug

SEQ ID NO: 2120654 - RNA, 19 nt, Artificial Sequence
  Description of Artificial Sequence: Synthetic oligonucleotide
ccuuuugcaaaucuaaguc

SEQ ID NO: 2120655 - RNA, 19 nt, Artificial Sequence
  Description of Artificial Sequence: Synthetic oligonucleotide
uuucaggaaggccugugua

SEQ ID NO: 2120656 - RNA, 19 nt, Artificial Sequence
  Description of Artificial Sequence: Synthetic oligonucleotide
ugucgacagauccaaguua

SEQ ID NO: 2120657 - RNA, 19 nt, Artificial Sequence
  Description of Artificial Sequence: Synthetic oligonucleotide
aagccccgggcuuuguguc

SEQ ID NO: 2120658 - RNA, 19 nt, Artificial Sequence
  Description of Artificial Sequence: Synthetic oligonucleotide
gaggcgcccggucagaggc

SEQ ID NO: 2120659 - RNA, 19 nt, Artificial Sequence
  Description of Artificial Sequence: Synthetic oligonucleotide
aucgcuuuccacaaggcgu

SEQ ID NO: 2120660 - RNA, 19 nt, Artificial Sequence
  Description of Artificial Sequence: Synthetic oligonucleotide
cuuucggaauucaauccuc

SEQ ID NO: 2120661 - RNA, 19 nt, Artificial Sequence
  Description of Artificial Sequence: Synthetic oligonucleotide
auuucuuucggaauucaau

SEQ ID NO: 2120662 - RNA, 19 nt, Artificial Sequence
  Description of Artificial Sequence: Synthetic oligonucleotide
cuuuccacaaggcguugcc

SEQ ID NO: 2120663 - RNA, 19 nt, Artificial Sequence
  Description of Artificial Sequence: Synthetic oligonucleotide
ugguuccccgcuauccgcg

SEQ ID NO: 2120664 - RNA, 19 nt, Artificial Sequence
  Description of Artificial Sequence: Synthetic oligonucleotide
gucacaagauguuuauauc

SEQ ID NO: 2120665 - RNA, 19 nt, Artificial Sequence
  Description of Artificial Sequence: Synthetic oligonucleotide
caaagucaggacucucacc

SEQ ID NO: 2120666 - RNA, 19 nt, Artificial Sequence
  Description of Artificial Sequence: Synthetic oligonucleotide
acggcuucuucaaacuccc

SEQ ID NO: 2120667 - RNA, 19 nt, Artificial Sequence
  Description of Artificial Sequence: Synthetic oligonucleotide
cauccuuuugcaaaucuaa

SEQ ID NO: 2120668 - RNA, 19 nt, Artificial Sequence
  Description of Artificial Sequence: Synthetic oligonucleotide
cuuuuccauuaguugccgg

SEQ ID NO: 2120669 - RNA, 19 nt, Artificial Sequence
  Description of Artificial Sequence: Synthetic oligonucleotide
uaggauguacugcguggag

SEQ ID NO: 2120670 - RNA, 19 nt, Artificial Sequence
  Description of Artificial Sequence: Synthetic oligonucleotide
accaacgcauuucuagugu

SEQ ID NO: 2120671 - RNA, 19 nt, Artificial Sequence
  Description of Artificial Sequence: Synthetic oligonucleotide
acucucacccaccacggcu

SEQ ID NO: 2120672 - RNA, 19 nt, Artificial Sequence
  Description of Artificial Sequence: Synthetic oligonucleotide
cagacucuaagaaggagga

SEQ ID NO: 2120673 - RNA, 19 nt, Artificial Sequence
  Description of Artificial Sequence: Synthetic oligonucleotide
caaauuggauaaccaucag

SEQ ID NO: 2120674 - RNA, 19 nt, Artificial Sequence
  Description of Artificial Sequence: Synthetic oligonucleotide
auuaguugccggaugauuu

SEQ ID NO: 2120675 - RNA, 19 nt, Artificial Sequence
  Description of Artificial Sequence: Synthetic oligonucleotide
ugcugcgugagcgagcucu

SEQ ID NO: 2120676 - RNA, 19 nt, Artificial Sequence
  Description of Artificial Sequence: Synthetic oligonucleotide
acuuuuccauuaguugccg

SEQ ID NO: 2120677 - RNA, 19 nt, Artificial Sequence
  Description of Artificial Sequence: Synthetic oligonucleotide
ucucguugccgcuccacgc

SEQ ID NO: 2120678 - RNA, 19 nt, Artificial Sequence
  Description of Artificial Sequence: Synthetic oligonucleotide
guguggaaacuuuuggcuc

SEQ ID NO: 2120679 - RNA, 19 nt, Artificial Sequence
  Description of Artificial Sequence: Synthetic oligonucleotide
uuucuagugucuucaucau

SEQ ID NO: 2120680 - RNA, 19 nt, Artificial Sequence
  Description of Artificial Sequence: Synthetic oligonucleotide
uucguguaggugaggcgcc

SEQ ID NO: 2120681 - RNA, 19 nt, Artificial Sequence
  Description of Artificial Sequence: Synthetic oligonucleotide
ugaugcacuggucgguuuc

SEQ ID NO: 2120682 - RNA, 19 nt, Artificial Sequence
  Description of Artificial Sequence: Synthetic oligonucleotide
ccaaauuggauaaccauca

SEQ ID NO: 2120683 - RNA, 19 nt, Artificial Sequence
  Description of Artificial Sequence: Synthetic oligonucleotide
uaacugucgacagauccaa

SEQ ID NO: 2120684 - RNA, 19 nt, Artificial Sequence
  Description of Artificial Sequence: Synthetic oligonucleotide
guguucucuuguucugugg

SEQ ID NO: 2120685 - RNA, 19 nt, Artificial Sequence
  Description of Artificial Sequence: Synthetic oligonucleotide
ugggaggaucaucaucaca

SEQ ID NO: 2120686 - RNA, 19 nt, Artificial Sequence
  Description of Artificial Sequence: Synthetic oligonucleotide
agccgguaugcccuccagc

SEQ ID NO: 2120687 - RNA, 19 nt, Artificial Sequence
  Description of Artificial Sequence: Synthetic oligonucleotide
cauuguuauauggauuuca

SEQ ID NO: 2120688 - RNA, 19 nt, Artificial Sequence
  Description of Artificial Sequence: Synthetic oligonucleotide
caggagugcugcgugagcg

SEQ ID NO: 2120689 - RNA, 19 nt, Artificial Sequence
  Description of Artificial Sequence: Synthetic oligonucleotide
agaaucuucuucaggugug

SEQ ID NO: 2120690 - RNA, 19 nt, Artificial Sequence
  Description of Artificial Sequence: Synthetic oligonucleotide
accgaguugggcgugcggg

SEQ ID NO: 2120691 - RNA, 19 nt, Artificial Sequence
  Description of Artificial Sequence: Synthetic oligonucleotide
gucuaggauguacugcgug

SEQ ID NO: 2120692 - RNA, 19 nt, Artificial Sequence
  Description of Artificial Sequence: Synthetic oligonucleotide
ugcgugagcgagcucuucu

SEQ ID NO: 2120693 - RNA, 19 nt, Artificial Sequence
  Description of Artificial Sequence: Synthetic oligonucleotide
acauuguuauauggauuuc

SEQ ID NO: 2120694 - RNA, 19 nt, Artificial Sequence
  Description of Artificial Sequence: Synthetic oligonucleotide
auggucacaagauguuuau

SEQ ID NO: 2120695 - RNA, 19 nt, Artificial Sequence
  Description of Artificial Sequence: Synthetic oligonucleotide
caaggcguugccugugacc

SEQ ID NO: 2120696 - RNA, 19 nt, Artificial Sequence
  Description of Artificial Sequence: Synthetic oligonucleotide
cauuucuagugucuucauc

SEQ ID NO: 2120697 - RNA, 19 nt, Artificial Sequence
  Description of Artificial Sequence: Synthetic oligonucleotide
acucuaagaaggaggaagu

SEQ ID NO: 2120698 - RNA, 19 nt, Artificial Sequence
  Description of Artificial Sequence: Synthetic oligonucleotide
uucaauccuccgagcaaca

SEQ ID NO: 2120699 - RNA, 19 nt, Artificial Sequence
  Description of Artificial Sequence: Synthetic oligonucleotide
gguacuugugcuccuggcc

SEQ ID NO: 2120700 - RNA, 19 nt, Artificial Sequence
  Description of Artificial Sequence: Synthetic oligonucleotide
uuaguugccggaugauuuu

SEQ ID NO: 2120701 - RNA, 19 nt, Artificial Sequence
  Description of Artificial Sequence: Synthetic oligonucleotide
acaaggcguugccugugac

SEQ ID NO: 2120702 - RNA, 19 nt, Artificial Sequence
  Description of Artificial Sequence: Synthetic oligonucleotide
auccuuuugcaaaucuaag

SEQ ID NO: 2120703 - RNA, 19 nt, Artificial Sequence
  Description of Artificial Sequence: Synthetic oligonucleotide
gagguagcgguccuugaga

SEQ ID NO: 2120704 - RNA, 19 nt, Artificial Sequence
  Description of Artificial Sequence: Synthetic oligonucleotide
uacuugugcuccuggcccc

SEQ ID NO: 2120705 - RNA, 19 nt, Artificial Sequence
  Description of Artificial Sequence: Synthetic oligonucleotide
ugcaaaucuaagucaucuu

SEQ ID NO: 2120706 - RNA, 19 nt, Artificial Sequence
  Description of Artificial Sequence: Synthetic oligonucleotide
aggaaguggccuccagcuc

SEQ ID NO: 2120707 - RNA, 19 nt, Artificial Sequence
  Description of Artificial Sequence: Synthetic oligonucleotide
cucucguugccgcuccacg

SEQ ID NO: 2120708 - RNA, 19 nt, Artificial Sequence
  Description of Artificial Sequence: Synthetic oligonucleotide
aacgcauuucuagugucuu

SEQ ID NO: 2120709 - RNA, 19 nt, Artificial Sequence
  Description of Artificial Sequence: Synthetic oligonucleotide
agccucucguugccgcucc

SEQ ID NO: 2120710 - RNA, 19 nt, Artificial Sequence
  Description of Artificial Sequence: Synthetic oligonucleotide
guaacugucgacagaucca

SEQ ID NO: 2120711 - RNA, 19 nt, Artificial Sequence
  Description of Artificial Sequence: Synthetic oligonucleotide
gaccaaauuggauaaccau

SEQ ID NO: 2120712 - RNA, 19 nt, Artificial Sequence
  Description of Artificial Sequence: Synthetic oligonucleotide
ugugcuccuggccccgcag

SEQ ID NO: 2120713 - RNA, 19 nt, Artificial Sequence
  Description of Artificial Sequence: Synthetic oligonucleotide
caccacggcuucuucaaac

SEQ ID NO: 2120714 - RNA, 19 nt, Artificial Sequence
  Description of Artificial Sequence: Synthetic oligonucleotide
uuugaccaacgcauuucua

SEQ ID NO: 2120715 - RNA, 19 nt, Artificial Sequence
  Description of Artificial Sequence: Synthetic oligonucleotide
gauggccacgucguccgcg

SEQ ID NO: 2120716 - RNA, 19 nt, Artificial Sequence
  Description of Artificial Sequence: Synthetic oligonucleotide
ucguccgcguucguguagg

SEQ ID NO: 2120717 - RNA, 19 nt, Artificial Sequence
  Description of Artificial Sequence: Synthetic oligonucleotide
ggauuucaaagucaggacu

SEQ ID NO: 2120718 - RNA, 19 nt, Artificial Sequence
  Description of Artificial Sequence: Synthetic oligonucleotide
ucgcuuuccacaaggcguu

SEQ ID NO: 2120719 - RNA, 19 nt, Artificial Sequence
  Description of Artificial Sequence: Synthetic oligonucleotide
uuguucugugguuccccgc

SEQ ID NO: 2120720 - RNA, 19 nt, Artificial Sequence
  Description of Artificial Sequence: Synthetic oligonucleotide
acgucguccgcguucgugu

SEQ ID NO: 2120721 - RNA, 19 nt, Artificial Sequence
  Description of Artificial Sequence: Synthetic oligonucleotide
ggcguucuccuucacguag

SEQ ID NO: 2120722 - RNA, 19 nt, Artificial Sequence
  Description of Artificial Sequence: Synthetic oligonucleotide
ggaauucaauccuccgagc

SEQ ID NO: 2120723 - RNA, 19 nt, Artificial Sequence
  Description of Artificial Sequence: Synthetic oligonucleotide
gaugcacuggucgguuucc

SEQ ID NO: 2120724 - RNA, 19 nt, Artificial Sequence
  Description of Artificial Sequence: Synthetic oligonucleotide
agugcugcgugagcgagcu

SEQ ID NO: 2120725 - RNA, 19 nt, Artificial Sequence
  Description of Artificial Sequence: Synthetic oligonucleotide
ggucacaagauguuuauau

SEQ ID NO: 2120726 - RNA, 19 nt, Artificial Sequence
  Description of Artificial Sequence: Synthetic oligonucleotide
gccgguaugcccuccagcc

SEQ ID NO: 2120727 - RNA, 19 nt, Artificial Sequence
  Description of Artificial Sequence: Synthetic oligonucleotide
cauuauuucuuucggaauu

SEQ ID NO: 2120728 - RNA, 19 nt, Artificial Sequence
  Description of Artificial Sequence: Synthetic oligonucleotide
cuucaggcaagucuggugu

SEQ ID NO: 2120729 - RNA, 19 nt, Artificial Sequence
  Description of Artificial Sequence: Synthetic oligonucleotide
ucguugccgcuccacgcag

SEQ ID NO: 2120730 - RNA, 19 nt, Artificial Sequence
  Description of Artificial Sequence: Synthetic oligonucleotide
gauaaccaucagaccuccg

SEQ ID NO: 2120731 - RNA, 19 nt, Artificial Sequence
  Description of Artificial Sequence: Synthetic oligonucleotide
ugagcgagcucuucuccau

SEQ ID NO: 2120732 - RNA, 19 nt, Artificial Sequence
  Description of Artificial Sequence: Synthetic oligonucleotide
gucgacagauccaaguuaa

SEQ ID NO: 2120733 - RNA, 19 nt, Artificial Sequence
  Description of Artificial Sequence: Synthetic oligonucleotide
cucuaagaaggaggaagug

SEQ ID NO: 2120734 - RNA, 19 nt, Artificial Sequence
  Description of Artificial Sequence: Synthetic oligonucleotide
ucuggcuguguuucagaau

SEQ ID NO: 2120735 - RNA, 19 nt, Artificial Sequence
  Description of Artificial Sequence: Synthetic oligonucleotide
aggauguacugcguggaga

SEQ ID NO: 2120736 - RNA, 19 nt, Artificial Sequence
  Description of Artificial Sequence: Synthetic oligonucleotide
cucgguggaagccccgggc

SEQ ID NO: 2120737 - RNA, 19 nt, Artificial Sequence
  Description of Artificial Sequence: Synthetic oligonucleotide
cacacauuguuauauggau

SEQ ID NO: 2120738 - RNA, 19 nt, Artificial Sequence
  Description of Artificial Sequence: Synthetic oligonucleotide
uuccccgcuauccgcggcc

SEQ ID NO: 2120739 - RNA, 19 nt, Artificial Sequence
  Description of Artificial Sequence: Synthetic oligonucleotide
gucagucccagccgguaug

SEQ ID NO: 2120740 - RNA, 19 nt, Artificial Sequence
  Description of Artificial Sequence: Synthetic oligonucleotide
cggaauucaauccuccgag

SEQ ID NO: 2120741 - RNA, 19 nt, Artificial Sequence
  Description of Artificial Sequence: Synthetic oligonucleotide
uaugcccuccagccuccag

SEQ ID NO: 2120742 - RNA, 19 nt, Artificial Sequence
  Description of Artificial Sequence: Synthetic oligonucleotide
cacgcagucuaggauguac

SEQ ID NO: 2120743 - RNA, 19 nt, Artificial Sequence
  Description of Artificial Sequence: Synthetic oligonucleotide
uucugugguuccccgcuau

SEQ ID NO: 2120744 - RNA, 19 nt, Artificial Sequence
  Description of Artificial Sequence: Synthetic oligonucleotide
gggcuuugugucuggagcc

SEQ ID NO: 2120745 - RNA, 19 nt, Artificial Sequence
  Description of Artificial Sequence: Synthetic oligonucleotide
gguguucucuuguucugug

SEQ ID NO: 2120746 - RNA, 19 nt, Artificial Sequence
  Description of Artificial Sequence: Synthetic oligonucleotide
auuggucauucuccuuggu

SEQ ID NO: 2120747 - RNA, 19 nt, Artificial Sequence
  Description of Artificial Sequence: Synthetic oligonucleotide
ggcgucucccaacagguac

SEQ ID NO: 2120748 - RNA, 19 nt, Artificial Sequence
  Description of Artificial Sequence: Synthetic oligonucleotide
ccuguguaacugucgacag

SEQ ID NO: 2120749 - RNA, 19 nt, Artificial Sequence
  Description of Artificial Sequence: Synthetic oligonucleotide
ccgaccagacucuaagaag

SEQ ID NO: 2120750 - RNA, 19 nt, Artificial Sequence
  Description of Artificial Sequence: Synthetic oligonucleotide
ucgacagauccaaguuaaa

SEQ ID NO: 2120751 - RNA, 19 nt, Artificial Sequence
  Description of Artificial Sequence: Synthetic oligonucleotide
uuugugucuggagccugcu

SEQ ID NO: 2120752 - RNA, 19 nt, Artificial Sequence
  Description of Artificial Sequence: Synthetic oligonucleotide
acucccgaguggcuuccuc

SEQ ID NO: 2120753 - RNA, 19 nt, Artificial Sequence
  Description of Artificial Sequence: Synthetic oligonucleotide
cacaagauguuuauaucau

SEQ ID NO: 2120754 - RNA, 19 nt, Artificial Sequence
  Description of Artificial Sequence: Synthetic oligonucleotide
aggcaagucugguguucuc

SEQ ID NO: 2120755 - RNA, 19 nt, Artificial Sequence
  Description of Artificial Sequence: Synthetic oligonucleotide
uuuugacugauuggucauu

SEQ ID NO: 2120756 - RNA, 19 nt, Artificial Sequence
  Description of Artificial Sequence: Synthetic oligonucleotide
gaccgaguugggcgugcgg

SEQ ID NO: 2120757 - RNA, 19 nt, Artificial Sequence
  Description of Artificial Sequence: Synthetic oligonucleotide
gacucucacccaccacggc

SEQ ID NO: 2120758 - RNA, 19 nt, Artificial Sequence
  Description of Artificial Sequence: Synthetic oligonucleotide
cuaggauguacugcgugga

SEQ ID NO: 2120759 - RNA, 19 nt, Artificial Sequence
  Description of Artificial Sequence: Synthetic oligonucleotide
agcgguccuugagagacug

SEQ ID NO: 2120760 - RNA, 19 nt, Artificial Sequence
  Description of Artificial Sequence: Synthetic oligonucleotide
cucccuucacacacucuuc

SEQ ID NO: 2120761 - RNA, 19 nt, Artificial Sequence
  Description of Artificial Sequence: Synthetic oligonucleotide
ggauaaccaucagaccucc

SEQ ID NO: 2120762 - RNA, 19 nt, Artificial Sequence
  Description of Artificial Sequence: Synthetic oligonucleotide
ccuccgaccagacucuaag

SEQ ID NO: 2120763 - RNA, 19 nt, Artificial Sequence
  Description of Artificial Sequence: Synthetic oligonucleotide
ucacguaggucaggauggc

SEQ ID NO: 2120764 - RNA, 19 nt, Artificial Sequence
  Description of Artificial Sequence: Synthetic oligonucleotide
uugugucuggagccugcuc

SEQ ID NO: 2120765 - RNA, 19 nt, Artificial Sequence
  Description of Artificial Sequence: Synthetic oligonucleotide
aggagugcugcgugagcga

SEQ ID NO: 2120766 - RNA, 19 nt, Artificial Sequence
  Description of Artificial Sequence: Synthetic oligonucleotide
uucccacuucuugugugga

SEQ ID NO: 2120767 - RNA, 19 nt, Artificial Sequence
  Description of Artificial Sequence: Synthetic oligonucleotide
aucagaccuccgaccagac

SEQ ID NO: 2120768 - RNA, 19 nt, Artificial Sequence
  Description of Artificial Sequence: Synthetic oligonucleotide
cuccgaggagcccucggug

SEQ ID NO: 2120769 - RNA, 19 nt, Artificial Sequence
  Description of Artificial Sequence: Synthetic oligonucleotide
ggacucucacccaccacgg

SEQ ID NO: 2120770 - RNA, 19 nt, Artificial Sequence
  Description of Artificial Sequence: Synthetic oligonucleotide
gcuauccgcggccucgggg

SEQ ID NO: 2120771 - RNA, 19 nt, Artificial Sequence
  Description of Artificial Sequence: Synthetic oligonucleotide
gaagccccgggcuuugugu

SEQ ID NO: 2120772 - RNA, 19 nt, Artificial Sequence
  Description of Artificial Sequence: Synthetic oligonucleotide
ugaccgaguugggcgugcg

SEQ ID NO: 2120773 - RNA, 19 nt, Artificial Sequence
  Description of Artificial Sequence: Synthetic oligonucleotide
ucaauccuccgagcaacau

SEQ ID NO: 2120774 - RNA, 19 nt, Artificial Sequence
  Description of Artificial Sequence: Synthetic oligonucleotide
guaggugaggcgcccgguc

SEQ ID NO: 2120775 - RNA, 19 nt, Artificial Sequence
  Description of Artificial Sequence: Synthetic oligonucleotide
ugccgggaccaaauuggau

SEQ ID NO: 2120776 - RNA, 19 nt, Artificial Sequence
  Description of Artificial Sequence: Synthetic oligonucleotide
agucugguguucucuuguu

SEQ ID NO: 2120777 - RNA, 19 nt, Artificial Sequence
  Description of Artificial Sequence: Synthetic oligonucleotide
accggggcgucucccaaca

SEQ ID NO: 2120778 - RNA, 19 nt, Artificial Sequence
  Description of Artificial Sequence: Synthetic oligonucleotide
uucaggcaagucugguguu

SEQ ID NO: 2120779 - RNA, 19 nt, Artificial Sequence
  Description of Artificial Sequence: Synthetic oligonucleotide
caucagaccuccgaccaga

SEQ ID NO: 2120780 - RNA, 19 nt, Artificial Sequence
  Description of Artificial Sequence: Synthetic oligonucleotide
ugugaccgaguugggcgug

SEQ ID NO: 2120781 - RNA, 19 nt, Artificial Sequence
  Description of Artificial Sequence: Synthetic oligonucleotide
ucccacuucuuguguggaa

SEQ ID NO: 2120782 - RNA, 19 nt, Artificial Sequence
  Description of Artificial Sequence: Synthetic oligonucleotide
ugccaggagugcugcguga

SEQ ID NO: 2120783 - RNA, 19 nt, Artificial Sequence
  Description of Artificial Sequence: Synthetic oligonucleotide
gccgggaccaaauuggaua

SEQ ID NO: 2120784 - RNA, 19 nt, Artificial Sequence
  Description of Artificial Sequence: Synthetic oligonucleotide
cacguaggucaggauggcc

SEQ ID NO: 2120785 - RNA, 19 nt, Artificial Sequence
  Description of Artificial Sequence: Synthetic oligonucleotide
gccuguguaacugucgaca

SEQ ID NO: 2120786 - RNA, 19 nt, Artificial Sequence
  Description of Artificial Sequence: Synthetic oligonucleotide
guugccgcuccacgcaguc

SEQ ID NO: 2120787 - RNA, 19 nt, Artificial Sequence
  Description of Artificial Sequence: Synthetic oligonucleotide
cgggcuuugugucuggagc

SEQ ID NO: 2120788 - RNA, 19 nt, Artificial Sequence
  Description of Artificial Sequence: Synthetic oligonucleotide
acgcagucuaggauguacu

SEQ ID NO: 2120789 - RNA, 19 nt, Artificial Sequence
  Description of Artificial Sequence: Synthetic oligonucleotide
cucccgaguggcuuccuca

SEQ ID NO: 2120790 - RNA, 19 nt, Artificial Sequence
  Description of Artificial Sequence: Synthetic oligonucleotide
cucguugccgcuccacgca

SEQ ID NO: 2120791 - RNA, 19 nt, Artificial Sequence
  Description of Artificial Sequence: Synthetic oligonucleotide
cuguguaacugucgacaga

SEQ ID NO: 2120792 - RNA, 19 nt, Artificial Sequence
  Description of Artificial Sequence: Synthetic oligonucleotide
ccuccgagcaacauucuga

SEQ ID NO: 2120793 - RNA, 19 nt, Artificial Sequence
  Description of Artificial Sequence: Synthetic oligonucleotide
ucggucagucccagccggu

SEQ ID NO: 2120794 - RNA, 19 nt, Artificial Sequence
  Description of Artificial Sequence: Synthetic oligonucleotide
ugaccggggcgucucccaa

SEQ ID NO: 2120795 - RNA, 19 nt, Artificial Sequence
  Description of Artificial Sequence: Synthetic oligonucleotide
gagcgagcucuucuccauc

SEQ ID NO: 2120796 - RNA, 19 nt, Artificial Sequence
  Description of Artificial Sequence: Synthetic oligonucleotide
gucguccgcguucguguag

SEQ ID NO: 2120797 - RNA, 19 nt, Artificial Sequence
  Description of Artificial Sequence: Synthetic oligonucleotide
ccaacgcauuucuaguguc

SEQ ID NO: 2120798 - RNA, 19 nt, Artificial Sequence
  Description of Artificial Sequence: Synthetic oligonucleotide
ggagugcugcgugagcgag

SEQ ID NO: 2120799 - RNA, 19 nt, Artificial Sequence
  Description of Artificial Sequence: Synthetic oligonucleotide
ccaucgcuuuccacaaggc

SEQ ID NO: 2120800 - RNA, 19 nt, Artificial Sequence
  Description of Artificial Sequence: Synthetic oligonucleotide
auccgcggccucggggucc

SEQ ID NO: 2120801 - RNA, 19 nt, Artificial Sequence
  Description of Artificial Sequence: Synthetic oligonucleotide
cuauccgcggccucggggu

SEQ ID NO: 2120802 - RNA, 19 nt, Artificial Sequence
  Description of Artificial Sequence: Synthetic oligonucleotide
gcguucguguaggugaggc

SEQ ID NO: 2120803 - RNA, 19 nt, Artificial Sequence
  Description of Artificial Sequence: Synthetic oligonucleotide
ggcaguucccacuucuugu

SEQ ID NO: 2120804 - RNA, 19 nt, Artificial Sequence
  Description of Artificial Sequence: Synthetic oligonucleotide
caggugcuugagguagcgg

SEQ ID NO: 2120805 - RNA, 19 nt, Artificial Sequence
  Description of Artificial Sequence: Synthetic oligonucleotide
uagcgguccuugagagacu

SEQ ID NO: 2120806 - RNA, 19 nt, Artificial Sequence
  Description of Artificial Sequence: Synthetic oligonucleotide
gucuggagccugcucgguc

SEQ ID NO: 2120807 - RNA, 19 nt, Artificial Sequence
  Description of Artificial Sequence: Synthetic oligonucleotide
ccacuucuuguguggaaac

SEQ ID NO: 2120808 - RNA, 19 nt, Artificial Sequence
  Description of Artificial Sequence: Synthetic oligonucleotide
aucuugccgggaccaaauu

SEQ ID NO: 2120809 - RNA, 19 nt, Artificial Sequence
  Description of Artificial Sequence: Synthetic oligonucleotide
cuccgaccagacucuaaga

SEQ ID NO: 2120810 - RNA, 19 nt, Artificial Sequence
  Description of Artificial Sequence: Synthetic oligonucleotide
cuggagccugcucggucag

SEQ ID NO: 2120811 - RNA, 19 nt, Artificial Sequence
  Description of Artificial Sequence: Synthetic oligonucleotide
caacgcauuucuagugucu

SEQ ID NO: 2120812 - RNA, 19 nt, Artificial Sequence
  Description of Artificial Sequence: Synthetic oligonucleotide
gguuccccgcuauccgcgg

SEQ ID NO: 2120813 - RNA, 19 nt, Artificial Sequence
  Description of Artificial Sequence: Synthetic oligonucleotide
ccgcuugagcuucugggag

SEQ ID NO: 2120814 - RNA, 19 nt, Artificial Sequence
  Description of Artificial Sequence: Synthetic oligonucleotide
cuccaucgcuuuccacaag

SEQ ID NO: 2120815 - RNA, 19 nt, Artificial Sequence
  Description of Artificial Sequence: Synthetic oligonucleotide
cacgucguccgcguucgug

SEQ ID NO: 2120816 - RNA, 19 nt, Artificial Sequence
  Description of Artificial Sequence: Synthetic oligonucleotide
ggucagaggcugcggcucc

SEQ ID NO: 2120817 - RNA, 19 nt, Artificial Sequence
  Description of Artificial Sequence: Synthetic oligonucleotide
guuccccgcuauccgcggc

SEQ ID NO: 2120818 - RNA, 19 nt, Artificial Sequence
  Description of Artificial Sequence: Synthetic oligonucleotide
gcguucuccuucacguagg

SEQ ID NO: 2120819 - RNA, 19 nt, Artificial Sequence
  Description of Artificial Sequence: Synthetic oligonucleotide
gccacgucguccgcguucg

SEQ ID NO: 2120820 - RNA, 19 nt, Artificial Sequence
  Description of Artificial Sequence: Synthetic oligonucleotide
gaccggggcgucucccaac

SEQ ID NO: 2120821 - RNA, 19 nt, Artificial Sequence
  Description of Artificial Sequence: Synthetic oligonucleotide
cuagugucuucaucauccu

SEQ ID NO: 2120822 - RNA, 19 nt, Artificial Sequence
  Description of Artificial Sequence: Synthetic oligonucleotide
gucgguuuccauggucaca

SEQ ID NO: 2120823 - RNA, 19 nt, Artificial Sequence
  Description of Artificial Sequence: Synthetic oligonucleotide
guugccggaugauuuugau

SEQ ID NO: 2120824 - RNA, 19 nt, Artificial Sequence
  Description of Artificial Sequence: Synthetic oligonucleotide
ggugcuugagguagcgguc

SEQ ID NO: 2120825 - RNA, 19 nt, Artificial Sequence
  Description of Artificial Sequence: Synthetic oligonucleotide
cguucguguaggugaggcg

SEQ ID NO: 2120826 - RNA, 19 nt, Artificial Sequence
  Description of Artificial Sequence: Synthetic oligonucleotide
cgcuugagcuucugggagg

SEQ ID NO: 2120827 - RNA, 19 nt, Artificial Sequence
  Description of Artificial Sequence: Synthetic oligonucleotide
ggaagccccgggcuuugug

SEQ ID NO: 2120828 - RNA, 19 nt, Artificial Sequence
  Description of Artificial Sequence: Synthetic oligonucleotide
ggaugauuuugauggcagu

SEQ ID NO: 2120829 - RNA, 19 nt, Artificial Sequence
  Description of Artificial Sequence: Synthetic oligonucleotide
cugucgacagauccaaguu

SEQ ID NO: 2120830 - RNA, 19 nt, Artificial Sequence
  Description of Artificial Sequence: Synthetic oligonucleotide
cagccgguaugcccuccag

SEQ ID NO: 2120831 - RNA, 19 nt, Artificial Sequence
  Description of Artificial Sequence: Synthetic oligonucleotide
gaugggcugaccggggcgu

SEQ ID NO: 2120832 - RNA, 19 nt, Artificial Sequence
  Description of Artificial Sequence: Synthetic oligonucleotide
cgugagcgagcucuucucc

SEQ ID NO: 2120833 - RNA, 19 nt, Artificial Sequence
  Description of Artificial Sequence: Synthetic oligonucleotide
gguagcgguccuugagaga

SEQ ID NO: 2120834 - RNA, 19 nt, Artificial Sequence
  Description of Artificial Sequence: Synthetic oligonucleotide
gcuucugggaggaugggcu

SEQ ID NO: 2120835 - RNA, 19 nt, Artificial Sequence
  Description of Artificial Sequence: Synthetic oligonucleotide
cuaagucaucuugccggga

SEQ ID NO: 2120836 - RNA, 19 nt, Artificial Sequence
  Description of Artificial Sequence: Synthetic oligonucleotide
guccgcguucguguaggug

SEQ ID NO: 2120837 - RNA, 19 nt, Artificial Sequence
  Description of Artificial Sequence: Synthetic oligonucleotide
gugaccgaguugggcgugc

SEQ ID NO: 2120838 - RNA, 19 nt, Artificial Sequence
  Description of Artificial Sequence: Synthetic oligonucleotide
gcggcuccagcuccgagga

SEQ ID NO: 2120839 - RNA, 19 nt, Artificial Sequence
  Description of Artificial Sequence: Synthetic oligonucleotide
ggccuguguaacugucgac

SEQ ID NO: 2120840 - RNA, 19 nt, Artificial Sequence
  Description of Artificial Sequence: Synthetic oligonucleotide
ccgaguugggcgugcgggc

SEQ ID NO: 2120841 - RNA, 19 nt, Artificial Sequence
  Description of Artificial Sequence: Synthetic oligonucleotide
cugaccggggcgucuccca

SEQ ID NO: 2120842 - RNA, 19 nt, Artificial Sequence
  Description of Artificial Sequence: Synthetic oligonucleotide
cccggucagaggcugcggc

SEQ ID NO: 2120843 - RNA, 19 nt, Artificial Sequence
  Description of Artificial Sequence: Synthetic oligonucleotide
caauccuccgagcaacauu

SEQ ID NO: 2120844 - RNA, 19 nt, Artificial Sequence
  Description of Artificial Sequence: Synthetic oligonucleotide
cauuaguugccggaugauu

SEQ ID NO: 2120845 - RNA, 19 nt, Artificial Sequence
  Description of Artificial Sequence: Synthetic oligonucleotide
ccgggaccaaauuggauaa

SEQ ID NO: 2120846 - RNA, 19 nt, Artificial Sequence
  Description of Artificial Sequence: Synthetic oligonucleotide
ccaucagaccuccgaccag

SEQ ID NO: 2120847 - RNA, 19 nt, Artificial Sequence
  Description of Artificial Sequence: Synthetic oligonucleotide
aacucccgaguggcuuccu

SEQ ID NO: 2120848 - RNA, 19 nt, Artificial Sequence
  Description of Artificial Sequence: Synthetic oligonucleotide
augggcugaccggggcguc

SEQ ID NO: 2120849 - RNA, 19 nt, Artificial Sequence
  Description of Artificial Sequence: Synthetic oligonucleotide
ugggcgugcgggcguucuc

SEQ ID NO: 2120850 - RNA, 19 nt, Artificial Sequence
  Description of Artificial Sequence: Synthetic oligonucleotide
gcgagcucuucuccaucgc

SEQ ID NO: 2120851 - RNA, 19 nt, Artificial Sequence
  Description of Artificial Sequence: Synthetic oligonucleotide
cgcauuucuagugucuuca

SEQ ID NO: 2120852 - RNA, 19 nt, Artificial Sequence
  Description of Artificial Sequence: Synthetic oligonucleotide
gucccagccgguaugcccu

SEQ ID NO: 2120853 - RNA, 19 nt, Artificial Sequence
  Description of Artificial Sequence: Synthetic oligonucleotide
guucugugguuccccgcua

SEQ ID NO: 2120854 - RNA, 19 nt, Artificial Sequence
  Description of Artificial Sequence: Synthetic oligonucleotide
uugccgcuccacgcagucu

SEQ ID NO: 2120855 - RNA, 19 nt, Artificial Sequence
  Description of Artificial Sequence: Synthetic oligonucleotide
cggggcgucucccaacagg

SEQ ID NO: 2120856 - RNA, 19 nt, Artificial Sequence
  Description of Artificial Sequence: Synthetic oligonucleotide
cccgcuauccgcggccucg

SEQ ID NO: 2120857 - RNA, 19 nt, Artificial Sequence
  Description of Artificial Sequence: Synthetic oligonucleotide
cugcucggucagucccagc

SEQ ID NO: 2120858 - RNA, 19 nt, Artificial Sequence
  Description of Artificial Sequence: Synthetic oligonucleotide
ugcgggcguucuccuucac

SEQ ID NO: 2120859 - RNA, 19 nt, Artificial Sequence
  Description of Artificial Sequence: Synthetic oligonucleotide
ccgggcuuugugucuggag

SEQ ID NO: 2120860 - RNA, 19 nt, Artificial Sequence
  Description of Artificial Sequence: Synthetic oligonucleotide
cgguaugcccuccagccuc

SEQ ID NO: 2120861 - RNA, 19 nt, Artificial Sequence
  Description of Artificial Sequence: Synthetic oligonucleotide
caggaaggccuguguaacu

SEQ ID NO: 2120862 - RNA, 19 nt, Artificial Sequence
  Description of Artificial Sequence: Synthetic oligonucleotide
cucucacccaccacggcuu

SEQ ID NO: 2120863 - RNA, 19 nt, Artificial Sequence
  Description of Artificial Sequence: Synthetic oligonucleotide
uccccgcuauccgcggccu

SEQ ID NO: 2120864 - RNA, 19 nt, Artificial Sequence
  Description of Artificial Sequence: Synthetic oligonucleotide
ggccacgucguccgcguuc

SEQ ID NO: 2120865 - RNA, 19 nt, Artificial Sequence
  Description of Artificial Sequence: Synthetic oligonucleotide
ccgcguucguguaggugag

SEQ ID NO: 2120866 - RNA, 19 nt, Artificial Sequence
  Description of Artificial Sequence: Synthetic oligonucleotide
gggcgugcgggcguucucc

SEQ ID NO: 2120867 - RNA, 19 nt, Artificial Sequence
  Description of Artificial Sequence: Synthetic oligonucleotide
gaguugggcgugcgggcgu

SEQ ID NO: 2120868 - RNA, 19 nt, Artificial Sequence
  Description of Artificial Sequence: Synthetic oligonucleotide
ccucgguggaagccccggg

SEQ ID NO: 2120869 - RNA, 19 nt, Artificial Sequence
  Description of Artificial Sequence: Synthetic oligonucleotide
auccuccgagcaacauucu

SEQ ID NO: 2120870 - RNA, 19 nt, Artificial Sequence
  Description of Artificial Sequence: Synthetic oligonucleotide
cgugcgggcguucuccuuc

SEQ ID NO: 2120871 - RNA, 19 nt, Artificial Sequence
  Description of Artificial Sequence: Synthetic oligonucleotide
ggggcgucucccaacaggu

SEQ ID NO: 2120872 - RNA, 19 nt, Artificial Sequence
  Description of Artificial Sequence: Synthetic oligonucleotide
cugauuggucauucuccuu

SEQ ID NO: 2120873 - RNA, 19 nt, Artificial Sequence
  Description of Artificial Sequence: Synthetic oligonucleotide
gucaucuugccgggaccaa

SEQ ID NO: 2120874 - RNA, 19 nt, Artificial Sequence
  Description of Artificial Sequence: Synthetic oligonucleotide
cugcgugagcgagcucuuc

SEQ ID NO: 2120875 - RNA, 19 nt, Artificial Sequence
  Description of Artificial Sequence: Synthetic oligonucleotide
cccacuucuuguguggaaa

SEQ ID NO: 2120876 - RNA, 19 nt, Artificial Sequence
  Description of Artificial Sequence: Synthetic oligonucleotide
aguugggcgugcgggcguu

SEQ ID NO: 2120877 - RNA, 19 nt, Artificial Sequence
  Description of Artificial Sequence: Synthetic oligonucleotide
cgaguggcuuccucaaaga

SEQ ID NO: 2120878 - RNA, 19 nt, Artificial Sequence
  Description of Artificial Sequence: Synthetic oligonucleotide
gcugaccggggcgucuccc

SEQ ID NO: 2120879 - RNA, 19 nt, Artificial Sequence
  Description of Artificial Sequence: Synthetic oligonucleotide
accuccgaccagacucuaa

SEQ ID NO: 2120880 - RNA, 19 nt, Artificial Sequence
  Description of Artificial Sequence: Synthetic oligonucleotide
cguguaggugaggcgcccg

SEQ ID NO: 2120881 - RNA, 19 nt, Artificial Sequence
  Description of Artificial Sequence: Synthetic oligonucleotide
cgcaggugcuugagguagc

SEQ ID NO: 2120882 - RNA, 19 nt, Artificial Sequence
  Description of Artificial Sequence: Synthetic oligonucleotide
ggugugggaggaucaucau

SEQ ID NO: 2120883 - RNA, 19 nt, Artificial Sequence
  Description of Artificial Sequence: Synthetic oligonucleotide
ggcuuugugucuggagccu

SEQ ID NO: 2120884 - RNA, 19 nt, Artificial Sequence
  Description of Artificial Sequence: Synthetic oligonucleotide
gucucucccuucacacacu

SEQ ID NO: 2120885 - RNA, 19 nt, Artificial Sequence
  Description of Artificial Sequence: Synthetic oligonucleotide
ccucucguugccgcuccac

SEQ ID NO: 2120886 - RNA, 19 nt, Artificial Sequence
  Description of Artificial Sequence: Synthetic oligonucleotide
guaugcccuccagccucca

SEQ ID NO: 2120887 - RNA, 19 nt, Artificial Sequence
  Description of Artificial Sequence: Synthetic oligonucleotide
cgcuccacgcagucuagga

SEQ ID NO: 2120888 - RNA, 19 nt, Artificial Sequence
  Description of Artificial Sequence: Synthetic oligonucleotide
gggcguucuccuucacgua

SEQ ID NO: 2120889 - RNA, 19 nt, Artificial Sequence
  Description of Artificial Sequence: Synthetic oligonucleotide
gaccuccgaccagacucua

SEQ ID NO: 2120890 - RNA, 19 nt, Artificial Sequence
  Description of Artificial Sequence: Synthetic oligonucleotide
ggugaggcgcccggucaga

SEQ ID NO: 2120891 - RNA, 19 nt, Artificial Sequence
  Description of Artificial Sequence: Synthetic oligonucleotide
guggaaacuuuuggcucuu

SEQ ID NO: 2120892 - RNA, 19 nt, Artificial Sequence
  Description of Artificial Sequence: Synthetic oligonucleotide
gccgcuccacgcagucuag

SEQ ID NO: 2120893 - RNA, 19 nt, Artificial Sequence
  Description of Artificial Sequence: Synthetic oligonucleotide
ccgaggagcccucggugga

SEQ ID NO: 2120894 - RNA, 19 nt, Artificial Sequence
  Description of Artificial Sequence: Synthetic oligonucleotide
ccgcuccacgcagucuagg

SEQ ID NO: 2120895 - RNA, 19 nt, Artificial Sequence
  Description of Artificial Sequence: Synthetic oligonucleotide
ggcuguguuucagaaucuu

SEQ ID NO: 2120896 - RNA, 19 nt, Artificial Sequence
  Description of Artificial Sequence: Synthetic oligonucleotide
guugggcgugcgggcguuc

SEQ ID NO: 2120897 - RNA, 19 nt, Artificial Sequence
  Description of Artificial Sequence: Synthetic oligonucleotide
ccgcuauccgcggccucgg

SEQ ID NO: 2120898 - RNA, 19 nt, Artificial Sequence
  Description of Artificial Sequence: Synthetic oligonucleotide
gcgucucccaacagguacu

SEQ ID NO: 2120899 - RNA, 19 nt, Artificial Sequence
  Description of Artificial Sequence: Synthetic oligonucleotide
gcgguccuugagagacugc

SEQ ID NO: 2120900 - RNA, 19 nt, Artificial Sequence
  Description of Artificial Sequence: Synthetic oligonucleotide
aggcgcccggucagaggcu

SEQ ID NO: 2120901 - RNA, 19 nt, Artificial Sequence
  Description of Artificial Sequence: Synthetic oligonucleotide
gccugcucggucaguccca

SEQ ID NO: 2120902 - RNA, 19 nt, Artificial Sequence
  Description of Artificial Sequence: Synthetic oligonucleotide
ccagccgguaugcccucca

SEQ ID NO: 2120903 - RNA, 19 nt, Artificial Sequence
  Description of Artificial Sequence: Synthetic oligonucleotide
gguggaagccccgggcuuu

SEQ ID NO: 2120904 - RNA, 19 nt, Artificial Sequence
  Description of Artificial Sequence: Synthetic oligonucleotide
gcccucgguggaagccccg

SEQ ID NO: 2120905 - RNA, 19 nt, Artificial Sequence
  Description of Artificial Sequence: Synthetic oligonucleotide
cgcccggucagaggcugcg

SEQ ID NO: 2120906 - RNA, 19 nt, Artificial Sequence
  Description of Artificial Sequence: Synthetic oligonucleotide
gggcugaccggggcgucuc

SEQ ID NO: 2120907 - RNA, 19 nt, Artificial Sequence
  Description of Artificial Sequence: Synthetic oligonucleotide
gugcugcgugagcgagcuc

SEQ ID NO: 2120908 - RNA, 19 nt, Artificial Sequence
  Description of Artificial Sequence: Synthetic oligonucleotide
cgccuuccgcuugagcuuc

SEQ ID NO: 2120909 - RNA, 19 nt, Artificial Sequence
  Description of Artificial Sequence: Synthetic oligonucleotide
cgggaccaaauuggauaac

SEQ ID NO: 2120910 - RNA, 19 nt, Artificial Sequence
  Description of Artificial Sequence: Synthetic oligonucleotide
ggcgugcgggcguucuccu

SEQ ID NO: 2120911 - RNA, 19 nt, Artificial Sequence
  Description of Artificial Sequence: Synthetic oligonucleotide
cccgcaggugcuugaggua

SEQ ID NO: 2120912 - RNA, 19 nt, Artificial Sequence
  Description of Artificial Sequence: Synthetic oligonucleotide
ccggggcgucucccaacag

SEQ ID NO: 2120913 - RNA, 19 nt, Artificial Sequence
  Description of Artificial Sequence: Synthetic oligonucleotide
cgcuauccgcggccucggg

SEQ ID NO: 2120914 - RNA, 19 nt, Artificial Sequence
  Description of Artificial Sequence: Synthetic oligonucleotide
cgcguucguguaggugagg

SEQ ID NO: 2120915 - RNA, 19 nt, Artificial Sequence
  Description of Artificial Sequence: Synthetic oligonucleotide
ccggucagaggcugcggcu

SEQ ID NO: 2120916 - RNA, 19 nt, Artificial Sequence
  Description of Artificial Sequence: Synthetic oligonucleotide
ccgguaugcccuccagccu

SEQ ID NO: 2120917 - RNA, 19 nt, Artificial Sequence
  Description of Artificial Sequence: Synthetic oligonucleotide
ccauuaguugccggaugau

SEQ ID NO: 2120918 - RNA, 19 nt, Artificial Sequence
  Description of Artificial Sequence: Synthetic oligonucleotide
cgcuuuccacaaggcguug

SEQ ID NO: 2120919 - RNA, 19 nt, Artificial Sequence
  Description of Artificial Sequence: Synthetic oligonucleotide
gggcgucucccaacaggua

SEQ ID NO: 2120920 - RNA, 19 nt, Artificial Sequence
  Description of Artificial Sequence: Synthetic oligonucleotide
gcgcccggucagaggcugc

SEQ ID NO: 2120921 - RNA, 19 nt, Artificial Sequence
  Description of Artificial Sequence: Synthetic oligonucleotide
gcuugagguagcgguccuu

SEQ ID NO: 2120922 - RNA, 19 nt, Artificial Sequence
  Description of Artificial Sequence: Synthetic oligonucleotide
ccccgcuauccgcggccuc

SEQ ID NO: 2120923 - RNA, 19 nt, Artificial Sequence
  Description of Artificial Sequence: Synthetic oligonucleotide
cgucguccgcguucgugua

SEQ ID NO: 2120924 - RNA, 19 nt, Artificial Sequence
  Description of Artificial Sequence: Synthetic oligonucleotide
cguugccugugaccgaguu

SEQ ID NO: 2120925 - RNA, 19 nt, Artificial Sequence
  Description of Artificial Sequence: Synthetic oligonucleotide
gcugcgugagcgagcucuu

SEQ ID NO: 2120926 - RNA, 19 nt, Artificial Sequence
  Description of Artificial Sequence: Synthetic oligonucleotide
cguugccgcuccacgcagu

SEQ ID NO: 2120927 - RNA, 19 nt, Artificial Sequence
  Description of Artificial Sequence: Synthetic oligonucleotide
gcgugcgggcguucuccuu

SEQ ID NO: 2120928 - RNA, 19 nt, Artificial Sequence
  Description of Artificial Sequence: Synthetic oligonucleotide
gcguugccugugaccgagu

SEQ ID NO: 2120929 - RNA, 19 nt, Artificial Sequence
  Description of Artificial Sequence: Synthetic oligonucleotide
ccacgcagucuaggaugua

SEQ ID NO: 2120930 - RNA, 19 nt, Artificial Sequence
  Description of Artificial Sequence: Synthetic oligonucleotide
cguccgcguucguguaggu

SEQ ID NO: 2120931 - RNA, 19 nt, Artificial Sequence
  Description of Artificial Sequence: Synthetic oligonucleotide
ccacgucguccgcguucgu

SEQ ID NO: 2120932 - RNA, 19 nt, Artificial Sequence
  Description of Artificial Sequence: Synthetic oligonucleotide
ccgcggccucgggguccug

SEQ ID NO: 2120933 - RNA, 19 nt, Artificial Sequence
  Description of Artificial Sequence: Synthetic oligonucleotide
aacuugaggaagcuggggc

SEQ ID NO: 2120934 - RNA, 19 nt, Artificial Sequence
  Description of Artificial Sequence: Synthetic oligonucleotide
agauucgcgaccuugaccg

SEQ ID NO: 2120935 - RNA, 19 nt, Artificial Sequence
  Description of Artificial Sequence: Synthetic oligonucleotide
uuugacgaagcccucaggg

SEQ ID NO: 2120936 - RNA, 19 nt, Artificial Sequence
  Description of Artificial Sequence: Synthetic oligonucleotide
aauuaggcagugcuccucc

SEQ ID NO: 2120937 - RNA, 19 nt, Artificial Sequence
  Description of Artificial Sequence: Synthetic oligonucleotide
ucuccaaucucaauuaggc

SEQ ID NO: 2120938 - RNA, 19 nt, Artificial Sequence
  Description of Artificial Sequence: Synthetic oligonucleotide
aagauucgcgaccuugacc

SEQ ID NO: 2120939 - RNA, 19 nt, Artificial Sequence
  Description of Artificial Sequence: Synthetic oligonucleotide
aguuccacgggguggaccc

SEQ ID NO: 2120940 - RNA, 19 nt, Artificial Sequence
  Description of Artificial Sequence: Synthetic oligonucleotide
ugucuguggaccuaaaagu

SEQ ID NO: 2120941 - RNA, 19 nt, Artificial Sequence
  Description of Artificial Sequence: Synthetic oligonucleotide
auaacaucaucuauaggcg

SEQ ID NO: 2120942 - RNA, 19 nt, Artificial Sequence
  Description of Artificial Sequence: Synthetic oligonucleotide
aucuauaggcgucugaugu

SEQ ID NO: 2120943 - RNA, 19 nt, Artificial Sequence
  Description of Artificial Sequence: Synthetic oligonucleotide
ugcuacucaucccaaagcc

SEQ ID NO: 2120944 - RNA, 19 nt, Artificial Sequence
  Description of Artificial Sequence: Synthetic oligonucleotide
gaugcuacucaucccaaag

SEQ ID NO: 2120945 - RNA, 19 nt, Artificial Sequence
  Description of Artificial Sequence: Synthetic oligonucleotide
ucugaggucuccaaucuca

SEQ ID NO: 2120946 - RNA, 19 nt, Artificial Sequence
  Description of Artificial Sequence: Synthetic oligonucleotide
aucucaauuaggcagugcu

SEQ ID NO: 2120947 - RNA, 19 nt, Artificial Sequence
  Description of Artificial Sequence: Synthetic oligonucleotide
acugcagggauccuuguuc

SEQ ID NO: 2120948 - RNA, 19 nt, Artificial Sequence
  Description of Artificial Sequence: Synthetic oligonucleotide
aguguucccugucugaguc

SEQ ID NO: 2120949 - RNA, 19 nt, Artificial Sequence
  Description of Artificial Sequence: Synthetic oligonucleotide
agagucgggacucucuucg

SEQ ID NO: 2120950 - RNA, 19 nt, Artificial Sequence
  Description of Artificial Sequence: Synthetic oligonucleotide
ucagacuccacgaaaccca

SEQ ID NO: 2120951 - RNA, 19 nt, Artificial Sequence
  Description of Artificial Sequence: Synthetic oligonucleotide
aaacccacugugucugugg

SEQ ID NO: 2120952 - RNA, 19 nt, Artificial Sequence
  Description of Artificial Sequence: Synthetic oligonucleotide
gagaaagcgcaucauggag

SEQ ID NO: 2120953 - RNA, 19 nt, Artificial Sequence
  Description of Artificial Sequence: Synthetic oligonucleotide
augcuacucaucccaaagc

SEQ ID NO: 2120954 - RNA, 19 nt, Artificial Sequence
  Description of Artificial Sequence: Synthetic oligonucleotide
cacaggaugcuacucaucc

SEQ ID NO: 2120955 - RNA, 19 nt, Artificial Sequence
  Description of Artificial Sequence: Synthetic oligonucleotide
accgaugacaccucugcac

SEQ ID NO: 2120956 - RNA, 19 nt, Artificial Sequence
  Description of Artificial Sequence: Synthetic oligonucleotide
aacaucaucuauaggcguc

SEQ ID NO: 2120957 - RNA, 19 nt, Artificial Sequence
  Description of Artificial Sequence: Synthetic oligonucleotide
aaaguguucccugucugag

SEQ ID NO: 2120958 - RNA, 19 nt, Artificial Sequence
  Description of Artificial Sequence: Synthetic oligonucleotide
accacacacacacaggaug

SEQ ID NO: 2120959 - RNA, 19 nt, Artificial Sequence
  Description of Artificial Sequence: Synthetic oligonucleotide
uugacgaagcccucagggg

SEQ ID NO: 2120960 - RNA, 19 nt, Artificial Sequence
  Description of Artificial Sequence: Synthetic oligonucleotide
gcuuguacaagccaaggag

SEQ ID NO: 2120961 - RNA, 19 nt, Artificial Sequence
  Description of Artificial Sequence: Synthetic oligonucleotide
ucuuugacgaagcccucag

SEQ ID NO: 2120962 - RNA, 19 nt, Artificial Sequence
  Description of Artificial Sequence: Synthetic oligonucleotide
ugcaagaggccaaucugag

SEQ ID NO: 2120963 - RNA, 19 nt, Artificial Sequence
  Description of Artificial Sequence: Synthetic oligonucleotide
uugcaagaggccaaucuga

SEQ ID NO: 2120964 - RNA, 19 nt, Artificial Sequence
  Description of Artificial Sequence: Synthetic oligonucleotide
uuucggagaaagcgcauca

SEQ ID NO: 2120965 - RNA, 19 nt, Artificial Sequence
  Description of Artificial Sequence: Synthetic oligonucleotide
ugacgaagcccucaggggu

SEQ ID NO: 2120966 - RNA, 19 nt, Artificial Sequence
  Description of Artificial Sequence: Synthetic oligonucleotide
aaucucaauuaggcagugc

SEQ ID NO: 2120967 - RNA, 19 nt, Artificial Sequence
  Description of Artificial Sequence: Synthetic oligonucleotide
ucuucugcagaggacacug

SEQ ID NO: 2120968 - RNA, 19 nt, Artificial Sequence
  Description of Artificial Sequence: Synthetic oligonucleotide
accuaaaagucuucugcag

SEQ ID NO: 2120969 - RNA, 19 nt, Artificial Sequence
  Description of Artificial Sequence: Synthetic oligonucleotide
agggguccgagccugggcc

SEQ ID NO: 2120970 - RNA, 19 nt, Artificial Sequence
  Description of Artificial Sequence: Synthetic oligonucleotide
ucuuccucuuugacgaagc

SEQ ID NO: 2120971 - RNA, 19 nt, Artificial Sequence
  Description of Artificial Sequence: Synthetic oligonucleotide
cuugcaagaggccaaucug

SEQ ID NO: 2120972 - RNA, 19 nt, Artificial Sequence
  Description of Artificial Sequence: Synthetic oligonucleotide
gaagcucccggccuucugg

SEQ ID NO: 2120973 - RNA, 19 nt, Artificial Sequence
  Description of Artificial Sequence: Synthetic oligonucleotide
acaggaugcuacucauccc

SEQ ID NO: 2120974 - RNA, 19 nt, Artificial Sequence
  Description of Artificial Sequence: Synthetic oligonucleotide
ggaccuaaaagucuucugc

SEQ ID NO: 2120975 - RNA, 19 nt, Artificial Sequence
  Description of Artificial Sequence: Synthetic oligonucleotide
cugagagggacccugacuc

SEQ ID NO: 2120976 - RNA, 19 nt, Artificial Sequence
  Description of Artificial Sequence: Synthetic oligonucleotide
ugaccgagggguccgagcc

SEQ ID NO: 2120977 - RNA, 19 nt, Artificial Sequence
  Description of Artificial Sequence: Synthetic oligonucleotide
uccugggacgcacugcagg

SEQ ID NO: 2120978 - RNA, 19 nt, Artificial Sequence
  Description of Artificial Sequence: Synthetic oligonucleotide
uggggcacacaacuugagg

SEQ ID NO: 2120979 - RNA, 19 nt, Artificial Sequence
  Description of Artificial Sequence: Synthetic oligonucleotide
uucagcucagacuccacga

SEQ ID NO: 2120980 - RNA, 19 nt, Artificial Sequence
  Description of Artificial Sequence: Synthetic oligonucleotide
ucggagaaagcgcaucaug

SEQ ID NO: 2120981 - RNA, 19 nt, Artificial Sequence
  Description of Artificial Sequence: Synthetic oligonucleotide
gaccuaaaagucuucugca

SEQ ID NO: 2120982 - RNA, 19 nt, Artificial Sequence
  Description of Artificial Sequence: Synthetic oligonucleotide
ucagaggaagcugaggcac

SEQ ID NO: 2120983 - RNA, 19 nt, Artificial Sequence
  Description of Artificial Sequence: Synthetic oligonucleotide
ucuauaggcgucugaugug

SEQ ID NO: 2120984 - RNA, 19 nt, Artificial Sequence
  Description of Artificial Sequence: Synthetic oligonucleotide
cagguuucggagaaagcgc

SEQ ID NO: 2120985 - RNA, 19 nt, Artificial Sequence
  Description of Artificial Sequence: Synthetic oligonucleotide
uuggucauggcugacuugu

SEQ ID NO: 2120986 - RNA, 19 nt, Artificial Sequence
  Description of Artificial Sequence: Synthetic oligonucleotide
guaaaguguucccugucug

SEQ ID NO: 2120987 - RNA, 19 nt, Artificial Sequence
  Description of Artificial Sequence: Synthetic oligonucleotide
uugaugugucccaggaaga

SEQ ID NO: 2120988 - RNA, 19 nt, Artificial Sequence
  Description of Artificial Sequence: Synthetic oligonucleotide
ugaugucuggccuggucag

SEQ ID NO: 2120989 - RNA, 19 nt, Artificial Sequence
  Description of Artificial Sequence: Synthetic oligonucleotide
caagccaaggagauaguuc

SEQ ID NO: 2120990 - RNA, 19 nt, Artificial Sequence
  Description of Artificial Sequence: Synthetic oligonucleotide
ucaucuauaggcgucugau

SEQ ID NO: 2120991 - RNA, 19 nt, Artificial Sequence
  Description of Artificial Sequence: Synthetic oligonucleotide
cuacucaucccaaagccca

SEQ ID NO: 2120992 - RNA, 19 nt, Artificial Sequence
  Description of Artificial Sequence: Synthetic oligonucleotide
agauaguuccacggggugg

SEQ ID NO: 2120993 - RNA, 19 nt, Artificial Sequence
  Description of Artificial Sequence: Synthetic oligonucleotide
auguggggcacacaacuug

SEQ ID NO: 2120994 - RNA, 19 nt, Artificial Sequence
  Description of Artificial Sequence: Synthetic oligonucleotide
uccacgaaacccacugugu

SEQ ID NO: 2120995 - RNA, 19 nt, Artificial Sequence
  Description of Artificial Sequence: Synthetic oligonucleotide
uggaccuaaaagucuucug

SEQ ID NO: 2120996 - RNA, 19 nt, Artificial Sequence
  Description of Artificial Sequence: Synthetic oligonucleotide
uccagcgugaugucuggcc

SEQ ID NO: 2120997 - RNA, 19 nt, Artificial Sequence
  Description of Artificial Sequence: Synthetic oligonucleotide
agcucagacuccacgaaac

SEQ ID NO: 2120998 - RNA, 19 nt, Artificial Sequence
  Description of Artificial Sequence: Synthetic oligonucleotide
gagauaguuccacggggug

SEQ ID NO: 2120999 - RNA, 19 nt, Artificial Sequence
  Description of Artificial Sequence: Synthetic oligonucleotide
uucgcgaccuugaccgagg

SEQ ID NO: 2121000 - RNA, 19 nt, Artificial Sequence
  Description of Artificial Sequence: Synthetic oligonucleotide
gacuugaugugucccagga

SEQ ID NO: 2121001 - RNA, 19 nt, Artificial Sequence
  Description of Artificial Sequence: Synthetic oligonucleotide
uggucagaagcucccggcc

SEQ ID NO: 2121002 - RNA, 19 nt, Artificial Sequence
  Description of Artificial Sequence: Synthetic oligonucleotide
gaugugucaggacagugcu

SEQ ID NO: 2121003 - RNA, 19 nt, Artificial Sequence
  Description of Artificial Sequence: Synthetic oligonucleotide
cuggguaaaguguucccug

SEQ ID NO: 2121004 - RNA, 19 nt, Artificial Sequence
  Description of Artificial Sequence: Synthetic oligonucleotide
acacaugcuggacuggggu

SEQ ID NO: 2121005 - RNA, 19 nt, Artificial Sequence
  Description of Artificial Sequence: Synthetic oligonucleotide
ccagguuucggagaaagcg

SEQ ID NO: 2121006 - RNA, 19 nt, Artificial Sequence
  Description of Artificial Sequence: Synthetic oligonucleotide
cuucucagacaggugaccc

SEQ ID NO: 2121007 - RNA, 19 nt, Artificial Sequence
  Description of Artificial Sequence: Synthetic oligonucleotide
caagaggccaaucugaggu

SEQ ID NO: 2121008 - RNA, 19 nt, Artificial Sequence
  Description of Artificial Sequence: Synthetic oligonucleotide
cucagacuccacgaaaccc

SEQ ID NO: 2121009 - RNA, 19 nt, Artificial Sequence
  Description of Artificial Sequence: Synthetic oligonucleotide
ucaauuaggcagugcuccu

SEQ ID NO: 2121010 - RNA, 19 nt, Artificial Sequence
  Description of Artificial Sequence: Synthetic oligonucleotide
ugugucuguggaccuaaaa

SEQ ID NO: 2121011 - RNA, 19 nt, Artificial Sequence
  Description of Artificial Sequence: Synthetic oligonucleotide
aacccacugugucugugga

SEQ ID NO: 2121012 - RNA, 19 nt, Artificial Sequence
  Description of Artificial Sequence: Synthetic oligonucleotide
agacacaugcuggacuggg

SEQ ID NO: 2121013 - RNA, 19 nt, Artificial Sequence
  Description of Artificial Sequence: Synthetic oligonucleotide
cuccacgaaacccacugug

SEQ ID NO: 2121014 - RNA, 19 nt, Artificial Sequence
  Description of Artificial Sequence: Synthetic oligonucleotide
aucugaggucuccaaucuc

SEQ ID NO: 2121015 - RNA, 19 nt, Artificial Sequence
  Description of Artificial Sequence: Synthetic oligonucleotide
gauaguuccacggggugga

SEQ ID NO: 2121016 - RNA, 19 nt, Artificial Sequence
  Description of Artificial Sequence: Synthetic oligonucleotide
cucaucccaaagcccaggg

SEQ ID NO: 2121017 - RNA, 19 nt, Artificial Sequence
  Description of Artificial Sequence: Synthetic oligonucleotide
uggguaaaguguucccugu

SEQ ID NO: 2121018 - RNA, 19 nt, Artificial Sequence
  Description of Artificial Sequence: Synthetic oligonucleotide
cuuguucugccuccagggc

SEQ ID NO: 2121019 - RNA, 19 nt, Artificial Sequence
  Description of Artificial Sequence: Synthetic oligonucleotide
acaacuugaggaagcuggg

SEQ ID NO: 2121020 - RNA, 19 nt, Artificial Sequence
  Description of Artificial Sequence: Synthetic oligonucleotide
uaggcgucugaugugucag

SEQ ID NO: 2121021 - RNA, 19 nt, Artificial Sequence
  Description of Artificial Sequence: Synthetic oligonucleotide
caucuauaggcgucugaug

SEQ ID NO: 2121022 - RNA, 19 nt, Artificial Sequence
  Description of Artificial Sequence: Synthetic oligonucleotide
acgaaacccacugugucug

SEQ ID NO: 2121023 - RNA, 19 nt, Artificial Sequence
  Description of Artificial Sequence: Synthetic oligonucleotide
ucugcacccugccagguuu

SEQ ID NO: 2121024 - RNA, 19 nt, Artificial Sequence
  Description of Artificial Sequence: Synthetic oligonucleotide
uucucagacaggugaccca

SEQ ID NO: 2121025 - RNA, 19 nt, Artificial Sequence
  Description of Artificial Sequence: Synthetic oligonucleotide
caggaugcuacucauccca

SEQ ID NO: 2121026 - RNA, 19 nt, Artificial Sequence
  Description of Artificial Sequence: Synthetic oligonucleotide
gucaggacagugcugggca

SEQ ID NO: 2121027 - RNA, 19 nt, Artificial Sequence
  Description of Artificial Sequence: Synthetic oligonucleotide
auaggcgucugauguguca

SEQ ID NO: 2121028 - RNA, 19 nt, Artificial Sequence
  Description of Artificial Sequence: Synthetic oligonucleotide
cuuugacgaagcccucagg

SEQ ID NO: 2121029 - RNA, 19 nt, Artificial Sequence
  Description of Artificial Sequence: Synthetic oligonucleotide
augccggccuccuccagcg

SEQ ID NO: 2121030 - RNA, 19 nt, Artificial Sequence
  Description of Artificial Sequence: Synthetic oligonucleotide
uggccuggucagaagcucc

SEQ ID NO: 2121031 - RNA, 19 nt, Artificial Sequence
  Description of Artificial Sequence: Synthetic oligonucleotide
guaggugcuggccauccac

SEQ ID NO: 2121032 - RNA, 19 nt, Artificial Sequence
  Description of Artificial Sequence: Synthetic oligonucleotide
gaggagcagcccaagauuc

SEQ ID NO: 2121033 - RNA, 19 nt, Artificial Sequence
  Description of Artificial Sequence: Synthetic oligonucleotide
cuuccuucagaggaagcug

SEQ ID NO: 2121034 - RNA, 19 nt, Artificial Sequence
  Description of Artificial Sequence: Synthetic oligonucleotide
ugggccgccaauccugaga

SEQ ID NO: 2121035 - RNA, 19 nt, Artificial Sequence
  Description of Artificial Sequence: Synthetic oligonucleotide
ugguggggaccgaugacac

SEQ ID NO: 2121036 - RNA, 19 nt, Artificial Sequence
  Description of Artificial Sequence: Synthetic oligonucleotide
cagggauccuuguucugcc

SEQ ID NO: 2121037 - RNA, 19 nt, Artificial Sequence
  Description of Artificial Sequence: Synthetic oligonucleotide
uuaggcagugcuccuccuc

SEQ ID NO: 2121038 - RNA, 19 nt, Artificial Sequence
  Description of Artificial Sequence: Synthetic oligonucleotide
ggggcacacaacuugagga

SEQ ID NO: 2121039 - RNA, 19 nt, Artificial Sequence
  Description of Artificial Sequence: Synthetic oligonucleotide
gaccccgccuugcaagagg

SEQ ID NO: 2121040 - RNA, 19 nt, Artificial Sequence
  Description of Artificial Sequence: Synthetic oligonucleotide
aucaucuauaggcgucuga

SEQ ID NO: 2121041 - RNA, 19 nt, Artificial Sequence
  Description of Artificial Sequence: Synthetic oligonucleotide
gucugaugugucaggacag

SEQ ID NO: 2121042 - RNA, 19 nt, Artificial Sequence
  Description of Artificial Sequence: Synthetic oligonucleotide
ucaggacagugcugggcag

SEQ ID NO: 2121043 - RNA, 19 nt, Artificial Sequence
  Description of Artificial Sequence: Synthetic oligonucleotide
gucuguggaccuaaaaguc

SEQ ID NO: 2121044 - RNA, 19 nt, Artificial Sequence
  Description of Artificial Sequence: Synthetic oligonucleotide
gaggucuccaaucucaauu

SEQ ID NO: 2121045 - RNA, 19 nt, Artificial Sequence
  Description of Artificial Sequence: Synthetic oligonucleotide
guggaccccgccuugcaag

SEQ ID NO: 2121046 - RNA, 19 nt, Artificial Sequence
  Description of Artificial Sequence: Synthetic oligonucleotide
cuuccucuuugacgaagcc

SEQ ID NO: 2121047 - RNA, 19 nt, Artificial Sequence
  Description of Artificial Sequence: Synthetic oligonucleotide
caagauucgcgaccuugac

SEQ ID NO: 2121048 - RNA, 19 nt, Artificial Sequence
  Description of Artificial Sequence: Synthetic oligonucleotide
uguggaccuaaaagucuuc

SEQ ID NO: 2121049 - RNA, 19 nt, Artificial Sequence
  Description of Artificial Sequence: Synthetic oligonucleotide
gagagggacccugacucag

SEQ ID NO: 2121050 - RNA, 19 nt, Artificial Sequence
  Description of Artificial Sequence: Synthetic oligonucleotide
cagcccaagauucgcgacc

SEQ ID NO: 2121051 - RNA, 19 nt, Artificial Sequence
  Description of Artificial Sequence: Synthetic oligonucleotide
uugaccgagggguccgagc

SEQ ID NO: 2121052 - RNA, 19 nt, Artificial Sequence
  Description of Artificial Sequence: Synthetic oligonucleotide
acacacacaggaugcuacu

SEQ ID NO: 2121053 - RNA, 19 nt, Artificial Sequence
  Description of Artificial Sequence: Synthetic oligonucleotide
ucucugguggggaccgaug

SEQ ID NO: 2121054 - RNA, 19 nt, Artificial Sequence
  Description of Artificial Sequence: Synthetic oligonucleotide
aggccaaucugaggucucc

SEQ ID NO: 2121055 - RNA, 19 nt, Artificial Sequence
  Description of Artificial Sequence: Synthetic oligonucleotide
gugcuuguacaagccaagg

SEQ ID NO: 2121056 - RNA, 19 nt, Artificial Sequence
  Description of Artificial Sequence: Synthetic oligonucleotide
uccaggaguaggugcuggc

SEQ ID NO: 2121057 - RNA, 19 nt, Artificial Sequence
  Description of Artificial Sequence: Synthetic oligonucleotide
ccacacacacacaggaugc

SEQ ID NO: 2121058 - RNA, 19 nt, Artificial Sequence
  Description of Artificial Sequence: Synthetic oligonucleotide
auggggcgagccuuccuuc

SEQ ID NO: 2121059 - RNA, 19 nt, Artificial Sequence
  Description of Artificial Sequence: Synthetic oligonucleotide
ugggacgcacugcagggau

SEQ ID NO: 2121060 - RNA, 19 nt, Artificial Sequence
  Description of Artificial Sequence: Synthetic oligonucleotide
acucaucccaaagcccagg

SEQ ID NO: 2121061 - RNA, 19 nt, Artificial Sequence
  Description of Artificial Sequence: Synthetic oligonucleotide
ugacaccucugcacccugc

SEQ ID NO: 2121062 - RNA, 19 nt, Artificial Sequence
  Description of Artificial Sequence: Synthetic oligonucleotide
ucgcgaccuugaccgaggg

SEQ ID NO: 2121063 - RNA, 19 nt, Artificial Sequence
  Description of Artificial Sequence: Synthetic oligonucleotide
ccaaggagauaguuccacg

SEQ ID NO: 2121064 - RNA, 19 nt, Artificial Sequence
  Description of Artificial Sequence: Synthetic oligonucleotide
cagacuccacgaaacccac

SEQ ID NO: 2121065 - RNA, 19 nt, Artificial Sequence
  Description of Artificial Sequence: Synthetic oligonucleotide
ucucuucgcacugccagaa

SEQ ID NO: 2121066 - RNA, 19 nt, Artificial Sequence
  Description of Artificial Sequence: Synthetic oligonucleotide
uauaggcgucugauguguc

SEQ ID NO: 2121067 - RNA, 19 nt, Artificial Sequence
  Description of Artificial Sequence: Synthetic oligonucleotide
gucucucugguggggaccg

SEQ ID NO: 2121068 - RNA, 19 nt, Artificial Sequence
  Description of Artificial Sequence: Synthetic oligonucleotide
cacagggacuugauguguc

SEQ ID NO: 2121069 - RNA, 19 nt, Artificial Sequence
  Description of Artificial Sequence: Synthetic oligonucleotide
agguuucggagaaagcgca

SEQ ID NO: 2121070 - RNA, 19 nt, Artificial Sequence
  Description of Artificial Sequence: Synthetic oligonucleotide
cuccaaucucaauuaggca

SEQ ID NO: 2121071 - RNA, 19 nt, Artificial Sequence
  Description of Artificial Sequence: Synthetic oligonucleotide
auucgcgaccuugaccgag

SEQ ID NO: 2121072 - RNA, 19 nt, Artificial Sequence
  Description of Artificial Sequence: Synthetic oligonucleotide
gcaagaggccaaucugagg

SEQ ID NO: 2121073 - RNA, 19 nt, Artificial Sequence
  Description of Artificial Sequence: Synthetic oligonucleotide
aggcgucugaugugucagg

SEQ ID NO: 2121074 - RNA, 19 nt, Artificial Sequence
  Description of Artificial Sequence: Synthetic oligonucleotide
gucgggacucucuucgcac

SEQ ID NO: 2121075 - RNA, 19 nt, Artificial Sequence
  Description of Artificial Sequence: Synthetic oligonucleotide
accccgccuugcaagaggc

SEQ ID NO: 2121076 - RNA, 19 nt, Artificial Sequence
  Description of Artificial Sequence: Synthetic oligonucleotide
uguacaagccaaggagaua

SEQ ID NO: 2121077 - RNA, 19 nt, Artificial Sequence
  Description of Artificial Sequence: Synthetic oligonucleotide
cucuuccucuuugacgaag

SEQ ID NO: 2121078 - RNA, 19 nt, Artificial Sequence
  Description of Artificial Sequence: Synthetic oligonucleotide
cacaugcuggacugggguc

SEQ ID NO: 2121079 - RNA, 19 nt, Artificial Sequence
  Description of Artificial Sequence: Synthetic oligonucleotide
gagccugggccgccaaucc

SEQ ID NO: 2121080 - RNA, 19 nt, Artificial Sequence
  Description of Artificial Sequence: Synthetic oligonucleotide
ugcccaccuuccagagucg

SEQ ID NO: 2121081 - RNA, 19 nt, Artificial Sequence
  Description of Artificial Sequence: Synthetic oligonucleotide
ucgggacucucuucgcacu

SEQ ID NO: 2121082 - RNA, 19 nt, Artificial Sequence
  Description of Artificial Sequence: Synthetic oligonucleotide
uccugagagggacccugac

SEQ ID NO: 2121083 - RNA, 19 nt, Artificial Sequence
  Description of Artificial Sequence: Synthetic oligonucleotide
agguggcgauauguggggc

SEQ ID NO: 2121084 - RNA, 19 nt, Artificial Sequence
  Description of Artificial Sequence: Synthetic oligonucleotide
guuucggagaaagcgcauc

SEQ ID NO: 2121085 - RNA, 19 nt, Artificial Sequence
  Description of Artificial Sequence: Synthetic oligonucleotide
gggccgccaauccugagag

SEQ ID NO: 2121086 - RNA, 19 nt, Artificial Sequence
  Description of Artificial Sequence: Synthetic oligonucleotide
uggucauggcugacuugug

SEQ ID NO: 2121087 - RNA, 19 nt, Artificial Sequence
  Description of Artificial Sequence: Synthetic oligonucleotide
gcccaccacacacacacag

SEQ ID NO: 2121088 - RNA, 19 nt, Artificial Sequence
  Description of Artificial Sequence: Synthetic oligonucleotide
auuaggcagugcuccuccu

SEQ ID NO: 2121089 - RNA, 19 nt, Artificial Sequence
  Description of Artificial Sequence: Synthetic oligonucleotide
uuccacgggguggaccccg

SEQ ID NO: 2121090 - RNA, 19 nt, Artificial Sequence
  Description of Artificial Sequence: Synthetic oligonucleotide
aggagcagcccaagauucg

SEQ ID NO: 2121091 - RNA, 19 nt, Artificial Sequence
  Description of Artificial Sequence: Synthetic oligonucleotide
acuccacgaaacccacugu

SEQ ID NO: 2121092 - RNA, 19 nt, Artificial Sequence
  Description of Artificial Sequence: Synthetic oligonucleotide
acccugccagguuucggag

SEQ ID NO: 2121093 - RNA, 19 nt, Artificial Sequence
  Description of Artificial Sequence: Synthetic oligonucleotide
ggugcuuguacaagccaag

SEQ ID NO: 2121094 - RNA, 19 nt, Artificial Sequence
  Description of Artificial Sequence: Synthetic oligonucleotide
cugaggcacaccuggucuc

SEQ ID NO: 2121095 - RNA, 19 nt, Artificial Sequence
  Description of Artificial Sequence: Synthetic oligonucleotide
accuuccagagucgggacu

SEQ ID NO: 2121096 - RNA, 19 nt, Artificial Sequence
  Description of Artificial Sequence: Synthetic oligonucleotide
cuggggcacacaacuugag

SEQ ID NO: 2121097 - RNA, 19 nt, Artificial Sequence
  Description of Artificial Sequence: Synthetic oligonucleotide
aaagcgcaucauggaggag

SEQ ID NO: 2121098 - RNA, 19 nt, Artificial Sequence
  Description of Artificial Sequence: Synthetic oligonucleotide
uggaccccgccuugcaaga

SEQ ID NO: 2121099 - RNA, 19 nt, Artificial Sequence
  Description of Artificial Sequence: Synthetic oligonucleotide
ggacuugaugugucccagg

SEQ ID NO: 2121100 - RNA, 19 nt, Artificial Sequence
  Description of Artificial Sequence: Synthetic oligonucleotide
uaguuccacgggguggacc

SEQ ID NO: 2121101 - RNA, 19 nt, Artificial Sequence
  Description of Artificial Sequence: Synthetic oligonucleotide
acaagccaaggagauaguu

SEQ ID NO: 2121102 - RNA, 19 nt, Artificial Sequence
  Description of Artificial Sequence: Synthetic oligonucleotide
accuugaccgagggguccg

SEQ ID NO: 2121103 - RNA, 19 nt, Artificial Sequence
  Description of Artificial Sequence: Synthetic oligonucleotide
ccugggacgcacugcaggg

SEQ ID NO: 2121104 - RNA, 19 nt, Artificial Sequence
  Description of Artificial Sequence: Synthetic oligonucleotide
uuggucucucuggugggga

SEQ ID NO: 2121105 - RNA, 19 nt, Artificial Sequence
  Description of Artificial Sequence: Synthetic oligonucleotide
ccuaaaagucuucugcaga

SEQ ID NO: 2121106 - RNA, 19 nt, Artificial Sequence
  Description of Artificial Sequence: Synthetic oligonucleotide
gagucgggacucucuucgc

SEQ ID NO: 2121107 - RNA, 19 nt, Artificial Sequence
  Description of Artificial Sequence: Synthetic oligonucleotide
agugcugggcaggcccacc

SEQ ID NO: 2121108 - RNA, 19 nt, Artificial Sequence
  Description of Artificial Sequence: Synthetic oligonucleotide
ugaggcacaccuggucucu

SEQ ID NO: 2121109 - RNA, 19 nt, Artificial Sequence
  Description of Artificial Sequence: Synthetic oligonucleotide
caaucucaauuaggcagug

SEQ ID NO: 2121110 - RNA, 19 nt, Artificial Sequence
  Description of Artificial Sequence: Synthetic oligonucleotide
caauuaggcagugcuccuc

SEQ ID NO: 2121111 - RNA, 19 nt, Artificial Sequence
  Description of Artificial Sequence: Synthetic oligonucleotide
cagaggacacuggaaggug

SEQ ID NO: 2121112 - RNA, 19 nt, Artificial Sequence
  Description of Artificial Sequence: Synthetic oligonucleotide
gcuacucaucccaaagccc

SEQ ID NO: 2121113 - RNA, 19 nt, Artificial Sequence
  Description of Artificial Sequence: Synthetic oligonucleotide
cccuuucuccucauggggc

SEQ ID NO: 2121114 - RNA, 19 nt, Artificial Sequence
  Description of Artificial Sequence: Synthetic oligonucleotide
agcccaagauucgcgaccu

SEQ ID NO: 2121115 - RNA, 19 nt, Artificial Sequence
  Description of Artificial Sequence: Synthetic oligonucleotide
uggggcgagccuuccuuca

SEQ ID NO: 2121116 - RNA, 19 nt, Artificial Sequence
  Description of Artificial Sequence: Synthetic oligonucleotide
gguaaaguguucccugucu

SEQ ID NO: 2121117 - RNA, 19 nt, Artificial Sequence
  Description of Artificial Sequence: Synthetic oligonucleotide
cucugguggggaccgauga

SEQ ID NO: 2121118 - RNA, 19 nt, Artificial Sequence
  Description of Artificial Sequence: Synthetic oligonucleotide
ggcgagccuuccuucagag

SEQ ID NO: 2121119 - RNA, 19 nt, Artificial Sequence
  Description of Artificial Sequence: Synthetic oligonucleotide
ugcacccugccagguuucg

SEQ ID NO: 2121120 - RNA, 19 nt, Artificial Sequence
  Description of Artificial Sequence: Synthetic oligonucleotide
aguaggugcuggccaucca

SEQ ID NO: 2121121 - RNA, 19 nt, Artificial Sequence
  Description of Artificial Sequence: Synthetic oligonucleotide
gcagggauccuuguucugc

SEQ ID NO: 2121122 - RNA, 19 nt, Artificial Sequence
  Description of Artificial Sequence: Synthetic oligonucleotide
gcaucauggaggagcagcc

SEQ ID NO: 2121123 - RNA, 19 nt, Artificial Sequence
  Description of Artificial Sequence: Synthetic oligonucleotide
uccucauggggcgagccuu

SEQ ID NO: 2121124 - RNA, 19 nt, Artificial Sequence
  Description of Artificial Sequence: Synthetic oligonucleotide
uucggagaaagcgcaucau

SEQ ID NO: 2121125 - RNA, 19 nt, Artificial Sequence
  Description of Artificial Sequence: Synthetic oligonucleotide
ugcuggacuggggucccag

SEQ ID NO: 2121126 - RNA, 19 nt, Artificial Sequence
  Description of Artificial Sequence: Synthetic oligonucleotide
ccccuuucuccucaugggg

SEQ ID NO: 2121127 - RNA, 19 nt, Artificial Sequence
  Description of Artificial Sequence: Synthetic oligonucleotide
cacccugccagguuucgga

SEQ ID NO: 2121128 - RNA, 19 nt, Artificial Sequence
  Description of Artificial Sequence: Synthetic oligonucleotide
agcgcaucauggaggagca

SEQ ID NO: 2121129 - RNA, 19 nt, Artificial Sequence
  Description of Artificial Sequence: Synthetic oligonucleotide
auaguuccacgggguggac

SEQ ID NO: 2121130 - RNA, 19 nt, Artificial Sequence
  Description of Artificial Sequence: Synthetic oligonucleotide
agggauccuuguucugccu

SEQ ID NO: 2121131 - RNA, 19 nt, Artificial Sequence
  Description of Artificial Sequence: Synthetic oligonucleotide
cagcgugaugucuggccug

SEQ ID NO: 2121132 - RNA, 19 nt, Artificial Sequence
  Description of Artificial Sequence: Synthetic oligonucleotide
gcacacaacuugaggaagc

SEQ ID NO: 2121133 - RNA, 19 nt, Artificial Sequence
  Description of Artificial Sequence: Synthetic oligonucleotide
guggggaccgaugacaccu

SEQ ID NO: 2121134 - RNA, 19 nt, Artificial Sequence
  Description of Artificial Sequence: Synthetic oligonucleotide
cagagucgggacucucuuc

SEQ ID NO: 2121135 - RNA, 19 nt, Artificial Sequence
  Description of Artificial Sequence: Synthetic oligonucleotide
ggacucucuucgcacugcc

SEQ ID NO: 2121136 - RNA, 19 nt, Artificial Sequence
  Description of Artificial Sequence: Synthetic oligonucleotide
ccuggucagaagcucccgg

SEQ ID NO: 2121137 - RNA, 19 nt, Artificial Sequence
  Description of Artificial Sequence: Synthetic oligonucleotide
guggcgauauguggggcac

SEQ ID NO: 2121138 - RNA, 19 nt, Artificial Sequence
  Description of Artificial Sequence: Synthetic oligonucleotide
cccaccacacacacacagg

SEQ ID NO: 2121139 - RNA, 19 nt, Artificial Sequence
  Description of Artificial Sequence: Synthetic oligonucleotide
gaugacaccucugcacccu

SEQ ID NO: 2121140 - RNA, 19 nt, Artificial Sequence
  Description of Artificial Sequence: Synthetic oligonucleotide
cacgaaacccacugugucu

SEQ ID NO: 2121141 - RNA, 19 nt, Artificial Sequence
  Description of Artificial Sequence: Synthetic oligonucleotide
accgagggguccgagccug

SEQ ID NO: 2121142 - RNA, 19 nt, Artificial Sequence
  Description of Artificial Sequence: Synthetic oligonucleotide
cuauaggcgucugaugugu

SEQ ID NO: 2121143 - RNA, 19 nt, Artificial Sequence
  Description of Artificial Sequence: Synthetic oligonucleotide
aggcacaccuggucucuga

SEQ ID NO: 2121144 - RNA, 19 nt, Artificial Sequence
  Description of Artificial Sequence: Synthetic oligonucleotide
gguggcgauauguggggca

SEQ ID NO: 2121145 - RNA, 19 nt, Artificial Sequence
  Description of Artificial Sequence: Synthetic oligonucleotide
caugcuggacugggguccc

SEQ ID NO: 2121146 - RNA, 19 nt, Artificial Sequence
  Description of Artificial Sequence: Synthetic oligonucleotide
gcaggugcuuguacaagcc

SEQ ID NO: 2121147 - RNA, 19 nt, Artificial Sequence
  Description of Artificial Sequence: Synthetic oligonucleotide
cucucuucgcacugccaga

SEQ ID NO: 2121148 - RNA, 19 nt, Artificial Sequence
  Description of Artificial Sequence: Synthetic oligonucleotide
caggugcuuguacaagcca

SEQ ID NO: 2121149 - RNA, 19 nt, Artificial Sequence
  Description of Artificial Sequence: Synthetic oligonucleotide
ccacgaaacccacuguguc

SEQ ID NO: 2121150 - RNA, 19 nt, Artificial Sequence
  Description of Artificial Sequence: Synthetic oligonucleotide
gauucgcgaccuugaccga

SEQ ID NO: 2121151 - RNA, 19 nt, Artificial Sequence
  Description of Artificial Sequence: Synthetic oligonucleotide
ccaccacacacacacagga

SEQ ID NO: 2121152 - RNA, 19 nt, Artificial Sequence
  Description of Artificial Sequence: Synthetic oligonucleotide
caucaucuauaggcgucug

SEQ ID NO: 2121153 - RNA, 19 nt, Artificial Sequence
  Description of Artificial Sequence: Synthetic oligonucleotide
uucgcacugccagaaucuu

SEQ ID NO: 2121154 - RNA, 19 nt, Artificial Sequence
  Description of Artificial Sequence: Synthetic oligonucleotide
guggggcacacaacuugag

SEQ ID NO: 2121155 - RNA, 19 nt, Artificial Sequence
  Description of Artificial Sequence: Synthetic oligonucleotide
cucuuugacgaagcccuca

SEQ ID NO: 2121156 - RNA, 19 nt, Artificial Sequence
  Description of Artificial Sequence: Synthetic oligonucleotide
ccaagauucgcgaccuuga

SEQ ID NO: 2121157 - RNA, 19 nt, Artificial Sequence
  Description of Artificial Sequence: Synthetic oligonucleotide
gggcacacaacuugaggaa

SEQ ID NO: 2121158 - RNA, 19 nt, Artificial Sequence
  Description of Artificial Sequence: Synthetic oligonucleotide
ggguaaaguguucccuguc

SEQ ID NO: 2121159 - RNA, 19 nt, Artificial Sequence
  Description of Artificial Sequence: Synthetic oligonucleotide
gggcaggcccaccacacac

SEQ ID NO: 2121160 - RNA, 19 nt, Artificial Sequence
  Description of Artificial Sequence: Synthetic oligonucleotide
gccggugagggccucacuc

SEQ ID NO: 2121161 - RNA, 19 nt, Artificial Sequence
  Description of Artificial Sequence: Synthetic oligonucleotide
ucccaaagcccagggccac

SEQ ID NO: 2121162 - RNA, 19 nt, Artificial Sequence
  Description of Artificial Sequence: Synthetic oligonucleotide
uggggaccgaugacaccuc

SEQ ID NO: 2121163 - RNA, 19 nt, Artificial Sequence
  Description of Artificial Sequence: Synthetic oligonucleotide
gaugucuggccuggucaga

SEQ ID NO: 2121164 - RNA, 19 nt, Artificial Sequence
  Description of Artificial Sequence: Synthetic oligonucleotide
uucuccucauggggcgagc

SEQ ID NO: 2121165 - RNA, 19 nt, Artificial Sequence
  Description of Artificial Sequence: Synthetic oligonucleotide
uggcugacuugugcaggug

SEQ ID NO: 2121166 - RNA, 19 nt, Artificial Sequence
  Description of Artificial Sequence: Synthetic oligonucleotide
cgucugaugugucaggaca

SEQ ID NO: 2121167 - RNA, 19 nt, Artificial Sequence
  Description of Artificial Sequence: Synthetic oligonucleotide
cccaagauucgcgaccuug

SEQ ID NO: 2121168 - RNA, 19 nt, Artificial Sequence
  Description of Artificial Sequence: Synthetic oligonucleotide
gcgaccuugaccgaggggu

SEQ ID NO: 2121169 - RNA, 19 nt, Artificial Sequence
  Description of Artificial Sequence: Synthetic oligonucleotide
augugucaggacagugcug

SEQ ID NO: 2121170 - RNA, 19 nt, Artificial Sequence
  Description of Artificial Sequence: Synthetic oligonucleotide
gcacaccuggucucugagc

SEQ ID NO: 2121171 - RNA, 19 nt, Artificial Sequence
  Description of Artificial Sequence: Synthetic oligonucleotide
cgauauguggggcacacaa

SEQ ID NO: 2121172 - RNA, 19 nt, Artificial Sequence
  Description of Artificial Sequence: Synthetic oligonucleotide
gugagggccagugguccug

SEQ ID NO: 2121173 - RNA, 19 nt, Artificial Sequence
  Description of Artificial Sequence: Synthetic oligonucleotide
cucauggggcgagccuucc

SEQ ID NO: 2121174 - RNA, 19 nt, Artificial Sequence
  Description of Artificial Sequence: Synthetic oligonucleotide
acgggguggaccccgccuu

SEQ ID NO: 2121175 - RNA, 19 nt, Artificial Sequence
  Description of Artificial Sequence: Synthetic oligonucleotide
guggaccuaaaagucuucu

SEQ ID NO: 2121176 - RNA, 19 nt, Artificial Sequence
  Description of Artificial Sequence: Synthetic oligonucleotide
cagcucagacuccacgaaa

SEQ ID NO: 2121177 - RNA, 19 nt, Artificial Sequence
  Description of Artificial Sequence: Synthetic oligonucleotide
cugcagggauccuuguucu

SEQ ID NO: 2121178 - RNA, 19 nt, Artificial Sequence
  Description of Artificial Sequence: Synthetic oligonucleotide
gguggggaccgaugacacc

SEQ ID NO: 2121179 - RNA, 19 nt, Artificial Sequence
  Description of Artificial Sequence: Synthetic oligonucleotide
gcgagccuuccuucagagg

SEQ ID NO: 2121180 - RNA, 19 nt, Artificial Sequence
  Description of Artificial Sequence: Synthetic oligonucleotide
gcagcccaagauucgcgac

SEQ ID NO: 2121181 - RNA, 19 nt, Artificial Sequence
  Description of Artificial Sequence: Synthetic oligonucleotide
ccaaucucaauuaggcagu

SEQ ID NO: 2121182 - RNA, 19 nt, Artificial Sequence
  Description of Artificial Sequence: Synthetic oligonucleotide
ccaggaguaggugcuggcc

SEQ ID NO: 2121183 - RNA, 19 nt, Artificial Sequence
  Description of Artificial Sequence: Synthetic oligonucleotide
gaggccaaucugaggucuc

SEQ ID NO: 2121184 - RNA, 19 nt, Artificial Sequence
  Description of Artificial Sequence: Synthetic oligonucleotide
ccuuccagagucgggacuc

SEQ ID NO: 2121185 - RNA, 19 nt, Artificial Sequence
  Description of Artificial Sequence: Synthetic oligonucleotide
cagugguccugggacgcac

SEQ ID NO: 2121186 - RNA, 19 nt, Artificial Sequence
  Description of Artificial Sequence: Synthetic oligonucleotide
gagccuuccuucagaggaa

SEQ ID NO: 2121187 - RNA, 19 nt, Artificial Sequence
  Description of Artificial Sequence: Synthetic oligonucleotide
ggagauaguuccacggggu

SEQ ID NO: 2121188 - RNA, 19 nt, Artificial Sequence
  Description of Artificial Sequence: Synthetic oligonucleotide
gaggcacaccuggucucug

SEQ ID NO: 2121189 - RNA, 19 nt, Artificial Sequence
  Description of Artificial Sequence: Synthetic oligonucleotide
ggucucucugguggggacc

SEQ ID NO: 2121190 - RNA, 19 nt, Artificial Sequence
  Description of Artificial Sequence: Synthetic oligonucleotide
cugcacccugccagguuuc

SEQ ID NO: 2121191 - RNA, 19 nt, Artificial Sequence
  Description of Artificial Sequence: Synthetic oligonucleotide
aggaugcuacucaucccaa

SEQ ID NO: 2121192 - RNA, 19 nt, Artificial Sequence
  Description of Artificial Sequence: Synthetic oligonucleotide
aagcuggggcacacaacuu

SEQ ID NO: 2121193 - RNA, 19 nt, Artificial Sequence
  Description of Artificial Sequence: Synthetic oligonucleotide
ugccggugagggccucacu

SEQ ID NO: 2121194 - RNA, 19 nt, Artificial Sequence
  Description of Artificial Sequence: Synthetic oligonucleotide
ggcgucugaugugucagga

SEQ ID NO: 2121195 - RNA, 19 nt, Artificial Sequence
  Description of Artificial Sequence: Synthetic oligonucleotide
acgaagcccucagggguga

SEQ ID NO: 2121196 - RNA, 19 nt, Artificial Sequence
  Description of Artificial Sequence: Synthetic oligonucleotide
gcgucugaugugucaggac

SEQ ID NO: 2121197 - RNA, 19 nt, Artificial Sequence
  Description of Artificial Sequence: Synthetic oligonucleotide
cacacaacuugaggaagcu

SEQ ID NO: 2121198 - RNA, 19 nt, Artificial Sequence
  Description of Artificial Sequence: Synthetic oligonucleotide
gggccacagggacuugaug

SEQ ID NO: 2121199 - RNA, 19 nt, Artificial Sequence
  Description of Artificial Sequence: Synthetic oligonucleotide
ccuugcaagaggccaaucu

SEQ ID NO: 2121200 - RNA, 19 nt, Artificial Sequence
  Description of Artificial Sequence: Synthetic oligonucleotide
ggacccugacucaggaaga

SEQ ID NO: 2121201 - RNA, 19 nt, Artificial Sequence
  Description of Artificial Sequence: Synthetic oligonucleotide
agacuccacgaaacccacu

SEQ ID NO: 2121202 - RNA, 19 nt, Artificial Sequence
  Description of Artificial Sequence: Synthetic oligonucleotide
ggccuggucagaagcuccc

SEQ ID NO: 2121203 - RNA, 19 nt, Artificial Sequence
  Description of Artificial Sequence: Synthetic oligonucleotide
gccggccuccuccagcgug

SEQ ID NO: 2121204 - RNA, 19 nt, Artificial Sequence
  Description of Artificial Sequence: Synthetic oligonucleotide
gucagaagcucccggccuu

SEQ ID NO: 2121205 - RNA, 19 nt, Artificial Sequence
  Description of Artificial Sequence: Synthetic oligonucleotide
gggaccgaugacaccucug

SEQ ID NO: 2121206 - RNA, 19 nt, Artificial Sequence
  Description of Artificial Sequence: Synthetic oligonucleotide
guccugggacgcacugcag

SEQ ID NO: 2121207 - RNA, 19 nt, Artificial Sequence
  Description of Artificial Sequence: Synthetic oligonucleotide
acgcacugcagggauccuu

SEQ ID NO: 2121208 - RNA, 19 nt, Artificial Sequence
  Description of Artificial Sequence: Synthetic oligonucleotide
gaaccuccuuggucucucu

SEQ ID NO: 2121209 - RNA, 19 nt, Artificial Sequence
  Description of Artificial Sequence: Synthetic oligonucleotide
guucccugucugagucccc

SEQ ID NO: 2121210 - RNA, 19 nt, Artificial Sequence
  Description of Artificial Sequence: Synthetic oligonucleotide
gcccaccuuccagagucgg

SEQ ID NO: 2121211 - RNA, 19 nt, Artificial Sequence
  Description of Artificial Sequence: Synthetic oligonucleotide
cauggggcgagccuuccuu

SEQ ID NO: 2121212 - RNA, 19 nt, Artificial Sequence
  Description of Artificial Sequence: Synthetic oligonucleotide
cugccggugagggccucac

SEQ ID NO: 2121213 - RNA, 19 nt, Artificial Sequence
  Description of Artificial Sequence: Synthetic oligonucleotide
gguggaccccgccuugcaa

SEQ ID NO: 2121214 - RNA, 19 nt, Artificial Sequence
  Description of Artificial Sequence: Synthetic oligonucleotide
cgugaugucuggccugguc

SEQ ID NO: 2121215 - RNA, 19 nt, Artificial Sequence
  Description of Artificial Sequence: Synthetic oligonucleotide
cugggacgcacugcaggga

SEQ ID NO: 2121216 - RNA, 19 nt, Artificial Sequence
  Description of Artificial Sequence: Synthetic oligonucleotide
gggcgagccuuccuucaga

SEQ ID NO: 2121217 - RNA, 19 nt, Artificial Sequence
  Description of Artificial Sequence: Synthetic oligonucleotide
caccacacacacacaggau

SEQ ID NO: 2121218 - RNA, 19 nt, Artificial Sequence
  Description of Artificial Sequence: Synthetic oligonucleotide
ccucauggggcgagccuuc

SEQ ID NO: 2121219 - RNA, 19 nt, Artificial Sequence
  Description of Artificial Sequence: Synthetic oligonucleotide
cgccaauccugagagggac

SEQ ID NO: 2121220 - RNA, 19 nt, Artificial Sequence
  Description of Artificial Sequence: Synthetic oligonucleotide
ggcuccugccggugagggc

SEQ ID NO: 2121221 - RNA, 19 nt, Artificial Sequence
  Description of Artificial Sequence: Synthetic oligonucleotide
cagugggcuccugccggug

SEQ ID NO: 2121222 - RNA, 19 nt, Artificial Sequence
  Description of Artificial Sequence: Synthetic oligonucleotide
cacacacacacaggaugcu

SEQ ID NO: 2121223 - RNA, 19 nt, Artificial Sequence
  Description of Artificial Sequence: Synthetic oligonucleotide
ggccaaucugaggucucca

SEQ ID NO: 2121224 - RNA, 19 nt, Artificial Sequence
  Description of Artificial Sequence: Synthetic oligonucleotide
ggaccccgccuugcaagag

SEQ ID NO: 2121225 - RNA, 19 nt, Artificial Sequence
  Description of Artificial Sequence: Synthetic oligonucleotide
cuccucauggggcgagccu

SEQ ID NO: 2121226 - RNA, 19 nt, Artificial Sequence
  Description of Artificial Sequence: Synthetic oligonucleotide
ggcaggcccaccacacaca

SEQ ID NO: 2121227 - RNA, 19 nt, Artificial Sequence
  Description of Artificial Sequence: Synthetic oligonucleotide
gcucccggccuucugggcu

SEQ ID NO: 2121228 - RNA, 19 nt, Artificial Sequence
  Description of Artificial Sequence: Synthetic oligonucleotide
gggguggaccccgccuugc

SEQ ID NO: 2121229 - RNA, 19 nt, Artificial Sequence
  Description of Artificial Sequence: Synthetic oligonucleotide
cacgggguggaccccgccu

SEQ ID NO: 2121230 - RNA, 19 nt, Artificial Sequence
  Description of Artificial Sequence: Synthetic oligonucleotide
ggguggaccccgccuugca

SEQ ID NO: 2121231 - RNA, 19 nt, Artificial Sequence
  Description of Artificial Sequence: Synthetic oligonucleotide
ccagcgugaugucuggccu

SEQ ID NO: 2121232 - RNA, 19 nt, Artificial Sequence
  Description of Artificial Sequence: Synthetic oligonucleotide
cuggucucugagccuuggu

SEQ ID NO: 2121233 - RNA, 19 nt, Artificial Sequence
  Description of Artificial Sequence: Synthetic oligonucleotide
cacugugucuguggaccua

SEQ ID NO: 2121234 - RNA, 19 nt, Artificial Sequence
  Description of Artificial Sequence: Synthetic oligonucleotide
cccgaggccuccccugcug

SEQ ID NO: 2121235 - RNA, 19 nt, Artificial Sequence
  Description of Artificial Sequence: Synthetic oligonucleotide
gccauccaccaugccggcc

SEQ ID NO: 2121236 - RNA, 19 nt, Artificial Sequence
  Description of Artificial Sequence: Synthetic oligonucleotide
cgcgaccuugaccgagggg

SEQ ID NO: 2121237 - RNA, 19 nt, Artificial Sequence
  Description of Artificial Sequence: Synthetic oligonucleotide
ccugggccgccaauccuga

SEQ ID NO: 2121238 - RNA, 19 nt, Artificial Sequence
  Description of Artificial Sequence: Synthetic oligonucleotide
cccugccagguuucggaga

SEQ ID NO: 2121239 - RNA, 19 nt, Artificial Sequence
  Description of Artificial Sequence: Synthetic oligonucleotide
ccgccaauccugagaggga

SEQ ID NO: 2121240 - RNA, 19 nt, Artificial Sequence
  Description of Artificial Sequence: Synthetic oligonucleotide
augcuggacugggguccca

SEQ ID NO: 2121241 - RNA, 19 nt, Artificial Sequence
  Description of Artificial Sequence: Synthetic oligonucleotide
ccgagggguccgagccugg

SEQ ID NO: 2121242 - RNA, 19 nt, Artificial Sequence
  Description of Artificial Sequence: Synthetic oligonucleotide
ccccgccuugcaagaggcc

SEQ ID NO: 2121243 - RNA, 19 nt, Artificial Sequence
  Description of Artificial Sequence: Synthetic oligonucleotide
cgagccugggccgccaauc

SEQ ID NO: 2121244 - RNA, 19 nt, Artificial Sequence
  Description of Artificial Sequence: Synthetic oligonucleotide
ggggaccgaugacaccucu

SEQ ID NO: 2121245 - RNA, 19 nt, Artificial Sequence
  Description of Artificial Sequence: Synthetic oligonucleotide
gcgauauguggggcacaca

SEQ ID NO: 2121246 - RNA, 19 nt, Artificial Sequence
  Description of Artificial Sequence: Synthetic oligonucleotide
gguuucggagaaagcgcau

SEQ ID NO: 2121247 - RNA, 19 nt, Artificial Sequence
  Description of Artificial Sequence: Synthetic oligonucleotide
cucucugguggggaccgau

SEQ ID NO: 2121248 - RNA, 19 nt, Artificial Sequence
  Description of Artificial Sequence: Synthetic oligonucleotide
gccuuggucauggcugacu

SEQ ID NO: 2121249 - RNA, 19 nt, Artificial Sequence
  Description of Artificial Sequence: Synthetic oligonucleotide
ccaugccggccuccuccag

SEQ ID NO: 2121250 - RNA, 19 nt, Artificial Sequence
  Description of Artificial Sequence: Synthetic oligonucleotide
gcgcaucauggaggagcag

SEQ ID NO: 2121251 - RNA, 19 nt, Artificial Sequence
  Description of Artificial Sequence: Synthetic oligonucleotide
ccggugagggccucacucu

SEQ ID NO: 2121252 - RNA, 19 nt, Artificial Sequence
  Description of Artificial Sequence: Synthetic oligonucleotide
gacgcacugcagggauccu

SEQ ID NO: 2121253 - RNA, 19 nt, Artificial Sequence
  Description of Artificial Sequence: Synthetic oligonucleotide
cucugcacccugccagguu

SEQ ID NO: 2121254 - RNA, 19 nt, Artificial Sequence
  Description of Artificial Sequence: Synthetic oligonucleotide
guccgagccugggccgcca

SEQ ID NO: 2121255 - RNA, 19 nt, Artificial Sequence
  Description of Artificial Sequence: Synthetic oligonucleotide
gcacugcagggauccuugu

SEQ ID NO: 2121256 - RNA, 19 nt, Artificial Sequence
  Description of Artificial Sequence: Synthetic oligonucleotide
cuccugccggugagggccu

SEQ ID NO: 2121257 - RNA, 19 nt, Artificial Sequence
  Description of Artificial Sequence: Synthetic oligonucleotide
cugccagguuucggagaaa

SEQ ID NO: 2121258 - RNA, 19 nt, Artificial Sequence
  Description of Artificial Sequence: Synthetic oligonucleotide
ccacagggacuugaugugu

SEQ ID NO: 2121259 - RNA, 19 nt, Artificial Sequence
  Description of Artificial Sequence: Synthetic oligonucleotide
cuucugggcugcccaccuu

SEQ ID NO: 2121260 - RNA, 19 nt, Artificial Sequence
  Description of Artificial Sequence: Synthetic oligonucleotide
ggcccaccacacacacaca

SEQ ID NO: 2121261 - RNA, 19 nt, Artificial Sequence
  Description of Artificial Sequence: Synthetic oligonucleotide
cgggguggaccccgccuug

SEQ ID NO: 2121262 - RNA, 19 nt, Artificial Sequence
  Description of Artificial Sequence: Synthetic oligonucleotide
ccagugguccugggacgca

SEQ ID NO: 2121263 - RNA, 19 nt, Artificial Sequence
  Description of Artificial Sequence: Synthetic oligonucleotide
ccuugaccgagggguccga

SEQ ID NO: 2121264 - RNA, 19 nt, Artificial Sequence
  Description of Artificial Sequence: Synthetic oligonucleotide
cccggccuucugggcugcc

SEQ ID NO: 2121265 - RNA, 19 nt, Artificial Sequence
  Description of Artificial Sequence: Synthetic oligonucleotide
ccccgaggccuccccugcu

SEQ ID NO: 2121266 - RNA, 19 nt, Artificial Sequence
  Description of Artificial Sequence: Synthetic oligonucleotide
ccgagccugggccgccaau

SEQ ID NO: 2121267 - RNA, 19 nt, Artificial Sequence
  Description of Artificial Sequence: Synthetic oligonucleotide
cgccuugcaagaggccaau

SEQ ID NO: 2121268 - RNA, 19 nt, Artificial Sequence
  Description of Artificial Sequence: Synthetic oligonucleotide
aacaacaccgaauuggacc

SEQ ID NO: 2121269 - RNA, 19 nt, Artificial Sequence
  Description of Artificial Sequence: Synthetic oligonucleotide
aauuaucuuacucagauau

SEQ ID NO: 2121270 - RNA, 19 nt, Artificial Sequence
  Description of Artificial Sequence: Synthetic oligonucleotide
acuauuuuguaauuagggc

SEQ ID NO: 2121271 - RNA, 19 nt, Artificial Sequence
  Description of Artificial Sequence: Synthetic oligonucleotide
aaauacugugaauaaguac

SEQ ID NO: 2121272 - RNA, 19 nt, Artificial Sequence
  Description of Artificial Sequence: Synthetic oligonucleotide
uuugguauaaugaacaguc

SEQ ID NO: 2121273 - RNA, 19 nt, Artificial Sequence
  Description of Artificial Sequence: Synthetic oligonucleotide
uguaauuagggcaagguga

SEQ ID NO: 2121274 - RNA, 19 nt, Artificial Sequence
  Description of Artificial Sequence: Synthetic oligonucleotide
cauacauaguauauaaucg

SEQ ID NO: 2121275 - RNA, 19 nt, Artificial Sequence
  Description of Artificial Sequence: Synthetic oligonucleotide
aauacugugaauaaguaca

SEQ ID NO: 2121276 - RNA, 19 nt, Artificial Sequence
  Description of Artificial Sequence: Synthetic oligonucleotide
uucgaagucagaaucauug

SEQ ID NO: 2121277 - RNA, 19 nt, Artificial Sequence
  Description of Artificial Sequence: Synthetic oligonucleotide
acaauuauuuuaaaggugg

SEQ ID NO: 2121278 - RNA, 19 nt, Artificial Sequence
  Description of Artificial Sequence: Synthetic oligonucleotide
ucaguuaccaauuuucuga

SEQ ID NO: 2121279 - RNA, 19 nt, Artificial Sequence
  Description of Artificial Sequence: Synthetic oligonucleotide
gaaucauugccauaauagg

SEQ ID NO: 2121280 - RNA, 19 nt, Artificial Sequence
  Description of Artificial Sequence: Synthetic oligonucleotide
ccuacaauuauuuuaaagg

SEQ ID NO: 2121281 - RNA, 19 nt, Artificial Sequence
  Description of Artificial Sequence: Synthetic oligonucleotide
uuuaaagguggacaguaag

SEQ ID NO: 2121282 - RNA, 19 nt, Artificial Sequence
  Description of Artificial Sequence: Synthetic oligonucleotide
uucuauucaaaucucucag

SEQ ID NO: 2121283 - RNA, 19 nt, Artificial Sequence
  Description of Artificial Sequence: Synthetic oligonucleotide
cauaguauauaaucgaaug

SEQ ID NO: 2121284 - RNA, 19 nt, Artificial Sequence
  Description of Artificial Sequence: Synthetic oligonucleotide
aaauguuaccgagacacac

SEQ ID NO: 2121285 - RNA, 19 nt, Artificial Sequence
  Description of Artificial Sequence: Synthetic oligonucleotide
ucuacuuuguuccauauuu

SEQ ID NO: 2121286 - RNA, 19 nt, Artificial Sequence
  Description of Artificial Sequence: Synthetic oligonucleotide
uauauaaucgaaugugaca

SEQ ID NO: 2121287 - RNA, 19 nt, Artificial Sequence
  Description of Artificial Sequence: Synthetic oligonucleotide
ugugcuaaugccaugauuu

SEQ ID NO: 2121288 - RNA, 19 nt, Artificial Sequence
  Description of Artificial Sequence: Synthetic oligonucleotide
uuccuaguuggauauagcg

SEQ ID NO: 2121289 - RNA, 19 nt, Artificial Sequence
  Description of Artificial Sequence: Synthetic oligonucleotide
ucaauaaugaguuguuucu

SEQ ID NO: 2121290 - RNA, 19 nt, Artificial Sequence
  Description of Artificial Sequence: Synthetic oligonucleotide
ucuguaaaaguacauucca

SEQ ID NO: 2121291 - RNA, 19 nt, Artificial Sequence
  Description of Artificial Sequence: Synthetic oligonucleotide
agucuaagaaugcuuugcc

SEQ ID NO: 2121292 - RNA, 19 nt, Artificial Sequence
  Description of Artificial Sequence: Synthetic oligonucleotide
aauuagggcaaggugagag

SEQ ID NO: 2121293 - RNA, 19 nt, Artificial Sequence
  Description of Artificial Sequence: Synthetic oligonucleotide
uauguaaauacugugaaua

SEQ ID NO: 2121294 - RNA, 19 nt, Artificial Sequence
  Description of Artificial Sequence: Synthetic oligonucleotide
ugaauaaguacaaggaaau

SEQ ID NO: 2121295 - RNA, 19 nt, Artificial Sequence
  Description of Artificial Sequence: Synthetic oligonucleotide
uaguauauaaucgaaugug

SEQ ID NO: 2121296 - RNA, 19 nt, Artificial Sequence
  Description of Artificial Sequence: Synthetic oligonucleotide
gaucauagcucccaaguag

SEQ ID NO: 2121297 - RNA, 19 nt, Artificial Sequence
  Description of Artificial Sequence: Synthetic oligonucleotide
uauuuuguaauuagggcaa

SEQ ID NO: 2121298 - RNA, 19 nt, Artificial Sequence
  Description of Artificial Sequence: Synthetic oligonucleotide
aaggacguggcgcaugcgc

SEQ ID NO: 2121299 - RNA, 19 nt, Artificial Sequence
  Description of Artificial Sequence: Synthetic oligonucleotide
auuauuuuaaagguggaca

SEQ ID NO: 2121300 - RNA, 19 nt, Artificial Sequence
  Description of Artificial Sequence: Synthetic oligonucleotide
aauaaaugaaguguuuggu

SEQ ID NO: 2121301 - RNA, 19 nt, Artificial Sequence
  Description of Artificial Sequence: Synthetic oligonucleotide
acaauauguaaauacugug

SEQ ID NO: 2121302 - RNA, 19 nt, Artificial Sequence
  Description of Artificial Sequence: Synthetic oligonucleotide
aauuggacccagcuuccgc

SEQ ID NO: 2121303 - RNA, 19 nt, Artificial Sequence
  Description of Artificial Sequence: Synthetic oligonucleotide
gaacauaugccuaauuucc

SEQ ID NO: 2121304 - RNA, 19 nt, Artificial Sequence
  Description of Artificial Sequence: Synthetic oligonucleotide
ucaucaguuaccaauuuuc

SEQ ID NO: 2121305 - RNA, 19 nt, Artificial Sequence
  Description of Artificial Sequence: Synthetic oligonucleotide
uaaaugaaguguuugguau

SEQ ID NO: 2121306 - RNA, 19 nt, Artificial Sequence
  Description of Artificial Sequence: Synthetic oligonucleotide
aaaucucucagauugcuuu

SEQ ID NO: 2121307 - RNA, 19 nt, Artificial Sequence
  Description of Artificial Sequence: Synthetic oligonucleotide
agacacacgaacaacaccg

SEQ ID NO: 2121308 - RNA, 19 nt, Artificial Sequence
  Description of Artificial Sequence: Synthetic oligonucleotide
cuauuuuguaauuagggca

SEQ ID NO: 2121309 - RNA, 19 nt, Artificial Sequence
  Description of Artificial Sequence: Synthetic oligonucleotide
uuucuauucaaaucucuca

SEQ ID NO: 2121310 - RNA, 19 nt, Artificial Sequence
  Description of Artificial Sequence: Synthetic oligonucleotide
uucaauaaugaguuguuuc

SEQ ID NO: 2121311 - RNA, 19 nt, Artificial Sequence
  Description of Artificial Sequence: Synthetic oligonucleotide
ucuaagaaugcuuugccuc

SEQ ID NO: 2121312 - RNA, 19 nt, Artificial Sequence
  Description of Artificial Sequence: Synthetic oligonucleotide
ugugaauaaguacaaggaa

SEQ ID NO: 2121313 - RNA, 19 nt, Artificial Sequence
  Description of Artificial Sequence: Synthetic oligonucleotide
ucgaaugugacaaagucuu

SEQ ID NO: 2121314 - RNA, 19 nt, Artificial Sequence
  Description of Artificial Sequence: Synthetic oligonucleotide
auaguauauaaucgaaugu

SEQ ID NO: 2121315 - RNA, 19 nt, Artificial Sequence
  Description of Artificial Sequence: Synthetic oligonucleotide
auacauaguauauaaucga

SEQ ID NO: 2121316 - RNA, 19 nt, Artificial Sequence
  Description of Artificial Sequence: Synthetic oligonucleotide
ucugucuugccuuaugggc

SEQ ID NO: 2121317 - RNA, 19 nt, Artificial Sequence
  Description of Artificial Sequence: Synthetic oligonucleotide
uuaaagguggacaguaagu

SEQ ID NO: 2121318 - RNA, 19 nt, Artificial Sequence
  Description of Artificial Sequence: Synthetic oligonucleotide
auaauagggaucuucaaua

SEQ ID NO: 2121319 - RNA, 19 nt, Artificial Sequence
  Description of Artificial Sequence: Synthetic oligonucleotide
ugguacaccacuucgaagu

SEQ ID NO: 2121320 - RNA, 19 nt, Artificial Sequence
  Description of Artificial Sequence: Synthetic oligonucleotide
ugauuucucaggcagcuga

SEQ ID NO: 2121321 - RNA, 19 nt, Artificial Sequence
  Description of Artificial Sequence: Synthetic oligonucleotide
aaguguuugguauaaugaa

SEQ ID NO: 2121322 - RNA, 19 nt, Artificial Sequence
  Description of Artificial Sequence: Synthetic oligonucleotide
uuguaauuagggcaaggug

SEQ ID NO: 2121323 - RNA, 19 nt, Artificial Sequence
  Description of Artificial Sequence: Synthetic oligonucleotide
auauaaucgaaugugacaa

SEQ ID NO: 2121324 - RNA, 19 nt, Artificial Sequence
  Description of Artificial Sequence: Synthetic oligonucleotide
ucuauaacauuuguguucu

SEQ ID NO: 2121325 - RNA, 19 nt, Artificial Sequence
  Description of Artificial Sequence: Synthetic oligonucleotide
accuacaauuauuuuaaag

SEQ ID NO: 2121326 - RNA, 19 nt, Artificial Sequence
  Description of Artificial Sequence: Synthetic oligonucleotide
acauaugccuaauuuccac

SEQ ID NO: 2121327 - RNA, 19 nt, Artificial Sequence
  Description of Artificial Sequence: Synthetic oligonucleotide
acgaacaacaccgaauugg

SEQ ID NO: 2121328 - RNA, 19 nt, Artificial Sequence
  Description of Artificial Sequence: Synthetic oligonucleotide
accucaaauuaucuuacuc

SEQ ID NO: 2121329 - RNA, 19 nt, Artificial Sequence
  Description of Artificial Sequence: Synthetic oligonucleotide
uuuguuccauauuugcuug

SEQ ID NO: 2121330 - RNA, 19 nt, Artificial Sequence
  Description of Artificial Sequence: Synthetic oligonucleotide
cucuguaaaaguacauucc

SEQ ID NO: 2121331 - RNA, 19 nt, Artificial Sequence
  Description of Artificial Sequence: Synthetic oligonucleotide
uuugccucaccucaaauua

SEQ ID NO: 2121332 - RNA, 19 nt, Artificial Sequence
  Description of Artificial Sequence: Synthetic oligonucleotide
cauguuucgguacagccgc

SEQ ID NO: 2121333 - RNA, 19 nt, Artificial Sequence
  Description of Artificial Sequence: Synthetic oligonucleotide
uucagagugacucuucuau

SEQ ID NO: 2121334 - RNA, 19 nt, Artificial Sequence
  Description of Artificial Sequence: Synthetic oligonucleotide
aucaauauguggguaugcc

SEQ ID NO: 2121335 - RNA, 19 nt, Artificial Sequence
  Description of Artificial Sequence: Synthetic oligonucleotide
aauguuaccgagacacacg

SEQ ID NO: 2121336 - RNA, 19 nt, Artificial Sequence
  Description of Artificial Sequence: Synthetic oligonucleotide
auugccauaauagggaucu

SEQ ID NO: 2121337 - RNA, 19 nt, Artificial Sequence
  Description of Artificial Sequence: Synthetic oligonucleotide
uccuaguuggauauagcgc

SEQ ID NO: 2121338 - RNA, 19 nt, Artificial Sequence
  Description of Artificial Sequence: Synthetic oligonucleotide
aauauguggguaugcccag

SEQ ID NO: 2121339 - RNA, 19 nt, Artificial Sequence
  Description of Artificial Sequence: Synthetic oligonucleotide
agagguuccaauuagucua

SEQ ID NO: 2121340 - RNA, 19 nt, Artificial Sequence
  Description of Artificial Sequence: Synthetic oligonucleotide
aagaaugcuuugccucacc

SEQ ID NO: 2121341 - RNA, 19 nt, Artificial Sequence
  Description of Artificial Sequence: Synthetic oligonucleotide
aggccagucucauuugucc

SEQ ID NO: 2121342 - RNA, 19 nt, Artificial Sequence
  Description of Artificial Sequence: Synthetic oligonucleotide
ugaccggcaaauguuaccg

SEQ ID NO: 2121343 - RNA, 19 nt, Artificial Sequence
  Description of Artificial Sequence: Synthetic oligonucleotide
caucuaucgagucuucucc

SEQ ID NO: 2121344 - RNA, 19 nt, Artificial Sequence
  Description of Artificial Sequence: Synthetic oligonucleotide
aguguuugguauaaugaac

SEQ ID NO: 2121345 - RNA, 19 nt, Artificial Sequence
  Description of Artificial Sequence: Synthetic oligonucleotide
uauaaugaacagucuucag

SEQ ID NO: 2121346 - RNA, 19 nt, Artificial Sequence
  Description of Artificial Sequence: Synthetic oligonucleotide
ugcuuucauccauacauag

SEQ ID NO: 2121347 - RNA, 19 nt, Artificial Sequence
  Description of Artificial Sequence: Synthetic oligonucleotide
auagggaucuucaauaaug

SEQ ID NO: 2121348 - RNA, 19 nt, Artificial Sequence
  Description of Artificial Sequence: Synthetic oligonucleotide
caguaagucagcugaaaag

SEQ ID NO: 2121349 - RNA, 19 nt, Artificial Sequence
  Description of Artificial Sequence: Synthetic oligonucleotide
acuuguuuugaagacagug

SEQ ID NO: 2121350 - RNA, 19 nt, Artificial Sequence
  Description of Artificial Sequence: Synthetic oligonucleotide
uguggguaugcccaggcca

SEQ ID NO: 2121351 - RNA, 19 nt, Artificial Sequence
  Description of Artificial Sequence: Synthetic oligonucleotide
uccaccuacaauuauuuua

SEQ ID NO: 2121352 - RNA, 19 nt, Artificial Sequence
  Description of Artificial Sequence: Synthetic oligonucleotide
guuaccgagacacacgaac

SEQ ID NO: 2121353 - RNA, 19 nt, Artificial Sequence
  Description of Artificial Sequence: Synthetic oligonucleotide
uuguuucuguggaucauag

SEQ ID NO: 2121354 - RNA, 19 nt, Artificial Sequence
  Description of Artificial Sequence: Synthetic oligonucleotide
caauauguaaauacuguga

SEQ ID NO: 2121355 - RNA, 19 nt, Artificial Sequence
  Description of Artificial Sequence: Synthetic oligonucleotide
augccuaauuuccaccuac

SEQ ID NO: 2121356 - RNA, 19 nt, Artificial Sequence
  Description of Artificial Sequence: Synthetic oligonucleotide
uuuguaauuagggcaaggu

SEQ ID NO: 2121357 - RNA, 19 nt, Artificial Sequence
  Description of Artificial Sequence: Synthetic oligonucleotide
uauaacauuuguguucuac

SEQ ID NO: 2121358 - RNA, 19 nt, Artificial Sequence
  Description of Artificial Sequence: Synthetic oligonucleotide
agagugacucuucuauaac

SEQ ID NO: 2121359 - RNA, 19 nt, Artificial Sequence
  Description of Artificial Sequence: Synthetic oligonucleotide
aucauagcucccaaguagc

SEQ ID NO: 2121360 - RNA, 19 nt, Artificial Sequence
  Description of Artificial Sequence: Synthetic oligonucleotide
uuccaauuagucuaagaau

SEQ ID NO: 2121361 - RNA, 19 nt, Artificial Sequence
  Description of Artificial Sequence: Synthetic oligonucleotide
auaaugaguuguuucugug

SEQ ID NO: 2121362 - RNA, 19 nt, Artificial Sequence
  Description of Artificial Sequence: Synthetic oligonucleotide
uuaucuuacucagauauuu

SEQ ID NO: 2121363 - RNA, 19 nt, Artificial Sequence
  Description of Artificial Sequence: Synthetic oligonucleotide
auccauacauaguauauaa

SEQ ID NO: 2121364 - RNA, 19 nt, Artificial Sequence
  Description of Artificial Sequence: Synthetic oligonucleotide
uguuuugaagacaguggca

SEQ ID NO: 2121365 - RNA, 19 nt, Artificial Sequence
  Description of Artificial Sequence: Synthetic oligonucleotide
ucuauucaaaucucucaga

SEQ ID NO: 2121366 - RNA, 19 nt, Artificial Sequence
  Description of Artificial Sequence: Synthetic oligonucleotide
cuauccuccaauuaucuga

SEQ ID NO: 2121367 - RNA, 19 nt, Artificial Sequence
  Description of Artificial Sequence: Synthetic oligonucleotide
aguugcucaaugguggugg

SEQ ID NO: 2121368 - RNA, 19 nt, Artificial Sequence
  Description of Artificial Sequence: Synthetic oligonucleotide
cauaugccuaauuuccacc

SEQ ID NO: 2121369 - RNA, 19 nt, Artificial Sequence
  Description of Artificial Sequence: Synthetic oligonucleotide
auugcugguacaccacuuc

SEQ ID NO: 2121370 - RNA, 19 nt, Artificial Sequence
  Description of Artificial Sequence: Synthetic oligonucleotide
ugagagguuccaauuaguc

SEQ ID NO: 2121371 - RNA, 19 nt, Artificial Sequence
  Description of Artificial Sequence: Synthetic oligonucleotide
cuguaaaaguacauuccag

SEQ ID NO: 2121372 - RNA, 19 nt, Artificial Sequence
  Description of Artificial Sequence: Synthetic oligonucleotide
aguagcucaauuuuagcuu

SEQ ID NO: 2121373 - RNA, 19 nt, Artificial Sequence
  Description of Artificial Sequence: Synthetic oligonucleotide
uuuuguaauuagggcaagg

SEQ ID NO: 2121374 - RNA, 19 nt, Artificial Sequence
  Description of Artificial Sequence: Synthetic oligonucleotide
ugguauaaugaacagucuu

SEQ ID NO: 2121375 - RNA, 19 nt, Artificial Sequence
  Description of Artificial Sequence: Synthetic oligonucleotide
aauagggaucuucaauaau

SEQ ID NO: 2121376 - RNA, 19 nt, Artificial Sequence
  Description of Artificial Sequence: Synthetic oligonucleotide
uuaccgagacacacgaaca

SEQ ID NO: 2121377 - RNA, 19 nt, Artificial Sequence
  Description of Artificial Sequence: Synthetic oligonucleotide
uaaucgaaugugacaaagu

SEQ ID NO: 2121378 - RNA, 19 nt, Artificial Sequence
  Description of Artificial Sequence: Synthetic oligonucleotide
auagcgcugcugucuaucc

SEQ ID NO: 2121379 - RNA, 19 nt, Artificial Sequence
  Description of Artificial Sequence: Synthetic oligonucleotide
uaaagguggacaguaaguc

SEQ ID NO: 2121380 - RNA, 19 nt, Artificial Sequence
  Description of Artificial Sequence: Synthetic oligonucleotide
aucaguuaccaauuuucug

SEQ ID NO: 2121381 - RNA, 19 nt, Artificial Sequence
  Description of Artificial Sequence: Synthetic oligonucleotide
auuagggcaaggugagagg

SEQ ID NO: 2121382 - RNA, 19 nt, Artificial Sequence
  Description of Artificial Sequence: Synthetic oligonucleotide
ucaccucaaauuaucuuac

SEQ ID NO: 2121383 - RNA, 19 nt, Artificial Sequence
  Description of Artificial Sequence: Synthetic oligonucleotide
uuguccucuguaaaaguac

SEQ ID NO: 2121384 - RNA, 19 nt, Artificial Sequence
  Description of Artificial Sequence: Synthetic oligonucleotide
uagucuaagaaugcuuugc

SEQ ID NO: 2121385 - RNA, 19 nt, Artificial Sequence
  Description of Artificial Sequence: Synthetic oligonucleotide
auaugccuaauuuccaccu

SEQ ID NO: 2121386 - RNA, 19 nt, Artificial Sequence
  Description of Artificial Sequence: Synthetic oligonucleotide
uuagucuaagaaugcuuug

SEQ ID NO: 2121387 - RNA, 19 nt, Artificial Sequence
  Description of Artificial Sequence: Synthetic oligonucleotide
aagucagaaucauugccau

SEQ ID NO: 2121388 - RNA, 19 nt, Artificial Sequence
  Description of Artificial Sequence: Synthetic oligonucleotide
gugaguugcucaauggugg

SEQ ID NO: 2121389 - RNA, 19 nt, Artificial Sequence
  Description of Artificial Sequence: Synthetic oligonucleotide
aaaaccucacuuguuuuga

SEQ ID NO: 2121390 - RNA, 19 nt, Artificial Sequence
  Description of Artificial Sequence: Synthetic oligonucleotide
guaauuagggcaaggugag

SEQ ID NO: 2121391 - RNA, 19 nt, Artificial Sequence
  Description of Artificial Sequence: Synthetic oligonucleotide
uuuccaccuacaauuauuu

SEQ ID NO: 2121392 - RNA, 19 nt, Artificial Sequence
  Description of Artificial Sequence: Synthetic oligonucleotide
aguauauaaucgaauguga

SEQ ID NO: 2121393 - RNA, 19 nt, Artificial Sequence
  Description of Artificial Sequence: Synthetic oligonucleotide
uucaaaucucucagauugc

SEQ ID NO: 2121394 - RNA, 19 nt, Artificial Sequence
  Description of Artificial Sequence: Synthetic oligonucleotide
ugucuauccuccaauuauc

SEQ ID NO: 2121395 - RNA, 19 nt, Artificial Sequence
  Description of Artificial Sequence: Synthetic oligonucleotide
ugggcaggaccaucuaucg

SEQ ID NO: 2121396 - RNA, 19 nt, Artificial Sequence
  Description of Artificial Sequence: Synthetic oligonucleotide
ucuaucgagucuucuccag

SEQ ID NO: 2121397 - RNA, 19 nt, Artificial Sequence
  Description of Artificial Sequence: Synthetic oligonucleotide
uauguggguaugcccaggc

SEQ ID NO: 2121398 - RNA, 19 nt, Artificial Sequence
  Description of Artificial Sequence: Synthetic oligonucleotide
uaucgagucuucuccagga

SEQ ID NO: 2121399 - RNA, 19 nt, Artificial Sequence
  Description of Artificial Sequence: Synthetic oligonucleotide
guauauaaucgaaugugac

SEQ ID NO: 2121400 - RNA, 19 nt, Artificial Sequence
  Description of Artificial Sequence: Synthetic oligonucleotide
aaguacauuccagguauug

SEQ ID NO: 2121401 - RNA, 19 nt, Artificial Sequence
  Description of Artificial Sequence: Synthetic oligonucleotide
ucgaagucagaaucauugc

SEQ ID NO: 2121402 - RNA, 19 nt, Artificial Sequence
  Description of Artificial Sequence: Synthetic oligonucleotide
ucuauccuccaauuaucug

SEQ ID NO: 2121403 - RNA, 19 nt, Artificial Sequence
  Description of Artificial Sequence: Synthetic oligonucleotide
uuuuaaagguggacaguaa

SEQ ID NO: 2121404 - RNA, 19 nt, Artificial Sequence
  Description of Artificial Sequence: Synthetic oligonucleotide
auguuaccgagacacacga

SEQ ID NO: 2121405 - RNA, 19 nt, Artificial Sequence
  Description of Artificial Sequence: Synthetic oligonucleotide
ggcaggaccaucuaucgag

SEQ ID NO: 2121406 - RNA, 19 nt, Artificial Sequence
  Description of Artificial Sequence: Synthetic oligonucleotide
auguaaauacugugaauaa

SEQ ID NO: 2121407 - RNA, 19 nt, Artificial Sequence
  Description of Artificial Sequence: Synthetic oligonucleotide
gagugacucuucuauaaca

SEQ ID NO: 2121408 - RNA, 19 nt, Artificial Sequence
  Description of Artificial Sequence: Synthetic oligonucleotide
ccaauuuucugaaaacagc

SEQ ID NO: 2121409 - RNA, 19 nt, Artificial Sequence
  Description of Artificial Sequence: Synthetic oligonucleotide
acacgaacaacaccgaauu

SEQ ID NO: 2121410 - RNA, 19 nt, Artificial Sequence
  Description of Artificial Sequence: Synthetic oligonucleotide
caaguagcucaauuuuagc

SEQ ID NO: 2121411 - RNA, 19 nt, Artificial Sequence
  Description of Artificial Sequence: Synthetic oligonucleotide
uaaucugucuugccuuaug

SEQ ID NO: 2121412 - RNA, 19 nt, Artificial Sequence
  Description of Artificial Sequence: Synthetic oligonucleotide
caauuuucugaaaacagcu

SEQ ID NO: 2121413 - RNA, 19 nt, Artificial Sequence
  Description of Artificial Sequence: Synthetic oligonucleotide
acaaagucuucucuuguaa

SEQ ID NO: 2121414 - RNA, 19 nt, Artificial Sequence
  Description of Artificial Sequence: Synthetic oligonucleotide
auauguaaauacugugaau

SEQ ID NO: 2121415 - RNA, 19 nt, Artificial Sequence
  Description of Artificial Sequence: Synthetic oligonucleotide
uucgguacagccgcuggcg

SEQ ID NO: 2121416 - RNA, 19 nt, Artificial Sequence
  Description of Artificial Sequence: Synthetic oligonucleotide
acaguaagucagcugaaaa

SEQ ID NO: 2121417 - RNA, 19 nt, Artificial Sequence
  Description of Artificial Sequence: Synthetic oligonucleotide
aaggugagagguuccaauu

SEQ ID NO: 2121418 - RNA, 19 nt, Artificial Sequence
  Description of Artificial Sequence: Synthetic oligonucleotide
accggcaaauguuaccgag

SEQ ID NO: 2121419 - RNA, 19 nt, Artificial Sequence
  Description of Artificial Sequence: Synthetic oligonucleotide
guauaaugaacagucuuca

SEQ ID NO: 2121420 - RNA, 19 nt, Artificial Sequence
  Description of Artificial Sequence: Synthetic oligonucleotide
ugaguuguuucuguggauc

SEQ ID NO: 2121421 - RNA, 19 nt, Artificial Sequence
  Description of Artificial Sequence: Synthetic oligonucleotide
agugaguugcucaauggug

SEQ ID NO: 2121422 - RNA, 19 nt, Artificial Sequence
  Description of Artificial Sequence: Synthetic oligonucleotide
acaguggcauaucaauaug

SEQ ID NO: 2121423 - RNA, 19 nt, Artificial Sequence
  Description of Artificial Sequence: Synthetic oligonucleotide
cuaucgagucuucuccagg

SEQ ID NO: 2121424 - RNA, 19 nt, Artificial Sequence
  Description of Artificial Sequence: Synthetic oligonucleotide
guaaaaguacauuccaggu

SEQ ID NO: 2121425 - RNA, 19 nt, Artificial Sequence
  Description of Artificial Sequence: Synthetic oligonucleotide
uucaucaguuaccaauuuu

SEQ ID NO: 2121426 - RNA, 19 nt, Artificial Sequence
  Description of Artificial Sequence: Synthetic oligonucleotide
cuaagaaugcuuugccuca

SEQ ID NO: 2121427 - RNA, 19 nt, Artificial Sequence
  Description of Artificial Sequence: Synthetic oligonucleotide
uaucaauauguggguaugc

SEQ ID NO: 2121428 - RNA, 19 nt, Artificial Sequence
  Description of Artificial Sequence: Synthetic oligonucleotide
auaucaauauguggguaug

SEQ ID NO: 2121429 - RNA, 19 nt, Artificial Sequence
  Description of Artificial Sequence: Synthetic oligonucleotide
uuagggcaaggugagaggu

SEQ ID NO: 2121430 - RNA, 19 nt, Artificial Sequence
  Description of Artificial Sequence: Synthetic oligonucleotide
ggugagagguuccaauuag

SEQ ID NO: 2121431 - RNA, 19 nt, Artificial Sequence
  Description of Artificial Sequence: Synthetic oligonucleotide
uccauacauaguauauaau

SEQ ID NO: 2121432 - RNA, 19 nt, Artificial Sequence
  Description of Artificial Sequence: Synthetic oligonucleotide
auguggguaugcccaggcc

SEQ ID NO: 2121433 - RNA, 19 nt, Artificial Sequence
  Description of Artificial Sequence: Synthetic oligonucleotide
acucuucuauaacauuugu

SEQ ID NO: 2121434 - RNA, 19 nt, Artificial Sequence
  Description of Artificial Sequence: Synthetic oligonucleotide
cagagacggcguaaggacg

SEQ ID NO: 2121435 - RNA, 19 nt, Artificial Sequence
  Description of Artificial Sequence: Synthetic oligonucleotide
aguggcauaucaauaugug

SEQ ID NO: 2121436 - RNA, 19 nt, Artificial Sequence
  Description of Artificial Sequence: Synthetic oligonucleotide
ucauagcucccaaguagcu

SEQ ID NO: 2121437 - RNA, 19 nt, Artificial Sequence
  Description of Artificial Sequence: Synthetic oligonucleotide
ucauugccauaauagggau

SEQ ID NO: 2121438 - RNA, 19 nt, Artificial Sequence
  Description of Artificial Sequence: Synthetic oligonucleotide
gguauaaugaacagucuuc

SEQ ID NO: 2121439 - RNA, 19 nt, Artificial Sequence
  Description of Artificial Sequence: Synthetic oligonucleotide
aggaccaucuaucgagucu

SEQ ID NO: 2121440 - RNA, 19 nt, Artificial Sequence
  Description of Artificial Sequence: Synthetic oligonucleotide
uguuucuguggaucauagc

SEQ ID NO: 2121441 - RNA, 19 nt, Artificial Sequence
  Description of Artificial Sequence: Synthetic oligonucleotide
caauaaugaguuguuucug

SEQ ID NO: 2121442 - RNA, 19 nt, Artificial Sequence
  Description of Artificial Sequence: Synthetic oligonucleotide
ugcugguacaccacuucga

SEQ ID NO: 2121443 - RNA, 19 nt, Artificial Sequence
  Description of Artificial Sequence: Synthetic oligonucleotide
uccaauuaucugaaacauu

SEQ ID NO: 2121444 - RNA, 19 nt, Artificial Sequence
  Description of Artificial Sequence: Synthetic oligonucleotide
aguacauuccagguauugu

SEQ ID NO: 2121445 - RNA, 19 nt, Artificial Sequence
  Description of Artificial Sequence: Synthetic oligonucleotide
uccgccauguuucgguaca

SEQ ID NO: 2121446 - RNA, 19 nt, Artificial Sequence
  Description of Artificial Sequence: Synthetic oligonucleotide
uguaaucugucuugccuua

SEQ ID NO: 2121447 - RNA, 19 nt, Artificial Sequence
  Description of Artificial Sequence: Synthetic oligonucleotide
ccaauuagucuaagaaugc

SEQ ID NO: 2121448 - RNA, 19 nt, Artificial Sequence
  Description of Artificial Sequence: Synthetic oligonucleotide
ugccuaauuuccaccuaca

SEQ ID NO: 2121449 - RNA, 19 nt, Artificial Sequence
  Description of Artificial Sequence: Synthetic oligonucleotide
aacaccgaauuggacccag

SEQ ID NO: 2121450 - RNA, 19 nt, Artificial Sequence
  Description of Artificial Sequence: Synthetic oligonucleotide
uugccuuaugggcugugcu

SEQ ID NO: 2121451 - RNA, 19 nt, Artificial Sequence
  Description of Artificial Sequence: Synthetic oligonucleotide
guaaggacguggcgcaugc

SEQ ID NO: 2121452 - RNA, 19 nt, Artificial Sequence
  Description of Artificial Sequence: Synthetic oligonucleotide
guacauuccagguauugua

SEQ ID NO: 2121453 - RNA, 19 nt, Artificial Sequence
  Description of Artificial Sequence: Synthetic oligonucleotide
uaccgagacacacgaacaa

SEQ ID NO: 2121454 - RNA, 19 nt, Artificial Sequence
  Description of Artificial Sequence: Synthetic oligonucleotide
ugcuaaugccaugauuucu

SEQ ID NO: 2121455 - RNA, 19 nt, Artificial Sequence
  Description of Artificial Sequence: Synthetic oligonucleotide
ccucuguaaaaguacauuc

SEQ ID NO: 2121456 - RNA, 19 nt, Artificial Sequence
  Description of Artificial Sequence: Synthetic oligonucleotide
accgagacacacgaacaac

SEQ ID NO: 2121457 - RNA, 19 nt, Artificial Sequence
  Description of Artificial Sequence: Synthetic oligonucleotide
uggcccacguuccuaguug

SEQ ID NO: 2121458 - RNA, 19 nt, Artificial Sequence
  Description of Artificial Sequence: Synthetic oligonucleotide
uccagguauuguacaauau

SEQ ID NO: 2121459 - RNA, 19 nt, Artificial Sequence
  Description of Artificial Sequence: Synthetic oligonucleotide
gacaguggcauaucaauau

SEQ ID NO: 2121460 - RNA, 19 nt, Artificial Sequence
  Description of Artificial Sequence: Synthetic oligonucleotide
ugccucaccucaaauuauc

SEQ ID NO: 2121461 - RNA, 19 nt, Artificial Sequence
  Description of Artificial Sequence: Synthetic oligonucleotide
guaagucagcugaaaagac

SEQ ID NO: 2121462 - RNA, 19 nt, Artificial Sequence
  Description of Artificial Sequence: Synthetic oligonucleotide
aucuaucgagucuucucca

SEQ ID NO: 2121463 - RNA, 19 nt, Artificial Sequence
  Description of Artificial Sequence: Synthetic oligonucleotide
acauaguauauaaucgaau

SEQ ID NO: 2121464 - RNA, 19 nt, Artificial Sequence
  Description of Artificial Sequence: Synthetic oligonucleotide
uguggaucauagcucccaa

SEQ ID NO: 2121465 - RNA, 19 nt, Artificial Sequence
  Description of Artificial Sequence: Synthetic oligonucleotide
gagagguuccaauuagucu

SEQ ID NO: 2121466 - RNA, 19 nt, Artificial Sequence
  Description of Artificial Sequence: Synthetic oligonucleotide
cauggcucuggugagugag

SEQ ID NO: 2121467 - RNA, 19 nt, Artificial Sequence
  Description of Artificial Sequence: Synthetic oligonucleotide
cuaguuggauauagcgcug

SEQ ID NO: 2121468 - RNA, 19 nt, Artificial Sequence
  Description of Artificial Sequence: Synthetic oligonucleotide
ugggugaccggcaaauguu

SEQ ID NO: 2121469 - RNA, 19 nt, Artificial Sequence
  Description of Artificial Sequence: Synthetic oligonucleotide
ccauguuucgguacagccg

SEQ ID NO: 2121470 - RNA, 19 nt, Artificial Sequence
  Description of Artificial Sequence: Synthetic oligonucleotide
uaguuggauauagcgcugc

SEQ ID NO: 2121471 - RNA, 19 nt, Artificial Sequence
  Description of Artificial Sequence: Synthetic oligonucleotide
gauauagcgcugcugucua

SEQ ID NO: 2121472 - RNA, 19 nt, Artificial Sequence
  Description of Artificial Sequence: Synthetic oligonucleotide
acagguggggcauggggcu

SEQ ID NO: 2121473 - RNA, 19 nt, Artificial Sequence
  Description of Artificial Sequence: Synthetic oligonucleotide
guugcucaauggugguggg

SEQ ID NO: 2121474 - RNA, 19 nt, Artificial Sequence
  Description of Artificial Sequence: Synthetic oligonucleotide
gaauuggacccagcuuccg

SEQ ID NO: 2121475 - RNA, 19 nt, Artificial Sequence
  Description of Artificial Sequence: Synthetic oligonucleotide
gugaccggcaaauguuacc

SEQ ID NO: 2121476 - RNA, 19 nt, Artificial Sequence
  Description of Artificial Sequence: Synthetic oligonucleotide
agucucauuuguccucugu

SEQ ID NO: 2121477 - RNA, 19 nt, Artificial Sequence
  Description of Artificial Sequence: Synthetic oligonucleotide
ugcaaugggugaccggcaa

SEQ ID NO: 2121478 - RNA, 19 nt, Artificial Sequence
  Description of Artificial Sequence: Synthetic oligonucleotide
cuauucaaaucucucagau

SEQ ID NO: 2121479 - RNA, 19 nt, Artificial Sequence
  Description of Artificial Sequence: Synthetic oligonucleotide
cagagugacucuucuauaa

SEQ ID NO: 2121480 - RNA, 19 nt, Artificial Sequence
  Description of Artificial Sequence: Synthetic oligonucleotide
aaggacugccaccacccuu

SEQ ID NO: 2121481 - RNA, 19 nt, Artificial Sequence
  Description of Artificial Sequence: Synthetic oligonucleotide
uauagcgcugcugucuauc

SEQ ID NO: 2121482 - RNA, 19 nt, Artificial Sequence
  Description of Artificial Sequence: Synthetic oligonucleotide
guggacaguaagucagcug

SEQ ID NO: 2121483 - RNA, 19 nt, Artificial Sequence
  Description of Artificial Sequence: Synthetic oligonucleotide
cauugccauaauagggauc

SEQ ID NO: 2121484 - RNA, 19 nt, Artificial Sequence
  Description of Artificial Sequence: Synthetic oligonucleotide
guuggauauagcgcugcug

SEQ ID NO: 2121485 - RNA, 19 nt, Artificial Sequence
  Description of Artificial Sequence: Synthetic oligonucleotide
aguuggauauagcgcugcu

SEQ ID NO: 2121486 - RNA, 19 nt, Artificial Sequence
  Description of Artificial Sequence: Synthetic oligonucleotide
acggcguaaggacguggcg

SEQ ID NO: 2121487 - RNA, 19 nt, Artificial Sequence
  Description of Artificial Sequence: Synthetic oligonucleotide
cauaucaauauguggguau

SEQ ID NO: 2121488 - RNA, 19 nt, Artificial Sequence
  Description of Artificial Sequence: Synthetic oligonucleotide
gagugaguugcucaauggu

SEQ ID NO: 2121489 - RNA, 19 nt, Artificial Sequence
  Description of Artificial Sequence: Synthetic oligonucleotide
cauggggcuaaggacugcc

SEQ ID NO: 2121490 - RNA, 19 nt, Artificial Sequence
  Description of Artificial Sequence: Synthetic oligonucleotide
gcucuggugagugaguugc

SEQ ID NO: 2121491 - RNA, 19 nt, Artificial Sequence
  Description of Artificial Sequence: Synthetic oligonucleotide
cuuaugggcugugcuaaug

SEQ ID NO: 2121492 - RNA, 19 nt, Artificial Sequence
  Description of Artificial Sequence: Synthetic oligonucleotide
ugccuuaugggcugugcua

SEQ ID NO: 2121493 - RNA, 19 nt, Artificial Sequence
  Description of Artificial Sequence: Synthetic oligonucleotide
aggugagagguuccaauua

SEQ ID NO: 2121494 - RNA, 19 nt, Artificial Sequence
  Description of Artificial Sequence: Synthetic oligonucleotide
gaauaaguacaaggaaaua

SEQ ID NO: 2121495 - RNA, 19 nt, Artificial Sequence
  Description of Artificial Sequence: Synthetic oligonucleotide
uugccucaccucaaauuau

SEQ ID NO: 2121496 - RNA, 19 nt, Artificial Sequence
  Description of Artificial Sequence: Synthetic oligonucleotide
cgaagucagaaucauugcc

SEQ ID NO: 2121497 - RNA, 19 nt, Artificial Sequence
  Description of Artificial Sequence: Synthetic oligonucleotide
ucgguacagccgcuggcgc

SEQ ID NO: 2121498 - RNA, 19 nt, Artificial Sequence
  Description of Artificial Sequence: Synthetic oligonucleotide
cauuccagguauuguacaa

SEQ ID NO: 2121499 - RNA, 19 nt, Artificial Sequence
  Description of Artificial Sequence: Synthetic oligonucleotide
acuucgaagucagaaucau

SEQ ID NO: 2121500 - RNA, 19 nt, Artificial Sequence
  Description of Artificial Sequence: Synthetic oligonucleotide
ccagagacggcguaaggac

SEQ ID NO: 2121501 - RNA, 19 nt, Artificial Sequence
  Description of Artificial Sequence: Synthetic oligonucleotide
gacggcguaaggacguggc

SEQ ID NO: 2121502 - RNA, 19 nt, Artificial Sequence
  Description of Artificial Sequence: Synthetic oligonucleotide
guggguaugcccaggccag

SEQ ID NO: 2121503 - RNA, 19 nt, Artificial Sequence
  Description of Artificial Sequence: Synthetic oligonucleotide
cauauuugcuuguuucacu

SEQ ID NO: 2121504 - RNA, 19 nt, Artificial Sequence
  Description of Artificial Sequence: Synthetic oligonucleotide
uggauauagcgcugcuguc

SEQ ID NO: 2121505 - RNA, 19 nt, Artificial Sequence
  Description of Artificial Sequence: Synthetic oligonucleotide
aguuaccaauuuucugaaa

SEQ ID NO: 2121506 - RNA, 19 nt, Artificial Sequence
  Description of Artificial Sequence: Synthetic oligonucleotide
guuccuaguuggauauagc

SEQ ID NO: 2121507 - RNA, 19 nt, Artificial Sequence
  Description of Artificial Sequence: Synthetic oligonucleotide
ucuggugagugaguugcuc

SEQ ID NO: 2121508 - RNA, 19 nt, Artificial Sequence
  Description of Artificial Sequence: Synthetic oligonucleotide
ccaauuaucugaaacauuu

SEQ ID NO: 2121509 - RNA, 19 nt, Artificial Sequence
  Description of Artificial Sequence: Synthetic oligonucleotide
ccacuucgaagucagaauc

SEQ ID NO: 2121510 - RNA, 19 nt, Artificial Sequence
  Description of Artificial Sequence: Synthetic oligonucleotide
auacugugaauaaguacaa

SEQ ID NO: 2121511 - RNA, 19 nt, Artificial Sequence
  Description of Artificial Sequence: Synthetic oligonucleotide
acacacgaacaacaccgaa

SEQ ID NO: 2121512 - RNA, 19 nt, Artificial Sequence
  Description of Artificial Sequence: Synthetic oligonucleotide
cuugccuuaugggcugugc

SEQ ID NO: 2121513 - RNA, 19 nt, Artificial Sequence
  Description of Artificial Sequence: Synthetic oligonucleotide
ugcugucuauccuccaauu

SEQ ID NO: 2121514 - RNA, 19 nt, Artificial Sequence
  Description of Artificial Sequence: Synthetic oligonucleotide
agagacggcguaaggacgu

SEQ ID NO: 2121515 - RNA, 19 nt, Artificial Sequence
  Description of Artificial Sequence: Synthetic oligonucleotide
agguauuguacaauaugua

SEQ ID NO: 2121516 - RNA, 19 nt, Artificial Sequence
  Description of Artificial Sequence: Synthetic oligonucleotide
gugcuaaugccaugauuuc

SEQ ID NO: 2121517 - RNA, 19 nt, Artificial Sequence
  Description of Artificial Sequence: Synthetic oligonucleotide
uguuaccgagacacacgaa

SEQ ID NO: 2121518 - RNA, 19 nt, Artificial Sequence
  Description of Artificial Sequence: Synthetic oligonucleotide
cacgaacaacaccgaauug

SEQ ID NO: 2121519 - RNA, 19 nt, Artificial Sequence
  Description of Artificial Sequence: Synthetic oligonucleotide
ccuaguuggauauagcgcu

SEQ ID NO: 2121520 - RNA, 19 nt, Artificial Sequence
  Description of Artificial Sequence: Synthetic oligonucleotide
ccaccuacaauuauuuuaa

SEQ ID NO: 2121521 - RNA, 19 nt, Artificial Sequence
  Description of Artificial Sequence: Synthetic oligonucleotide
caguuaccaauuuucugaa

SEQ ID NO: 2121522 - RNA, 19 nt, Artificial Sequence
  Description of Artificial Sequence: Synthetic oligonucleotide
gucuaagaaugcuuugccu

SEQ ID NO: 2121523 - RNA, 19 nt, Artificial Sequence
  Description of Artificial Sequence: Synthetic oligonucleotide
gguuccaauuagucuaaga

SEQ ID NO: 2121524 - RNA, 19 nt, Artificial Sequence
  Description of Artificial Sequence: Synthetic oligonucleotide
guagcucaauuuuagcuuu

SEQ ID NO: 2121525 - RNA, 19 nt, Artificial Sequence
  Description of Artificial Sequence: Synthetic oligonucleotide
accacccuugggcauggcu

SEQ ID NO: 2121526 - RNA, 19 nt, Artificial Sequence
  Description of Artificial Sequence: Synthetic oligonucleotide
uuccgccauguuucgguac

SEQ ID NO: 2121527 - RNA, 19 nt, Artificial Sequence
  Description of Artificial Sequence: Synthetic oligonucleotide
uuccaccuacaauuauuuu

SEQ ID NO: 2121528 - RNA, 19 nt, Artificial Sequence
  Description of Artificial Sequence: Synthetic oligonucleotide
caguggcauaucaauaugu

SEQ ID NO: 2121529 - RNA, 19 nt, Artificial Sequence
  Description of Artificial Sequence: Synthetic oligonucleotide
uaaggacguggcgcaugcg

SEQ ID NO: 2121530 - RNA, 19 nt, Artificial Sequence
  Description of Artificial Sequence: Synthetic oligonucleotide
agacggcguaaggacgugg

SEQ ID NO: 2121531 - RNA, 19 nt, Artificial Sequence
  Description of Artificial Sequence: Synthetic oligonucleotide
gacugccaccacccuuggg

SEQ ID NO: 2121532 - RNA, 19 nt, Artificial Sequence
  Description of Artificial Sequence: Synthetic oligonucleotide
caggaccaucuaucgaguc

SEQ ID NO: 2121533 - RNA, 19 nt, Artificial Sequence
  Description of Artificial Sequence: Synthetic oligonucleotide
accaucuaucgagucuucu

SEQ ID NO: 2121534 - RNA, 19 nt, Artificial Sequence
  Description of Artificial Sequence: Synthetic oligonucleotide
cuucucuuguaaucugucu

SEQ ID NO: 2121535 - RNA, 19 nt, Artificial Sequence
  Description of Artificial Sequence: Synthetic oligonucleotide
aguuguuucuguggaucau

SEQ ID NO: 2121536 - RNA, 19 nt, Artificial Sequence
  Description of Artificial Sequence: Synthetic oligonucleotide
caauuagucuaagaaugcu

SEQ ID NO: 2121537 - RNA, 19 nt, Artificial Sequence
  Description of Artificial Sequence: Synthetic oligonucleotide
aaaguacauuccagguauu

SEQ ID NO: 2121538 - RNA, 19 nt, Artificial Sequence
  Description of Artificial Sequence: Synthetic oligonucleotide
gacacacgaacaacaccga

SEQ ID NO: 2121539 - RNA, 19 nt, Artificial Sequence
  Description of Artificial Sequence: Synthetic oligonucleotide
acaccgaauuggacccagc

SEQ ID NO: 2121540 - RNA, 19 nt, Artificial Sequence
  Description of Artificial Sequence: Synthetic oligonucleotide
cagcuuccgccauguuucg

SEQ ID NO: 2121541 - RNA, 19 nt, Artificial Sequence
  Description of Artificial Sequence: Synthetic oligonucleotide
cacacgaacaacaccgaau

SEQ ID NO: 2121542 - RNA, 19 nt, Artificial Sequence
  Description of Artificial Sequence: Synthetic oligonucleotide
uagggcaaggugagagguu

SEQ ID NO: 2121543 - RNA, 19 nt, Artificial Sequence
  Description of Artificial Sequence: Synthetic oligonucleotide
ggcguaaggacguggcgca

SEQ ID NO: 2121544 - RNA, 19 nt, Artificial Sequence
  Description of Artificial Sequence: Synthetic oligonucleotide
gaccggcaaauguuaccga

SEQ ID NO: 2121545 - RNA, 19 nt, Artificial Sequence
  Description of Artificial Sequence: Synthetic oligonucleotide
guuucacuauuuuguaauu

SEQ ID NO: 2121546 - RNA, 19 nt, Artificial Sequence
  Description of Artificial Sequence: Synthetic oligonucleotide
cuuugccucaccucaaauu

SEQ ID NO: 2121547 - RNA, 19 nt, Artificial Sequence
  Description of Artificial Sequence: Synthetic oligonucleotide
ccgagacacacgaacaaca

SEQ ID NO: 2121548 - RNA, 19 nt, Artificial Sequence
  Description of Artificial Sequence: Synthetic oligonucleotide
cugacagcucuugguaguc

SEQ ID NO: 2121549 - RNA, 19 nt, Artificial Sequence
  Description of Artificial Sequence: Synthetic oligonucleotide
ggaucauagcucccaagua

SEQ ID NO: 2121550 - RNA, 19 nt, Artificial Sequence
  Description of Artificial Sequence: Synthetic oligonucleotide
caaggugagagguuccaau

SEQ ID NO: 2121551 - RNA, 19 nt, Artificial Sequence
  Description of Artificial Sequence: Synthetic oligonucleotide
guacaccacuucgaaguca

SEQ ID NO: 2121552 - RNA, 19 nt, Artificial Sequence
  Description of Artificial Sequence: Synthetic oligonucleotide
aggacguggcgcaugcgca

SEQ ID NO: 2121553 - RNA, 19 nt, Artificial Sequence
  Description of Artificial Sequence: Synthetic oligonucleotide
auauagcgcugcugucuau

SEQ ID NO: 2121554 - RNA, 19 nt, Artificial Sequence
  Description of Artificial Sequence: Synthetic oligonucleotide
ucuugccuuaugggcugug

SEQ ID NO: 2121555 - RNA, 19 nt, Artificial Sequence
  Description of Artificial Sequence: Synthetic oligonucleotide
ggcuggcccacguuccuag

SEQ ID NO: 2121556 - RNA, 19 nt, Artificial Sequence
  Description of Artificial Sequence: Synthetic oligonucleotide
cacguuccuaguuggauau

SEQ ID NO: 2121557 - RNA, 19 nt, Artificial Sequence
  Description of Artificial Sequence: Synthetic oligonucleotide
agguuccaauuagucuaag

SEQ ID NO: 2121558 - RNA, 19 nt, Artificial Sequence
  Description of Artificial Sequence: Synthetic oligonucleotide
cgagacacacgaacaacac

SEQ ID NO: 2121559 - RNA, 19 nt, Artificial Sequence
  Description of Artificial Sequence: Synthetic oligonucleotide
cuucagagugacucuucua

SEQ ID NO: 2121560 - RNA, 19 nt, Artificial Sequence
  Description of Artificial Sequence: Synthetic oligonucleotide
gcuucugcaaugggugacc

SEQ ID NO: 2121561 - RNA, 19 nt, Artificial Sequence
  Description of Artificial Sequence: Synthetic oligonucleotide
ggcugugcuaaugccauga

SEQ ID NO: 2121562 - RNA, 19 nt, Artificial Sequence
  Description of Artificial Sequence: Synthetic oligonucleotide
cgaacaacaccgaauugga

SEQ ID NO: 2121563 - RNA, 19 nt, Artificial Sequence
  Description of Artificial Sequence: Synthetic oligonucleotide
cggcaaauguuaccgagac

SEQ ID NO: 2121564 - RNA, 19 nt, Artificial Sequence
  Description of Artificial Sequence: Synthetic oligonucleotide
agcuuccgccauguuucgg

SEQ ID NO: 2121565 - RNA, 19 nt, Artificial Sequence
  Description of Artificial Sequence: Synthetic oligonucleotide
ggauauagcgcugcugucu

SEQ ID NO: 2121566 - RNA, 19 nt, Artificial Sequence
  Description of Artificial Sequence: Synthetic oligonucleotide
ggcauggcucuggugagug

SEQ ID NO: 2121567 - RNA, 19 nt, Artificial Sequence
  Description of Artificial Sequence: Synthetic oligonucleotide
uggacccagcuuccgccau

SEQ ID NO: 2121568 - RNA, 19 nt, Artificial Sequence
  Description of Artificial Sequence: Synthetic oligonucleotide
gccuaauuuccaccuacaa

SEQ ID NO: 2121569 - RNA, 19 nt, Artificial Sequence
  Description of Artificial Sequence: Synthetic oligonucleotide
ggcaaauguuaccgagaca

SEQ ID NO: 2121570 - RNA, 19 nt, Artificial Sequence
  Description of Artificial Sequence: Synthetic oligonucleotide
gagacggcguaaggacgug

SEQ ID NO: 2121571 - RNA, 19 nt, Artificial Sequence
  Description of Artificial Sequence: Synthetic oligonucleotide
cugcaaugggugaccggca

SEQ ID NO: 2121572 - RNA, 19 nt, Artificial Sequence
  Description of Artificial Sequence: Synthetic oligonucleotide
gcugucuauccuccaauua

SEQ ID NO: 2121573 - RNA, 19 nt, Artificial Sequence
  Description of Artificial Sequence: Synthetic oligonucleotide
ggugaccggcaaauguuac

SEQ ID NO: 2121574 - RNA, 19 nt, Artificial Sequence
  Description of Artificial Sequence: Synthetic oligonucleotide
caccgaauuggacccagcu

SEQ ID NO: 2121575 - RNA, 19 nt, Artificial Sequence
  Description of Artificial Sequence: Synthetic oligonucleotide
caccuacaauuauuuuaaa

SEQ ID NO: 2121576 - RNA, 19 nt, Artificial Sequence
  Description of Artificial Sequence: Synthetic oligonucleotide
ccuaauuuccaccuacaau

SEQ ID NO: 2121577 - RNA, 19 nt, Artificial Sequence
  Description of Artificial Sequence: Synthetic oligonucleotide
ugccaccacccuugggcau

SEQ ID NO: 2121578 - RNA, 19 nt, Artificial Sequence
  Description of Artificial Sequence: Synthetic oligonucleotide
gaccaucuaucgagucuuc

SEQ ID NO: 2121579 - RNA, 19 nt, Artificial Sequence
  Description of Artificial Sequence: Synthetic oligonucleotide
gugagagguuccaauuagu

SEQ ID NO: 2121580 - RNA, 19 nt, Artificial Sequence
  Description of Artificial Sequence: Synthetic oligonucleotide
ggacguggcgcaugcgcac

SEQ ID NO: 2121581 - RNA, 19 nt, Artificial Sequence
  Description of Artificial Sequence: Synthetic oligonucleotide
accugaggcauugcuggua

SEQ ID NO: 2121582 - RNA, 19 nt, Artificial Sequence
  Description of Artificial Sequence: Synthetic oligonucleotide
gcuuccgccauguuucggu

SEQ ID NO: 2121583 - RNA, 19 nt, Artificial Sequence
  Description of Artificial Sequence: Synthetic oligonucleotide
uggguaugcccaggccagu

SEQ ID NO: 2121584 - RNA, 19 nt, Artificial Sequence
  Description of Artificial Sequence: Synthetic oligonucleotide
gcccagagacggcguaagg

SEQ ID NO: 2121585 - RNA, 19 nt, Artificial Sequence
  Description of Artificial Sequence: Synthetic oligonucleotide
cuuccgccauguuucggua

SEQ ID NO: 2121586 - RNA, 19 nt, Artificial Sequence
  Description of Artificial Sequence: Synthetic oligonucleotide
gccuuaugggcugugcuaa

SEQ ID NO: 2121587 - RNA, 19 nt, Artificial Sequence
  Description of Artificial Sequence: Synthetic oligonucleotide
auggggcuaaggacugcca

SEQ ID NO: 2121588 - RNA, 19 nt, Artificial Sequence
  Description of Artificial Sequence: Synthetic oligonucleotide
caccucaaauuaucuuacu

SEQ ID NO: 2121589 - RNA, 19 nt, Artificial Sequence
  Description of Artificial Sequence: Synthetic oligonucleotide
cacccuugggcauggcucu

SEQ ID NO: 2121590 - RNA, 19 nt, Artificial Sequence
  Description of Artificial Sequence: Synthetic oligonucleotide
uggcgcccagagacggcgu

SEQ ID NO: 2121591 - RNA, 19 nt, Artificial Sequence
  Description of Artificial Sequence: Synthetic oligonucleotide
cauugcugguacaccacuu

SEQ ID NO: 2121592 - RNA, 19 nt, Artificial Sequence
  Description of Artificial Sequence: Synthetic oligonucleotide
guggggcauggggcuaagg

SEQ ID NO: 2121593 - RNA, 19 nt, Artificial Sequence
  Description of Artificial Sequence: Synthetic oligonucleotide
ccggcaaauguuaccgaga

SEQ ID NO: 2121594 - RNA, 19 nt, Artificial Sequence
  Description of Artificial Sequence: Synthetic oligonucleotide
cuucgaagucagaaucauu

SEQ ID NO: 2121595 - RNA, 19 nt, Artificial Sequence
  Description of Artificial Sequence: Synthetic oligonucleotide
ggacccagcuuccgccaug

SEQ ID NO: 2121596 - RNA, 19 nt, Artificial Sequence
  Description of Artificial Sequence: Synthetic oligonucleotide
cuauaacauuuguguucua

SEQ ID NO: 2121597 - RNA, 19 nt, Artificial Sequence
  Description of Artificial Sequence: Synthetic oligonucleotide
cggcguaaggacguggcgc

SEQ ID NO: 2121598 - RNA, 19 nt, Artificial Sequence
  Description of Artificial Sequence: Synthetic oligonucleotide
gcauugcugguacaccacu

SEQ ID NO: 2121599 - RNA, 19 nt, Artificial Sequence
  Description of Artificial Sequence: Synthetic oligonucleotide
cccagagacggcguaagga

SEQ ID NO: 2121600 - RNA, 19 nt, Artificial Sequence
  Description of Artificial Sequence: Synthetic oligonucleotide
gcuuucauccauacauagu

SEQ ID NO: 2121601 - RNA, 19 nt, Artificial Sequence
  Description of Artificial Sequence: Synthetic oligonucleotide
augcuuugccucaccucaa

SEQ ID NO: 2121602 - RNA, 19 nt, Artificial Sequence
  Description of Artificial Sequence: Synthetic oligonucleotide
gggcaggaccaucuaucga

SEQ ID NO: 2121603 - RNA, 19 nt, Artificial Sequence
  Description of Artificial Sequence: Synthetic oligonucleotide
cugugcuaaugccaugauu

SEQ ID NO: 2121604 - RNA, 19 nt, Artificial Sequence
  Description of Artificial Sequence: Synthetic oligonucleotide
auguuucgguacagccgcu

SEQ ID NO: 2121605 - RNA, 19 nt, Artificial Sequence
  Description of Artificial Sequence: Synthetic oligonucleotide
gguaugcccaggccagucu

SEQ ID NO: 2121606 - RNA, 19 nt, Artificial Sequence
  Description of Artificial Sequence: Synthetic oligonucleotide
gacccagcuuccgccaugu

SEQ ID NO: 2121607 - RNA, 19 nt, Artificial Sequence
  Description of Artificial Sequence: Synthetic oligonucleotide
ccacguuccuaguuggaua

SEQ ID NO: 2121608 - RNA, 19 nt, Artificial Sequence
  Description of Artificial Sequence: Synthetic oligonucleotide
uugccauaauagggaucuu

SEQ ID NO: 2121609 - RNA, 19 nt, Artificial Sequence
  Description of Artificial Sequence: Synthetic oligonucleotide
guaaucugucuugccuuau

SEQ ID NO: 2121610 - RNA, 19 nt, Artificial Sequence
  Description of Artificial Sequence: Synthetic oligonucleotide
ggacaguaagucagcugaa

SEQ ID NO: 2121611 - RNA, 19 nt, Artificial Sequence
  Description of Artificial Sequence: Synthetic oligonucleotide
gggcugugcuaaugccaug

SEQ ID NO: 2121612 - RNA, 19 nt, Artificial Sequence
  Description of Artificial Sequence: Synthetic oligonucleotide
caacaccgaauuggaccca

SEQ ID NO: 2121613 - RNA, 19 nt, Artificial Sequence
  Description of Artificial Sequence: Synthetic oligonucleotide
gggugaccggcaaauguua

SEQ ID NO: 2121614 - RNA, 19 nt, Artificial Sequence
  Description of Artificial Sequence: Synthetic oligonucleotide
gcucccaaguagcucaauu

SEQ ID NO: 2121615 - RNA, 19 nt, Artificial Sequence
  Description of Artificial Sequence: Synthetic oligonucleotide
cguaaggacguggcgcaug

SEQ ID NO: 2121616 - RNA, 19 nt, Artificial Sequence
  Description of Artificial Sequence: Synthetic oligonucleotide
acguuccuaguuggauaua

SEQ ID NO: 2121617 - RNA, 19 nt, Artificial Sequence
  Description of Artificial Sequence: Synthetic oligonucleotide
gcuuugccucaccucaaau

SEQ ID NO: 2121618 - RNA, 19 nt, Artificial Sequence
  Description of Artificial Sequence: Synthetic oligonucleotide
gcauggcucuggugaguga

SEQ ID NO: 2121619 - RNA, 19 nt, Artificial Sequence
  Description of Artificial Sequence: Synthetic oligonucleotide
caccugaggcauugcuggu

SEQ ID NO: 2121620 - RNA, 19 nt, Artificial Sequence
  Description of Artificial Sequence: Synthetic oligonucleotide
gccucaccucaaauuaucu

SEQ ID NO: 2121621 - RNA, 19 nt, Artificial Sequence
  Description of Artificial Sequence: Synthetic oligonucleotide
gguggggcauggggcuaag

SEQ ID NO: 2121622 - RNA, 19 nt, Artificial Sequence
  Description of Artificial Sequence: Synthetic oligonucleotide
gcaggaccaucuaucgagu

SEQ ID NO: 2121623 - RNA, 19 nt, Artificial Sequence
  Description of Artificial Sequence: Synthetic oligonucleotide
cuggcccacguuccuaguu

SEQ ID NO: 2121624 - RNA, 19 nt, Artificial Sequence
  Description of Artificial Sequence: Synthetic oligonucleotide
ccgccauguuucgguacag

SEQ ID NO: 2121625 - RNA, 19 nt, Artificial Sequence
  Description of Artificial Sequence: Synthetic oligonucleotide
guacagccgcuggcgccca

SEQ ID NO: 2121626 - RNA, 19 nt, Artificial Sequence
  Description of Artificial Sequence: Synthetic oligonucleotide
cccagcuuccgccauguuu

SEQ ID NO: 2121627 - RNA, 19 nt, Artificial Sequence
  Description of Artificial Sequence: Synthetic oligonucleotide
cgcccagagacggcguaag

SEQ ID NO: 2121628 - RNA, 19 nt, Artificial Sequence
  Description of Artificial Sequence: Synthetic oligonucleotide
ggcgcccagagacggcgua

SEQ ID NO: 2121629 - RNA, 19 nt, Artificial Sequence
  Description of Artificial Sequence: Synthetic oligonucleotide
ccaggccagucucauuugu

SEQ ID NO: 2121630 - RNA, 19 nt, Artificial Sequence
  Description of Artificial Sequence: Synthetic oligonucleotide
caccacccuugggcauggc

SEQ ID NO: 2121631 - RNA, 19 nt, Artificial Sequence
  Description of Artificial Sequence: Synthetic oligonucleotide
cagguggggcauggggcua

SEQ ID NO: 2121632 - RNA, 19 nt, Artificial Sequence
  Description of Artificial Sequence: Synthetic oligonucleotide
ggggcuggcccacguuccu

SEQ ID NO: 2121633 - RNA, 19 nt, Artificial Sequence
  Description of Artificial Sequence: Synthetic oligonucleotide
cccacguuccuaguuggau

SEQ ID NO: 2121634 - RNA, 19 nt, Artificial Sequence
  Description of Artificial Sequence: Synthetic oligonucleotide
gcuggcccacguuccuagu

SEQ ID NO: 2121635 - RNA, 19 nt, Artificial Sequence
  Description of Artificial Sequence: Synthetic oligonucleotide
ccuuaugggcugugcuaau

SEQ ID NO: 2121636 - RNA, 19 nt, Artificial Sequence
  Description of Artificial Sequence: Synthetic oligonucleotide
gcgcccagagacggcguaa

SEQ ID NO: 2121637 - RNA, 19 nt, Artificial Sequence
  Description of Artificial Sequence: Synthetic oligonucleotide
gggcauggcucuggugagu

SEQ ID NO: 2121638 - RNA, 19 nt, Artificial Sequence
  Description of Artificial Sequence: Synthetic oligonucleotide
gggcuggcccacguuccua

SEQ ID NO: 2121639 - RNA, 19 nt, Artificial Sequence
  Description of Artificial Sequence: Synthetic oligonucleotide
gcguaaggacguggcgcau

SEQ ID NO: 2121640 - RNA, 19 nt, Artificial Sequence
  Description of Artificial Sequence: Synthetic oligonucleotide
uguagguugacaaugacca

SEQ ID NO: 2121641 - RNA, 19 nt, Artificial Sequence
  Description of Artificial Sequence: Synthetic oligonucleotide
guugacaaugaccagacgg

SEQ ID NO: 2121642 - RNA, 19 nt, Artificial Sequence
  Description of Artificial Sequence: Synthetic oligonucleotide
aaaaguguggcucuuacaa

SEQ ID NO: 2121643 - RNA, 19 nt, Artificial Sequence
  Description of Artificial Sequence: Synthetic oligonucleotide
ucuuccaugguccacacgc

SEQ ID NO: 2121644 - RNA, 19 nt, Artificial Sequence
  Description of Artificial Sequence: Synthetic oligonucleotide
aaacauguuuccauggagc

SEQ ID NO: 2121645 - RNA, 19 nt, Artificial Sequence
  Description of Artificial Sequence: Synthetic oligonucleotide
acaaacagcauucaccgag

SEQ ID NO: 2121646 - RNA, 19 nt, Artificial Sequence
  Description of Artificial Sequence: Synthetic oligonucleotide
ucggucuuuacucuuuugg

SEQ ID NO: 2121647 - RNA, 19 nt, Artificial Sequence
  Description of Artificial Sequence: Synthetic oligonucleotide
uauugcgucuuacacuugg

SEQ ID NO: 2121648 - RNA, 19 nt, Artificial Sequence
  Description of Artificial Sequence: Synthetic oligonucleotide
acuuggacggaucugcagc

SEQ ID NO: 2121649 - RNA, 19 nt, Artificial Sequence
  Description of Artificial Sequence: Synthetic oligonucleotide
uccucuacaaacauguuuc

SEQ ID NO: 2121650 - RNA, 19 nt, Artificial Sequence
  Description of Artificial Sequence: Synthetic oligonucleotide
auugagaugugcaggaggc

SEQ ID NO: 2121651 - RNA, 19 nt, Artificial Sequence
  Description of Artificial Sequence: Synthetic oligonucleotide
ucaucagcgagcaucaggu

SEQ ID NO: 2121652 - RNA, 19 nt, Artificial Sequence
  Description of Artificial Sequence: Synthetic oligonucleotide
aacauguuuccauggagcu

SEQ ID NO: 2121653 - RNA, 19 nt, Artificial Sequence
  Description of Artificial Sequence: Synthetic oligonucleotide
acaagugccccucccaccc

SEQ ID NO: 2121654 - RNA, 19 nt, Artificial Sequence
  Description of Artificial Sequence: Synthetic oligonucleotide
uuggccacugugcagagcc

SEQ ID NO: 2121655 - RNA, 19 nt, Artificial Sequence
  Description of Artificial Sequence: Synthetic oligonucleotide
guagccauggauucgcagg

SEQ ID NO: 2121656 - RNA, 19 nt, Artificial Sequence
  Description of Artificial Sequence: Synthetic oligonucleotide
aaaguguggcucuuacaag

SEQ ID NO: 2121657 - RNA, 19 nt, Artificial Sequence
  Description of Artificial Sequence: Synthetic oligonucleotide
aguggcaaggggcagguuc

SEQ ID NO: 2121658 - RNA, 19 nt, Artificial Sequence
  Description of Artificial Sequence: Synthetic oligonucleotide
caucacgucauccacguag

SEQ ID NO: 2121659 - RNA, 19 nt, Artificial Sequence
  Description of Artificial Sequence: Synthetic oligonucleotide
acaaugaccagacggccuc

SEQ ID NO: 2121660 - RNA, 19 nt, Artificial Sequence
  Description of Artificial Sequence: Synthetic oligonucleotide
uguggcucuuacaagugcc

SEQ ID NO: 2121661 - RNA, 19 nt, Artificial Sequence
  Description of Artificial Sequence: Synthetic oligonucleotide
gguggugucaaacuugggg

SEQ ID NO: 2121662 - RNA, 19 nt, Artificial Sequence
  Description of Artificial Sequence: Synthetic oligonucleotide
ucgcaggucagccuggcgg

SEQ ID NO: 2121663 - RNA, 19 nt, Artificial Sequence
  Description of Artificial Sequence: Synthetic oligonucleotide
ucugaagucggggaugccg

SEQ ID NO: 2121664 - RNA, 19 nt, Artificial Sequence
  Description of Artificial Sequence: Synthetic oligonucleotide
ucuugggcacagcagggcg

SEQ ID NO: 2121665 - RNA, 19 nt, Artificial Sequence
  Description of Artificial Sequence: Synthetic oligonucleotide
uuacacuugggacauuccu

SEQ ID NO: 2121666 - RNA, 19 nt, Artificial Sequence
  Description of Artificial Sequence: Synthetic oligonucleotide
gaagaucuccggcagcccg

SEQ ID NO: 2121667 - RNA, 19 nt, Artificial Sequence
  Description of Artificial Sequence: Synthetic oligonucleotide
aggaggcucagucuugggc

SEQ ID NO: 2121668 - RNA, 19 nt, Artificial Sequence
  Description of Artificial Sequence: Synthetic oligonucleotide
cauugagaugugcaggagg

SEQ ID NO: 2121669 - RNA, 19 nt, Artificial Sequence
  Description of Artificial Sequence: Synthetic oligonucleotide
aagcugaggaagcccgagc

SEQ ID NO: 2121670 - RNA, 19 nt, Artificial Sequence
  Description of Artificial Sequence: Synthetic oligonucleotide
agcugaggaagcccgagcg

SEQ ID NO: 2121671 - RNA, 19 nt, Artificial Sequence
  Description of Artificial Sequence: Synthetic oligonucleotide
cuguagguugacaaugacc

SEQ ID NO: 2121672 - RNA, 19 nt, Artificial Sequence
  Description of Artificial Sequence: Synthetic oligonucleotide
acuugggacauuccucuac

SEQ ID NO: 2121673 - RNA, 19 nt, Artificial Sequence
  Description of Artificial Sequence: Synthetic oligonucleotide
agcccguccacauucuggc

SEQ ID NO: 2121674 - RNA, 19 nt, Artificial Sequence
  Description of Artificial Sequence: Synthetic oligonucleotide
aagguggugucaaacuugg

SEQ ID NO: 2121675 - RNA, 19 nt, Artificial Sequence
  Description of Artificial Sequence: Synthetic oligonucleotide
ugggcucuggcuuacaaac

SEQ ID NO: 2121676 - RNA, 19 nt, Artificial Sequence
  Description of Artificial Sequence: Synthetic oligonucleotide
aaaaccacgcuggaggccu

SEQ ID NO: 2121677 - RNA, 19 nt, Artificial Sequence
  Description of Artificial Sequence: Synthetic oligonucleotide
aggucugcgguccugcugg

SEQ ID NO: 2121678 - RNA, 19 nt, Artificial Sequence
  Description of Artificial Sequence: Synthetic oligonucleotide
uuguccagcacgcaggguc

SEQ ID NO: 2121679 - RNA, 19 nt, Artificial Sequence
  Description of Artificial Sequence: Synthetic oligonucleotide
acgacugucucucucacgu

SEQ ID NO: 2121680 - RNA, 19 nt, Artificial Sequence
  Description of Artificial Sequence: Synthetic oligonucleotide
ggucuuuacucuuuugggg

SEQ ID NO: 2121681 - RNA, 19 nt, Artificial Sequence
  Description of Artificial Sequence: Synthetic oligonucleotide
cagguucccacuuggacgg

SEQ ID NO: 2121682 - RNA, 19 nt, Artificial Sequence
  Description of Artificial Sequence: Synthetic oligonucleotide
ucccaguccagaauggugu

SEQ ID NO: 2121683 - RNA, 19 nt, Artificial Sequence
  Description of Artificial Sequence: Synthetic oligonucleotide
uucaccgagccauugagau

SEQ ID NO: 2121684 - RNA, 19 nt, Artificial Sequence
  Description of Artificial Sequence: Synthetic oligonucleotide
cuacaaacauguuuccaug

SEQ ID NO: 2121685 - RNA, 19 nt, Artificial Sequence
  Description of Artificial Sequence: Synthetic oligonucleotide
ugcgucuuacacuugggac

SEQ ID NO: 2121686 - RNA, 19 nt, Artificial Sequence
  Description of Artificial Sequence: Synthetic oligonucleotide
aagucggggaugccggagg

SEQ ID NO: 2121687 - RNA, 19 nt, Artificial Sequence
  Description of Artificial Sequence: Synthetic oligonucleotide
ugacugacaggucugcggu

SEQ ID NO: 2121688 - RNA, 19 nt, Artificial Sequence
  Description of Artificial Sequence: Synthetic oligonucleotide
cuuggacggaucugcagcg

SEQ ID NO: 2121689 - RNA, 19 nt, Artificial Sequence
  Description of Artificial Sequence: Synthetic oligonucleotide
gucccguucaggcagugcg

SEQ ID NO: 2121690 - RNA, 19 nt, Artificial Sequence
  Description of Artificial Sequence: Synthetic oligonucleotide
uagguugacaaugaccaga

SEQ ID NO: 2121691 - RNA, 19 nt, Artificial Sequence
  Description of Artificial Sequence: Synthetic oligonucleotide
uacacuugggacauuccuc

SEQ ID NO: 2121692 - RNA, 19 nt, Artificial Sequence
  Description of Artificial Sequence: Synthetic oligonucleotide
uuuccauggagcucagcca

SEQ ID NO: 2121693 - RNA, 19 nt, Artificial Sequence
  Description of Artificial Sequence: Synthetic oligonucleotide
caucaggucccguucaggc

SEQ ID NO: 2121694 - RNA, 19 nt, Artificial Sequence
  Description of Artificial Sequence: Synthetic oligonucleotide
cacguauugcgucuuacac

SEQ ID NO: 2121695 - RNA, 19 nt, Artificial Sequence
  Description of Artificial Sequence: Synthetic oligonucleotide
uuacaagugccccucccac

SEQ ID NO: 2121696 - RNA, 19 nt, Artificial Sequence
  Description of Artificial Sequence: Synthetic oligonucleotide
uugucccuggggaagcccg

SEQ ID NO: 2121697 - RNA, 19 nt, Artificial Sequence
  Description of Artificial Sequence: Synthetic oligonucleotide
guguggaaaaccacgcugg

SEQ ID NO: 2121698 - RNA, 19 nt, Artificial Sequence
  Description of Artificial Sequence: Synthetic oligonucleotide
cugaagucggggaugccgg

SEQ ID NO: 2121699 - RNA, 19 nt, Artificial Sequence
  Description of Artificial Sequence: Synthetic oligonucleotide
aaugaccagacggccuccc

SEQ ID NO: 2121700 - RNA, 19 nt, Artificial Sequence
  Description of Artificial Sequence: Synthetic oligonucleotide
uccagaauggugucccuca

SEQ ID NO: 2121701 - RNA, 19 nt, Artificial Sequence
  Description of Artificial Sequence: Synthetic oligonucleotide
cauucaccgagccauugag

SEQ ID NO: 2121702 - RNA, 19 nt, Artificial Sequence
  Description of Artificial Sequence: Synthetic oligonucleotide
agugcguccucccagucca

SEQ ID NO: 2121703 - RNA, 19 nt, Artificial Sequence
  Description of Artificial Sequence: Synthetic oligonucleotide
gcagguucccacuuggacg

SEQ ID NO: 2121704 - RNA, 19 nt, Artificial Sequence
  Description of Artificial Sequence: Synthetic oligonucleotide
cacauucuggcugacgagg

SEQ ID NO: 2121705 - RNA, 19 nt, Artificial Sequence
  Description of Artificial Sequence: Synthetic oligonucleotide
agggcuguugggcucuggc

SEQ ID NO: 2121706 - RNA, 19 nt, Artificial Sequence
  Description of Artificial Sequence: Synthetic oligonucleotide
acguauugcgucuuacacu

SEQ ID NO: 2121707 - RNA, 19 nt, Artificial Sequence
  Description of Artificial Sequence: Synthetic oligonucleotide
ucgaagguggugucaaacu

SEQ ID NO: 2121708 - RNA, 19 nt, Artificial Sequence
  Description of Artificial Sequence: Synthetic oligonucleotide
acgucauccacguagccau

SEQ ID NO: 2121709 - RNA, 19 nt, Artificial Sequence
  Description of Artificial Sequence: Synthetic oligonucleotide
ucuuacacuugggacauuc

SEQ ID NO: 2121710 - RNA, 19 nt, Artificial Sequence
  Description of Artificial Sequence: Synthetic oligonucleotide
uccacguagccauggauuc

SEQ ID NO: 2121711 - RNA, 19 nt, Artificial Sequence
  Description of Artificial Sequence: Synthetic oligonucleotide
aucacgucauccacguagc

SEQ ID NO: 2121712 - RNA, 19 nt, Artificial Sequence
  Description of Artificial Sequence: Synthetic oligonucleotide
uugcgucuuacacuuggga

SEQ ID NO: 2121713 - RNA, 19 nt, Artificial Sequence
  Description of Artificial Sequence: Synthetic oligonucleotide
ucacguauugcgucuuaca

SEQ ID NO: 2121714 - RNA, 19 nt, Artificial Sequence
  Description of Artificial Sequence: Synthetic oligonucleotide
uguggaaaaccacgcugga

SEQ ID NO: 2121715 - RNA, 19 nt, Artificial Sequence
  Description of Artificial Sequence: Synthetic oligonucleotide
uuugugggcuguagguuga

SEQ ID NO: 2121716 - RNA, 19 nt, Artificial Sequence
  Description of Artificial Sequence: Synthetic oligonucleotide
ugacaaugaccagacggcc

SEQ ID NO: 2121717 - RNA, 19 nt, Artificial Sequence
  Description of Artificial Sequence: Synthetic oligonucleotide
gaugccggcgcccgugugg

SEQ ID NO: 2121718 - RNA, 19 nt, Artificial Sequence
  Description of Artificial Sequence: Synthetic oligonucleotide
uggcggucguguuuugugg

SEQ ID NO: 2121719 - RNA, 19 nt, Artificial Sequence
  Description of Artificial Sequence: Synthetic oligonucleotide
ucugcgguccugcuggccu

SEQ ID NO: 2121720 - RNA, 19 nt, Artificial Sequence
  Description of Artificial Sequence: Synthetic oligonucleotide
ucucucucacguauugcgu

SEQ ID NO: 2121721 - RNA, 19 nt, Artificial Sequence
  Description of Artificial Sequence: Synthetic oligonucleotide
ugggacauuccucuacaaa

SEQ ID NO: 2121722 - RNA, 19 nt, Artificial Sequence
  Description of Artificial Sequence: Synthetic oligonucleotide
uggacggaucugcagcgag

SEQ ID NO: 2121723 - RNA, 19 nt, Artificial Sequence
  Description of Artificial Sequence: Synthetic oligonucleotide
gaagcccgagcguacgugc

SEQ ID NO: 2121724 - RNA, 19 nt, Artificial Sequence
  Description of Artificial Sequence: Synthetic oligonucleotide
uguccagcacgcagggucc

SEQ ID NO: 2121725 - RNA, 19 nt, Artificial Sequence
  Description of Artificial Sequence: Synthetic oligonucleotide
agucggggaugccggaggc

SEQ ID NO: 2121726 - RNA, 19 nt, Artificial Sequence
  Description of Artificial Sequence: Synthetic oligonucleotide
ucucucacguauugcgucu

SEQ ID NO: 2121727 - RNA, 19 nt, Artificial Sequence
  Description of Artificial Sequence: Synthetic oligonucleotide
cuuaguggcaaggggcagg

SEQ ID NO: 2121728 - RNA, 19 nt, Artificial Sequence
  Description of Artificial Sequence: Synthetic oligonucleotide
acgaggaagcugaggaagc

SEQ ID NO: 2121729 - RNA, 19 nt, Artificial Sequence
  Description of Artificial Sequence: Synthetic oligonucleotide
uacaagugccccucccacc

SEQ ID NO: 2121730 - RNA, 19 nt, Artificial Sequence
  Description of Artificial Sequence: Synthetic oligonucleotide
acccgggucagcuggggac

SEQ ID NO: 2121731 - RNA, 19 nt, Artificial Sequence
  Description of Artificial Sequence: Synthetic oligonucleotide
cccagaugcuucaugagcc

SEQ ID NO: 2121732 - RNA, 19 nt, Artificial Sequence
  Description of Artificial Sequence: Synthetic oligonucleotide
augaccagacggccucccc

SEQ ID NO: 2121733 - RNA, 19 nt, Artificial Sequence
  Description of Artificial Sequence: Synthetic oligonucleotide
cucucucacguauugcguc

SEQ ID NO: 2121734 - RNA, 19 nt, Artificial Sequence
  Description of Artificial Sequence: Synthetic oligonucleotide
ugguccacacgccgugggg

SEQ ID NO: 2121735 - RNA, 19 nt, Artificial Sequence
  Description of Artificial Sequence: Synthetic oligonucleotide
ucuggcuuacaaacagcau

SEQ ID NO: 2121736 - RNA, 19 nt, Artificial Sequence
  Description of Artificial Sequence: Synthetic oligonucleotide
uccaugguccacacgccgu

SEQ ID NO: 2121737 - RNA, 19 nt, Artificial Sequence
  Description of Artificial Sequence: Synthetic oligonucleotide
guagguugacaaugaccag

SEQ ID NO: 2121738 - RNA, 19 nt, Artificial Sequence
  Description of Artificial Sequence: Synthetic oligonucleotide
gaagcugaggaagcccgag

SEQ ID NO: 2121739 - RNA, 19 nt, Artificial Sequence
  Description of Artificial Sequence: Synthetic oligonucleotide
cuuccaugguccacacgcc

SEQ ID NO: 2121740 - RNA, 19 nt, Artificial Sequence
  Description of Artificial Sequence: Synthetic oligonucleotide
cacgcuggaggccugcagc

SEQ ID NO: 2121741 - RNA, 19 nt, Artificial Sequence
  Description of Artificial Sequence: Synthetic oligonucleotide
aggcccuuaggccccuggc

SEQ ID NO: 2121742 - RNA, 19 nt, Artificial Sequence
  Description of Artificial Sequence: Synthetic oligonucleotide
ggauucgcaggucagccug

SEQ ID NO: 2121743 - RNA, 19 nt, Artificial Sequence
  Description of Artificial Sequence: Synthetic oligonucleotide
caugguacccacgacuguc

SEQ ID NO: 2121744 - RNA, 19 nt, Artificial Sequence
  Description of Artificial Sequence: Synthetic oligonucleotide
augguccacacgccguggg

SEQ ID NO: 2121745 - RNA, 19 nt, Artificial Sequence
  Description of Artificial Sequence: Synthetic oligonucleotide
agcacgcaggguccauccc

SEQ ID NO: 2121746 - RNA, 19 nt, Artificial Sequence
  Description of Artificial Sequence: Synthetic oligonucleotide
cacguagccauggauucgc

SEQ ID NO: 2121747 - RNA, 19 nt, Artificial Sequence
  Description of Artificial Sequence: Synthetic oligonucleotide
gaaaaccacgcuggaggcc

SEQ ID NO: 2121748 - RNA, 19 nt, Artificial Sequence
  Description of Artificial Sequence: Synthetic oligonucleotide
ucaccgagccauugagaug

SEQ ID NO: 2121749 - RNA, 19 nt, Artificial Sequence
  Description of Artificial Sequence: Synthetic oligonucleotide
cuuacaagugccccuccca

SEQ ID NO: 2121750 - RNA, 19 nt, Artificial Sequence
  Description of Artificial Sequence: Synthetic oligonucleotide
ugcaggaggcucagucuug

SEQ ID NO: 2121751 - RNA, 19 nt, Artificial Sequence
  Description of Artificial Sequence: Synthetic oligonucleotide
aagcccgagcgcuccagcu

SEQ ID NO: 2121752 - RNA, 19 nt, Artificial Sequence
  Description of Artificial Sequence: Synthetic oligonucleotide
agcaucaggucccguucag

SEQ ID NO: 2121753 - RNA, 19 nt, Artificial Sequence
  Description of Artificial Sequence: Synthetic oligonucleotide
uucgcaggucagccuggcg

SEQ ID NO: 2121754 - RNA, 19 nt, Artificial Sequence
  Description of Artificial Sequence: Synthetic oligonucleotide
auugcgucuuacacuuggg

SEQ ID NO: 2121755 - RNA, 19 nt, Artificial Sequence
  Description of Artificial Sequence: Synthetic oligonucleotide
ucacgucauccacguagcc

SEQ ID NO: 2121756 - RNA, 19 nt, Artificial Sequence
  Description of Artificial Sequence: Synthetic oligonucleotide
uuaguggcaaggggcaggu

SEQ ID NO: 2121757 - RNA, 19 nt, Artificial Sequence
  Description of Artificial Sequence: Synthetic oligonucleotide
ggccaugugggucuuggag

SEQ ID NO: 2121758 - RNA, 19 nt, Artificial Sequence
  Description of Artificial Sequence: Synthetic oligonucleotide
cugucucucucacguauug

SEQ ID NO: 2121759 - RNA, 19 nt, Artificial Sequence
  Description of Artificial Sequence: Synthetic oligonucleotide
cuugaggcccaugguaccc

SEQ ID NO: 2121760 - RNA, 19 nt, Artificial Sequence
  Description of Artificial Sequence: Synthetic oligonucleotide
gagccugcucaucacguca

SEQ ID NO: 2121761 - RNA, 19 nt, Artificial Sequence
  Description of Artificial Sequence: Synthetic oligonucleotide
guguggcucuuacaagugc

SEQ ID NO: 2121762 - RNA, 19 nt, Artificial Sequence
  Description of Artificial Sequence: Synthetic oligonucleotide
cucgaagguggugucaaac

SEQ ID NO: 2121763 - RNA, 19 nt, Artificial Sequence
  Description of Artificial Sequence: Synthetic oligonucleotide
ggaggcucagucuugggca

SEQ ID NO: 2121764 - RNA, 19 nt, Artificial Sequence
  Description of Artificial Sequence: Synthetic oligonucleotide
cuggcggucguguuuugug

SEQ ID NO: 2121765 - RNA, 19 nt, Artificial Sequence
  Description of Artificial Sequence: Synthetic oligonucleotide
cuugggacauuccucuaca

SEQ ID NO: 2121766 - RNA, 19 nt, Artificial Sequence
  Description of Artificial Sequence: Synthetic oligonucleotide
gauucgcaggucagccugg

SEQ ID NO: 2121767 - RNA, 19 nt, Artificial Sequence
  Description of Artificial Sequence: Synthetic oligonucleotide
ggcgcuuaguggcaagggg

SEQ ID NO: 2121768 - RNA, 19 nt, Artificial Sequence
  Description of Artificial Sequence: Synthetic oligonucleotide
uucucgaagguggugucaa

SEQ ID NO: 2121769 - RNA, 19 nt, Artificial Sequence
  Description of Artificial Sequence: Synthetic oligonucleotide
cuacaggcccuuaggcccc

SEQ ID NO: 2121770 - RNA, 19 nt, Artificial Sequence
  Description of Artificial Sequence: Synthetic oligonucleotide
cugcaccagggccaugugg

SEQ ID NO: 2121771 - RNA, 19 nt, Artificial Sequence
  Description of Artificial Sequence: Synthetic oligonucleotide
uggcucuuacaagugcccc

SEQ ID NO: 2121772 - RNA, 19 nt, Artificial Sequence
  Description of Artificial Sequence: Synthetic oligonucleotide
cacuuggacggaucugcag

SEQ ID NO: 2121773 - RNA, 19 nt, Artificial Sequence
  Description of Artificial Sequence: Synthetic oligonucleotide
aagugccccucccaccccu

SEQ ID NO: 2121774 - RNA, 19 nt, Artificial Sequence
  Description of Artificial Sequence: Synthetic oligonucleotide
caggccacgcucuuccaug

SEQ ID NO: 2121775 - RNA, 19 nt, Artificial Sequence
  Description of Artificial Sequence: Synthetic oligonucleotide
auucgcaggucagccuggc

SEQ ID NO: 2121776 - RNA, 19 nt, Artificial Sequence
  Description of Artificial Sequence: Synthetic oligonucleotide
ggucgaagaucuccggcag

SEQ ID NO: 2121777 - RNA, 19 nt, Artificial Sequence
  Description of Artificial Sequence: Synthetic oligonucleotide
uggauucgcaggucagccu

SEQ ID NO: 2121778 - RNA, 19 nt, Artificial Sequence
  Description of Artificial Sequence: Synthetic oligonucleotide
gcgucuuacacuugggaca

SEQ ID NO: 2121779 - RNA, 19 nt, Artificial Sequence
  Description of Artificial Sequence: Synthetic oligonucleotide
gucagcuggggacagccuc

SEQ ID NO: 2121780 - RNA, 19 nt, Artificial Sequence
  Description of Artificial Sequence: Synthetic oligonucleotide
cacgacugucucucucacg

SEQ ID NO: 2121781 - RNA, 19 nt, Artificial Sequence
  Description of Artificial Sequence: Synthetic oligonucleotide
guacccacgacugucucuc

SEQ ID NO: 2121782 - RNA, 19 nt, Artificial Sequence
  Description of Artificial Sequence: Synthetic oligonucleotide
aucuccggcagcccgcacu

SEQ ID NO: 2121783 - RNA, 19 nt, Artificial Sequence
  Description of Artificial Sequence: Synthetic oligonucleotide
ggcggucguguuuuguggg

SEQ ID NO: 2121784 - RNA, 19 nt, Artificial Sequence
  Description of Artificial Sequence: Synthetic oligonucleotide
uugggacauuccucuacaa

SEQ ID NO: 2121785 - RNA, 19 nt, Artificial Sequence
  Description of Artificial Sequence: Synthetic oligonucleotide
gacauuccucuacaaacau

SEQ ID NO: 2121786 - RNA, 19 nt, Artificial Sequence
  Description of Artificial Sequence: Synthetic oligonucleotide
cggucuuuacucuuuuggg

SEQ ID NO: 2121787 - RNA, 19 nt, Artificial Sequence
  Description of Artificial Sequence: Synthetic oligonucleotide
ugaggaagcccgagcgcuc

SEQ ID NO: 2121788 - RNA, 19 nt, Artificial Sequence
  Description of Artificial Sequence: Synthetic oligonucleotide
cuggcuuacaaacagcauu

SEQ ID NO: 2121789 - RNA, 19 nt, Artificial Sequence
  Description of Artificial Sequence: Synthetic oligonucleotide
ucccguucaggcagugcgu

SEQ ID NO: 2121790 - RNA, 19 nt, Artificial Sequence
  Description of Artificial Sequence: Synthetic oligonucleotide
cagugcguccucccagucc

SEQ ID NO: 2121791 - RNA, 19 nt, Artificial Sequence
  Description of Artificial Sequence: Synthetic oligonucleotide
cucggucuuuacucuuuug

SEQ ID NO: 2121792 - RNA, 19 nt, Artificial Sequence
  Description of Artificial Sequence: Synthetic oligonucleotide
cucacguauugcgucuuac

SEQ ID NO: 2121793 - RNA, 19 nt, Artificial Sequence
  Description of Artificial Sequence: Synthetic oligonucleotide
cagacggccuccccggcgc

SEQ ID NO: 2121794 - RNA, 19 nt, Artificial Sequence
  Description of Artificial Sequence: Synthetic oligonucleotide
ggcagguucccacuuggac

SEQ ID NO: 2121795 - RNA, 19 nt, Artificial Sequence
  Description of Artificial Sequence: Synthetic oligonucleotide
agcauucaccgagccauug

SEQ ID NO: 2121796 - RNA, 19 nt, Artificial Sequence
  Description of Artificial Sequence: Synthetic oligonucleotide
gguugacaaugaccagacg

SEQ ID NO: 2121797 - RNA, 19 nt, Artificial Sequence
  Description of Artificial Sequence: Synthetic oligonucleotide
ggacauuccucuacaaaca

SEQ ID NO: 2121798 - RNA, 19 nt, Artificial Sequence
  Description of Artificial Sequence: Synthetic oligonucleotide
agccagcuugucccugggg

SEQ ID NO: 2121799 - RNA, 19 nt, Artificial Sequence
  Description of Artificial Sequence: Synthetic oligonucleotide
aaggggcagguucccacuu

SEQ ID NO: 2121800 - RNA, 19 nt, Artificial Sequence
  Description of Artificial Sequence: Synthetic oligonucleotide
ucccaccccucgcacccgg

SEQ ID NO: 2121801 - RNA, 19 nt, Artificial Sequence
  Description of Artificial Sequence: Synthetic oligonucleotide
gggucgaagaucuccggca

SEQ ID NO: 2121802 - RNA, 19 nt, Artificial Sequence
  Description of Artificial Sequence: Synthetic oligonucleotide
caccgagccauugagaugu

SEQ ID NO: 2121803 - RNA, 19 nt, Artificial Sequence
  Description of Artificial Sequence: Synthetic oligonucleotide
agaugugcaggaggcucag

SEQ ID NO: 2121804 - RNA, 19 nt, Artificial Sequence
  Description of Artificial Sequence: Synthetic oligonucleotide
acauucuggcugacgagga

SEQ ID NO: 2121805 - RNA, 19 nt, Artificial Sequence
  Description of Artificial Sequence: Synthetic oligonucleotide
gcucaucacgucauccacg

SEQ ID NO: 2121806 - RNA, 19 nt, Artificial Sequence
  Description of Artificial Sequence: Synthetic oligonucleotide
ucuccggcagcccgcacuu

SEQ ID NO: 2121807 - RNA, 19 nt, Artificial Sequence
  Description of Artificial Sequence: Synthetic oligonucleotide
cccuacaggcccuuaggcc

SEQ ID NO: 2121808 - RNA, 19 nt, Artificial Sequence
  Description of Artificial Sequence: Synthetic oligonucleotide
cguguggaaaaccacgcug

SEQ ID NO: 2121809 - RNA, 19 nt, Artificial Sequence
  Description of Artificial Sequence: Synthetic oligonucleotide
cccguguggaaaaccacgc

SEQ ID NO: 2121810 - RNA, 19 nt, Artificial Sequence
  Description of Artificial Sequence: Synthetic oligonucleotide
agcccgagcguacgugcag

SEQ ID NO: 2121811 - RNA, 19 nt, Artificial Sequence
  Description of Artificial Sequence: Synthetic oligonucleotide
ugguacccacgacugucuc

SEQ ID NO: 2121812 - RNA, 19 nt, Artificial Sequence
  Description of Artificial Sequence: Synthetic oligonucleotide
cgggcguucucgaaggugg

SEQ ID NO: 2121813 - RNA, 19 nt, Artificial Sequence
  Description of Artificial Sequence: Synthetic oligonucleotide
gcccguguggaaaaccacg

SEQ ID NO: 2121814 - RNA, 19 nt, Artificial Sequence
  Description of Artificial Sequence: Synthetic oligonucleotide
gggcuguagguugacaaug

SEQ ID NO: 2121815 - RNA, 19 nt, Artificial Sequence
  Description of Artificial Sequence: Synthetic oligonucleotide
ucucacguauugcgucuua

SEQ ID NO: 2121816 - RNA, 19 nt, Artificial Sequence
  Description of Artificial Sequence: Synthetic oligonucleotide
ggaggcggugcugaugccg

SEQ ID NO: 2121817 - RNA, 19 nt, Artificial Sequence
  Description of Artificial Sequence: Synthetic oligonucleotide
cucuuccaugguccacacg

SEQ ID NO: 2121818 - RNA, 19 nt, Artificial Sequence
  Description of Artificial Sequence: Synthetic oligonucleotide
cccacuuggacggaucugc

SEQ ID NO: 2121819 - RNA, 19 nt, Artificial Sequence
  Description of Artificial Sequence: Synthetic oligonucleotide
ucuggcugacgaggaagcu

SEQ ID NO: 2121820 - RNA, 19 nt, Artificial Sequence
  Description of Artificial Sequence: Synthetic oligonucleotide
ggggucgaagaucuccggc

SEQ ID NO: 2121821 - RNA, 19 nt, Artificial Sequence
  Description of Artificial Sequence: Synthetic oligonucleotide
auucaccgagccauugaga

SEQ ID NO: 2121822 - RNA, 19 nt, Artificial Sequence
  Description of Artificial Sequence: Synthetic oligonucleotide
cuugucccuggggaagccc

SEQ ID NO: 2121823 - RNA, 19 nt, Artificial Sequence
  Description of Artificial Sequence: Synthetic oligonucleotide
ccggaggcggugcugaugc

SEQ ID NO: 2121824 - RNA, 19 nt, Artificial Sequence
  Description of Artificial Sequence: Synthetic oligonucleotide
gcgcuuaguggcaaggggc

SEQ ID NO: 2121825 - RNA, 19 nt, Artificial Sequence
  Description of Artificial Sequence: Synthetic oligonucleotide
accccucgcacccggguca

SEQ ID NO: 2121826 - RNA, 19 nt, Artificial Sequence
  Description of Artificial Sequence: Synthetic oligonucleotide
ggccgggcguucucgaagg

SEQ ID NO: 2121827 - RNA, 19 nt, Artificial Sequence
  Description of Artificial Sequence: Synthetic oligonucleotide
cagcuugucccuggggaag

SEQ ID NO: 2121828 - RNA, 19 nt, Artificial Sequence
  Description of Artificial Sequence: Synthetic oligonucleotide
caggucagccuggcggucg

SEQ ID NO: 2121829 - RNA, 19 nt, Artificial Sequence
  Description of Artificial Sequence: Synthetic oligonucleotide
guacgugcagcccguccac

SEQ ID NO: 2121830 - RNA, 19 nt, Artificial Sequence
  Description of Artificial Sequence: Synthetic oligonucleotide
gacagccucggucuuuacu

SEQ ID NO: 2121831 - RNA, 19 nt, Artificial Sequence
  Description of Artificial Sequence: Synthetic oligonucleotide
cacgucauccacguagcca

SEQ ID NO: 2121832 - RNA, 19 nt, Artificial Sequence
  Description of Artificial Sequence: Synthetic oligonucleotide
caggaggcucagucuuggg

SEQ ID NO: 2121833 - RNA, 19 nt, Artificial Sequence
  Description of Artificial Sequence: Synthetic oligonucleotide
cgagcguacgugcagcccg

SEQ ID NO: 2121834 - RNA, 19 nt, Artificial Sequence
  Description of Artificial Sequence: Synthetic oligonucleotide
gccagcuugucccugggga

SEQ ID NO: 2121835 - RNA, 19 nt, Artificial Sequence
  Description of Artificial Sequence: Synthetic oligonucleotide
gacaaugaccagacggccu

SEQ ID NO: 2121836 - RNA, 19 nt, Artificial Sequence
  Description of Artificial Sequence: Synthetic oligonucleotide
gcuguagguugacaaugac

SEQ ID NO: 2121837 - RNA, 19 nt, Artificial Sequence
  Description of Artificial Sequence: Synthetic oligonucleotide
agggugacugacaggucug

SEQ ID NO: 2121838 - RNA, 19 nt, Artificial Sequence
  Description of Artificial Sequence: Synthetic oligonucleotide
ucucgaagguggugucaaa

SEQ ID NO: 2121839 - RNA, 19 nt, Artificial Sequence
  Description of Artificial Sequence: Synthetic oligonucleotide
cagggugacugacaggucu

SEQ ID NO: 2121840 - RNA, 19 nt, Artificial Sequence
  Description of Artificial Sequence: Synthetic oligonucleotide
ucccacuuggacggaucug

SEQ ID NO: 2121841 - RNA, 19 nt, Artificial Sequence
  Description of Artificial Sequence: Synthetic oligonucleotide
caucagcgagcaucagguc

SEQ ID NO: 2121842 - RNA, 19 nt, Artificial Sequence
  Description of Artificial Sequence: Synthetic oligonucleotide
gugcagagccggcccgugg

SEQ ID NO: 2121843 - RNA, 19 nt, Artificial Sequence
  Description of Artificial Sequence: Synthetic oligonucleotide
ggucguguuuugugggcug

SEQ ID NO: 2121844 - RNA, 19 nt, Artificial Sequence
  Description of Artificial Sequence: Synthetic oligonucleotide
augguacccacgacugucu

SEQ ID NO: 2121845 - RNA, 19 nt, Artificial Sequence
  Description of Artificial Sequence: Synthetic oligonucleotide
agccauggauucgcagguc

SEQ ID NO: 2121846 - RNA, 19 nt, Artificial Sequence
  Description of Artificial Sequence: Synthetic oligonucleotide
uuggacggaucugcagcga

SEQ ID NO: 2121847 - RNA, 19 nt, Artificial Sequence
  Description of Artificial Sequence: Synthetic oligonucleotide
caggucugcgguccugcug

SEQ ID NO: 2121848 - RNA, 19 nt, Artificial Sequence
  Description of Artificial Sequence: Synthetic oligonucleotide
gaugccggaggcggugcug

SEQ ID NO: 2121849 - RNA, 19 nt, Artificial Sequence
  Description of Artificial Sequence: Synthetic oligonucleotide
gcugaggaagcccgagcgc

SEQ ID NO: 2121850 - RNA, 19 nt, Artificial Sequence
  Description of Artificial Sequence: Synthetic oligonucleotide
gacggaucugcagcgaggu

SEQ ID NO: 2121851 - RNA, 19 nt, Artificial Sequence
  Description of Artificial Sequence: Synthetic oligonucleotide
agcgaggugcccaggguga

SEQ ID NO: 2121852 - RNA, 19 nt, Artificial Sequence
  Description of Artificial Sequence: Synthetic oligonucleotide
ggacggaucugcagcgagg

SEQ ID NO: 2121853 - RNA, 19 nt, Artificial Sequence
  Description of Artificial Sequence: Synthetic oligonucleotide
aagcccgagcguacgugca

SEQ ID NO: 2121854 - RNA, 19 nt, Artificial Sequence
  Description of Artificial Sequence: Synthetic oligonucleotide
caggcccuuaggccccugg

SEQ ID NO: 2121855 - RNA, 19 nt, Artificial Sequence
  Description of Artificial Sequence: Synthetic oligonucleotide
ccuugaggcccaugguacc

SEQ ID NO: 2121856 - RNA, 19 nt, Artificial Sequence
  Description of Artificial Sequence: Synthetic oligonucleotide
ggccacugugcagagccgg

SEQ ID NO: 2121857 - RNA, 19 nt, Artificial Sequence
  Description of Artificial Sequence: Synthetic oligonucleotide
uccccggcgcuuaguggca

SEQ ID NO: 2121858 - RNA, 19 nt, Artificial Sequence
  Description of Artificial Sequence: Synthetic oligonucleotide
acggaucugcagcgaggug

SEQ ID NO: 2121859 - RNA, 19 nt, Artificial Sequence
  Description of Artificial Sequence: Synthetic oligonucleotide
acgcucuuccaugguccac

SEQ ID NO: 2121860 - RNA, 19 nt, Artificial Sequence
  Description of Artificial Sequence: Synthetic oligonucleotide
ccacauucuggcugacgag

SEQ ID NO: 2121861 - RNA, 19 nt, Artificial Sequence
  Description of Artificial Sequence: Synthetic oligonucleotide
guucucgaaggugguguca

SEQ ID NO: 2121862 - RNA, 19 nt, Artificial Sequence
  Description of Artificial Sequence: Synthetic oligonucleotide
cccguccacauucuggcug

SEQ ID NO: 2121863 - RNA, 19 nt, Artificial Sequence
  Description of Artificial Sequence: Synthetic oligonucleotide
uacgugcagcccguccaca

SEQ ID NO: 2121864 - RNA, 19 nt, Artificial Sequence
  Description of Artificial Sequence: Synthetic oligonucleotide
ccccuacaggcccuuaggc

SEQ ID NO: 2121865 - RNA, 19 nt, Artificial Sequence
  Description of Artificial Sequence: Synthetic oligonucleotide
gcauucaccgagccauuga

SEQ ID NO: 2121866 - RNA, 19 nt, Artificial Sequence
  Description of Artificial Sequence: Synthetic oligonucleotide
gucggggaugccggaggcg

SEQ ID NO: 2121867 - RNA, 19 nt, Artificial Sequence
  Description of Artificial Sequence: Synthetic oligonucleotide
agguggugucaaacuuggg

SEQ ID NO: 2121868 - RNA, 19 nt, Artificial Sequence
  Description of Artificial Sequence: Synthetic oligonucleotide
cgagccauugagaugugca

SEQ ID NO: 2121869 - RNA, 19 nt, Artificial Sequence
  Description of Artificial Sequence: Synthetic oligonucleotide
agaucuccggcagcccgca

SEQ ID NO: 2121870 - RNA, 19 nt, Artificial Sequence
  Description of Artificial Sequence: Synthetic oligonucleotide
aggucagccuggcggucgu

SEQ ID NO: 2121871 - RNA, 19 nt, Artificial Sequence
  Description of Artificial Sequence: Synthetic oligonucleotide
gugggucuuggagggccgg

SEQ ID NO: 2121872 - RNA, 19 nt, Artificial Sequence
  Description of Artificial Sequence: Synthetic oligonucleotide
cucgcacccgggucagcug

SEQ ID NO: 2121873 - RNA, 19 nt, Artificial Sequence
  Description of Artificial Sequence: Synthetic oligonucleotide
cugaggaagcccgagcgcu

SEQ ID NO: 2121874 - RNA, 19 nt, Artificial Sequence
  Description of Artificial Sequence: Synthetic oligonucleotide
gcggucguguuuugugggc

SEQ ID NO: 2121875 - RNA, 19 nt, Artificial Sequence
  Description of Artificial Sequence: Synthetic oligonucleotide
ggugcugaugccggcgccc

SEQ ID NO: 2121876 - RNA, 19 nt, Artificial Sequence
  Description of Artificial Sequence: Synthetic oligonucleotide
cacgcucuuccauggucca

SEQ ID NO: 2121877 - RNA, 19 nt, Artificial Sequence
  Description of Artificial Sequence: Synthetic oligonucleotide
guucccacuuggacggauc

SEQ ID NO: 2121878 - RNA, 19 nt, Artificial Sequence
  Description of Artificial Sequence: Synthetic oligonucleotide
guauugcgucuuacacuug

SEQ ID NO: 2121879 - RNA, 19 nt, Artificial Sequence
  Description of Artificial Sequence: Synthetic oligonucleotide
ggcuguagguugacaauga

SEQ ID NO: 2121880 - RNA, 19 nt, Artificial Sequence
  Description of Artificial Sequence: Synthetic oligonucleotide
aaaccacgcuggaggccug

SEQ ID NO: 2121881 - RNA, 19 nt, Artificial Sequence
  Description of Artificial Sequence: Synthetic oligonucleotide
ggccuugaggcccauggua

SEQ ID NO: 2121882 - RNA, 19 nt, Artificial Sequence
  Description of Artificial Sequence: Synthetic oligonucleotide
gggccgggcguucucgaag

SEQ ID NO: 2121883 - RNA, 19 nt, Artificial Sequence
  Description of Artificial Sequence: Synthetic oligonucleotide
acugucucucucacguauu

SEQ ID NO: 2121884 - RNA, 19 nt, Artificial Sequence
  Description of Artificial Sequence: Synthetic oligonucleotide
ggggaagcccgagcguacg

SEQ ID NO: 2121885 - RNA, 19 nt, Artificial Sequence
  Description of Artificial Sequence: Synthetic oligonucleotide
ggcggugcugaugccggcg

SEQ ID NO: 2121886 - RNA, 19 nt, Artificial Sequence
  Description of Artificial Sequence: Synthetic oligonucleotide
uugugggcuguagguugac

SEQ ID NO: 2121887 - RNA, 19 nt, Artificial Sequence
  Description of Artificial Sequence: Synthetic oligonucleotide
gccacgcucuuccaugguc

SEQ ID NO: 2121888 - RNA, 19 nt, Artificial Sequence
  Description of Artificial Sequence: Synthetic oligonucleotide
uacccacgacugucucucu

SEQ ID NO: 2121889 - RNA, 19 nt, Artificial Sequence
  Description of Artificial Sequence: Synthetic oligonucleotide
cguagccauggauucgcag

SEQ ID NO: 2121890 - RNA, 19 nt, Artificial Sequence
  Description of Artificial Sequence: Synthetic oligonucleotide
ggagggccgggcguucucg

SEQ ID NO: 2121891 - RNA, 19 nt, Artificial Sequence
  Description of Artificial Sequence: Synthetic oligonucleotide
ccaugguccacacgccgug

SEQ ID NO: 2121892 - RNA, 19 nt, Artificial Sequence
  Description of Artificial Sequence: Synthetic oligonucleotide
gugcaggaggcucagucuu

SEQ ID NO: 2121893 - RNA, 19 nt, Artificial Sequence
  Description of Artificial Sequence: Synthetic oligonucleotide
aggaagcccgagcgcucca

SEQ ID NO: 2121894 - RNA, 19 nt, Artificial Sequence
  Description of Artificial Sequence: Synthetic oligonucleotide
caccccucgcacccggguc

SEQ ID NO: 2121895 - RNA, 19 nt, Artificial Sequence
  Description of Artificial Sequence: Synthetic oligonucleotide
auuccucuacaaacauguu

SEQ ID NO: 2121896 - RNA, 19 nt, Artificial Sequence
  Description of Artificial Sequence: Synthetic oligonucleotide
agccuggcggucguguuuu

SEQ ID NO: 2121897 - RNA, 19 nt, Artificial Sequence
  Description of Artificial Sequence: Synthetic oligonucleotide
cucugaagucggggaugcc

SEQ ID NO: 2121898 - RNA, 19 nt, Artificial Sequence
  Description of Artificial Sequence: Synthetic oligonucleotide
ugcgguccugcuggccuca

SEQ ID NO: 2121899 - RNA, 19 nt, Artificial Sequence
  Description of Artificial Sequence: Synthetic oligonucleotide
augccggcgcccgugugga

SEQ ID NO: 2121900 - RNA, 19 nt, Artificial Sequence
  Description of Artificial Sequence: Synthetic oligonucleotide
cugcgguccugcuggccuc

SEQ ID NO: 2121901 - RNA, 19 nt, Artificial Sequence
  Description of Artificial Sequence: Synthetic oligonucleotide
ccauugagaugugcaggag

SEQ ID NO: 2121902 - RNA, 19 nt, Artificial Sequence
  Description of Artificial Sequence: Synthetic oligonucleotide
ccacguagccauggauucg

SEQ ID NO: 2121903 - RNA, 19 nt, Artificial Sequence
  Description of Artificial Sequence: Synthetic oligonucleotide
cuggggaagcccgagcgua

SEQ ID NO: 2121904 - RNA, 19 nt, Artificial Sequence
  Description of Artificial Sequence: Synthetic oligonucleotide
agccugcucaucacgucau

SEQ ID NO: 2121905 - RNA, 19 nt, Artificial Sequence
  Description of Artificial Sequence: Synthetic oligonucleotide
ggcuuacaaacagcauuca

SEQ ID NO: 2121906 - RNA, 19 nt, Artificial Sequence
  Description of Artificial Sequence: Synthetic oligonucleotide
agcguacgugcagcccguc

SEQ ID NO: 2121907 - RNA, 19 nt, Artificial Sequence
  Description of Artificial Sequence: Synthetic oligonucleotide
ggugcccagggugacugac

SEQ ID NO: 2121908 - RNA, 19 nt, Artificial Sequence
  Description of Artificial Sequence: Synthetic oligonucleotide
gccuccccggcgcuuagug

SEQ ID NO: 2121909 - RNA, 19 nt, Artificial Sequence
  Description of Artificial Sequence: Synthetic oligonucleotide
gcguacgugcagcccgucc

SEQ ID NO: 2121910 - RNA, 19 nt, Artificial Sequence
  Description of Artificial Sequence: Synthetic oligonucleotide
ccagacggccuccccggcg

SEQ ID NO: 2121911 - RNA, 19 nt, Artificial Sequence
  Description of Artificial Sequence: Synthetic oligonucleotide
agagccggcccguggccuu

SEQ ID NO: 2121912 - RNA, 19 nt, Artificial Sequence
  Description of Artificial Sequence: Synthetic oligonucleotide
gcugaugccggcgcccgug

SEQ ID NO: 2121913 - RNA, 19 nt, Artificial Sequence
  Description of Artificial Sequence: Synthetic oligonucleotide
ggaagcccgagcgcuccag

SEQ ID NO: 2121914 - RNA, 19 nt, Artificial Sequence
  Description of Artificial Sequence: Synthetic oligonucleotide
gaucuccggcagcccgcac

SEQ ID NO: 2121915 - RNA, 19 nt, Artificial Sequence
  Description of Artificial Sequence: Synthetic oligonucleotide
ccguucaggcagugcgucc

SEQ ID NO: 2121916 - RNA, 19 nt, Artificial Sequence
  Description of Artificial Sequence: Synthetic oligonucleotide
gcagagccggcccguggcc

SEQ ID NO: 2121917 - RNA, 19 nt, Artificial Sequence
  Description of Artificial Sequence: Synthetic oligonucleotide
cuuggagggccgggcguuc

SEQ ID NO: 2121918 - RNA, 19 nt, Artificial Sequence
  Description of Artificial Sequence: Synthetic oligonucleotide
gguacccacgacugucucu

SEQ ID NO: 2121919 - RNA, 19 nt, Artificial Sequence
  Description of Artificial Sequence: Synthetic oligonucleotide
ccacgacugucucucucac

SEQ ID NO: 2121920 - RNA, 19 nt, Artificial Sequence
  Description of Artificial Sequence: Synthetic oligonucleotide
cccgagcguacgugcagcc

SEQ ID NO: 2121921 - RNA, 19 nt, Artificial Sequence
  Description of Artificial Sequence: Synthetic oligonucleotide
gucugcgguccugcuggcc

SEQ ID NO: 2121922 - RNA, 19 nt, Artificial Sequence
  Description of Artificial Sequence: Synthetic oligonucleotide
ggcguucucgaagguggug

SEQ ID NO: 2121923 - RNA, 19 nt, Artificial Sequence
  Description of Artificial Sequence: Synthetic oligonucleotide
agcuggggacagccucggu

SEQ ID NO: 2121924 - RNA, 19 nt, Artificial Sequence
  Description of Artificial Sequence: Synthetic oligonucleotide
cguacgugcagcccgucca

SEQ ID NO: 2121925 - RNA, 19 nt, Artificial Sequence
  Description of Artificial Sequence: Synthetic oligonucleotide
ggcccguggccuugaggcc

SEQ ID NO: 2121926 - RNA, 19 nt, Artificial Sequence
  Description of Artificial Sequence: Synthetic oligonucleotide
cgcuuaguggcaaggggca

SEQ ID NO: 2121927 - RNA, 19 nt, Artificial Sequence
  Description of Artificial Sequence: Synthetic oligonucleotide
ggcgcccguguggaaaacc

SEQ ID NO: 2121928 - RNA, 19 nt, Artificial Sequence
  Description of Artificial Sequence: Synthetic oligonucleotide
gcccuuaggccccuggccu

SEQ ID NO: 2121929 - RNA, 19 nt, Artificial Sequence
  Description of Artificial Sequence: Synthetic oligonucleotide
uacaggcccuuaggccccu

SEQ ID NO: 2121930 - RNA, 19 nt, Artificial Sequence
  Description of Artificial Sequence: Synthetic oligonucleotide
ggggaugccggaggcggug

SEQ ID NO: 2121931 - RNA, 19 nt, Artificial Sequence
  Description of Artificial Sequence: Synthetic oligonucleotide
cagccucggucuuuacucu

SEQ ID NO: 2121932 - RNA, 19 nt, Artificial Sequence
  Description of Artificial Sequence: Synthetic oligonucleotide
gcguucucgaagguggugu

SEQ ID NO: 2121933 - RNA, 19 nt, Artificial Sequence
  Description of Artificial Sequence: Synthetic oligonucleotide
ccggcgcuuaguggcaagg

SEQ ID NO: 2121934 - RNA, 19 nt, Artificial Sequence
  Description of Artificial Sequence: Synthetic oligonucleotide
cugcagcgaggugcccagg

SEQ ID NO: 2121935 - RNA, 19 nt, Artificial Sequence
  Description of Artificial Sequence: Synthetic oligonucleotide
ccggcagcccgcacuuagc

SEQ ID NO: 2121936 - RNA, 19 nt, Artificial Sequence
  Description of Artificial Sequence: Synthetic oligonucleotide
cguucucgaaggugguguc

SEQ ID NO: 2121937 - RNA, 19 nt, Artificial Sequence
  Description of Artificial Sequence: Synthetic oligonucleotide
cgagcgcuccagcugcacc

SEQ ID NO: 2121938 - RNA, 19 nt, Artificial Sequence
  Description of Artificial Sequence: Synthetic oligonucleotide
gcccgagcguacgugcagc

SEQ ID NO: 2121939 - RNA, 19 nt, Artificial Sequence
  Description of Artificial Sequence: Synthetic oligonucleotide
gcgcccguguggaaaacca

SEQ ID NO: 2121940 - RNA, 19 nt, Artificial Sequence
  Description of Artificial Sequence: Synthetic oligonucleotide
gggaugccggaggcggugc

SEQ ID NO: 2121941 - RNA, 19 nt, Artificial Sequence
  Description of Artificial Sequence: Synthetic oligonucleotide
ggcagugcguccucccagu

SEQ ID NO: 2121942 - RNA, 19 nt, Artificial Sequence
  Description of Artificial Sequence: Synthetic oligonucleotide
caggggccuuguccagcac

SEQ ID NO: 2121943 - RNA, 19 nt, Artificial Sequence
  Description of Artificial Sequence: Synthetic oligonucleotide
cacccgggucagcugggga

SEQ ID NO: 2121944 - RNA, 19 nt, Artificial Sequence
  Description of Artificial Sequence: Synthetic oligonucleotide
ccgagccauugagaugugc

SEQ ID NO: 2121945 - RNA, 19 nt, Artificial Sequence
  Description of Artificial Sequence: Synthetic oligonucleotide
gcguccucccaguccagaa

SEQ ID NO: 2121946 - RNA, 19 nt, Artificial Sequence
  Description of Artificial Sequence: Synthetic oligonucleotide
gcagugcguccucccaguc

SEQ ID NO: 2121947 - RNA, 19 nt, Artificial Sequence
  Description of Artificial Sequence: Synthetic oligonucleotide
cccguucaggcagugcguc

SEQ ID NO: 2121948 - RNA, 19 nt, Artificial Sequence
  Description of Artificial Sequence: Synthetic oligonucleotide
gagcguacgugcagcccgu

SEQ ID NO: 2121949 - RNA, 19 nt, Artificial Sequence
  Description of Artificial Sequence: Synthetic oligonucleotide
agcgagcaucaggucccgu

SEQ ID NO: 2121950 - RNA, 19 nt, Artificial Sequence
  Description of Artificial Sequence: Synthetic oligonucleotide
ccgagcguacgugcagccc

SEQ ID NO: 2121951 - RNA, 19 nt, Artificial Sequence
  Description of Artificial Sequence: Synthetic oligonucleotide
guccagcacgcagggucca

SEQ ID NO: 2121952 - RNA, 19 nt, Artificial Sequence
  Description of Artificial Sequence: Synthetic oligonucleotide
agguucccacuuggacgga

SEQ ID NO: 2121953 - RNA, 19 nt, Artificial Sequence
  Description of Artificial Sequence: Synthetic oligonucleotide
ccggcccguggccuugagg

SEQ ID NO: 2121954 - RNA, 19 nt, Artificial Sequence
  Description of Artificial Sequence: Synthetic oligonucleotide
ccgggcguucucgaaggug

SEQ ID NO: 2121955 - RNA, 19 nt, Artificial Sequence
  Description of Artificial Sequence: Synthetic oligonucleotide
ccagaugcuucaugagccu

SEQ ID NO: 2121956 - RNA, 19 nt, Artificial Sequence
  Description of Artificial Sequence: Synthetic oligonucleotide
ggacagccucggucuuuac

SEQ ID NO: 2121957 - RNA, 19 nt, Artificial Sequence
  Description of Artificial Sequence: Synthetic oligonucleotide
gcgagcaucaggucccguu

SEQ ID NO: 2121958 - RNA, 19 nt, Artificial Sequence
  Description of Artificial Sequence: Synthetic oligonucleotide
gggccaugugggucuugga

SEQ ID NO: 2121959 - RNA, 19 nt, Artificial Sequence
  Description of Artificial Sequence: Synthetic oligonucleotide
cggcgcuuaguggcaaggg

SEQ ID NO: 2121960 - RNA, 19 nt, Artificial Sequence
  Description of Artificial Sequence: Synthetic oligonucleotide
gccggaggcggugcugaug

SEQ ID NO: 2121961 - RNA, 19 nt, Artificial Sequence
  Description of Artificial Sequence: Synthetic oligonucleotide
cccggcgcuuaguggcaag

SEQ ID NO: 2121962 - RNA, 19 nt, Artificial Sequence
  Description of Artificial Sequence: Synthetic oligonucleotide
cugaugccggcgcccgugu

SEQ ID NO: 2121963 - RNA, 19 nt, Artificial Sequence
  Description of Artificial Sequence: Synthetic oligonucleotide
gcagcgaggugcccagggu

SEQ ID NO: 2121964 - RNA, 19 nt, Artificial Sequence
  Description of Artificial Sequence: Synthetic oligonucleotide
cccaccccucgcacccggg

SEQ ID NO: 2121965 - RNA, 19 nt, Artificial Sequence
  Description of Artificial Sequence: Synthetic oligonucleotide
acaggcccuuaggccccug

SEQ ID NO: 2121966 - RNA, 19 nt, Artificial Sequence
  Description of Artificial Sequence: Synthetic oligonucleotide
gggaagcccgagcguacgu

SEQ ID NO: 2121967 - RNA, 19 nt, Artificial Sequence
  Description of Artificial Sequence: Synthetic oligonucleotide
ugccggcgcccguguggaa

SEQ ID NO: 2121968 - RNA, 19 nt, Artificial Sequence
  Description of Artificial Sequence: Synthetic oligonucleotide
gggcguggcagagguggca

SEQ ID NO: 2121969 - RNA, 19 nt, Artificial Sequence
  Description of Artificial Sequence: Synthetic oligonucleotide
gcgaggugcccagggugac

SEQ ID NO: 2121970 - RNA, 19 nt, Artificial Sequence
  Description of Artificial Sequence: Synthetic oligonucleotide
caggucccguucaggcagu

SEQ ID NO: 2121971 - RNA, 19 nt, Artificial Sequence
  Description of Artificial Sequence: Synthetic oligonucleotide
cagcauucaccgagccauu

SEQ ID NO: 2121972 - RNA, 19 nt, Artificial Sequence
  Description of Artificial Sequence: Synthetic oligonucleotide
ccguguggaaaaccacgcu

SEQ ID NO: 2121973 - RNA, 19 nt, Artificial Sequence
  Description of Artificial Sequence: Synthetic oligonucleotide
cucucacguauugcgucuu

SEQ ID NO: 2121974 - RNA, 19 nt, Artificial Sequence
  Description of Artificial Sequence: Synthetic oligonucleotide
cugugcagagccggcccgu

SEQ ID NO: 2121975 - RNA, 19 nt, Artificial Sequence
  Description of Artificial Sequence: Synthetic oligonucleotide
ggaugccggaggcggugcu

SEQ ID NO: 2121976 - RNA, 19 nt, Artificial Sequence
  Description of Artificial Sequence: Synthetic oligonucleotide
gccggcgcccguguggaaa

SEQ ID NO: 2121977 - RNA, 19 nt, Artificial Sequence
  Description of Artificial Sequence: Synthetic oligonucleotide
gccuggcggucguguuuug

SEQ ID NO: 2121978 - RNA, 19 nt, Artificial Sequence
  Description of Artificial Sequence: Synthetic oligonucleotide
cccgggucagcuggggaca

SEQ ID NO: 2121979 - RNA, 19 nt, Artificial Sequence
  Description of Artificial Sequence: Synthetic oligonucleotide
gguucccacuuggacggau

SEQ ID NO: 2121980 - RNA, 19 nt, Artificial Sequence
  Description of Artificial Sequence: Synthetic oligonucleotide
agccggcccguggccuuga

SEQ ID NO: 2121981 - RNA, 19 nt, Artificial Sequence
  Description of Artificial Sequence: Synthetic oligonucleotide
ccaugguacccacgacugu

SEQ ID NO: 2121982 - RNA, 19 nt, Artificial Sequence
  Description of Artificial Sequence: Synthetic oligonucleotide
ccggcgcccguguggaaaa

SEQ ID NO: 2121983 - RNA, 19 nt, Artificial Sequence
  Description of Artificial Sequence: Synthetic oligonucleotide
ccgagcgcuccagcugcac

SEQ ID NO: 2121984 - RNA, 19 nt, Artificial Sequence
  Description of Artificial Sequence: Synthetic oligonucleotide
ggccacgcucuuccauggu

SEQ ID NO: 2121985 - RNA, 19 nt, Artificial Sequence
  Description of Artificial Sequence: Synthetic oligonucleotide
cgcaggucagccuggcggu

SEQ ID NO: 2121986 - RNA, 19 nt, Artificial Sequence
  Description of Artificial Sequence: Synthetic oligonucleotide
gcccguccacauucuggcu

SEQ ID NO: 2121987 - RNA, 19 nt, Artificial Sequence
  Description of Artificial Sequence: Synthetic oligonucleotide
gccggcccguggccuugag

SEQ ID NO: 2121988 - RNA, 19 nt, Artificial Sequence
  Description of Artificial Sequence: Synthetic oligonucleotide
ccccucgcacccgggucag

SEQ ID NO: 2121989 - RNA, 19 nt, Artificial Sequence
  Description of Artificial Sequence: Synthetic oligonucleotide
ccucgcacccgggucagcu

SEQ ID NO: 2121990 - RNA, 19 nt, Artificial Sequence
  Description of Artificial Sequence: Synthetic oligonucleotide
gggcguucucgaagguggu

SEQ ID NO: 2121991 - RNA, 19 nt, Artificial Sequence
  Description of Artificial Sequence: Synthetic oligonucleotide
ccaggccacgcucuuccau

SEQ ID NO: 2121992 - RNA, 19 nt, Artificial Sequence
  Description of Artificial Sequence: Synthetic oligonucleotide
ccucggucuuuacucuuuu

SEQ ID NO: 2121993 - RNA, 19 nt, Artificial Sequence
  Description of Artificial Sequence: Synthetic oligonucleotide
cgacugucucucucacgua

SEQ ID NO: 2121994 - RNA, 19 nt, Artificial Sequence
  Description of Artificial Sequence: Synthetic oligonucleotide
cccgagcgcuccagcugca

SEQ ID NO: 2121995 - RNA, 19 nt, Artificial Sequence
  Description of Artificial Sequence: Synthetic oligonucleotide
gccgggcguucucgaaggu

SEQ ID NO: 2121996 - RNA, 19 nt, Artificial Sequence
  Description of Artificial Sequence: Synthetic oligonucleotide
ccuggcggucguguuuugu

SEQ ID NO: 2121997 - RNA, 19 nt, Artificial Sequence
  Description of Artificial Sequence: Synthetic oligonucleotide
cggucguguuuugugggcu

SEQ ID NO: 2121998 - RNA, 19 nt, Artificial Sequence
  Description of Artificial Sequence: Synthetic oligonucleotide
ccaccccucgcacccgggu

SEQ ID NO: 2121999 - RNA, 19 nt, Artificial Sequence
  Description of Artificial Sequence: Synthetic oligonucleotide
cccuuaggccccuggccuu

SEQ ID NO: 2122000 - RNA, 19 nt, Artificial Sequence
  Description of Artificial Sequence: Synthetic oligonucleotide
cuccggcagcccgcacuua

SEQ ID NO: 2122001 - RNA, 19 nt, Artificial Sequence
  Description of Artificial Sequence: Synthetic oligonucleotide
cccucgcacccgggucagc

SEQ ID NO: 2122002 - RNA, 19 nt, Artificial Sequence
  Description of Artificial Sequence: Synthetic oligonucleotide
cgugcagcccguccacauu

SEQ ID NO: 2122003 - RNA, 19 nt, Artificial Sequence
  Description of Artificial Sequence: Synthetic oligonucleotide
cggcgcccguguggaaaac

SEQ ID NO: 2122004 - RNA, 19 nt, Artificial Sequence
  Description of Artificial Sequence: Synthetic oligonucleotide
ccccggcgcuuaguggcaa

SEQ ID NO: 2122005 - RNA, 19 nt, Artificial Sequence
  Description of Artificial Sequence: Synthetic oligonucleotide
cccuggccuuggccacugu

SEQ ID NO: 2122006 - RNA, 19 nt, Artificial Sequence
  Description of Artificial Sequence: Synthetic oligonucleotide
ccguggccuugaggcccau

SEQ ID NO: 2122007 - RNA, 19 nt, Artificial Sequence
  Description of Artificial Sequence: Synthetic oligonucleotide
ucaucuuuugaacagagag

SEQ ID NO: 2122008 - RNA, 19 nt, Artificial Sequence
  Description of Artificial Sequence: Synthetic oligonucleotide
uuuagguccagauaaagag

SEQ ID NO: 2122009 - RNA, 19 nt, Artificial Sequence
  Description of Artificial Sequence: Synthetic oligonucleotide
auaaccaaaacucggauuc

SEQ ID NO: 2122010 - RNA, 19 nt, Artificial Sequence
  Description of Artificial Sequence: Synthetic oligonucleotide
agugcuaucaucaaaguac

SEQ ID NO: 2122011 - RNA, 19 nt, Artificial Sequence
  Description of Artificial Sequence: Synthetic oligonucleotide
ucuucaagcaaucuuuggg

SEQ ID NO: 2122012 - RNA, 19 nt, Artificial Sequence
  Description of Artificial Sequence: Synthetic oligonucleotide
ucuuaaaucccaaucagga

SEQ ID NO: 2122013 - RNA, 19 nt, Artificial Sequence
  Description of Artificial Sequence: Synthetic oligonucleotide
aguuuuauucuuuggggcc

SEQ ID NO: 2122014 - RNA, 19 nt, Artificial Sequence
  Description of Artificial Sequence: Synthetic oligonucleotide
ugucuugcaucuuugaagg

SEQ ID NO: 2122015 - RNA, 19 nt, Artificial Sequence
  Description of Artificial Sequence: Synthetic oligonucleotide
ucaauagugcaucuuacag

SEQ ID NO: 2122016 - RNA, 19 nt, Artificial Sequence
  Description of Artificial Sequence: Synthetic oligonucleotide
aaacacagugauuuuggac

SEQ ID NO: 2122017 - RNA, 19 nt, Artificial Sequence
  Description of Artificial Sequence: Synthetic oligonucleotide
gauaucgucaccaagagca

SEQ ID NO: 2122018 - RNA, 19 nt, Artificial Sequence
  Description of Artificial Sequence: Synthetic oligonucleotide
uuucggauaaccaaaacuc

SEQ ID NO: 2122019 - RNA, 19 nt, Artificial Sequence
  Description of Artificial Sequence: Synthetic oligonucleotide
acagagaguguccuuaugc

SEQ ID NO: 2122020 - RNA, 19 nt, Artificial Sequence
  Description of Artificial Sequence: Synthetic oligonucleotide
uuaaaucccaaucaggauc

SEQ ID NO: 2122021 - RNA, 19 nt, Artificial Sequence
  Description of Artificial Sequence: Synthetic oligonucleotide
uuuaguaagagggugaacu

SEQ ID NO: 2122022 - RNA, 19 nt, Artificial Sequence
  Description of Artificial Sequence: Synthetic oligonucleotide
uuuucggauaaccaaaacu

SEQ ID NO: 2122023 - RNA, 19 nt, Artificial Sequence
  Description of Artificial Sequence: Synthetic oligonucleotide
uuucuuaaaucccaaucag

SEQ ID NO: 2122024 - RNA, 19 nt, Artificial Sequence
  Description of Artificial Sequence: Synthetic oligonucleotide
uauccucagacacagaaga

SEQ ID NO: 2122025 - RNA, 19 nt, Artificial Sequence
  Description of Artificial Sequence: Synthetic oligonucleotide
uucuuaaaucccaaucagg

SEQ ID NO: 2122026 - RNA, 19 nt, Artificial Sequence
  Description of Artificial Sequence: Synthetic oligonucleotide
ucguuauugagguucagag

SEQ ID NO: 2122027 - RNA, 19 nt, Artificial Sequence
  Description of Artificial Sequence: Synthetic oligonucleotide
acagauucuaacuuccuag

SEQ ID NO: 2122028 - RNA, 19 nt, Artificial Sequence
  Description of Artificial Sequence: Synthetic oligonucleotide
auuuaguuaugacaucagg

SEQ ID NO: 2122029 - RNA, 19 nt, Artificial Sequence
  Description of Artificial Sequence: Synthetic oligonucleotide
aaguguauauguuuugggu

SEQ ID NO: 2122030 - RNA, 19 nt, Artificial Sequence
  Description of Artificial Sequence: Synthetic oligonucleotide
uucggauaaccaaaacucg

SEQ ID NO: 2122031 - RNA, 19 nt, Artificial Sequence
  Description of Artificial Sequence: Synthetic oligonucleotide
ucggauaaccaaaacucgg

SEQ ID NO: 2122032 - RNA, 19 nt, Artificial Sequence
  Description of Artificial Sequence: Synthetic oligonucleotide
aguguauauguuuugggug

SEQ ID NO: 2122033 - RNA, 19 nt, Artificial Sequence
  Description of Artificial Sequence: Synthetic oligonucleotide
uauguuuugggugacaccu

SEQ ID NO: 2122034 - RNA, 19 nt, Artificial Sequence
  Description of Artificial Sequence: Synthetic oligonucleotide
ugaacugcuaaucuggcaa

SEQ ID NO: 2122035 - RNA, 19 nt, Artificial Sequence
  Description of Artificial Sequence: Synthetic oligonucleotide
uguagaaucuuucuucagu

SEQ ID NO: 2122036 - RNA, 19 nt, Artificial Sequence
  Description of Artificial Sequence: Synthetic oligonucleotide
uaaaucccaaucaggauca

SEQ ID NO: 2122037 - RNA, 19 nt, Artificial Sequence
  Description of Artificial Sequence: Synthetic oligonucleotide
uucaauuccuucauggcgu

SEQ ID NO: 2122038 - RNA, 19 nt, Artificial Sequence
  Description of Artificial Sequence: Synthetic oligonucleotide
uuuucaauagugcaucuua

SEQ ID NO: 2122039 - RNA, 19 nt, Artificial Sequence
  Description of Artificial Sequence: Synthetic oligonucleotide
aucuuuugaacagagagug

SEQ ID NO: 2122040 - RNA, 19 nt, Artificial Sequence
  Description of Artificial Sequence: Synthetic oligonucleotide
uuuuagguccagauaaaga

SEQ ID NO: 2122041 - RNA, 19 nt, Artificial Sequence
  Description of Artificial Sequence: Synthetic oligonucleotide
ucaaguguauauguuuugg

SEQ ID NO: 2122042 - RNA, 19 nt, Artificial Sequence
  Description of Artificial Sequence: Synthetic oligonucleotide
augacucagccucaggagc

SEQ ID NO: 2122043 - RNA, 19 nt, Artificial Sequence
  Description of Artificial Sequence: Synthetic oligonucleotide
aaccucguuauugagguuc

SEQ ID NO: 2122044 - RNA, 19 nt, Artificial Sequence
  Description of Artificial Sequence: Synthetic oligonucleotide
uuuguaaaccgacucuuga

SEQ ID NO: 2122045 - RNA, 19 nt, Artificial Sequence
  Description of Artificial Sequence: Synthetic oligonucleotide
aauucccuuguguuuauca

SEQ ID NO: 2122046 - RNA, 19 nt, Artificial Sequence
  Description of Artificial Sequence: Synthetic oligonucleotide
agcuuuuagguccagauaa

SEQ ID NO: 2122047 - RNA, 19 nt, Artificial Sequence
  Description of Artificial Sequence: Synthetic oligonucleotide
ugcaucaucuuuugaacag

SEQ ID NO: 2122048 - RNA, 19 nt, Artificial Sequence
  Description of Artificial Sequence: Synthetic oligonucleotide
acucuuuguaaaccgacuc

SEQ ID NO: 2122049 - RNA, 19 nt, Artificial Sequence
  Description of Artificial Sequence: Synthetic oligonucleotide
ugucacuauccucagacac

SEQ ID NO: 2122050 - RNA, 19 nt, Artificial Sequence
  Description of Artificial Sequence: Synthetic oligonucleotide
ugaugacucagccucagga

SEQ ID NO: 2122051 - RNA, 19 nt, Artificial Sequence
  Description of Artificial Sequence: Synthetic oligonucleotide
ucucaaacccucuucgugc

SEQ ID NO: 2122052 - RNA, 19 nt, Artificial Sequence
  Description of Artificial Sequence: Synthetic oligonucleotide
agauucuaacuuccuagcg

SEQ ID NO: 2122053 - RNA, 19 nt, Artificial Sequence
  Description of Artificial Sequence: Synthetic oligonucleotide
acaaccucguuauugaggu

SEQ ID NO: 2122054 - RNA, 19 nt, Artificial Sequence
  Description of Artificial Sequence: Synthetic oligonucleotide
ugaacagcagcuuuuaguu

SEQ ID NO: 2122055 - RNA, 19 nt, Artificial Sequence
  Description of Artificial Sequence: Synthetic oligonucleotide
uauugagguucagagaucc

SEQ ID NO: 2122056 - RNA, 19 nt, Artificial Sequence
  Description of Artificial Sequence: Synthetic oligonucleotide
gagaguguccuuaugcugg

SEQ ID NO: 2122057 - RNA, 19 nt, Artificial Sequence
  Description of Artificial Sequence: Synthetic oligonucleotide
ucucaucuucacaaccucg

SEQ ID NO: 2122058 - RNA, 19 nt, Artificial Sequence
  Description of Artificial Sequence: Synthetic oligonucleotide
uugagguucagagaucccg

SEQ ID NO: 2122059 - RNA, 19 nt, Artificial Sequence
  Description of Artificial Sequence: Synthetic oligonucleotide
ggaguuuuauucuuugggg

SEQ ID NO: 2122060 - RNA, 19 nt, Artificial Sequence
  Description of Artificial Sequence: Synthetic oligonucleotide
uugaacagcagcuuuuagu

SEQ ID NO: 2122061 - RNA, 19 nt, Artificial Sequence
  Description of Artificial Sequence: Synthetic oligonucleotide
aaccaaaacucggauucgc

SEQ ID NO: 2122062 - RNA, 19 nt, Artificial Sequence
  Description of Artificial Sequence: Synthetic oligonucleotide
uaaaccgacucuugauugg

SEQ ID NO: 2122063 - RNA, 19 nt, Artificial Sequence
  Description of Artificial Sequence: Synthetic oligonucleotide
acuccugacaaguuuucgg

SEQ ID NO: 2122064 - RNA, 19 nt, Artificial Sequence
  Description of Artificial Sequence: Synthetic oligonucleotide
cugucuugcaucuuugaag

SEQ ID NO: 2122065 - RNA, 19 nt, Artificial Sequence
  Description of Artificial Sequence: Synthetic oligonucleotide
uuuucaaaguugauaucgu

SEQ ID NO: 2122066 - RNA, 19 nt, Artificial Sequence
  Description of Artificial Sequence: Synthetic oligonucleotide
uuaggaugcuguaacucgc

SEQ ID NO: 2122067 - RNA, 19 nt, Artificial Sequence
  Description of Artificial Sequence: Synthetic oligonucleotide
ucggacuuuuccaaugaag

SEQ ID NO: 2122068 - RNA, 19 nt, Artificial Sequence
  Description of Artificial Sequence: Synthetic oligonucleotide
uuucaauagugcaucuuac

SEQ ID NO: 2122069 - RNA, 19 nt, Artificial Sequence
  Description of Artificial Sequence: Synthetic oligonucleotide
aguuaugacaucagguuuc

SEQ ID NO: 2122070 - RNA, 19 nt, Artificial Sequence
  Description of Artificial Sequence: Synthetic oligonucleotide
ucagucaucaaaccgugau

SEQ ID NO: 2122071 - RNA, 19 nt, Artificial Sequence
  Description of Artificial Sequence: Synthetic oligonucleotide
uguacgucggacuuuucca

SEQ ID NO: 2122072 - RNA, 19 nt, Artificial Sequence
  Description of Artificial Sequence: Synthetic oligonucleotide
uuaguaagagggugaacug

SEQ ID NO: 2122073 - RNA, 19 nt, Artificial Sequence
  Description of Artificial Sequence: Synthetic oligonucleotide
uucacaaccucguuauuga

SEQ ID NO: 2122074 - RNA, 19 nt, Artificial Sequence
  Description of Artificial Sequence: Synthetic oligonucleotide
uuguacgucggacuuuucc

SEQ ID NO: 2122075 - RNA, 19 nt, Artificial Sequence
  Description of Artificial Sequence: Synthetic oligonucleotide
agauuuaguuaugacauca

SEQ ID NO: 2122076 - RNA, 19 nt, Artificial Sequence
  Description of Artificial Sequence: Synthetic oligonucleotide
gaagacuguuuguagaauc

SEQ ID NO: 2122077 - RNA, 19 nt, Artificial Sequence
  Description of Artificial Sequence: Synthetic oligonucleotide
uuagguccagauaaagagu

SEQ ID NO: 2122078 - RNA, 19 nt, Artificial Sequence
  Description of Artificial Sequence: Synthetic oligonucleotide
guaaaccgacucuugauug

SEQ ID NO: 2122079 - RNA, 19 nt, Artificial Sequence
  Description of Artificial Sequence: Synthetic oligonucleotide
uucaauagugcaucuuaca

SEQ ID NO: 2122080 - RNA, 19 nt, Artificial Sequence
  Description of Artificial Sequence: Synthetic oligonucleotide
aaaacucggauucgcuuca

SEQ ID NO: 2122081 - RNA, 19 nt, Artificial Sequence
  Description of Artificial Sequence: Synthetic oligonucleotide
guuauugagguucagagau

SEQ ID NO: 2122082 - RNA, 19 nt, Artificial Sequence
  Description of Artificial Sequence: Synthetic oligonucleotide
aagaaaucaucaccacugu

SEQ ID NO: 2122083 - RNA, 19 nt, Artificial Sequence
  Description of Artificial Sequence: Synthetic oligonucleotide
guuuguguuccuuagcuga

SEQ ID NO: 2122084 - RNA, 19 nt, Artificial Sequence
  Description of Artificial Sequence: Synthetic oligonucleotide
uguguuuaucauuucuuaa

SEQ ID NO: 2122085 - RNA, 19 nt, Artificial Sequence
  Description of Artificial Sequence: Synthetic oligonucleotide
agaaaucaucaccacuguc

SEQ ID NO: 2122086 - RNA, 19 nt, Artificial Sequence
  Description of Artificial Sequence: Synthetic oligonucleotide
uuuuaguugcaucuauuuu

SEQ ID NO: 2122087 - RNA, 19 nt, Artificial Sequence
  Description of Artificial Sequence: Synthetic oligonucleotide
ggugacaccuuuuggaggg

SEQ ID NO: 2122088 - RNA, 19 nt, Artificial Sequence
  Description of Artificial Sequence: Synthetic oligonucleotide
ucuggaguuuuauucuuug

SEQ ID NO: 2122089 - RNA, 19 nt, Artificial Sequence
  Description of Artificial Sequence: Synthetic oligonucleotide
uauauguuuugggugacac

SEQ ID NO: 2122090 - RNA, 19 nt, Artificial Sequence
  Description of Artificial Sequence: Synthetic oligonucleotide
uguaaaccgacucuugauu

SEQ ID NO: 2122091 - RNA, 19 nt, Artificial Sequence
  Description of Artificial Sequence: Synthetic oligonucleotide
aggaaggaugcagaggagc

SEQ ID NO: 2122092 - RNA, 19 nt, Artificial Sequence
  Description of Artificial Sequence: Synthetic oligonucleotide
gacaaguuuucggauaacc

SEQ ID NO: 2122093 - RNA, 19 nt, Artificial Sequence
  Description of Artificial Sequence: Synthetic oligonucleotide
uccucugaagcauucuuug

SEQ ID NO: 2122094 - RNA, 19 nt, Artificial Sequence
  Description of Artificial Sequence: Synthetic oligonucleotide
ugauuggagguucauuuuc

SEQ ID NO: 2122095 - RNA, 19 nt, Artificial Sequence
  Description of Artificial Sequence: Synthetic oligonucleotide
uguuuguagaaucuuucuu

SEQ ID NO: 2122096 - RNA, 19 nt, Artificial Sequence
  Description of Artificial Sequence: Synthetic oligonucleotide
guugauaucgucaccaaga

SEQ ID NO: 2122097 - RNA, 19 nt, Artificial Sequence
  Description of Artificial Sequence: Synthetic oligonucleotide
cacaaccucguuauugagg

SEQ ID NO: 2122098 - RNA, 19 nt, Artificial Sequence
  Description of Artificial Sequence: Synthetic oligonucleotide
acagaagacuguuuguaga

SEQ ID NO: 2122099 - RNA, 19 nt, Artificial Sequence
  Description of Artificial Sequence: Synthetic oligonucleotide
ugggugacaccuuuuggag

SEQ ID NO: 2122100 - RNA, 19 nt, Artificial Sequence
  Description of Artificial Sequence: Synthetic oligonucleotide
ugcuaaucuggcaauugcu

SEQ ID NO: 2122101 - RNA, 19 nt, Artificial Sequence
  Description of Artificial Sequence: Synthetic oligonucleotide
uucgcuucacuucuuuucu

SEQ ID NO: 2122102 - RNA, 19 nt, Artificial Sequence
  Description of Artificial Sequence: Synthetic oligonucleotide
uuccaaugaagaaaucauc

SEQ ID NO: 2122103 - RNA, 19 nt, Artificial Sequence
  Description of Artificial Sequence: Synthetic oligonucleotide
ucccuugaaacacagugau

SEQ ID NO: 2122104 - RNA, 19 nt, Artificial Sequence
  Description of Artificial Sequence: Synthetic oligonucleotide
ucaccaagagcagauuuag

SEQ ID NO: 2122105 - RNA, 19 nt, Artificial Sequence
  Description of Artificial Sequence: Synthetic oligonucleotide
cagauucuaacuuccuagc

SEQ ID NO: 2122106 - RNA, 19 nt, Artificial Sequence
  Description of Artificial Sequence: Synthetic oligonucleotide
ugcuucacacucucaaacc

SEQ ID NO: 2122107 - RNA, 19 nt, Artificial Sequence
  Description of Artificial Sequence: Synthetic oligonucleotide
caaaguacuccuuuuccuc

SEQ ID NO: 2122108 - RNA, 19 nt, Artificial Sequence
  Description of Artificial Sequence: Synthetic oligonucleotide
uucaagcaaucuuugggcu

SEQ ID NO: 2122109 - RNA, 19 nt, Artificial Sequence
  Description of Artificial Sequence: Synthetic oligonucleotide
caaaacucggauucgcuuc

SEQ ID NO: 2122110 - RNA, 19 nt, Artificial Sequence
  Description of Artificial Sequence: Synthetic oligonucleotide
ucggauucgcuucacuucu

SEQ ID NO: 2122111 - RNA, 19 nt, Artificial Sequence
  Description of Artificial Sequence: Synthetic oligonucleotide
uguguuccuuagcugagga

SEQ ID NO: 2122112 - RNA, 19 nt, Artificial Sequence
  Description of Artificial Sequence: Synthetic oligonucleotide
cacucucaaacccucuucg

SEQ ID NO: 2122113 - RNA, 19 nt, Artificial Sequence
  Description of Artificial Sequence: Synthetic oligonucleotide
uugcaucaucuuuugaaca

SEQ ID NO: 2122114 - RNA, 19 nt, Artificial Sequence
  Description of Artificial Sequence: Synthetic oligonucleotide
uaguuaugacaucagguuu

SEQ ID NO: 2122115 - RNA, 19 nt, Artificial Sequence
  Description of Artificial Sequence: Synthetic oligonucleotide
guguauauguuuuggguga

SEQ ID NO: 2122116 - RNA, 19 nt, Artificial Sequence
  Description of Artificial Sequence: Synthetic oligonucleotide
accgacucuugauuggagg

SEQ ID NO: 2122117 - RNA, 19 nt, Artificial Sequence
  Description of Artificial Sequence: Synthetic oligonucleotide
agguucauuuucugcaaag

SEQ ID NO: 2122118 - RNA, 19 nt, Artificial Sequence
  Description of Artificial Sequence: Synthetic oligonucleotide
caagcaaucuuugggcucg

SEQ ID NO: 2122119 - RNA, 19 nt, Artificial Sequence
  Description of Artificial Sequence: Synthetic oligonucleotide
agaguguccuuaugcuggc

SEQ ID NO: 2122120 - RNA, 19 nt, Artificial Sequence
  Description of Artificial Sequence: Synthetic oligonucleotide
aaucagucaucaaaccgug

SEQ ID NO: 2122121 - RNA, 19 nt, Artificial Sequence
  Description of Artificial Sequence: Synthetic oligonucleotide
ucugucuugcaucuuugaa

SEQ ID NO: 2122122 - RNA, 19 nt, Artificial Sequence
  Description of Artificial Sequence: Synthetic oligonucleotide
ucuucgugcacucuuugua

SEQ ID NO: 2122123 - RNA, 19 nt, Artificial Sequence
  Description of Artificial Sequence: Synthetic oligonucleotide
agucugcugcuucacacuc

SEQ ID NO: 2122124 - RNA, 19 nt, Artificial Sequence
  Description of Artificial Sequence: Synthetic oligonucleotide
ugauaucgucaccaagagc

SEQ ID NO: 2122125 - RNA, 19 nt, Artificial Sequence
  Description of Artificial Sequence: Synthetic oligonucleotide
uaacucgcuugcaucaucu

SEQ ID NO: 2122126 - RNA, 19 nt, Artificial Sequence
  Description of Artificial Sequence: Synthetic oligonucleotide
uuuuggagggguuuguguu

SEQ ID NO: 2122127 - RNA, 19 nt, Artificial Sequence
  Description of Artificial Sequence: Synthetic oligonucleotide
cuucuuucuuguacgucgg

SEQ ID NO: 2122128 - RNA, 19 nt, Artificial Sequence
  Description of Artificial Sequence: Synthetic oligonucleotide
cacagaagacuguuuguag

SEQ ID NO: 2122129 - RNA, 19 nt, Artificial Sequence
  Description of Artificial Sequence: Synthetic oligonucleotide
gcuaucaucaaaguacucc

SEQ ID NO: 2122130 - RNA, 19 nt, Artificial Sequence
  Description of Artificial Sequence: Synthetic oligonucleotide
uccagauaaagaguggaaa

SEQ ID NO: 2122131 - RNA, 19 nt, Artificial Sequence
  Description of Artificial Sequence: Synthetic oligonucleotide
aucaaguguauauguuuug

SEQ ID NO: 2122132 - RNA, 19 nt, Artificial Sequence
  Description of Artificial Sequence: Synthetic oligonucleotide
cuuuuagguccagauaaag

SEQ ID NO: 2122133 - RNA, 19 nt, Artificial Sequence
  Description of Artificial Sequence: Synthetic oligonucleotide
acacucucaaacccucuuc

SEQ ID NO: 2122134 - RNA, 19 nt, Artificial Sequence
  Description of Artificial Sequence: Synthetic oligonucleotide
aaguuuucggauaaccaaa

SEQ ID NO: 2122135 - RNA, 19 nt, Artificial Sequence
  Description of Artificial Sequence: Synthetic oligonucleotide
gauucuaacuuccuagcgu

SEQ ID NO: 2122136 - RNA, 19 nt, Artificial Sequence
  Description of Artificial Sequence: Synthetic oligonucleotide
cuauccucagacacagaag

SEQ ID NO: 2122137 - RNA, 19 nt, Artificial Sequence
  Description of Artificial Sequence: Synthetic oligonucleotide
aacagagaguguccuuaug

SEQ ID NO: 2122138 - RNA, 19 nt, Artificial Sequence
  Description of Artificial Sequence: Synthetic oligonucleotide
aucaucaccacugucacua

SEQ ID NO: 2122139 - RNA, 19 nt, Artificial Sequence
  Description of Artificial Sequence: Synthetic oligonucleotide
caaguuuucggauaaccaa

SEQ ID NO: 2122140 - RNA, 19 nt, Artificial Sequence
  Description of Artificial Sequence: Synthetic oligonucleotide
aagagggugaacugcuaau

SEQ ID NO: 2122141 - RNA, 19 nt, Artificial Sequence
  Description of Artificial Sequence: Synthetic oligonucleotide
ugaagcauucuuugaugac

SEQ ID NO: 2122142 - RNA, 19 nt, Artificial Sequence
  Description of Artificial Sequence: Synthetic oligonucleotide
cuaacuuccuagcgucugg

SEQ ID NO: 2122143 - RNA, 19 nt, Artificial Sequence
  Description of Artificial Sequence: Synthetic oligonucleotide
uggcguguaucucuucaag

SEQ ID NO: 2122144 - RNA, 19 nt, Artificial Sequence
  Description of Artificial Sequence: Synthetic oligonucleotide
agagggugaacugcuaauc

SEQ ID NO: 2122145 - RNA, 19 nt, Artificial Sequence
  Description of Artificial Sequence: Synthetic oligonucleotide
uaaccaaaacucggauucg

SEQ ID NO: 2122146 - RNA, 19 nt, Artificial Sequence
  Description of Artificial Sequence: Synthetic oligonucleotide
uguuaggaugcuguaacuc

SEQ ID NO: 2122147 - RNA, 19 nt, Artificial Sequence
  Description of Artificial Sequence: Synthetic oligonucleotide
agcaugagucugcugcuuc

SEQ ID NO: 2122148 - RNA, 19 nt, Artificial Sequence
  Description of Artificial Sequence: Synthetic oligonucleotide
caucuuugaaggcuugaac

SEQ ID NO: 2122149 - RNA, 19 nt, Artificial Sequence
  Description of Artificial Sequence: Synthetic oligonucleotide
uuguaaaccgacucuugau

SEQ ID NO: 2122150 - RNA, 19 nt, Artificial Sequence
  Description of Artificial Sequence: Synthetic oligonucleotide
ugcacucuuuguaaaccga

SEQ ID NO: 2122151 - RNA, 19 nt, Artificial Sequence
  Description of Artificial Sequence: Synthetic oligonucleotide
cugcuaaucuggcaauugc

SEQ ID NO: 2122152 - RNA, 19 nt, Artificial Sequence
  Description of Artificial Sequence: Synthetic oligonucleotide
ucuaacuuccuagcgucug

SEQ ID NO: 2122153 - RNA, 19 nt, Artificial Sequence
  Description of Artificial Sequence: Synthetic oligonucleotide
ugaacagagaguguccuua

SEQ ID NO: 2122154 - RNA, 19 nt, Artificial Sequence
  Description of Artificial Sequence: Synthetic oligonucleotide
uucacacucucaaacccuc

SEQ ID NO: 2122155 - RNA, 19 nt, Artificial Sequence
  Description of Artificial Sequence: Synthetic oligonucleotide
uucuuugaugacucagccu

SEQ ID NO: 2122156 - RNA, 19 nt, Artificial Sequence
  Description of Artificial Sequence: Synthetic oligonucleotide
aaucccaaucaggaucaag

SEQ ID NO: 2122157 - RNA, 19 nt, Artificial Sequence
  Description of Artificial Sequence: Synthetic oligonucleotide
uugaugacucagccucagg

SEQ ID NO: 2122158 - RNA, 19 nt, Artificial Sequence
  Description of Artificial Sequence: Synthetic oligonucleotide
uucagucugccaacacucc

SEQ ID NO: 2122159 - RNA, 19 nt, Artificial Sequence
  Description of Artificial Sequence: Synthetic oligonucleotide
ucuuuugaacagagagugu

SEQ ID NO: 2122160 - RNA, 19 nt, Artificial Sequence
  Description of Artificial Sequence: Synthetic oligonucleotide
uuugaugacucagccucag

SEQ ID NO: 2122161 - RNA, 19 nt, Artificial Sequence
  Description of Artificial Sequence: Synthetic oligonucleotide
uggcaauugcucuuucaga

SEQ ID NO: 2122162 - RNA, 19 nt, Artificial Sequence
  Description of Artificial Sequence: Synthetic oligonucleotide
agggguuuguguuccuuag

SEQ ID NO: 2122163 - RNA, 19 nt, Artificial Sequence
  Description of Artificial Sequence: Synthetic oligonucleotide
acaaguuuucggauaacca

SEQ ID NO: 2122164 - RNA, 19 nt, Artificial Sequence
  Description of Artificial Sequence: Synthetic oligonucleotide
ucacaaccucguuauugag

SEQ ID NO: 2122165 - RNA, 19 nt, Artificial Sequence
  Description of Artificial Sequence: Synthetic oligonucleotide
gaaacacagugauuuugga

SEQ ID NO: 2122166 - RNA, 19 nt, Artificial Sequence
  Description of Artificial Sequence: Synthetic oligonucleotide
ugcucgcuucccaggaagg

SEQ ID NO: 2122167 - RNA, 19 nt, Artificial Sequence
  Description of Artificial Sequence: Synthetic oligonucleotide
guuccuuagcugaggaccg

SEQ ID NO: 2122168 - RNA, 19 nt, Artificial Sequence
  Description of Artificial Sequence: Synthetic oligonucleotide
uuauugagguucagagauc

SEQ ID NO: 2122169 - RNA, 19 nt, Artificial Sequence
  Description of Artificial Sequence: Synthetic oligonucleotide
aaguugauaucgucaccaa

SEQ ID NO: 2122170 - RNA, 19 nt, Artificial Sequence
  Description of Artificial Sequence: Synthetic oligonucleotide
uguuuugggugacaccuuu

SEQ ID NO: 2122171 - RNA, 19 nt, Artificial Sequence
  Description of Artificial Sequence: Synthetic oligonucleotide
aguaagagggugaacugcu

SEQ ID NO: 2122172 - RNA, 19 nt, Artificial Sequence
  Description of Artificial Sequence: Synthetic oligonucleotide
ucagugcuaucaucaaagu

SEQ ID NO: 2122173 - RNA, 19 nt, Artificial Sequence
  Description of Artificial Sequence: Synthetic oligonucleotide
aaaccgacucuugauugga

SEQ ID NO: 2122174 - RNA, 19 nt, Artificial Sequence
  Description of Artificial Sequence: Synthetic oligonucleotide
agagcagauuuaguuauga

SEQ ID NO: 2122175 - RNA, 19 nt, Artificial Sequence
  Description of Artificial Sequence: Synthetic oligonucleotide
acuuccuagcgucuggaau

SEQ ID NO: 2122176 - RNA, 19 nt, Artificial Sequence
  Description of Artificial Sequence: Synthetic oligonucleotide
agcgucuggaauucccuug

SEQ ID NO: 2122177 - RNA, 19 nt, Artificial Sequence
  Description of Artificial Sequence: Synthetic oligonucleotide
ugcuguaacucgcuugcau

SEQ ID NO: 2122178 - RNA, 19 nt, Artificial Sequence
  Description of Artificial Sequence: Synthetic oligonucleotide
cucggauucgcuucacuuc

SEQ ID NO: 2122179 - RNA, 19 nt, Artificial Sequence
  Description of Artificial Sequence: Synthetic oligonucleotide
auucccuuguguuuaucau

SEQ ID NO: 2122180 - RNA, 19 nt, Artificial Sequence
  Description of Artificial Sequence: Synthetic oligonucleotide
uugggcucgucuuugguuu

SEQ ID NO: 2122181 - RNA, 19 nt, Artificial Sequence
  Description of Artificial Sequence: Synthetic oligonucleotide
cuucccaggaaggaugcag

SEQ ID NO: 2122182 - RNA, 19 nt, Artificial Sequence
  Description of Artificial Sequence: Synthetic oligonucleotide
uaggaugcuguaacucgcu

SEQ ID NO: 2122183 - RNA, 19 nt, Artificial Sequence
  Description of Artificial Sequence: Synthetic oligonucleotide
agcuuuuaguugcaucuau

SEQ ID NO: 2122184 - RNA, 19 nt, Artificial Sequence
  Description of Artificial Sequence: Synthetic oligonucleotide
cuugaacagcagcuuuuag

SEQ ID NO: 2122185 - RNA, 19 nt, Artificial Sequence
  Description of Artificial Sequence: Synthetic oligonucleotide
cuugauuggagguucauuu

SEQ ID NO: 2122186 - RNA, 19 nt, Artificial Sequence
  Description of Artificial Sequence: Synthetic oligonucleotide
ggcaauugcucuuucagaa

SEQ ID NO: 2122187 - RNA, 19 nt, Artificial Sequence
  Description of Artificial Sequence: Synthetic oligonucleotide
ugcagaggagcaugagucu

SEQ ID NO: 2122188 - RNA, 19 nt, Artificial Sequence
  Description of Artificial Sequence: Synthetic oligonucleotide
acugcuaaucuggcaauug

SEQ ID NO: 2122189 - RNA, 19 nt, Artificial Sequence
  Description of Artificial Sequence: Synthetic oligonucleotide
guuuucggauaaccaaaac

SEQ ID NO: 2122190 - RNA, 19 nt, Artificial Sequence
  Description of Artificial Sequence: Synthetic oligonucleotide
uguauauguuuugggugac

SEQ ID NO: 2122191 - RNA, 19 nt, Artificial Sequence
  Description of Artificial Sequence: Synthetic oligonucleotide
uugauuggagguucauuuu

SEQ ID NO: 2122192 - RNA, 19 nt, Artificial Sequence
  Description of Artificial Sequence: Synthetic oligonucleotide
cuguaacucgcuugcauca

SEQ ID NO: 2122193 - RNA, 19 nt, Artificial Sequence
  Description of Artificial Sequence: Synthetic oligonucleotide
aacucggauucgcuucacu

SEQ ID NO: 2122194 - RNA, 19 nt, Artificial Sequence
  Description of Artificial Sequence: Synthetic oligonucleotide
cuccugacaaguuuucgga

SEQ ID NO: 2122195 - RNA, 19 nt, Artificial Sequence
  Description of Artificial Sequence: Synthetic oligonucleotide
gcuugcaucaucuuuugaa

SEQ ID NO: 2122196 - RNA, 19 nt, Artificial Sequence
  Description of Artificial Sequence: Synthetic oligonucleotide
acucggauucgcuucacuu

SEQ ID NO: 2122197 - RNA, 19 nt, Artificial Sequence
  Description of Artificial Sequence: Synthetic oligonucleotide
gacucuugauuggagguuc

SEQ ID NO: 2122198 - RNA, 19 nt, Artificial Sequence
  Description of Artificial Sequence: Synthetic oligonucleotide
cagucugccaacacuccug

SEQ ID NO: 2122199 - RNA, 19 nt, Artificial Sequence
  Description of Artificial Sequence: Synthetic oligonucleotide
acgucggacuuuuccaaug

SEQ ID NO: 2122200 - RNA, 19 nt, Artificial Sequence
  Description of Artificial Sequence: Synthetic oligonucleotide
uucgugcacucuuuguaaa

SEQ ID NO: 2122201 - RNA, 19 nt, Artificial Sequence
  Description of Artificial Sequence: Synthetic oligonucleotide
ucgugcacucuuuguaaac

SEQ ID NO: 2122202 - RNA, 19 nt, Artificial Sequence
  Description of Artificial Sequence: Synthetic oligonucleotide
agucugccaacacuccuga

SEQ ID NO: 2122203 - RNA, 19 nt, Artificial Sequence
  Description of Artificial Sequence: Synthetic oligonucleotide
auugagguucagagauccc

SEQ ID NO: 2122204 - RNA, 19 nt, Artificial Sequence
  Description of Artificial Sequence: Synthetic oligonucleotide
gauuuuggacugcugcucu

SEQ ID NO: 2122205 - RNA, 19 nt, Artificial Sequence
  Description of Artificial Sequence: Synthetic oligonucleotide
gauaaccaaaacucggauu

SEQ ID NO: 2122206 - RNA, 19 nt, Artificial Sequence
  Description of Artificial Sequence: Synthetic oligonucleotide
cagauuuaguuaugacauc

SEQ ID NO: 2122207 - RNA, 19 nt, Artificial Sequence
  Description of Artificial Sequence: Synthetic oligonucleotide
uuccuucuuucuuguacgu

SEQ ID NO: 2122208 - RNA, 19 nt, Artificial Sequence
  Description of Artificial Sequence: Synthetic oligonucleotide
aagagcagauuuaguuaug

SEQ ID NO: 2122209 - RNA, 19 nt, Artificial Sequence
  Description of Artificial Sequence: Synthetic oligonucleotide
aaacucggauucgcuucac

SEQ ID NO: 2122210 - RNA, 19 nt, Artificial Sequence
  Description of Artificial Sequence: Synthetic oligonucleotide
uucuuucuuguacgucgga

SEQ ID NO: 2122211 - RNA, 19 nt, Artificial Sequence
  Description of Artificial Sequence: Synthetic oligonucleotide
ucuuguacgucggacuuuu

SEQ ID NO: 2122212 - RNA, 19 nt, Artificial Sequence
  Description of Artificial Sequence: Synthetic oligonucleotide
acucucaaacccucuucgu

SEQ ID NO: 2122213 - RNA, 19 nt, Artificial Sequence
  Description of Artificial Sequence: Synthetic oligonucleotide
ggcguguaucucuucaagc

SEQ ID NO: 2122214 - RNA, 19 nt, Artificial Sequence
  Description of Artificial Sequence: Synthetic oligonucleotide
aguguccuuaugcuggcuu

SEQ ID NO: 2122215 - RNA, 19 nt, Artificial Sequence
  Description of Artificial Sequence: Synthetic oligonucleotide
ucgcuugcaucaucuuuug

SEQ ID NO: 2122216 - RNA, 19 nt, Artificial Sequence
  Description of Artificial Sequence: Synthetic oligonucleotide
uccuuaugcuggcuuuccu

SEQ ID NO: 2122217 - RNA, 19 nt, Artificial Sequence
  Description of Artificial Sequence: Synthetic oligonucleotide
cugacaaguuuucggauaa

SEQ ID NO: 2122218 - RNA, 19 nt, Artificial Sequence
  Description of Artificial Sequence: Synthetic oligonucleotide
uucauggcguguaucucuu

SEQ ID NO: 2122219 - RNA, 19 nt, Artificial Sequence
  Description of Artificial Sequence: Synthetic oligonucleotide
uccugacaaguuuucggau

SEQ ID NO: 2122220 - RNA, 19 nt, Artificial Sequence
  Description of Artificial Sequence: Synthetic oligonucleotide
aacuuccuagcgucuggaa

SEQ ID NO: 2122221 - RNA, 19 nt, Artificial Sequence
  Description of Artificial Sequence: Synthetic oligonucleotide
gguuuguguuccuuagcug

SEQ ID NO: 2122222 - RNA, 19 nt, Artificial Sequence
  Description of Artificial Sequence: Synthetic oligonucleotide
uaucgucaccaagagcaga

SEQ ID NO: 2122223 - RNA, 19 nt, Artificial Sequence
  Description of Artificial Sequence: Synthetic oligonucleotide
acacagaagacuguuugua

SEQ ID NO: 2122224 - RNA, 19 nt, Artificial Sequence
  Description of Artificial Sequence: Synthetic oligonucleotide
ggccuguucucugaaaucc

SEQ ID NO: 2122225 - RNA, 19 nt, Artificial Sequence
  Description of Artificial Sequence: Synthetic oligonucleotide
acucgcuugcaucaucuuu

SEQ ID NO: 2122226 - RNA, 19 nt, Artificial Sequence
  Description of Artificial Sequence: Synthetic oligonucleotide
caagagcagauuuaguuau

SEQ ID NO: 2122227 - RNA, 19 nt, Artificial Sequence
  Description of Artificial Sequence: Synthetic oligonucleotide
cuuaugcuggcuuuccucu

SEQ ID NO: 2122228 - RNA, 19 nt, Artificial Sequence
  Description of Artificial Sequence: Synthetic oligonucleotide
acagugauuuuggacugcu

SEQ ID NO: 2122229 - RNA, 19 nt, Artificial Sequence
  Description of Artificial Sequence: Synthetic oligonucleotide
gggugacaccuuuuggagg

SEQ ID NO: 2122230 - RNA, 19 nt, Artificial Sequence
  Description of Artificial Sequence: Synthetic oligonucleotide
uaacuuccuagcgucugga

SEQ ID NO: 2122231 - RNA, 19 nt, Artificial Sequence
  Description of Artificial Sequence: Synthetic oligonucleotide
caucuuuugaacagagagu

SEQ ID NO: 2122232 - RNA, 19 nt, Artificial Sequence
  Description of Artificial Sequence: Synthetic oligonucleotide
cuuucuuguacgucggacu

SEQ ID NO: 2122233 - RNA, 19 nt, Artificial Sequence
  Description of Artificial Sequence: Synthetic oligonucleotide
ucccuccuggagcuuuuag

SEQ ID NO: 2122234 - RNA, 19 nt, Artificial Sequence
  Description of Artificial Sequence: Synthetic oligonucleotide
cuuuuaguugcaucuauuu

SEQ ID NO: 2122235 - RNA, 19 nt, Artificial Sequence
  Description of Artificial Sequence: Synthetic oligonucleotide
gcguguaucucuucaagca

SEQ ID NO: 2122236 - RNA, 19 nt, Artificial Sequence
  Description of Artificial Sequence: Synthetic oligonucleotide
cugcucgcuucccaggaag

SEQ ID NO: 2122237 - RNA, 19 nt, Artificial Sequence
  Description of Artificial Sequence: Synthetic oligonucleotide
ugcuaucaucaaaguacuc

SEQ ID NO: 2122238 - RNA, 19 nt, Artificial Sequence
  Description of Artificial Sequence: Synthetic oligonucleotide
cuuagcugaggaccggaca

SEQ ID NO: 2122239 - RNA, 19 nt, Artificial Sequence
  Description of Artificial Sequence: Synthetic oligonucleotide
ucuugauuggagguucauu

SEQ ID NO: 2122240 - RNA, 19 nt, Artificial Sequence
  Description of Artificial Sequence: Synthetic oligonucleotide
cuucgugcacucuuuguaa

SEQ ID NO: 2122241 - RNA, 19 nt, Artificial Sequence
  Description of Artificial Sequence: Synthetic oligonucleotide
aguuuucggauaaccaaaa

SEQ ID NO: 2122242 - RNA, 19 nt, Artificial Sequence
  Description of Artificial Sequence: Synthetic oligonucleotide
cacuccugacaaguuuucg

SEQ ID NO: 2122243 - RNA, 19 nt, Artificial Sequence
  Description of Artificial Sequence: Synthetic oligonucleotide
gaucaaguguauauguuuu

SEQ ID NO: 2122244 - RNA, 19 nt, Artificial Sequence
  Description of Artificial Sequence: Synthetic oligonucleotide
agcauucuuugaugacuca

SEQ ID NO: 2122245 - RNA, 19 nt, Artificial Sequence
  Description of Artificial Sequence: Synthetic oligonucleotide
guuaugacaucagguuuca

SEQ ID NO: 2122246 - RNA, 19 nt, Artificial Sequence
  Description of Artificial Sequence: Synthetic oligonucleotide
aaccgacucuugauuggag

SEQ ID NO: 2122247 - RNA, 19 nt, Artificial Sequence
  Description of Artificial Sequence: Synthetic oligonucleotide
ccaaucaggaucaagugua

SEQ ID NO: 2122248 - RNA, 19 nt, Artificial Sequence
  Description of Artificial Sequence: Synthetic oligonucleotide
gcuguaacucgcuugcauc

SEQ ID NO: 2122249 - RNA, 19 nt, Artificial Sequence
  Description of Artificial Sequence: Synthetic oligonucleotide
cuuuuaguaagagggugaa

SEQ ID NO: 2122250 - RNA, 19 nt, Artificial Sequence
  Description of Artificial Sequence: Synthetic oligonucleotide
aaaucccuccuggagcuuu

SEQ ID NO: 2122251 - RNA, 19 nt, Artificial Sequence
  Description of Artificial Sequence: Synthetic oligonucleotide
auaucgucaccaagagcag

SEQ ID NO: 2122252 - RNA, 19 nt, Artificial Sequence
  Description of Artificial Sequence: Synthetic oligonucleotide
augagucugcugcuucaca

SEQ ID NO: 2122253 - RNA, 19 nt, Artificial Sequence
  Description of Artificial Sequence: Synthetic oligonucleotide
gugaacugcuaaucuggca

SEQ ID NO: 2122254 - RNA, 19 nt, Artificial Sequence
  Description of Artificial Sequence: Synthetic oligonucleotide
gauuggagguucauuuucu

SEQ ID NO: 2122255 - RNA, 19 nt, Artificial Sequence
  Description of Artificial Sequence: Synthetic oligonucleotide
uuccuuagcugaggaccgg

SEQ ID NO: 2122256 - RNA, 19 nt, Artificial Sequence
  Description of Artificial Sequence: Synthetic oligonucleotide
caggaucaaguguauaugu

SEQ ID NO: 2122257 - RNA, 19 nt, Artificial Sequence
  Description of Artificial Sequence: Synthetic oligonucleotide
guaacucgcuugcaucauc

SEQ ID NO: 2122258 - RNA, 19 nt, Artificial Sequence
  Description of Artificial Sequence: Synthetic oligonucleotide
ucaaacccucuucgugcac

SEQ ID NO: 2122259 - RNA, 19 nt, Artificial Sequence
  Description of Artificial Sequence: Synthetic oligonucleotide
agaagacuguuuguagaau

SEQ ID NO: 2122260 - RNA, 19 nt, Artificial Sequence
  Description of Artificial Sequence: Synthetic oligonucleotide
gagcuuuuagguccagaua

SEQ ID NO: 2122261 - RNA, 19 nt, Artificial Sequence
  Description of Artificial Sequence: Synthetic oligonucleotide
ccuagcgucuggaauuccc

SEQ ID NO: 2122262 - RNA, 19 nt, Artificial Sequence
  Description of Artificial Sequence: Synthetic oligonucleotide
aucgucaccaagagcagau

SEQ ID NO: 2122263 - RNA, 19 nt, Artificial Sequence
  Description of Artificial Sequence: Synthetic oligonucleotide
cuuaaaucccaaucaggau

SEQ ID NO: 2122264 - RNA, 19 nt, Artificial Sequence
  Description of Artificial Sequence: Synthetic oligonucleotide
ccagauaaagaguggaaaa

SEQ ID NO: 2122265 - RNA, 19 nt, Artificial Sequence
  Description of Artificial Sequence: Synthetic oligonucleotide
cuuugaugacucagccuca

SEQ ID NO: 2122266 - RNA, 19 nt, Artificial Sequence
  Description of Artificial Sequence: Synthetic oligonucleotide
aacugcuaaucuggcaauu

SEQ ID NO: 2122267 - RNA, 19 nt, Artificial Sequence
  Description of Artificial Sequence: Synthetic oligonucleotide
uguaacucgcuugcaucau

SEQ ID NO: 2122268 - RNA, 19 nt, Artificial Sequence
  Description of Artificial Sequence: Synthetic oligonucleotide
acacuccugacaaguuuuc

SEQ ID NO: 2122269 - RNA, 19 nt, Artificial Sequence
  Description of Artificial Sequence: Synthetic oligonucleotide
gcuaaucuggcaauugcuc

SEQ ID NO: 2122270 - RNA, 19 nt, Artificial Sequence
  Description of Artificial Sequence: Synthetic oligonucleotide
uguccuuaugcuggcuuuc

SEQ ID NO: 2122271 - RNA, 19 nt, Artificial Sequence
  Description of Artificial Sequence: Synthetic oligonucleotide
cuguuuguagaaucuuucu

SEQ ID NO: 2122272 - RNA, 19 nt, Artificial Sequence
  Description of Artificial Sequence: Synthetic oligonucleotide
accaaaacucggauucgcu

SEQ ID NO: 2122273 - RNA, 19 nt, Artificial Sequence
  Description of Artificial Sequence: Synthetic oligonucleotide
aggcuugaacagcagcuuu

SEQ ID NO: 2122274 - RNA, 19 nt, Artificial Sequence
  Description of Artificial Sequence: Synthetic oligonucleotide
guacgucggacuuuuccaa

SEQ ID NO: 2122275 - RNA, 19 nt, Artificial Sequence
  Description of Artificial Sequence: Synthetic oligonucleotide
cucguuauugagguucaga

SEQ ID NO: 2122276 - RNA, 19 nt, Artificial Sequence
  Description of Artificial Sequence: Synthetic oligonucleotide
uccuucuuucuuguacguc

SEQ ID NO: 2122277 - RNA, 19 nt, Artificial Sequence
  Description of Artificial Sequence: Synthetic oligonucleotide
caugagucugcugcuucac

SEQ ID NO: 2122278 - RNA, 19 nt, Artificial Sequence
  Description of Artificial Sequence: Synthetic oligonucleotide
ugccaacacuccugacaag

SEQ ID NO: 2122279 - RNA, 19 nt, Artificial Sequence
  Description of Artificial Sequence: Synthetic oligonucleotide
guuuuauucuuuggggccu

SEQ ID NO: 2122280 - RNA, 19 nt, Artificial Sequence
  Description of Artificial Sequence: Synthetic oligonucleotide
uuuauucuuuggggccugu

SEQ ID NO: 2122281 - RNA, 19 nt, Artificial Sequence
  Description of Artificial Sequence: Synthetic oligonucleotide
cuuccuagcgucuggaauu

SEQ ID NO: 2122282 - RNA, 19 nt, Artificial Sequence
  Description of Artificial Sequence: Synthetic oligonucleotide
uuccuagcgucuggaauuc

SEQ ID NO: 2122283 - RNA, 19 nt, Artificial Sequence
  Description of Artificial Sequence: Synthetic oligonucleotide
ggugaacugcuaaucuggc

SEQ ID NO: 2122284 - RNA, 19 nt, Artificial Sequence
  Description of Artificial Sequence: Synthetic oligonucleotide
ucgcuucacuucuuuucuc

SEQ ID NO: 2122285 - RNA, 19 nt, Artificial Sequence
  Description of Artificial Sequence: Synthetic oligonucleotide
ccuuaugcuggcuuuccuc

SEQ ID NO: 2122286 - RNA, 19 nt, Artificial Sequence
  Description of Artificial Sequence: Synthetic oligonucleotide
uggagcuuuuagguccaga

SEQ ID NO: 2122287 - RNA, 19 nt, Artificial Sequence
  Description of Artificial Sequence: Synthetic oligonucleotide
ggaucaaguguauauguuu

SEQ ID NO: 2122288 - RNA, 19 nt, Artificial Sequence
  Description of Artificial Sequence: Synthetic oligonucleotide
ggguuuguguuccuuagcu

SEQ ID NO: 2122289 - RNA, 19 nt, Artificial Sequence
  Description of Artificial Sequence: Synthetic oligonucleotide
guccuuaugcuggcuuucc

SEQ ID NO: 2122290 - RNA, 19 nt, Artificial Sequence
  Description of Artificial Sequence: Synthetic oligonucleotide
agacuguuuguagaaucuu

SEQ ID NO: 2122291 - RNA, 19 nt, Artificial Sequence
  Description of Artificial Sequence: Synthetic oligonucleotide
cagugcuaucaucaaagua

SEQ ID NO: 2122292 - RNA, 19 nt, Artificial Sequence
  Description of Artificial Sequence: Synthetic oligonucleotide
gaggagcaugagucugcug

SEQ ID NO: 2122293 - RNA, 19 nt, Artificial Sequence
  Description of Artificial Sequence: Synthetic oligonucleotide
caccuuuuggagggguuug

SEQ ID NO: 2122294 - RNA, 19 nt, Artificial Sequence
  Description of Artificial Sequence: Synthetic oligonucleotide
cugucacuauccucagaca

SEQ ID NO: 2122295 - RNA, 19 nt, Artificial Sequence
  Description of Artificial Sequence: Synthetic oligonucleotide
gaacugcuaaucuggcaau

SEQ ID NO: 2122296 - RNA, 19 nt, Artificial Sequence
  Description of Artificial Sequence: Synthetic oligonucleotide
gucaccaagagcagauuua

SEQ ID NO: 2122297 - RNA, 19 nt, Artificial Sequence
  Description of Artificial Sequence: Synthetic oligonucleotide
ugcaucuuacagugcccuu

SEQ ID NO: 2122298 - RNA, 19 nt, Artificial Sequence
  Description of Artificial Sequence: Synthetic oligonucleotide
acccucuucgugcacucuu

SEQ ID NO: 2122299 - RNA, 19 nt, Artificial Sequence
  Description of Artificial Sequence: Synthetic oligonucleotide
uuccuucauggcguguauc

SEQ ID NO: 2122300 - RNA, 19 nt, Artificial Sequence
  Description of Artificial Sequence: Synthetic oligonucleotide
gggguuuguguuccuuagc

SEQ ID NO: 2122301 - RNA, 19 nt, Artificial Sequence
  Description of Artificial Sequence: Synthetic oligonucleotide
gugcuaucaucaaaguacu

SEQ ID NO: 2122302 - RNA, 19 nt, Artificial Sequence
  Description of Artificial Sequence: Synthetic oligonucleotide
cacucuuuguaaaccgacu

SEQ ID NO: 2122303 - RNA, 19 nt, Artificial Sequence
  Description of Artificial Sequence: Synthetic oligonucleotide
gaacagagaguguccuuau

SEQ ID NO: 2122304 - RNA, 19 nt, Artificial Sequence
  Description of Artificial Sequence: Synthetic oligonucleotide
uuauucuuuggggccuguu

SEQ ID NO: 2122305 - RNA, 19 nt, Artificial Sequence
  Description of Artificial Sequence: Synthetic oligonucleotide
gacuguuuguagaaucuuu

SEQ ID NO: 2122306 - RNA, 19 nt, Artificial Sequence
  Description of Artificial Sequence: Synthetic oligonucleotide
gcacucuuuguaaaccgac

SEQ ID NO: 2122307 - RNA, 19 nt, Artificial Sequence
  Description of Artificial Sequence: Synthetic oligonucleotide
guccagauaaagaguggaa

SEQ ID NO: 2122308 - RNA, 19 nt, Artificial Sequence
  Description of Artificial Sequence: Synthetic oligonucleotide
aggaugcagaggagcauga

SEQ ID NO: 2122309 - RNA, 19 nt, Artificial Sequence
  Description of Artificial Sequence: Synthetic oligonucleotide
gaauucccuuguguuuauc

SEQ ID NO: 2122310 - RNA, 19 nt, Artificial Sequence
  Description of Artificial Sequence: Synthetic oligonucleotide
ucacugccacuguuaggau

SEQ ID NO: 2122311 - RNA, 19 nt, Artificial Sequence
  Description of Artificial Sequence: Synthetic oligonucleotide
ccuugaaacacagugauuu

SEQ ID NO: 2122312 - RNA, 19 nt, Artificial Sequence
  Description of Artificial Sequence: Synthetic oligonucleotide
uucuuguacgucggacuuu

SEQ ID NO: 2122313 - RNA, 19 nt, Artificial Sequence
  Description of Artificial Sequence: Synthetic oligonucleotide
caggagcauucugucuugc

SEQ ID NO: 2122314 - RNA, 19 nt, Artificial Sequence
  Description of Artificial Sequence: Synthetic oligonucleotide
gucggacuuuuccaaugaa

SEQ ID NO: 2122315 - RNA, 19 nt, Artificial Sequence
  Description of Artificial Sequence: Synthetic oligonucleotide
gugacaccuuuuggagggg

SEQ ID NO: 2122316 - RNA, 19 nt, Artificial Sequence
  Description of Artificial Sequence: Synthetic oligonucleotide
ggauaaccaaaacucggau

SEQ ID NO: 2122317 - RNA, 19 nt, Artificial Sequence
  Description of Artificial Sequence: Synthetic oligonucleotide
aaaucccaaucaggaucaa

SEQ ID NO: 2122318 - RNA, 19 nt, Artificial Sequence
  Description of Artificial Sequence: Synthetic oligonucleotide
ggagcauucugucuugcau

SEQ ID NO: 2122319 - RNA, 19 nt, Artificial Sequence
  Description of Artificial Sequence: Synthetic oligonucleotide
gcaaucuuugggcucgucu

SEQ ID NO: 2122320 - RNA, 19 nt, Artificial Sequence
  Description of Artificial Sequence: Synthetic oligonucleotide
acucuugauuggagguuca

SEQ ID NO: 2122321 - RNA, 19 nt, Artificial Sequence
  Description of Artificial Sequence: Synthetic oligonucleotide
uccuagcgucuggaauucc

SEQ ID NO: 2122322 - RNA, 19 nt, Artificial Sequence
  Description of Artificial Sequence: Synthetic oligonucleotide
gcaugagucugcugcuuca

SEQ ID NO: 2122323 - RNA, 19 nt, Artificial Sequence
  Description of Artificial Sequence: Synthetic oligonucleotide
cuugaaacacagugauuuu

SEQ ID NO: 2122324 - RNA, 19 nt, Artificial Sequence
  Description of Artificial Sequence: Synthetic oligonucleotide
cacuguuaggaugcuguaa

SEQ ID NO: 2122325 - RNA, 19 nt, Artificial Sequence
  Description of Artificial Sequence: Synthetic oligonucleotide
caaagucuggaguuuuauu

SEQ ID NO: 2122326 - RNA, 19 nt, Artificial Sequence
  Description of Artificial Sequence: Synthetic oligonucleotide
cuuguacgucggacuuuuc

SEQ ID NO: 2122327 - RNA, 19 nt, Artificial Sequence
  Description of Artificial Sequence: Synthetic oligonucleotide
cuguuaggaugcuguaacu

SEQ ID NO: 2122328 - RNA, 19 nt, Artificial Sequence
  Description of Artificial Sequence: Synthetic oligonucleotide
gcaucaucuuuugaacaga

SEQ ID NO: 2122329 - RNA, 19 nt, Artificial Sequence
  Description of Artificial Sequence: Synthetic oligonucleotide
aagcaaucuuugggcucgu

SEQ ID NO: 2122330 - RNA, 19 nt, Artificial Sequence
  Description of Artificial Sequence: Synthetic oligonucleotide
ccuuagcugaggaccggac

SEQ ID NO: 2122331 - RNA, 19 nt, Artificial Sequence
  Description of Artificial Sequence: Synthetic oligonucleotide
cguuauugagguucagaga

SEQ ID NO: 2122332 - RNA, 19 nt, Artificial Sequence
  Description of Artificial Sequence: Synthetic oligonucleotide
ccugacaaguuuucggaua

SEQ ID NO: 2122333 - RNA, 19 nt, Artificial Sequence
  Description of Artificial Sequence: Synthetic oligonucleotide
gugcaucuuacagugcccu

SEQ ID NO: 2122334 - RNA, 19 nt, Artificial Sequence
  Description of Artificial Sequence: Synthetic oligonucleotide
gccacuguuaggaugcugu

SEQ ID NO: 2122335 - RNA, 19 nt, Artificial Sequence
  Description of Artificial Sequence: Synthetic oligonucleotide
gaaggaugcagaggagcau

SEQ ID NO: 2122336 - RNA, 19 nt, Artificial Sequence
  Description of Artificial Sequence: Synthetic oligonucleotide
gccuguucucugaaauccc

SEQ ID NO: 2122337 - RNA, 19 nt, Artificial Sequence
  Description of Artificial Sequence: Synthetic oligonucleotide
aaucccuccuggagcuuuu

SEQ ID NO: 2122338 - RNA, 19 nt, Artificial Sequence
  Description of Artificial Sequence: Synthetic oligonucleotide
caacacuccugacaaguuu

SEQ ID NO: 2122339 - RNA, 19 nt, Artificial Sequence
  Description of Artificial Sequence: Synthetic oligonucleotide
gccaacacuccugacaagu

SEQ ID NO: 2122340 - RNA, 19 nt, Artificial Sequence
  Description of Artificial Sequence: Synthetic oligonucleotide
gucugccaacacuccugac

SEQ ID NO: 2122341 - RNA, 19 nt, Artificial Sequence
  Description of Artificial Sequence: Synthetic oligonucleotide
augcuguaacucgcuugca

SEQ ID NO: 2122342 - RNA, 19 nt, Artificial Sequence
  Description of Artificial Sequence: Synthetic oligonucleotide
ggagcaugagucugcugcu

SEQ ID NO: 2122343 - RNA, 19 nt, Artificial Sequence
  Description of Artificial Sequence: Synthetic oligonucleotide
ccuuuuggagggguuugug

SEQ ID NO: 2122344 - RNA, 19 nt, Artificial Sequence
  Description of Artificial Sequence: Synthetic oligonucleotide
guguccuuaugcuggcuuu

SEQ ID NO: 2122345 - RNA, 19 nt, Artificial Sequence
  Description of Artificial Sequence: Synthetic oligonucleotide
gcuuuuagguccagauaaa

SEQ ID NO: 2122346 - RNA, 19 nt, Artificial Sequence
  Description of Artificial Sequence: Synthetic oligonucleotide
caucuuacagugcccuuuu

SEQ ID NO: 2122347 - RNA, 19 nt, Artificial Sequence
  Description of Artificial Sequence: Synthetic oligonucleotide
cagucaucaaaccgugauu

SEQ ID NO: 2122348 - RNA, 19 nt, Artificial Sequence
  Description of Artificial Sequence: Synthetic oligonucleotide
uuccgccuccugcucgcuu

SEQ ID NO: 2122349 - RNA, 19 nt, Artificial Sequence
  Description of Artificial Sequence: Synthetic oligonucleotide
cccaaucaggaucaagugu

SEQ ID NO: 2122350 - RNA, 19 nt, Artificial Sequence
  Description of Artificial Sequence: Synthetic oligonucleotide
caccaagagcagauuuagu

SEQ ID NO: 2122351 - RNA, 19 nt, Artificial Sequence
  Description of Artificial Sequence: Synthetic oligonucleotide
ggacuucagucugccaaca

SEQ ID NO: 2122352 - RNA, 19 nt, Artificial Sequence
  Description of Artificial Sequence: Synthetic oligonucleotide
cagcuuuuaguugcaucua

SEQ ID NO: 2122353 - RNA, 19 nt, Artificial Sequence
  Description of Artificial Sequence: Synthetic oligonucleotide
cguguaucucuucaagcaa

SEQ ID NO: 2122354 - RNA, 19 nt, Artificial Sequence
  Description of Artificial Sequence: Synthetic oligonucleotide
cacuauccucagacacaga

SEQ ID NO: 2122355 - RNA, 19 nt, Artificial Sequence
  Description of Artificial Sequence: Synthetic oligonucleotide
ccgacucuugauuggaggu

SEQ ID NO: 2122356 - RNA, 19 nt, Artificial Sequence
  Description of Artificial Sequence: Synthetic oligonucleotide
gcgucuggaauucccuugu

SEQ ID NO: 2122357 - RNA, 19 nt, Artificial Sequence
  Description of Artificial Sequence: Synthetic oligonucleotide
cccuuguguuuaucauuuc

SEQ ID NO: 2122358 - RNA, 19 nt, Artificial Sequence
  Description of Artificial Sequence: Synthetic oligonucleotide
ccaaaacucggauucgcuu

SEQ ID NO: 2122359 - RNA, 19 nt, Artificial Sequence
  Description of Artificial Sequence: Synthetic oligonucleotide
cgucggacuuuuccaauga

SEQ ID NO: 2122360 - RNA, 19 nt, Artificial Sequence
  Description of Artificial Sequence: Synthetic oligonucleotide
gcuuuuaguugcaucuauu

SEQ ID NO: 2122361 - RNA, 19 nt, Artificial Sequence
  Description of Artificial Sequence: Synthetic oligonucleotide
gcaucuuacagugcccuuu

SEQ ID NO: 2122362 - RNA, 19 nt, Artificial Sequence
  Description of Artificial Sequence: Synthetic oligonucleotide
ccucguuauugagguucag

SEQ ID NO: 2122363 - RNA, 19 nt, Artificial Sequence
  Description of Artificial Sequence: Synthetic oligonucleotide
ggcuugaacagcagcuuuu

SEQ ID NO: 2122364 - RNA, 19 nt, Artificial Sequence
  Description of Artificial Sequence: Synthetic oligonucleotide
ccacuguuaggaugcugua

SEQ ID NO: 2122365 - RNA, 19 nt, Artificial Sequence
  Description of Artificial Sequence: Synthetic oligonucleotide
gaaaucccuccuggagcuu

SEQ ID NO: 2122366 - RNA, 19 nt, Artificial Sequence
  Description of Artificial Sequence: Synthetic oligonucleotide
ccaacacuccugacaaguu

SEQ ID NO: 2122367 - RNA, 19 nt, Artificial Sequence
  Description of Artificial Sequence: Synthetic oligonucleotide
caaccucguuauugagguu

SEQ ID NO: 2122368 - RNA, 19 nt, Artificial Sequence
  Description of Artificial Sequence: Synthetic oligonucleotide
cgucaccaagagcagauuu

SEQ ID NO: 2122369 - RNA, 19 nt, Artificial Sequence
  Description of Artificial Sequence: Synthetic oligonucleotide
gcaguugaaucuggcuuuu

SEQ ID NO: 2122370 - RNA, 19 nt, Artificial Sequence
  Description of Artificial Sequence: Synthetic oligonucleotide
ccugcucgcuucccaggaa

SEQ ID NO: 2122371 - RNA, 19 nt, Artificial Sequence
  Description of Artificial Sequence: Synthetic oligonucleotide
ggagggguuuguguuccuu

SEQ ID NO: 2122372 - RNA, 19 nt, Artificial Sequence
  Description of Artificial Sequence: Synthetic oligonucleotide
cgcuugcaucaucuuuuga

SEQ ID NO: 2122373 - RNA, 19 nt, Artificial Sequence
  Description of Artificial Sequence: Synthetic oligonucleotide
cccuugaaacacagugauu

SEQ ID NO: 2122374 - RNA, 19 nt, Artificial Sequence
  Description of Artificial Sequence: Synthetic oligonucleotide
cagcagcuuuuaguugcau

SEQ ID NO: 2122375 - RNA, 19 nt, Artificial Sequence
  Description of Artificial Sequence: Synthetic oligonucleotide
cccucuucgugcacucuuu

SEQ ID NO: 2122376 - RNA, 19 nt, Artificial Sequence
  Description of Artificial Sequence: Synthetic oligonucleotide
cgacucuugauuggagguu

SEQ ID NO: 2122377 - RNA, 19 nt, Artificial Sequence
  Description of Artificial Sequence: Synthetic oligonucleotide
aaagaaacgcuuuacaugc

SEQ ID NO: 2122378 - RNA, 19 nt, Artificial Sequence
  Description of Artificial Sequence: Synthetic oligonucleotide
aaauucgucaucgaaaucc

SEQ ID NO: 2122379 - RNA, 19 nt, Artificial Sequence
  Description of Artificial Sequence: Synthetic oligonucleotide
uuuucaagaauaucgaugc

SEQ ID NO: 2122380 - RNA, 19 nt, Artificial Sequence
  Description of Artificial Sequence: Synthetic oligonucleotide
guacuuuucaagaauaucg

SEQ ID NO: 2122381 - RNA, 19 nt, Artificial Sequence
  Description of Artificial Sequence: Synthetic oligonucleotide
uagacuucgacguaggaag

SEQ ID NO: 2122382 - RNA, 19 nt, Artificial Sequence
  Description of Artificial Sequence: Synthetic oligonucleotide
ucuaccacggaaauggugc

SEQ ID NO: 2122383 - RNA, 19 nt, Artificial Sequence
  Description of Artificial Sequence: Synthetic oligonucleotide
aauaucgaugccccacugc

SEQ ID NO: 2122384 - RNA, 19 nt, Artificial Sequence
  Description of Artificial Sequence: Synthetic oligonucleotide
gaaagaaacgcuuuacaug

SEQ ID NO: 2122385 - RNA, 19 nt, Artificial Sequence
  Description of Artificial Sequence: Synthetic oligonucleotide
uacauaucgcaucaggucc

SEQ ID NO: 2122386 - RNA, 19 nt, Artificial Sequence
  Description of Artificial Sequence: Synthetic oligonucleotide
ucaagaauaucgaugcccc

SEQ ID NO: 2122387 - RNA, 19 nt, Artificial Sequence
  Description of Artificial Sequence: Synthetic oligonucleotide
uucucuauguucugggugg

SEQ ID NO: 2122388 - RNA, 19 nt, Artificial Sequence
  Description of Artificial Sequence: Synthetic oligonucleotide
uucaagguggaaagaaacg

SEQ ID NO: 2122389 - RNA, 19 nt, Artificial Sequence
  Description of Artificial Sequence: Synthetic oligonucleotide
uuucauuuuggugauggcg

SEQ ID NO: 2122390 - RNA, 19 nt, Artificial Sequence
  Description of Artificial Sequence: Synthetic oligonucleotide
cuuuucaagaauaucgaug

SEQ ID NO: 2122391 - RNA, 19 nt, Artificial Sequence
  Description of Artificial Sequence: Synthetic oligonucleotide
guugguauuucuuugaaga

SEQ ID NO: 2122392 - RNA, 19 nt, Artificial Sequence
  Description of Artificial Sequence: Synthetic oligonucleotide
auacauuccgcucugccgg

SEQ ID NO: 2122393 - RNA, 19 nt, Artificial Sequence
  Description of Artificial Sequence: Synthetic oligonucleotide
aagaauaucgaugccccac

SEQ ID NO: 2122394 - RNA, 19 nt, Artificial Sequence
  Description of Artificial Sequence: Synthetic oligonucleotide
auaucgaugccccacugcg

SEQ ID NO: 2122395 - RNA, 19 nt, Artificial Sequence
  Description of Artificial Sequence: Synthetic oligonucleotide
ucucauucaagguggaaag

SEQ ID NO: 2122396 - RNA, 19 nt, Artificial Sequence
  Description of Artificial Sequence: Synthetic oligonucleotide
uaucgcaucagguccaccg

SEQ ID NO: 2122397 - RNA, 19 nt, Artificial Sequence
  Description of Artificial Sequence: Synthetic oligonucleotide
aauguauagagggccuugc

SEQ ID NO: 2122398 - RNA, 19 nt, Artificial Sequence
  Description of Artificial Sequence: Synthetic oligonucleotide
uguacuuguauucuucuuc

SEQ ID NO: 2122399 - RNA, 19 nt, Artificial Sequence
  Description of Artificial Sequence: Synthetic oligonucleotide
ccuucaaauguauagaggg

SEQ ID NO: 2122400 - RNA, 19 nt, Artificial Sequence
  Description of Artificial Sequence: Synthetic oligonucleotide
ugcgaugucauguucucgg

SEQ ID NO: 2122401 - RNA, 19 nt, Artificial Sequence
  Description of Artificial Sequence: Synthetic oligonucleotide
ugucaaacugaucccagag

SEQ ID NO: 2122402 - RNA, 19 nt, Artificial Sequence
  Description of Artificial Sequence: Synthetic oligonucleotide
uucaagaauaucgaugccc

SEQ ID NO: 2122403 - RNA, 19 nt, Artificial Sequence
  Description of Artificial Sequence: Synthetic oligonucleotide
cugaccuucaaauguauag

SEQ ID NO: 2122404 - RNA, 19 nt, Artificial Sequence
  Description of Artificial Sequence: Synthetic oligonucleotide
uguacauaucgcaucaggu

SEQ ID NO: 2122405 - RNA, 19 nt, Artificial Sequence
  Description of Artificial Sequence: Synthetic oligonucleotide
uaaauagacuucgacguag

SEQ ID NO: 2122406 - RNA, 19 nt, Artificial Sequence
  Description of Artificial Sequence: Synthetic oligonucleotide
ucaaauucgucaucgaaau

SEQ ID NO: 2122407 - RNA, 19 nt, Artificial Sequence
  Description of Artificial Sequence: Synthetic oligonucleotide
uacuuuucaagaauaucga

SEQ ID NO: 2122408 - RNA, 19 nt, Artificial Sequence
  Description of Artificial Sequence: Synthetic oligonucleotide
auuagugacugucuggugu

SEQ ID NO: 2122409 - RNA, 19 nt, Artificial Sequence
  Description of Artificial Sequence: Synthetic oligonucleotide
uacgaguccacccaucacc

SEQ ID NO: 2122410 - RNA, 19 nt, Artificial Sequence
  Description of Artificial Sequence: Synthetic oligonucleotide
uuguccuccucaaugacgc

SEQ ID NO: 2122411 - RNA, 19 nt, Artificial Sequence
  Description of Artificial Sequence: Synthetic oligonucleotide
gaugaccucaugcugcccg

SEQ ID NO: 2122412 - RNA, 19 nt, Artificial Sequence
  Description of Artificial Sequence: Synthetic oligonucleotide
ucaagguggaaagaaacgc

SEQ ID NO: 2122413 - RNA, 19 nt, Artificial Sequence
  Description of Artificial Sequence: Synthetic oligonucleotide
gaccuucaaauguauagag

SEQ ID NO: 2122414 - RNA, 19 nt, Artificial Sequence
  Description of Artificial Sequence: Synthetic oligonucleotide
agaaacgcuuuacaugccg

SEQ ID NO: 2122415 - RNA, 19 nt, Artificial Sequence
  Description of Artificial Sequence: Synthetic oligonucleotide
uucgacguaggaaguaggg

SEQ ID NO: 2122416 - RNA, 19 nt, Artificial Sequence
  Description of Artificial Sequence: Synthetic oligonucleotide
ucuaaguugucaaacugau

SEQ ID NO: 2122417 - RNA, 19 nt, Artificial Sequence
  Description of Artificial Sequence: Synthetic oligonucleotide
ucaacuuucugcugcagcu

SEQ ID NO: 2122418 - RNA, 19 nt, Artificial Sequence
  Description of Artificial Sequence: Synthetic oligonucleotide
cugaccgucauacauuccg

SEQ ID NO: 2122419 - RNA, 19 nt, Artificial Sequence
  Description of Artificial Sequence: Synthetic oligonucleotide
uucgucaucgaaauccgug

SEQ ID NO: 2122420 - RNA, 19 nt, Artificial Sequence
  Description of Artificial Sequence: Synthetic oligonucleotide
ucgucaucgaaauccgugg

SEQ ID NO: 2122421 - RNA, 19 nt, Artificial Sequence
  Description of Artificial Sequence: Synthetic oligonucleotide
cuugauguacuuuucaaga

SEQ ID NO: 2122422 - RNA, 19 nt, Artificial Sequence
  Description of Artificial Sequence: Synthetic oligonucleotide
guaacuaccaucugggcuc

SEQ ID NO: 2122423 - RNA, 19 nt, Artificial Sequence
  Description of Artificial Sequence: Synthetic oligonucleotide
uuuccuuucuugcuugagc

SEQ ID NO: 2122424 - RNA, 19 nt, Artificial Sequence
  Description of Artificial Sequence: Synthetic oligonucleotide
cucaucaacuuucugcugc

SEQ ID NO: 2122425 - RNA, 19 nt, Artificial Sequence
  Description of Artificial Sequence: Synthetic oligonucleotide
uggaaagaaacgcuuuaca

SEQ ID NO: 2122426 - RNA, 19 nt, Artificial Sequence
  Description of Artificial Sequence: Synthetic oligonucleotide
auuucugcggauacgaguc

SEQ ID NO: 2122427 - RNA, 19 nt, Artificial Sequence
  Description of Artificial Sequence: Synthetic oligonucleotide
accggaagggccccgaccc

SEQ ID NO: 2122428 - RNA, 19 nt, Artificial Sequence
  Description of Artificial Sequence: Synthetic oligonucleotide
ucaaauguauagagggccu

SEQ ID NO: 2122429 - RNA, 19 nt, Artificial Sequence
  Description of Artificial Sequence: Synthetic oligonucleotide
uuccuuucuugcuugagcu

SEQ ID NO: 2122430 - RNA, 19 nt, Artificial Sequence
  Description of Artificial Sequence: Synthetic oligonucleotide
ucauacauuccgcucugcc

SEQ ID NO: 2122431 - RNA, 19 nt, Artificial Sequence
  Description of Artificial Sequence: Synthetic oligonucleotide
ucaaucucaguccucuccu

SEQ ID NO: 2122432 - RNA, 19 nt, Artificial Sequence
  Description of Artificial Sequence: Synthetic oligonucleotide
guaggaaguagggacauag

SEQ ID NO: 2122433 - RNA, 19 nt, Artificial Sequence
  Description of Artificial Sequence: Synthetic oligonucleotide
uucauuucugcggauacga

SEQ ID NO: 2122434 - RNA, 19 nt, Artificial Sequence
  Description of Artificial Sequence: Synthetic oligonucleotide
gaugucauguucucggaga

SEQ ID NO: 2122435 - RNA, 19 nt, Artificial Sequence
  Description of Artificial Sequence: Synthetic oligonucleotide
aaauagacuucgacguagg

SEQ ID NO: 2122436 - RNA, 19 nt, Artificial Sequence
  Description of Artificial Sequence: Synthetic oligonucleotide
aagauuccugagcugcuug

SEQ ID NO: 2122437 - RNA, 19 nt, Artificial Sequence
  Description of Artificial Sequence: Synthetic oligonucleotide
gaucacuccgugcugggag

SEQ ID NO: 2122438 - RNA, 19 nt, Artificial Sequence
  Description of Artificial Sequence: Synthetic oligonucleotide
cugagcucaaucucagucc

SEQ ID NO: 2122439 - RNA, 19 nt, Artificial Sequence
  Description of Artificial Sequence: Synthetic oligonucleotide
aaugacgcucagcauuucu

SEQ ID NO: 2122440 - RNA, 19 nt, Artificial Sequence
  Description of Artificial Sequence: Synthetic oligonucleotide
uuagugacugucuggugug

SEQ ID NO: 2122441 - RNA, 19 nt, Artificial Sequence
  Description of Artificial Sequence: Synthetic oligonucleotide
cuguacauaucgcaucagg

SEQ ID NO: 2122442 - RNA, 19 nt, Artificial Sequence
  Description of Artificial Sequence: Synthetic oligonucleotide
ugagcucaaucucaguccu

SEQ ID NO: 2122443 - RNA, 19 nt, Artificial Sequence
  Description of Artificial Sequence: Synthetic oligonucleotide
aauuagugacugucuggug

SEQ ID NO: 2122444 - RNA, 19 nt, Artificial Sequence
  Description of Artificial Sequence: Synthetic oligonucleotide
ccuucuaccacggaaaugg

SEQ ID NO: 2122445 - RNA, 19 nt, Artificial Sequence
  Description of Artificial Sequence: Synthetic oligonucleotide
uugcaggucccaauggcag

SEQ ID NO: 2122446 - RNA, 19 nt, Artificial Sequence
  Description of Artificial Sequence: Synthetic oligonucleotide
ucgucuucauuucugcgga

SEQ ID NO: 2122447 - RNA, 19 nt, Artificial Sequence
  Description of Artificial Sequence: Synthetic oligonucleotide
aaauguauagagggccuug

SEQ ID NO: 2122448 - RNA, 19 nt, Artificial Sequence
  Description of Artificial Sequence: Synthetic oligonucleotide
uccuucgaguucuucuugg

SEQ ID NO: 2122449 - RNA, 19 nt, Artificial Sequence
  Description of Artificial Sequence: Synthetic oligonucleotide
gaaguagggacauagcccu

SEQ ID NO: 2122450 - RNA, 19 nt, Artificial Sequence
  Description of Artificial Sequence: Synthetic oligonucleotide
ugagcugcuuggcauagcu

SEQ ID NO: 2122451 - RNA, 19 nt, Artificial Sequence
  Description of Artificial Sequence: Synthetic oligonucleotide
cuugagcucgcucuccugg

SEQ ID NO: 2122452 - RNA, 19 nt, Artificial Sequence
  Description of Artificial Sequence: Synthetic oligonucleotide
aauagacuucgacguagga

SEQ ID NO: 2122453 - RNA, 19 nt, Artificial Sequence
  Description of Artificial Sequence: Synthetic oligonucleotide
cagcauuucuccuucuacc

SEQ ID NO: 2122454 - RNA, 19 nt, Artificial Sequence
  Description of Artificial Sequence: Synthetic oligonucleotide
cucaaucucaguccucucc

SEQ ID NO: 2122455 - RNA, 19 nt, Artificial Sequence
  Description of Artificial Sequence: Synthetic oligonucleotide
uuucaagaauaucgaugcc

SEQ ID NO: 2122456 - RNA, 19 nt, Artificial Sequence
  Description of Artificial Sequence: Synthetic oligonucleotide
ucggagaugaccucaugcu

SEQ ID NO: 2122457 - RNA, 19 nt, Artificial Sequence
  Description of Artificial Sequence: Synthetic oligonucleotide
ucaguccucuccuugacaa

SEQ ID NO: 2122458 - RNA, 19 nt, Artificial Sequence
  Description of Artificial Sequence: Synthetic oligonucleotide
uuuacaugccguguacuug

SEQ ID NO: 2122459 - RNA, 19 nt, Artificial Sequence
  Description of Artificial Sequence: Synthetic oligonucleotide
ugccugaucacuccgugcu

SEQ ID NO: 2122460 - RNA, 19 nt, Artificial Sequence
  Description of Artificial Sequence: Synthetic oligonucleotide
guacauaucgcaucagguc

SEQ ID NO: 2122461 - RNA, 19 nt, Artificial Sequence
  Description of Artificial Sequence: Synthetic oligonucleotide
ugacgcucagcauuucucc

SEQ ID NO: 2122462 - RNA, 19 nt, Artificial Sequence
  Description of Artificial Sequence: Synthetic oligonucleotide
ugauccgucuccuuuugga

SEQ ID NO: 2122463 - RNA, 19 nt, Artificial Sequence
  Description of Artificial Sequence: Synthetic oligonucleotide
ugugguccaagcuggccgg

SEQ ID NO: 2122464 - RNA, 19 nt, Artificial Sequence
  Description of Artificial Sequence: Synthetic oligonucleotide
agcauuucuccuucuacca

SEQ ID NO: 2122465 - RNA, 19 nt, Artificial Sequence
  Description of Artificial Sequence: Synthetic oligonucleotide
uguacuuuucaagaauauc

SEQ ID NO: 2122466 - RNA, 19 nt, Artificial Sequence
  Description of Artificial Sequence: Synthetic oligonucleotide
ugaccuucaaauguauaga

SEQ ID NO: 2122467 - RNA, 19 nt, Artificial Sequence
  Description of Artificial Sequence: Synthetic oligonucleotide
augccguguacuuguauuc

SEQ ID NO: 2122468 - RNA, 19 nt, Artificial Sequence
  Description of Artificial Sequence: Synthetic oligonucleotide
cuugggcgcaauuagugac

SEQ ID NO: 2122469 - RNA, 19 nt, Artificial Sequence
  Description of Artificial Sequence: Synthetic oligonucleotide
agauuccugagcugcuugg

SEQ ID NO: 2122470 - RNA, 19 nt, Artificial Sequence
  Description of Artificial Sequence: Synthetic oligonucleotide
aguccucuccuugacaaac

SEQ ID NO: 2122471 - RNA, 19 nt, Artificial Sequence
  Description of Artificial Sequence: Synthetic oligonucleotide
ucaucgaaauccguggcca

SEQ ID NO: 2122472 - RNA, 19 nt, Artificial Sequence
  Description of Artificial Sequence: Synthetic oligonucleotide
ucgaaauccguggccagcg

SEQ ID NO: 2122473 - RNA, 19 nt, Artificial Sequence
  Description of Artificial Sequence: Synthetic oligonucleotide
uucuaccacggaaauggug

SEQ ID NO: 2122474 - RNA, 19 nt, Artificial Sequence
  Description of Artificial Sequence: Synthetic oligonucleotide
cuugagguacacaucuuuc

SEQ ID NO: 2122475 - RNA, 19 nt, Artificial Sequence
  Description of Artificial Sequence: Synthetic oligonucleotide
uucgaguucuucuuggguu

SEQ ID NO: 2122476 - RNA, 19 nt, Artificial Sequence
  Description of Artificial Sequence: Synthetic oligonucleotide
gacccuucgccggugaucg

SEQ ID NO: 2122477 - RNA, 19 nt, Artificial Sequence
  Description of Artificial Sequence: Synthetic oligonucleotide
ggcauagucauucaucuca

SEQ ID NO: 2122478 - RNA, 19 nt, Artificial Sequence
  Description of Artificial Sequence: Synthetic oligonucleotide
agaauaucgaugccccacu

SEQ ID NO: 2122479 - RNA, 19 nt, Artificial Sequence
  Description of Artificial Sequence: Synthetic oligonucleotide
aagaaacgcuuuacaugcc

SEQ ID NO: 2122480 - RNA, 19 nt, Artificial Sequence
  Description of Artificial Sequence: Synthetic oligonucleotide
ucaaugacgcucagcauuu

SEQ ID NO: 2122481 - RNA, 19 nt, Artificial Sequence
  Description of Artificial Sequence: Synthetic oligonucleotide
gaaauccguggccagcgcc

SEQ ID NO: 2122482 - RNA, 19 nt, Artificial Sequence
  Description of Artificial Sequence: Synthetic oligonucleotide
accgucauacauuccgcuc

SEQ ID NO: 2122483 - RNA, 19 nt, Artificial Sequence
  Description of Artificial Sequence: Synthetic oligonucleotide
uccaccgugaucugcgaug

SEQ ID NO: 2122484 - RNA, 19 nt, Artificial Sequence
  Description of Artificial Sequence: Synthetic oligonucleotide
uuauugagcucaucaacuu

SEQ ID NO: 2122485 - RNA, 19 nt, Artificial Sequence
  Description of Artificial Sequence: Synthetic oligonucleotide
acuaccaucugggcucucc

SEQ ID NO: 2122486 - RNA, 19 nt, Artificial Sequence
  Description of Artificial Sequence: Synthetic oligonucleotide
aucgaugccccacugcgug

SEQ ID NO: 2122487 - RNA, 19 nt, Artificial Sequence
  Description of Artificial Sequence: Synthetic oligonucleotide
ucuugggcgcaauuaguga

SEQ ID NO: 2122488 - RNA, 19 nt, Artificial Sequence
  Description of Artificial Sequence: Synthetic oligonucleotide
agcuccuguacauaucgca

SEQ ID NO: 2122489 - RNA, 19 nt, Artificial Sequence
  Description of Artificial Sequence: Synthetic oligonucleotide
gcaauuagugacugucugg

SEQ ID NO: 2122490 - RNA, 19 nt, Artificial Sequence
  Description of Artificial Sequence: Synthetic oligonucleotide
ugcggauacgaguccaccc

SEQ ID NO: 2122491 - RNA, 19 nt, Artificial Sequence
  Description of Artificial Sequence: Synthetic oligonucleotide
uugguauuucuuugaagau

SEQ ID NO: 2122492 - RNA, 19 nt, Artificial Sequence
  Description of Artificial Sequence: Synthetic oligonucleotide
cauguucucggagaugacc

SEQ ID NO: 2122493 - RNA, 19 nt, Artificial Sequence
  Description of Artificial Sequence: Synthetic oligonucleotide
gaucccagagcucggugcc

SEQ ID NO: 2122494 - RNA, 19 nt, Artificial Sequence
  Description of Artificial Sequence: Synthetic oligonucleotide
uauugagcucaucaacuuu

SEQ ID NO: 2122495 - RNA, 19 nt, Artificial Sequence
  Description of Artificial Sequence: Synthetic oligonucleotide
guucuugagguacacaucu

SEQ ID NO: 2122496 - RNA, 19 nt, Artificial Sequence
  Description of Artificial Sequence: Synthetic oligonucleotide
ugaccgucauacauuccgc

SEQ ID NO: 2122497 - RNA, 19 nt, Artificial Sequence
  Description of Artificial Sequence: Synthetic oligonucleotide
cuucgacguaggaaguagg

SEQ ID NO: 2122498 - RNA, 19 nt, Artificial Sequence
  Description of Artificial Sequence: Synthetic oligonucleotide
accuucaaauguauagagg

SEQ ID NO: 2122499 - RNA, 19 nt, Artificial Sequence
  Description of Artificial Sequence: Synthetic oligonucleotide
uaggaaguagggacauagc

SEQ ID NO: 2122500 - RNA, 19 nt, Artificial Sequence
  Description of Artificial Sequence: Synthetic oligonucleotide
uccuuuuggaucucuuuau

SEQ ID NO: 2122501 - RNA, 19 nt, Artificial Sequence
  Description of Artificial Sequence: Synthetic oligonucleotide
ggugccuucauucugaccu

SEQ ID NO: 2122502 - RNA, 19 nt, Artificial Sequence
  Description of Artificial Sequence: Synthetic oligonucleotide
auacgaguccacccaucac

SEQ ID NO: 2122503 - RNA, 19 nt, Artificial Sequence
  Description of Artificial Sequence: Synthetic oligonucleotide
aacuuucugcugcagcuuu

SEQ ID NO: 2122504 - RNA, 19 nt, Artificial Sequence
  Description of Artificial Sequence: Synthetic oligonucleotide
aucgaaauccguggccagc

SEQ ID NO: 2122505 - RNA, 19 nt, Artificial Sequence
  Description of Artificial Sequence: Synthetic oligonucleotide
ugaagauuccugagcugcu

SEQ ID NO: 2122506 - RNA, 19 nt, Artificial Sequence
  Description of Artificial Sequence: Synthetic oligonucleotide
ucugauccgucuccuuuug

SEQ ID NO: 2122507 - RNA, 19 nt, Artificial Sequence
  Description of Artificial Sequence: Synthetic oligonucleotide
uccucgucuucauuucugc

SEQ ID NO: 2122508 - RNA, 19 nt, Artificial Sequence
  Description of Artificial Sequence: Synthetic oligonucleotide
gucaucgaaauccguggcc

SEQ ID NO: 2122509 - RNA, 19 nt, Artificial Sequence
  Description of Artificial Sequence: Synthetic oligonucleotide
acgaguccacccaucaccc

SEQ ID NO: 2122510 - RNA, 19 nt, Artificial Sequence
  Description of Artificial Sequence: Synthetic oligonucleotide
gaauaucgaugccccacug

SEQ ID NO: 2122511 - RNA, 19 nt, Artificial Sequence
  Description of Artificial Sequence: Synthetic oligonucleotide
acuucgacguaggaaguag

SEQ ID NO: 2122512 - RNA, 19 nt, Artificial Sequence
  Description of Artificial Sequence: Synthetic oligonucleotide
auagcugagcucaaucuca

SEQ ID NO: 2122513 - RNA, 19 nt, Artificial Sequence
  Description of Artificial Sequence: Synthetic oligonucleotide
ugucugaccgucauacauu

SEQ ID NO: 2122514 - RNA, 19 nt, Artificial Sequence
  Description of Artificial Sequence: Synthetic oligonucleotide
cauucugaccuucaaaugu

SEQ ID NO: 2122515 - RNA, 19 nt, Artificial Sequence
  Description of Artificial Sequence: Synthetic oligonucleotide
auagacuucgacguaggaa

SEQ ID NO: 2122516 - RNA, 19 nt, Artificial Sequence
  Description of Artificial Sequence: Synthetic oligonucleotide
uuccuucgaguucuucuug

SEQ ID NO: 2122517 - RNA, 19 nt, Artificial Sequence
  Description of Artificial Sequence: Synthetic oligonucleotide
ccacccaucacccuugucc

SEQ ID NO: 2122518 - RNA, 19 nt, Artificial Sequence
  Description of Artificial Sequence: Synthetic oligonucleotide
uaccaucugggcucucccg

SEQ ID NO: 2122519 - RNA, 19 nt, Artificial Sequence
  Description of Artificial Sequence: Synthetic oligonucleotide
agcucggugccccagcuca

SEQ ID NO: 2122520 - RNA, 19 nt, Artificial Sequence
  Description of Artificial Sequence: Synthetic oligonucleotide
gagucugccuuccaccuca

SEQ ID NO: 2122521 - RNA, 19 nt, Artificial Sequence
  Description of Artificial Sequence: Synthetic oligonucleotide
cagcucauggugcagggac

SEQ ID NO: 2122522 - RNA, 19 nt, Artificial Sequence
  Description of Artificial Sequence: Synthetic oligonucleotide
uuucugcggauacgagucc

SEQ ID NO: 2122523 - RNA, 19 nt, Artificial Sequence
  Description of Artificial Sequence: Synthetic oligonucleotide
accccgauuuccuuucuug

SEQ ID NO: 2122524 - RNA, 19 nt, Artificial Sequence
  Description of Artificial Sequence: Synthetic oligonucleotide
gugugucugaccgucauac

SEQ ID NO: 2122525 - RNA, 19 nt, Artificial Sequence
  Description of Artificial Sequence: Synthetic oligonucleotide
uugggcgcaauuagugacu

SEQ ID NO: 2122526 - RNA, 19 nt, Artificial Sequence
  Description of Artificial Sequence: Synthetic oligonucleotide
gguugguauuucuuugaag

SEQ ID NO: 2122527 - RNA, 19 nt, Artificial Sequence
  Description of Artificial Sequence: Synthetic oligonucleotide
ucugcgaugucauguucuc

SEQ ID NO: 2122528 - RNA, 19 nt, Artificial Sequence
  Description of Artificial Sequence: Synthetic oligonucleotide
ucggugccccagcucaugg

SEQ ID NO: 2122529 - RNA, 19 nt, Artificial Sequence
  Description of Artificial Sequence: Synthetic oligonucleotide
ucauuuuggugauggcguc

SEQ ID NO: 2122530 - RNA, 19 nt, Artificial Sequence
  Description of Artificial Sequence: Synthetic oligonucleotide
ucuggugugucugaccguc

SEQ ID NO: 2122531 - RNA, 19 nt, Artificial Sequence
  Description of Artificial Sequence: Synthetic oligonucleotide
ucuuggguugguauuucuu

SEQ ID NO: 2122532 - RNA, 19 nt, Artificial Sequence
  Description of Artificial Sequence: Synthetic oligonucleotide
augacgcucagcauuucuc

SEQ ID NO: 2122533 - RNA, 19 nt, Artificial Sequence
  Description of Artificial Sequence: Synthetic oligonucleotide
auguucucggagaugaccu

SEQ ID NO: 2122534 - RNA, 19 nt, Artificial Sequence
  Description of Artificial Sequence: Synthetic oligonucleotide
ucagcaaguuuguggucca

SEQ ID NO: 2122535 - RNA, 19 nt, Artificial Sequence
  Description of Artificial Sequence: Synthetic oligonucleotide
agcucaaucucaguccucu

SEQ ID NO: 2122536 - RNA, 19 nt, Artificial Sequence
  Description of Artificial Sequence: Synthetic oligonucleotide
gcaaguuugugguccaagc

SEQ ID NO: 2122537 - RNA, 19 nt, Artificial Sequence
  Description of Artificial Sequence: Synthetic oligonucleotide
ucugaccuucaaauguaua

SEQ ID NO: 2122538 - RNA, 19 nt, Artificial Sequence
  Description of Artificial Sequence: Synthetic oligonucleotide
cuaccacggaaauggugcc

SEQ ID NO: 2122539 - RNA, 19 nt, Artificial Sequence
  Description of Artificial Sequence: Synthetic oligonucleotide
augaccucaugcugcccgg

SEQ ID NO: 2122540 - RNA, 19 nt, Artificial Sequence
  Description of Artificial Sequence: Synthetic oligonucleotide
aaauccguggccagcgccu

SEQ ID NO: 2122541 - RNA, 19 nt, Artificial Sequence
  Description of Artificial Sequence: Synthetic oligonucleotide
aucucaguccucuccuuga

SEQ ID NO: 2122542 - RNA, 19 nt, Artificial Sequence
  Description of Artificial Sequence: Synthetic oligonucleotide
ucaucucauucaaggugga

SEQ ID NO: 2122543 - RNA, 19 nt, Artificial Sequence
  Description of Artificial Sequence: Synthetic oligonucleotide
gucugaccgucauacauuc

SEQ ID NO: 2122544 - RNA, 19 nt, Artificial Sequence
  Description of Artificial Sequence: Synthetic oligonucleotide
ucgacguaggaaguaggga

SEQ ID NO: 2122545 - RNA, 19 nt, Artificial Sequence
  Description of Artificial Sequence: Synthetic oligonucleotide
ucucaguccucuccuugac

SEQ ID NO: 2122546 - RNA, 19 nt, Artificial Sequence
  Description of Artificial Sequence: Synthetic oligonucleotide
auguauagagggccuugca

SEQ ID NO: 2122547 - RNA, 19 nt, Artificial Sequence
  Description of Artificial Sequence: Synthetic oligonucleotide
gucuugggcgcaauuagug

SEQ ID NO: 2122548 - RNA, 19 nt, Artificial Sequence
  Description of Artificial Sequence: Synthetic oligonucleotide
acugucuggugugucugac

SEQ ID NO: 2122549 - RNA, 19 nt, Artificial Sequence
  Description of Artificial Sequence: Synthetic oligonucleotide
ugaucugcgaugucauguu

SEQ ID NO: 2122550 - RNA, 19 nt, Artificial Sequence
  Description of Artificial Sequence: Synthetic oligonucleotide
auggugccuucauucugac

SEQ ID NO: 2122551 - RNA, 19 nt, Artificial Sequence
  Description of Artificial Sequence: Synthetic oligonucleotide
cuugcaggucccaauggca

SEQ ID NO: 2122552 - RNA, 19 nt, Artificial Sequence
  Description of Artificial Sequence: Synthetic oligonucleotide
ucuccuuuuggaucucuuu

SEQ ID NO: 2122553 - RNA, 19 nt, Artificial Sequence
  Description of Artificial Sequence: Synthetic oligonucleotide
accgugaucugcgauguca

SEQ ID NO: 2122554 - RNA, 19 nt, Artificial Sequence
  Description of Artificial Sequence: Synthetic oligonucleotide
cuuugcucuucuguguaac

SEQ ID NO: 2122555 - RNA, 19 nt, Artificial Sequence
  Description of Artificial Sequence: Synthetic oligonucleotide
gaagucuucugguguggca

SEQ ID NO: 2122556 - RNA, 19 nt, Artificial Sequence
  Description of Artificial Sequence: Synthetic oligonucleotide
uaucgaugccccacugcgu

SEQ ID NO: 2122557 - RNA, 19 nt, Artificial Sequence
  Description of Artificial Sequence: Synthetic oligonucleotide
ucuauguucuggguggcuu

SEQ ID NO: 2122558 - RNA, 19 nt, Artificial Sequence
  Description of Artificial Sequence: Synthetic oligonucleotide
cauuuuggugauggcgucc

SEQ ID NO: 2122559 - RNA, 19 nt, Artificial Sequence
  Description of Artificial Sequence: Synthetic oligonucleotide
guggaaagaaacgcuuuac

SEQ ID NO: 2122560 - RNA, 19 nt, Artificial Sequence
  Description of Artificial Sequence: Synthetic oligonucleotide
agcucauggugcagggacc

SEQ ID NO: 2122561 - RNA, 19 nt, Artificial Sequence
  Description of Artificial Sequence: Synthetic oligonucleotide
cuaccaucugggcucuccc

SEQ ID NO: 2122562 - RNA, 19 nt, Artificial Sequence
  Description of Artificial Sequence: Synthetic oligonucleotide
auggcgucccucugauccg

SEQ ID NO: 2122563 - RNA, 19 nt, Artificial Sequence
  Description of Artificial Sequence: Synthetic oligonucleotide
ucugcggauacgaguccac

SEQ ID NO: 2122564 - RNA, 19 nt, Artificial Sequence
  Description of Artificial Sequence: Synthetic oligonucleotide
ucugaccgucauacauucc

SEQ ID NO: 2122565 - RNA, 19 nt, Artificial Sequence
  Description of Artificial Sequence: Synthetic oligonucleotide
gacguaggaaguagggaca

SEQ ID NO: 2122566 - RNA, 19 nt, Artificial Sequence
  Description of Artificial Sequence: Synthetic oligonucleotide
ugugucugaccgucauaca

SEQ ID NO: 2122567 - RNA, 19 nt, Artificial Sequence
  Description of Artificial Sequence: Synthetic oligonucleotide
caucgaaauccguggccag

SEQ ID NO: 2122568 - RNA, 19 nt, Artificial Sequence
  Description of Artificial Sequence: Synthetic oligonucleotide
ggaaagaaacgcuuuacau

SEQ ID NO: 2122569 - RNA, 19 nt, Artificial Sequence
  Description of Artificial Sequence: Synthetic oligonucleotide
aucgcaucagguccaccgu

SEQ ID NO: 2122570 - RNA, 19 nt, Artificial Sequence
  Description of Artificial Sequence: Synthetic oligonucleotide
uacauuccgcucugccggc

SEQ ID NO: 2122571 - RNA, 19 nt, Artificial Sequence
  Description of Artificial Sequence: Synthetic oligonucleotide
caaauucgucaucgaaauc

SEQ ID NO: 2122572 - RNA, 19 nt, Artificial Sequence
  Description of Artificial Sequence: Synthetic oligonucleotide
aggucccaauggcaggaag

SEQ ID NO: 2122573 - RNA, 19 nt, Artificial Sequence
  Description of Artificial Sequence: Synthetic oligonucleotide
ucucccaucugaggguucu

SEQ ID NO: 2122574 - RNA, 19 nt, Artificial Sequence
  Description of Artificial Sequence: Synthetic oligonucleotide
cgacguaggaaguagggac

SEQ ID NO: 2122575 - RNA, 19 nt, Artificial Sequence
  Description of Artificial Sequence: Synthetic oligonucleotide
uggugugucugaccgucau

SEQ ID NO: 2122576 - RNA, 19 nt, Artificial Sequence
  Description of Artificial Sequence: Synthetic oligonucleotide
ugggcgcaauuagugacug

SEQ ID NO: 2122577 - RNA, 19 nt, Artificial Sequence
  Description of Artificial Sequence: Synthetic oligonucleotide
aucacuccgugcugggagu

SEQ ID NO: 2122578 - RNA, 19 nt, Artificial Sequence
  Description of Artificial Sequence: Synthetic oligonucleotide
ucucuauguucuggguggc

SEQ ID NO: 2122579 - RNA, 19 nt, Artificial Sequence
  Description of Artificial Sequence: Synthetic oligonucleotide
uucucggagaugaccucau

SEQ ID NO: 2122580 - RNA, 19 nt, Artificial Sequence
  Description of Artificial Sequence: Synthetic oligonucleotide
cauucaucucauucaaggu

SEQ ID NO: 2122581 - RNA, 19 nt, Artificial Sequence
  Description of Artificial Sequence: Synthetic oligonucleotide
caagguggaaagaaacgcu

SEQ ID NO: 2122582 - RNA, 19 nt, Artificial Sequence
  Description of Artificial Sequence: Synthetic oligonucleotide
cauuucugcggauacgagu

SEQ ID NO: 2122583 - RNA, 19 nt, Artificial Sequence
  Description of Artificial Sequence: Synthetic oligonucleotide
ucccaucugaggguucuug

SEQ ID NO: 2122584 - RNA, 19 nt, Artificial Sequence
  Description of Artificial Sequence: Synthetic oligonucleotide
cugauccgucuccuuuugg

SEQ ID NO: 2122585 - RNA, 19 nt, Artificial Sequence
  Description of Artificial Sequence: Synthetic oligonucleotide
cugggagucugccuuccac

SEQ ID NO: 2122586 - RNA, 19 nt, Artificial Sequence
  Description of Artificial Sequence: Synthetic oligonucleotide
cucaaugacgcucagcauu

SEQ ID NO: 2122587 - RNA, 19 nt, Artificial Sequence
  Description of Artificial Sequence: Synthetic oligonucleotide
agccgcaguuucucuaugu

SEQ ID NO: 2122588 - RNA, 19 nt, Artificial Sequence
  Description of Artificial Sequence: Synthetic oligonucleotide
auucugaccuucaaaugua

SEQ ID NO: 2122589 - RNA, 19 nt, Artificial Sequence
  Description of Artificial Sequence: Synthetic oligonucleotide
caauuagugacugucuggu

SEQ ID NO: 2122590 - RNA, 19 nt, Artificial Sequence
  Description of Artificial Sequence: Synthetic oligonucleotide
auagagggccuugcagguc

SEQ ID NO: 2122591 - RNA, 19 nt, Artificial Sequence
  Description of Artificial Sequence: Synthetic oligonucleotide
acauaucgcaucaggucca

SEQ ID NO: 2122592 - RNA, 19 nt, Artificial Sequence
  Description of Artificial Sequence: Synthetic oligonucleotide
ugggcucucccggucuugg

SEQ ID NO: 2122593 - RNA, 19 nt, Artificial Sequence
  Description of Artificial Sequence: Synthetic oligonucleotide
ggcgcaauuagugacuguc

SEQ ID NO: 2122594 - RNA, 19 nt, Artificial Sequence
  Description of Artificial Sequence: Synthetic oligonucleotide
uucuugagguacacaucuu

SEQ ID NO: 2122595 - RNA, 19 nt, Artificial Sequence
  Description of Artificial Sequence: Synthetic oligonucleotide
gaagggccccgacccuucg

SEQ ID NO: 2122596 - RNA, 19 nt, Artificial Sequence
  Description of Artificial Sequence: Synthetic oligonucleotide
ugcugcccggcauagucau

SEQ ID NO: 2122597 - RNA, 19 nt, Artificial Sequence
  Description of Artificial Sequence: Synthetic oligonucleotide
ggcauagcugagcucaauc

SEQ ID NO: 2122598 - RNA, 19 nt, Artificial Sequence
  Description of Artificial Sequence: Synthetic oligonucleotide
agagcucggugccccagcu

SEQ ID NO: 2122599 - RNA, 19 nt, Artificial Sequence
  Description of Artificial Sequence: Synthetic oligonucleotide
uacuuguauucuucuucuu

SEQ ID NO: 2122600 - RNA, 19 nt, Artificial Sequence
  Description of Artificial Sequence: Synthetic oligonucleotide
uuuuggugauggcgucccu

SEQ ID NO: 2122601 - RNA, 19 nt, Artificial Sequence
  Description of Artificial Sequence: Synthetic oligonucleotide
gugccugaucacuccgugc

SEQ ID NO: 2122602 - RNA, 19 nt, Artificial Sequence
  Description of Artificial Sequence: Synthetic oligonucleotide
gaagguugcugaagucuuc

SEQ ID NO: 2122603 - RNA, 19 nt, Artificial Sequence
  Description of Artificial Sequence: Synthetic oligonucleotide
acgcuuuacaugccgugua

SEQ ID NO: 2122604 - RNA, 19 nt, Artificial Sequence
  Description of Artificial Sequence: Synthetic oligonucleotide
uucugguguggcaccccga

SEQ ID NO: 2122605 - RNA, 19 nt, Artificial Sequence
  Description of Artificial Sequence: Synthetic oligonucleotide
gugucugaccgucauacau

SEQ ID NO: 2122606 - RNA, 19 nt, Artificial Sequence
  Description of Artificial Sequence: Synthetic oligonucleotide
cugcccggcauagucauuc

SEQ ID NO: 2122607 - RNA, 19 nt, Artificial Sequence
  Description of Artificial Sequence: Synthetic oligonucleotide
gugaucugcgaugucaugu

SEQ ID NO: 2122608 - RNA, 19 nt, Artificial Sequence
  Description of Artificial Sequence: Synthetic oligonucleotide
cuugagcuccuguacauau

SEQ ID NO: 2122609 - RNA, 19 nt, Artificial Sequence
  Description of Artificial Sequence: Synthetic oligonucleotide
cugcgaugucauguucucg

SEQ ID NO: 2122610 - RNA, 19 nt, Artificial Sequence
  Description of Artificial Sequence: Synthetic oligonucleotide
caagaauaucgaugcccca

SEQ ID NO: 2122611 - RNA, 19 nt, Artificial Sequence
  Description of Artificial Sequence: Synthetic oligonucleotide
caaguuugugguccaagcu

SEQ ID NO: 2122612 - RNA, 19 nt, Artificial Sequence
  Description of Artificial Sequence: Synthetic oligonucleotide
ccuucgaguucuucuuggg

SEQ ID NO: 2122613 - RNA, 19 nt, Artificial Sequence
  Description of Artificial Sequence: Synthetic oligonucleotide
ugaucacuccgugcuggga

SEQ ID NO: 2122614 - RNA, 19 nt, Artificial Sequence
  Description of Artificial Sequence: Synthetic oligonucleotide
gguggaaagaaacgcuuua

SEQ ID NO: 2122615 - RNA, 19 nt, Artificial Sequence
  Description of Artificial Sequence: Synthetic oligonucleotide
gcucauggugcagggaccg

SEQ ID NO: 2122616 - RNA, 19 nt, Artificial Sequence
  Description of Artificial Sequence: Synthetic oligonucleotide
cucaugcugcccggcauag

SEQ ID NO: 2122617 - RNA, 19 nt, Artificial Sequence
  Description of Artificial Sequence: Synthetic oligonucleotide
uaacuaccaucugggcucu

SEQ ID NO: 2122618 - RNA, 19 nt, Artificial Sequence
  Description of Artificial Sequence: Synthetic oligonucleotide
ccugaucacuccgugcugg

SEQ ID NO: 2122619 - RNA, 19 nt, Artificial Sequence
  Description of Artificial Sequence: Synthetic oligonucleotide
ggguucuugagguacacau

SEQ ID NO: 2122620 - RNA, 19 nt, Artificial Sequence
  Description of Artificial Sequence: Synthetic oligonucleotide
ucugccggcgugccugauc

SEQ ID NO: 2122621 - RNA, 19 nt, Artificial Sequence
  Description of Artificial Sequence: Synthetic oligonucleotide
gagguacacaucuuucauu

SEQ ID NO: 2122622 - RNA, 19 nt, Artificial Sequence
  Description of Artificial Sequence: Synthetic oligonucleotide
ccucgucuucauuucugcg

SEQ ID NO: 2122623 - RNA, 19 nt, Artificial Sequence
  Description of Artificial Sequence: Synthetic oligonucleotide
cugccggcgugccugauca

SEQ ID NO: 2122624 - RNA, 19 nt, Artificial Sequence
  Description of Artificial Sequence: Synthetic oligonucleotide
cugcggauacgaguccacc

SEQ ID NO: 2122625 - RNA, 19 nt, Artificial Sequence
  Description of Artificial Sequence: Synthetic oligonucleotide
ggccuugcaggucccaaug

SEQ ID NO: 2122626 - RNA, 19 nt, Artificial Sequence
  Description of Artificial Sequence: Synthetic oligonucleotide
uccgugcugggagucugcc

SEQ ID NO: 2122627 - RNA, 19 nt, Artificial Sequence
  Description of Artificial Sequence: Synthetic oligonucleotide
gaccgucauacauuccgcu

SEQ ID NO: 2122628 - RNA, 19 nt, Artificial Sequence
  Description of Artificial Sequence: Synthetic oligonucleotide
cuuuacaugccguguacuu

SEQ ID NO: 2122629 - RNA, 19 nt, Artificial Sequence
  Description of Artificial Sequence: Synthetic oligonucleotide
ggcgugccugaucacuccg

SEQ ID NO: 2122630 - RNA, 19 nt, Artificial Sequence
  Description of Artificial Sequence: Synthetic oligonucleotide
ccccgauuuccuuucuugc

SEQ ID NO: 2122631 - RNA, 19 nt, Artificial Sequence
  Description of Artificial Sequence: Synthetic oligonucleotide
cauaucgcaucagguccac

SEQ ID NO: 2122632 - RNA, 19 nt, Artificial Sequence
  Description of Artificial Sequence: Synthetic oligonucleotide
ggugauggcgucccucuga

SEQ ID NO: 2122633 - RNA, 19 nt, Artificial Sequence
  Description of Artificial Sequence: Synthetic oligonucleotide
uccguggccagcgccuuga

SEQ ID NO: 2122634 - RNA, 19 nt, Artificial Sequence
  Description of Artificial Sequence: Synthetic oligonucleotide
gaccucaugcugcccggca

SEQ ID NO: 2122635 - RNA, 19 nt, Artificial Sequence
  Description of Artificial Sequence: Synthetic oligonucleotide
acguaggaaguagggacau

SEQ ID NO: 2122636 - RNA, 19 nt, Artificial Sequence
  Description of Artificial Sequence: Synthetic oligonucleotide
cgcaauuagugacugucug

SEQ ID NO: 2122637 - RNA, 19 nt, Artificial Sequence
  Description of Artificial Sequence: Synthetic oligonucleotide
agccaggccucaaacuucu

SEQ ID NO: 2122638 - RNA, 19 nt, Artificial Sequence
  Description of Artificial Sequence: Synthetic oligonucleotide
gcggauacgaguccaccca

SEQ ID NO: 2122639 - RNA, 19 nt, Artificial Sequence
  Description of Artificial Sequence: Synthetic oligonucleotide
ucgaugccccacugcgugu

SEQ ID NO: 2122640 - RNA, 19 nt, Artificial Sequence
  Description of Artificial Sequence: Synthetic oligonucleotide
cccggcauagucauucauc

SEQ ID NO: 2122641 - RNA, 19 nt, Artificial Sequence
  Description of Artificial Sequence: Synthetic oligonucleotide
uacaugccguguacuugua

SEQ ID NO: 2122642 - RNA, 19 nt, Artificial Sequence
  Description of Artificial Sequence: Synthetic oligonucleotide
gucuucugguguggcaccc

SEQ ID NO: 2122643 - RNA, 19 nt, Artificial Sequence
  Description of Artificial Sequence: Synthetic oligonucleotide
uguccuccucaaugacgcu

SEQ ID NO: 2122644 - RNA, 19 nt, Artificial Sequence
  Description of Artificial Sequence: Synthetic oligonucleotide
acauuccgcucugccggcg

SEQ ID NO: 2122645 - RNA, 19 nt, Artificial Sequence
  Description of Artificial Sequence: Synthetic oligonucleotide
caugccguguacuuguauu

SEQ ID NO: 2122646 - RNA, 19 nt, Artificial Sequence
  Description of Artificial Sequence: Synthetic oligonucleotide
uagugacugucuggugugu

SEQ ID NO: 2122647 - RNA, 19 nt, Artificial Sequence
  Description of Artificial Sequence: Synthetic oligonucleotide
acuccgugcugggagucug

SEQ ID NO: 2122648 - RNA, 19 nt, Artificial Sequence
  Description of Artificial Sequence: Synthetic oligonucleotide
agacuucgacguaggaagu

SEQ ID NO: 2122649 - RNA, 19 nt, Artificial Sequence
  Description of Artificial Sequence: Synthetic oligonucleotide
agguggaaagaaacgcuuu

SEQ ID NO: 2122650 - RNA, 19 nt, Artificial Sequence
  Description of Artificial Sequence: Synthetic oligonucleotide
ccguguacuuguauucuuc

SEQ ID NO: 2122651 - RNA, 19 nt, Artificial Sequence
  Description of Artificial Sequence: Synthetic oligonucleotide
ugcccggcauagucauuca

SEQ ID NO: 2122652 - RNA, 19 nt, Artificial Sequence
  Description of Artificial Sequence: Synthetic oligonucleotide
ccucuccuugacaaacuug

SEQ ID NO: 2122653 - RNA, 19 nt, Artificial Sequence
  Description of Artificial Sequence: Synthetic oligonucleotide
uggcaccccgauuuccuuu

SEQ ID NO: 2122654 - RNA, 19 nt, Artificial Sequence
  Description of Artificial Sequence: Synthetic oligonucleotide
auucgucaucgaaauccgu

SEQ ID NO: 2122655 - RNA, 19 nt, Artificial Sequence
  Description of Artificial Sequence: Synthetic oligonucleotide
agagggccuugcagguccc

SEQ ID NO: 2122656 - RNA, 19 nt, Artificial Sequence
  Description of Artificial Sequence: Synthetic oligonucleotide
cuucgaguucuucuugggu

SEQ ID NO: 2122657 - RNA, 19 nt, Artificial Sequence
  Description of Artificial Sequence: Synthetic oligonucleotide
gguucuugagguacacauc

SEQ ID NO: 2122658 - RNA, 19 nt, Artificial Sequence
  Description of Artificial Sequence: Synthetic oligonucleotide
ggaucucuuuauugagcuc

SEQ ID NO: 2122659 - RNA, 19 nt, Artificial Sequence
  Description of Artificial Sequence: Synthetic oligonucleotide
gucauacauuccgcucugc

SEQ ID NO: 2122660 - RNA, 19 nt, Artificial Sequence
  Description of Artificial Sequence: Synthetic oligonucleotide
gaguccacccaucacccuu

SEQ ID NO: 2122661 - RNA, 19 nt, Artificial Sequence
  Description of Artificial Sequence: Synthetic oligonucleotide
cuuccuucgaguucuucuu

SEQ ID NO: 2122662 - RNA, 19 nt, Artificial Sequence
  Description of Artificial Sequence: Synthetic oligonucleotide
agcggcuccuccucaucaa

SEQ ID NO: 2122663 - RNA, 19 nt, Artificial Sequence
  Description of Artificial Sequence: Synthetic oligonucleotide
guguggcaccccgauuucc

SEQ ID NO: 2122664 - RNA, 19 nt, Artificial Sequence
  Description of Artificial Sequence: Synthetic oligonucleotide
gacuucgacguaggaagua

SEQ ID NO: 2122665 - RNA, 19 nt, Artificial Sequence
  Description of Artificial Sequence: Synthetic oligonucleotide
cacccaucacccuuguccu

SEQ ID NO: 2122666 - RNA, 19 nt, Artificial Sequence
  Description of Artificial Sequence: Synthetic oligonucleotide
uuccgcucugccggcgugc

SEQ ID NO: 2122667 - RNA, 19 nt, Artificial Sequence
  Description of Artificial Sequence: Synthetic oligonucleotide
caccucagccagccaggcc

SEQ ID NO: 2122668 - RNA, 19 nt, Artificial Sequence
  Description of Artificial Sequence: Synthetic oligonucleotide
acccuucgccggugaucgc

SEQ ID NO: 2122669 - RNA, 19 nt, Artificial Sequence
  Description of Artificial Sequence: Synthetic oligonucleotide
aauccguggccagcgccuu

SEQ ID NO: 2122670 - RNA, 19 nt, Artificial Sequence
  Description of Artificial Sequence: Synthetic oligonucleotide
ggguugguauuucuuugaa

SEQ ID NO: 2122671 - RNA, 19 nt, Artificial Sequence
  Description of Artificial Sequence: Synthetic oligonucleotide
aacuaccaucugggcucuc

SEQ ID NO: 2122672 - RNA, 19 nt, Artificial Sequence
  Description of Artificial Sequence: Synthetic oligonucleotide
ggcaccccgauuuccuuuc

SEQ ID NO: 2122673 - RNA, 19 nt, Artificial Sequence
  Description of Artificial Sequence: Synthetic oligonucleotide
ugccccacugcguguguuu

SEQ ID NO: 2122674 - RNA, 19 nt, Artificial Sequence
  Description of Artificial Sequence: Synthetic oligonucleotide
cacggaaauggugccuuca

SEQ ID NO: 2122675 - RNA, 19 nt, Artificial Sequence
  Description of Artificial Sequence: Synthetic oligonucleotide
ucacuccgugcugggaguc

SEQ ID NO: 2122676 - RNA, 19 nt, Artificial Sequence
  Description of Artificial Sequence: Synthetic oligonucleotide
cgucaucgaaauccguggc

SEQ ID NO: 2122677 - RNA, 19 nt, Artificial Sequence
  Description of Artificial Sequence: Synthetic oligonucleotide
ggccccgacccuucgccgg

SEQ ID NO: 2122678 - RNA, 19 nt, Artificial Sequence
  Description of Artificial Sequence: Synthetic oligonucleotide
cggucuugggcgcaauuag

SEQ ID NO: 2122679 - RNA, 19 nt, Artificial Sequence
  Description of Artificial Sequence: Synthetic oligonucleotide
caauggcaggaagcggcuc

SEQ ID NO: 2122680 - RNA, 19 nt, Artificial Sequence
  Description of Artificial Sequence: Synthetic oligonucleotide
ccggcauagucauucaucu

SEQ ID NO: 2122681 - RNA, 19 nt, Artificial Sequence
  Description of Artificial Sequence: Synthetic oligonucleotide
ucaugcugcccggcauagu

SEQ ID NO: 2122682 - RNA, 19 nt, Artificial Sequence
  Description of Artificial Sequence: Synthetic oligonucleotide
gagcucggugccccagcuc

SEQ ID NO: 2122683 - RNA, 19 nt, Artificial Sequence
  Description of Artificial Sequence: Synthetic oligonucleotide
gagcucaaucucaguccuc

SEQ ID NO: 2122684 - RNA, 19 nt, Artificial Sequence
  Description of Artificial Sequence: Synthetic oligonucleotide
ucucccggucuugggcgca

SEQ ID NO: 2122685 - RNA, 19 nt, Artificial Sequence
  Description of Artificial Sequence: Synthetic oligonucleotide
ggccgggucucccaucuga

SEQ ID NO: 2122686 - RNA, 19 nt, Artificial Sequence
  Description of Artificial Sequence: Synthetic oligonucleotide
uggguggcuucagcaaguu

SEQ ID NO: 2122687 - RNA, 19 nt, Artificial Sequence
  Description of Artificial Sequence: Synthetic oligonucleotide
gccucaaacuucugugucu

SEQ ID NO: 2122688 - RNA, 19 nt, Artificial Sequence
  Description of Artificial Sequence: Synthetic oligonucleotide
cuggugugucugaccguca

SEQ ID NO: 2122689 - RNA, 19 nt, Artificial Sequence
  Description of Artificial Sequence: Synthetic oligonucleotide
gcgaugucauguucucgga

SEQ ID NO: 2122690 - RNA, 19 nt, Artificial Sequence
  Description of Artificial Sequence: Synthetic oligonucleotide
caaugacgcucagcauuuc

SEQ ID NO: 2122691 - RNA, 19 nt, Artificial Sequence
  Description of Artificial Sequence: Synthetic oligonucleotide
ggagucugccuuccaccuc

SEQ ID NO: 2122692 - RNA, 19 nt, Artificial Sequence
  Description of Artificial Sequence: Synthetic oligonucleotide
cgcuuuacaugccguguac

SEQ ID NO: 2122693 - RNA, 19 nt, Artificial Sequence
  Description of Artificial Sequence: Synthetic oligonucleotide
ccugagcugcuuggcauag

SEQ ID NO: 2122694 - RNA, 19 nt, Artificial Sequence
  Description of Artificial Sequence: Synthetic oligonucleotide
cucugauccgucuccuuuu

SEQ ID NO: 2122695 - RNA, 19 nt, Artificial Sequence
  Description of Artificial Sequence: Synthetic oligonucleotide
gccugaucacuccgugcug

SEQ ID NO: 2122696 - RNA, 19 nt, Artificial Sequence
  Description of Artificial Sequence: Synthetic oligonucleotide
ggauacgaguccacccauc

SEQ ID NO: 2122697 - RNA, 19 nt, Artificial Sequence
  Description of Artificial Sequence: Synthetic oligonucleotide
gcaggucccaauggcagga

SEQ ID NO: 2122698 - RNA, 19 nt, Artificial Sequence
  Description of Artificial Sequence: Synthetic oligonucleotide
cgucauacauuccgcucug

SEQ ID NO: 2122699 - RNA, 19 nt, Artificial Sequence
  Description of Artificial Sequence: Synthetic oligonucleotide
gcuuugcucuucuguguaa

SEQ ID NO: 2122700 - RNA, 19 nt, Artificial Sequence
  Description of Artificial Sequence: Synthetic oligonucleotide
agucugccuuccaccucag

SEQ ID NO: 2122701 - RNA, 19 nt, Artificial Sequence
  Description of Artificial Sequence: Synthetic oligonucleotide
cagggaccggaagggcccc

SEQ ID NO: 2122702 - RNA, 19 nt, Artificial Sequence
  Description of Artificial Sequence: Synthetic oligonucleotide
caguccucuccuugacaaa

SEQ ID NO: 2122703 - RNA, 19 nt, Artificial Sequence
  Description of Artificial Sequence: Synthetic oligonucleotide
ccuucgccggugaucgcug

SEQ ID NO: 2122704 - RNA, 19 nt, Artificial Sequence
  Description of Artificial Sequence: Synthetic oligonucleotide
agggaccggaagggccccg

SEQ ID NO: 2122705 - RNA, 19 nt, Artificial Sequence
  Description of Artificial Sequence: Synthetic oligonucleotide
ccgucauacauuccgcucu

SEQ ID NO: 2122706 - RNA, 19 nt, Artificial Sequence
  Description of Artificial Sequence: Synthetic oligonucleotide
caaauguauagagggccuu

SEQ ID NO: 2122707 - RNA, 19 nt, Artificial Sequence
  Description of Artificial Sequence: Synthetic oligonucleotide
cuccuucuaccacggaaau

SEQ ID NO: 2122708 - RNA, 19 nt, Artificial Sequence
  Description of Artificial Sequence: Synthetic oligonucleotide
cgaguucuucuuggguugg

SEQ ID NO: 2122709 - RNA, 19 nt, Artificial Sequence
  Description of Artificial Sequence: Synthetic oligonucleotide
gccgggucucccaucugag

SEQ ID NO: 2122710 - RNA, 19 nt, Artificial Sequence
  Description of Artificial Sequence: Synthetic oligonucleotide
ggugugucugaccgucaua

SEQ ID NO: 2122711 - RNA, 19 nt, Artificial Sequence
  Description of Artificial Sequence: Synthetic oligonucleotide
ccggcgugccugaucacuc

SEQ ID NO: 2122712 - RNA, 19 nt, Artificial Sequence
  Description of Artificial Sequence: Synthetic oligonucleotide
gaugccccacugcgugugu

SEQ ID NO: 2122713 - RNA, 19 nt, Artificial Sequence
  Description of Artificial Sequence: Synthetic oligonucleotide
gagcucgcucuccuggcuu

SEQ ID NO: 2122714 - RNA, 19 nt, Artificial Sequence
  Description of Artificial Sequence: Synthetic oligonucleotide
gcuuuacaugccguguacu

SEQ ID NO: 2122715 - RNA, 19 nt, Artificial Sequence
  Description of Artificial Sequence: Synthetic oligonucleotide
cccgauuuccuuucuugcu

SEQ ID NO: 2122716 - RNA, 19 nt, Artificial Sequence
  Description of Artificial Sequence: Synthetic oligonucleotide
ggucuugggcgcaauuagu

SEQ ID NO: 2122717 - RNA, 19 nt, Artificial Sequence
  Description of Artificial Sequence: Synthetic oligonucleotide
gucuggugugucugaccgu

SEQ ID NO: 2122718 - RNA, 19 nt, Artificial Sequence
  Description of Artificial Sequence: Synthetic oligonucleotide
caccgugaucugcgauguc

SEQ ID NO: 2122719 - RNA, 19 nt, Artificial Sequence
  Description of Artificial Sequence: Synthetic oligonucleotide
cgaaauccguggccagcgc

SEQ ID NO: 2122720 - RNA, 19 nt, Artificial Sequence
  Description of Artificial Sequence: Synthetic oligonucleotide
cguguacuuguauucuucu

SEQ ID NO: 2122721 - RNA, 19 nt, Artificial Sequence
  Description of Artificial Sequence: Synthetic oligonucleotide
ggaccggaagggccccgac

SEQ ID NO: 2122722 - RNA, 19 nt, Artificial Sequence
  Description of Artificial Sequence: Synthetic oligonucleotide
cauuccgcucugccggcgu

SEQ ID NO: 2122723 - RNA, 19 nt, Artificial Sequence
  Description of Artificial Sequence: Synthetic oligonucleotide
ccacggaaauggugccuuc

SEQ ID NO: 2122724 - RNA, 19 nt, Artificial Sequence
  Description of Artificial Sequence: Synthetic oligonucleotide
gucucccaucugaggguuc

SEQ ID NO: 2122725 - RNA, 19 nt, Artificial Sequence
  Description of Artificial Sequence: Synthetic oligonucleotide
ggaagggccccgacccuuc

SEQ ID NO: 2122726 - RNA, 19 nt, Artificial Sequence
  Description of Artificial Sequence: Synthetic oligonucleotide
guccaccgugaucugcgau

SEQ ID NO: 2122727 - RNA, 19 nt, Artificial Sequence
  Description of Artificial Sequence: Synthetic oligonucleotide
ccuccucaaugacgcucag

SEQ ID NO: 2122728 - RNA, 19 nt, Artificial Sequence
  Description of Artificial Sequence: Synthetic oligonucleotide
gcggcuccuccucaucaaa

SEQ ID NO: 2122729 - RNA, 19 nt, Artificial Sequence
  Description of Artificial Sequence: Synthetic oligonucleotide
gcgcaauuagugacugucu

SEQ ID NO: 2122730 - RNA, 19 nt, Artificial Sequence
  Description of Artificial Sequence: Synthetic oligonucleotide
cgcucugccggcgugccug

SEQ ID NO: 2122731 - RNA, 19 nt, Artificial Sequence
  Description of Artificial Sequence: Synthetic oligonucleotide
cggcgugccugaucacucc

SEQ ID NO: 2122732 - RNA, 19 nt, Artificial Sequence
  Description of Artificial Sequence: Synthetic oligonucleotide
ccaauggcaggaagcggcu

SEQ ID NO: 2122733 - RNA, 19 nt, Artificial Sequence
  Description of Artificial Sequence: Synthetic oligonucleotide
cugugucuccagccgcagu

SEQ ID NO: 2122734 - RNA, 19 nt, Artificial Sequence
  Description of Artificial Sequence: Synthetic oligonucleotide
gccgcaguuucucuauguu

SEQ ID NO: 2122735 - RNA, 19 nt, Artificial Sequence
  Description of Artificial Sequence: Synthetic oligonucleotide
gccguguacuuguauucuu

SEQ ID NO: 2122736 - RNA, 19 nt, Artificial Sequence
  Description of Artificial Sequence: Synthetic oligonucleotide
cagcaaguuugugguccaa

SEQ ID NO: 2122737 - RNA, 19 nt, Artificial Sequence
  Description of Artificial Sequence: Synthetic oligonucleotide
ucccggucuugggcgcaau

SEQ ID NO: 2122738 - RNA, 19 nt, Artificial Sequence
  Description of Artificial Sequence: Synthetic oligonucleotide
ccucaugcugcccggcaua

SEQ ID NO: 2122739 - RNA, 19 nt, Artificial Sequence
  Description of Artificial Sequence: Synthetic oligonucleotide
caggucccaauggcaggaa

SEQ ID NO: 2122740 - RNA, 19 nt, Artificial Sequence
  Description of Artificial Sequence: Synthetic oligonucleotide
ccucugauccgucuccuuu

SEQ ID NO: 2122741 - RNA, 19 nt, Artificial Sequence
  Description of Artificial Sequence: Synthetic oligonucleotide
ccggucuugggcgcaauua

SEQ ID NO: 2122742 - RNA, 19 nt, Artificial Sequence
  Description of Artificial Sequence: Synthetic oligonucleotide
ccgugaucugcgaugucau

SEQ ID NO: 2122743 - RNA, 19 nt, Artificial Sequence
  Description of Artificial Sequence: Synthetic oligonucleotide
gggccuugcaggucccaau

SEQ ID NO: 2122744 - RNA, 19 nt, Artificial Sequence
  Description of Artificial Sequence: Synthetic oligonucleotide
gggaccggaagggccccga

SEQ ID NO: 2122745 - RNA, 19 nt, Artificial Sequence
  Description of Artificial Sequence: Synthetic oligonucleotide
ccaccgugaucugcgaugu

SEQ ID NO: 2122746 - RNA, 19 nt, Artificial Sequence
  Description of Artificial Sequence: Synthetic oligonucleotide
gccggcgugccugaucacu

SEQ ID NO: 2122747 - RNA, 19 nt, Artificial Sequence
  Description of Artificial Sequence: Synthetic oligonucleotide
gcgucccucugauccgucu

SEQ ID NO: 2122748 - RNA, 19 nt, Artificial Sequence
  Description of Artificial Sequence: Synthetic oligonucleotide
caccccgauuuccuuucuu

SEQ ID NO: 2122749 - RNA, 19 nt, Artificial Sequence
  Description of Artificial Sequence: Synthetic oligonucleotide
cacuccgugcugggagucu

SEQ ID NO: 2122750 - RNA, 19 nt, Artificial Sequence
  Description of Artificial Sequence: Synthetic oligonucleotide
ccagcucauggugcaggga

SEQ ID NO: 2122751 - RNA, 19 nt, Artificial Sequence
  Description of Artificial Sequence: Synthetic oligonucleotide
gccaggccucaaacuucug

SEQ ID NO: 2122752 - RNA, 19 nt, Artificial Sequence
  Description of Artificial Sequence: Synthetic oligonucleotide
gggcgcaauuagugacugu

SEQ ID NO: 2122753 - RNA, 19 nt, Artificial Sequence
  Description of Artificial Sequence: Synthetic oligonucleotide
gcccggcauagucauucau

SEQ ID NO: 2122754 - RNA, 19 nt, Artificial Sequence
  Description of Artificial Sequence: Synthetic oligonucleotide
ggcgucccucugauccguc

SEQ ID NO: 2122755 - RNA, 19 nt, Artificial Sequence
  Description of Artificial Sequence: Synthetic oligonucleotide
cccuucgccggugaucgcu

SEQ ID NO: 2122756 - RNA, 19 nt, Artificial Sequence
  Description of Artificial Sequence: Synthetic oligonucleotide
gcgugccugaucacuccgu

SEQ ID NO: 2122757 - RNA, 19 nt, Artificial Sequence
  Description of Artificial Sequence: Synthetic oligonucleotide
cccgacccuucgccgguga

SEQ ID NO: 2122758 - RNA, 19 nt, Artificial Sequence
  Description of Artificial Sequence: Synthetic oligonucleotide
ccgugcugggagucugccu

SEQ ID NO: 2122759 - RNA, 19 nt, Artificial Sequence
  Description of Artificial Sequence: Synthetic oligonucleotide
cggauacgaguccacccau

SEQ ID NO: 2122760 - RNA, 19 nt, Artificial Sequence
  Description of Artificial Sequence: Synthetic oligonucleotide
cguaggaaguagggacaua

SEQ ID NO: 2122761 - RNA, 19 nt, Artificial Sequence
  Description of Artificial Sequence: Synthetic oligonucleotide
cggcuccuccucaucaaau

SEQ ID NO: 2122762 - RNA, 19 nt, Artificial Sequence
  Description of Artificial Sequence: Synthetic oligonucleotide
ccccgacccuucgccggug

SEQ ID NO: 2122763 - RNA, 19 nt, Artificial Sequence
  Description of Artificial Sequence: Synthetic oligonucleotide
ccggaagggccccgacccu

SEQ ID NO: 2122764 - RNA, 19 nt, Artificial Sequence
  Description of Artificial Sequence: Synthetic oligonucleotide
gcucggugccccagcucau

SEQ ID NO: 2122765 - RNA, 19 nt, Artificial Sequence
  Description of Artificial Sequence: Synthetic oligonucleotide
cggugccccagcucauggu

SEQ ID NO: 2122766 - RNA, 19 nt, Artificial Sequence
  Description of Artificial Sequence: Synthetic oligonucleotide
cccggucuugggcgcaauu

SEQ ID NO: 2122767 - RNA, 19 nt, Artificial Sequence
  Description of Artificial Sequence: Synthetic oligonucleotide
ccgacccuucgccggugau

SEQ ID NO: 2122768 - RNA, 19 nt, Artificial Sequence
  Description of Artificial Sequence: Synthetic oligonucleotide
gcugcccggcauagucauu

SEQ ID NO: 2122769 - RNA, 19 nt, Artificial Sequence
  Description of Artificial Sequence: Synthetic oligonucleotide
cggaagggccccgacccuu

SEQ ID NO: 2122770 - RNA, 19 nt, Artificial Sequence
  Description of Artificial Sequence: Synthetic oligonucleotide
aaacuaggcauuuagauuc

SEQ ID NO: 2122771 - RNA, 19 nt, Artificial Sequence
  Description of Artificial Sequence: Synthetic oligonucleotide
uaaauuuucaaugacaggg

SEQ ID NO: 2122772 - RNA, 19 nt, Artificial Sequence
  Description of Artificial Sequence: Synthetic oligonucleotide
uuuauauccgcgaagaucc

SEQ ID NO: 2122773 - RNA, 19 nt, Artificial Sequence
  Description of Artificial Sequence: Synthetic oligonucleotide
aauuccauguugcugauac

SEQ ID NO: 2122774 - RNA, 19 nt, Artificial Sequence
  Description of Artificial Sequence: Synthetic oligonucleotide
acuaauaauguuuucaguc

SEQ ID NO: 2122775 - RNA, 19 nt, Artificial Sequence
  Description of Artificial Sequence: Synthetic oligonucleotide
aaaucaauagcaucaaacu

SEQ ID NO: 2122776 - RNA, 19 nt, Artificial Sequence
  Description of Artificial Sequence: Synthetic oligonucleotide
uguagaucacauaaagucg

SEQ ID NO: 2122777 - RNA, 19 nt, Artificial Sequence
  Description of Artificial Sequence: Synthetic oligonucleotide
uuguuguucacuaauaaug

SEQ ID NO: 2122778 - RNA, 19 nt, Artificial Sequence
  Description of Artificial Sequence: Synthetic oligonucleotide
aaugacagggauuuuauau

SEQ ID NO: 2122779 - RNA, 19 nt, Artificial Sequence
  Description of Artificial Sequence: Synthetic oligonucleotide
ucagucuucucaauaaagg

SEQ ID NO: 2122780 - RNA, 19 nt, Artificial Sequence
  Description of Artificial Sequence: Synthetic oligonucleotide
cuugauugcuucuacaucc

SEQ ID NO: 2122781 - RNA, 19 nt, Artificial Sequence
  Description of Artificial Sequence: Synthetic oligonucleotide
aacuuuguagaucacauaa

SEQ ID NO: 2122782 - RNA, 19 nt, Artificial Sequence
  Description of Artificial Sequence: Synthetic oligonucleotide
uaagguagcaccuaaauuu

SEQ ID NO: 2122783 - RNA, 19 nt, Artificial Sequence
  Description of Artificial Sequence: Synthetic oligonucleotide
uccgcgaagauccagcucg

SEQ ID NO: 2122784 - RNA, 19 nt, Artificial Sequence
  Description of Artificial Sequence: Synthetic oligonucleotide
uuuguagaaaacuaggcau

SEQ ID NO: 2122785 - RNA, 19 nt, Artificial Sequence
  Description of Artificial Sequence: Synthetic oligonucleotide
aucaauagcaucaaacugg

SEQ ID NO: 2122786 - RNA, 19 nt, Artificial Sequence
  Description of Artificial Sequence: Synthetic oligonucleotide
aaaaguuuugcuucuccug

SEQ ID NO: 2122787 - RNA, 19 nt, Artificial Sequence
  Description of Artificial Sequence: Synthetic oligonucleotide
acuggucuaagguagcacc

SEQ ID NO: 2122788 - RNA, 19 nt, Artificial Sequence
  Description of Artificial Sequence: Synthetic oligonucleotide
acaaauuccauguugcuga

SEQ ID NO: 2122789 - RNA, 19 nt, Artificial Sequence
  Description of Artificial Sequence: Synthetic oligonucleotide
uguggaacuuuguagauca

SEQ ID NO: 2122790 - RNA, 19 nt, Artificial Sequence
  Description of Artificial Sequence: Synthetic oligonucleotide
ugucagacagggaagagcc

SEQ ID NO: 2122791 - RNA, 19 nt, Artificial Sequence
  Description of Artificial Sequence: Synthetic oligonucleotide
uuagugauuugagagaugc

SEQ ID NO: 2122792 - RNA, 19 nt, Artificial Sequence
  Description of Artificial Sequence: Synthetic oligonucleotide
agcaccuaaauuuucaaug

SEQ ID NO: 2122793 - RNA, 19 nt, Artificial Sequence
  Description of Artificial Sequence: Synthetic oligonucleotide
aaaaccauccaguuuccug

SEQ ID NO: 2122794 - RNA, 19 nt, Artificial Sequence
  Description of Artificial Sequence: Synthetic oligonucleotide
ucuuaggaugcuuagauau

SEQ ID NO: 2122795 - RNA, 19 nt, Artificial Sequence
  Description of Artificial Sequence: Synthetic oligonucleotide
aaaccauccaguuuccuga

SEQ ID NO: 2122796 - RNA, 19 nt, Artificial Sequence
  Description of Artificial Sequence: Synthetic oligonucleotide
ucaauaaaggaaaaccauc

SEQ ID NO: 2122797 - RNA, 19 nt, Artificial Sequence
  Description of Artificial Sequence: Synthetic oligonucleotide
aaaagcaagacuugucccu

SEQ ID NO: 2122798 - RNA, 19 nt, Artificial Sequence
  Description of Artificial Sequence: Synthetic oligonucleotide
uguuguucacuaauaaugu

SEQ ID NO: 2122799 - RNA, 19 nt, Artificial Sequence
  Description of Artificial Sequence: Synthetic oligonucleotide
agccuauuagaccaucugc

SEQ ID NO: 2122800 - RNA, 19 nt, Artificial Sequence
  Description of Artificial Sequence: Synthetic oligonucleotide
aaguccagaacucugacuu

SEQ ID NO: 2122801 - RNA, 19 nt, Artificial Sequence
  Description of Artificial Sequence: Synthetic oligonucleotide
aaaacuaggcauuuagauu

SEQ ID NO: 2122802 - RNA, 19 nt, Artificial Sequence
  Description of Artificial Sequence: Synthetic oligonucleotide
ucugccagguaucuggccg

SEQ ID NO: 2122803 - RNA, 19 nt, Artificial Sequence
  Description of Artificial Sequence: Synthetic oligonucleotide
uauacggcaaauucuguug

SEQ ID NO: 2122804 - RNA, 19 nt, Artificial Sequence
  Description of Artificial Sequence: Synthetic oligonucleotide
uuagauauguuagugauuu

SEQ ID NO: 2122805 - RNA, 19 nt, Artificial Sequence
  Description of Artificial Sequence: Synthetic oligonucleotide
uccacuagacuguuguugg

SEQ ID NO: 2122806 - RNA, 19 nt, Artificial Sequence
  Description of Artificial Sequence: Synthetic oligonucleotide
uccuauacggcaaauucug

SEQ ID NO: 2122807 - RNA, 19 nt, Artificial Sequence
  Description of Artificial Sequence: Synthetic oligonucleotide
ucuuauuuguuacaggauu

SEQ ID NO: 2122808 - RNA, 19 nt, Artificial Sequence
  Description of Artificial Sequence: Synthetic oligonucleotide
uguuacuccaugcucaaaa

SEQ ID NO: 2122809 - RNA, 19 nt, Artificial Sequence
  Description of Artificial Sequence: Synthetic oligonucleotide
cauuuagauuccaagguac

SEQ ID NO: 2122810 - RNA, 19 nt, Artificial Sequence
  Description of Artificial Sequence: Synthetic oligonucleotide
guagaucacauaaagucgg

SEQ ID NO: 2122811 - RNA, 19 nt, Artificial Sequence
  Description of Artificial Sequence: Synthetic oligonucleotide
aaaauuaccagcaguaguu

SEQ ID NO: 2122812 - RNA, 19 nt, Artificial Sequence
  Description of Artificial Sequence: Synthetic oligonucleotide
uggauuaaaaguuuugcuu

SEQ ID NO: 2122813 - RNA, 19 nt, Artificial Sequence
  Description of Artificial Sequence: Synthetic oligonucleotide
ucuccuauacggcaaauuc

SEQ ID NO: 2122814 - RNA, 19 nt, Artificial Sequence
  Description of Artificial Sequence: Synthetic oligonucleotide
cuaaauuuucaaugacagg

SEQ ID NO: 2122815 - RNA, 19 nt, Artificial Sequence
  Description of Artificial Sequence: Synthetic oligonucleotide
ugucaguuggcaaaccagc

SEQ ID NO: 2122816 - RNA, 19 nt, Artificial Sequence
  Description of Artificial Sequence: Synthetic oligonucleotide
auaaagucgguaaugcuuc

SEQ ID NO: 2122817 - RNA, 19 nt, Artificial Sequence
  Description of Artificial Sequence: Synthetic oligonucleotide
aauuuucaaugacagggau

SEQ ID NO: 2122818 - RNA, 19 nt, Artificial Sequence
  Description of Artificial Sequence: Synthetic oligonucleotide
ucaauagcaucaaacuggu

SEQ ID NO: 2122819 - RNA, 19 nt, Artificial Sequence
  Description of Artificial Sequence: Synthetic oligonucleotide
ccuaaauuuucaaugacag

SEQ ID NO: 2122820 - RNA, 19 nt, Artificial Sequence
  Description of Artificial Sequence: Synthetic oligonucleotide
uuuuauauccgcgaagauc

SEQ ID NO: 2122821 - RNA, 19 nt, Artificial Sequence
  Description of Artificial Sequence: Synthetic oligonucleotide
uauuagaccaucugccaca

SEQ ID NO: 2122822 - RNA, 19 nt, Artificial Sequence
  Description of Artificial Sequence: Synthetic oligonucleotide
acaagcaaggcuguuacuc

SEQ ID NO: 2122823 - RNA, 19 nt, Artificial Sequence
  Description of Artificial Sequence: Synthetic oligonucleotide
ugcucgaucagcuccgccg

SEQ ID NO: 2122824 - RNA, 19 nt, Artificial Sequence
  Description of Artificial Sequence: Synthetic oligonucleotide
aauuaccagcaguaguucu

SEQ ID NO: 2122825 - RNA, 19 nt, Artificial Sequence
  Description of Artificial Sequence: Synthetic oligonucleotide
gauuucuuaggaugcuuag

SEQ ID NO: 2122826 - RNA, 19 nt, Artificial Sequence
  Description of Artificial Sequence: Synthetic oligonucleotide
aguuccacuagacuguugu

SEQ ID NO: 2122827 - RNA, 19 nt, Artificial Sequence
  Description of Artificial Sequence: Synthetic oligonucleotide
acaggauuucuuaggaugc

SEQ ID NO: 2122828 - RNA, 19 nt, Artificial Sequence
  Description of Artificial Sequence: Synthetic oligonucleotide
ugaugcguuugcuauagca

SEQ ID NO: 2122829 - RNA, 19 nt, Artificial Sequence
  Description of Artificial Sequence: Synthetic oligonucleotide
uccaagguacauauuaaaa

SEQ ID NO: 2122830 - RNA, 19 nt, Artificial Sequence
  Description of Artificial Sequence: Synthetic oligonucleotide
uguucacuaauaauguuuu

SEQ ID NO: 2122831 - RNA, 19 nt, Artificial Sequence
  Description of Artificial Sequence: Synthetic oligonucleotide
auuuucucugcuuccugac

SEQ ID NO: 2122832 - RNA, 19 nt, Artificial Sequence
  Description of Artificial Sequence: Synthetic oligonucleotide
ucuaagguagcaccuaaau

SEQ ID NO: 2122833 - RNA, 19 nt, Artificial Sequence
  Description of Artificial Sequence: Synthetic oligonucleotide
ugccacagagcucaggacc

SEQ ID NO: 2122834 - RNA, 19 nt, Artificial Sequence
  Description of Artificial Sequence: Synthetic oligonucleotide
gcuauagcauucuugauug

SEQ ID NO: 2122835 - RNA, 19 nt, Artificial Sequence
  Description of Artificial Sequence: Synthetic oligonucleotide
aaauucuguuguuguucac

SEQ ID NO: 2122836 - RNA, 19 nt, Artificial Sequence
  Description of Artificial Sequence: Synthetic oligonucleotide
cuagacagccuauuagacc

SEQ ID NO: 2122837 - RNA, 19 nt, Artificial Sequence
  Description of Artificial Sequence: Synthetic oligonucleotide
uagauuccaagguacauau

SEQ ID NO: 2122838 - RNA, 19 nt, Artificial Sequence
  Description of Artificial Sequence: Synthetic oligonucleotide
agauauguuagugauuuga

SEQ ID NO: 2122839 - RNA, 19 nt, Artificial Sequence
  Description of Artificial Sequence: Synthetic oligonucleotide
gaucacauaaagucgguaa

SEQ ID NO: 2122840 - RNA, 19 nt, Artificial Sequence
  Description of Artificial Sequence: Synthetic oligonucleotide
ugcugauacaagcaaggcu

SEQ ID NO: 2122841 - RNA, 19 nt, Artificial Sequence
  Description of Artificial Sequence: Synthetic oligonucleotide
accaucaucacuuggcccu

SEQ ID NO: 2122842 - RNA, 19 nt, Artificial Sequence
  Description of Artificial Sequence: Synthetic oligonucleotide
agcucugucagacagggaa

SEQ ID NO: 2122843 - RNA, 19 nt, Artificial Sequence
  Description of Artificial Sequence: Synthetic oligonucleotide
gauuugagagaugccaaag

SEQ ID NO: 2122844 - RNA, 19 nt, Artificial Sequence
  Description of Artificial Sequence: Synthetic oligonucleotide
augcugacaaauuccaugu

SEQ ID NO: 2122845 - RNA, 19 nt, Artificial Sequence
  Description of Artificial Sequence: Synthetic oligonucleotide
uuaggaugcuuagauaugu

SEQ ID NO: 2122846 - RNA, 19 nt, Artificial Sequence
  Description of Artificial Sequence: Synthetic oligonucleotide
cuacauccccugcagaugg

SEQ ID NO: 2122847 - RNA, 19 nt, Artificial Sequence
  Description of Artificial Sequence: Synthetic oligonucleotide
uaauaauguuuucagucuu

SEQ ID NO: 2122848 - RNA, 19 nt, Artificial Sequence
  Description of Artificial Sequence: Synthetic oligonucleotide
ugcuucuuauuuguuacag

SEQ ID NO: 2122849 - RNA, 19 nt, Artificial Sequence
  Description of Artificial Sequence: Synthetic oligonucleotide
ucaaugacagggauuuuau

SEQ ID NO: 2122850 - RNA, 19 nt, Artificial Sequence
  Description of Artificial Sequence: Synthetic oligonucleotide
uaccauuuguagaaaacua

SEQ ID NO: 2122851 - RNA, 19 nt, Artificial Sequence
  Description of Artificial Sequence: Synthetic oligonucleotide
accagcaguaguucugaac

SEQ ID NO: 2122852 - RNA, 19 nt, Artificial Sequence
  Description of Artificial Sequence: Synthetic oligonucleotide
aaguggccuuuauuuuacc

SEQ ID NO: 2122853 - RNA, 19 nt, Artificial Sequence
  Description of Artificial Sequence: Synthetic oligonucleotide
uguuagugauuugagagau

SEQ ID NO: 2122854 - RNA, 19 nt, Artificial Sequence
  Description of Artificial Sequence: Synthetic oligonucleotide
ucaaccucagccagcguug

SEQ ID NO: 2122855 - RNA, 19 nt, Artificial Sequence
  Description of Artificial Sequence: Synthetic oligonucleotide
guuacaggauuucuuagga

SEQ ID NO: 2122856 - RNA, 19 nt, Artificial Sequence
  Description of Artificial Sequence: Synthetic oligonucleotide
uuuuggaaguccagaacuc

SEQ ID NO: 2122857 - RNA, 19 nt, Artificial Sequence
  Description of Artificial Sequence: Synthetic oligonucleotide
ucuugauugcuucuacauc

SEQ ID NO: 2122858 - RNA, 19 nt, Artificial Sequence
  Description of Artificial Sequence: Synthetic oligonucleotide
ggcaauauccuuugcaagc

SEQ ID NO: 2122859 - RNA, 19 nt, Artificial Sequence
  Description of Artificial Sequence: Synthetic oligonucleotide
uggcaauauccuuugcaag

SEQ ID NO: 2122860 - RNA, 19 nt, Artificial Sequence
  Description of Artificial Sequence: Synthetic oligonucleotide
uugagagaugccaaaggau

SEQ ID NO: 2122861 - RNA, 19 nt, Artificial Sequence
  Description of Artificial Sequence: Synthetic oligonucleotide
ucacauaaagucgguaaug

SEQ ID NO: 2122862 - RNA, 19 nt, Artificial Sequence
  Description of Artificial Sequence: Synthetic oligonucleotide
acccauuugugacuguguc

SEQ ID NO: 2122863 - RNA, 19 nt, Artificial Sequence
  Description of Artificial Sequence: Synthetic oligonucleotide
uuguagaaaacuaggcauu

SEQ ID NO: 2122864 - RNA, 19 nt, Artificial Sequence
  Description of Artificial Sequence: Synthetic oligonucleotide
aacuaggcauuuagauucc

SEQ ID NO: 2122865 - RNA, 19 nt, Artificial Sequence
  Description of Artificial Sequence: Synthetic oligonucleotide
aacuggucuaagguagcac

SEQ ID NO: 2122866 - RNA, 19 nt, Artificial Sequence
  Description of Artificial Sequence: Synthetic oligonucleotide
cuauuagaccaucugccac

SEQ ID NO: 2122867 - RNA, 19 nt, Artificial Sequence
  Description of Artificial Sequence: Synthetic oligonucleotide
auauccgcgaagauccagc

SEQ ID NO: 2122868 - RNA, 19 nt, Artificial Sequence
  Description of Artificial Sequence: Synthetic oligonucleotide
uucagcaaugcugacaaau

SEQ ID NO: 2122869 - RNA, 19 nt, Artificial Sequence
  Description of Artificial Sequence: Synthetic oligonucleotide
cucaggacccauuugugac

SEQ ID NO: 2122870 - RNA, 19 nt, Artificial Sequence
  Description of Artificial Sequence: Synthetic oligonucleotide
ucaguuggcaaaccagcac

SEQ ID NO: 2122871 - RNA, 19 nt, Artificial Sequence
  Description of Artificial Sequence: Synthetic oligonucleotide
agggauuuuauauccgcga

SEQ ID NO: 2122872 - RNA, 19 nt, Artificial Sequence
  Description of Artificial Sequence: Synthetic oligonucleotide
caagcaaggcuguuacucc

SEQ ID NO: 2122873 - RNA, 19 nt, Artificial Sequence
  Description of Artificial Sequence: Synthetic oligonucleotide
uugauugcuucuacauccc

SEQ ID NO: 2122874 - RNA, 19 nt, Artificial Sequence
  Description of Artificial Sequence: Synthetic oligonucleotide
cuuccugacgcucuuugag

SEQ ID NO: 2122875 - RNA, 19 nt, Artificial Sequence
  Description of Artificial Sequence: Synthetic oligonucleotide
uaucuggccggacugcagc

SEQ ID NO: 2122876 - RNA, 19 nt, Artificial Sequence
  Description of Artificial Sequence: Synthetic oligonucleotide
auugguguacugcgccgcc

SEQ ID NO: 2122877 - RNA, 19 nt, Artificial Sequence
  Description of Artificial Sequence: Synthetic oligonucleotide
guaguucugaacauucagc

SEQ ID NO: 2122878 - RNA, 19 nt, Artificial Sequence
  Description of Artificial Sequence: Synthetic oligonucleotide
acuagacuguuguugguga

SEQ ID NO: 2122879 - RNA, 19 nt, Artificial Sequence
  Description of Artificial Sequence: Synthetic oligonucleotide
ucuucucaauaaaggaaaa

SEQ ID NO: 2122880 - RNA, 19 nt, Artificial Sequence
  Description of Artificial Sequence: Synthetic oligonucleotide
uucuacauccccugcagau

SEQ ID NO: 2122881 - RNA, 19 nt, Artificial Sequence
  Description of Artificial Sequence: Synthetic oligonucleotide
cuuaggaugcuuagauaug

SEQ ID NO: 2122882 - RNA, 19 nt, Artificial Sequence
  Description of Artificial Sequence: Synthetic oligonucleotide
uuugcccuugaacauuuuc

SEQ ID NO: 2122883 - RNA, 19 nt, Artificial Sequence
  Description of Artificial Sequence: Synthetic oligonucleotide
aagcaaggcuguuacucca

SEQ ID NO: 2122884 - RNA, 19 nt, Artificial Sequence
  Description of Artificial Sequence: Synthetic oligonucleotide
guugaugcguuugcuauag

SEQ ID NO: 2122885 - RNA, 19 nt, Artificial Sequence
  Description of Artificial Sequence: Synthetic oligonucleotide
gaaaguggccuuuauuuua

SEQ ID NO: 2122886 - RNA, 19 nt, Artificial Sequence
  Description of Artificial Sequence: Synthetic oligonucleotide
auagcaucaaacuggucua

SEQ ID NO: 2122887 - RNA, 19 nt, Artificial Sequence
  Description of Artificial Sequence: Synthetic oligonucleotide
acauaaagucgguaaugcu

SEQ ID NO: 2122888 - RNA, 19 nt, Artificial Sequence
  Description of Artificial Sequence: Synthetic oligonucleotide
aagucgguaaugcuucuua

SEQ ID NO: 2122889 - RNA, 19 nt, Artificial Sequence
  Description of Artificial Sequence: Synthetic oligonucleotide
cauucagcaaugcugacaa

SEQ ID NO: 2122890 - RNA, 19 nt, Artificial Sequence
  Description of Artificial Sequence: Synthetic oligonucleotide
cuuugcaagcugugcaccc

SEQ ID NO: 2122891 - RNA, 19 nt, Artificial Sequence
  Description of Artificial Sequence: Synthetic oligonucleotide
uuauuuguuacaggauuuc

SEQ ID NO: 2122892 - RNA, 19 nt, Artificial Sequence
  Description of Artificial Sequence: Synthetic oligonucleotide
ugacuuguggaacuuugua

SEQ ID NO: 2122893 - RNA, 19 nt, Artificial Sequence
  Description of Artificial Sequence: Synthetic oligonucleotide
gugaggaugagcucuguca

SEQ ID NO: 2122894 - RNA, 19 nt, Artificial Sequence
  Description of Artificial Sequence: Synthetic oligonucleotide
uucaccauccugccgccgc

SEQ ID NO: 2122895 - RNA, 19 nt, Artificial Sequence
  Description of Artificial Sequence: Synthetic oligonucleotide
ucagcaaugcugacaaauu

SEQ ID NO: 2122896 - RNA, 19 nt, Artificial Sequence
  Description of Artificial Sequence: Synthetic oligonucleotide
guuugcuauagcauucuug

SEQ ID NO: 2122897 - RNA, 19 nt, Artificial Sequence
  Description of Artificial Sequence: Synthetic oligonucleotide
uuagauuccaagguacaua

SEQ ID NO: 2122898 - RNA, 19 nt, Artificial Sequence
  Description of Artificial Sequence: Synthetic oligonucleotide
ucccgcacagcauuggugu

SEQ ID NO: 2122899 - RNA, 19 nt, Artificial Sequence
  Description of Artificial Sequence: Synthetic oligonucleotide
auacggcaaauucuguugu

SEQ ID NO: 2122900 - RNA, 19 nt, Artificial Sequence
  Description of Artificial Sequence: Synthetic oligonucleotide
ugcuucuacauccccugca

SEQ ID NO: 2122901 - RNA, 19 nt, Artificial Sequence
  Description of Artificial Sequence: Synthetic oligonucleotide
accuaaauuuucaaugaca

SEQ ID NO: 2122902 - RNA, 19 nt, Artificial Sequence
  Description of Artificial Sequence: Synthetic oligonucleotide
uuuagauuccaagguacau

SEQ ID NO: 2122903 - RNA, 19 nt, Artificial Sequence
  Description of Artificial Sequence: Synthetic oligonucleotide
cugaucugcgcucucugcc

SEQ ID NO: 2122904 - RNA, 19 nt, Artificial Sequence
  Description of Artificial Sequence: Synthetic oligonucleotide
gcugacaaauuccauguug

SEQ ID NO: 2122905 - RNA, 19 nt, Artificial Sequence
  Description of Artificial Sequence: Synthetic oligonucleotide
uccugaucucauuaucaga

SEQ ID NO: 2122906 - RNA, 19 nt, Artificial Sequence
  Description of Artificial Sequence: Synthetic oligonucleotide
cauguugcugauacaagca

SEQ ID NO: 2122907 - RNA, 19 nt, Artificial Sequence
  Description of Artificial Sequence: Synthetic oligonucleotide
ucggccaccggccugcgcc

SEQ ID NO: 2122908 - RNA, 19 nt, Artificial Sequence
  Description of Artificial Sequence: Synthetic oligonucleotide
accccguuugcccuugaac

SEQ ID NO: 2122909 - RNA, 19 nt, Artificial Sequence
  Description of Artificial Sequence: Synthetic oligonucleotide
ggauuuuauauccgcgaag

SEQ ID NO: 2122910 - RNA, 19 nt, Artificial Sequence
  Description of Artificial Sequence: Synthetic oligonucleotide
ugcccuugaacauuuucuc

SEQ ID NO: 2122911 - RNA, 19 nt, Artificial Sequence
  Description of Artificial Sequence: Synthetic oligonucleotide
uuuugcuucuccuggcaau

SEQ ID NO: 2122912 - RNA, 19 nt, Artificial Sequence
  Description of Artificial Sequence: Synthetic oligonucleotide
gaugcuuagauauguuagu

SEQ ID NO: 2122913 - RNA, 19 nt, Artificial Sequence
  Description of Artificial Sequence: Synthetic oligonucleotide
uauauccgcgaagauccag

SEQ ID NO: 2122914 - RNA, 19 nt, Artificial Sequence
  Description of Artificial Sequence: Synthetic oligonucleotide
auucuguuguuguucacua

SEQ ID NO: 2122915 - RNA, 19 nt, Artificial Sequence
  Description of Artificial Sequence: Synthetic oligonucleotide
uccuuugcaagcugugcac

SEQ ID NO: 2122916 - RNA, 19 nt, Artificial Sequence
  Description of Artificial Sequence: Synthetic oligonucleotide
uagugauuugagagaugcc

SEQ ID NO: 2122917 - RNA, 19 nt, Artificial Sequence
  Description of Artificial Sequence: Synthetic oligonucleotide
caaacuggucuaagguagc

SEQ ID NO: 2122918 - RNA, 19 nt, Artificial Sequence
  Description of Artificial Sequence: Synthetic oligonucleotide
auuaccagcaguaguucug

SEQ ID NO: 2122919 - RNA, 19 nt, Artificial Sequence
  Description of Artificial Sequence: Synthetic oligonucleotide
ugcgccucccgccagugcc

SEQ ID NO: 2122920 - RNA, 19 nt, Artificial Sequence
  Description of Artificial Sequence: Synthetic oligonucleotide
cucucaaccucagccagcg

SEQ ID NO: 2122921 - RNA, 19 nt, Artificial Sequence
  Description of Artificial Sequence: Synthetic oligonucleotide
ucuacauccccugcagaug

SEQ ID NO: 2122922 - RNA, 19 nt, Artificial Sequence
  Description of Artificial Sequence: Synthetic oligonucleotide
uagaucacauaaagucggu

SEQ ID NO: 2122923 - RNA, 19 nt, Artificial Sequence
  Description of Artificial Sequence: Synthetic oligonucleotide
caucacuuggcccugaucu

SEQ ID NO: 2122924 - RNA, 19 nt, Artificial Sequence
  Description of Artificial Sequence: Synthetic oligonucleotide
ucagccagcguugaugcgu

SEQ ID NO: 2122925 - RNA, 19 nt, Artificial Sequence
  Description of Artificial Sequence: Synthetic oligonucleotide
ugcgcucucugccagguau

SEQ ID NO: 2122926 - RNA, 19 nt, Artificial Sequence
  Description of Artificial Sequence: Synthetic oligonucleotide
uguagaaaacuaggcauuu

SEQ ID NO: 2122927 - RNA, 19 nt, Artificial Sequence
  Description of Artificial Sequence: Synthetic oligonucleotide
aggaugcuuagauauguua

SEQ ID NO: 2122928 - RNA, 19 nt, Artificial Sequence
  Description of Artificial Sequence: Synthetic oligonucleotide
uuccugacgcucuuugagu

SEQ ID NO: 2122929 - RNA, 19 nt, Artificial Sequence
  Description of Artificial Sequence: Synthetic oligonucleotide
auuuuauauccgcgaagau

SEQ ID NO: 2122930 - RNA, 19 nt, Artificial Sequence
  Description of Artificial Sequence: Synthetic oligonucleotide
cuucaccaucaucacuugg

SEQ ID NO: 2122931 - RNA, 19 nt, Artificial Sequence
  Description of Artificial Sequence: Synthetic oligonucleotide
gucuucucaauaaaggaaa

SEQ ID NO: 2122932 - RNA, 19 nt, Artificial Sequence
  Description of Artificial Sequence: Synthetic oligonucleotide
uuacaggauuucuuaggau

SEQ ID NO: 2122933 - RNA, 19 nt, Artificial Sequence
  Description of Artificial Sequence: Synthetic oligonucleotide
aguuuccugaucucauuau

SEQ ID NO: 2122934 - RNA, 19 nt, Artificial Sequence
  Description of Artificial Sequence: Synthetic oligonucleotide
aaacuggucuaagguagca

SEQ ID NO: 2122935 - RNA, 19 nt, Artificial Sequence
  Description of Artificial Sequence: Synthetic oligonucleotide
cuagacuguuguuggugag

SEQ ID NO: 2122936 - RNA, 19 nt, Artificial Sequence
  Description of Artificial Sequence: Synthetic oligonucleotide
auuuagauuccaagguaca

SEQ ID NO: 2122937 - RNA, 19 nt, Artificial Sequence
  Description of Artificial Sequence: Synthetic oligonucleotide
acauccccugcagauggcc

SEQ ID NO: 2122938 - RNA, 19 nt, Artificial Sequence
  Description of Artificial Sequence: Synthetic oligonucleotide
uugcugauacaagcaaggc

SEQ ID NO: 2122939 - RNA, 19 nt, Artificial Sequence
  Description of Artificial Sequence: Synthetic oligonucleotide
cucaccucggccaccggcc

SEQ ID NO: 2122940 - RNA, 19 nt, Artificial Sequence
  Description of Artificial Sequence: Synthetic oligonucleotide
auuucuuaggaugcuuaga

SEQ ID NO: 2122941 - RNA, 19 nt, Artificial Sequence
  Description of Artificial Sequence: Synthetic oligonucleotide
cuggcaauauccuuugcaa

SEQ ID NO: 2122942 - RNA, 19 nt, Artificial Sequence
  Description of Artificial Sequence: Synthetic oligonucleotide
ucacuuggcccugaucugc

SEQ ID NO: 2122943 - RNA, 19 nt, Artificial Sequence
  Description of Artificial Sequence: Synthetic oligonucleotide
uggccuuuauuuuaccauu

SEQ ID NO: 2122944 - RNA, 19 nt, Artificial Sequence
  Description of Artificial Sequence: Synthetic oligonucleotide
auuagaccaucugccacag

SEQ ID NO: 2122945 - RNA, 19 nt, Artificial Sequence
  Description of Artificial Sequence: Synthetic oligonucleotide
uuugcaagcugugcacccc

SEQ ID NO: 2122946 - RNA, 19 nt, Artificial Sequence
  Description of Artificial Sequence: Synthetic oligonucleotide
ugugcaccccguuugcccu

SEQ ID NO: 2122947 - RNA, 19 nt, Artificial Sequence
  Description of Artificial Sequence: Synthetic oligonucleotide
cauaaagucgguaaugcuu

SEQ ID NO: 2122948 - RNA, 19 nt, Artificial Sequence
  Description of Artificial Sequence: Synthetic oligonucleotide
cugucagacagggaagagc

SEQ ID NO: 2122949 - RNA, 19 nt, Artificial Sequence
  Description of Artificial Sequence: Synthetic oligonucleotide
augcguuugcuauagcauu

SEQ ID NO: 2122950 - RNA, 19 nt, Artificial Sequence
  Description of Artificial Sequence: Synthetic oligonucleotide
aaagcaagacuugucccua

SEQ ID NO: 2122951 - RNA, 19 nt, Artificial Sequence
  Description of Artificial Sequence: Synthetic oligonucleotide
uagcaccuaaauuuucaau

SEQ ID NO: 2122952 - RNA, 19 nt, Artificial Sequence
  Description of Artificial Sequence: Synthetic oligonucleotide
cucaauaaaggaaaaccau

SEQ ID NO: 2122953 - RNA, 19 nt, Artificial Sequence
  Description of Artificial Sequence: Synthetic oligonucleotide
ccuggauuaaaaguuuugc

SEQ ID NO: 2122954 - RNA, 19 nt, Artificial Sequence
  Description of Artificial Sequence: Synthetic oligonucleotide
acauucagcaaugcugaca

SEQ ID NO: 2122955 - RNA, 19 nt, Artificial Sequence
  Description of Artificial Sequence: Synthetic oligonucleotide
agaucacccaguuccacua

SEQ ID NO: 2122956 - RNA, 19 nt, Artificial Sequence
  Description of Artificial Sequence: Synthetic oligonucleotide
uauccgcgaagauccagcu

SEQ ID NO: 2122957 - RNA, 19 nt, Artificial Sequence
  Description of Artificial Sequence: Synthetic oligonucleotide
aguccccucaccucggcca

SEQ ID NO: 2122958 - RNA, 19 nt, Artificial Sequence
  Description of Artificial Sequence: Synthetic oligonucleotide
caccaucaucacuuggccc

SEQ ID NO: 2122959 - RNA, 19 nt, Artificial Sequence
  Description of Artificial Sequence: Synthetic oligonucleotide
uuauauccgcgaagaucca

SEQ ID NO: 2122960 - RNA, 19 nt, Artificial Sequence
  Description of Artificial Sequence: Synthetic oligonucleotide
gccuauuagaccaucugcc

SEQ ID NO: 2122961 - RNA, 19 nt, Artificial Sequence
  Description of Artificial Sequence: Synthetic oligonucleotide
ucugucagacagggaagag

SEQ ID NO: 2122962 - RNA, 19 nt, Artificial Sequence
  Description of Artificial Sequence: Synthetic oligonucleotide
gaucugcgcucucugccag

SEQ ID NO: 2122963 - RNA, 19 nt, Artificial Sequence
  Description of Artificial Sequence: Synthetic oligonucleotide
acggcaaauucuguuguug

SEQ ID NO: 2122964 - RNA, 19 nt, Artificial Sequence
  Description of Artificial Sequence: Synthetic oligonucleotide
auuuguuacaggauuucuu

SEQ ID NO: 2122965 - RNA, 19 nt, Artificial Sequence
  Description of Artificial Sequence: Synthetic oligonucleotide
agagcucaggacccauuug

SEQ ID NO: 2122966 - RNA, 19 nt, Artificial Sequence
  Description of Artificial Sequence: Synthetic oligonucleotide
cuggauuaaaaguuuugcu

SEQ ID NO: 2122967 - RNA, 19 nt, Artificial Sequence
  Description of Artificial Sequence: Synthetic oligonucleotide
acuuggcccugaucugcgc

SEQ ID NO: 2122968 - RNA, 19 nt, Artificial Sequence
  Description of Artificial Sequence: Synthetic oligonucleotide
uaaagucgguaaugcuucu

SEQ ID NO: 2122969 - RNA, 19 nt, Artificial Sequence
  Description of Artificial Sequence: Synthetic oligonucleotide
gguaaugcuucuuauuugu

SEQ ID NO: 2122970 - RNA, 19 nt, Artificial Sequence
  Description of Artificial Sequence: Synthetic oligonucleotide
gugacugugucuucuucca

SEQ ID NO: 2122971 - RNA, 19 nt, Artificial Sequence
  Description of Artificial Sequence: Synthetic oligonucleotide
gaacucugacuuguggaac

SEQ ID NO: 2122972 - RNA, 19 nt, Artificial Sequence
  Description of Artificial Sequence: Synthetic oligonucleotide
cagccuauuagaccaucug

SEQ ID NO: 2122973 - RNA, 19 nt, Artificial Sequence
  Description of Artificial Sequence: Synthetic oligonucleotide
uugcuucuacauccccugc

SEQ ID NO: 2122974 - RNA, 19 nt, Artificial Sequence
  Description of Artificial Sequence: Synthetic oligonucleotide
aaccauccaguuuccugau

SEQ ID NO: 2122975 - RNA, 19 nt, Artificial Sequence
  Description of Artificial Sequence: Synthetic oligonucleotide
agucgguaaugcuucuuau

SEQ ID NO: 2122976 - RNA, 19 nt, Artificial Sequence
  Description of Artificial Sequence: Synthetic oligonucleotide
uuugcuucuccuggcaaua

SEQ ID NO: 2122977 - RNA, 19 nt, Artificial Sequence
  Description of Artificial Sequence: Synthetic oligonucleotide
agauggcccaccuuucuuu

SEQ ID NO: 2122978 - RNA, 19 nt, Artificial Sequence
  Description of Artificial Sequence: Synthetic oligonucleotide
cauugguguacugcgccgc

SEQ ID NO: 2122979 - RNA, 19 nt, Artificial Sequence
  Description of Artificial Sequence: Synthetic oligonucleotide
cacuuggcccugaucugcg

SEQ ID NO: 2122980 - RNA, 19 nt, Artificial Sequence
  Description of Artificial Sequence: Synthetic oligonucleotide
ggcauuuagauuccaaggu

SEQ ID NO: 2122981 - RNA, 19 nt, Artificial Sequence
  Description of Artificial Sequence: Synthetic oligonucleotide
gaacuuuguagaucacaua

SEQ ID NO: 2122982 - RNA, 19 nt, Artificial Sequence
  Description of Artificial Sequence: Synthetic oligonucleotide
cauccccugcagauggccc

SEQ ID NO: 2122983 - RNA, 19 nt, Artificial Sequence
  Description of Artificial Sequence: Synthetic oligonucleotide
ucaucacuuggcccugauc

SEQ ID NO: 2122984 - RNA, 19 nt, Artificial Sequence
  Description of Artificial Sequence: Synthetic oligonucleotide
ugcuucuccuggcaauauc

SEQ ID NO: 2122985 - RNA, 19 nt, Artificial Sequence
  Description of Artificial Sequence: Synthetic oligonucleotide
accuggauuaaaaguuuug

SEQ ID NO: 2122986 - RNA, 19 nt, Artificial Sequence
  Description of Artificial Sequence: Synthetic oligonucleotide
auauccuuugcaagcugug

SEQ ID NO: 2122987 - RNA, 19 nt, Artificial Sequence
  Description of Artificial Sequence: Synthetic oligonucleotide
uucucugcuuccugacgcu

SEQ ID NO: 2122988 - RNA, 19 nt, Artificial Sequence
  Description of Artificial Sequence: Synthetic oligonucleotide
agcaagacuugucccuaga

SEQ ID NO: 2122989 - RNA, 19 nt, Artificial Sequence
  Description of Artificial Sequence: Synthetic oligonucleotide
ugcagauggcccaccuuuc

SEQ ID NO: 2122990 - RNA, 19 nt, Artificial Sequence
  Description of Artificial Sequence: Synthetic oligonucleotide
auccgcgaagauccagcuc

SEQ ID NO: 2122991 - RNA, 19 nt, Artificial Sequence
  Description of Artificial Sequence: Synthetic oligonucleotide
aucacccaguuccacuaga

SEQ ID NO: 2122992 - RNA, 19 nt, Artificial Sequence
  Description of Artificial Sequence: Synthetic oligonucleotide
ucaccauccugccgccgcc

SEQ ID NO: 2122993 - RNA, 19 nt, Artificial Sequence
  Description of Artificial Sequence: Synthetic oligonucleotide
uacaagcaaggcuguuacu

SEQ ID NO: 2122994 - RNA, 19 nt, Artificial Sequence
  Description of Artificial Sequence: Synthetic oligonucleotide
uaggaugcuuagauauguu

SEQ ID NO: 2122995 - RNA, 19 nt, Artificial Sequence
  Description of Artificial Sequence: Synthetic oligonucleotide
ccugaucaaguccuucucc

SEQ ID NO: 2122996 - RNA, 19 nt, Artificial Sequence
  Description of Artificial Sequence: Synthetic oligonucleotide
gccgaguccccucaccucg

SEQ ID NO: 2122997 - RNA, 19 nt, Artificial Sequence
  Description of Artificial Sequence: Synthetic oligonucleotide
gcuuagauauguuagugau

SEQ ID NO: 2122998 - RNA, 19 nt, Artificial Sequence
  Description of Artificial Sequence: Synthetic oligonucleotide
gaugcguuugcuauagcau

SEQ ID NO: 2122999 - RNA, 19 nt, Artificial Sequence
  Description of Artificial Sequence: Synthetic oligonucleotide
agcguugaugcguuugcua

SEQ ID NO: 2123000 - RNA, 19 nt, Artificial Sequence
  Description of Artificial Sequence: Synthetic oligonucleotide
acgcucuuugaguuucacu

SEQ ID NO: 2123001 - RNA, 19 nt, Artificial Sequence
  Description of Artificial Sequence: Synthetic oligonucleotide
auuccauguugcugauaca

SEQ ID NO: 2123002 - RNA, 19 nt, Artificial Sequence
  Description of Artificial Sequence: Synthetic oligonucleotide
uugaugcguuugcuauagc

SEQ ID NO: 2123003 - RNA, 19 nt, Artificial Sequence
  Description of Artificial Sequence: Synthetic oligonucleotide
gaaguccagaacucugacu

SEQ ID NO: 2123004 - RNA, 19 nt, Artificial Sequence
  Description of Artificial Sequence: Synthetic oligonucleotide
gcauugguguacugcgccg

SEQ ID NO: 2123005 - RNA, 19 nt, Artificial Sequence
  Description of Artificial Sequence: Synthetic oligonucleotide
agguagcaccuaaauuuuc

SEQ ID NO: 2123006 - RNA, 19 nt, Artificial Sequence
  Description of Artificial Sequence: Synthetic oligonucleotide
guuagugauuugagagaug

SEQ ID NO: 2123007 - RNA, 19 nt, Artificial Sequence
  Description of Artificial Sequence: Synthetic oligonucleotide
ucgaucagcuccgccguca

SEQ ID NO: 2123008 - RNA, 19 nt, Artificial Sequence
  Description of Artificial Sequence: Synthetic oligonucleotide
aaagucgguaaugcuucuu

SEQ ID NO: 2123009 - RNA, 19 nt, Artificial Sequence
  Description of Artificial Sequence: Synthetic oligonucleotide
aguuggcaaaccagcaccu

SEQ ID NO: 2123010 - RNA, 19 nt, Artificial Sequence
  Description of Artificial Sequence: Synthetic oligonucleotide
gugauuugagagaugccaa

SEQ ID NO: 2123011 - RNA, 19 nt, Artificial Sequence
  Description of Artificial Sequence: Synthetic oligonucleotide
ggaaguccagaacucugac

SEQ ID NO: 2123012 - RNA, 19 nt, Artificial Sequence
  Description of Artificial Sequence: Synthetic oligonucleotide
gccuuuauuuuaccauuug

SEQ ID NO: 2123013 - RNA, 19 nt, Artificial Sequence
  Description of Artificial Sequence: Synthetic oligonucleotide
cugaucaaguccuucuccu

SEQ ID NO: 2123014 - RNA, 19 nt, Artificial Sequence
  Description of Artificial Sequence: Synthetic oligonucleotide
cuccuauacggcaaauucu

SEQ ID NO: 2123015 - RNA, 19 nt, Artificial Sequence
  Description of Artificial Sequence: Synthetic oligonucleotide
uggccggacugcagcaagc

SEQ ID NO: 2123016 - RNA, 19 nt, Artificial Sequence
  Description of Artificial Sequence: Synthetic oligonucleotide
uucuccuauacggcaaauu

SEQ ID NO: 2123017 - RNA, 19 nt, Artificial Sequence
  Description of Artificial Sequence: Synthetic oligonucleotide
ugcugacaaauuccauguu

SEQ ID NO: 2123018 - RNA, 19 nt, Artificial Sequence
  Description of Artificial Sequence: Synthetic oligonucleotide
gggauuuuauauccgcgaa

SEQ ID NO: 2123019 - RNA, 19 nt, Artificial Sequence
  Description of Artificial Sequence: Synthetic oligonucleotide
uuggcccugaucugcgcuc

SEQ ID NO: 2123020 - RNA, 19 nt, Artificial Sequence
  Description of Artificial Sequence: Synthetic oligonucleotide
aucugcgcucucugccagg

SEQ ID NO: 2123021 - RNA, 19 nt, Artificial Sequence
  Description of Artificial Sequence: Synthetic oligonucleotide
ucugcgcucucugccaggu

SEQ ID NO: 2123022 - RNA, 19 nt, Artificial Sequence
  Description of Artificial Sequence: Synthetic oligonucleotide
caggacccauuugugacug

SEQ ID NO: 2123023 - RNA, 19 nt, Artificial Sequence
  Description of Artificial Sequence: Synthetic oligonucleotide
gacagggaagagccugauc

SEQ ID NO: 2123024 - RNA, 19 nt, Artificial Sequence
  Description of Artificial Sequence: Synthetic oligonucleotide
aaaccagcaccuggauuaa

SEQ ID NO: 2123025 - RNA, 19 nt, Artificial Sequence
  Description of Artificial Sequence: Synthetic oligonucleotide
acagccuauuagaccaucu

SEQ ID NO: 2123026 - RNA, 19 nt, Artificial Sequence
  Description of Artificial Sequence: Synthetic oligonucleotide
gcaagacuugucccuagac

SEQ ID NO: 2123027 - RNA, 19 nt, Artificial Sequence
  Description of Artificial Sequence: Synthetic oligonucleotide
aucuggccggacugcagca

SEQ ID NO: 2123028 - RNA, 19 nt, Artificial Sequence
  Description of Artificial Sequence: Synthetic oligonucleotide
uacggcaaauucuguuguu

SEQ ID NO: 2123029 - RNA, 19 nt, Artificial Sequence
  Description of Artificial Sequence: Synthetic oligonucleotide
uacugcgccgccugcucga

SEQ ID NO: 2123030 - RNA, 19 nt, Artificial Sequence
  Description of Artificial Sequence: Synthetic oligonucleotide
agaucacauaaagucggua

SEQ ID NO: 2123031 - RNA, 19 nt, Artificial Sequence
  Description of Artificial Sequence: Synthetic oligonucleotide
uugucccuagacagccuau

SEQ ID NO: 2123032 - RNA, 19 nt, Artificial Sequence
  Description of Artificial Sequence: Synthetic oligonucleotide
cucagccagcguugaugcg

SEQ ID NO: 2123033 - RNA, 19 nt, Artificial Sequence
  Description of Artificial Sequence: Synthetic oligonucleotide
gaguccccucaccucggcc

SEQ ID NO: 2123034 - RNA, 19 nt, Artificial Sequence
  Description of Artificial Sequence: Synthetic oligonucleotide
ugcaagcugugcaccccgu

SEQ ID NO: 2123035 - RNA, 19 nt, Artificial Sequence
  Description of Artificial Sequence: Synthetic oligonucleotide
ggcuguuacuccaugcuca

SEQ ID NO: 2123036 - RNA, 19 nt, Artificial Sequence
  Description of Artificial Sequence: Synthetic oligonucleotide
ccuauuagaccaucugcca

SEQ ID NO: 2123037 - RNA, 19 nt, Artificial Sequence
  Description of Artificial Sequence: Synthetic oligonucleotide
cuauacggcaaauucuguu

SEQ ID NO: 2123038 - RNA, 19 nt, Artificial Sequence
  Description of Artificial Sequence: Synthetic oligonucleotide
cuaagguagcaccuaaauu

SEQ ID NO: 2123039 - RNA, 19 nt, Artificial Sequence
  Description of Artificial Sequence: Synthetic oligonucleotide
guuggcaaaccagcaccug

SEQ ID NO: 2123040 - RNA, 19 nt, Artificial Sequence
  Description of Artificial Sequence: Synthetic oligonucleotide
caauagcaucaaacugguc

SEQ ID NO: 2123041 - RNA, 19 nt, Artificial Sequence
  Description of Artificial Sequence: Synthetic oligonucleotide
gaucagcuccgccgucagc

SEQ ID NO: 2123042 - RNA, 19 nt, Artificial Sequence
  Description of Artificial Sequence: Synthetic oligonucleotide
uggucuaagguagcaccua

SEQ ID NO: 2123043 - RNA, 19 nt, Artificial Sequence
  Description of Artificial Sequence: Synthetic oligonucleotide
aaauuccauguugcugaua

SEQ ID NO: 2123044 - RNA, 19 nt, Artificial Sequence
  Description of Artificial Sequence: Synthetic oligonucleotide
cuugucccuagacagccua

SEQ ID NO: 2123045 - RNA, 19 nt, Artificial Sequence
  Description of Artificial Sequence: Synthetic oligonucleotide
gacagccuauuagaccauc

SEQ ID NO: 2123046 - RNA, 19 nt, Artificial Sequence
  Description of Artificial Sequence: Synthetic oligonucleotide
auccugccgccgccgaguc

SEQ ID NO: 2123047 - RNA, 19 nt, Artificial Sequence
  Description of Artificial Sequence: Synthetic oligonucleotide
ccccguuugcccuugaaca

SEQ ID NO: 2123048 - RNA, 19 nt, Artificial Sequence
  Description of Artificial Sequence: Synthetic oligonucleotide
cccuagacagccuauuaga

SEQ ID NO: 2123049 - RNA, 19 nt, Artificial Sequence
  Description of Artificial Sequence: Synthetic oligonucleotide
cucugucagacagggaaga

SEQ ID NO: 2123050 - RNA, 19 nt, Artificial Sequence
  Description of Artificial Sequence: Synthetic oligonucleotide
cuuagauauguuagugauu

SEQ ID NO: 2123051 - RNA, 19 nt, Artificial Sequence
  Description of Artificial Sequence: Synthetic oligonucleotide
ccagcguugaugcguuugc

SEQ ID NO: 2123052 - RNA, 19 nt, Artificial Sequence
  Description of Artificial Sequence: Synthetic oligonucleotide
accaucugccacagagcuc

SEQ ID NO: 2123053 - RNA, 19 nt, Artificial Sequence
  Description of Artificial Sequence: Synthetic oligonucleotide
ugucccuagacagccuauu

SEQ ID NO: 2123054 - RNA, 19 nt, Artificial Sequence
  Description of Artificial Sequence: Synthetic oligonucleotide
gacgcucuuugaguuucac

SEQ ID NO: 2123055 - RNA, 19 nt, Artificial Sequence
  Description of Artificial Sequence: Synthetic oligonucleotide
gcucaggacccauuuguga

SEQ ID NO: 2123056 - RNA, 19 nt, Artificial Sequence
  Description of Artificial Sequence: Synthetic oligonucleotide
aaccucagccagcguugau

SEQ ID NO: 2123057 - RNA, 19 nt, Artificial Sequence
  Description of Artificial Sequence: Synthetic oligonucleotide
agaugccaaaggauccaga

SEQ ID NO: 2123058 - RNA, 19 nt, Artificial Sequence
  Description of Artificial Sequence: Synthetic oligonucleotide
ccugaucugcgcucucugc

SEQ ID NO: 2123059 - RNA, 19 nt, Artificial Sequence
  Description of Artificial Sequence: Synthetic oligonucleotide
uccagcucgcggucccgca

SEQ ID NO: 2123060 - RNA, 19 nt, Artificial Sequence
  Description of Artificial Sequence: Synthetic oligonucleotide
uugguguacugcgccgccu

SEQ ID NO: 2123061 - RNA, 19 nt, Artificial Sequence
  Description of Artificial Sequence: Synthetic oligonucleotide
guagaaaacuaggcauuua

SEQ ID NO: 2123062 - RNA, 19 nt, Artificial Sequence
  Description of Artificial Sequence: Synthetic oligonucleotide
gucccgcacagcauuggug

SEQ ID NO: 2123063 - RNA, 19 nt, Artificial Sequence
  Description of Artificial Sequence: Synthetic oligonucleotide
cuggucuaagguagcaccu

SEQ ID NO: 2123064 - RNA, 19 nt, Artificial Sequence
  Description of Artificial Sequence: Synthetic oligonucleotide
cucaaccucagccagcguu

SEQ ID NO: 2123065 - RNA, 19 nt, Artificial Sequence
  Description of Artificial Sequence: Synthetic oligonucleotide
ggcagcaagaaaguggccu

SEQ ID NO: 2123066 - RNA, 19 nt, Artificial Sequence
  Description of Artificial Sequence: Synthetic oligonucleotide
agcaagaaaguggccuuua

SEQ ID NO: 2123067 - RNA, 19 nt, Artificial Sequence
  Description of Artificial Sequence: Synthetic oligonucleotide
ggauuucuuaggaugcuua

SEQ ID NO: 2123068 - RNA, 19 nt, Artificial Sequence
  Description of Artificial Sequence: Synthetic oligonucleotide
gcucugucagacagggaag

SEQ ID NO: 2123069 - RNA, 19 nt, Artificial Sequence
  Description of Artificial Sequence: Synthetic oligonucleotide
ucucaaccucagccagcgu

SEQ ID NO: 2123070 - RNA, 19 nt, Artificial Sequence
  Description of Artificial Sequence: Synthetic oligonucleotide
uaccagcaguaguucugaa

SEQ ID NO: 2123071 - RNA, 19 nt, Artificial Sequence
  Description of Artificial Sequence: Synthetic oligonucleotide
gagccugaucaaguccuuc

SEQ ID NO: 2123072 - RNA, 19 nt, Artificial Sequence
  Description of Artificial Sequence: Synthetic oligonucleotide
caagaaaguggccuuuauu

SEQ ID NO: 2123073 - RNA, 19 nt, Artificial Sequence
  Description of Artificial Sequence: Synthetic oligonucleotide
cugcucgaucagcuccgcc

SEQ ID NO: 2123074 - RNA, 19 nt, Artificial Sequence
  Description of Artificial Sequence: Synthetic oligonucleotide
cugacuuguggaacuuugu

SEQ ID NO: 2123075 - RNA, 19 nt, Artificial Sequence
  Description of Artificial Sequence: Synthetic oligonucleotide
gucgguaaugcuucuuauu

SEQ ID NO: 2123076 - RNA, 19 nt, Artificial Sequence
  Description of Artificial Sequence: Synthetic oligonucleotide
gauggcccaccuuucuuuu

SEQ ID NO: 2123077 - RNA, 19 nt, Artificial Sequence
  Description of Artificial Sequence: Synthetic oligonucleotide
gucuaagguagcaccuaaa

SEQ ID NO: 2123078 - RNA, 19 nt, Artificial Sequence
  Description of Artificial Sequence: Synthetic oligonucleotide
cugcagauggcccaccuuu

SEQ ID NO: 2123079 - RNA, 19 nt, Artificial Sequence
  Description of Artificial Sequence: Synthetic oligonucleotide
gguguacugcgccgccugc

SEQ ID NO: 2123080 - RNA, 19 nt, Artificial Sequence
  Description of Artificial Sequence: Synthetic oligonucleotide
uggcccugaucugcgcucu

SEQ ID NO: 2123081 - RNA, 19 nt, Artificial Sequence
  Description of Artificial Sequence: Synthetic oligonucleotide
ccucucaaccucagccagc

SEQ ID NO: 2123082 - RNA, 19 nt, Artificial Sequence
  Description of Artificial Sequence: Synthetic oligonucleotide
gcaauauccuuugcaagcu

SEQ ID NO: 2123083 - RNA, 19 nt, Artificial Sequence
  Description of Artificial Sequence: Synthetic oligonucleotide
ugccagguaucuggccgga

SEQ ID NO: 2123084 - RNA, 19 nt, Artificial Sequence
  Description of Artificial Sequence: Synthetic oligonucleotide
gcuguuacuccaugcucaa

SEQ ID NO: 2123085 - RNA, 19 nt, Artificial Sequence
  Description of Artificial Sequence: Synthetic oligonucleotide
agcaaggcuguuacuccau

SEQ ID NO: 2123086 - RNA, 19 nt, Artificial Sequence
  Description of Artificial Sequence: Synthetic oligonucleotide
ugcaccccguuugcccuug

SEQ ID NO: 2123087 - RNA, 19 nt, Artificial Sequence
  Description of Artificial Sequence: Synthetic oligonucleotide
ccucaccucggccaccggc

SEQ ID NO: 2123088 - RNA, 19 nt, Artificial Sequence
  Description of Artificial Sequence: Synthetic oligonucleotide
gguaucuggccggacugca

SEQ ID NO: 2123089 - RNA, 19 nt, Artificial Sequence
  Description of Artificial Sequence: Synthetic oligonucleotide
gcguugaugcguuugcuau

SEQ ID NO: 2123090 - RNA, 19 nt, Artificial Sequence
  Description of Artificial Sequence: Synthetic oligonucleotide
caccauccugccgccgccg

SEQ ID NO: 2123091 - RNA, 19 nt, Artificial Sequence
  Description of Artificial Sequence: Synthetic oligonucleotide
gccagcguugaugcguuug

SEQ ID NO: 2123092 - RNA, 19 nt, Artificial Sequence
  Description of Artificial Sequence: Synthetic oligonucleotide
acuugucccuagacagccu

SEQ ID NO: 2123093 - RNA, 19 nt, Artificial Sequence
  Description of Artificial Sequence: Synthetic oligonucleotide
caucugccacagagcucag

SEQ ID NO: 2123094 - RNA, 19 nt, Artificial Sequence
  Description of Artificial Sequence: Synthetic oligonucleotide
cuuggcccugaucugcgcu

SEQ ID NO: 2123095 - RNA, 19 nt, Artificial Sequence
  Description of Artificial Sequence: Synthetic oligonucleotide
cucgaucagcuccgccguc

SEQ ID NO: 2123096 - RNA, 19 nt, Artificial Sequence
  Description of Artificial Sequence: Synthetic oligonucleotide
ucgcggucccgcacagcau

SEQ ID NO: 2123097 - RNA, 19 nt, Artificial Sequence
  Description of Artificial Sequence: Synthetic oligonucleotide
cgcucuuugaguuucacuu

SEQ ID NO: 2123098 - RNA, 19 nt, Artificial Sequence
  Description of Artificial Sequence: Synthetic oligonucleotide
gcauucuugauugcuucua

SEQ ID NO: 2123099 - RNA, 19 nt, Artificial Sequence
  Description of Artificial Sequence: Synthetic oligonucleotide
gcccuugaacauuuucucu

SEQ ID NO: 2123100 - RNA, 19 nt, Artificial Sequence
  Description of Artificial Sequence: Synthetic oligonucleotide
ggcaaauucuguuguuguu

SEQ ID NO: 2123101 - RNA, 19 nt, Artificial Sequence
  Description of Artificial Sequence: Synthetic oligonucleotide
caagcugugcaccccguuu

SEQ ID NO: 2123102 - RNA, 19 nt, Artificial Sequence
  Description of Artificial Sequence: Synthetic oligonucleotide
acagagcucaggacccauu

SEQ ID NO: 2123103 - RNA, 19 nt, Artificial Sequence
  Description of Artificial Sequence: Synthetic oligonucleotide
agacagccuauuagaccau

SEQ ID NO: 2123104 - RNA, 19 nt, Artificial Sequence
  Description of Artificial Sequence: Synthetic oligonucleotide
guuccacuagacuguuguu

SEQ ID NO: 2123105 - RNA, 19 nt, Artificial Sequence
  Description of Artificial Sequence: Synthetic oligonucleotide
cagcucgcggucccgcaca

SEQ ID NO: 2123106 - RNA, 19 nt, Artificial Sequence
  Description of Artificial Sequence: Synthetic oligonucleotide
caaccucagccagcguuga

SEQ ID NO: 2123107 - RNA, 19 nt, Artificial Sequence
  Description of Artificial Sequence: Synthetic oligonucleotide
agagccugaucaaguccuu

SEQ ID NO: 2123108 - RNA, 19 nt, Artificial Sequence
  Description of Artificial Sequence: Synthetic oligonucleotide
cagcaguaguucugaacau

SEQ ID NO: 2123109 - RNA, 19 nt, Artificial Sequence
  Description of Artificial Sequence: Synthetic oligonucleotide
cgaagauccagcucgcggu

SEQ ID NO: 2123110 - RNA, 19 nt, Artificial Sequence
  Description of Artificial Sequence: Synthetic oligonucleotide
ccagaucacccaguuccac

SEQ ID NO: 2123111 - RNA, 19 nt, Artificial Sequence
  Description of Artificial Sequence: Synthetic oligonucleotide
gccaaaggauccagaucac

SEQ ID NO: 2123112 - RNA, 19 nt, Artificial Sequence
  Description of Artificial Sequence: Synthetic oligonucleotide
caagcccuucagccucuca

SEQ ID NO: 2123113 - RNA, 19 nt, Artificial Sequence
  Description of Artificial Sequence: Synthetic oligonucleotide
ccgaguccccucaccucgg

SEQ ID NO: 2123114 - RNA, 19 nt, Artificial Sequence
  Description of Artificial Sequence: Synthetic oligonucleotide
ccgcacagcauugguguac

SEQ ID NO: 2123115 - RNA, 19 nt, Artificial Sequence
  Description of Artificial Sequence: Synthetic oligonucleotide
gcagauggcccaccuuucu

SEQ ID NO: 2123116 - RNA, 19 nt, Artificial Sequence
  Description of Artificial Sequence: Synthetic oligonucleotide
gcucgaucagcuccgccgu

SEQ ID NO: 2123117 - RNA, 19 nt, Artificial Sequence
  Description of Artificial Sequence: Synthetic oligonucleotide
gcaagaaaguggccuuuau

SEQ ID NO: 2123118 - RNA, 19 nt, Artificial Sequence
  Description of Artificial Sequence: Synthetic oligonucleotide
ccgcgaagauccagcucgc

SEQ ID NO: 2123119 - RNA, 19 nt, Artificial Sequence
  Description of Artificial Sequence: Synthetic oligonucleotide
gccgccgaguccccucacc

SEQ ID NO: 2123120 - RNA, 19 nt, Artificial Sequence
  Description of Artificial Sequence: Synthetic oligonucleotide
cuccgccgucagcuucacc

SEQ ID NO: 2123121 - RNA, 19 nt, Artificial Sequence
  Description of Artificial Sequence: Synthetic oligonucleotide
cucggccaccggccugcgc

SEQ ID NO: 2123122 - RNA, 19 nt, Artificial Sequence
  Description of Artificial Sequence: Synthetic oligonucleotide
cuguuacuccaugcucaaa

SEQ ID NO: 2123123 - RNA, 19 nt, Artificial Sequence
  Description of Artificial Sequence: Synthetic oligonucleotide
ccuauacggcaaauucugu

SEQ ID NO: 2123124 - RNA, 19 nt, Artificial Sequence
  Description of Artificial Sequence: Synthetic oligonucleotide
ccuucuccuauacggcaaa

SEQ ID NO: 2123125 - RNA, 19 nt, Artificial Sequence
  Description of Artificial Sequence: Synthetic oligonucleotide
cagauggcccaccuuucuu

SEQ ID NO: 2123126 - RNA, 19 nt, Artificial Sequence
  Description of Artificial Sequence: Synthetic oligonucleotide
cgaucagcuccgccgucag

SEQ ID NO: 2123127 - RNA, 19 nt, Artificial Sequence
  Description of Artificial Sequence: Synthetic oligonucleotide
caccggccugcgccucccg

SEQ ID NO: 2123128 - RNA, 19 nt, Artificial Sequence
  Description of Artificial Sequence: Synthetic oligonucleotide
ggucccgcacagcauuggu

SEQ ID NO: 2123129 - RNA, 19 nt, Artificial Sequence
  Description of Artificial Sequence: Synthetic oligonucleotide
acugcgccgccugcucgau

SEQ ID NO: 2123130 - RNA, 19 nt, Artificial Sequence
  Description of Artificial Sequence: Synthetic oligonucleotide
gcguuugcuauagcauucu

SEQ ID NO: 2123131 - RNA, 19 nt, Artificial Sequence
  Description of Artificial Sequence: Synthetic oligonucleotide
cggcaaauucuguuguugu

SEQ ID NO: 2123132 - RNA, 19 nt, Artificial Sequence
  Description of Artificial Sequence: Synthetic oligonucleotide
caccccguuugcccuugaa

SEQ ID NO: 2123133 - RNA, 19 nt, Artificial Sequence
  Description of Artificial Sequence: Synthetic oligonucleotide
cagccagcguugaugcguu

SEQ ID NO: 2123134 - RNA, 19 nt, Artificial Sequence
  Description of Artificial Sequence: Synthetic oligonucleotide
gcggucccgcacagcauug

SEQ ID NO: 2123135 - RNA, 19 nt, Artificial Sequence
  Description of Artificial Sequence: Synthetic oligonucleotide
ccugcucgaucagcuccgc

SEQ ID NO: 2123136 - RNA, 19 nt, Artificial Sequence
  Description of Artificial Sequence: Synthetic oligonucleotide
cagcguugaugcguuugcu

SEQ ID NO: 2123137 - RNA, 19 nt, Artificial Sequence
  Description of Artificial Sequence: Synthetic oligonucleotide
cgcgaagauccagcucgcg

SEQ ID NO: 2123138 - RNA, 19 nt, Artificial Sequence
  Description of Artificial Sequence: Synthetic oligonucleotide
cguugaugcguuugcuaua

SEQ ID NO: 2123139 - RNA, 19 nt, Artificial Sequence
  Description of Artificial Sequence: Synthetic oligonucleotide
cgaguccccucaccucggc

SEQ ID NO: 2123140 - RNA, 19 nt, Artificial Sequence
  Description of Artificial Sequence: Synthetic oligonucleotide
gcgcucucugccagguauc

SEQ ID NO: 2123141 - RNA, 19 nt, Artificial Sequence
  Description of Artificial Sequence: Synthetic oligonucleotide
cacagagcucaggacccau

SEQ ID NO: 2123142 - RNA, 19 nt, Artificial Sequence
  Description of Artificial Sequence: Synthetic oligonucleotide
ccacuagacuguuguuggu

SEQ ID NO: 2123143 - RNA, 19 nt, Artificial Sequence
  Description of Artificial Sequence: Synthetic oligonucleotide
cggucccgcacagcauugg

SEQ ID NO: 2123144 - RNA, 19 nt, Artificial Sequence
  Description of Artificial Sequence: Synthetic oligonucleotide
ggcccugaucugcgcucuc

SEQ ID NO: 2123145 - RNA, 19 nt, Artificial Sequence
  Description of Artificial Sequence: Synthetic oligonucleotide
guuugcccuugaacauuuu

SEQ ID NO: 2123146 - RNA, 19 nt, Artificial Sequence
  Description of Artificial Sequence: Synthetic oligonucleotide
cugcgcucucugccaggua

SEQ ID NO: 2123147 - RNA, 19 nt, Artificial Sequence
  Description of Artificial Sequence: Synthetic oligonucleotide
cccucaccucggccaccgg

SEQ ID NO: 2123148 - RNA, 19 nt, Artificial Sequence
  Description of Artificial Sequence: Synthetic oligonucleotide
ccgccgaguccccucaccu

SEQ ID NO: 2123149 - RNA, 19 nt, Artificial Sequence
  Description of Artificial Sequence: Synthetic oligonucleotide
ccccugcagauggcccacc

SEQ ID NO: 2123150 - RNA, 19 nt, Artificial Sequence
  Description of Artificial Sequence: Synthetic oligonucleotide
cccugcagauggcccaccu

SEQ ID NO: 2123151 - RNA, 19 nt, Artificial Sequence
  Description of Artificial Sequence: Synthetic oligonucleotide
cgcacagcauugguguacu

SEQ ID NO: 2123152 - RNA, 19 nt, Artificial Sequence
  Description of Artificial Sequence: Synthetic oligonucleotide
gcaccccguuugcccuuga

SEQ ID NO: 2123153 - RNA, 19 nt, Artificial Sequence
  Description of Artificial Sequence: Synthetic oligonucleotide
ccguuugcccuugaacauu

SEQ ID NO: 2123154 - RNA, 19 nt, Artificial Sequence
  Description of Artificial Sequence: Synthetic oligonucleotide
ccgucagcuucaccauccu

SEQ ID NO: 2123155 - RNA, 19 nt, Artificial Sequence
  Description of Artificial Sequence: Synthetic oligonucleotide
ccgccgucagcuucaccau

SEQ ID NO: 2123156 - RNA, 19 nt, Artificial Sequence
  Description of Artificial Sequence: Synthetic oligonucleotide
ggccaccggccugcgccuc

SEQ ID NO: 2123157 - RNA, 19 nt, Artificial Sequence
  Description of Artificial Sequence: Synthetic oligonucleotide
cgcggucccgcacagcauu

SEQ ID NO: 2123158 - RNA, 19 nt, Artificial Sequence
  Description of Artificial Sequence: Synthetic oligonucleotide
aaaaggucuauuuauuagg

SEQ ID NO: 2123159 - RNA, 19 nt, Artificial Sequence
  Description of Artificial Sequence: Synthetic oligonucleotide
uguaguuucugccuuacgg

SEQ ID NO: 2123160 - RNA, 19 nt, Artificial Sequence
  Description of Artificial Sequence: Synthetic oligonucleotide
uuuauuaggaaggaaaugu

SEQ ID NO: 2123161 - RNA, 19 nt, Artificial Sequence
  Description of Artificial Sequence: Synthetic oligonucleotide
ucaacuaggacacuucuug

SEQ ID NO: 2123162 - RNA, 19 nt, Artificial Sequence
  Description of Artificial Sequence: Synthetic oligonucleotide
aacuaggacacuucuuggc

SEQ ID NO: 2123163 - RNA, 19 nt, Artificial Sequence
  Description of Artificial Sequence: Synthetic oligonucleotide
aaugaggacagcagaaggc

SEQ ID NO: 2123164 - RNA, 19 nt, Artificial Sequence
  Description of Artificial Sequence: Synthetic oligonucleotide
gagaagaaggaacaggacc

SEQ ID NO: 2123165 - RNA, 19 nt, Artificial Sequence
  Description of Artificial Sequence: Synthetic oligonucleotide
ugcuuuaucaaagaugaag

SEQ ID NO: 2123166 - RNA, 19 nt, Artificial Sequence
  Description of Artificial Sequence: Synthetic oligonucleotide
acuaggacacuucuuggcc

SEQ ID NO: 2123167 - RNA, 19 nt, Artificial Sequence
  Description of Artificial Sequence: Synthetic oligonucleotide
uauuaggaaggaaauguca

SEQ ID NO: 2123168 - RNA, 19 nt, Artificial Sequence
  Description of Artificial Sequence: Synthetic oligonucleotide
uagaggcucguccacaucg

SEQ ID NO: 2123169 - RNA, 19 nt, Artificial Sequence
  Description of Artificial Sequence: Synthetic oligonucleotide
acccagauccuucagggcc

SEQ ID NO: 2123170 - RNA, 19 nt, Artificial Sequence
  Description of Artificial Sequence: Synthetic oligonucleotide
uuucaaaaggucuauuuau

SEQ ID NO: 2123171 - RNA, 19 nt, Artificial Sequence
  Description of Artificial Sequence: Synthetic oligonucleotide
ucuucagucaaaauggguu

SEQ ID NO: 2123172 - RNA, 19 nt, Artificial Sequence
  Description of Artificial Sequence: Synthetic oligonucleotide
ucugccuuacggcugacag

SEQ ID NO: 2123173 - RNA, 19 nt, Artificial Sequence
  Description of Artificial Sequence: Synthetic oligonucleotide
ugucagugcuuuaucaaag

SEQ ID NO: 2123174 - RNA, 19 nt, Artificial Sequence
  Description of Artificial Sequence: Synthetic oligonucleotide
ugagaaagcccuucugggg

SEQ ID NO: 2123175 - RNA, 19 nt, Artificial Sequence
  Description of Artificial Sequence: Synthetic oligonucleotide
uccauaagccaguccaucg

SEQ ID NO: 2123176 - RNA, 19 nt, Artificial Sequence
  Description of Artificial Sequence: Synthetic oligonucleotide
cuuuaucaaagaugaagag

SEQ ID NO: 2123177 - RNA, 19 nt, Artificial Sequence
  Description of Artificial Sequence: Synthetic oligonucleotide
ugagcaacugcacaggguc

SEQ ID NO: 2123178 - RNA, 19 nt, Artificial Sequence
  Description of Artificial Sequence: Synthetic oligonucleotide
aucggggucgucuucgugc

SEQ ID NO: 2123179 - RNA, 19 nt, Artificial Sequence
  Description of Artificial Sequence: Synthetic oligonucleotide
agacccagauccuucaggg

SEQ ID NO: 2123180 - RNA, 19 nt, Artificial Sequence
  Description of Artificial Sequence: Synthetic oligonucleotide
uuugggucagggaagugcc

SEQ ID NO: 2123181 - RNA, 19 nt, Artificial Sequence
  Description of Artificial Sequence: Synthetic oligonucleotide
aaugucagugcuuuaucaa

SEQ ID NO: 2123182 - RNA, 19 nt, Artificial Sequence
  Description of Artificial Sequence: Synthetic oligonucleotide
acacuggucauacucccgc

SEQ ID NO: 2123183 - RNA, 19 nt, Artificial Sequence
  Description of Artificial Sequence: Synthetic oligonucleotide
acuaccauacuucuuggcu

SEQ ID NO: 2123184 - RNA, 19 nt, Artificial Sequence
  Description of Artificial Sequence: Synthetic oligonucleotide
cauagagccucacagcugc

SEQ ID NO: 2123185 - RNA, 19 nt, Artificial Sequence
  Description of Artificial Sequence: Synthetic oligonucleotide
cacacuacuaccauacuuc

SEQ ID NO: 2123186 - RNA, 19 nt, Artificial Sequence
  Description of Artificial Sequence: Synthetic oligonucleotide
uccaacauucucuuagucu

SEQ ID NO: 2123187 - RNA, 19 nt, Artificial Sequence
  Description of Artificial Sequence: Synthetic oligonucleotide
auuaggaaggaaaugucag

SEQ ID NO: 2123188 - RNA, 19 nt, Artificial Sequence
  Description of Artificial Sequence: Synthetic oligonucleotide
uuauuaggaaggaaauguc

SEQ ID NO: 2123189 - RNA, 19 nt, Artificial Sequence
  Description of Artificial Sequence: Synthetic oligonucleotide
uccaucgcagccucgaugc

SEQ ID NO: 2123190 - RNA, 19 nt, Artificial Sequence
  Description of Artificial Sequence: Synthetic oligonucleotide
cugagaaagcccuucuggg

SEQ ID NO: 2123191 - RNA, 19 nt, Artificial Sequence
  Description of Artificial Sequence: Synthetic oligonucleotide
acggugaagcuccacauag

SEQ ID NO: 2123192 - RNA, 19 nt, Artificial Sequence
  Description of Artificial Sequence: Synthetic oligonucleotide
caaugaggacagcagaagg

SEQ ID NO: 2123193 - RNA, 19 nt, Artificial Sequence
  Description of Artificial Sequence: Synthetic oligonucleotide
guaguuucugccuuacggc

SEQ ID NO: 2123194 - RNA, 19 nt, Artificial Sequence
  Description of Artificial Sequence: Synthetic oligonucleotide
aaaggucuauuuauuagga

SEQ ID NO: 2123195 - RNA, 19 nt, Artificial Sequence
  Description of Artificial Sequence: Synthetic oligonucleotide
ucaaaaggucuauuuauua

SEQ ID NO: 2123196 - RNA, 19 nt, Artificial Sequence
  Description of Artificial Sequence: Synthetic oligonucleotide
ucuuagucuguucuugccu

SEQ ID NO: 2123197 - RNA, 19 nt, Artificial Sequence
  Description of Artificial Sequence: Synthetic oligonucleotide
ugagaacccacacuacuac

SEQ ID NO: 2123198 - RNA, 19 nt, Artificial Sequence
  Description of Artificial Sequence: Synthetic oligonucleotide
aggacccucaacuaggaca

SEQ ID NO: 2123199 - RNA, 19 nt, Artificial Sequence
  Description of Artificial Sequence: Synthetic oligonucleotide
acggcugacagcucuugcc

SEQ ID NO: 2123200 - RNA, 19 nt, Artificial Sequence
  Description of Artificial Sequence: Synthetic oligonucleotide
aggcacgagucccaguucc

SEQ ID NO: 2123201 - RNA, 19 nt, Artificial Sequence
  Description of Artificial Sequence: Synthetic oligonucleotide
ggucuauuuauuaggaagg

SEQ ID NO: 2123202 - RNA, 19 nt, Artificial Sequence
  Description of Artificial Sequence: Synthetic oligonucleotide
ucugcuuugucccuuucaa

SEQ ID NO: 2123203 - RNA, 19 nt, Artificial Sequence
  Description of Artificial Sequence: Synthetic oligonucleotide
ugcgacacuggucauacuc

SEQ ID NO: 2123204 - RNA, 19 nt, Artificial Sequence
  Description of Artificial Sequence: Synthetic oligonucleotide
uaaccuguaugcgacacug

SEQ ID NO: 2123205 - RNA, 19 nt, Artificial Sequence
  Description of Artificial Sequence: Synthetic oligonucleotide
gaacguuugggucagggaa

SEQ ID NO: 2123206 - RNA, 19 nt, Artificial Sequence
  Description of Artificial Sequence: Synthetic oligonucleotide
uucaaaaggucuauuuauu

SEQ ID NO: 2123207 - RNA, 19 nt, Artificial Sequence
  Description of Artificial Sequence: Synthetic oligonucleotide
uuaggaaggaaaugucagu

SEQ ID NO: 2123208 - RNA, 19 nt, Artificial Sequence
  Description of Artificial Sequence: Synthetic oligonucleotide
agccuuuucucuccugcgc

SEQ ID NO: 2123209 - RNA, 19 nt, Artificial Sequence
  Description of Artificial Sequence: Synthetic oligonucleotide
cauacucccgcuugguagg

SEQ ID NO: 2123210 - RNA, 19 nt, Artificial Sequence
  Description of Artificial Sequence: Synthetic oligonucleotide
uucuggggaagccacugag

SEQ ID NO: 2123211 - RNA, 19 nt, Artificial Sequence
  Description of Artificial Sequence: Synthetic oligonucleotide
ugcuuugucccuuucaauu

SEQ ID NO: 2123212 - RNA, 19 nt, Artificial Sequence
  Description of Artificial Sequence: Synthetic oligonucleotide
uugcugguggggaugacug

SEQ ID NO: 2123213 - RNA, 19 nt, Artificial Sequence
  Description of Artificial Sequence: Synthetic oligonucleotide
ucgaugaggcucuccagag

SEQ ID NO: 2123214 - RNA, 19 nt, Artificial Sequence
  Description of Artificial Sequence: Synthetic oligonucleotide
ugccuuacggcugacagcu

SEQ ID NO: 2123215 - RNA, 19 nt, Artificial Sequence
  Description of Artificial Sequence: Synthetic oligonucleotide
aggacguggguucccgucc

SEQ ID NO: 2123216 - RNA, 19 nt, Artificial Sequence
  Description of Artificial Sequence: Synthetic oligonucleotide
cuuagucuguucuugccuc

SEQ ID NO: 2123217 - RNA, 19 nt, Artificial Sequence
  Description of Artificial Sequence: Synthetic oligonucleotide
cuguaugcgacacugguca

SEQ ID NO: 2123218 - RNA, 19 nt, Artificial Sequence
  Description of Artificial Sequence: Synthetic oligonucleotide
agugccaucaggcagccua

SEQ ID NO: 2123219 - RNA, 19 nt, Artificial Sequence
  Description of Artificial Sequence: Synthetic oligonucleotide
ucucuuagucuguucuugc

SEQ ID NO: 2123220 - RNA, 19 nt, Artificial Sequence
  Description of Artificial Sequence: Synthetic oligonucleotide
uaguuucugccuuacggcu

SEQ ID NO: 2123221 - RNA, 19 nt, Artificial Sequence
  Description of Artificial Sequence: Synthetic oligonucleotide
cuaccauacuucuuggcuc

SEQ ID NO: 2123222 - RNA, 19 nt, Artificial Sequence
  Description of Artificial Sequence: Synthetic oligonucleotide
uguucccgggcccggaacg

SEQ ID NO: 2123223 - RNA, 19 nt, Artificial Sequence
  Description of Artificial Sequence: Synthetic oligonucleotide
ggugaagcuccacauagag

SEQ ID NO: 2123224 - RNA, 19 nt, Artificial Sequence
  Description of Artificial Sequence: Synthetic oligonucleotide
gaaaugucagugcuuuauc

SEQ ID NO: 2123225 - RNA, 19 nt, Artificial Sequence
  Description of Artificial Sequence: Synthetic oligonucleotide
caacuaggacacuucuugg

SEQ ID NO: 2123226 - RNA, 19 nt, Artificial Sequence
  Description of Artificial Sequence: Synthetic oligonucleotide
uucucggacccuuugucug

SEQ ID NO: 2123227 - RNA, 19 nt, Artificial Sequence
  Description of Artificial Sequence: Synthetic oligonucleotide
uucacguucccgcugcuuc

SEQ ID NO: 2123228 - RNA, 19 nt, Artificial Sequence
  Description of Artificial Sequence: Synthetic oligonucleotide
uucucuuagucuguucuug

SEQ ID NO: 2123229 - RNA, 19 nt, Artificial Sequence
  Description of Artificial Sequence: Synthetic oligonucleotide
uggucauacucccgcuugg

SEQ ID NO: 2123230 - RNA, 19 nt, Artificial Sequence
  Description of Artificial Sequence: Synthetic oligonucleotide
aacguuugggucagggaag

SEQ ID NO: 2123231 - RNA, 19 nt, Artificial Sequence
  Description of Artificial Sequence: Synthetic oligonucleotide
ucuauuuauuaggaaggaa

SEQ ID NO: 2123232 - RNA, 19 nt, Artificial Sequence
  Description of Artificial Sequence: Synthetic oligonucleotide
uaugcgacacuggucauac

SEQ ID NO: 2123233 - RNA, 19 nt, Artificial Sequence
  Description of Artificial Sequence: Synthetic oligonucleotide
cuacuaccauacuucuugg

SEQ ID NO: 2123234 - RNA, 19 nt, Artificial Sequence
  Description of Artificial Sequence: Synthetic oligonucleotide
augacugagaacccacacu

SEQ ID NO: 2123235 - RNA, 19 nt, Artificial Sequence
  Description of Artificial Sequence: Synthetic oligonucleotide
aaagagggauggugggaug

SEQ ID NO: 2123236 - RNA, 19 nt, Artificial Sequence
  Description of Artificial Sequence: Synthetic oligonucleotide
acaaugaggacagcagaag

SEQ ID NO: 2123237 - RNA, 19 nt, Artificial Sequence
  Description of Artificial Sequence: Synthetic oligonucleotide
uaccauacuucuuggcucu

SEQ ID NO: 2123238 - RNA, 19 nt, Artificial Sequence
  Description of Artificial Sequence: Synthetic oligonucleotide
acaagcuccaacauucucu

SEQ ID NO: 2123239 - RNA, 19 nt, Artificial Sequence
  Description of Artificial Sequence: Synthetic oligonucleotide
cuccccacggugaagcucc

SEQ ID NO: 2123240 - RNA, 19 nt, Artificial Sequence
  Description of Artificial Sequence: Synthetic oligonucleotide
gagaacccacacuacuacc

SEQ ID NO: 2123241 - RNA, 19 nt, Artificial Sequence
  Description of Artificial Sequence: Synthetic oligonucleotide
guuugggucagggaagugc

SEQ ID NO: 2123242 - RNA, 19 nt, Artificial Sequence
  Description of Artificial Sequence: Synthetic oligonucleotide
ucucggacccuuugucugg

SEQ ID NO: 2123243 - RNA, 19 nt, Artificial Sequence
  Description of Artificial Sequence: Synthetic oligonucleotide
cucuuagucuguucuugcc

SEQ ID NO: 2123244 - RNA, 19 nt, Artificial Sequence
  Description of Artificial Sequence: Synthetic oligonucleotide
gucaaaauggguuugcuuu

SEQ ID NO: 2123245 - RNA, 19 nt, Artificial Sequence
  Description of Artificial Sequence: Synthetic oligonucleotide
accuguaugcgacacuggu

SEQ ID NO: 2123246 - RNA, 19 nt, Artificial Sequence
  Description of Artificial Sequence: Synthetic oligonucleotide
uucagucaaaauggguuug

SEQ ID NO: 2123247 - RNA, 19 nt, Artificial Sequence
  Description of Artificial Sequence: Synthetic oligonucleotide
augucagugcuuuaucaaa

SEQ ID NO: 2123248 - RNA, 19 nt, Artificial Sequence
  Description of Artificial Sequence: Synthetic oligonucleotide
cugcuucugggccacaagc

SEQ ID NO: 2123249 - RNA, 19 nt, Artificial Sequence
  Description of Artificial Sequence: Synthetic oligonucleotide
uucccgucccaggauaugg

SEQ ID NO: 2123250 - RNA, 19 nt, Artificial Sequence
  Description of Artificial Sequence: Synthetic oligonucleotide
acacuacuaccauacuucu

SEQ ID NO: 2123251 - RNA, 19 nt, Artificial Sequence
  Description of Artificial Sequence: Synthetic oligonucleotide
gcuuuaucaaagaugaaga

SEQ ID NO: 2123252 - RNA, 19 nt, Artificial Sequence
  Description of Artificial Sequence: Synthetic oligonucleotide
agccuaaccuguaugcgac

SEQ ID NO: 2123253 - RNA, 19 nt, Artificial Sequence
  Description of Artificial Sequence: Synthetic oligonucleotide
uacuaccauacuucuuggc

SEQ ID NO: 2123254 - RNA, 19 nt, Artificial Sequence
  Description of Artificial Sequence: Synthetic oligonucleotide
agagccgucagcuccgcca

SEQ ID NO: 2123255 - RNA, 19 nt, Artificial Sequence
  Description of Artificial Sequence: Synthetic oligonucleotide
caggauauggccgagggga

SEQ ID NO: 2123256 - RNA, 19 nt, Artificial Sequence
  Description of Artificial Sequence: Synthetic oligonucleotide
ucgucuucgugcuccauaa

SEQ ID NO: 2123257 - RNA, 19 nt, Artificial Sequence
  Description of Artificial Sequence: Synthetic oligonucleotide
caggaccuggaucuguugc

SEQ ID NO: 2123258 - RNA, 19 nt, Artificial Sequence
  Description of Artificial Sequence: Synthetic oligonucleotide
augaggacagcagaaggca

SEQ ID NO: 2123259 - RNA, 19 nt, Artificial Sequence
  Description of Artificial Sequence: Synthetic oligonucleotide
ugcgcuccucagcagcacg

SEQ ID NO: 2123260 - RNA, 19 nt, Artificial Sequence
  Description of Artificial Sequence: Synthetic oligonucleotide
agucaaaauggguuugcuu

SEQ ID NO: 2123261 - RNA, 19 nt, Artificial Sequence
  Description of Artificial Sequence: Synthetic oligonucleotide
agaacccacacuacuacca

SEQ ID NO: 2123262 - RNA, 19 nt, Artificial Sequence
  Description of Artificial Sequence: Synthetic oligonucleotide
uccgcugcuuuucucguuc

SEQ ID NO: 2123263 - RNA, 19 nt, Artificial Sequence
  Description of Artificial Sequence: Synthetic oligonucleotide
ucgucuuccuguaguuucu

SEQ ID NO: 2123264 - RNA, 19 nt, Artificial Sequence
  Description of Artificial Sequence: Synthetic oligonucleotide
uucccgcugcuucugggcc

SEQ ID NO: 2123265 - RNA, 19 nt, Artificial Sequence
  Description of Artificial Sequence: Synthetic oligonucleotide
gcuuuucucguuccaaagc

SEQ ID NO: 2123266 - RNA, 19 nt, Artificial Sequence
  Description of Artificial Sequence: Synthetic oligonucleotide
ucuagaggcucguccacau

SEQ ID NO: 2123267 - RNA, 19 nt, Artificial Sequence
  Description of Artificial Sequence: Synthetic oligonucleotide
cuugcccuugucuccuccg

SEQ ID NO: 2123268 - RNA, 19 nt, Artificial Sequence
  Description of Artificial Sequence: Synthetic oligonucleotide
cuggucauacucccgcuug

SEQ ID NO: 2123269 - RNA, 19 nt, Artificial Sequence
  Description of Artificial Sequence: Synthetic oligonucleotide
ucucuagaggcucguccac

SEQ ID NO: 2123270 - RNA, 19 nt, Artificial Sequence
  Description of Artificial Sequence: Synthetic oligonucleotide
ggcagccuaaccuguaugc

SEQ ID NO: 2123271 - RNA, 19 nt, Artificial Sequence
  Description of Artificial Sequence: Synthetic oligonucleotide
auacuucuuggcucucucu

SEQ ID NO: 2123272 - RNA, 19 nt, Artificial Sequence
  Description of Artificial Sequence: Synthetic oligonucleotide
cauacuucuuggcucucuc

SEQ ID NO: 2123273 - RNA, 19 nt, Artificial Sequence
  Description of Artificial Sequence: Synthetic oligonucleotide
uucuccgcgcguccccugg

SEQ ID NO: 2123274 - RNA, 19 nt, Artificial Sequence
  Description of Artificial Sequence: Synthetic oligonucleotide
agggccaacuugcucugag

SEQ ID NO: 2123275 - RNA, 19 nt, Artificial Sequence
  Description of Artificial Sequence: Synthetic oligonucleotide
cacgagucccaguuccugc

SEQ ID NO: 2123276 - RNA, 19 nt, Artificial Sequence
  Description of Artificial Sequence: Synthetic oligonucleotide
ucuugcccuugucuccucc

SEQ ID NO: 2123277 - RNA, 19 nt, Artificial Sequence
  Description of Artificial Sequence: Synthetic oligonucleotide
agcacggcgcaucucgucu

SEQ ID NO: 2123278 - RNA, 19 nt, Artificial Sequence
  Description of Artificial Sequence: Synthetic oligonucleotide
gauauggccgaggggaguc

SEQ ID NO: 2123279 - RNA, 19 nt, Artificial Sequence
  Description of Artificial Sequence: Synthetic oligonucleotide
cuaggacacuucuuggcca

SEQ ID NO: 2123280 - RNA, 19 nt, Artificial Sequence
  Description of Artificial Sequence: Synthetic oligonucleotide
uacggcugacagcucuugc

SEQ ID NO: 2123281 - RNA, 19 nt, Artificial Sequence
  Description of Artificial Sequence: Synthetic oligonucleotide
ugccaacuguucccgggcc

SEQ ID NO: 2123282 - RNA, 19 nt, Artificial Sequence
  Description of Artificial Sequence: Synthetic oligonucleotide
aaccuguaugcgacacugg

SEQ ID NO: 2123283 - RNA, 19 nt, Artificial Sequence
  Description of Artificial Sequence: Synthetic oligonucleotide
cauaagccaguccaucgca

SEQ ID NO: 2123284 - RNA, 19 nt, Artificial Sequence
  Description of Artificial Sequence: Synthetic oligonucleotide
cacaucggggucgucuucg

SEQ ID NO: 2123285 - RNA, 19 nt, Artificial Sequence
  Description of Artificial Sequence: Synthetic oligonucleotide
cuucgugcuccauaagcca

SEQ ID NO: 2123286 - RNA, 19 nt, Artificial Sequence
  Description of Artificial Sequence: Synthetic oligonucleotide
uuccuguaguuucugccuu

SEQ ID NO: 2123287 - RNA, 19 nt, Artificial Sequence
  Description of Artificial Sequence: Synthetic oligonucleotide
cacauagagccucacagcu

SEQ ID NO: 2123288 - RNA, 19 nt, Artificial Sequence
  Description of Artificial Sequence: Synthetic oligonucleotide
ucgugcuccauaagccagu

SEQ ID NO: 2123289 - RNA, 19 nt, Artificial Sequence
  Description of Artificial Sequence: Synthetic oligonucleotide
aacccacacuacuaccaua

SEQ ID NO: 2123290 - RNA, 19 nt, Artificial Sequence
  Description of Artificial Sequence: Synthetic oligonucleotide
cucgaugaggcucuccaga

SEQ ID NO: 2123291 - RNA, 19 nt, Artificial Sequence
  Description of Artificial Sequence: Synthetic oligonucleotide
cugccuuacggcugacagc

SEQ ID NO: 2123292 - RNA, 19 nt, Artificial Sequence
  Description of Artificial Sequence: Synthetic oligonucleotide
cugguucccugugagggcc

SEQ ID NO: 2123293 - RNA, 19 nt, Artificial Sequence
  Description of Artificial Sequence: Synthetic oligonucleotide
ucccgucccaggauauggc

SEQ ID NO: 2123294 - RNA, 19 nt, Artificial Sequence
  Description of Artificial Sequence: Synthetic oligonucleotide
cugccaacuguucccgggc

SEQ ID NO: 2123295 - RNA, 19 nt, Artificial Sequence
  Description of Artificial Sequence: Synthetic oligonucleotide
gggaaagcccaucucgaug

SEQ ID NO: 2123296 - RNA, 19 nt, Artificial Sequence
  Description of Artificial Sequence: Synthetic oligonucleotide
aggccgcuccaugucagcc

SEQ ID NO: 2123297 - RNA, 19 nt, Artificial Sequence
  Description of Artificial Sequence: Synthetic oligonucleotide
gaaggcacgagucccaguu

SEQ ID NO: 2123298 - RNA, 19 nt, Artificial Sequence
  Description of Artificial Sequence: Synthetic oligonucleotide
aggcagccuaaccuguaug

SEQ ID NO: 2123299 - RNA, 19 nt, Artificial Sequence
  Description of Artificial Sequence: Synthetic oligonucleotide
cuccaacauucucuuaguc

SEQ ID NO: 2123300 - RNA, 19 nt, Artificial Sequence
  Description of Artificial Sequence: Synthetic oligonucleotide
ggauggaggacccucaacu

SEQ ID NO: 2123301 - RNA, 19 nt, Artificial Sequence
  Description of Artificial Sequence: Synthetic oligonucleotide
auggugggauggaggaccc

SEQ ID NO: 2123302 - RNA, 19 nt, Artificial Sequence
  Description of Artificial Sequence: Synthetic oligonucleotide
ggguuugcuuucuucagca

SEQ ID NO: 2123303 - RNA, 19 nt, Artificial Sequence
  Description of Artificial Sequence: Synthetic oligonucleotide
ucacguucccgcugcuucu

SEQ ID NO: 2123304 - RNA, 19 nt, Artificial Sequence
  Description of Artificial Sequence: Synthetic oligonucleotide
uccgcggggaccggguugg

SEQ ID NO: 2123305 - RNA, 19 nt, Artificial Sequence
  Description of Artificial Sequence: Synthetic oligonucleotide
gaucuguugcuggugggga

SEQ ID NO: 2123306 - RNA, 19 nt, Artificial Sequence
  Description of Artificial Sequence: Synthetic oligonucleotide
ugcucugaggacguggguu

SEQ ID NO: 2123307 - RNA, 19 nt, Artificial Sequence
  Description of Artificial Sequence: Synthetic oligonucleotide
ugaggcucuccagagccgu

SEQ ID NO: 2123308 - RNA, 19 nt, Artificial Sequence
  Description of Artificial Sequence: Synthetic oligonucleotide
caucgcagccucgaugccc

SEQ ID NO: 2123309 - RNA, 19 nt, Artificial Sequence
  Description of Artificial Sequence: Synthetic oligonucleotide
agaaagcccuucuggggaa

SEQ ID NO: 2123310 - RNA, 19 nt, Artificial Sequence
  Description of Artificial Sequence: Synthetic oligonucleotide
ugggaaagcccaucucgau

SEQ ID NO: 2123311 - RNA, 19 nt, Artificial Sequence
  Description of Artificial Sequence: Synthetic oligonucleotide
cugggaaagcccaucucga

SEQ ID NO: 2123312 - RNA, 19 nt, Artificial Sequence
  Description of Artificial Sequence: Synthetic oligonucleotide
acaggaccuggaucuguug

SEQ ID NO: 2123313 - RNA, 19 nt, Artificial Sequence
  Description of Artificial Sequence: Synthetic oligonucleotide
ucggggucgucuucgugcu

SEQ ID NO: 2123314 - RNA, 19 nt, Artificial Sequence
  Description of Artificial Sequence: Synthetic oligonucleotide
cugagaacccacacuacua

SEQ ID NO: 2123315 - RNA, 19 nt, Artificial Sequence
  Description of Artificial Sequence: Synthetic oligonucleotide
ggacccucaacuaggacac

SEQ ID NO: 2123316 - RNA, 19 nt, Artificial Sequence
  Description of Artificial Sequence: Synthetic oligonucleotide
cagccuaaccuguaugcga

SEQ ID NO: 2123317 - RNA, 19 nt, Artificial Sequence
  Description of Artificial Sequence: Synthetic oligonucleotide
uugggucagggaagugcca

SEQ ID NO: 2123318 - RNA, 19 nt, Artificial Sequence
  Description of Artificial Sequence: Synthetic oligonucleotide
cucuccugcgcuccucagc

SEQ ID NO: 2123319 - RNA, 19 nt, Artificial Sequence
  Description of Artificial Sequence: Synthetic oligonucleotide
ccauaagccaguccaucgc

SEQ ID NO: 2123320 - RNA, 19 nt, Artificial Sequence
  Description of Artificial Sequence: Synthetic oligonucleotide
uuccgcggggaccggguug

SEQ ID NO: 2123321 - RNA, 19 nt, Artificial Sequence
  Description of Artificial Sequence: Synthetic oligonucleotide
agaggcucguccacaucgg

SEQ ID NO: 2123322 - RNA, 19 nt, Artificial Sequence
  Description of Artificial Sequence: Synthetic oligonucleotide
gaaagcccuucuggggaag

SEQ ID NO: 2123323 - RNA, 19 nt, Artificial Sequence
  Description of Artificial Sequence: Synthetic oligonucleotide
ggccaacuugcucugagga

SEQ ID NO: 2123324 - RNA, 19 nt, Artificial Sequence
  Description of Artificial Sequence: Synthetic oligonucleotide
gguuugcuuucuucagcag

SEQ ID NO: 2123325 - RNA, 19 nt, Artificial Sequence
  Description of Artificial Sequence: Synthetic oligonucleotide
cugaggacguggguucccg

SEQ ID NO: 2123326 - RNA, 19 nt, Artificial Sequence
  Description of Artificial Sequence: Synthetic oligonucleotide
cuccauaagccaguccauc

SEQ ID NO: 2123327 - RNA, 19 nt, Artificial Sequence
  Description of Artificial Sequence: Synthetic oligonucleotide
ucuccgcgcguccccuggg

SEQ ID NO: 2123328 - RNA, 19 nt, Artificial Sequence
  Description of Artificial Sequence: Synthetic oligonucleotide
uguaugcgacacuggucau

SEQ ID NO: 2123329 - RNA, 19 nt, Artificial Sequence
  Description of Artificial Sequence: Synthetic oligonucleotide
aggacagcagaaggcacga

SEQ ID NO: 2123330 - RNA, 19 nt, Artificial Sequence
  Description of Artificial Sequence: Synthetic oligonucleotide
gcagccuaaccuguaugcg

SEQ ID NO: 2123331 - RNA, 19 nt, Artificial Sequence
  Description of Artificial Sequence: Synthetic oligonucleotide
ugggucagggaagugccau

SEQ ID NO: 2123332 - RNA, 19 nt, Artificial Sequence
  Description of Artificial Sequence: Synthetic oligonucleotide
ucugaggacguggguuccc

SEQ ID NO: 2123333 - RNA, 19 nt, Artificial Sequence
  Description of Artificial Sequence: Synthetic oligonucleotide
uggggaagccacugagcaa

SEQ ID NO: 2123334 - RNA, 19 nt, Artificial Sequence
  Description of Artificial Sequence: Synthetic oligonucleotide
uccuguaguuucugccuua

SEQ ID NO: 2123335 - RNA, 19 nt, Artificial Sequence
  Description of Artificial Sequence: Synthetic oligonucleotide
ggccagagccuucuccgcg

SEQ ID NO: 2123336 - RNA, 19 nt, Artificial Sequence
  Description of Artificial Sequence: Synthetic oligonucleotide
cagcagacccagauccuuc

SEQ ID NO: 2123337 - RNA, 19 nt, Artificial Sequence
  Description of Artificial Sequence: Synthetic oligonucleotide
cuucagucaaaauggguuu

SEQ ID NO: 2123338 - RNA, 19 nt, Artificial Sequence
  Description of Artificial Sequence: Synthetic oligonucleotide
aggauauggccgaggggag

SEQ ID NO: 2123339 - RNA, 19 nt, Artificial Sequence
  Description of Artificial Sequence: Synthetic oligonucleotide
uugcucugaggacgugggu

SEQ ID NO: 2123340 - RNA, 19 nt, Artificial Sequence
  Description of Artificial Sequence: Synthetic oligonucleotide
gaggacccucaacuaggac

SEQ ID NO: 2123341 - RNA, 19 nt, Artificial Sequence
  Description of Artificial Sequence: Synthetic oligonucleotide
auacucccgcuugguaggg

SEQ ID NO: 2123342 - RNA, 19 nt, Artificial Sequence
  Description of Artificial Sequence: Synthetic oligonucleotide
uuggcucucucugcuuugu

SEQ ID NO: 2123343 - RNA, 19 nt, Artificial Sequence
  Description of Artificial Sequence: Synthetic oligonucleotide
agaaggcacgagucccagu

SEQ ID NO: 2123344 - RNA, 19 nt, Artificial Sequence
  Description of Artificial Sequence: Synthetic oligonucleotide
gagccuucuccgcgcgucc

SEQ ID NO: 2123345 - RNA, 19 nt, Artificial Sequence
  Description of Artificial Sequence: Synthetic oligonucleotide
gggccaacuugcucugagg

SEQ ID NO: 2123346 - RNA, 19 nt, Artificial Sequence
  Description of Artificial Sequence: Synthetic oligonucleotide
ucgaugcccugguucccug

SEQ ID NO: 2123347 - RNA, 19 nt, Artificial Sequence
  Description of Artificial Sequence: Synthetic oligonucleotide
cuuucuucacguucccgcu

SEQ ID NO: 2123348 - RNA, 19 nt, Artificial Sequence
  Description of Artificial Sequence: Synthetic oligonucleotide
ucuucacguucccgcugcu

SEQ ID NO: 2123349 - RNA, 19 nt, Artificial Sequence
  Description of Artificial Sequence: Synthetic oligonucleotide
ggaacguuugggucaggga

SEQ ID NO: 2123350 - RNA, 19 nt, Artificial Sequence
  Description of Artificial Sequence: Synthetic oligonucleotide
gacagcucuugcccuuguc

SEQ ID NO: 2123351 - RNA, 19 nt, Artificial Sequence
  Description of Artificial Sequence: Synthetic oligonucleotide
gucccaguuccugcagagg

SEQ ID NO: 2123352 - RNA, 19 nt, Artificial Sequence
  Description of Artificial Sequence: Synthetic oligonucleotide
ccgucccaggauauggccg

SEQ ID NO: 2123353 - RNA, 19 nt, Artificial Sequence
  Description of Artificial Sequence: Synthetic oligonucleotide
agaggccgcuccaugucag

SEQ ID NO: 2123354 - RNA, 19 nt, Artificial Sequence
  Description of Artificial Sequence: Synthetic oligonucleotide
uacucccgcuugguagggg

SEQ ID NO: 2123355 - RNA, 19 nt, Artificial Sequence
  Description of Artificial Sequence: Synthetic oligonucleotide
acggcgcaucucgucuucc

SEQ ID NO: 2123356 - RNA, 19 nt, Artificial Sequence
  Description of Artificial Sequence: Synthetic oligonucleotide
aagcuccaacauucucuua

SEQ ID NO: 2123357 - RNA, 19 nt, Artificial Sequence
  Description of Artificial Sequence: Synthetic oligonucleotide
cagccucugagaaagcccu

SEQ ID NO: 2123358 - RNA, 19 nt, Artificial Sequence
  Description of Artificial Sequence: Synthetic oligonucleotide
gaacccacacuacuaccau

SEQ ID NO: 2123359 - RNA, 19 nt, Artificial Sequence
  Description of Artificial Sequence: Synthetic oligonucleotide
ccuguaugcgacacugguc

SEQ ID NO: 2123360 - RNA, 19 nt, Artificial Sequence
  Description of Artificial Sequence: Synthetic oligonucleotide
ucucgucuuccuguaguuu

SEQ ID NO: 2123361 - RNA, 19 nt, Artificial Sequence
  Description of Artificial Sequence: Synthetic oligonucleotide
cucugaggacguggguucc

SEQ ID NO: 2123362 - RNA, 19 nt, Artificial Sequence
  Description of Artificial Sequence: Synthetic oligonucleotide
ggggucgucuucgugcucc

SEQ ID NO: 2123363 - RNA, 19 nt, Artificial Sequence
  Description of Artificial Sequence: Synthetic oligonucleotide
uucugccuuacggcugaca

SEQ ID NO: 2123364 - RNA, 19 nt, Artificial Sequence
  Description of Artificial Sequence: Synthetic oligonucleotide
caucucgucuuccuguagu

SEQ ID NO: 2123365 - RNA, 19 nt, Artificial Sequence
  Description of Artificial Sequence: Synthetic oligonucleotide
gggaugacugagaacccac

SEQ ID NO: 2123366 - RNA, 19 nt, Artificial Sequence
  Description of Artificial Sequence: Synthetic oligonucleotide
ggaaaugucagugcuuuau

SEQ ID NO: 2123367 - RNA, 19 nt, Artificial Sequence
  Description of Artificial Sequence: Synthetic oligonucleotide
agccaguccaucgcagccu

SEQ ID NO: 2123368 - RNA, 19 nt, Artificial Sequence
  Description of Artificial Sequence: Synthetic oligonucleotide
acaucggggucgucuucgu

SEQ ID NO: 2123369 - RNA, 19 nt, Artificial Sequence
  Description of Artificial Sequence: Synthetic oligonucleotide
caaagaugaagaggucaaa

SEQ ID NO: 2123370 - RNA, 19 nt, Artificial Sequence
  Description of Artificial Sequence: Synthetic oligonucleotide
aacuguucccgggcccgga

SEQ ID NO: 2123371 - RNA, 19 nt, Artificial Sequence
  Description of Artificial Sequence: Synthetic oligonucleotide
gucauacucccgcuuggua

SEQ ID NO: 2123372 - RNA, 19 nt, Artificial Sequence
  Description of Artificial Sequence: Synthetic oligonucleotide
gugcuccauaagccagucc

SEQ ID NO: 2123373 - RNA, 19 nt, Artificial Sequence
  Description of Artificial Sequence: Synthetic oligonucleotide
uauggccgaggggagucuc

SEQ ID NO: 2123374 - RNA, 19 nt, Artificial Sequence
  Description of Artificial Sequence: Synthetic oligonucleotide
gguggggaugacugagaac

SEQ ID NO: 2123375 - RNA, 19 nt, Artificial Sequence
  Description of Artificial Sequence: Synthetic oligonucleotide
uggcucucucugcuuuguc

SEQ ID NO: 2123376 - RNA, 19 nt, Artificial Sequence
  Description of Artificial Sequence: Synthetic oligonucleotide
ccuaaccuguaugcgacac

SEQ ID NO: 2123377 - RNA, 19 nt, Artificial Sequence
  Description of Artificial Sequence: Synthetic oligonucleotide
ccgaggggagucucuagag

SEQ ID NO: 2123378 - RNA, 19 nt, Artificial Sequence
  Description of Artificial Sequence: Synthetic oligonucleotide
aggggagucucuagaggcu

SEQ ID NO: 2123379 - RNA, 19 nt, Artificial Sequence
  Description of Artificial Sequence: Synthetic oligonucleotide
gacccuuugucuggcagcu

SEQ ID NO: 2123380 - RNA, 19 nt, Artificial Sequence
  Description of Artificial Sequence: Synthetic oligonucleotide
cugcagaggccgcuccaug

SEQ ID NO: 2123381 - RNA, 19 nt, Artificial Sequence
  Description of Artificial Sequence: Synthetic oligonucleotide
cucggacccuuugucuggc

SEQ ID NO: 2123382 - RNA, 19 nt, Artificial Sequence
  Description of Artificial Sequence: Synthetic oligonucleotide
gggagucucuagaggcucg

SEQ ID NO: 2123383 - RNA, 19 nt, Artificial Sequence
  Description of Artificial Sequence: Synthetic oligonucleotide
aguccaucgcagccucgau

SEQ ID NO: 2123384 - RNA, 19 nt, Artificial Sequence
  Description of Artificial Sequence: Synthetic oligonucleotide
ggugggauggaggacccuc

SEQ ID NO: 2123385 - RNA, 19 nt, Artificial Sequence
  Description of Artificial Sequence: Synthetic oligonucleotide
acuguucccgggcccggaa

SEQ ID NO: 2123386 - RNA, 19 nt, Artificial Sequence
  Description of Artificial Sequence: Synthetic oligonucleotide
uccgcgcguccccugggaa

SEQ ID NO: 2123387 - RNA, 19 nt, Artificial Sequence
  Description of Artificial Sequence: Synthetic oligonucleotide
caucggggucgucuucgug

SEQ ID NO: 2123388 - RNA, 19 nt, Artificial Sequence
  Description of Artificial Sequence: Synthetic oligonucleotide
cugguggggaugacugaga

SEQ ID NO: 2123389 - RNA, 19 nt, Artificial Sequence
  Description of Artificial Sequence: Synthetic oligonucleotide
cuguucccgggcccggaac

SEQ ID NO: 2123390 - RNA, 19 nt, Artificial Sequence
  Description of Artificial Sequence: Synthetic oligonucleotide
acguggguucccgucccag

SEQ ID NO: 2123391 - RNA, 19 nt, Artificial Sequence
  Description of Artificial Sequence: Synthetic oligonucleotide
cagaggccgcuccauguca

SEQ ID NO: 2123392 - RNA, 19 nt, Artificial Sequence
  Description of Artificial Sequence: Synthetic oligonucleotide
cuugccucuccucuucagu

SEQ ID NO: 2123393 - RNA, 19 nt, Artificial Sequence
  Description of Artificial Sequence: Synthetic oligonucleotide
cccgucccaggauauggcc

SEQ ID NO: 2123394 - RNA, 19 nt, Artificial Sequence
  Description of Artificial Sequence: Synthetic oligonucleotide
ccugguucccugugagggc

SEQ ID NO: 2123395 - RNA, 19 nt, Artificial Sequence
  Description of Artificial Sequence: Synthetic oligonucleotide
uccuccccacggugaagcu

SEQ ID NO: 2123396 - RNA, 19 nt, Artificial Sequence
  Description of Artificial Sequence: Synthetic oligonucleotide
gccaacuguucccgggccc

SEQ ID NO: 2123397 - RNA, 19 nt, Artificial Sequence
  Description of Artificial Sequence: Synthetic oligonucleotide
gcaucucgucuuccuguag

SEQ ID NO: 2123398 - RNA, 19 nt, Artificial Sequence
  Description of Artificial Sequence: Synthetic oligonucleotide
ugagggccagagccuucuc

SEQ ID NO: 2123399 - RNA, 19 nt, Artificial Sequence
  Description of Artificial Sequence: Synthetic oligonucleotide
ucguccacaucggggucgu

SEQ ID NO: 2123400 - RNA, 19 nt, Artificial Sequence
  Description of Artificial Sequence: Synthetic oligonucleotide
gcccuugucuccuccgcug

SEQ ID NO: 2123401 - RNA, 19 nt, Artificial Sequence
  Description of Artificial Sequence: Synthetic oligonucleotide
agguuccuccccacgguga

SEQ ID NO: 2123402 - RNA, 19 nt, Artificial Sequence
  Description of Artificial Sequence: Synthetic oligonucleotide
ucggacccuuugucuggca

SEQ ID NO: 2123403 - RNA, 19 nt, Artificial Sequence
  Description of Artificial Sequence: Synthetic oligonucleotide
cuuugucccuuucaauuuu

SEQ ID NO: 2123404 - RNA, 19 nt, Artificial Sequence
  Description of Artificial Sequence: Synthetic oligonucleotide
cccucaacuaggacacuuc

SEQ ID NO: 2123405 - RNA, 19 nt, Artificial Sequence
  Description of Artificial Sequence: Synthetic oligonucleotide
guucccgucccaggauaug

SEQ ID NO: 2123406 - RNA, 19 nt, Artificial Sequence
  Description of Artificial Sequence: Synthetic oligonucleotide
auauggccgaggggagucu

SEQ ID NO: 2123407 - RNA, 19 nt, Artificial Sequence
  Description of Artificial Sequence: Synthetic oligonucleotide
cagcacggcgcaucucguc

SEQ ID NO: 2123408 - RNA, 19 nt, Artificial Sequence
  Description of Artificial Sequence: Synthetic oligonucleotide
ggcccggaacguuuggguc

SEQ ID NO: 2123409 - RNA, 19 nt, Artificial Sequence
  Description of Artificial Sequence: Synthetic oligonucleotide
guugcugguggggaugacu

SEQ ID NO: 2123410 - RNA, 19 nt, Artificial Sequence
  Description of Artificial Sequence: Synthetic oligonucleotide
gugggauggaggacccuca

SEQ ID NO: 2123411 - RNA, 19 nt, Artificial Sequence
  Description of Artificial Sequence: Synthetic oligonucleotide
cuaaccuguaugcgacacu

SEQ ID NO: 2123412 - RNA, 19 nt, Artificial Sequence
  Description of Artificial Sequence: Synthetic oligonucleotide
caacuugcucugaggacgu

SEQ ID NO: 2123413 - RNA, 19 nt, Artificial Sequence
  Description of Artificial Sequence: Synthetic oligonucleotide
ucccgggcccggaacguuu

SEQ ID NO: 2123414 - RNA, 19 nt, Artificial Sequence
  Description of Artificial Sequence: Synthetic oligonucleotide
guaugcgacacuggucaua

SEQ ID NO: 2123415 - RNA, 19 nt, Artificial Sequence
  Description of Artificial Sequence: Synthetic oligonucleotide
gagucucuagaggcucguc

SEQ ID NO: 2123416 - RNA, 19 nt, Artificial Sequence
  Description of Artificial Sequence: Synthetic oligonucleotide
cucaacuaggacacuucuu

SEQ ID NO: 2123417 - RNA, 19 nt, Artificial Sequence
  Description of Artificial Sequence: Synthetic oligonucleotide
cacguucccgcugcuucug

SEQ ID NO: 2123418 - RNA, 19 nt, Artificial Sequence
  Description of Artificial Sequence: Synthetic oligonucleotide
gccgaggggagucucuaga

SEQ ID NO: 2123419 - RNA, 19 nt, Artificial Sequence
  Description of Artificial Sequence: Synthetic oligonucleotide
gcagaggccgcuccauguc

SEQ ID NO: 2123420 - RNA, 19 nt, Artificial Sequence
  Description of Artificial Sequence: Synthetic oligonucleotide
ggggaugacugagaaccca

SEQ ID NO: 2123421 - RNA, 19 nt, Artificial Sequence
  Description of Artificial Sequence: Synthetic oligonucleotide
ccuguaguuucugccuuac

SEQ ID NO: 2123422 - RNA, 19 nt, Artificial Sequence
  Description of Artificial Sequence: Synthetic oligonucleotide
cuucuccgcgcguccccug

SEQ ID NO: 2123423 - RNA, 19 nt, Artificial Sequence
  Description of Artificial Sequence: Synthetic oligonucleotide
cacggugaagcuccacaua

SEQ ID NO: 2123424 - RNA, 19 nt, Artificial Sequence
  Description of Artificial Sequence: Synthetic oligonucleotide
gcccugguucccugugagg

SEQ ID NO: 2123425 - RNA, 19 nt, Artificial Sequence
  Description of Artificial Sequence: Synthetic oligonucleotide
gacguggguucccguccca

SEQ ID NO: 2123426 - RNA, 19 nt, Artificial Sequence
  Description of Artificial Sequence: Synthetic oligonucleotide
gguuccuccccacggugaa

SEQ ID NO: 2123427 - RNA, 19 nt, Artificial Sequence
  Description of Artificial Sequence: Synthetic oligonucleotide
augcgacacuggucauacu

SEQ ID NO: 2123428 - RNA, 19 nt, Artificial Sequence
  Description of Artificial Sequence: Synthetic oligonucleotide
cagagccgucagcuccgcc

SEQ ID NO: 2123429 - RNA, 19 nt, Artificial Sequence
  Description of Artificial Sequence: Synthetic oligonucleotide
ccagagccuucuccgcgcg

SEQ ID NO: 2123430 - RNA, 19 nt, Artificial Sequence
  Description of Artificial Sequence: Synthetic oligonucleotide
ggucuuguccagguuccuc

SEQ ID NO: 2123431 - RNA, 19 nt, Artificial Sequence
  Description of Artificial Sequence: Synthetic oligonucleotide
cggaacguuugggucaggg

SEQ ID NO: 2123432 - RNA, 19 nt, Artificial Sequence
  Description of Artificial Sequence: Synthetic oligonucleotide
gcacgagucccaguuccug

SEQ ID NO: 2123433 - RNA, 19 nt, Artificial Sequence
  Description of Artificial Sequence: Synthetic oligonucleotide
ggaggacccucaacuagga

SEQ ID NO: 2123434 - RNA, 19 nt, Artificial Sequence
  Description of Artificial Sequence: Synthetic oligonucleotide
ggccgaggggagucucuag

SEQ ID NO: 2123435 - RNA, 19 nt, Artificial Sequence
  Description of Artificial Sequence: Synthetic oligonucleotide
gagccgucagcuccgccau

SEQ ID NO: 2123436 - RNA, 19 nt, Artificial Sequence
  Description of Artificial Sequence: Synthetic oligonucleotide
gccucugagaaagcccuuc

SEQ ID NO: 2123437 - RNA, 19 nt, Artificial Sequence
  Description of Artificial Sequence: Synthetic oligonucleotide
ggauggugggauggaggac

SEQ ID NO: 2123438 - RNA, 19 nt, Artificial Sequence
  Description of Artificial Sequence: Synthetic oligonucleotide
auggccgaggggagucucu

SEQ ID NO: 2123439 - RNA, 19 nt, Artificial Sequence
  Description of Artificial Sequence: Synthetic oligonucleotide
cuuacggcugacagcucuu

SEQ ID NO: 2123440 - RNA, 19 nt, Artificial Sequence
  Description of Artificial Sequence: Synthetic oligonucleotide
gguucccugugagggccag

SEQ ID NO: 2123441 - RNA, 19 nt, Artificial Sequence
  Description of Artificial Sequence: Synthetic oligonucleotide
cggacccuuugucuggcag

SEQ ID NO: 2123442 - RNA, 19 nt, Artificial Sequence
  Description of Artificial Sequence: Synthetic oligonucleotide
gugccaucaggcagccuaa

SEQ ID NO: 2123443 - RNA, 19 nt, Artificial Sequence
  Description of Artificial Sequence: Synthetic oligonucleotide
ccaguccaucgcagccucg

SEQ ID NO: 2123444 - RNA, 19 nt, Artificial Sequence
  Description of Artificial Sequence: Synthetic oligonucleotide
ccgcugcuuuucucguucc

SEQ ID NO: 2123445 - RNA, 19 nt, Artificial Sequence
  Description of Artificial Sequence: Synthetic oligonucleotide
gccuucuccgcgcgucccc

SEQ ID NO: 2123446 - RNA, 19 nt, Artificial Sequence
  Description of Artificial Sequence: Synthetic oligonucleotide
gggaccggguuggggaccc

SEQ ID NO: 2123447 - RNA, 19 nt, Artificial Sequence
  Description of Artificial Sequence: Synthetic oligonucleotide
gcccuucuggggaagccac

SEQ ID NO: 2123448 - RNA, 19 nt, Artificial Sequence
  Description of Artificial Sequence: Synthetic oligonucleotide
ccuuacggcugacagcucu

SEQ ID NO: 2123449 - RNA, 19 nt, Artificial Sequence
  Description of Artificial Sequence: Synthetic oligonucleotide
cacuacuaccauacuucuu

SEQ ID NO: 2123450 - RNA, 19 nt, Artificial Sequence
  Description of Artificial Sequence: Synthetic oligonucleotide
ggguucccgucccaggaua

SEQ ID NO: 2123451 - RNA, 19 nt, Artificial Sequence
  Description of Artificial Sequence: Synthetic oligonucleotide
gccuaaccuguaugcgaca

SEQ ID NO: 2123452 - RNA, 19 nt, Artificial Sequence
  Description of Artificial Sequence: Synthetic oligonucleotide
cguuccaaagcuucucgcu

SEQ ID NO: 2123453 - RNA, 19 nt, Artificial Sequence
  Description of Artificial Sequence: Synthetic oligonucleotide
ccacacuacuaccauacuu

SEQ ID NO: 2123454 - RNA, 19 nt, Artificial Sequence
  Description of Artificial Sequence: Synthetic oligonucleotide
uucccgggcccggaacguu

SEQ ID NO: 2123455 - RNA, 19 nt, Artificial Sequence
  Description of Artificial Sequence: Synthetic oligonucleotide
caggcagccuaaccuguau

SEQ ID NO: 2123456 - RNA, 19 nt, Artificial Sequence
  Description of Artificial Sequence: Synthetic oligonucleotide
gggcccggaacguuugggu

SEQ ID NO: 2123457 - RNA, 19 nt, Artificial Sequence
  Description of Artificial Sequence: Synthetic oligonucleotide
cucgaugcccugguucccu

SEQ ID NO: 2123458 - RNA, 19 nt, Artificial Sequence
  Description of Artificial Sequence: Synthetic oligonucleotide
cgucuucgugcuccauaag

SEQ ID NO: 2123459 - RNA, 19 nt, Artificial Sequence
  Description of Artificial Sequence: Synthetic oligonucleotide
ggggaccggguuggggacc

SEQ ID NO: 2123460 - RNA, 19 nt, Artificial Sequence
  Description of Artificial Sequence: Synthetic oligonucleotide
ggauauggccgaggggagu

SEQ ID NO: 2123461 - RNA, 19 nt, Artificial Sequence
  Description of Artificial Sequence: Synthetic oligonucleotide
gggucgucuucgugcucca

SEQ ID NO: 2123462 - RNA, 19 nt, Artificial Sequence
  Description of Artificial Sequence: Synthetic oligonucleotide
gcguccccugggaaagccc

SEQ ID NO: 2123463 - RNA, 19 nt, Artificial Sequence
  Description of Artificial Sequence: Synthetic oligonucleotide
agccucugagaaagcccuu

SEQ ID NO: 2123464 - RNA, 19 nt, Artificial Sequence
  Description of Artificial Sequence: Synthetic oligonucleotide
gcucuugcccuugucuccu

SEQ ID NO: 2123465 - RNA, 19 nt, Artificial Sequence
  Description of Artificial Sequence: Synthetic oligonucleotide
cccgggcccggaacguuug

SEQ ID NO: 2123466 - RNA, 19 nt, Artificial Sequence
  Description of Artificial Sequence: Synthetic oligonucleotide
ccacaucggggucgucuuc

SEQ ID NO: 2123467 - RNA, 19 nt, Artificial Sequence
  Description of Artificial Sequence: Synthetic oligonucleotide
cggugaagcuccacauaga

SEQ ID NO: 2123468 - RNA, 19 nt, Artificial Sequence
  Description of Artificial Sequence: Synthetic oligonucleotide
ccacggugaagcuccacau

SEQ ID NO: 2123469 - RNA, 19 nt, Artificial Sequence
  Description of Artificial Sequence: Synthetic oligonucleotide
ccgggcccggaacguuugg

SEQ ID NO: 2123470 - RNA, 19 nt, Artificial Sequence
  Description of Artificial Sequence: Synthetic oligonucleotide
cagcuccgccauggcgccc

SEQ ID NO: 2123471 - RNA, 19 nt, Artificial Sequence
  Description of Artificial Sequence: Synthetic oligonucleotide
acccuuugucuggcagcua

SEQ ID NO: 2123472 - RNA, 19 nt, Artificial Sequence
  Description of Artificial Sequence: Synthetic oligonucleotide
cgggcccggaacguuuggg

SEQ ID NO: 2123473 - RNA, 19 nt, Artificial Sequence
  Description of Artificial Sequence: Synthetic oligonucleotide
cgcguccccugggaaagcc

SEQ ID NO: 2123474 - RNA, 19 nt, Artificial Sequence
  Description of Artificial Sequence: Synthetic oligonucleotide
gguucccgucccaggauau

SEQ ID NO: 2123475 - RNA, 19 nt, Artificial Sequence
  Description of Artificial Sequence: Synthetic oligonucleotide
cuucacguucccgcugcuu

SEQ ID NO: 2123476 - RNA, 19 nt, Artificial Sequence
  Description of Artificial Sequence: Synthetic oligonucleotide
ggcacgagucccaguuccu

SEQ ID NO: 2123477 - RNA, 19 nt, Artificial Sequence
  Description of Artificial Sequence: Synthetic oligonucleotide
cgcaucucgucuuccugua

SEQ ID NO: 2123478 - RNA, 19 nt, Artificial Sequence
  Description of Artificial Sequence: Synthetic oligonucleotide
cagagccuucuccgcgcgu

SEQ ID NO: 2123479 - RNA, 19 nt, Artificial Sequence
  Description of Artificial Sequence: Synthetic oligonucleotide
cuuccgcggggaccggguu

SEQ ID NO: 2123480 - RNA, 19 nt, Artificial Sequence
  Description of Artificial Sequence: Synthetic oligonucleotide
cccacacuacuaccauacu

SEQ ID NO: 2123481 - RNA, 19 nt, Artificial Sequence
  Description of Artificial Sequence: Synthetic oligonucleotide
ccgcgcguccccugggaaa

SEQ ID NO: 2123482 - RNA, 19 nt, Artificial Sequence
  Description of Artificial Sequence: Synthetic oligonucleotide
ccaucucgaugaggcucuc

SEQ ID NO: 2123483 - RNA, 19 nt, Artificial Sequence
  Description of Artificial Sequence: Synthetic oligonucleotide
gcgcguccccugggaaagc

SEQ ID NO: 2123484 - RNA, 19 nt, Artificial Sequence
  Description of Artificial Sequence: Synthetic oligonucleotide
gccuuacggcugacagcuc

SEQ ID NO: 2123485 - RNA, 19 nt, Artificial Sequence
  Description of Artificial Sequence: Synthetic oligonucleotide
ccgccgcuuccgcggggac

SEQ ID NO: 2123486 - RNA, 19 nt, Artificial Sequence
  Description of Artificial Sequence: Synthetic oligonucleotide
cagccucgaugcccugguu

SEQ ID NO: 2123487 - RNA, 19 nt, Artificial Sequence
  Description of Artificial Sequence: Synthetic oligonucleotide
ggucgucuucgugcuccau

SEQ ID NO: 2123488 - RNA, 19 nt, Artificial Sequence
  Description of Artificial Sequence: Synthetic oligonucleotide
cggggucgucuucgugcuc

SEQ ID NO: 2123489 - RNA, 19 nt, Artificial Sequence
  Description of Artificial Sequence: Synthetic oligonucleotide
cggcgcaucucgucuuccu

SEQ ID NO: 2123490 - RNA, 19 nt, Artificial Sequence
  Description of Artificial Sequence: Synthetic oligonucleotide
ccgcggggaccggguuggg

SEQ ID NO: 2123491 - RNA, 19 nt, Artificial Sequence
  Description of Artificial Sequence: Synthetic oligonucleotide
ccgcuuccgcggggaccgg

SEQ ID NO: 2123492 - RNA, 19 nt, Artificial Sequence
  Description of Artificial Sequence: Synthetic oligonucleotide
aauaucuccauauagcucc

SEQ ID NO: 2123493 - RNA, 19 nt, Artificial Sequence
  Description of Artificial Sequence: Synthetic oligonucleotide
aaacuuaacaauuuccucc

SEQ ID NO: 2123494 - RNA, 19 nt, Artificial Sequence
  Description of Artificial Sequence: Synthetic oligonucleotide
aauacauugaguucacggc

SEQ ID NO: 2123495 - RNA, 19 nt, Artificial Sequence
  Description of Artificial Sequence: Synthetic oligonucleotide
uguauuaucauccaaaauc

SEQ ID NO: 2123496 - RNA, 19 nt, Artificial Sequence
  Description of Artificial Sequence: Synthetic oligonucleotide
aaaaucaugcugcuguggc

SEQ ID NO: 2123497 - RNA, 19 nt, Artificial Sequence
  Description of Artificial Sequence: Synthetic oligonucleotide
uuuugugugaguuugguag

SEQ ID NO: 2123498 - RNA, 19 nt, Artificial Sequence
  Description of Artificial Sequence: Synthetic oligonucleotide
gaugaugaaaaccagagac

SEQ ID NO: 2123499 - RNA, 19 nt, Artificial Sequence
  Description of Artificial Sequence: Synthetic oligonucleotide
aacuuaacaauuuccuccc

SEQ ID NO: 2123500 - RNA, 19 nt, Artificial Sequence
  Description of Artificial Sequence: Synthetic oligonucleotide
aaaccagagacugaaaacc

SEQ ID NO: 2123501 - RNA, 19 nt, Artificial Sequence
  Description of Artificial Sequence: Synthetic oligonucleotide
uaauauauccugcagaaac

SEQ ID NO: 2123502 - RNA, 19 nt, Artificial Sequence
  Description of Artificial Sequence: Synthetic oligonucleotide
gaguguaucuaauauaucc

SEQ ID NO: 2123503 - RNA, 19 nt, Artificial Sequence
  Description of Artificial Sequence: Synthetic oligonucleotide
uuugguagaagaaaguugu

SEQ ID NO: 2123504 - RNA, 19 nt, Artificial Sequence
  Description of Artificial Sequence: Synthetic oligonucleotide
aguggaaauauuuuauguc

SEQ ID NO: 2123505 - RNA, 19 nt, Artificial Sequence
  Description of Artificial Sequence: Synthetic oligonucleotide
ugaguuugguagaagaaag

SEQ ID NO: 2123506 - RNA, 19 nt, Artificial Sequence
  Description of Artificial Sequence: Synthetic oligonucleotide
agugcuuuuggauauaugu

SEQ ID NO: 2123507 - RNA, 19 nt, Artificial Sequence
  Description of Artificial Sequence: Synthetic oligonucleotide
ugcaauaucuccauauagc

SEQ ID NO: 2123508 - RNA, 19 nt, Artificial Sequence
  Description of Artificial Sequence: Synthetic oligonucleotide
acggcaguagaacagagac

SEQ ID NO: 2123509 - RNA, 19 nt, Artificial Sequence
  Description of Artificial Sequence: Synthetic oligonucleotide
uuuuaugucucgaagcaga

SEQ ID NO: 2123510 - RNA, 19 nt, Artificial Sequence
  Description of Artificial Sequence: Synthetic oligonucleotide
uccauauagcuccaugugg

SEQ ID NO: 2123511 - RNA, 19 nt, Artificial Sequence
  Description of Artificial Sequence: Synthetic oligonucleotide
ucuaauauauccugcagaa

SEQ ID NO: 2123512 - RNA, 19 nt, Artificial Sequence
  Description of Artificial Sequence: Synthetic oligonucleotide
aaaucaugcugcuguggcc

SEQ ID NO: 2123513 - RNA, 19 nt, Artificial Sequence
  Description of Artificial Sequence: Synthetic oligonucleotide
gcaacuacugcauaaaagg

SEQ ID NO: 2123514 - RNA, 19 nt, Artificial Sequence
  Description of Artificial Sequence: Synthetic oligonucleotide
ugcaaagcaauucugucug

SEQ ID NO: 2123515 - RNA, 19 nt, Artificial Sequence
  Description of Artificial Sequence: Synthetic oligonucleotide
uguaucuaauauauccugc

SEQ ID NO: 2123516 - RNA, 19 nt, Artificial Sequence
  Description of Artificial Sequence: Synthetic oligonucleotide
ccuaguauguccaugaucc

SEQ ID NO: 2123517 - RNA, 19 nt, Artificial Sequence
  Description of Artificial Sequence: Synthetic oligonucleotide
ugagggaugacacacccug

SEQ ID NO: 2123518 - RNA, 19 nt, Artificial Sequence
  Description of Artificial Sequence: Synthetic oligonucleotide
agggacuugcauuucagac

SEQ ID NO: 2123519 - RNA, 19 nt, Artificial Sequence
  Description of Artificial Sequence: Synthetic oligonucleotide
ucugcauugcugcaaagca

SEQ ID NO: 2123520 - RNA, 19 nt, Artificial Sequence
  Description of Artificial Sequence: Synthetic oligonucleotide
aaauauuuuaugucucgaa

SEQ ID NO: 2123521 - RNA, 19 nt, Artificial Sequence
  Description of Artificial Sequence: Synthetic oligonucleotide
auauguguccaucacaggu

SEQ ID NO: 2123522 - RNA, 19 nt, Artificial Sequence
  Description of Artificial Sequence: Synthetic oligonucleotide
uaucuaauauauccugcag

SEQ ID NO: 2123523 - RNA, 19 nt, Artificial Sequence
  Description of Artificial Sequence: Synthetic oligonucleotide
gaaguggaaauauuuuaug

SEQ ID NO: 2123524 - RNA, 19 nt, Artificial Sequence
  Description of Artificial Sequence: Synthetic oligonucleotide
uaccacuucaaacagcgga

SEQ ID NO: 2123525 - RNA, 19 nt, Artificial Sequence
  Description of Artificial Sequence: Synthetic oligonucleotide
aaaucacaaagaguguauc

SEQ ID NO: 2123526 - RNA, 19 nt, Artificial Sequence
  Description of Artificial Sequence: Synthetic oligonucleotide
uguggucuggaacugcagg

SEQ ID NO: 2123527 - RNA, 19 nt, Artificial Sequence
  Description of Artificial Sequence: Synthetic oligonucleotide
uggguggcaacgcaggugg

SEQ ID NO: 2123528 - RNA, 19 nt, Artificial Sequence
  Description of Artificial Sequence: Synthetic oligonucleotide
gacauggcaauacauugag

SEQ ID NO: 2123529 - RNA, 19 nt, Artificial Sequence
  Description of Artificial Sequence: Synthetic oligonucleotide
auauauguguccaucacag

SEQ ID NO: 2123530 - RNA, 19 nt, Artificial Sequence
  Description of Artificial Sequence: Synthetic oligonucleotide
auuucagaccccgagugcc

SEQ ID NO: 2123531 - RNA, 19 nt, Artificial Sequence
  Description of Artificial Sequence: Synthetic oligonucleotide
agauugaugaugaaaacca

SEQ ID NO: 2123532 - RNA, 19 nt, Artificial Sequence
  Description of Artificial Sequence: Synthetic oligonucleotide
guagaagaaaguuguguag

SEQ ID NO: 2123533 - RNA, 19 nt, Artificial Sequence
  Description of Artificial Sequence: Synthetic oligonucleotide
uucgccaucgcuacccugg

SEQ ID NO: 2123534 - RNA, 19 nt, Artificial Sequence
  Description of Artificial Sequence: Synthetic oligonucleotide
auuucagcagagcaaggag

SEQ ID NO: 2123535 - RNA, 19 nt, Artificial Sequence
  Description of Artificial Sequence: Synthetic oligonucleotide
aaggaagaggucccuagug

SEQ ID NO: 2123536 - RNA, 19 nt, Artificial Sequence
  Description of Artificial Sequence: Synthetic oligonucleotide
uacauugaguucacggcag

SEQ ID NO: 2123537 - RNA, 19 nt, Artificial Sequence
  Description of Artificial Sequence: Synthetic oligonucleotide
ucuguauuaucauccaaaa

SEQ ID NO: 2123538 - RNA, 19 nt, Artificial Sequence
  Description of Artificial Sequence: Synthetic oligonucleotide
gauauauguguccaucaca

SEQ ID NO: 2123539 - RNA, 19 nt, Artificial Sequence
  Description of Artificial Sequence: Synthetic oligonucleotide
uucugucugugcaauaucu

SEQ ID NO: 2123540 - RNA, 19 nt, Artificial Sequence
  Description of Artificial Sequence: Synthetic oligonucleotide
auggcaauacauugaguuc

SEQ ID NO: 2123541 - RNA, 19 nt, Artificial Sequence
  Description of Artificial Sequence: Synthetic oligonucleotide
uagcauacccucaucgugc

SEQ ID NO: 2123542 - RNA, 19 nt, Artificial Sequence
  Description of Artificial Sequence: Synthetic oligonucleotide
uuuuggauauaugugucca

SEQ ID NO: 2123543 - RNA, 19 nt, Artificial Sequence
  Description of Artificial Sequence: Synthetic oligonucleotide
agaaacuuaacaauuuccu

SEQ ID NO: 2123544 - RNA, 19 nt, Artificial Sequence
  Description of Artificial Sequence: Synthetic oligonucleotide
aauauauccugcagaaacu

SEQ ID NO: 2123545 - RNA, 19 nt, Artificial Sequence
  Description of Artificial Sequence: Synthetic oligonucleotide
ugcuuauggaagguggugg

SEQ ID NO: 2123546 - RNA, 19 nt, Artificial Sequence
  Description of Artificial Sequence: Synthetic oligonucleotide
guauuaucauccaaaauca

SEQ ID NO: 2123547 - RNA, 19 nt, Artificial Sequence
  Description of Artificial Sequence: Synthetic oligonucleotide
cagauugaugaugaaaacc

SEQ ID NO: 2123548 - RNA, 19 nt, Artificial Sequence
  Description of Artificial Sequence: Synthetic oligonucleotide
ucuccauauagcuccaugu

SEQ ID NO: 2123549 - RNA, 19 nt, Artificial Sequence
  Description of Artificial Sequence: Synthetic oligonucleotide
caaacagcggaugagcucc

SEQ ID NO: 2123550 - RNA, 19 nt, Artificial Sequence
  Description of Artificial Sequence: Synthetic oligonucleotide
uaguauguccaugauccgg

SEQ ID NO: 2123551 - RNA, 19 nt, Artificial Sequence
  Description of Artificial Sequence: Synthetic oligonucleotide
uccauguaccacuucaaac

SEQ ID NO: 2123552 - RNA, 19 nt, Artificial Sequence
  Description of Artificial Sequence: Synthetic oligonucleotide
agugcaauuuccauucuuc

SEQ ID NO: 2123553 - RNA, 19 nt, Artificial Sequence
  Description of Artificial Sequence: Synthetic oligonucleotide
auuaucauccaaaaucaca

SEQ ID NO: 2123554 - RNA, 19 nt, Artificial Sequence
  Description of Artificial Sequence: Synthetic oligonucleotide
gaaucaguucugcugagca

SEQ ID NO: 2123555 - RNA, 19 nt, Artificial Sequence
  Description of Artificial Sequence: Synthetic oligonucleotide
aacgcagguggguccaugg

SEQ ID NO: 2123556 - RNA, 19 nt, Artificial Sequence
  Description of Artificial Sequence: Synthetic oligonucleotide
uauauguguccaucacagg

SEQ ID NO: 2123557 - RNA, 19 nt, Artificial Sequence
  Description of Artificial Sequence: Synthetic oligonucleotide
gcaauuuccauucuucgcc

SEQ ID NO: 2123558 - RNA, 19 nt, Artificial Sequence
  Description of Artificial Sequence: Synthetic oligonucleotide
uggauauauguguccauca

SEQ ID NO: 2123559 - RNA, 19 nt, Artificial Sequence
  Description of Artificial Sequence: Synthetic oligonucleotide
gugcaauaucuccauauag

SEQ ID NO: 2123560 - RNA, 19 nt, Artificial Sequence
  Description of Artificial Sequence: Synthetic oligonucleotide
ugugaguuugguagaagaa

SEQ ID NO: 2123561 - RNA, 19 nt, Artificial Sequence
  Description of Artificial Sequence: Synthetic oligonucleotide
ugcauugcugcaaagcaau

SEQ ID NO: 2123562 - RNA, 19 nt, Artificial Sequence
  Description of Artificial Sequence: Synthetic oligonucleotide
uucaaacagcggaugagcu

SEQ ID NO: 2123563 - RNA, 19 nt, Artificial Sequence
  Description of Artificial Sequence: Synthetic oligonucleotide
caguagcauacccucaucg

SEQ ID NO: 2123564 - RNA, 19 nt, Artificial Sequence
  Description of Artificial Sequence: Synthetic oligonucleotide
aauucugucugugcaauau

SEQ ID NO: 2123565 - RNA, 19 nt, Artificial Sequence
  Description of Artificial Sequence: Synthetic oligonucleotide
gugcaauuuccauucuucg

SEQ ID NO: 2123566 - RNA, 19 nt, Artificial Sequence
  Description of Artificial Sequence: Synthetic oligonucleotide
ugacaugccgcaaccgucc

SEQ ID NO: 2123567 - RNA, 19 nt, Artificial Sequence
  Description of Artificial Sequence: Synthetic oligonucleotide
cauguaccacuucaaacag

SEQ ID NO: 2123568 - RNA, 19 nt, Artificial Sequence
  Description of Artificial Sequence: Synthetic oligonucleotide
aaaaucacaaagaguguau

SEQ ID NO: 2123569 - RNA, 19 nt, Artificial Sequence
  Description of Artificial Sequence: Synthetic oligonucleotide
acuuaacaauuuccucccc

SEQ ID NO: 2123570 - RNA, 19 nt, Artificial Sequence
  Description of Artificial Sequence: Synthetic oligonucleotide
guagcauacccucaucgug

SEQ ID NO: 2123571 - RNA, 19 nt, Artificial Sequence
  Description of Artificial Sequence: Synthetic oligonucleotide
cauauuucucuguauuauc

SEQ ID NO: 2123572 - RNA, 19 nt, Artificial Sequence
  Description of Artificial Sequence: Synthetic oligonucleotide
caaaggaagaggucccuag

SEQ ID NO: 2123573 - RNA, 19 nt, Artificial Sequence
  Description of Artificial Sequence: Synthetic oligonucleotide
gagguccacauuuugugug

SEQ ID NO: 2123574 - RNA, 19 nt, Artificial Sequence
  Description of Artificial Sequence: Synthetic oligonucleotide
ugccgaaucaguucugcug

SEQ ID NO: 2123575 - RNA, 19 nt, Artificial Sequence
  Description of Artificial Sequence: Synthetic oligonucleotide
agcagauugaugaugaaaa

SEQ ID NO: 2123576 - RNA, 19 nt, Artificial Sequence
  Description of Artificial Sequence: Synthetic oligonucleotide
ugguagaagaaaguugugu

SEQ ID NO: 2123577 - RNA, 19 nt, Artificial Sequence
  Description of Artificial Sequence: Synthetic oligonucleotide
cuucaaacagcggaugagc

SEQ ID NO: 2123578 - RNA, 19 nt, Artificial Sequence
  Description of Artificial Sequence: Synthetic oligonucleotide
ugugcaauaucuccauaua

SEQ ID NO: 2123579 - RNA, 19 nt, Artificial Sequence
  Description of Artificial Sequence: Synthetic oligonucleotide
auucugucugugcaauauc

SEQ ID NO: 2123580 - RNA, 19 nt, Artificial Sequence
  Description of Artificial Sequence: Synthetic oligonucleotide
cugaguggcuucugcaugg

SEQ ID NO: 2123581 - RNA, 19 nt, Artificial Sequence
  Description of Artificial Sequence: Synthetic oligonucleotide
cauucuucgccaucgcuac

SEQ ID NO: 2123582 - RNA, 19 nt, Artificial Sequence
  Description of Artificial Sequence: Synthetic oligonucleotide
aguguaucuaauauauccu

SEQ ID NO: 2123583 - RNA, 19 nt, Artificial Sequence
  Description of Artificial Sequence: Synthetic oligonucleotide
agcaacuacugcauaaaag

SEQ ID NO: 2123584 - RNA, 19 nt, Artificial Sequence
  Description of Artificial Sequence: Synthetic oligonucleotide
uacugcauaaaaggaaaac

SEQ ID NO: 2123585 - RNA, 19 nt, Artificial Sequence
  Description of Artificial Sequence: Synthetic oligonucleotide
agcaaggagguccacauuu

SEQ ID NO: 2123586 - RNA, 19 nt, Artificial Sequence
  Description of Artificial Sequence: Synthetic oligonucleotide
acuugcauuucagaccccg

SEQ ID NO: 2123587 - RNA, 19 nt, Artificial Sequence
  Description of Artificial Sequence: Synthetic oligonucleotide
aguagcauacccucaucgu

SEQ ID NO: 2123588 - RNA, 19 nt, Artificial Sequence
  Description of Artificial Sequence: Synthetic oligonucleotide
augagcuccuuauaugcca

SEQ ID NO: 2123589 - RNA, 19 nt, Artificial Sequence
  Description of Artificial Sequence: Synthetic oligonucleotide
ucuagggcuggcaggcggg

SEQ ID NO: 2123590 - RNA, 19 nt, Artificial Sequence
  Description of Artificial Sequence: Synthetic oligonucleotide
caauaucuccauauagcuc

SEQ ID NO: 2123591 - RNA, 19 nt, Artificial Sequence
  Description of Artificial Sequence: Synthetic oligonucleotide
ucuggacauggcaauacau

SEQ ID NO: 2123592 - RNA, 19 nt, Artificial Sequence
  Description of Artificial Sequence: Synthetic oligonucleotide
uccuaguauguccaugauc

SEQ ID NO: 2123593 - RNA, 19 nt, Artificial Sequence
  Description of Artificial Sequence: Synthetic oligonucleotide
acaauuuccuccccacuga

SEQ ID NO: 2123594 - RNA, 19 nt, Artificial Sequence
  Description of Artificial Sequence: Synthetic oligonucleotide
uuuaugucucgaagcagau

SEQ ID NO: 2123595 - RNA, 19 nt, Artificial Sequence
  Description of Artificial Sequence: Synthetic oligonucleotide
acaaagaguguaucuaaua

SEQ ID NO: 2123596 - RNA, 19 nt, Artificial Sequence
  Description of Artificial Sequence: Synthetic oligonucleotide
caaccguccuaguaugucc

SEQ ID NO: 2123597 - RNA, 19 nt, Artificial Sequence
  Description of Artificial Sequence: Synthetic oligonucleotide
acugacaugccgcaaccgu

SEQ ID NO: 2123598 - RNA, 19 nt, Artificial Sequence
  Description of Artificial Sequence: Synthetic oligonucleotide
agagcaaggagguccacau

SEQ ID NO: 2123599 - RNA, 19 nt, Artificial Sequence
  Description of Artificial Sequence: Synthetic oligonucleotide
ucuggugguuuucuccuga

SEQ ID NO: 2123600 - RNA, 19 nt, Artificial Sequence
  Description of Artificial Sequence: Synthetic oligonucleotide
acuacugcauaaaaggaaa

SEQ ID NO: 2123601 - RNA, 19 nt, Artificial Sequence
  Description of Artificial Sequence: Synthetic oligonucleotide
aagcaacuacugcauaaaa

SEQ ID NO: 2123602 - RNA, 19 nt, Artificial Sequence
  Description of Artificial Sequence: Synthetic oligonucleotide
uugguagaagaaaguugug

SEQ ID NO: 2123603 - RNA, 19 nt, Artificial Sequence
  Description of Artificial Sequence: Synthetic oligonucleotide
ucggaaguggaaauauuuu

SEQ ID NO: 2123604 - RNA, 19 nt, Artificial Sequence
  Description of Artificial Sequence: Synthetic oligonucleotide
uuccuccccacugacaugc

SEQ ID NO: 2123605 - RNA, 19 nt, Artificial Sequence
  Description of Artificial Sequence: Synthetic oligonucleotide
uuauaugccagggcuccag

SEQ ID NO: 2123606 - RNA, 19 nt, Artificial Sequence
  Description of Artificial Sequence: Synthetic oligonucleotide
uuggauauauguguccauc

SEQ ID NO: 2123607 - RNA, 19 nt, Artificial Sequence
  Description of Artificial Sequence: Synthetic oligonucleotide
uucuucgccaucgcuaccc

SEQ ID NO: 2123608 - RNA, 19 nt, Artificial Sequence
  Description of Artificial Sequence: Synthetic oligonucleotide
ccuagugcaauuuccauuc

SEQ ID NO: 2123609 - RNA, 19 nt, Artificial Sequence
  Description of Artificial Sequence: Synthetic oligonucleotide
uccacauuuugugugaguu

SEQ ID NO: 2123610 - RNA, 19 nt, Artificial Sequence
  Description of Artificial Sequence: Synthetic oligonucleotide
ucgaagcagauugaugaug

SEQ ID NO: 2123611 - RNA, 19 nt, Artificial Sequence
  Description of Artificial Sequence: Synthetic oligonucleotide
uauauccugcagaaacuua

SEQ ID NO: 2123612 - RNA, 19 nt, Artificial Sequence
  Description of Artificial Sequence: Synthetic oligonucleotide
cuaguauguccaugauccg

SEQ ID NO: 2123613 - RNA, 19 nt, Artificial Sequence
  Description of Artificial Sequence: Synthetic oligonucleotide
aguuugguagaagaaaguu

SEQ ID NO: 2123614 - RNA, 19 nt, Artificial Sequence
  Description of Artificial Sequence: Synthetic oligonucleotide
aucuccauauagcuccaug

SEQ ID NO: 2123615 - RNA, 19 nt, Artificial Sequence
  Description of Artificial Sequence: Synthetic oligonucleotide
uaugccagggcuccagcaa

SEQ ID NO: 2123616 - RNA, 19 nt, Artificial Sequence
  Description of Artificial Sequence: Synthetic oligonucleotide
augaugaaaaccagagacu

SEQ ID NO: 2123617 - RNA, 19 nt, Artificial Sequence
  Description of Artificial Sequence: Synthetic oligonucleotide
caagcucuagcucccuggg

SEQ ID NO: 2123618 - RNA, 19 nt, Artificial Sequence
  Description of Artificial Sequence: Synthetic oligonucleotide
caacuacugcauaaaagga

SEQ ID NO: 2123619 - RNA, 19 nt, Artificial Sequence
  Description of Artificial Sequence: Synthetic oligonucleotide
uggcaagcugcuuauggaa

SEQ ID NO: 2123620 - RNA, 19 nt, Artificial Sequence
  Description of Artificial Sequence: Synthetic oligonucleotide
uccuuauaugccagggcuc

SEQ ID NO: 2123621 - RNA, 19 nt, Artificial Sequence
  Description of Artificial Sequence: Synthetic oligonucleotide
aguauguccaugauccggu

SEQ ID NO: 2123622 - RNA, 19 nt, Artificial Sequence
  Description of Artificial Sequence: Synthetic oligonucleotide
cauuucagaccccgagugc

SEQ ID NO: 2123623 - RNA, 19 nt, Artificial Sequence
  Description of Artificial Sequence: Synthetic oligonucleotide
uuuggauauauguguccau

SEQ ID NO: 2123624 - RNA, 19 nt, Artificial Sequence
  Description of Artificial Sequence: Synthetic oligonucleotide
ggaugacacacccuggggc

SEQ ID NO: 2123625 - RNA, 19 nt, Artificial Sequence
  Description of Artificial Sequence: Synthetic oligonucleotide
caguagaacagagacucug

SEQ ID NO: 2123626 - RNA, 19 nt, Artificial Sequence
  Description of Artificial Sequence: Synthetic oligonucleotide
gguagaagaaaguugugua

SEQ ID NO: 2123627 - RNA, 19 nt, Artificial Sequence
  Description of Artificial Sequence: Synthetic oligonucleotide
auauagcuccauguggucu

SEQ ID NO: 2123628 - RNA, 19 nt, Artificial Sequence
  Description of Artificial Sequence: Synthetic oligonucleotide
cuuggcgcucccaggaggc

SEQ ID NO: 2123629 - RNA, 19 nt, Artificial Sequence
  Description of Artificial Sequence: Synthetic oligonucleotide
auauccugcagaaacuuaa

SEQ ID NO: 2123630 - RNA, 19 nt, Artificial Sequence
  Description of Artificial Sequence: Synthetic oligonucleotide
caugccgcaaccguccuag

SEQ ID NO: 2123631 - RNA, 19 nt, Artificial Sequence
  Description of Artificial Sequence: Synthetic oligonucleotide
ucgcuacccuggaaggagg

SEQ ID NO: 2123632 - RNA, 19 nt, Artificial Sequence
  Description of Artificial Sequence: Synthetic oligonucleotide
caucacaggucggaagugg

SEQ ID NO: 2123633 - RNA, 19 nt, Artificial Sequence
  Description of Artificial Sequence: Synthetic oligonucleotide
auucuucgccaucgcuacc

SEQ ID NO: 2123634 - RNA, 19 nt, Artificial Sequence
  Description of Artificial Sequence: Synthetic oligonucleotide
gcauuucagaccccgagug

SEQ ID NO: 2123635 - RNA, 19 nt, Artificial Sequence
  Description of Artificial Sequence: Synthetic oligonucleotide
ccauguaccacuucaaaca

SEQ ID NO: 2123636 - RNA, 19 nt, Artificial Sequence
  Description of Artificial Sequence: Synthetic oligonucleotide
aggucccuagugcaauuuc

SEQ ID NO: 2123637 - RNA, 19 nt, Artificial Sequence
  Description of Artificial Sequence: Synthetic oligonucleotide
uguguccaucacaggucgg

SEQ ID NO: 2123638 - RNA, 19 nt, Artificial Sequence
  Description of Artificial Sequence: Synthetic oligonucleotide
uccugaaugugguccugcc

SEQ ID NO: 2123639 - RNA, 19 nt, Artificial Sequence
  Description of Artificial Sequence: Synthetic oligonucleotide
aucgcuacccuggaaggag

SEQ ID NO: 2123640 - RNA, 19 nt, Artificial Sequence
  Description of Artificial Sequence: Synthetic oligonucleotide
uucacggcaguagaacaga

SEQ ID NO: 2123641 - RNA, 19 nt, Artificial Sequence
  Description of Artificial Sequence: Synthetic oligonucleotide
guucacggcaguagaacag

SEQ ID NO: 2123642 - RNA, 19 nt, Artificial Sequence
  Description of Artificial Sequence: Synthetic oligonucleotide
ggauauauguguccaucac

SEQ ID NO: 2123643 - RNA, 19 nt, Artificial Sequence
  Description of Artificial Sequence: Synthetic oligonucleotide
gaguucacggcaguagaac

SEQ ID NO: 2123644 - RNA, 19 nt, Artificial Sequence
  Description of Artificial Sequence: Synthetic oligonucleotide
uuuucuccugagugccaag

SEQ ID NO: 2123645 - RNA, 19 nt, Artificial Sequence
  Description of Artificial Sequence: Synthetic oligonucleotide
cauauagcuccaugugguc

SEQ ID NO: 2123646 - RNA, 19 nt, Artificial Sequence
  Description of Artificial Sequence: Synthetic oligonucleotide
gaugacacacccuggggcu

SEQ ID NO: 2123647 - RNA, 19 nt, Artificial Sequence
  Description of Artificial Sequence: Synthetic oligonucleotide
caaagaguguaucuaauau

SEQ ID NO: 2123648 - RNA, 19 nt, Artificial Sequence
  Description of Artificial Sequence: Synthetic oligonucleotide
uuucagaccccgagugccu

SEQ ID NO: 2123649 - RNA, 19 nt, Artificial Sequence
  Description of Artificial Sequence: Synthetic oligonucleotide
caaaaucacaaagagugua

SEQ ID NO: 2123650 - RNA, 19 nt, Artificial Sequence
  Description of Artificial Sequence: Synthetic oligonucleotide
auauauccugcagaaacuu

SEQ ID NO: 2123651 - RNA, 19 nt, Artificial Sequence
  Description of Artificial Sequence: Synthetic oligonucleotide
gccaucgcuacccuggaag

SEQ ID NO: 2123652 - RNA, 19 nt, Artificial Sequence
  Description of Artificial Sequence: Synthetic oligonucleotide
cugacaugccgcaaccguc

SEQ ID NO: 2123653 - RNA, 19 nt, Artificial Sequence
  Description of Artificial Sequence: Synthetic oligonucleotide
caaggagguccacauuuug

SEQ ID NO: 2123654 - RNA, 19 nt, Artificial Sequence
  Description of Artificial Sequence: Synthetic oligonucleotide
uccugagggaugacacacc

SEQ ID NO: 2123655 - RNA, 19 nt, Artificial Sequence
  Description of Artificial Sequence: Synthetic oligonucleotide
auaugccagggcuccagca

SEQ ID NO: 2123656 - RNA, 19 nt, Artificial Sequence
  Description of Artificial Sequence: Synthetic oligonucleotide
cucuagggcuggcaggcgg

SEQ ID NO: 2123657 - RNA, 19 nt, Artificial Sequence
  Description of Artificial Sequence: Synthetic oligonucleotide
cagugaggccuuucggugc

SEQ ID NO: 2123658 - RNA, 19 nt, Artificial Sequence
  Description of Artificial Sequence: Synthetic oligonucleotide
uuucggugcaggccccuug

SEQ ID NO: 2123659 - RNA, 19 nt, Artificial Sequence
  Description of Artificial Sequence: Synthetic oligonucleotide
gcaauaucuccauauagcu

SEQ ID NO: 2123660 - RNA, 19 nt, Artificial Sequence
  Description of Artificial Sequence: Synthetic oligonucleotide
acauuuugugugaguuugg

SEQ ID NO: 2123661 - RNA, 19 nt, Artificial Sequence
  Description of Artificial Sequence: Synthetic oligonucleotide
ucccgcaguagcauacccu

SEQ ID NO: 2123662 - RNA, 19 nt, Artificial Sequence
  Description of Artificial Sequence: Synthetic oligonucleotide
uuccccucggccgugcucc

SEQ ID NO: 2123663 - RNA, 19 nt, Artificial Sequence
  Description of Artificial Sequence: Synthetic oligonucleotide
aauuuccuccccacugaca

SEQ ID NO: 2123664 - RNA, 19 nt, Artificial Sequence
  Description of Artificial Sequence: Synthetic oligonucleotide
caauuuccuccccacugac

SEQ ID NO: 2123665 - RNA, 19 nt, Artificial Sequence
  Description of Artificial Sequence: Synthetic oligonucleotide
uggccgucuggacauggca

SEQ ID NO: 2123666 - RNA, 19 nt, Artificial Sequence
  Description of Artificial Sequence: Synthetic oligonucleotide
aaccguccuaguaugucca

SEQ ID NO: 2123667 - RNA, 19 nt, Artificial Sequence
  Description of Artificial Sequence: Synthetic oligonucleotide
uccucccgcaguagcauac

SEQ ID NO: 2123668 - RNA, 19 nt, Artificial Sequence
  Description of Artificial Sequence: Synthetic oligonucleotide
acaggucggaaguggaaau

SEQ ID NO: 2123669 - RNA, 19 nt, Artificial Sequence
  Description of Artificial Sequence: Synthetic oligonucleotide
uguccaugauccggucugg

SEQ ID NO: 2123670 - RNA, 19 nt, Artificial Sequence
  Description of Artificial Sequence: Synthetic oligonucleotide
ucacaggucggaaguggaa

SEQ ID NO: 2123671 - RNA, 19 nt, Artificial Sequence
  Description of Artificial Sequence: Synthetic oligonucleotide
ugccagggcuccagcaaag

SEQ ID NO: 2123672 - RNA, 19 nt, Artificial Sequence
  Description of Artificial Sequence: Synthetic oligonucleotide
aagugcuuuuggauauaug

SEQ ID NO: 2123673 - RNA, 19 nt, Artificial Sequence
  Description of Artificial Sequence: Synthetic oligonucleotide
uacccuggaaggaggccug

SEQ ID NO: 2123674 - RNA, 19 nt, Artificial Sequence
  Description of Artificial Sequence: Synthetic oligonucleotide
cucaucgugcucuagggcu

SEQ ID NO: 2123675 - RNA, 19 nt, Artificial Sequence
  Description of Artificial Sequence: Synthetic oligonucleotide
gaggccuuucggugcaggc

SEQ ID NO: 2123676 - RNA, 19 nt, Artificial Sequence
  Description of Artificial Sequence: Synthetic oligonucleotide
ggaagaggucccuagugca

SEQ ID NO: 2123677 - RNA, 19 nt, Artificial Sequence
  Description of Artificial Sequence: Synthetic oligonucleotide
uguggccgucuggacaugg

SEQ ID NO: 2123678 - RNA, 19 nt, Artificial Sequence
  Description of Artificial Sequence: Synthetic oligonucleotide
agcauacccucaucgugcu

SEQ ID NO: 2123679 - RNA, 19 nt, Artificial Sequence
  Description of Artificial Sequence: Synthetic oligonucleotide
cauguggucuggaacugca

SEQ ID NO: 2123680 - RNA, 19 nt, Artificial Sequence
  Description of Artificial Sequence: Synthetic oligonucleotide
acauugaguucacggcagu

SEQ ID NO: 2123681 - RNA, 19 nt, Artificial Sequence
  Description of Artificial Sequence: Synthetic oligonucleotide
gagggaugacacacccugg

SEQ ID NO: 2123682 - RNA, 19 nt, Artificial Sequence
  Description of Artificial Sequence: Synthetic oligonucleotide
guccugagggaugacacac

SEQ ID NO: 2123683 - RNA, 19 nt, Artificial Sequence
  Description of Artificial Sequence: Synthetic oligonucleotide
gagggacuugcauuucaga

SEQ ID NO: 2123684 - RNA, 19 nt, Artificial Sequence
  Description of Artificial Sequence: Synthetic oligonucleotide
uccuuggcgcucccaggag

SEQ ID NO: 2123685 - RNA, 19 nt, Artificial Sequence
  Description of Artificial Sequence: Synthetic oligonucleotide
gcagauugaugaugaaaac

SEQ ID NO: 2123686 - RNA, 19 nt, Artificial Sequence
  Description of Artificial Sequence: Synthetic oligonucleotide
ucccuagugcaauuuccau

SEQ ID NO: 2123687 - RNA, 19 nt, Artificial Sequence
  Description of Artificial Sequence: Synthetic oligonucleotide
gacucugcauugcugcaaa

SEQ ID NO: 2123688 - RNA, 19 nt, Artificial Sequence
  Description of Artificial Sequence: Synthetic oligonucleotide
ggccuuucggugcaggccc

SEQ ID NO: 2123689 - RNA, 19 nt, Artificial Sequence
  Description of Artificial Sequence: Synthetic oligonucleotide
augauccggucugggaagg

SEQ ID NO: 2123690 - RNA, 19 nt, Artificial Sequence
  Description of Artificial Sequence: Synthetic oligonucleotide
cuggcaagcugcuuaugga

SEQ ID NO: 2123691 - RNA, 19 nt, Artificial Sequence
  Description of Artificial Sequence: Synthetic oligonucleotide
ccuuauaugccagggcucc

SEQ ID NO: 2123692 - RNA, 19 nt, Artificial Sequence
  Description of Artificial Sequence: Synthetic oligonucleotide
gagcaguccauguaccacu

SEQ ID NO: 2123693 - RNA, 19 nt, Artificial Sequence
  Description of Artificial Sequence: Synthetic oligonucleotide
uuuccuccccacugacaug

SEQ ID NO: 2123694 - RNA, 19 nt, Artificial Sequence
  Description of Artificial Sequence: Synthetic oligonucleotide
uggcaacgcaggugggucc

SEQ ID NO: 2123695 - RNA, 19 nt, Artificial Sequence
  Description of Artificial Sequence: Synthetic oligonucleotide
gccgaaucaguucugcuga

SEQ ID NO: 2123696 - RNA, 19 nt, Artificial Sequence
  Description of Artificial Sequence: Synthetic oligonucleotide
uugugugaguuugguagaa

SEQ ID NO: 2123697 - RNA, 19 nt, Artificial Sequence
  Description of Artificial Sequence: Synthetic oligonucleotide
accacuucaaacagcggau

SEQ ID NO: 2123698 - RNA, 19 nt, Artificial Sequence
  Description of Artificial Sequence: Synthetic oligonucleotide
ucuucgccaucgcuacccu

SEQ ID NO: 2123699 - RNA, 19 nt, Artificial Sequence
  Description of Artificial Sequence: Synthetic oligonucleotide
aggucggaaguggaaauau

SEQ ID NO: 2123700 - RNA, 19 nt, Artificial Sequence
  Description of Artificial Sequence: Synthetic oligonucleotide
ugaaaaccaaaaggccaua

SEQ ID NO: 2123701 - RNA, 19 nt, Artificial Sequence
  Description of Artificial Sequence: Synthetic oligonucleotide
ggccaugcgggccugcucc

SEQ ID NO: 2123702 - RNA, 19 nt, Artificial Sequence
  Description of Artificial Sequence: Synthetic oligonucleotide
accccgagugccuggcaag

SEQ ID NO: 2123703 - RNA, 19 nt, Artificial Sequence
  Description of Artificial Sequence: Synthetic oligonucleotide
ggucccuagugcaauuucc

SEQ ID NO: 2123704 - RNA, 19 nt, Artificial Sequence
  Description of Artificial Sequence: Synthetic oligonucleotide
uucagaccccgagugccug

SEQ ID NO: 2123705 - RNA, 19 nt, Artificial Sequence
  Description of Artificial Sequence: Synthetic oligonucleotide
ccaaaaggccauauuucuc

SEQ ID NO: 2123706 - RNA, 19 nt, Artificial Sequence
  Description of Artificial Sequence: Synthetic oligonucleotide
aggaggccugggcuccuac

SEQ ID NO: 2123707 - RNA, 19 nt, Artificial Sequence
  Description of Artificial Sequence: Synthetic oligonucleotide
cccucaucgugcucuaggg

SEQ ID NO: 2123708 - RNA, 19 nt, Artificial Sequence
  Description of Artificial Sequence: Synthetic oligonucleotide
cucccgcaguagcauaccc

SEQ ID NO: 2123709 - RNA, 19 nt, Artificial Sequence
  Description of Artificial Sequence: Synthetic oligonucleotide
ugccgcaaccguccuagua

SEQ ID NO: 2123710 - RNA, 19 nt, Artificial Sequence
  Description of Artificial Sequence: Synthetic oligonucleotide
ugccucucugcuccucacu

SEQ ID NO: 2123711 - RNA, 19 nt, Artificial Sequence
  Description of Artificial Sequence: Synthetic oligonucleotide
cugcauugcugcaaagcaa

SEQ ID NO: 2123712 - RNA, 19 nt, Artificial Sequence
  Description of Artificial Sequence: Synthetic oligonucleotide
ccugaaugugguccugccg

SEQ ID NO: 2123713 - RNA, 19 nt, Artificial Sequence
  Description of Artificial Sequence: Synthetic oligonucleotide
uuaugucucgaagcagauu

SEQ ID NO: 2123714 - RNA, 19 nt, Artificial Sequence
  Description of Artificial Sequence: Synthetic oligonucleotide
cauacccucaucgugcucu

SEQ ID NO: 2123715 - RNA, 19 nt, Artificial Sequence
  Description of Artificial Sequence: Synthetic oligonucleotide
gcuuuuggauauauguguc

SEQ ID NO: 2123716 - RNA, 19 nt, Artificial Sequence
  Description of Artificial Sequence: Synthetic oligonucleotide
gcuccauguggucuggaac

SEQ ID NO: 2123717 - RNA, 19 nt, Artificial Sequence
  Description of Artificial Sequence: Synthetic oligonucleotide
guaccacuucaaacagcgg

SEQ ID NO: 2123718 - RNA, 19 nt, Artificial Sequence
  Description of Artificial Sequence: Synthetic oligonucleotide
aggccauauuucucuguau

SEQ ID NO: 2123719 - RNA, 19 nt, Artificial Sequence
  Description of Artificial Sequence: Synthetic oligonucleotide
acccgcauggcuuccugaa

SEQ ID NO: 2123720 - RNA, 19 nt, Artificial Sequence
  Description of Artificial Sequence: Synthetic oligonucleotide
gaguuugguagaagaaagu

SEQ ID NO: 2123721 - RNA, 19 nt, Artificial Sequence
  Description of Artificial Sequence: Synthetic oligonucleotide
gucccuagugcaauuucca

SEQ ID NO: 2123722 - RNA, 19 nt, Artificial Sequence
  Description of Artificial Sequence: Synthetic oligonucleotide
gguccugccgaaucaguuc

SEQ ID NO: 2123723 - RNA, 19 nt, Artificial Sequence
  Description of Artificial Sequence: Synthetic oligonucleotide
cucuggugguuuucuccug

SEQ ID NO: 2123724 - RNA, 19 nt, Artificial Sequence
  Description of Artificial Sequence: Synthetic oligonucleotide
gccccuuggccucucagcc

SEQ ID NO: 2123725 - RNA, 19 nt, Artificial Sequence
  Description of Artificial Sequence: Synthetic oligonucleotide
caucgugcucuagggcugg

SEQ ID NO: 2123726 - RNA, 19 nt, Artificial Sequence
  Description of Artificial Sequence: Synthetic oligonucleotide
guguccaucacaggucgga

SEQ ID NO: 2123727 - RNA, 19 nt, Artificial Sequence
  Description of Artificial Sequence: Synthetic oligonucleotide
ggcuccuacuccuggacuc

SEQ ID NO: 2123728 - RNA, 19 nt, Artificial Sequence
  Description of Artificial Sequence: Synthetic oligonucleotide
ucgccaucgcuacccugga

SEQ ID NO: 2123729 - RNA, 19 nt, Artificial Sequence
  Description of Artificial Sequence: Synthetic oligonucleotide
cacggcaguagaacagaga

SEQ ID NO: 2123730 - RNA, 19 nt, Artificial Sequence
  Description of Artificial Sequence: Synthetic oligonucleotide
uccggucugggaaggcuuu

SEQ ID NO: 2123731 - RNA, 19 nt, Artificial Sequence
  Description of Artificial Sequence: Synthetic oligonucleotide
cuccuuggcgcucccagga

SEQ ID NO: 2123732 - RNA, 19 nt, Artificial Sequence
  Description of Artificial Sequence: Synthetic oligonucleotide
ggguccaugggguccugag

SEQ ID NO: 2123733 - RNA, 19 nt, Artificial Sequence
  Description of Artificial Sequence: Synthetic oligonucleotide
cccgcaguagcauacccuc

SEQ ID NO: 2123734 - RNA, 19 nt, Artificial Sequence
  Description of Artificial Sequence: Synthetic oligonucleotide
ggacauggcaauacauuga

SEQ ID NO: 2123735 - RNA, 19 nt, Artificial Sequence
  Description of Artificial Sequence: Synthetic oligonucleotide
aggccaugcgggccugcuc

SEQ ID NO: 2123736 - RNA, 19 nt, Artificial Sequence
  Description of Artificial Sequence: Synthetic oligonucleotide
cuucgccaucgcuacccug

SEQ ID NO: 2123737 - RNA, 19 nt, Artificial Sequence
  Description of Artificial Sequence: Synthetic oligonucleotide
cuggacauggcaauacauu

SEQ ID NO: 2123738 - RNA, 19 nt, Artificial Sequence
  Description of Artificial Sequence: Synthetic oligonucleotide
agcggaugagcuccuuaua

SEQ ID NO: 2123739 - RNA, 19 nt, Artificial Sequence
  Description of Artificial Sequence: Synthetic oligonucleotide
guggcaacgcagguggguc

SEQ ID NO: 2123740 - RNA, 19 nt, Artificial Sequence
  Description of Artificial Sequence: Synthetic oligonucleotide
gucggaaguggaaauauuu

SEQ ID NO: 2123741 - RNA, 19 nt, Artificial Sequence
  Description of Artificial Sequence: Synthetic oligonucleotide
auaucuccauauagcucca

SEQ ID NO: 2123742 - RNA, 19 nt, Artificial Sequence
  Description of Artificial Sequence: Synthetic oligonucleotide
acauggcaauacauugagu

SEQ ID NO: 2123743 - RNA, 19 nt, Artificial Sequence
  Description of Artificial Sequence: Synthetic oligonucleotide
auguggucuggaacugcag

SEQ ID NO: 2123744 - RNA, 19 nt, Artificial Sequence
  Description of Artificial Sequence: Synthetic oligonucleotide
cugggacccgcauggcuuc

SEQ ID NO: 2123745 - RNA, 19 nt, Artificial Sequence
  Description of Artificial Sequence: Synthetic oligonucleotide
ugauccggucugggaaggc

SEQ ID NO: 2123746 - RNA, 19 nt, Artificial Sequence
  Description of Artificial Sequence: Synthetic oligonucleotide
agaggucccuagugcaauu

SEQ ID NO: 2123747 - RNA, 19 nt, Artificial Sequence
  Description of Artificial Sequence: Synthetic oligonucleotide
ccauauagcuccauguggu

SEQ ID NO: 2123748 - RNA, 19 nt, Artificial Sequence
  Description of Artificial Sequence: Synthetic oligonucleotide
gaccccgagugccuggcaa

SEQ ID NO: 2123749 - RNA, 19 nt, Artificial Sequence
  Description of Artificial Sequence: Synthetic oligonucleotide
cacaggucggaaguggaaa

SEQ ID NO: 2123750 - RNA, 19 nt, Artificial Sequence
  Description of Artificial Sequence: Synthetic oligonucleotide
cccacugacaugccgcaac

SEQ ID NO: 2123751 - RNA, 19 nt, Artificial Sequence
  Description of Artificial Sequence: Synthetic oligonucleotide
aaacagcggaugagcuccu

SEQ ID NO: 2123752 - RNA, 19 nt, Artificial Sequence
  Description of Artificial Sequence: Synthetic oligonucleotide
ccacugacaugccgcaacc

SEQ ID NO: 2123753 - RNA, 19 nt, Artificial Sequence
  Description of Artificial Sequence: Synthetic oligonucleotide
cucggccgugcucccaggc

SEQ ID NO: 2123754 - RNA, 19 nt, Artificial Sequence
  Description of Artificial Sequence: Synthetic oligonucleotide
gugccaagcucuagcuccc

SEQ ID NO: 2123755 - RNA, 19 nt, Artificial Sequence
  Description of Artificial Sequence: Synthetic oligonucleotide
ucgugcucuagggcuggca

SEQ ID NO: 2123756 - RNA, 19 nt, Artificial Sequence
  Description of Artificial Sequence: Synthetic oligonucleotide
ggcagugaggccuuucggu

SEQ ID NO: 2123757 - RNA, 19 nt, Artificial Sequence
  Description of Artificial Sequence: Synthetic oligonucleotide
gguccacauuuugugugag

SEQ ID NO: 2123758 - RNA, 19 nt, Artificial Sequence
  Description of Artificial Sequence: Synthetic oligonucleotide
uguuccccucggccgugcu

SEQ ID NO: 2123759 - RNA, 19 nt, Artificial Sequence
  Description of Artificial Sequence: Synthetic oligonucleotide
guagggcuuggguggcaac

SEQ ID NO: 2123760 - RNA, 19 nt, Artificial Sequence
  Description of Artificial Sequence: Synthetic oligonucleotide
ggccccuuggccucucagc

SEQ ID NO: 2123761 - RNA, 19 nt, Artificial Sequence
  Description of Artificial Sequence: Synthetic oligonucleotide
cugccucucugcuccucac

SEQ ID NO: 2123762 - RNA, 19 nt, Artificial Sequence
  Description of Artificial Sequence: Synthetic oligonucleotide
gggagggacuugcauuuca

SEQ ID NO: 2123763 - RNA, 19 nt, Artificial Sequence
  Description of Artificial Sequence: Synthetic oligonucleotide
cggaugagcuccuuauaug

SEQ ID NO: 2123764 - RNA, 19 nt, Artificial Sequence
  Description of Artificial Sequence: Synthetic oligonucleotide
cucccaggccaugcgggcc

SEQ ID NO: 2123765 - RNA, 19 nt, Artificial Sequence
  Description of Artificial Sequence: Synthetic oligonucleotide
cguccuaguauguccauga

SEQ ID NO: 2123766 - RNA, 19 nt, Artificial Sequence
  Description of Artificial Sequence: Synthetic oligonucleotide
cgugcucuagggcuggcag

SEQ ID NO: 2123767 - RNA, 19 nt, Artificial Sequence
  Description of Artificial Sequence: Synthetic oligonucleotide
gguccugagggaugacaca

SEQ ID NO: 2123768 - RNA, 19 nt, Artificial Sequence
  Description of Artificial Sequence: Synthetic oligonucleotide
accguccuaguauguccau

SEQ ID NO: 2123769 - RNA, 19 nt, Artificial Sequence
  Description of Artificial Sequence: Synthetic oligonucleotide
uacccucaucgugcucuag

SEQ ID NO: 2123770 - RNA, 19 nt, Artificial Sequence
  Description of Artificial Sequence: Synthetic oligonucleotide
auacccucaucgugcucua

SEQ ID NO: 2123771 - RNA, 19 nt, Artificial Sequence
  Description of Artificial Sequence: Synthetic oligonucleotide
cagaccccgagugccuggc

SEQ ID NO: 2123772 - RNA, 19 nt, Artificial Sequence
  Description of Artificial Sequence: Synthetic oligonucleotide
cuacccuggaaggaggccu

SEQ ID NO: 2123773 - RNA, 19 nt, Artificial Sequence
  Description of Artificial Sequence: Synthetic oligonucleotide
cuuauaugccagggcucca

SEQ ID NO: 2123774 - RNA, 19 nt, Artificial Sequence
  Description of Artificial Sequence: Synthetic oligonucleotide
gauccggucugggaaggcu

SEQ ID NO: 2123775 - RNA, 19 nt, Artificial Sequence
  Description of Artificial Sequence: Synthetic oligonucleotide
ccucucagccuccucccgc

SEQ ID NO: 2123776 - RNA, 19 nt, Artificial Sequence
  Description of Artificial Sequence: Synthetic oligonucleotide
gcaaccguccuaguauguc

SEQ ID NO: 2123777 - RNA, 19 nt, Artificial Sequence
  Description of Artificial Sequence: Synthetic oligonucleotide
cauugaguucacggcagua

SEQ ID NO: 2123778 - RNA, 19 nt, Artificial Sequence
  Description of Artificial Sequence: Synthetic oligonucleotide
gcuuuccauuucagcagag

SEQ ID NO: 2123779 - RNA, 19 nt, Artificial Sequence
  Description of Artificial Sequence: Synthetic oligonucleotide
ccgcaaccguccuaguaug

SEQ ID NO: 2123780 - RNA, 19 nt, Artificial Sequence
  Description of Artificial Sequence: Synthetic oligonucleotide
ugggagggacuugcauuuc

SEQ ID NO: 2123781 - RNA, 19 nt, Artificial Sequence
  Description of Artificial Sequence: Synthetic oligonucleotide
ccgaaucaguucugcugag

SEQ ID NO: 2123782 - RNA, 19 nt, Artificial Sequence
  Description of Artificial Sequence: Synthetic oligonucleotide
agcaguccauguaccacuu

SEQ ID NO: 2123783 - RNA, 19 nt, Artificial Sequence
  Description of Artificial Sequence: Synthetic oligonucleotide
ccacuucaaacagcggaug

SEQ ID NO: 2123784 - RNA, 19 nt, Artificial Sequence
  Description of Artificial Sequence: Synthetic oligonucleotide
uuggcgcucccaggaggca

SEQ ID NO: 2123785 - RNA, 19 nt, Artificial Sequence
  Description of Artificial Sequence: Synthetic oligonucleotide
acaugccgcaaccguccua

SEQ ID NO: 2123786 - RNA, 19 nt, Artificial Sequence
  Description of Artificial Sequence: Synthetic oligonucleotide
guuccccucggccgugcuc

SEQ ID NO: 2123787 - RNA, 19 nt, Artificial Sequence
  Description of Artificial Sequence: Synthetic oligonucleotide
guggccgucuggacauggc

SEQ ID NO: 2123788 - RNA, 19 nt, Artificial Sequence
  Description of Artificial Sequence: Synthetic oligonucleotide
ccaaaaucacaaagagugu

SEQ ID NO: 2123789 - RNA, 19 nt, Artificial Sequence
  Description of Artificial Sequence: Synthetic oligonucleotide
gccgcaaccguccuaguau

SEQ ID NO: 2123790 - RNA, 19 nt, Artificial Sequence
  Description of Artificial Sequence: Synthetic oligonucleotide
cagcggaugagcuccuuau

SEQ ID NO: 2123791 - RNA, 19 nt, Artificial Sequence
  Description of Artificial Sequence: Synthetic oligonucleotide
ccgagugccuggcaagcug

SEQ ID NO: 2123792 - RNA, 19 nt, Artificial Sequence
  Description of Artificial Sequence: Synthetic oligonucleotide
agaccccgagugccuggca

SEQ ID NO: 2123793 - RNA, 19 nt, Artificial Sequence
  Description of Artificial Sequence: Synthetic oligonucleotide
gacaugccgcaaccguccu

SEQ ID NO: 2123794 - RNA, 19 nt, Artificial Sequence
  Description of Artificial Sequence: Synthetic oligonucleotide
ugggacccgcauggcuucc

SEQ ID NO: 2123795 - RNA, 19 nt, Artificial Sequence
  Description of Artificial Sequence: Synthetic oligonucleotide
gcuacccuggaaggaggcc

SEQ ID NO: 2123796 - RNA, 19 nt, Artificial Sequence
  Description of Artificial Sequence: Synthetic oligonucleotide
uggguccaugggguccuga

SEQ ID NO: 2123797 - RNA, 19 nt, Artificial Sequence
  Description of Artificial Sequence: Synthetic oligonucleotide
ugccaagcucuagcucccu

SEQ ID NO: 2123798 - RNA, 19 nt, Artificial Sequence
  Description of Artificial Sequence: Synthetic oligonucleotide
cuagugcaauuuccauucu

SEQ ID NO: 2123799 - RNA, 19 nt, Artificial Sequence
  Description of Artificial Sequence: Synthetic oligonucleotide
gcuguggccgucuggacau

SEQ ID NO: 2123800 - RNA, 19 nt, Artificial Sequence
  Description of Artificial Sequence: Synthetic oligonucleotide
ccauguggucuggaacugc

SEQ ID NO: 2123801 - RNA, 19 nt, Artificial Sequence
  Description of Artificial Sequence: Synthetic oligonucleotide
uagcuccauguggucugga

SEQ ID NO: 2123802 - RNA, 19 nt, Artificial Sequence
  Description of Artificial Sequence: Synthetic oligonucleotide
cgaaucaguucugcugagc

SEQ ID NO: 2123803 - RNA, 19 nt, Artificial Sequence
  Description of Artificial Sequence: Synthetic oligonucleotide
ggacccgcauggcuuccug

SEQ ID NO: 2123804 - RNA, 19 nt, Artificial Sequence
  Description of Artificial Sequence: Synthetic oligonucleotide
cugccgaaucaguucugcu

SEQ ID NO: 2123805 - RNA, 19 nt, Artificial Sequence
  Description of Artificial Sequence: Synthetic oligonucleotide
ccaucacaggucggaagug

SEQ ID NO: 2123806 - RNA, 19 nt, Artificial Sequence
  Description of Artificial Sequence: Synthetic oligonucleotide
gcaauucugucugugcaau

SEQ ID NO: 2123807 - RNA, 19 nt, Artificial Sequence
  Description of Artificial Sequence: Synthetic oligonucleotide
guccuaguauguccaugau

SEQ ID NO: 2123808 - RNA, 19 nt, Artificial Sequence
  Description of Artificial Sequence: Synthetic oligonucleotide
gaaugugguccugccgaau

SEQ ID NO: 2123809 - RNA, 19 nt, Artificial Sequence
  Description of Artificial Sequence: Synthetic oligonucleotide
ccugagugccaagcucuag

SEQ ID NO: 2123810 - RNA, 19 nt, Artificial Sequence
  Description of Artificial Sequence: Synthetic oligonucleotide
cuguuccccucggccgugc

SEQ ID NO: 2123811 - RNA, 19 nt, Artificial Sequence
  Description of Artificial Sequence: Synthetic oligonucleotide
augccgcaaccguccuagu

SEQ ID NO: 2123812 - RNA, 19 nt, Artificial Sequence
  Description of Artificial Sequence: Synthetic oligonucleotide
ggcaacgcaggugggucca

SEQ ID NO: 2123813 - RNA, 19 nt, Artificial Sequence
  Description of Artificial Sequence: Synthetic oligonucleotide
cgcuacccuggaaggaggc

SEQ ID NO: 2123814 - RNA, 19 nt, Artificial Sequence
  Description of Artificial Sequence: Synthetic oligonucleotide
ggccgucuggacauggcaa

SEQ ID NO: 2123815 - RNA, 19 nt, Artificial Sequence
  Description of Artificial Sequence: Synthetic oligonucleotide
gcagguggguccauggggu

SEQ ID NO: 2123816 - RNA, 19 nt, Artificial Sequence
  Description of Artificial Sequence: Synthetic oligonucleotide
gaggucccuagugcaauuu

SEQ ID NO: 2123817 - RNA, 19 nt, Artificial Sequence
  Description of Artificial Sequence: Synthetic oligonucleotide
gcaguccauguaccacuuc

SEQ ID NO: 2123818 - RNA, 19 nt, Artificial Sequence
  Description of Artificial Sequence: Synthetic oligonucleotide
gcucuagggcuggcaggcg

SEQ ID NO: 2123819 - RNA, 19 nt, Artificial Sequence
  Description of Artificial Sequence: Synthetic oligonucleotide
gcaaaggaagaggucccua

SEQ ID NO: 2123820 - RNA, 19 nt, Artificial Sequence
  Description of Artificial Sequence: Synthetic oligonucleotide
ccguccuaguauguccaug

SEQ ID NO: 2123821 - RNA, 19 nt, Artificial Sequence
  Description of Artificial Sequence: Synthetic oligonucleotide
gguagggcuuggguggcaa

SEQ ID NO: 2123822 - RNA, 19 nt, Artificial Sequence
  Description of Artificial Sequence: Synthetic oligonucleotide
cuccucccgcaguagcaua

SEQ ID NO: 2123823 - RNA, 19 nt, Artificial Sequence
  Description of Artificial Sequence: Synthetic oligonucleotide
cccucggccgugcucccag

SEQ ID NO: 2123824 - RNA, 19 nt, Artificial Sequence
  Description of Artificial Sequence: Synthetic oligonucleotide
ccucccgcaguagcauacc

SEQ ID NO: 2123825 - RNA, 19 nt, Artificial Sequence
  Description of Artificial Sequence: Synthetic oligonucleotide
gguggcaacgcaggugggu

SEQ ID NO: 2123826 - RNA, 19 nt, Artificial Sequence
  Description of Artificial Sequence: Synthetic oligonucleotide
ccccgagugccuggcaagc

SEQ ID NO: 2123827 - RNA, 19 nt, Artificial Sequence
  Description of Artificial Sequence: Synthetic oligonucleotide
gccgucuggacauggcaau

SEQ ID NO: 2123828 - RNA, 19 nt, Artificial Sequence
  Description of Artificial Sequence: Synthetic oligonucleotide
gugguccugccgaaucagu

SEQ ID NO: 2123829 - RNA, 19 nt, Artificial Sequence
  Description of Artificial Sequence: Synthetic oligonucleotide
gcauacccucaucgugcuc

SEQ ID NO: 2123830 - RNA, 19 nt, Artificial Sequence
  Description of Artificial Sequence: Synthetic oligonucleotide
cggucugggaaggcuuucc

SEQ ID NO: 2123831 - RNA, 19 nt, Artificial Sequence
  Description of Artificial Sequence: Synthetic oligonucleotide
gggcuccuacuccuggacu

SEQ ID NO: 2123832 - RNA, 19 nt, Artificial Sequence
  Description of Artificial Sequence: Synthetic oligonucleotide
cuguggccgucuggacaug

SEQ ID NO: 2123833 - RNA, 19 nt, Artificial Sequence
  Description of Artificial Sequence: Synthetic oligonucleotide
ccgcaguagcauacccuca

SEQ ID NO: 2123834 - RNA, 19 nt, Artificial Sequence
  Description of Artificial Sequence: Synthetic oligonucleotide
gaaggaggccugggcuccu

SEQ ID NO: 2123835 - RNA, 19 nt, Artificial Sequence
  Description of Artificial Sequence: Synthetic oligonucleotide
gccuuucggugcaggcccc

SEQ ID NO: 2123836 - RNA, 19 nt, Artificial Sequence
  Description of Artificial Sequence: Synthetic oligonucleotide
gcaguagaacagagacucu

SEQ ID NO: 2123837 - RNA, 19 nt, Artificial Sequence
  Description of Artificial Sequence: Synthetic oligonucleotide
ggucggaaguggaaauauu

SEQ ID NO: 2123838 - RNA, 19 nt, Artificial Sequence
  Description of Artificial Sequence: Synthetic oligonucleotide
cuuggccucucagccuccu

SEQ ID NO: 2123839 - RNA, 19 nt, Artificial Sequence
  Description of Artificial Sequence: Synthetic oligonucleotide
gcaaggagguccacauuuu

SEQ ID NO: 2123840 - RNA, 19 nt, Artificial Sequence
  Description of Artificial Sequence: Synthetic oligonucleotide
caggccccuuggccucuca

SEQ ID NO: 2123841 - RNA, 19 nt, Artificial Sequence
  Description of Artificial Sequence: Synthetic oligonucleotide
cggcaguagaacagagacu

SEQ ID NO: 2123842 - RNA, 19 nt, Artificial Sequence
  Description of Artificial Sequence: Synthetic oligonucleotide
caggccaugcgggccugcu

SEQ ID NO: 2123843 - RNA, 19 nt, Artificial Sequence
  Description of Artificial Sequence: Synthetic oligonucleotide
gcgcucccaggaggcagug

SEQ ID NO: 2123844 - RNA, 19 nt, Artificial Sequence
  Description of Artificial Sequence: Synthetic oligonucleotide
ggcgcucccaggaggcagu

SEQ ID NO: 2123845 - RNA, 19 nt, Artificial Sequence
  Description of Artificial Sequence: Synthetic oligonucleotide
cuuucggugcaggccccuu

SEQ ID NO: 2123846 - RNA, 19 nt, Artificial Sequence
  Description of Artificial Sequence: Synthetic oligonucleotide
gccgugcucccaggccaug

SEQ ID NO: 2123847 - RNA, 19 nt, Artificial Sequence
  Description of Artificial Sequence: Synthetic oligonucleotide
ccaugcgggccugcuccuc

SEQ ID NO: 2123848 - RNA, 19 nt, Artificial Sequence
  Description of Artificial Sequence: Synthetic oligonucleotide
ccgucuggacauggcaaua

SEQ ID NO: 2123849 - RNA, 19 nt, Artificial Sequence
  Description of Artificial Sequence: Synthetic oligonucleotide
cgcaaccguccuaguaugu

SEQ ID NO: 2123850 - RNA, 19 nt, Artificial Sequence
  Description of Artificial Sequence: Synthetic oligonucleotide
gggacccgcauggcuuccu

SEQ ID NO: 2123851 - RNA, 19 nt, Artificial Sequence
  Description of Artificial Sequence: Synthetic oligonucleotide
ggccgugcucccaggccau

SEQ ID NO: 2123852 - RNA, 19 nt, Artificial Sequence
  Description of Artificial Sequence: Synthetic oligonucleotide
cccgagugccuggcaagcu

SEQ ID NO: 2123853 - RNA, 19 nt, Artificial Sequence
  Description of Artificial Sequence: Synthetic oligonucleotide
ccccacugacaugccgcaa

SEQ ID NO: 2123854 - RNA, 19 nt, Artificial Sequence
  Description of Artificial Sequence: Synthetic oligonucleotide
ccuuucggugcaggccccu

SEQ ID NO: 2123855 - RNA, 19 nt, Artificial Sequence
  Description of Artificial Sequence: Synthetic oligonucleotide
cgccaucgcuacccuggaa

SEQ ID NO: 2123856 - RNA, 19 nt, Artificial Sequence
  Description of Artificial Sequence: Synthetic oligonucleotide
gcaacgcagguggguccau

SEQ ID NO: 2123857 - RNA, 19 nt, Artificial Sequence
  Description of Artificial Sequence: Synthetic oligonucleotide
ccccucggccgugcuccca

SEQ ID NO: 2123858 - RNA, 19 nt, Artificial Sequence
  Description of Artificial Sequence: Synthetic oligonucleotide
aacaauaggauauaguuuc

SEQ ID NO: 2123859 - RNA, 19 nt, Artificial Sequence
  Description of Artificial Sequence: Synthetic oligonucleotide
aauacuaucuuacagguga

SEQ ID NO: 2123860 - RNA, 19 nt, Artificial Sequence
  Description of Artificial Sequence: Synthetic oligonucleotide
aauggcaauuauuauaaac

SEQ ID NO: 2123861 - RNA, 19 nt, Artificial Sequence
  Description of Artificial Sequence: Synthetic oligonucleotide
uuugacaugaacuacagga

SEQ ID NO: 2123862 - RNA, 19 nt, Artificial Sequence
  Description of Artificial Sequence: Synthetic oligonucleotide
auaggauauaguuucaggc

SEQ ID NO: 2123863 - RNA, 19 nt, Artificial Sequence
  Description of Artificial Sequence: Synthetic oligonucleotide
uuaauagccacaaagcaag

SEQ ID NO: 2123864 - RNA, 19 nt, Artificial Sequence
  Description of Artificial Sequence: Synthetic oligonucleotide
ucuuauucaaacugaaugg

SEQ ID NO: 2123865 - RNA, 19 nt, Artificial Sequence
  Description of Artificial Sequence: Synthetic oligonucleotide
uuagauaaggcaaaguggc

SEQ ID NO: 2123866 - RNA, 19 nt, Artificial Sequence
  Description of Artificial Sequence: Synthetic oligonucleotide
uguacaaaauaguuuaccg

SEQ ID NO: 2123867 - RNA, 19 nt, Artificial Sequence
  Description of Artificial Sequence: Synthetic oligonucleotide
aauguaaauuacuauguug

SEQ ID NO: 2123868 - RNA, 19 nt, Artificial Sequence
  Description of Artificial Sequence: Synthetic oligonucleotide
aaucauguuuuguaguuac

SEQ ID NO: 2123869 - RNA, 19 nt, Artificial Sequence
  Description of Artificial Sequence: Synthetic oligonucleotide
uauuaaagcuguauuaaag

SEQ ID NO: 2123870 - RNA, 19 nt, Artificial Sequence
  Description of Artificial Sequence: Synthetic oligonucleotide
agacauauaggucuuauuc

SEQ ID NO: 2123871 - RNA, 19 nt, Artificial Sequence
  Description of Artificial Sequence: Synthetic oligonucleotide
aaaauacuaucuuacaggu

SEQ ID NO: 2123872 - RNA, 19 nt, Artificial Sequence
  Description of Artificial Sequence: Synthetic oligonucleotide
aaacuuacgugguaucugc

SEQ ID NO: 2123873 - RNA, 19 nt, Artificial Sequence
  Description of Artificial Sequence: Synthetic oligonucleotide
auguaaauuacuauguugc

SEQ ID NO: 2123874 - RNA, 19 nt, Artificial Sequence
  Description of Artificial Sequence: Synthetic oligonucleotide
aagaaagcgauuuucauaa

SEQ ID NO: 2123875 - RNA, 19 nt, Artificial Sequence
  Description of Artificial Sequence: Synthetic oligonucleotide
acuuuaaagcuuuuggaac

SEQ ID NO: 2123876 - RNA, 19 nt, Artificial Sequence
  Description of Artificial Sequence: Synthetic oligonucleotide
ucaucauaggauaaaauac

SEQ ID NO: 2123877 - RNA, 19 nt, Artificial Sequence
  Description of Artificial Sequence: Synthetic oligonucleotide
aagaauuguaacuaugggu

SEQ ID NO: 2123878 - RNA, 19 nt, Artificial Sequence
  Description of Artificial Sequence: Synthetic oligonucleotide
uuaaaauugccaaaucaug

SEQ ID NO: 2123879 - RNA, 19 nt, Artificial Sequence
  Description of Artificial Sequence: Synthetic oligonucleotide
accauugcaaucuaugugg

SEQ ID NO: 2123880 - RNA, 19 nt, Artificial Sequence
  Description of Artificial Sequence: Synthetic oligonucleotide
uguguuuaggaaauuaucu

SEQ ID NO: 2123881 - RNA, 19 nt, Artificial Sequence
  Description of Artificial Sequence: Synthetic oligonucleotide
uuuacauuuaaaacaaguc

SEQ ID NO: 2123882 - RNA, 19 nt, Artificial Sequence
  Description of Artificial Sequence: Synthetic oligonucleotide
auauaggucuuauucaaac

SEQ ID NO: 2123883 - RNA, 19 nt, Artificial Sequence
  Description of Artificial Sequence: Synthetic oligonucleotide
acuuagauaaggcaaagug

SEQ ID NO: 2123884 - RNA, 19 nt, Artificial Sequence
  Description of Artificial Sequence: Synthetic oligonucleotide
uaaaauugccaaaucaugu

SEQ ID NO: 2123885 - RNA, 19 nt, Artificial Sequence
  Description of Artificial Sequence: Synthetic oligonucleotide
acaaauuaaauguaaauua

SEQ ID NO: 2123886 - RNA, 19 nt, Artificial Sequence
  Description of Artificial Sequence: Synthetic oligonucleotide
uguauuaaaguauccagac

SEQ ID NO: 2123887 - RNA, 19 nt, Artificial Sequence
  Description of Artificial Sequence: Synthetic oligonucleotide
ggcaauuuaacuuuaaagc

SEQ ID NO: 2123888 - RNA, 19 nt, Artificial Sequence
  Description of Artificial Sequence: Synthetic oligonucleotide
uuugcuuacuuagauaagg

SEQ ID NO: 2123889 - RNA, 19 nt, Artificial Sequence
  Description of Artificial Sequence: Synthetic oligonucleotide
aaucgguugucuuugagcu

SEQ ID NO: 2123890 - RNA, 19 nt, Artificial Sequence
  Description of Artificial Sequence: Synthetic oligonucleotide
aagcaagcugacuauauag

SEQ ID NO: 2123891 - RNA, 19 nt, Artificial Sequence
  Description of Artificial Sequence: Synthetic oligonucleotide
gucuuauucaaacugaaug

SEQ ID NO: 2123892 - RNA, 19 nt, Artificial Sequence
  Description of Artificial Sequence: Synthetic oligonucleotide
aaaucgauuuggcaucugg

SEQ ID NO: 2123893 - RNA, 19 nt, Artificial Sequence
  Description of Artificial Sequence: Synthetic oligonucleotide
uguuuuguaguuacugagg

SEQ ID NO: 2123894 - RNA, 19 nt, Artificial Sequence
  Description of Artificial Sequence: Synthetic oligonucleotide
acuacaggagguuuucucc

SEQ ID NO: 2123895 - RNA, 19 nt, Artificial Sequence
  Description of Artificial Sequence: Synthetic oligonucleotide
cuaugggugaguuauauac

SEQ ID NO: 2123896 - RNA, 19 nt, Artificial Sequence
  Description of Artificial Sequence: Synthetic oligonucleotide
aauaguuuaccguuuugcu

SEQ ID NO: 2123897 - RNA, 19 nt, Artificial Sequence
  Description of Artificial Sequence: Synthetic oligonucleotide
uaucuuacaggugagaggc

SEQ ID NO: 2123898 - RNA, 19 nt, Artificial Sequence
  Description of Artificial Sequence: Synthetic oligonucleotide
uuuaauagccacaaagcaa

SEQ ID NO: 2123899 - RNA, 19 nt, Artificial Sequence
  Description of Artificial Sequence: Synthetic oligonucleotide
uaaaagaaagcgauuuuca

SEQ ID NO: 2123900 - RNA, 19 nt, Artificial Sequence
  Description of Artificial Sequence: Synthetic oligonucleotide
agcaaaauuugacaugaac

SEQ ID NO: 2123901 - RNA, 19 nt, Artificial Sequence
  Description of Artificial Sequence: Synthetic oligonucleotide
aaagcuguauuaaaguauc

SEQ ID NO: 2123902 - RNA, 19 nt, Artificial Sequence
  Description of Artificial Sequence: Synthetic oligonucleotide
acuuacaaaggaaugaaac

SEQ ID NO: 2123903 - RNA, 19 nt, Artificial Sequence
  Description of Artificial Sequence: Synthetic oligonucleotide
aagcgauuuucauaaacag

SEQ ID NO: 2123904 - RNA, 19 nt, Artificial Sequence
  Description of Artificial Sequence: Synthetic oligonucleotide
agaauuguaacuaugggug

SEQ ID NO: 2123905 - RNA, 19 nt, Artificial Sequence
  Description of Artificial Sequence: Synthetic oligonucleotide
uguuugguccgucacaucc

SEQ ID NO: 2123906 - RNA, 19 nt, Artificial Sequence
  Description of Artificial Sequence: Synthetic oligonucleotide
auaaaagaaagcgauuuuc

SEQ ID NO: 2123907 - RNA, 19 nt, Artificial Sequence
  Description of Artificial Sequence: Synthetic oligonucleotide
aggcaauuuaacuuuaaag

SEQ ID NO: 2123908 - RNA, 19 nt, Artificial Sequence
  Description of Artificial Sequence: Synthetic oligonucleotide
uauaguuucaggcaauuua

SEQ ID NO: 2123909 - RNA, 19 nt, Artificial Sequence
  Description of Artificial Sequence: Synthetic oligonucleotide
uauaacaccauugcaaucu

SEQ ID NO: 2123910 - RNA, 19 nt, Artificial Sequence
  Description of Artificial Sequence: Synthetic oligonucleotide
uguucauaugccaacucag

SEQ ID NO: 2123911 - RNA, 19 nt, Artificial Sequence
  Description of Artificial Sequence: Synthetic oligonucleotide
ucagaaauguggcagagau

SEQ ID NO: 2123912 - RNA, 19 nt, Artificial Sequence
  Description of Artificial Sequence: Synthetic oligonucleotide
auaggucuuauucaaacug

SEQ ID NO: 2123913 - RNA, 19 nt, Artificial Sequence
  Description of Artificial Sequence: Synthetic oligonucleotide
aacuacaggagguuuucuc

SEQ ID NO: 2123914 - RNA, 19 nt, Artificial Sequence
  Description of Artificial Sequence: Synthetic oligonucleotide
uucccuuuauauuaaagcu

SEQ ID NO: 2123915 - RNA, 19 nt, Artificial Sequence
  Description of Artificial Sequence: Synthetic oligonucleotide
aaauguggcagagauuagg

SEQ ID NO: 2123916 - RNA, 19 nt, Artificial Sequence
  Description of Artificial Sequence: Synthetic oligonucleotide
aguauccagacauauaggu

SEQ ID NO: 2123917 - RNA, 19 nt, Artificial Sequence
  Description of Artificial Sequence: Synthetic oligonucleotide
aaugcuucuagcaaaauuu

SEQ ID NO: 2123918 - RNA, 19 nt, Artificial Sequence
  Description of Artificial Sequence: Synthetic oligonucleotide
auuagggaacucuacaaug

SEQ ID NO: 2123919 - RNA, 19 nt, Artificial Sequence
  Description of Artificial Sequence: Synthetic oligonucleotide
uugacaugaacuacaggag

SEQ ID NO: 2123920 - RNA, 19 nt, Artificial Sequence
  Description of Artificial Sequence: Synthetic oligonucleotide
aaagaaagcgauuuucaua

SEQ ID NO: 2123921 - RNA, 19 nt, Artificial Sequence
  Description of Artificial Sequence: Synthetic oligonucleotide
aguaccacgaugguaacac

SEQ ID NO: 2123922 - RNA, 19 nt, Artificial Sequence
  Description of Artificial Sequence: Synthetic oligonucleotide
gaaagucucugucugcacg

SEQ ID NO: 2123923 - RNA, 19 nt, Artificial Sequence
  Description of Artificial Sequence: Synthetic oligonucleotide
uauagcacguuuugcagag

SEQ ID NO: 2123924 - RNA, 19 nt, Artificial Sequence
  Description of Artificial Sequence: Synthetic oligonucleotide
uuuguaguuacugaggaaa

SEQ ID NO: 2123925 - RNA, 19 nt, Artificial Sequence
  Description of Artificial Sequence: Synthetic oligonucleotide
aaucgauuuggcaucuggc

SEQ ID NO: 2123926 - RNA, 19 nt, Artificial Sequence
  Description of Artificial Sequence: Synthetic oligonucleotide
aauguggcagagauuaggg

SEQ ID NO: 2123927 - RNA, 19 nt, Artificial Sequence
  Description of Artificial Sequence: Synthetic oligonucleotide
auguuuuguaguuacugag

SEQ ID NO: 2123928 - RNA, 19 nt, Artificial Sequence
  Description of Artificial Sequence: Synthetic oligonucleotide
uguauaacaccauugcaau

SEQ ID NO: 2123929 - RNA, 19 nt, Artificial Sequence
  Description of Artificial Sequence: Synthetic oligonucleotide
ugcccuuuaauaaaccaug

SEQ ID NO: 2123930 - RNA, 19 nt, Artificial Sequence
  Description of Artificial Sequence: Synthetic oligonucleotide
uaggauauaguuucaggca

SEQ ID NO: 2123931 - RNA, 19 nt, Artificial Sequence
  Description of Artificial Sequence: Synthetic oligonucleotide
uaaacagggacuuuccccu

SEQ ID NO: 2123932 - RNA, 19 nt, Artificial Sequence
  Description of Artificial Sequence: Synthetic oligonucleotide
aaaauugccaaaucauguu

SEQ ID NO: 2123933 - RNA, 19 nt, Artificial Sequence
  Description of Artificial Sequence: Synthetic oligonucleotide
ucccuuuauauuaaagcug

SEQ ID NO: 2123934 - RNA, 19 nt, Artificial Sequence
  Description of Artificial Sequence: Synthetic oligonucleotide
gcgauuuucauaaacaggg

SEQ ID NO: 2123935 - RNA, 19 nt, Artificial Sequence
  Description of Artificial Sequence: Synthetic oligonucleotide
agcacaaguaccacgaugg

SEQ ID NO: 2123936 - RNA, 19 nt, Artificial Sequence
  Description of Artificial Sequence: Synthetic oligonucleotide
aaagcgauuuucauaaaca

SEQ ID NO: 2123937 - RNA, 19 nt, Artificial Sequence
  Description of Artificial Sequence: Synthetic oligonucleotide
uaccguuuugcuuacuuag

SEQ ID NO: 2123938 - RNA, 19 nt, Artificial Sequence
  Description of Artificial Sequence: Synthetic oligonucleotide
acuauauagcacguuuugc

SEQ ID NO: 2123939 - RNA, 19 nt, Artificial Sequence
  Description of Artificial Sequence: Synthetic oligonucleotide
aauaaaagaaagcgauuuu

SEQ ID NO: 2123940 - RNA, 19 nt, Artificial Sequence
  Description of Artificial Sequence: Synthetic oligonucleotide
ucauaugccaacucagaug

SEQ ID NO: 2123941 - RNA, 19 nt, Artificial Sequence
  Description of Artificial Sequence: Synthetic oligonucleotide
uaccacgaugguaacacgg

SEQ ID NO: 2123942 - RNA, 19 nt, Artificial Sequence
  Description of Artificial Sequence: Synthetic oligonucleotide
auagccacaaagcaagcug

SEQ ID NO: 2123943 - RNA, 19 nt, Artificial Sequence
  Description of Artificial Sequence: Synthetic oligonucleotide
uccaggaauaaaagaaagc

SEQ ID NO: 2123944 - RNA, 19 nt, Artificial Sequence
  Description of Artificial Sequence: Synthetic oligonucleotide
uuaaagcuguauuaaagua

SEQ ID NO: 2123945 - RNA, 19 nt, Artificial Sequence
  Description of Artificial Sequence: Synthetic oligonucleotide
aacucagauguguuuagga

SEQ ID NO: 2123946 - RNA, 19 nt, Artificial Sequence
  Description of Artificial Sequence: Synthetic oligonucleotide
uacuauguugcaauuuaca

SEQ ID NO: 2123947 - RNA, 19 nt, Artificial Sequence
  Description of Artificial Sequence: Synthetic oligonucleotide
gaaagcgauuuucauaaac

SEQ ID NO: 2123948 - RNA, 19 nt, Artificial Sequence
  Description of Artificial Sequence: Synthetic oligonucleotide
aaaaucgguugucuuugag

SEQ ID NO: 2123949 - RNA, 19 nt, Artificial Sequence
  Description of Artificial Sequence: Synthetic oligonucleotide
aauuguaacuaugggugag

SEQ ID NO: 2123950 - RNA, 19 nt, Artificial Sequence
  Description of Artificial Sequence: Synthetic oligonucleotide
ucuucccuuuauauuaaag

SEQ ID NO: 2123951 - RNA, 19 nt, Artificial Sequence
  Description of Artificial Sequence: Synthetic oligonucleotide
aagacgaaggagcaggaaa

SEQ ID NO: 2123952 - RNA, 19 nt, Artificial Sequence
  Description of Artificial Sequence: Synthetic oligonucleotide
auggcaauuauuauaaaca

SEQ ID NO: 2123953 - RNA, 19 nt, Artificial Sequence
  Description of Artificial Sequence: Synthetic oligonucleotide
aacaaacaauaggauauag

SEQ ID NO: 2123954 - RNA, 19 nt, Artificial Sequence
  Description of Artificial Sequence: Synthetic oligonucleotide
agauaaggcaaaguggcgg

SEQ ID NO: 2123955 - RNA, 19 nt, Artificial Sequence
  Description of Artificial Sequence: Synthetic oligonucleotide
uguuuaggaaauuaucuuu

SEQ ID NO: 2123956 - RNA, 19 nt, Artificial Sequence
  Description of Artificial Sequence: Synthetic oligonucleotide
uaguuuaccguuuugcuua

SEQ ID NO: 2123957 - RNA, 19 nt, Artificial Sequence
  Description of Artificial Sequence: Synthetic oligonucleotide
uguaaauuacuauguugca

SEQ ID NO: 2123958 - RNA, 19 nt, Artificial Sequence
  Description of Artificial Sequence: Synthetic oligonucleotide
gacauauaggucuuauuca

SEQ ID NO: 2123959 - RNA, 19 nt, Artificial Sequence
  Description of Artificial Sequence: Synthetic oligonucleotide
aaauugccaaaucauguuu

SEQ ID NO: 2123960 - RNA, 19 nt, Artificial Sequence
  Description of Artificial Sequence: Synthetic oligonucleotide
auuacuauguugcaauuua

SEQ ID NO: 2123961 - RNA, 19 nt, Artificial Sequence
  Description of Artificial Sequence: Synthetic oligonucleotide
ucauguuuuguaguuacug

SEQ ID NO: 2123962 - RNA, 19 nt, Artificial Sequence
  Description of Artificial Sequence: Synthetic oligonucleotide
ucauaaacagggacuuucc

SEQ ID NO: 2123963 - RNA, 19 nt, Artificial Sequence
  Description of Artificial Sequence: Synthetic oligonucleotide
uuuccacuuacaaaggaau

SEQ ID NO: 2123964 - RNA, 19 nt, Artificial Sequence
  Description of Artificial Sequence: Synthetic oligonucleotide
acuauguugcaauuuacau

SEQ ID NO: 2123965 - RNA, 19 nt, Artificial Sequence
  Description of Artificial Sequence: Synthetic oligonucleotide
gacuauauagcacguuuug

SEQ ID NO: 2123966 - RNA, 19 nt, Artificial Sequence
  Description of Artificial Sequence: Synthetic oligonucleotide
uuuuccacuuacaaaggaa

SEQ ID NO: 2123967 - RNA, 19 nt, Artificial Sequence
  Description of Artificial Sequence: Synthetic oligonucleotide
ccacauuucagaaaugugg

SEQ ID NO: 2123968 - RNA, 19 nt, Artificial Sequence
  Description of Artificial Sequence: Synthetic oligonucleotide
uagauaaggcaaaguggcg

SEQ ID NO: 2123969 - RNA, 19 nt, Artificial Sequence
  Description of Artificial Sequence: Synthetic oligonucleotide
aacugaauggcaauuauua

SEQ ID NO: 2123970 - RNA, 19 nt, Artificial Sequence
  Description of Artificial Sequence: Synthetic oligonucleotide
ucuacguuacuuuuaggaa

SEQ ID NO: 2123971 - RNA, 19 nt, Artificial Sequence
  Description of Artificial Sequence: Synthetic oligonucleotide
uugcuuacuuagauaaggc

SEQ ID NO: 2123972 - RNA, 19 nt, Artificial Sequence
  Description of Artificial Sequence: Synthetic oligonucleotide
aacaaguccaggaauaaaa

SEQ ID NO: 2123973 - RNA, 19 nt, Artificial Sequence
  Description of Artificial Sequence: Synthetic oligonucleotide
ucuaugugggacaucucug

SEQ ID NO: 2123974 - RNA, 19 nt, Artificial Sequence
  Description of Artificial Sequence: Synthetic oligonucleotide
ucgguugucuuugagcugg

SEQ ID NO: 2123975 - RNA, 19 nt, Artificial Sequence
  Description of Artificial Sequence: Synthetic oligonucleotide
acagguauguauaacacca

SEQ ID NO: 2123976 - RNA, 19 nt, Artificial Sequence
  Description of Artificial Sequence: Synthetic oligonucleotide
uugcagagaaugcuguaag

SEQ ID NO: 2123977 - RNA, 19 nt, Artificial Sequence
  Description of Artificial Sequence: Synthetic oligonucleotide
cuauauagcacguuuugca

SEQ ID NO: 2123978 - RNA, 19 nt, Artificial Sequence
  Description of Artificial Sequence: Synthetic oligonucleotide
ccaggaauaaaagaaagcg

SEQ ID NO: 2123979 - RNA, 19 nt, Artificial Sequence
  Description of Artificial Sequence: Synthetic oligonucleotide
aaacugcccuuuaauaaac

SEQ ID NO: 2123980 - RNA, 19 nt, Artificial Sequence
  Description of Artificial Sequence: Synthetic oligonucleotide
uaggucuuauucaaacuga

SEQ ID NO: 2123981 - RNA, 19 nt, Artificial Sequence
  Description of Artificial Sequence: Synthetic oligonucleotide
agaggcaaggcagagggac

SEQ ID NO: 2123982 - RNA, 19 nt, Artificial Sequence
  Description of Artificial Sequence: Synthetic oligonucleotide
uggcaauuauuauaaacaa

SEQ ID NO: 2123983 - RNA, 19 nt, Artificial Sequence
  Description of Artificial Sequence: Synthetic oligonucleotide
aucucugagcacaaguacc

SEQ ID NO: 2123984 - RNA, 19 nt, Artificial Sequence
  Description of Artificial Sequence: Synthetic oligonucleotide
uuucuugguguuugguccg

SEQ ID NO: 2123985 - RNA, 19 nt, Artificial Sequence
  Description of Artificial Sequence: Synthetic oligonucleotide
uauaggucuuauucaaacu

SEQ ID NO: 2123986 - RNA, 19 nt, Artificial Sequence
  Description of Artificial Sequence: Synthetic oligonucleotide
aggaauaaaagaaagcgau

SEQ ID NO: 2123987 - RNA, 19 nt, Artificial Sequence
  Description of Artificial Sequence: Synthetic oligonucleotide
acauauaggucuuauucaa

SEQ ID NO: 2123988 - RNA, 19 nt, Artificial Sequence
  Description of Artificial Sequence: Synthetic oligonucleotide
uuuugcuuacuuagauaag

SEQ ID NO: 2123989 - RNA, 19 nt, Artificial Sequence
  Description of Artificial Sequence: Synthetic oligonucleotide
ucauaggauaaaauacuau

SEQ ID NO: 2123990 - RNA, 19 nt, Artificial Sequence
  Description of Artificial Sequence: Synthetic oligonucleotide
ugcagagaaugcuguaagg

SEQ ID NO: 2123991 - RNA, 19 nt, Artificial Sequence
  Description of Artificial Sequence: Synthetic oligonucleotide
uacguuacuuuuaggaaaa

SEQ ID NO: 2123992 - RNA, 19 nt, Artificial Sequence
  Description of Artificial Sequence: Synthetic oligonucleotide
cucuacguuacuuuuagga

SEQ ID NO: 2123993 - RNA, 19 nt, Artificial Sequence
  Description of Artificial Sequence: Synthetic oligonucleotide
uuucaggcaauuuaacuuu

SEQ ID NO: 2123994 - RNA, 19 nt, Artificial Sequence
  Description of Artificial Sequence: Synthetic oligonucleotide
ugcuuacuuagauaaggca

SEQ ID NO: 2123995 - RNA, 19 nt, Artificial Sequence
  Description of Artificial Sequence: Synthetic oligonucleotide
agcaagcugacuauauagc

SEQ ID NO: 2123996 - RNA, 19 nt, Artificial Sequence
  Description of Artificial Sequence: Synthetic oligonucleotide
uucauaaacagggacuuuc

SEQ ID NO: 2123997 - RNA, 19 nt, Artificial Sequence
  Description of Artificial Sequence: Synthetic oligonucleotide
uccacuuacaaaggaauga

SEQ ID NO: 2123998 - RNA, 19 nt, Artificial Sequence
  Description of Artificial Sequence: Synthetic oligonucleotide
guaaacugcccuuuaauaa

SEQ ID NO: 2123999 - RNA, 19 nt, Artificial Sequence
  Description of Artificial Sequence: Synthetic oligonucleotide
acaaguaccacgaugguaa

SEQ ID NO: 2124000 - RNA, 19 nt, Artificial Sequence
  Description of Artificial Sequence: Synthetic oligonucleotide
uuccacuuacaaaggaaug

SEQ ID NO: 2124001 - RNA, 19 nt, Artificial Sequence
  Description of Artificial Sequence: Synthetic oligonucleotide
ugucuguacaaaauaguuu

SEQ ID NO: 2124002 - RNA, 19 nt, Artificial Sequence
  Description of Artificial Sequence: Synthetic oligonucleotide
uguugcaauuuacauuuaa

SEQ ID NO: 2124003 - RNA, 19 nt, Artificial Sequence
  Description of Artificial Sequence: Synthetic oligonucleotide
uuuucauaaacagggacuu

SEQ ID NO: 2124004 - RNA, 19 nt, Artificial Sequence
  Description of Artificial Sequence: Synthetic oligonucleotide
uuacuauguugcaauuuac

SEQ ID NO: 2124005 - RNA, 19 nt, Artificial Sequence
  Description of Artificial Sequence: Synthetic oligonucleotide
auggccuuaaaauugccaa

SEQ ID NO: 2124006 - RNA, 19 nt, Artificial Sequence
  Description of Artificial Sequence: Synthetic oligonucleotide
uaguuacugaggaaaagua

SEQ ID NO: 2124007 - RNA, 19 nt, Artificial Sequence
  Description of Artificial Sequence: Synthetic oligonucleotide
uguaguuacugaggaaaag

SEQ ID NO: 2124008 - RNA, 19 nt, Artificial Sequence
  Description of Artificial Sequence: Synthetic oligonucleotide
auuugacaugaacuacagg

SEQ ID NO: 2124009 - RNA, 19 nt, Artificial Sequence
  Description of Artificial Sequence: Synthetic oligonucleotide
aggauauaguuucaggcaa

SEQ ID NO: 2124010 - RNA, 19 nt, Artificial Sequence
  Description of Artificial Sequence: Synthetic oligonucleotide
aagcuguauuaaaguaucc

SEQ ID NO: 2124011 - RNA, 19 nt, Artificial Sequence
  Description of Artificial Sequence: Synthetic oligonucleotide
ugguaucugcaguaaacug

SEQ ID NO: 2124012 - RNA, 19 nt, Artificial Sequence
  Description of Artificial Sequence: Synthetic oligonucleotide
gagauuagggaacucuaca

SEQ ID NO: 2124013 - RNA, 19 nt, Artificial Sequence
  Description of Artificial Sequence: Synthetic oligonucleotide
gggugaguuauauacauac

SEQ ID NO: 2124014 - RNA, 19 nt, Artificial Sequence
  Description of Artificial Sequence: Synthetic oligonucleotide
cacagguauguauaacacc

SEQ ID NO: 2124015 - RNA, 19 nt, Artificial Sequence
  Description of Artificial Sequence: Synthetic oligonucleotide
cuagcaaaauuugacauga

SEQ ID NO: 2124016 - RNA, 19 nt, Artificial Sequence
  Description of Artificial Sequence: Synthetic oligonucleotide
agauuagggaacucuacaa

SEQ ID NO: 2124017 - RNA, 19 nt, Artificial Sequence
  Description of Artificial Sequence: Synthetic oligonucleotide
agcgauuuucauaaacagg

SEQ ID NO: 2124018 - RNA, 19 nt, Artificial Sequence
  Description of Artificial Sequence: Synthetic oligonucleotide
uccgucacauccaacuaca

SEQ ID NO: 2124019 - RNA, 19 nt, Artificial Sequence
  Description of Artificial Sequence: Synthetic oligonucleotide
ugcuucuagcaaaauuuga

SEQ ID NO: 2124020 - RNA, 19 nt, Artificial Sequence
  Description of Artificial Sequence: Synthetic oligonucleotide
aauagccacaaagcaagcu

SEQ ID NO: 2124021 - RNA, 19 nt, Artificial Sequence
  Description of Artificial Sequence: Synthetic oligonucleotide
ugguccgucacauccaacu

SEQ ID NO: 2124022 - RNA, 19 nt, Artificial Sequence
  Description of Artificial Sequence: Synthetic oligonucleotide
aaagcaagcugacuauaua

SEQ ID NO: 2124023 - RNA, 19 nt, Artificial Sequence
  Description of Artificial Sequence: Synthetic oligonucleotide
uggcaucuggcucacaggu

SEQ ID NO: 2124024 - RNA, 19 nt, Artificial Sequence
  Description of Artificial Sequence: Synthetic oligonucleotide
auguauaacaccauugcaa

SEQ ID NO: 2124025 - RNA, 19 nt, Artificial Sequence
  Description of Artificial Sequence: Synthetic oligonucleotide
guaucugcaguaaacugcc

SEQ ID NO: 2124026 - RNA, 19 nt, Artificial Sequence
  Description of Artificial Sequence: Synthetic oligonucleotide
aacugcccuuuaauaaacc

SEQ ID NO: 2124027 - RNA, 19 nt, Artificial Sequence
  Description of Artificial Sequence: Synthetic oligonucleotide
caggugagaggcaaggcag

SEQ ID NO: 2124028 - RNA, 19 nt, Artificial Sequence
  Description of Artificial Sequence: Synthetic oligonucleotide
uuuaccguuuugcuuacuu

SEQ ID NO: 2124029 - RNA, 19 nt, Artificial Sequence
  Description of Artificial Sequence: Synthetic oligonucleotide
cucacagguauguauaaca

SEQ ID NO: 2124030 - RNA, 19 nt, Artificial Sequence
  Description of Artificial Sequence: Synthetic oligonucleotide
gauaaggcaaaguggcgga

SEQ ID NO: 2124031 - RNA, 19 nt, Artificial Sequence
  Description of Artificial Sequence: Synthetic oligonucleotide
agagauuagggaacucuac

SEQ ID NO: 2124032 - RNA, 19 nt, Artificial Sequence
  Description of Artificial Sequence: Synthetic oligonucleotide
aauuacuauguugcaauuu

SEQ ID NO: 2124033 - RNA, 19 nt, Artificial Sequence
  Description of Artificial Sequence: Synthetic oligonucleotide
cuuacuuagauaaggcaaa

SEQ ID NO: 2124034 - RNA, 19 nt, Artificial Sequence
  Description of Artificial Sequence: Synthetic oligonucleotide
acaggugagaggcaaggca

SEQ ID NO: 2124035 - RNA, 19 nt, Artificial Sequence
  Description of Artificial Sequence: Synthetic oligonucleotide
aggaaugaaacugaugaaa

SEQ ID NO: 2124036 - RNA, 19 nt, Artificial Sequence
  Description of Artificial Sequence: Synthetic oligonucleotide
aggaaacuuacgugguauc

SEQ ID NO: 2124037 - RNA, 19 nt, Artificial Sequence
  Description of Artificial Sequence: Synthetic oligonucleotide
gugaguuauauacauacgu

SEQ ID NO: 2124038 - RNA, 19 nt, Artificial Sequence
  Description of Artificial Sequence: Synthetic oligonucleotide
cacguuuugcagagaaugc

SEQ ID NO: 2124039 - RNA, 19 nt, Artificial Sequence
  Description of Artificial Sequence: Synthetic oligonucleotide
augggugaguuauauacau

SEQ ID NO: 2124040 - RNA, 19 nt, Artificial Sequence
  Description of Artificial Sequence: Synthetic oligonucleotide
cauaugccaacucagaugu

SEQ ID NO: 2124041 - RNA, 19 nt, Artificial Sequence
  Description of Artificial Sequence: Synthetic oligonucleotide
gaauuguaacuauggguga

SEQ ID NO: 2124042 - RNA, 19 nt, Artificial Sequence
  Description of Artificial Sequence: Synthetic oligonucleotide
acugcccuuuaauaaacca

SEQ ID NO: 2124043 - RNA, 19 nt, Artificial Sequence
  Description of Artificial Sequence: Synthetic oligonucleotide
gguaucugcaguaaacugc

SEQ ID NO: 2124044 - RNA, 19 nt, Artificial Sequence
  Description of Artificial Sequence: Synthetic oligonucleotide
gaauaaaagaaagcgauuu

SEQ ID NO: 2124045 - RNA, 19 nt, Artificial Sequence
  Description of Artificial Sequence: Synthetic oligonucleotide
gaugguaacacggcugcug

SEQ ID NO: 2124046 - RNA, 19 nt, Artificial Sequence
  Description of Artificial Sequence: Synthetic oligonucleotide
acucagauguguuuaggaa

SEQ ID NO: 2124047 - RNA, 19 nt, Artificial Sequence
  Description of Artificial Sequence: Synthetic oligonucleotide
gagcacaaguaccacgaug

SEQ ID NO: 2124048 - RNA, 19 nt, Artificial Sequence
  Description of Artificial Sequence: Synthetic oligonucleotide
caggaauaaaagaaagcga

SEQ ID NO: 2124049 - RNA, 19 nt, Artificial Sequence
  Description of Artificial Sequence: Synthetic oligonucleotide
agcaggaaagucucugucu

SEQ ID NO: 2124050 - RNA, 19 nt, Artificial Sequence
  Description of Artificial Sequence: Synthetic oligonucleotide
uuugcagagaaugcuguaa

SEQ ID NO: 2124051 - RNA, 19 nt, Artificial Sequence
  Description of Artificial Sequence: Synthetic oligonucleotide
acggcugcugauucauggc

SEQ ID NO: 2124052 - RNA, 19 nt, Artificial Sequence
  Description of Artificial Sequence: Synthetic oligonucleotide
aaauacuaucuuacaggug

SEQ ID NO: 2124053 - RNA, 19 nt, Artificial Sequence
  Description of Artificial Sequence: Synthetic oligonucleotide
aguuuaccguuuugcuuac

SEQ ID NO: 2124054 - RNA, 19 nt, Artificial Sequence
  Description of Artificial Sequence: Synthetic oligonucleotide
ugacuauauagcacguuuu

SEQ ID NO: 2124055 - RNA, 19 nt, Artificial Sequence
  Description of Artificial Sequence: Synthetic oligonucleotide
auaguuucaggcaauuuaa

SEQ ID NO: 2124056 - RNA, 19 nt, Artificial Sequence
  Description of Artificial Sequence: Synthetic oligonucleotide
agacgaaggagcaggaaag

SEQ ID NO: 2124057 - RNA, 19 nt, Artificial Sequence
  Description of Artificial Sequence: Synthetic oligonucleotide
caucucugagcacaaguac

SEQ ID NO: 2124058 - RNA, 19 nt, Artificial Sequence
  Description of Artificial Sequence: Synthetic oligonucleotide
uaauagccacaaagcaagc

SEQ ID NO: 2124059 - RNA, 19 nt, Artificial Sequence
  Description of Artificial Sequence: Synthetic oligonucleotide
ucacauccaacuacaaauu

SEQ ID NO: 2124060 - RNA, 19 nt, Artificial Sequence
  Description of Artificial Sequence: Synthetic oligonucleotide
uaguuucaggcaauuuaac

SEQ ID NO: 2124061 - RNA, 19 nt, Artificial Sequence
  Description of Artificial Sequence: Synthetic oligonucleotide
cauccaacuacaaauuaaa

SEQ ID NO: 2124062 - RNA, 19 nt, Artificial Sequence
  Description of Artificial Sequence: Synthetic oligonucleotide
uuuuguaguuacugaggaa

SEQ ID NO: 2124063 - RNA, 19 nt, Artificial Sequence
  Description of Artificial Sequence: Synthetic oligonucleotide
aacuaugggugaguuauau

SEQ ID NO: 2124064 - RNA, 19 nt, Artificial Sequence
  Description of Artificial Sequence: Synthetic oligonucleotide
uagcacguuuugcagagaa

SEQ ID NO: 2124065 - RNA, 19 nt, Artificial Sequence
  Description of Artificial Sequence: Synthetic oligonucleotide
cuacguuacuuuuaggaaa

SEQ ID NO: 2124066 - RNA, 19 nt, Artificial Sequence
  Description of Artificial Sequence: Synthetic oligonucleotide
caccauugcaaucuaugug

SEQ ID NO: 2124067 - RNA, 19 nt, Artificial Sequence
  Description of Artificial Sequence: Synthetic oligonucleotide
cugaauggcaauuauuaua

SEQ ID NO: 2124068 - RNA, 19 nt, Artificial Sequence
  Description of Artificial Sequence: Synthetic oligonucleotide
uugcaaucuaugugggaca

SEQ ID NO: 2124069 - RNA, 19 nt, Artificial Sequence
  Description of Artificial Sequence: Synthetic oligonucleotide
gauucauggccuuaaaauu

SEQ ID NO: 2124070 - RNA, 19 nt, Artificial Sequence
  Description of Artificial Sequence: Synthetic oligonucleotide
aguuauauacauacguuua

SEQ ID NO: 2124071 - RNA, 19 nt, Artificial Sequence
  Description of Artificial Sequence: Synthetic oligonucleotide
aggaaaaucgguugucuuu

SEQ ID NO: 2124072 - RNA, 19 nt, Artificial Sequence
  Description of Artificial Sequence: Synthetic oligonucleotide
gcaauuuaacuuuaaagcu

SEQ ID NO: 2124073 - RNA, 19 nt, Artificial Sequence
  Description of Artificial Sequence: Synthetic oligonucleotide
acuacaaauuaaauguaaa

SEQ ID NO: 2124074 - RNA, 19 nt, Artificial Sequence
  Description of Artificial Sequence: Synthetic oligonucleotide
acaaacaauaggauauagu

SEQ ID NO: 2124075 - RNA, 19 nt, Artificial Sequence
  Description of Artificial Sequence: Synthetic oligonucleotide
guaacuaugggugaguuau

SEQ ID NO: 2124076 - RNA, 19 nt, Artificial Sequence
  Description of Artificial Sequence: Synthetic oligonucleotide
ugcucugaaaucuucccuu

SEQ ID NO: 2124077 - RNA, 19 nt, Artificial Sequence
  Description of Artificial Sequence: Synthetic oligonucleotide
gaaggagcaggaaagucuc

SEQ ID NO: 2124078 - RNA, 19 nt, Artificial Sequence
  Description of Artificial Sequence: Synthetic oligonucleotide
cugagcacaaguaccacga

SEQ ID NO: 2124079 - RNA, 19 nt, Artificial Sequence
  Description of Artificial Sequence: Synthetic oligonucleotide
ucugcacgcaggaggaaac

SEQ ID NO: 2124080 - RNA, 19 nt, Artificial Sequence
  Description of Artificial Sequence: Synthetic oligonucleotide
caauaggauauaguuucag

SEQ ID NO: 2124081 - RNA, 19 nt, Artificial Sequence
  Description of Artificial Sequence: Synthetic oligonucleotide
aaaucauguuuuguaguua

SEQ ID NO: 2124082 - RNA, 19 nt, Artificial Sequence
  Description of Artificial Sequence: Synthetic oligonucleotide
aaguggcggaggcucuacg

SEQ ID NO: 2124083 - RNA, 19 nt, Artificial Sequence
  Description of Artificial Sequence: Synthetic oligonucleotide
aaacaaacaauaggauaua

SEQ ID NO: 2124084 - RNA, 19 nt, Artificial Sequence
  Description of Artificial Sequence: Synthetic oligonucleotide
guuucaggcaauuuaacuu

SEQ ID NO: 2124085 - RNA, 19 nt, Artificial Sequence
  Description of Artificial Sequence: Synthetic oligonucleotide
ucugcaguaaacugcccuu

SEQ ID NO: 2124086 - RNA, 19 nt, Artificial Sequence
  Description of Artificial Sequence: Synthetic oligonucleotide
uuugguccgucacauccaa

SEQ ID NO: 2124087 - RNA, 19 nt, Artificial Sequence
  Description of Artificial Sequence: Synthetic oligonucleotide
uuacgugguaucugcagua

SEQ ID NO: 2124088 - RNA, 19 nt, Artificial Sequence
  Description of Artificial Sequence: Synthetic oligonucleotide
ugguguuugguccgucaca

SEQ ID NO: 2124089 - RNA, 19 nt, Artificial Sequence
  Description of Artificial Sequence: Synthetic oligonucleotide
ggaaaaucgguugucuuug

SEQ ID NO: 2124090 - RNA, 19 nt, Artificial Sequence
  Description of Artificial Sequence: Synthetic oligonucleotide
ugaacuacaggagguuuuc

SEQ ID NO: 2124091 - RNA, 19 nt, Artificial Sequence
  Description of Artificial Sequence: Synthetic oligonucleotide
aaacugaauggcaauuauu

SEQ ID NO: 2124092 - RNA, 19 nt, Artificial Sequence
  Description of Artificial Sequence: Synthetic oligonucleotide
cacgcaggaggaaacuuac

SEQ ID NO: 2124093 - RNA, 19 nt, Artificial Sequence
  Description of Artificial Sequence: Synthetic oligonucleotide
aaagcuuuuggaacacuuu

SEQ ID NO: 2124094 - RNA, 19 nt, Artificial Sequence
  Description of Artificial Sequence: Synthetic oligonucleotide
ggcucuacguuacuuuuag

SEQ ID NO: 2124095 - RNA, 19 nt, Artificial Sequence
  Description of Artificial Sequence: Synthetic oligonucleotide
uuaccguuuugcuuacuua

SEQ ID NO: 2124096 - RNA, 19 nt, Artificial Sequence
  Description of Artificial Sequence: Synthetic oligonucleotide
acgaaggagcaggaaaguc

SEQ ID NO: 2124097 - RNA, 19 nt, Artificial Sequence
  Description of Artificial Sequence: Synthetic oligonucleotide
uggcucacagguauguaua

SEQ ID NO: 2124098 - RNA, 19 nt, Artificial Sequence
  Description of Artificial Sequence: Synthetic oligonucleotide
aguuacugaggaaaaguau

SEQ ID NO: 2124099 - RNA, 19 nt, Artificial Sequence
  Description of Artificial Sequence: Synthetic oligonucleotide
guaacacggcugcugauuc

SEQ ID NO: 2124100 - RNA, 19 nt, Artificial Sequence
  Description of Artificial Sequence: Synthetic oligonucleotide
ucaggcaauuuaacuuuaa

SEQ ID NO: 2124101 - RNA, 19 nt, Artificial Sequence
  Description of Artificial Sequence: Synthetic oligonucleotide
uguaacuaugggugaguua

SEQ ID NO: 2124102 - RNA, 19 nt, Artificial Sequence
  Description of Artificial Sequence: Synthetic oligonucleotide
uacuuagauaaggcaaagu

SEQ ID NO: 2124103 - RNA, 19 nt, Artificial Sequence
  Description of Artificial Sequence: Synthetic oligonucleotide
cuuuccccuucuuucauca

SEQ ID NO: 2124104 - RNA, 19 nt, Artificial Sequence
  Description of Artificial Sequence: Synthetic oligonucleotide
gcuucuagcaaaauuugac

SEQ ID NO: 2124105 - RNA, 19 nt, Artificial Sequence
  Description of Artificial Sequence: Synthetic oligonucleotide
uucaaacugaauggcaauu

SEQ ID NO: 2124106 - RNA, 19 nt, Artificial Sequence
  Description of Artificial Sequence: Synthetic oligonucleotide
ggugaguuauauacauacg

SEQ ID NO: 2124107 - RNA, 19 nt, Artificial Sequence
  Description of Artificial Sequence: Synthetic oligonucleotide
gcacguuuugcagagaaug

SEQ ID NO: 2124108 - RNA, 19 nt, Artificial Sequence
  Description of Artificial Sequence: Synthetic oligonucleotide
uucaggcaauuuaacuuua

SEQ ID NO: 2124109 - RNA, 19 nt, Artificial Sequence
  Description of Artificial Sequence: Synthetic oligonucleotide
gauuagggaacucuacaau

SEQ ID NO: 2124110 - RNA, 19 nt, Artificial Sequence
  Description of Artificial Sequence: Synthetic oligonucleotide
acauccaacuacaaauuaa

SEQ ID NO: 2124111 - RNA, 19 nt, Artificial Sequence
  Description of Artificial Sequence: Synthetic oligonucleotide
guugcaauuuacauuuaaa

SEQ ID NO: 2124112 - RNA, 19 nt, Artificial Sequence
  Description of Artificial Sequence: Synthetic oligonucleotide
auuguaacuaugggugagu

SEQ ID NO: 2124113 - RNA, 19 nt, Artificial Sequence
  Description of Artificial Sequence: Synthetic oligonucleotide
aaucuaugugggacaucuc

SEQ ID NO: 2124114 - RNA, 19 nt, Artificial Sequence
  Description of Artificial Sequence: Synthetic oligonucleotide
caauuuaacuuuaaagcuu

SEQ ID NO: 2124115 - RNA, 19 nt, Artificial Sequence
  Description of Artificial Sequence: Synthetic oligonucleotide
aucauaggauaaaauacua

SEQ ID NO: 2124116 - RNA, 19 nt, Artificial Sequence
  Description of Artificial Sequence: Synthetic oligonucleotide
gcaagcugacuauauagca

SEQ ID NO: 2124117 - RNA, 19 nt, Artificial Sequence
  Description of Artificial Sequence: Synthetic oligonucleotide
guaguuacugaggaaaagu

SEQ ID NO: 2124118 - RNA, 19 nt, Artificial Sequence
  Description of Artificial Sequence: Synthetic oligonucleotide
gggaacucuacaaugucug

SEQ ID NO: 2124119 - RNA, 19 nt, Artificial Sequence
  Description of Artificial Sequence: Synthetic oligonucleotide
aguggcggaggcucuacgu

SEQ ID NO: 2124120 - RNA, 19 nt, Artificial Sequence
  Description of Artificial Sequence: Synthetic oligonucleotide
caacucagauguguuuagg

SEQ ID NO: 2124121 - RNA, 19 nt, Artificial Sequence
  Description of Artificial Sequence: Synthetic oligonucleotide
gaaauguggcagagauuag

SEQ ID NO: 2124122 - RNA, 19 nt, Artificial Sequence
  Description of Artificial Sequence: Synthetic oligonucleotide
augcuucuagcaaaauuug

SEQ ID NO: 2124123 - RNA, 19 nt, Artificial Sequence
  Description of Artificial Sequence: Synthetic oligonucleotide
uaucugcaguaaacugccc

SEQ ID NO: 2124124 - RNA, 19 nt, Artificial Sequence
  Description of Artificial Sequence: Synthetic oligonucleotide
guauccagacauauagguc

SEQ ID NO: 2124125 - RNA, 19 nt, Artificial Sequence
  Description of Artificial Sequence: Synthetic oligonucleotide
uucagaaauguggcagaga

SEQ ID NO: 2124126 - RNA, 19 nt, Artificial Sequence
  Description of Artificial Sequence: Synthetic oligonucleotide
gcaggaggaaacuuacgug

SEQ ID NO: 2124127 - RNA, 19 nt, Artificial Sequence
  Description of Artificial Sequence: Synthetic oligonucleotide
cuacaggagguuuucucca

SEQ ID NO: 2124128 - RNA, 19 nt, Artificial Sequence
  Description of Artificial Sequence: Synthetic oligonucleotide
uacuaucuuacaggugaga

SEQ ID NO: 2124129 - RNA, 19 nt, Artificial Sequence
  Description of Artificial Sequence: Synthetic oligonucleotide
guaccacgaugguaacacg

SEQ ID NO: 2124130 - RNA, 19 nt, Artificial Sequence
  Description of Artificial Sequence: Synthetic oligonucleotide
guccgucacauccaacuac

SEQ ID NO: 2124131 - RNA, 19 nt, Artificial Sequence
  Description of Artificial Sequence: Synthetic oligonucleotide
ggaaugaaacugaugaaaa

SEQ ID NO: 2124132 - RNA, 19 nt, Artificial Sequence
  Description of Artificial Sequence: Synthetic oligonucleotide
aaaaucgauuuggcaucug

SEQ ID NO: 2124133 - RNA, 19 nt, Artificial Sequence
  Description of Artificial Sequence: Synthetic oligonucleotide
uugccaaaucauguuuugu

SEQ ID NO: 2124134 - RNA, 19 nt, Artificial Sequence
  Description of Artificial Sequence: Synthetic oligonucleotide
aaguaccacgaugguaaca

SEQ ID NO: 2124135 - RNA, 19 nt, Artificial Sequence
  Description of Artificial Sequence: Synthetic oligonucleotide
uaacaccauugcaaucuau

SEQ ID NO: 2124136 - RNA, 19 nt, Artificial Sequence
  Description of Artificial Sequence: Synthetic oligonucleotide
auacuaucuuacaggugag

SEQ ID NO: 2124137 - RNA, 19 nt, Artificial Sequence
  Description of Artificial Sequence: Synthetic oligonucleotide
acaaaauaguuuaccguuu

SEQ ID NO: 2124138 - RNA, 19 nt, Artificial Sequence
  Description of Artificial Sequence: Synthetic oligonucleotide
acaggagguuuucuccaca

SEQ ID NO: 2124139 - RNA, 19 nt, Artificial Sequence
  Description of Artificial Sequence: Synthetic oligonucleotide
ugggugaguuauauacaua

SEQ ID NO: 2124140 - RNA, 19 nt, Artificial Sequence
  Description of Artificial Sequence: Synthetic oligonucleotide
ugcaaucuaugugggacau

SEQ ID NO: 2124141 - RNA, 19 nt, Artificial Sequence
  Description of Artificial Sequence: Synthetic oligonucleotide
ggaacucuacaaugucugc

SEQ ID NO: 2124142 - RNA, 19 nt, Artificial Sequence
  Description of Artificial Sequence: Synthetic oligonucleotide
auuaaaguauccagacaua

SEQ ID NO: 2124143 - RNA, 19 nt, Artificial Sequence
  Description of Artificial Sequence: Synthetic oligonucleotide
cuauguugcaauuuacauu

SEQ ID NO: 2124144 - RNA, 19 nt, Artificial Sequence
  Description of Artificial Sequence: Synthetic oligonucleotide
aucgguugucuuugagcug

SEQ ID NO: 2124145 - RNA, 19 nt, Artificial Sequence
  Description of Artificial Sequence: Synthetic oligonucleotide
acuaugggugaguuauaua

SEQ ID NO: 2124146 - RNA, 19 nt, Artificial Sequence
  Description of Artificial Sequence: Synthetic oligonucleotide
ccauugcaaucuauguggg

SEQ ID NO: 2124147 - RNA, 19 nt, Artificial Sequence
  Description of Artificial Sequence: Synthetic oligonucleotide
guguuuaggaaauuaucuu

SEQ ID NO: 2124148 - RNA, 19 nt, Artificial Sequence
  Description of Artificial Sequence: Synthetic oligonucleotide
uuguaacuaugggugaguu

SEQ ID NO: 2124149 - RNA, 19 nt, Artificial Sequence
  Description of Artificial Sequence: Synthetic oligonucleotide
aacuuacgugguaucugca

SEQ ID NO: 2124150 - RNA, 19 nt, Artificial Sequence
  Description of Artificial Sequence: Synthetic oligonucleotide
ugcugauucauggccuuaa

SEQ ID NO: 2124151 - RNA, 19 nt, Artificial Sequence
  Description of Artificial Sequence: Synthetic oligonucleotide
ggugcuggggaguugaaua

SEQ ID NO: 2124152 - RNA, 19 nt, Artificial Sequence
  Description of Artificial Sequence: Synthetic oligonucleotide
gcagagaaugcuguaagga

SEQ ID NO: 2124153 - RNA, 19 nt, Artificial Sequence
  Description of Artificial Sequence: Synthetic oligonucleotide
aaacagggacuuuccccuu

SEQ ID NO: 2124154 - RNA, 19 nt, Artificial Sequence
  Description of Artificial Sequence: Synthetic oligonucleotide
ugagcacaaguaccacgau

SEQ ID NO: 2124155 - RNA, 19 nt, Artificial Sequence
  Description of Artificial Sequence: Synthetic oligonucleotide
cuugguguuugguccguca

SEQ ID NO: 2124156 - RNA, 19 nt, Artificial Sequence
  Description of Artificial Sequence: Synthetic oligonucleotide
cagagauuagggaacucua

SEQ ID NO: 2124157 - RNA, 19 nt, Artificial Sequence
  Description of Artificial Sequence: Synthetic oligonucleotide
caaguaccacgaugguaac

SEQ ID NO: 2124158 - RNA, 19 nt, Artificial Sequence
  Description of Artificial Sequence: Synthetic oligonucleotide
uaacuaugggugaguuaua

SEQ ID NO: 2124159 - RNA, 19 nt, Artificial Sequence
  Description of Artificial Sequence: Synthetic oligonucleotide
auauaguuucaggcaauuu

SEQ ID NO: 2124160 - RNA, 19 nt, Artificial Sequence
  Description of Artificial Sequence: Synthetic oligonucleotide
cauugcaaucuauguggga

SEQ ID NO: 2124161 - RNA, 19 nt, Artificial Sequence
  Description of Artificial Sequence: Synthetic oligonucleotide
cgugguaucugcaguaaac

SEQ ID NO: 2124162 - RNA, 19 nt, Artificial Sequence
  Description of Artificial Sequence: Synthetic oligonucleotide
cugacuauauagcacguuu

SEQ ID NO: 2124163 - RNA, 19 nt, Artificial Sequence
  Description of Artificial Sequence: Synthetic oligonucleotide
cuuacgugguaucugcagu

SEQ ID NO: 2124164 - RNA, 19 nt, Artificial Sequence
  Description of Artificial Sequence: Synthetic oligonucleotide
agaaagcgauuuucauaaa

SEQ ID NO: 2124165 - RNA, 19 nt, Artificial Sequence
  Description of Artificial Sequence: Synthetic oligonucleotide
aggucuuauucaaacugaa

SEQ ID NO: 2124166 - RNA, 19 nt, Artificial Sequence
  Description of Artificial Sequence: Synthetic oligonucleotide
ugccaacucagauguguuu

SEQ ID NO: 2124167 - RNA, 19 nt, Artificial Sequence
  Description of Artificial Sequence: Synthetic oligonucleotide
uacgugguaucugcaguaa

SEQ ID NO: 2124168 - RNA, 19 nt, Artificial Sequence
  Description of Artificial Sequence: Synthetic oligonucleotide
aggaggaaacuuacguggu

SEQ ID NO: 2124169 - RNA, 19 nt, Artificial Sequence
  Description of Artificial Sequence: Synthetic oligonucleotide
uggcggaggcucuacguua

SEQ ID NO: 2124170 - RNA, 19 nt, Artificial Sequence
  Description of Artificial Sequence: Synthetic oligonucleotide
cguuuugcagagaaugcug

SEQ ID NO: 2124171 - RNA, 19 nt, Artificial Sequence
  Description of Artificial Sequence: Synthetic oligonucleotide
gaggaaacuuacgugguau

SEQ ID NO: 2124172 - RNA, 19 nt, Artificial Sequence
  Description of Artificial Sequence: Synthetic oligonucleotide
auccaacuacaaauuaaau

SEQ ID NO: 2124173 - RNA, 19 nt, Artificial Sequence
  Description of Artificial Sequence: Synthetic oligonucleotide
acaaagcaagcugacuaua

SEQ ID NO: 2124174 - RNA, 19 nt, Artificial Sequence
  Description of Artificial Sequence: Synthetic oligonucleotide
acaugaacuacaggagguu

SEQ ID NO: 2124175 - RNA, 19 nt, Artificial Sequence
  Description of Artificial Sequence: Synthetic oligonucleotide
ggcaauuauuauaaacaaa

SEQ ID NO: 2124176 - RNA, 19 nt, Artificial Sequence
  Description of Artificial Sequence: Synthetic oligonucleotide
ggcaaaguggcggaggcuc

SEQ ID NO: 2124177 - RNA, 19 nt, Artificial Sequence
  Description of Artificial Sequence: Synthetic oligonucleotide
accguuuugcuuacuuaga

SEQ ID NO: 2124178 - RNA, 19 nt, Artificial Sequence
  Description of Artificial Sequence: Synthetic oligonucleotide
cacauccaacuacaaauua

SEQ ID NO: 2124179 - RNA, 19 nt, Artificial Sequence
  Description of Artificial Sequence: Synthetic oligonucleotide
cccuuuauauuaaagcugu

SEQ ID NO: 2124180 - RNA, 19 nt, Artificial Sequence
  Description of Artificial Sequence: Synthetic oligonucleotide
acgugguaucugcaguaaa

SEQ ID NO: 2124181 - RNA, 19 nt, Artificial Sequence
  Description of Artificial Sequence: Synthetic oligonucleotide
gauauaguuucaggcaauu

SEQ ID NO: 2124182 - RNA, 19 nt, Artificial Sequence
  Description of Artificial Sequence: Synthetic oligonucleotide
gugguaucugcaguaaacu

SEQ ID NO: 2124183 - RNA, 19 nt, Artificial Sequence
  Description of Artificial Sequence: Synthetic oligonucleotide
acaagacgaaggagcagga

SEQ ID NO: 2124184 - RNA, 19 nt, Artificial Sequence
  Description of Artificial Sequence: Synthetic oligonucleotide
gugcuggggaguugaauaa

SEQ ID NO: 2124185 - RNA, 19 nt, Artificial Sequence
  Description of Artificial Sequence: Synthetic oligonucleotide
ggugagaggcaaggcagag

SEQ ID NO: 2124186 - RNA, 19 nt, Artificial Sequence
  Description of Artificial Sequence: Synthetic oligonucleotide
uugguccgucacauccaac

SEQ ID NO: 2124187 - RNA, 19 nt, Artificial Sequence
  Description of Artificial Sequence: Synthetic oligonucleotide
guuugguccgucacaucca

SEQ ID NO: 2124188 - RNA, 19 nt, Artificial Sequence
  Description of Artificial Sequence: Synthetic oligonucleotide
gcucuacguuacuuuuagg

SEQ ID NO: 2124189 - RNA, 19 nt, Artificial Sequence
  Description of Artificial Sequence: Synthetic oligonucleotide
ggaaaaguauuuguucaua

SEQ ID NO: 2124190 - RNA, 19 nt, Artificial Sequence
  Description of Artificial Sequence: Synthetic oligonucleotide
ggaaagucucugucugcac

SEQ ID NO: 2124191 - RNA, 19 nt, Artificial Sequence
  Description of Artificial Sequence: Synthetic oligonucleotide
acgcaggaggaaacuuacg

SEQ ID NO: 2124192 - RNA, 19 nt, Artificial Sequence
  Description of Artificial Sequence: Synthetic oligonucleotide
cucugagcacaaguaccac

SEQ ID NO: 2124193 - RNA, 19 nt, Artificial Sequence
  Description of Artificial Sequence: Synthetic oligonucleotide
cugcccuuuaauaaaccau

SEQ ID NO: 2124194 - RNA, 19 nt, Artificial Sequence
  Description of Artificial Sequence: Synthetic oligonucleotide
uucuugguguuugguccgu

SEQ ID NO: 2124195 - RNA, 19 nt, Artificial Sequence
  Description of Artificial Sequence: Synthetic oligonucleotide
ugcacgcaggaggaaacuu

SEQ ID NO: 2124196 - RNA, 19 nt, Artificial Sequence
  Description of Artificial Sequence: Synthetic oligonucleotide
gggacaagacgaaggagca

SEQ ID NO: 2124197 - RNA, 19 nt, Artificial Sequence
  Description of Artificial Sequence: Synthetic oligonucleotide
ugguaacacggcugcugau

SEQ ID NO: 2124198 - RNA, 19 nt, Artificial Sequence
  Description of Artificial Sequence: Synthetic oligonucleotide
agcugacuauauagcacgu

SEQ ID NO: 2124199 - RNA, 19 nt, Artificial Sequence
  Description of Artificial Sequence: Synthetic oligonucleotide
aggcaaggcagagggacaa

SEQ ID NO: 2124200 - RNA, 19 nt, Artificial Sequence
  Description of Artificial Sequence: Synthetic oligonucleotide
cacaaguaccacgauggua

SEQ ID NO: 2124201 - RNA, 19 nt, Artificial Sequence
  Description of Artificial Sequence: Synthetic oligonucleotide
ggaaacuuacgugguaucu

SEQ ID NO: 2124202 - RNA, 19 nt, Artificial Sequence
  Description of Artificial Sequence: Synthetic oligonucleotide
gcagagggacaagacgaag

SEQ ID NO: 2124203 - RNA, 19 nt, Artificial Sequence
  Description of Artificial Sequence: Synthetic oligonucleotide
ucuugguguuugguccguc

SEQ ID NO: 2124204 - RNA, 19 nt, Artificial Sequence
  Description of Artificial Sequence: Synthetic oligonucleotide
ccaaaucauguuuuguagu

SEQ ID NO: 2124205 - RNA, 19 nt, Artificial Sequence
  Description of Artificial Sequence: Synthetic oligonucleotide
gcagagauuagggaacucu

SEQ ID NO: 2124206 - RNA, 19 nt, Artificial Sequence
  Description of Artificial Sequence: Synthetic oligonucleotide
cguuacuuuuaggaaaauc

SEQ ID NO: 2124207 - RNA, 19 nt, Artificial Sequence
  Description of Artificial Sequence: Synthetic oligonucleotide
cuacaaugucugcucugaa

SEQ ID NO: 2124208 - RNA, 19 nt, Artificial Sequence
  Description of Artificial Sequence: Synthetic oligonucleotide
gucugcacgcaggaggaaa

SEQ ID NO: 2124209 - RNA, 19 nt, Artificial Sequence
  Description of Artificial Sequence: Synthetic oligonucleotide
uccagacauauaggucuua

SEQ ID NO: 2124210 - RNA, 19 nt, Artificial Sequence
  Description of Artificial Sequence: Synthetic oligonucleotide
augccaacucagauguguu

SEQ ID NO: 2124211 - RNA, 19 nt, Artificial Sequence
  Description of Artificial Sequence: Synthetic oligonucleotide
auagcacguuuugcagaga

SEQ ID NO: 2124212 - RNA, 19 nt, Artificial Sequence
  Description of Artificial Sequence: Synthetic oligonucleotide
agcacguuuugcagagaau

SEQ ID NO: 2124213 - RNA, 19 nt, Artificial Sequence
  Description of Artificial Sequence: Synthetic oligonucleotide
ggaggaaacuuacguggua

SEQ ID NO: 2124214 - RNA, 19 nt, Artificial Sequence
  Description of Artificial Sequence: Synthetic oligonucleotide
guguuugguccgucacauc

SEQ ID NO: 2124215 - RNA, 19 nt, Artificial Sequence
  Description of Artificial Sequence: Synthetic oligonucleotide
gccaacucagauguguuua

SEQ ID NO: 2124216 - RNA, 19 nt, Artificial Sequence
  Description of Artificial Sequence: Synthetic oligonucleotide
gcucacagguauguauaac

SEQ ID NO: 2124217 - RNA, 19 nt, Artificial Sequence
  Description of Artificial Sequence: Synthetic oligonucleotide
ccacuuacaaaggaaugaa

SEQ ID NO: 2124218 - RNA, 19 nt, Artificial Sequence
  Description of Artificial Sequence: Synthetic oligonucleotide
gguguuugguccgucacau

SEQ ID NO: 2124219 - RNA, 19 nt, Artificial Sequence
  Description of Artificial Sequence: Synthetic oligonucleotide
gcuggugcuggggaguuga

SEQ ID NO: 2124220 - RNA, 19 nt, Artificial Sequence
  Description of Artificial Sequence: Synthetic oligonucleotide
acguuacuuuuaggaaaau

SEQ ID NO: 2124221 - RNA, 19 nt, Artificial Sequence
  Description of Artificial Sequence: Synthetic oligonucleotide
gagaggcaaggcagaggga

SEQ ID NO: 2124222 - RNA, 19 nt, Artificial Sequence
  Description of Artificial Sequence: Synthetic oligonucleotide
caagacgaaggagcaggaa

SEQ ID NO: 2124223 - RNA, 19 nt, Artificial Sequence
  Description of Artificial Sequence: Synthetic oligonucleotide
gugggacaucucugagcac

SEQ ID NO: 2124224 - RNA, 19 nt, Artificial Sequence
  Description of Artificial Sequence: Synthetic oligonucleotide
cgaaggagcaggaaagucu

SEQ ID NO: 2124225 - RNA, 19 nt, Artificial Sequence
  Description of Artificial Sequence: Synthetic oligonucleotide
ugucugcacgcaggaggaa

SEQ ID NO: 2124226 - RNA, 19 nt, Artificial Sequence
  Description of Artificial Sequence: Synthetic oligonucleotide
cagacauauaggucuuauu

SEQ ID NO: 2124227 - RNA, 19 nt, Artificial Sequence
  Description of Artificial Sequence: Synthetic oligonucleotide
gguccgucacauccaacua

SEQ ID NO: 2124228 - RNA, 19 nt, Artificial Sequence
  Description of Artificial Sequence: Synthetic oligonucleotide
aggcucuacguuacuuuua

SEQ ID NO: 2124229 - RNA, 19 nt, Artificial Sequence
  Description of Artificial Sequence: Synthetic oligonucleotide
gcugauucauggccuuaaa

SEQ ID NO: 2124230 - RNA, 19 nt, Artificial Sequence
  Description of Artificial Sequence: Synthetic oligonucleotide
gguugucuuugagcuggug

SEQ ID NO: 2124231 - RNA, 19 nt, Artificial Sequence
  Description of Artificial Sequence: Synthetic oligonucleotide
acacggcugcugauucaug

SEQ ID NO: 2124232 - RNA, 19 nt, Artificial Sequence
  Description of Artificial Sequence: Synthetic oligonucleotide
cguuuugcuuacuuagaua

SEQ ID NO: 2124233 - RNA, 19 nt, Artificial Sequence
  Description of Artificial Sequence: Synthetic oligonucleotide
ggucuuauucaaacugaau

SEQ ID NO: 2124234 - RNA, 19 nt, Artificial Sequence
  Description of Artificial Sequence: Synthetic oligonucleotide
ggauauaguuucaggcaau

SEQ ID NO: 2124235 - RNA, 19 nt, Artificial Sequence
  Description of Artificial Sequence: Synthetic oligonucleotide
gguaacacggcugcugauu

SEQ ID NO: 2124236 - RNA, 19 nt, Artificial Sequence
  Description of Artificial Sequence: Synthetic oligonucleotide
guggcggaggcucuacguu

SEQ ID NO: 2124237 - RNA, 19 nt, Artificial Sequence
  Description of Artificial Sequence: Synthetic oligonucleotide
cgcaggaggaaacuuacgu

SEQ ID NO: 2124238 - RNA, 19 nt, Artificial Sequence
  Description of Artificial Sequence: Synthetic oligonucleotide
gcacgcaggaggaaacuua

SEQ ID NO: 2124239 - RNA, 19 nt, Artificial Sequence
  Description of Artificial Sequence: Synthetic oligonucleotide
ggcagagggacaagacgaa

SEQ ID NO: 2124240 - RNA, 19 nt, Artificial Sequence
  Description of Artificial Sequence: Synthetic oligonucleotide
ccuuuauauuaaagcugua

SEQ ID NO: 2124241 - RNA, 19 nt, Artificial Sequence
  Description of Artificial Sequence: Synthetic oligonucleotide
caaaguggcggaggcucua

SEQ ID NO: 2124242 - RNA, 19 nt, Artificial Sequence
  Description of Artificial Sequence: Synthetic oligonucleotide
ggcagagauuagggaacuc

SEQ ID NO: 2124243 - RNA, 19 nt, Artificial Sequence
  Description of Artificial Sequence: Synthetic oligonucleotide
ggcugcugauucauggccu

SEQ ID NO: 2124244 - RNA, 19 nt, Artificial Sequence
  Description of Artificial Sequence: Synthetic oligonucleotide
gcaaucuaugugggacauc

SEQ ID NO: 2124245 - RNA, 19 nt, Artificial Sequence
  Description of Artificial Sequence: Synthetic oligonucleotide
gggacaucucugagcacaa

SEQ ID NO: 2124246 - RNA, 19 nt, Artificial Sequence
  Description of Artificial Sequence: Synthetic oligonucleotide
ccguuuugcuuacuuagau

SEQ ID NO: 2124247 - RNA, 19 nt, Artificial Sequence
  Description of Artificial Sequence: Synthetic oligonucleotide
gcacaaguaccacgauggu

SEQ ID NO: 2124248 - RNA, 19 nt, Artificial Sequence
  Description of Artificial Sequence: Synthetic oligonucleotide
cugcaguaaacugcccuuu

SEQ ID NO: 2124249 - RNA, 19 nt, Artificial Sequence
  Description of Artificial Sequence: Synthetic oligonucleotide
guuuaccguuuugcuuacu

SEQ ID NO: 2124250 - RNA, 19 nt, Artificial Sequence
  Description of Artificial Sequence: Synthetic oligonucleotide
ccacgaugguaacacggcu

SEQ ID NO: 2124251 - RNA, 19 nt, Artificial Sequence
  Description of Artificial Sequence: Synthetic oligonucleotide
cugcacgcaggaggaaacu

SEQ ID NO: 2124252 - RNA, 19 nt, Artificial Sequence
  Description of Artificial Sequence: Synthetic oligonucleotide
gcugacuauauagcacguu

SEQ ID NO: 2124253 - RNA, 19 nt, Artificial Sequence
  Description of Artificial Sequence: Synthetic oligonucleotide
gcaaaguggcggaggcucu

SEQ ID NO: 2124254 - RNA, 19 nt, Artificial Sequence
  Description of Artificial Sequence: Synthetic oligonucleotide
cagauguguuuaggaaauu

SEQ ID NO: 2124255 - RNA, 19 nt, Artificial Sequence
  Description of Artificial Sequence: Synthetic oligonucleotide
ccgucacauccaacuacaa

SEQ ID NO: 2124256 - RNA, 19 nt, Artificial Sequence
  Description of Artificial Sequence: Synthetic oligonucleotide
gcggaggcucuacguuacu

SEQ ID NO: 2124257 - RNA, 19 nt, Artificial Sequence
  Description of Artificial Sequence: Synthetic oligonucleotide
auuaauaagaaucugucgg

SEQ ID NO: 2124258 - RNA, 19 nt, Artificial Sequence
  Description of Artificial Sequence: Synthetic oligonucleotide
auagcaaguaauuacagcc

SEQ ID NO: 2124259 - RNA, 19 nt, Artificial Sequence
  Description of Artificial Sequence: Synthetic oligonucleotide
aaagauuccacaucuuucc

SEQ ID NO: 2124260 - RNA, 19 nt, Artificial Sequence
  Description of Artificial Sequence: Synthetic oligonucleotide
uuuuaaacgaauuaauaag

SEQ ID NO: 2124261 - RNA, 19 nt, Artificial Sequence
  Description of Artificial Sequence: Synthetic oligonucleotide
uuuauaauagcaaauggcu

SEQ ID NO: 2124262 - RNA, 19 nt, Artificial Sequence
  Description of Artificial Sequence: Synthetic oligonucleotide
aaaaguuugaauugaccac

SEQ ID NO: 2124263 - RNA, 19 nt, Artificial Sequence
  Description of Artificial Sequence: Synthetic oligonucleotide
uaaaguauaaaauucuuca

SEQ ID NO: 2124264 - RNA, 19 nt, Artificial Sequence
  Description of Artificial Sequence: Synthetic oligonucleotide
acuuuauagaaauuccucc

SEQ ID NO: 2124265 - RNA, 19 nt, Artificial Sequence
  Description of Artificial Sequence: Synthetic oligonucleotide
aauguacacaaaccggucc

SEQ ID NO: 2124266 - RNA, 19 nt, Artificial Sequence
  Description of Artificial Sequence: Synthetic oligonucleotide
cuguuugucaauaucaucg

SEQ ID NO: 2124267 - RNA, 19 nt, Artificial Sequence
  Description of Artificial Sequence: Synthetic oligonucleotide
uaaaaguuugaauugacca

SEQ ID NO: 2124268 - RNA, 19 nt, Artificial Sequence
  Description of Artificial Sequence: Synthetic oligonucleotide
uuuaaacgaauuaauaaga

SEQ ID NO: 2124269 - RNA, 19 nt, Artificial Sequence
  Description of Artificial Sequence: Synthetic oligonucleotide
uauaauagcaaauggcugc

SEQ ID NO: 2124270 - RNA, 19 nt, Artificial Sequence
  Description of Artificial Sequence: Synthetic oligonucleotide
cuuuauaauagcaaauggc

SEQ ID NO: 2124271 - RNA, 19 nt, Artificial Sequence
  Description of Artificial Sequence: Synthetic oligonucleotide
aagucugaaagccagucuc

SEQ ID NO: 2124272 - RNA, 19 nt, Artificial Sequence
  Description of Artificial Sequence: Synthetic oligonucleotide
gaagacaucaucuuuauaa

SEQ ID NO: 2124273 - RNA, 19 nt, Artificial Sequence
  Description of Artificial Sequence: Synthetic oligonucleotide
aagguaaaguauaaaauuc

SEQ ID NO: 2124274 - RNA, 19 nt, Artificial Sequence
  Description of Artificial Sequence: Synthetic oligonucleotide
caauaagugguaaagauuc

SEQ ID NO: 2124275 - RNA, 19 nt, Artificial Sequence
  Description of Artificial Sequence: Synthetic oligonucleotide
ucuugggacagcaugaugc

SEQ ID NO: 2124276 - RNA, 19 nt, Artificial Sequence
  Description of Artificial Sequence: Synthetic oligonucleotide
uuuaucaagcucaggauug

SEQ ID NO: 2124277 - RNA, 19 nt, Artificial Sequence
  Description of Artificial Sequence: Synthetic oligonucleotide
cuuuauagaaauuccuccg

SEQ ID NO: 2124278 - RNA, 19 nt, Artificial Sequence
  Description of Artificial Sequence: Synthetic oligonucleotide
uuugucaauaucaucgcug

SEQ ID NO: 2124279 - RNA, 19 nt, Artificial Sequence
  Description of Artificial Sequence: Synthetic oligonucleotide
ucuagucucuguaucauag

SEQ ID NO: 2124280 - RNA, 19 nt, Artificial Sequence
  Description of Artificial Sequence: Synthetic oligonucleotide
ucgauaacggcuuccaccg

SEQ ID NO: 2124281 - RNA, 19 nt, Artificial Sequence
  Description of Artificial Sequence: Synthetic oligonucleotide
aaugcuuaggacuucugga

SEQ ID NO: 2124282 - RNA, 19 nt, Artificial Sequence
  Description of Artificial Sequence: Synthetic oligonucleotide
aguaaugucaauaaguggu

SEQ ID NO: 2124283 - RNA, 19 nt, Artificial Sequence
  Description of Artificial Sequence: Synthetic oligonucleotide
uuaauaagaaucugucggc

SEQ ID NO: 2124284 - RNA, 19 nt, Artificial Sequence
  Description of Artificial Sequence: Synthetic oligonucleotide
gaaucuuuggugcugauuc

SEQ ID NO: 2124285 - RNA, 19 nt, Artificial Sequence
  Description of Artificial Sequence: Synthetic oligonucleotide
ugaauggccacacaauuug

SEQ ID NO: 2124286 - RNA, 19 nt, Artificial Sequence
  Description of Artificial Sequence: Synthetic oligonucleotide
ugagaaauucuccacaaaa

SEQ ID NO: 2124287 - RNA, 19 nt, Artificial Sequence
  Description of Artificial Sequence: Synthetic oligonucleotide
uaucauagcaaguaauuac

SEQ ID NO: 2124288 - RNA, 19 nt, Artificial Sequence
  Description of Artificial Sequence: Synthetic oligonucleotide
gaauugaccacagacauac

SEQ ID NO: 2124289 - RNA, 19 nt, Artificial Sequence
  Description of Artificial Sequence: Synthetic oligonucleotide
uacauguacucgauaacgg

SEQ ID NO: 2124290 - RNA, 19 nt, Artificial Sequence
  Description of Artificial Sequence: Synthetic oligonucleotide
guuugaauugaccacagac

SEQ ID NO: 2124291 - RNA, 19 nt, Artificial Sequence
  Description of Artificial Sequence: Synthetic oligonucleotide
uuaaacgaauuaauaagaa

SEQ ID NO: 2124292 - RNA, 19 nt, Artificial Sequence
  Description of Artificial Sequence: Synthetic oligonucleotide
auauccgcagcuuucagag

SEQ ID NO: 2124293 - RNA, 19 nt, Artificial Sequence
  Description of Artificial Sequence: Synthetic oligonucleotide
aaacaguaaugucaauaag

SEQ ID NO: 2124294 - RNA, 19 nt, Artificial Sequence
  Description of Artificial Sequence: Synthetic oligonucleotide
uugaauugaccacagacau

SEQ ID NO: 2124295 - RNA, 19 nt, Artificial Sequence
  Description of Artificial Sequence: Synthetic oligonucleotide
uuuccagccuccaauaaug

SEQ ID NO: 2124296 - RNA, 19 nt, Artificial Sequence
  Description of Artificial Sequence: Synthetic oligonucleotide
aaaguuugaauugaccaca

SEQ ID NO: 2124297 - RNA, 19 nt, Artificial Sequence
  Description of Artificial Sequence: Synthetic oligonucleotide
aacgaauuaauaagaaucu

SEQ ID NO: 2124298 - RNA, 19 nt, Artificial Sequence
  Description of Artificial Sequence: Synthetic oligonucleotide
auacauguacucgauaacg

SEQ ID NO: 2124299 - RNA, 19 nt, Artificial Sequence
  Description of Artificial Sequence: Synthetic oligonucleotide
gaagccagggcuaaaauug

SEQ ID NO: 2124300 - RNA, 19 nt, Artificial Sequence
  Description of Artificial Sequence: Synthetic oligonucleotide
uuucagagcaagcuggcug

SEQ ID NO: 2124301 - RNA, 19 nt, Artificial Sequence
  Description of Artificial Sequence: Synthetic oligonucleotide
aauaagaaucugucggcca

SEQ ID NO: 2124302 - RNA, 19 nt, Artificial Sequence
  Description of Artificial Sequence: Synthetic oligonucleotide
ucauagcaaguaauuacag

SEQ ID NO: 2124303 - RNA, 19 nt, Artificial Sequence
  Description of Artificial Sequence: Synthetic oligonucleotide
aauaagugguaaagauucc

SEQ ID NO: 2124304 - RNA, 19 nt, Artificial Sequence
  Description of Artificial Sequence: Synthetic oligonucleotide
cucgaagaaucuuuggugc

SEQ ID NO: 2124305 - RNA, 19 nt, Artificial Sequence
  Description of Artificial Sequence: Synthetic oligonucleotide
uccuucaaugcuuaggacu

SEQ ID NO: 2124306 - RNA, 19 nt, Artificial Sequence
  Description of Artificial Sequence: Synthetic oligonucleotide
uguaucauagcaaguaauu

SEQ ID NO: 2124307 - RNA, 19 nt, Artificial Sequence
  Description of Artificial Sequence: Synthetic oligonucleotide
auaagaaucugucggccag

SEQ ID NO: 2124308 - RNA, 19 nt, Artificial Sequence
  Description of Artificial Sequence: Synthetic oligonucleotide
ugacgugacaagcaguggc

SEQ ID NO: 2124309 - RNA, 19 nt, Artificial Sequence
  Description of Artificial Sequence: Synthetic oligonucleotide
cucaggauuguaaacaguc

SEQ ID NO: 2124310 - RNA, 19 nt, Artificial Sequence
  Description of Artificial Sequence: Synthetic oligonucleotide
ucuaaguugugccauuuau

SEQ ID NO: 2124311 - RNA, 19 nt, Artificial Sequence
  Description of Artificial Sequence: Synthetic oligonucleotide
uaaacgaauuaauaagaau

SEQ ID NO: 2124312 - RNA, 19 nt, Artificial Sequence
  Description of Artificial Sequence: Synthetic oligonucleotide
aacagucacaucuuuggaa

SEQ ID NO: 2124313 - RNA, 19 nt, Artificial Sequence
  Description of Artificial Sequence: Synthetic oligonucleotide
cauagcaaguaauuacagc

SEQ ID NO: 2124314 - RNA, 19 nt, Artificial Sequence
  Description of Artificial Sequence: Synthetic oligonucleotide
ucaauaagugguaaagauu

SEQ ID NO: 2124315 - RNA, 19 nt, Artificial Sequence
  Description of Artificial Sequence: Synthetic oligonucleotide
cucgauaacggcuuccacc

SEQ ID NO: 2124316 - RNA, 19 nt, Artificial Sequence
  Description of Artificial Sequence: Synthetic oligonucleotide
aagugguaaagauuccaca

SEQ ID NO: 2124317 - RNA, 19 nt, Artificial Sequence
  Description of Artificial Sequence: Synthetic oligonucleotide
aagacaucaucuuuauaau

SEQ ID NO: 2124318 - RNA, 19 nt, Artificial Sequence
  Description of Artificial Sequence: Synthetic oligonucleotide
aaugucaauaagugguaaa

SEQ ID NO: 2124319 - RNA, 19 nt, Artificial Sequence
  Description of Artificial Sequence: Synthetic oligonucleotide
aagaaccucuucagaaucc

SEQ ID NO: 2124320 - RNA, 19 nt, Artificial Sequence
  Description of Artificial Sequence: Synthetic oligonucleotide
uguacaugugggcuaagcu

SEQ ID NO: 2124321 - RNA, 19 nt, Artificial Sequence
  Description of Artificial Sequence: Synthetic oligonucleotide
acugucuagucucuguauc

SEQ ID NO: 2124322 - RNA, 19 nt, Artificial Sequence
  Description of Artificial Sequence: Synthetic oligonucleotide
ugcuuaggacuucuggagg

SEQ ID NO: 2124323 - RNA, 19 nt, Artificial Sequence
  Description of Artificial Sequence: Synthetic oligonucleotide
uaagugguaaagauuccac

SEQ ID NO: 2124324 - RNA, 19 nt, Artificial Sequence
  Description of Artificial Sequence: Synthetic oligonucleotide
uaauuacagccuucaaucc

SEQ ID NO: 2124325 - RNA, 19 nt, Artificial Sequence
  Description of Artificial Sequence: Synthetic oligonucleotide
aauccaucuucgguguccc

SEQ ID NO: 2124326 - RNA, 19 nt, Artificial Sequence
  Description of Artificial Sequence: Synthetic oligonucleotide
auggcuagugcuuugacau

SEQ ID NO: 2124327 - RNA, 19 nt, Artificial Sequence
  Description of Artificial Sequence: Synthetic oligonucleotide
uguuugucaauaucaucgc

SEQ ID NO: 2124328 - RNA, 19 nt, Artificial Sequence
  Description of Artificial Sequence: Synthetic oligonucleotide
agugguaaagauuccacau

SEQ ID NO: 2124329 - RNA, 19 nt, Artificial Sequence
  Description of Artificial Sequence: Synthetic oligonucleotide
uccacgguaauuuccaagu

SEQ ID NO: 2124330 - RNA, 19 nt, Artificial Sequence
  Description of Artificial Sequence: Synthetic oligonucleotide
uacaugugggcuaagcuau

SEQ ID NO: 2124331 - RNA, 19 nt, Artificial Sequence
  Description of Artificial Sequence: Synthetic oligonucleotide
ugaaagccagucucgaaug

SEQ ID NO: 2124332 - RNA, 19 nt, Artificial Sequence
  Description of Artificial Sequence: Synthetic oligonucleotide
aaugaagacaucaucuuua

SEQ ID NO: 2124333 - RNA, 19 nt, Artificial Sequence
  Description of Artificial Sequence: Synthetic oligonucleotide
agucacaucuuuggaagcc

SEQ ID NO: 2124334 - RNA, 19 nt, Artificial Sequence
  Description of Artificial Sequence: Synthetic oligonucleotide
ucgaaugagauggaaaggu

SEQ ID NO: 2124335 - RNA, 19 nt, Artificial Sequence
  Description of Artificial Sequence: Synthetic oligonucleotide
uaauaagaaucugucggcc

SEQ ID NO: 2124336 - RNA, 19 nt, Artificial Sequence
  Description of Artificial Sequence: Synthetic oligonucleotide
ucagcauuucucugaaccc

SEQ ID NO: 2124337 - RNA, 19 nt, Artificial Sequence
  Description of Artificial Sequence: Synthetic oligonucleotide
agaauccacgguaauuucc

SEQ ID NO: 2124338 - RNA, 19 nt, Artificial Sequence
  Description of Artificial Sequence: Synthetic oligonucleotide
aauuugagagaugaaguuu

SEQ ID NO: 2124339 - RNA, 19 nt, Artificial Sequence
  Description of Artificial Sequence: Synthetic oligonucleotide
auaaaauucuucauccuga

SEQ ID NO: 2124340 - RNA, 19 nt, Artificial Sequence
  Description of Artificial Sequence: Synthetic oligonucleotide
augcuuaggacuucuggag

SEQ ID NO: 2124341 - RNA, 19 nt, Artificial Sequence
  Description of Artificial Sequence: Synthetic oligonucleotide
ucuguaucauagcaaguaa

SEQ ID NO: 2124342 - RNA, 19 nt, Artificial Sequence
  Description of Artificial Sequence: Synthetic oligonucleotide
aucucgaagaaucuuuggu

SEQ ID NO: 2124343 - RNA, 19 nt, Artificial Sequence
  Description of Artificial Sequence: Synthetic oligonucleotide
cucugaacccacuucaaac

SEQ ID NO: 2124344 - RNA, 19 nt, Artificial Sequence
  Description of Artificial Sequence: Synthetic oligonucleotide
ucaggauuguaaacaguca

SEQ ID NO: 2124345 - RNA, 19 nt, Artificial Sequence
  Description of Artificial Sequence: Synthetic oligonucleotide
aaacagucacaucuuugga

SEQ ID NO: 2124346 - RNA, 19 nt, Artificial Sequence
  Description of Artificial Sequence: Synthetic oligonucleotide
agcaauguacacaaaccgg

SEQ ID NO: 2124347 - RNA, 19 nt, Artificial Sequence
  Description of Artificial Sequence: Synthetic oligonucleotide
ugagauggaaagguaaagu

SEQ ID NO: 2124348 - RNA, 19 nt, Artificial Sequence
  Description of Artificial Sequence: Synthetic oligonucleotide
acaucuuuccacugucuag

SEQ ID NO: 2124349 - RNA, 19 nt, Artificial Sequence
  Description of Artificial Sequence: Synthetic oligonucleotide
gauaacggcuuccaccgug

SEQ ID NO: 2124350 - RNA, 19 nt, Artificial Sequence
  Description of Artificial Sequence: Synthetic oligonucleotide
ucaagcucaggauuguaaa

SEQ ID NO: 2124351 - RNA, 19 nt, Artificial Sequence
  Description of Artificial Sequence: Synthetic oligonucleotide
caggauuguaaacagucac

SEQ ID NO: 2124352 - RNA, 19 nt, Artificial Sequence
  Description of Artificial Sequence: Synthetic oligonucleotide
uaucgauaggccuccuucc

SEQ ID NO: 2124353 - RNA, 19 nt, Artificial Sequence
  Description of Artificial Sequence: Synthetic oligonucleotide
ucuucagaauccacgguaa

SEQ ID NO: 2124354 - RNA, 19 nt, Artificial Sequence
  Description of Artificial Sequence: Synthetic oligonucleotide
acaguaucgauaggccucc

SEQ ID NO: 2124355 - RNA, 19 nt, Artificial Sequence
  Description of Artificial Sequence: Synthetic oligonucleotide
cuaaguugugccauuuauc

SEQ ID NO: 2124356 - RNA, 19 nt, Artificial Sequence
  Description of Artificial Sequence: Synthetic oligonucleotide
cugaacccacuucaaaccg

SEQ ID NO: 2124357 - RNA, 19 nt, Artificial Sequence
  Description of Artificial Sequence: Synthetic oligonucleotide
agcacaguaucgauaggcc

SEQ ID NO: 2124358 - RNA, 19 nt, Artificial Sequence
  Description of Artificial Sequence: Synthetic oligonucleotide
agcucaggauuguaaacag

SEQ ID NO: 2124359 - RNA, 19 nt, Artificial Sequence
  Description of Artificial Sequence: Synthetic oligonucleotide
ccagucucgaaugagaugg

SEQ ID NO: 2124360 - RNA, 19 nt, Artificial Sequence
  Description of Artificial Sequence: Synthetic oligonucleotide
uucuugagaaauucuccac

SEQ ID NO: 2124361 - RNA, 19 nt, Artificial Sequence
  Description of Artificial Sequence: Synthetic oligonucleotide
aucauagcaaguaauuaca

SEQ ID NO: 2124362 - RNA, 19 nt, Artificial Sequence
  Description of Artificial Sequence: Synthetic oligonucleotide
aucuucggugucccggucc

SEQ ID NO: 2124363 - RNA, 19 nt, Artificial Sequence
  Description of Artificial Sequence: Synthetic oligonucleotide
aucgauaggccuccuuccg

SEQ ID NO: 2124364 - RNA, 19 nt, Artificial Sequence
  Description of Artificial Sequence: Synthetic oligonucleotide
ucuccacccggcccgagcg

SEQ ID NO: 2124365 - RNA, 19 nt, Artificial Sequence
  Description of Artificial Sequence: Synthetic oligonucleotide
acggcuuccaccguguccg

SEQ ID NO: 2124366 - RNA, 19 nt, Artificial Sequence
  Description of Artificial Sequence: Synthetic oligonucleotide
ugucugauaaaaguuugaa

SEQ ID NO: 2124367 - RNA, 19 nt, Artificial Sequence
  Description of Artificial Sequence: Synthetic oligonucleotide
cacaguaucgauaggccuc

SEQ ID NO: 2124368 - RNA, 19 nt, Artificial Sequence
  Description of Artificial Sequence: Synthetic oligonucleotide
gauggaaagguaaaguaua

SEQ ID NO: 2124369 - RNA, 19 nt, Artificial Sequence
  Description of Artificial Sequence: Synthetic oligonucleotide
auguacacaaaccgguccu

SEQ ID NO: 2124370 - RNA, 19 nt, Artificial Sequence
  Description of Artificial Sequence: Synthetic oligonucleotide
auaagugguaaagauucca

SEQ ID NO: 2124371 - RNA, 19 nt, Artificial Sequence
  Description of Artificial Sequence: Synthetic oligonucleotide
gcugagaguguacaugugg

SEQ ID NO: 2124372 - RNA, 19 nt, Artificial Sequence
  Description of Artificial Sequence: Synthetic oligonucleotide
ugugggcuaagcuaugaau

SEQ ID NO: 2124373 - RNA, 19 nt, Artificial Sequence
  Description of Artificial Sequence: Synthetic oligonucleotide
guaucgauaggccuccuuc

SEQ ID NO: 2124374 - RNA, 19 nt, Artificial Sequence
  Description of Artificial Sequence: Synthetic oligonucleotide
gugggcuaagcuaugaaug

SEQ ID NO: 2124375 - RNA, 19 nt, Artificial Sequence
  Description of Artificial Sequence: Synthetic oligonucleotide
uagugcuuugacaucucga

SEQ ID NO: 2124376 - RNA, 19 nt, Artificial Sequence
  Description of Artificial Sequence: Synthetic oligonucleotide
uggugcugauucuaaguug

SEQ ID NO: 2124377 - RNA, 19 nt, Artificial Sequence
  Description of Artificial Sequence: Synthetic oligonucleotide
aaguuugaauugaccacag

SEQ ID NO: 2124378 - RNA, 19 nt, Artificial Sequence
  Description of Artificial Sequence: Synthetic oligonucleotide
caucucgaagaaucuuugg

SEQ ID NO: 2124379 - RNA, 19 nt, Artificial Sequence
  Description of Artificial Sequence: Synthetic oligonucleotide
ugcugauucuaaguugugc

SEQ ID NO: 2124380 - RNA, 19 nt, Artificial Sequence
  Description of Artificial Sequence: Synthetic oligonucleotide
ccuacaacggggcugaggc

SEQ ID NO: 2124381 - RNA, 19 nt, Artificial Sequence
  Description of Artificial Sequence: Synthetic oligonucleotide
augagauggaaagguaaag

SEQ ID NO: 2124382 - RNA, 19 nt, Artificial Sequence
  Description of Artificial Sequence: Synthetic oligonucleotide
cagcacaguaucgauaggc

SEQ ID NO: 2124383 - RNA, 19 nt, Artificial Sequence
  Description of Artificial Sequence: Synthetic oligonucleotide
cuagugcuuugacaucucg

SEQ ID NO: 2124384 - RNA, 19 nt, Artificial Sequence
  Description of Artificial Sequence: Synthetic oligonucleotide
gauuguaaacagucacauc

SEQ ID NO: 2124385 - RNA, 19 nt, Artificial Sequence
  Description of Artificial Sequence: Synthetic oligonucleotide
guaaacagucacaucuuug

SEQ ID NO: 2124386 - RNA, 19 nt, Artificial Sequence
  Description of Artificial Sequence: Synthetic oligonucleotide
acgaauuaauaagaaucug

SEQ ID NO: 2124387 - RNA, 19 nt, Artificial Sequence
  Description of Artificial Sequence: Synthetic oligonucleotide
cuaagcuaugaauggccac

SEQ ID NO: 2124388 - RNA, 19 nt, Artificial Sequence
  Description of Artificial Sequence: Synthetic oligonucleotide
ucgaagaaucuuuggugcu

SEQ ID NO: 2124389 - RNA, 19 nt, Artificial Sequence
  Description of Artificial Sequence: Synthetic oligonucleotide
ugaacccacuucaaaccgu

SEQ ID NO: 2124390 - RNA, 19 nt, Artificial Sequence
  Description of Artificial Sequence: Synthetic oligonucleotide
gaauccacgguaauuucca

SEQ ID NO: 2124391 - RNA, 19 nt, Artificial Sequence
  Description of Artificial Sequence: Synthetic oligonucleotide
auaauagcaaauggcugcu

SEQ ID NO: 2124392 - RNA, 19 nt, Artificial Sequence
  Description of Artificial Sequence: Synthetic oligonucleotide
gucaauaagugguaaagau

SEQ ID NO: 2124393 - RNA, 19 nt, Artificial Sequence
  Description of Artificial Sequence: Synthetic oligonucleotide
gugccauuuaucaagcuca

SEQ ID NO: 2124394 - RNA, 19 nt, Artificial Sequence
  Description of Artificial Sequence: Synthetic oligonucleotide
agauggaaagguaaaguau

SEQ ID NO: 2124395 - RNA, 19 nt, Artificial Sequence
  Description of Artificial Sequence: Synthetic oligonucleotide
cucgaaugagauggaaagg

SEQ ID NO: 2124396 - RNA, 19 nt, Artificial Sequence
  Description of Artificial Sequence: Synthetic oligonucleotide
accguguccgguucggguc

SEQ ID NO: 2124397 - RNA, 19 nt, Artificial Sequence
  Description of Artificial Sequence: Synthetic oligonucleotide
aucaucuuuauaauagcaa

SEQ ID NO: 2124398 - RNA, 19 nt, Artificial Sequence
  Description of Artificial Sequence: Synthetic oligonucleotide
caauguacacaaaccgguc

SEQ ID NO: 2124399 - RNA, 19 nt, Artificial Sequence
  Description of Artificial Sequence: Synthetic oligonucleotide
agcaaguaauuacagccuu

SEQ ID NO: 2124400 - RNA, 19 nt, Artificial Sequence
  Description of Artificial Sequence: Synthetic oligonucleotide
uccggaucauauccgcagc

SEQ ID NO: 2124401 - RNA, 19 nt, Artificial Sequence
  Description of Artificial Sequence: Synthetic oligonucleotide
ggcagcaauguacacaaac

SEQ ID NO: 2124402 - RNA, 19 nt, Artificial Sequence
  Description of Artificial Sequence: Synthetic oligonucleotide
aaguaauuacagccuucaa

SEQ ID NO: 2124403 - RNA, 19 nt, Artificial Sequence
  Description of Artificial Sequence: Synthetic oligonucleotide
acucgauaacggcuuccac

SEQ ID NO: 2124404 - RNA, 19 nt, Artificial Sequence
  Description of Artificial Sequence: Synthetic oligonucleotide
uuccgauacuguuugucaa

SEQ ID NO: 2124405 - RNA, 19 nt, Artificial Sequence
  Description of Artificial Sequence: Synthetic oligonucleotide
accucgugcacgcuaccgg

SEQ ID NO: 2124406 - RNA, 19 nt, Artificial Sequence
  Description of Artificial Sequence: Synthetic oligonucleotide
agucugaaagccagucucg

SEQ ID NO: 2124407 - RNA, 19 nt, Artificial Sequence
  Description of Artificial Sequence: Synthetic oligonucleotide
agcauuucucugaacccac

SEQ ID NO: 2124408 - RNA, 19 nt, Artificial Sequence
  Description of Artificial Sequence: Synthetic oligonucleotide
guacaugugggcuaagcua

SEQ ID NO: 2124409 - RNA, 19 nt, Artificial Sequence
  Description of Artificial Sequence: Synthetic oligonucleotide
uucauccugaaugacuuua

SEQ ID NO: 2124410 - RNA, 19 nt, Artificial Sequence
  Description of Artificial Sequence: Synthetic oligonucleotide
cuuccgauacuguuuguca

SEQ ID NO: 2124411 - RNA, 19 nt, Artificial Sequence
  Description of Artificial Sequence: Synthetic oligonucleotide
aggaucucaucagacaccu

SEQ ID NO: 2124412 - RNA, 19 nt, Artificial Sequence
  Description of Artificial Sequence: Synthetic oligonucleotide
ugaauugaccacagacaua

SEQ ID NO: 2124413 - RNA, 19 nt, Artificial Sequence
  Description of Artificial Sequence: Synthetic oligonucleotide
acaccugaccggcucuugg

SEQ ID NO: 2124414 - RNA, 19 nt, Artificial Sequence
  Description of Artificial Sequence: Synthetic oligonucleotide
acgcuaccggugcucaccc

SEQ ID NO: 2124415 - RNA, 19 nt, Artificial Sequence
  Description of Artificial Sequence: Synthetic oligonucleotide
ucgugcacgcuaccggugc

SEQ ID NO: 2124416 - RNA, 19 nt, Artificial Sequence
  Description of Artificial Sequence: Synthetic oligonucleotide
guugugccauuuaucaagc

SEQ ID NO: 2124417 - RNA, 19 nt, Artificial Sequence
  Description of Artificial Sequence: Synthetic oligonucleotide
acgugacaagcaguggccc

SEQ ID NO: 2124418 - RNA, 19 nt, Artificial Sequence
  Description of Artificial Sequence: Synthetic oligonucleotide
ucucagcacaguaucgaua

SEQ ID NO: 2124419 - RNA, 19 nt, Artificial Sequence
  Description of Artificial Sequence: Synthetic oligonucleotide
caauccaucuucggugucc

SEQ ID NO: 2124420 - RNA, 19 nt, Artificial Sequence
  Description of Artificial Sequence: Synthetic oligonucleotide
gaugcgcccaguauacaug

SEQ ID NO: 2124421 - RNA, 19 nt, Artificial Sequence
  Description of Artificial Sequence: Synthetic oligonucleotide
ucgauaggccuccuuccga

SEQ ID NO: 2124422 - RNA, 19 nt, Artificial Sequence
  Description of Artificial Sequence: Synthetic oligonucleotide
aaauuccuccggaucauau

SEQ ID NO: 2124423 - RNA, 19 nt, Artificial Sequence
  Description of Artificial Sequence: Synthetic oligonucleotide
uacaacggggcugaggcau

SEQ ID NO: 2124424 - RNA, 19 nt, Artificial Sequence
  Description of Artificial Sequence: Synthetic oligonucleotide
aggauuguaaacagucaca

SEQ ID NO: 2124425 - RNA, 19 nt, Artificial Sequence
  Description of Artificial Sequence: Synthetic oligonucleotide
gaagaaucuuuggugcuga

SEQ ID NO: 2124426 - RNA, 19 nt, Artificial Sequence
  Description of Artificial Sequence: Synthetic oligonucleotide
uacucgauaacggcuucca

SEQ ID NO: 2124427 - RNA, 19 nt, Artificial Sequence
  Description of Artificial Sequence: Synthetic oligonucleotide
uccgauacuguuugucaau

SEQ ID NO: 2124428 - RNA, 19 nt, Artificial Sequence
  Description of Artificial Sequence: Synthetic oligonucleotide
uggaaagguaaaguauaaa

SEQ ID NO: 2124429 - RNA, 19 nt, Artificial Sequence
  Description of Artificial Sequence: Synthetic oligonucleotide
gcuaugaauggccacacaa

SEQ ID NO: 2124430 - RNA, 19 nt, Artificial Sequence
  Description of Artificial Sequence: Synthetic oligonucleotide
ucugaaagccagucucgaa

SEQ ID NO: 2124431 - RNA, 19 nt, Artificial Sequence
  Description of Artificial Sequence: Synthetic oligonucleotide
agaguguacaugugggcua

SEQ ID NO: 2124432 - RNA, 19 nt, Artificial Sequence
  Description of Artificial Sequence: Synthetic oligonucleotide
ugucccgguccacaggagu

SEQ ID NO: 2124433 - RNA, 19 nt, Artificial Sequence
  Description of Artificial Sequence: Synthetic oligonucleotide
uuaucaagcucaggauugu

SEQ ID NO: 2124434 - RNA, 19 nt, Artificial Sequence
  Description of Artificial Sequence: Synthetic oligonucleotide
uccgagcuccacuugcgca

SEQ ID NO: 2124435 - RNA, 19 nt, Artificial Sequence
  Description of Artificial Sequence: Synthetic oligonucleotide
uucagaauccacgguaauu

SEQ ID NO: 2124436 - RNA, 19 nt, Artificial Sequence
  Description of Artificial Sequence: Synthetic oligonucleotide
gcuuaggacuucuggaggc

SEQ ID NO: 2124437 - RNA, 19 nt, Artificial Sequence
  Description of Artificial Sequence: Synthetic oligonucleotide
acaagcaguggcccuacaa

SEQ ID NO: 2124438 - RNA, 19 nt, Artificial Sequence
  Description of Artificial Sequence: Synthetic oligonucleotide
cagucacaucuuuggaagc

SEQ ID NO: 2124439 - RNA, 19 nt, Artificial Sequence
  Description of Artificial Sequence: Synthetic oligonucleotide
gaggcaugggaggaaggag

SEQ ID NO: 2124440 - RNA, 19 nt, Artificial Sequence
  Description of Artificial Sequence: Synthetic oligonucleotide
augcgcccaguauacaugu

SEQ ID NO: 2124441 - RNA, 19 nt, Artificial Sequence
  Description of Artificial Sequence: Synthetic oligonucleotide
aagccagucucgaaugaga

SEQ ID NO: 2124442 - RNA, 19 nt, Artificial Sequence
  Description of Artificial Sequence: Synthetic oligonucleotide
aguuugaauugaccacaga

SEQ ID NO: 2124443 - RNA, 19 nt, Artificial Sequence
  Description of Artificial Sequence: Synthetic oligonucleotide
uucuaaguugugccauuua

SEQ ID NO: 2124444 - RNA, 19 nt, Artificial Sequence
  Description of Artificial Sequence: Synthetic oligonucleotide
aucauauccgcagcuuuca

SEQ ID NO: 2124445 - RNA, 19 nt, Artificial Sequence
  Description of Artificial Sequence: Synthetic oligonucleotide
cauauccgcagcuuucaga

SEQ ID NO: 2124446 - RNA, 19 nt, Artificial Sequence
  Description of Artificial Sequence: Synthetic oligonucleotide
ccugacgugacaagcagug

SEQ ID NO: 2124447 - RNA, 19 nt, Artificial Sequence
  Description of Artificial Sequence: Synthetic oligonucleotide
guaucauagcaaguaauua

SEQ ID NO: 2124448 - RNA, 19 nt, Artificial Sequence
  Description of Artificial Sequence: Synthetic oligonucleotide
cuggcugagaguguacaug

SEQ ID NO: 2124449 - RNA, 19 nt, Artificial Sequence
  Description of Artificial Sequence: Synthetic oligonucleotide
cccaguauacauguacucg

SEQ ID NO: 2124450 - RNA, 19 nt, Artificial Sequence
  Description of Artificial Sequence: Synthetic oligonucleotide
uggaagccagggcuaaaau

SEQ ID NO: 2124451 - RNA, 19 nt, Artificial Sequence
  Description of Artificial Sequence: Synthetic oligonucleotide
gagaaauucuccacaaaau

SEQ ID NO: 2124452 - RNA, 19 nt, Artificial Sequence
  Description of Artificial Sequence: Synthetic oligonucleotide
augaugcugucugauaaaa

SEQ ID NO: 2124453 - RNA, 19 nt, Artificial Sequence
  Description of Artificial Sequence: Synthetic oligonucleotide
gcuaccggugcucacccgg

SEQ ID NO: 2124454 - RNA, 19 nt, Artificial Sequence
  Description of Artificial Sequence: Synthetic oligonucleotide
uccgguucgggucccggcu

SEQ ID NO: 2124455 - RNA, 19 nt, Artificial Sequence
  Description of Artificial Sequence: Synthetic oligonucleotide
ggcuaagcuaugaauggcc

SEQ ID NO: 2124456 - RNA, 19 nt, Artificial Sequence
  Description of Artificial Sequence: Synthetic oligonucleotide
cucuguaucauagcaagua

SEQ ID NO: 2124457 - RNA, 19 nt, Artificial Sequence
  Description of Artificial Sequence: Synthetic oligonucleotide
agcaccucgugcacgcuac

SEQ ID NO: 2124458 - RNA, 19 nt, Artificial Sequence
  Description of Artificial Sequence: Synthetic oligonucleotide
aaucugucggccaguucca

SEQ ID NO: 2124459 - RNA, 19 nt, Artificial Sequence
  Description of Artificial Sequence: Synthetic oligonucleotide
cugucugauaaaaguuuga

SEQ ID NO: 2124460 - RNA, 19 nt, Artificial Sequence
  Description of Artificial Sequence: Synthetic oligonucleotide
uaagaaucugucggccagu

SEQ ID NO: 2124461 - RNA, 19 nt, Artificial Sequence
  Description of Artificial Sequence: Synthetic oligonucleotide
cugaggcaugggaggaagg

SEQ ID NO: 2124462 - RNA, 19 nt, Artificial Sequence
  Description of Artificial Sequence: Synthetic oligonucleotide
caucuuuauaauagcaaau

SEQ ID NO: 2124463 - RNA, 19 nt, Artificial Sequence
  Description of Artificial Sequence: Synthetic oligonucleotide
cuccuucaaugcuuaggac

SEQ ID NO: 2124464 - RNA, 19 nt, Artificial Sequence
  Description of Artificial Sequence: Synthetic oligonucleotide
gcaugaugcugucugauaa

SEQ ID NO: 2124465 - RNA, 19 nt, Artificial Sequence
  Description of Artificial Sequence: Synthetic oligonucleotide
uauccgcagcuuucagagc

SEQ ID NO: 2124466 - RNA, 19 nt, Artificial Sequence
  Description of Artificial Sequence: Synthetic oligonucleotide
auggaaagguaaaguauaa

SEQ ID NO: 2124467 - RNA, 19 nt, Artificial Sequence
  Description of Artificial Sequence: Synthetic oligonucleotide
cauuuaucaagcucaggau

SEQ ID NO: 2124468 - RNA, 19 nt, Artificial Sequence
  Description of Artificial Sequence: Synthetic oligonucleotide
guguacaugugggcuaagc

SEQ ID NO: 2124469 - RNA, 19 nt, Artificial Sequence
  Description of Artificial Sequence: Synthetic oligonucleotide
aucaagcucaggauuguaa

SEQ ID NO: 2124470 - RNA, 19 nt, Artificial Sequence
  Description of Artificial Sequence: Synthetic oligonucleotide
uguacacaaaccgguccuc

SEQ ID NO: 2124471 - RNA, 19 nt, Artificial Sequence
  Description of Artificial Sequence: Synthetic oligonucleotide
gucugauaaaaguuugaau

SEQ ID NO: 2124472 - RNA, 19 nt, Artificial Sequence
  Description of Artificial Sequence: Synthetic oligonucleotide
gaggcaagcuuucaaggau

SEQ ID NO: 2124473 - RNA, 19 nt, Artificial Sequence
  Description of Artificial Sequence: Synthetic oligonucleotide
guaaugucaauaaguggua

SEQ ID NO: 2124474 - RNA, 19 nt, Artificial Sequence
  Description of Artificial Sequence: Synthetic oligonucleotide
ggaggcaagcuuucaagga

SEQ ID NO: 2124475 - RNA, 19 nt, Artificial Sequence
  Description of Artificial Sequence: Synthetic oligonucleotide
ggauccugacgugacaagc

SEQ ID NO: 2124476 - RNA, 19 nt, Artificial Sequence
  Description of Artificial Sequence: Synthetic oligonucleotide
agcaugaugcugucugaua

SEQ ID NO: 2124477 - RNA, 19 nt, Artificial Sequence
  Description of Artificial Sequence: Synthetic oligonucleotide
ccaguauacauguacucga

SEQ ID NO: 2124478 - RNA, 19 nt, Artificial Sequence
  Description of Artificial Sequence: Synthetic oligonucleotide
caauggcuagugcuuugac

SEQ ID NO: 2124479 - RNA, 19 nt, Artificial Sequence
  Description of Artificial Sequence: Synthetic oligonucleotide
gguaauuuccaagucugaa

SEQ ID NO: 2124480 - RNA, 19 nt, Artificial Sequence
  Description of Artificial Sequence: Synthetic oligonucleotide
ugacaucucgaagaaucuu

SEQ ID NO: 2124481 - RNA, 19 nt, Artificial Sequence
  Description of Artificial Sequence: Synthetic oligonucleotide
cacgcuaccggugcucacc

SEQ ID NO: 2124482 - RNA, 19 nt, Artificial Sequence
  Description of Artificial Sequence: Synthetic oligonucleotide
uccaccguguccgguucgg

SEQ ID NO: 2124483 - RNA, 19 nt, Artificial Sequence
  Description of Artificial Sequence: Synthetic oligonucleotide
uugggacagcaugaugcug

SEQ ID NO: 2124484 - RNA, 19 nt, Artificial Sequence
  Description of Artificial Sequence: Synthetic oligonucleotide
guuugucaauaucaucgcu

SEQ ID NO: 2124485 - RNA, 19 nt, Artificial Sequence
  Description of Artificial Sequence: Synthetic oligonucleotide
cugacgugacaagcagugg

SEQ ID NO: 2124486 - RNA, 19 nt, Artificial Sequence
  Description of Artificial Sequence: Synthetic oligonucleotide
aguaucgauaggccuccuu

SEQ ID NO: 2124487 - RNA, 19 nt, Artificial Sequence
  Description of Artificial Sequence: Synthetic oligonucleotide
aggagugcgggcagcaaug

SEQ ID NO: 2124488 - RNA, 19 nt, Artificial Sequence
  Description of Artificial Sequence: Synthetic oligonucleotide
augugggcuaagcuaugaa

SEQ ID NO: 2124489 - RNA, 19 nt, Artificial Sequence
  Description of Artificial Sequence: Synthetic oligonucleotide
auucuaaguugugccauuu

SEQ ID NO: 2124490 - RNA, 19 nt, Artificial Sequence
  Description of Artificial Sequence: Synthetic oligonucleotide
cuaugaauggccacacaau

SEQ ID NO: 2124491 - RNA, 19 nt, Artificial Sequence
  Description of Artificial Sequence: Synthetic oligonucleotide
caugaugcugucugauaaa

SEQ ID NO: 2124492 - RNA, 19 nt, Artificial Sequence
  Description of Artificial Sequence: Synthetic oligonucleotide
auguacucgauaacggcuu

SEQ ID NO: 2124493 - RNA, 19 nt, Artificial Sequence
  Description of Artificial Sequence: Synthetic oligonucleotide
auaacggcuuccaccgugu

SEQ ID NO: 2124494 - RNA, 19 nt, Artificial Sequence
  Description of Artificial Sequence: Synthetic oligonucleotide
ccagggcuaaaauuguauc

SEQ ID NO: 2124495 - RNA, 19 nt, Artificial Sequence
  Description of Artificial Sequence: Synthetic oligonucleotide
cuuucucucagcacaguau

SEQ ID NO: 2124496 - RNA, 19 nt, Artificial Sequence
  Description of Artificial Sequence: Synthetic oligonucleotide
uggcccuacaacggggcug

SEQ ID NO: 2124497 - RNA, 19 nt, Artificial Sequence
  Description of Artificial Sequence: Synthetic oligonucleotide
guacucgauaacggcuucc

SEQ ID NO: 2124498 - RNA, 19 nt, Artificial Sequence
  Description of Artificial Sequence: Synthetic oligonucleotide
cagcauuucucugaaccca

SEQ ID NO: 2124499 - RNA, 19 nt, Artificial Sequence
  Description of Artificial Sequence: Synthetic oligonucleotide
uaauagcaaauggcugcuc

SEQ ID NO: 2124500 - RNA, 19 nt, Artificial Sequence
  Description of Artificial Sequence: Synthetic oligonucleotide
accggugcucacccggaug

SEQ ID NO: 2124501 - RNA, 19 nt, Artificial Sequence
  Description of Artificial Sequence: Synthetic oligonucleotide
cuccaauaaugaagacauc

SEQ ID NO: 2124502 - RNA, 19 nt, Artificial Sequence
  Description of Artificial Sequence: Synthetic oligonucleotide
ugcucacccggaugcgccc

SEQ ID NO: 2124503 - RNA, 19 nt, Artificial Sequence
  Description of Artificial Sequence: Synthetic oligonucleotide
ugcacgcuaccggugcuca

SEQ ID NO: 2124504 - RNA, 19 nt, Artificial Sequence
  Description of Artificial Sequence: Synthetic oligonucleotide
ggugucccgguccacagga

SEQ ID NO: 2124505 - RNA, 19 nt, Artificial Sequence
  Description of Artificial Sequence: Synthetic oligonucleotide
gggaggaaggagcauccac

SEQ ID NO: 2124506 - RNA, 19 nt, Artificial Sequence
  Description of Artificial Sequence: Synthetic oligonucleotide
cuccgagcuccacuugcgc

SEQ ID NO: 2124507 - RNA, 19 nt, Artificial Sequence
  Description of Artificial Sequence: Synthetic oligonucleotide
gucucgaaugagauggaaa

SEQ ID NO: 2124508 - RNA, 19 nt, Artificial Sequence
  Description of Artificial Sequence: Synthetic oligonucleotide
aauugaccacagacauacu

SEQ ID NO: 2124509 - RNA, 19 nt, Artificial Sequence
  Description of Artificial Sequence: Synthetic oligonucleotide
aaccgguccucaauggcua

SEQ ID NO: 2124510 - RNA, 19 nt, Artificial Sequence
  Description of Artificial Sequence: Synthetic oligonucleotide
cacuucaaaccguuucaaa

SEQ ID NO: 2124511 - RNA, 19 nt, Artificial Sequence
  Description of Artificial Sequence: Synthetic oligonucleotide
auccaucuucggugucccg

SEQ ID NO: 2124512 - RNA, 19 nt, Artificial Sequence
  Description of Artificial Sequence: Synthetic oligonucleotide
gccuucaauccaucuucgg

SEQ ID NO: 2124513 - RNA, 19 nt, Artificial Sequence
  Description of Artificial Sequence: Synthetic oligonucleotide
aacggggcugaggcauggg

SEQ ID NO: 2124514 - RNA, 19 nt, Artificial Sequence
  Description of Artificial Sequence: Synthetic oligonucleotide
aucuuuggugcugauucua

SEQ ID NO: 2124515 - RNA, 19 nt, Artificial Sequence
  Description of Artificial Sequence: Synthetic oligonucleotide
uaucaagcucaggauugua

SEQ ID NO: 2124516 - RNA, 19 nt, Artificial Sequence
  Description of Artificial Sequence: Synthetic oligonucleotide
cgaauuaauaagaaucugu

SEQ ID NO: 2124517 - RNA, 19 nt, Artificial Sequence
  Description of Artificial Sequence: Synthetic oligonucleotide
accgguccucaauggcuag

SEQ ID NO: 2124518 - RNA, 19 nt, Artificial Sequence
  Description of Artificial Sequence: Synthetic oligonucleotide
caccucgugcacgcuaccg

SEQ ID NO: 2124519 - RNA, 19 nt, Artificial Sequence
  Description of Artificial Sequence: Synthetic oligonucleotide
uguccgguucgggucccgg

SEQ ID NO: 2124520 - RNA, 19 nt, Artificial Sequence
  Description of Artificial Sequence: Synthetic oligonucleotide
ucccgguccacaggagugc

SEQ ID NO: 2124521 - RNA, 19 nt, Artificial Sequence
  Description of Artificial Sequence: Synthetic oligonucleotide
uggcuagugcuuugacauc

SEQ ID NO: 2124522 - RNA, 19 nt, Artificial Sequence
  Description of Artificial Sequence: Synthetic oligonucleotide
gcaauguacacaaaccggu

SEQ ID NO: 2124523 - RNA, 19 nt, Artificial Sequence
  Description of Artificial Sequence: Synthetic oligonucleotide
cucgugcacgcuaccggug

SEQ ID NO: 2124524 - RNA, 19 nt, Artificial Sequence
  Description of Artificial Sequence: Synthetic oligonucleotide
guaggggauccugacguga

SEQ ID NO: 2124525 - RNA, 19 nt, Artificial Sequence
  Description of Artificial Sequence: Synthetic oligonucleotide
agucucgaaugagauggaa

SEQ ID NO: 2124526 - RNA, 19 nt, Artificial Sequence
  Description of Artificial Sequence: Synthetic oligonucleotide
ggugcugauucuaaguugu

SEQ ID NO: 2124527 - RNA, 19 nt, Artificial Sequence
  Description of Artificial Sequence: Synthetic oligonucleotide
cugaccggcucuugggaca

SEQ ID NO: 2124528 - RNA, 19 nt, Artificial Sequence
  Description of Artificial Sequence: Synthetic oligonucleotide
aggggauccugacgugaca

SEQ ID NO: 2124529 - RNA, 19 nt, Artificial Sequence
  Description of Artificial Sequence: Synthetic oligonucleotide
cuuccaccguguccgguuc

SEQ ID NO: 2124530 - RNA, 19 nt, Artificial Sequence
  Description of Artificial Sequence: Synthetic oligonucleotide
gucugaaagccagucucga

SEQ ID NO: 2124531 - RNA, 19 nt, Artificial Sequence
  Description of Artificial Sequence: Synthetic oligonucleotide
gucccgguccacaggagug

SEQ ID NO: 2124532 - RNA, 19 nt, Artificial Sequence
  Description of Artificial Sequence: Synthetic oligonucleotide
agccagucucgaaugagau

SEQ ID NO: 2124533 - RNA, 19 nt, Artificial Sequence
  Description of Artificial Sequence: Synthetic oligonucleotide
cuuaggacuucuggaggca

SEQ ID NO: 2124534 - RNA, 19 nt, Artificial Sequence
  Description of Artificial Sequence: Synthetic oligonucleotide
ggcuaaaauuguaucucuc

SEQ ID NO: 2124535 - RNA, 19 nt, Artificial Sequence
  Description of Artificial Sequence: Synthetic oligonucleotide
cuugggacagcaugaugcu

SEQ ID NO: 2124536 - RNA, 19 nt, Artificial Sequence
  Description of Artificial Sequence: Synthetic oligonucleotide
ccggugcucacccggaugc

SEQ ID NO: 2124537 - RNA, 19 nt, Artificial Sequence
  Description of Artificial Sequence: Synthetic oligonucleotide
gcuaagcuaugaauggcca

SEQ ID NO: 2124538 - RNA, 19 nt, Artificial Sequence
  Description of Artificial Sequence: Synthetic oligonucleotide
uuuggaagccagggcuaaa

SEQ ID NO: 2124539 - RNA, 19 nt, Artificial Sequence
  Description of Artificial Sequence: Synthetic oligonucleotide
gguccucaauggcuagugc

SEQ ID NO: 2124540 - RNA, 19 nt, Artificial Sequence
  Description of Artificial Sequence: Synthetic oligonucleotide
gggcuaagcuaugaauggc

SEQ ID NO: 2124541 - RNA, 19 nt, Artificial Sequence
  Description of Artificial Sequence: Synthetic oligonucleotide
ugcgggcagcaauguacac

SEQ ID NO: 2124542 - RNA, 19 nt, Artificial Sequence
  Description of Artificial Sequence: Synthetic oligonucleotide
gguaaaguauaaaauucuu

SEQ ID NO: 2124543 - RNA, 19 nt, Artificial Sequence
  Description of Artificial Sequence: Synthetic oligonucleotide
caugugggcuaagcuauga

SEQ ID NO: 2124544 - RNA, 19 nt, Artificial Sequence
  Description of Artificial Sequence: Synthetic oligonucleotide
gguaggggauccugacgug

SEQ ID NO: 2124545 - RNA, 19 nt, Artificial Sequence
  Description of Artificial Sequence: Synthetic oligonucleotide
caagucugaaagccagucu

SEQ ID NO: 2124546 - RNA, 19 nt, Artificial Sequence
  Description of Artificial Sequence: Synthetic oligonucleotide
ccacuugcgcaucuccacc

SEQ ID NO: 2124547 - RNA, 19 nt, Artificial Sequence
  Description of Artificial Sequence: Synthetic oligonucleotide
gccagucucgaaugagaug

SEQ ID NO: 2124548 - RNA, 19 nt, Artificial Sequence
  Description of Artificial Sequence: Synthetic oligonucleotide
aaggagcauccaccucuuu

SEQ ID NO: 2124549 - RNA, 19 nt, Artificial Sequence
  Description of Artificial Sequence: Synthetic oligonucleotide
gccauuuaucaagcucagg

SEQ ID NO: 2124550 - RNA, 19 nt, Artificial Sequence
  Description of Artificial Sequence: Synthetic oligonucleotide
ccgagcgcgacucugaaaa

SEQ ID NO: 2124551 - RNA, 19 nt, Artificial Sequence
  Description of Artificial Sequence: Synthetic oligonucleotide
caacggggcugaggcaugg

SEQ ID NO: 2124552 - RNA, 19 nt, Artificial Sequence
  Description of Artificial Sequence: Synthetic oligonucleotide
gacaccugaccggcucuug

SEQ ID NO: 2124553 - RNA, 19 nt, Artificial Sequence
  Description of Artificial Sequence: Synthetic oligonucleotide
uccuuccgauacuguuugu

SEQ ID NO: 2124554 - RNA, 19 nt, Artificial Sequence
  Description of Artificial Sequence: Synthetic oligonucleotide
ccggaugcgcccaguauac

SEQ ID NO: 2124555 - RNA, 19 nt, Artificial Sequence
  Description of Artificial Sequence: Synthetic oligonucleotide
gcaaguaauuacagccuuc

SEQ ID NO: 2124556 - RNA, 19 nt, Artificial Sequence
  Description of Artificial Sequence: Synthetic oligonucleotide
accggcucuugggacagca

SEQ ID NO: 2124557 - RNA, 19 nt, Artificial Sequence
  Description of Artificial Sequence: Synthetic oligonucleotide
gagcgcgacucugaaaacu

SEQ ID NO: 2124558 - RNA, 19 nt, Artificial Sequence
  Description of Artificial Sequence: Synthetic oligonucleotide
guccgguucgggucccggc

SEQ ID NO: 2124559 - RNA, 19 nt, Artificial Sequence
  Description of Artificial Sequence: Synthetic oligonucleotide
gggcuaaaauuguaucucu

SEQ ID NO: 2124560 - RNA, 19 nt, Artificial Sequence
  Description of Artificial Sequence: Synthetic oligonucleotide
gugcugauucuaaguugug

SEQ ID NO: 2124561 - RNA, 19 nt, Artificial Sequence
  Description of Artificial Sequence: Synthetic oligonucleotide
aguguacaugugggcuaag

SEQ ID NO: 2124562 - RNA, 19 nt, Artificial Sequence
  Description of Artificial Sequence: Synthetic oligonucleotide
ggucccggcuccgagcucc

SEQ ID NO: 2124563 - RNA, 19 nt, Artificial Sequence
  Description of Artificial Sequence: Synthetic oligonucleotide
acaugugggcuaagcuaug

SEQ ID NO: 2124564 - RNA, 19 nt, Artificial Sequence
  Description of Artificial Sequence: Synthetic oligonucleotide
acccggaugcgcccaguau

SEQ ID NO: 2124565 - RNA, 19 nt, Artificial Sequence
  Description of Artificial Sequence: Synthetic oligonucleotide
gugcgggcagcaauguaca

SEQ ID NO: 2124566 - RNA, 19 nt, Artificial Sequence
  Description of Artificial Sequence: Synthetic oligonucleotide
caguauacauguacucgau

SEQ ID NO: 2124567 - RNA, 19 nt, Artificial Sequence
  Description of Artificial Sequence: Synthetic oligonucleotide
ccuuccgauacuguuuguc

SEQ ID NO: 2124568 - RNA, 19 nt, Artificial Sequence
  Description of Artificial Sequence: Synthetic oligonucleotide
cuacaacggggcugaggca

SEQ ID NO: 2124569 - RNA, 19 nt, Artificial Sequence
  Description of Artificial Sequence: Synthetic oligonucleotide
uaccggugcucacccggau

SEQ ID NO: 2124570 - RNA, 19 nt, Artificial Sequence
  Description of Artificial Sequence: Synthetic oligonucleotide
cuaccggugcucacccgga

SEQ ID NO: 2124571 - RNA, 19 nt, Artificial Sequence
  Description of Artificial Sequence: Synthetic oligonucleotide
ggaagccagggcuaaaauu

SEQ ID NO: 2124572 - RNA, 19 nt, Artificial Sequence
  Description of Artificial Sequence: Synthetic oligonucleotide
ggugcucacccggaugcgc

SEQ ID NO: 2124573 - RNA, 19 nt, Artificial Sequence
  Description of Artificial Sequence: Synthetic oligonucleotide
ccgguaggggauccugacg

SEQ ID NO: 2124574 - RNA, 19 nt, Artificial Sequence
  Description of Artificial Sequence: Synthetic oligonucleotide
ggcuagugcuuugacaucu

SEQ ID NO: 2124575 - RNA, 19 nt, Artificial Sequence
  Description of Artificial Sequence: Synthetic oligonucleotide
ugcgcccaguauacaugua

SEQ ID NO: 2124576 - RNA, 19 nt, Artificial Sequence
  Description of Artificial Sequence: Synthetic oligonucleotide
ccuucaauccaucuucggu

SEQ ID NO: 2124577 - RNA, 19 nt, Artificial Sequence
  Description of Artificial Sequence: Synthetic oligonucleotide
gugacaagcaguggcccua

SEQ ID NO: 2124578 - RNA, 19 nt, Artificial Sequence
  Description of Artificial Sequence: Synthetic oligonucleotide
cucacccggaugcgcccag

SEQ ID NO: 2124579 - RNA, 19 nt, Artificial Sequence
  Description of Artificial Sequence: Synthetic oligonucleotide
ggaucauauccgcagcuuu

SEQ ID NO: 2124580 - RNA, 19 nt, Artificial Sequence
  Description of Artificial Sequence: Synthetic oligonucleotide
cgaagaaucuuuggugcug

SEQ ID NO: 2124581 - RNA, 19 nt, Artificial Sequence
  Description of Artificial Sequence: Synthetic oligonucleotide
cagucucgaaugagaugga

SEQ ID NO: 2124582 - RNA, 19 nt, Artificial Sequence
  Description of Artificial Sequence: Synthetic oligonucleotide
ggaugcgcccaguauacau

SEQ ID NO: 2124583 - RNA, 19 nt, Artificial Sequence
  Description of Artificial Sequence: Synthetic oligonucleotide
gagugcgggcagcaaugua

SEQ ID NO: 2124584 - RNA, 19 nt, Artificial Sequence
  Description of Artificial Sequence: Synthetic oligonucleotide
cacugucuagucucuguau

SEQ ID NO: 2124585 - RNA, 19 nt, Artificial Sequence
  Description of Artificial Sequence: Synthetic oligonucleotide
ccacacaauuugagagaug

SEQ ID NO: 2124586 - RNA, 19 nt, Artificial Sequence
  Description of Artificial Sequence: Synthetic oligonucleotide
gcgcaucuccacccggccc

SEQ ID NO: 2124587 - RNA, 19 nt, Artificial Sequence
  Description of Artificial Sequence: Synthetic oligonucleotide
ccguguccgguucgggucc

SEQ ID NO: 2124588 - RNA, 19 nt, Artificial Sequence
  Description of Artificial Sequence: Synthetic oligonucleotide
cuuucagagcaagcuggcu

SEQ ID NO: 2124589 - RNA, 19 nt, Artificial Sequence
  Description of Artificial Sequence: Synthetic oligonucleotide
cccuacaacggggcugagg

SEQ ID NO: 2124590 - RNA, 19 nt, Artificial Sequence
  Description of Artificial Sequence: Synthetic oligonucleotide
gugucccgguccacaggag

SEQ ID NO: 2124591 - RNA, 19 nt, Artificial Sequence
  Description of Artificial Sequence: Synthetic oligonucleotide
agacaccugaccggcucuu

SEQ ID NO: 2124592 - RNA, 19 nt, Artificial Sequence
  Description of Artificial Sequence: Synthetic oligonucleotide
gccacacaauuugagagau

SEQ ID NO: 2124593 - RNA, 19 nt, Artificial Sequence
  Description of Artificial Sequence: Synthetic oligonucleotide
gaaggagcauccaccucuu

SEQ ID NO: 2124594 - RNA, 19 nt, Artificial Sequence
  Description of Artificial Sequence: Synthetic oligonucleotide
ucacccggaugcgcccagu

SEQ ID NO: 2124595 - RNA, 19 nt, Artificial Sequence
  Description of Artificial Sequence: Synthetic oligonucleotide
caggagugcgggcagcaau

SEQ ID NO: 2124596 - RNA, 19 nt, Artificial Sequence
  Description of Artificial Sequence: Synthetic oligonucleotide
gugcacgcuaccggugcuc

SEQ ID NO: 2124597 - RNA, 19 nt, Artificial Sequence
  Description of Artificial Sequence: Synthetic oligonucleotide
gcuagugcuuugacaucuc

SEQ ID NO: 2124598 - RNA, 19 nt, Artificial Sequence
  Description of Artificial Sequence: Synthetic oligonucleotide
guguccgguucgggucccg

SEQ ID NO: 2124599 - RNA, 19 nt, Artificial Sequence
  Description of Artificial Sequence: Synthetic oligonucleotide
cagcaccucgugcacgcua

SEQ ID NO: 2124600 - RNA, 19 nt, Artificial Sequence
  Description of Artificial Sequence: Synthetic oligonucleotide
cccggaugcgcccaguaua

SEQ ID NO: 2124601 - RNA, 19 nt, Artificial Sequence
  Description of Artificial Sequence: Synthetic oligonucleotide
ccacugucuagucucugua

SEQ ID NO: 2124602 - RNA, 19 nt, Artificial Sequence
  Description of Artificial Sequence: Synthetic oligonucleotide
gguaaagauuccacaucuu

SEQ ID NO: 2124603 - RNA, 19 nt, Artificial Sequence
  Description of Artificial Sequence: Synthetic oligonucleotide
gcaccucgugcacgcuacc

SEQ ID NO: 2124604 - RNA, 19 nt, Artificial Sequence
  Description of Artificial Sequence: Synthetic oligonucleotide
guggcccuacaacggggcu

SEQ ID NO: 2124605 - RNA, 19 nt, Artificial Sequence
  Description of Artificial Sequence: Synthetic oligonucleotide
cgguaauuuccaagucuga

SEQ ID NO: 2124606 - RNA, 19 nt, Artificial Sequence
  Description of Artificial Sequence: Synthetic oligonucleotide
cagcaugaugcugucugau

SEQ ID NO: 2124607 - RNA, 19 nt, Artificial Sequence
  Description of Artificial Sequence: Synthetic oligonucleotide
cgagcgcgacucugaaaac

SEQ ID NO: 2124608 - RNA, 19 nt, Artificial Sequence
  Description of Artificial Sequence: Synthetic oligonucleotide
gcuuccaccguguccgguu

SEQ ID NO: 2124609 - RNA, 19 nt, Artificial Sequence
  Description of Artificial Sequence: Synthetic oligonucleotide
gaccggcucuugggacagc

SEQ ID NO: 2124610 - RNA, 19 nt, Artificial Sequence
  Description of Artificial Sequence: Synthetic oligonucleotide
cacccggaugcgcccagua

SEQ ID NO: 2124611 - RNA, 19 nt, Artificial Sequence
  Description of Artificial Sequence: Synthetic oligonucleotide
gcacgcuaccggugcucac

SEQ ID NO: 2124612 - RNA, 19 nt, Artificial Sequence
  Description of Artificial Sequence: Synthetic oligonucleotide
ccucgugcacgcuaccggu

SEQ ID NO: 2124613 - RNA, 19 nt, Artificial Sequence
  Description of Artificial Sequence: Synthetic oligonucleotide
cgguucgggucccggcucc

SEQ ID NO: 2124614 - RNA, 19 nt, Artificial Sequence
  Description of Artificial Sequence: Synthetic oligonucleotide
ccgguucgggucccggcuc

SEQ ID NO: 2124615 - RNA, 19 nt, Artificial Sequence
  Description of Artificial Sequence: Synthetic oligonucleotide
ccggaucauauccgcagcu

SEQ ID NO: 2124616 - RNA, 19 nt, Artificial Sequence
  Description of Artificial Sequence: Synthetic oligonucleotide
ggagugcgggcagcaaugu

SEQ ID NO: 2124617 - RNA, 19 nt, Artificial Sequence
  Description of Artificial Sequence: Synthetic oligonucleotide
ucccggcuccgagcuccac

SEQ ID NO: 2124618 - RNA, 19 nt, Artificial Sequence
  Description of Artificial Sequence: Synthetic oligonucleotide
cgcuaccggugcucacccg

SEQ ID NO: 2124619 - RNA, 19 nt, Artificial Sequence
  Description of Artificial Sequence: Synthetic oligonucleotide
gcucuugggacagcaugau

SEQ ID NO: 2124620 - RNA, 19 nt, Artificial Sequence
  Description of Artificial Sequence: Synthetic oligonucleotide
gcucacccggaugcgccca

SEQ ID NO: 2124621 - RNA, 19 nt, Artificial Sequence
  Description of Artificial Sequence: Synthetic oligonucleotide
gcccgagcgcgacucugaa

SEQ ID NO: 2124622 - RNA, 19 nt, Artificial Sequence
  Description of Artificial Sequence: Synthetic oligonucleotide
cgugacaagcaguggcccu

SEQ ID NO: 2124623 - RNA, 19 nt, Artificial Sequence
  Description of Artificial Sequence: Synthetic oligonucleotide
cgauaggccuccuuccgau

SEQ ID NO: 2124624 - RNA, 19 nt, Artificial Sequence
  Description of Artificial Sequence: Synthetic oligonucleotide
cggugcucacccggaugcg

SEQ ID NO: 2124625 - RNA, 19 nt, Artificial Sequence
  Description of Artificial Sequence: Synthetic oligonucleotide
ccucaauggcuagugcuuu

SEQ ID NO: 2124626 - RNA, 19 nt, Artificial Sequence
  Description of Artificial Sequence: Synthetic oligonucleotide
cccgagcgcgacucugaaa

SEQ ID NO: 2124627 - RNA, 19 nt, Artificial Sequence
  Description of Artificial Sequence: Synthetic oligonucleotide
ccggcuccgagcuccacuu

SEQ ID NO: 2124628 - RNA, 19 nt, Artificial Sequence
  Description of Artificial Sequence: Synthetic oligonucleotide
cccggcuccgagcuccacu

SEQ ID NO: 2124629 - RNA, 19 nt, Artificial Sequence
  Description of Artificial Sequence: Synthetic oligonucleotide
gcccuacaacggggcugag

SEQ ID NO: 2124630 - RNA, 19 nt, Artificial Sequence
  Description of Artificial Sequence: Synthetic oligonucleotide
ccacccggcccgagcgcga

SEQ ID NO: 2124631 - RNA, 19 nt, Artificial Sequence
  Description of Artificial Sequence: Synthetic oligonucleotide
cggaugcgcccaguauaca

SEQ ID NO: 2124632 - RNA, 19 nt, Artificial Sequence
  Description of Artificial Sequence: Synthetic oligonucleotide
cgugcacgcuaccggugcu

SEQ ID NO: 2124633 - RNA, 19 nt, Artificial Sequence
  Description of Artificial Sequence: Synthetic oligonucleotide
cgauaacggcuuccaccgu

SEQ ID NO: 2124634 - RNA, 19 nt, Artificial Sequence
  Description of Artificial Sequence: Synthetic oligonucleotide
ccggcucuugggacagcau

SEQ ID NO: 2124635 - RNA, 19 nt, Artificial Sequence
  Description of Artificial Sequence: Synthetic oligonucleotide
ccggcccgagcgcgacucu

SEQ ID NO: 2124636 - RNA, 19 nt, Artificial Sequence
  Description of Artificial Sequence: Synthetic oligonucleotide
aagguaggaacacucuugg

SEQ ID NO: 2124637 - RNA, 19 nt, Artificial Sequence
  Description of Artificial Sequence: Synthetic oligonucleotide
uuucaguuuaagcuggggc

SEQ ID NO: 2124638 - RNA, 19 nt, Artificial Sequence
  Description of Artificial Sequence: Synthetic oligonucleotide
ucuucauccagccaggcuc

SEQ ID NO: 2124639 - RNA, 19 nt, Artificial Sequence
  Description of Artificial Sequence: Synthetic oligonucleotide
gaugcgguagcacugcagg

SEQ ID NO: 2124640 - RNA, 19 nt, Artificial Sequence
  Description of Artificial Sequence: Synthetic oligonucleotide
gaaaggacagcguggagcc

SEQ ID NO: 2124641 - RNA, 19 nt, Artificial Sequence
  Description of Artificial Sequence: Synthetic oligonucleotide
uucaguuuaagcuggggcu

SEQ ID NO: 2124642 - RNA, 19 nt, Artificial Sequence
  Description of Artificial Sequence: Synthetic oligonucleotide
uuaagcuggggcuuggcag

SEQ ID NO: 2124643 - RNA, 19 nt, Artificial Sequence
  Description of Artificial Sequence: Synthetic oligonucleotide
ugaucucggccccucaggg

SEQ ID NO: 2124644 - RNA, 19 nt, Artificial Sequence
  Description of Artificial Sequence: Synthetic oligonucleotide
uucuugugaacuccguggc

SEQ ID NO: 2124645 - RNA, 19 nt, Artificial Sequence
  Description of Artificial Sequence: Synthetic oligonucleotide
agaggcaccccuuccauag

SEQ ID NO: 2124646 - RNA, 19 nt, Artificial Sequence
  Description of Artificial Sequence: Synthetic oligonucleotide
aucuagccaccucuguucc

SEQ ID NO: 2124647 - RNA, 19 nt, Artificial Sequence
  Description of Artificial Sequence: Synthetic oligonucleotide
gaccuguccacccagcuug

SEQ ID NO: 2124648 - RNA, 19 nt, Artificial Sequence
  Description of Artificial Sequence: Synthetic oligonucleotide
cucagguccacccagccgc

SEQ ID NO: 2124649 - RNA, 19 nt, Artificial Sequence
  Description of Artificial Sequence: Synthetic oligonucleotide
ugcgggaacaggcguaacg

SEQ ID NO: 2124650 - RNA, 19 nt, Artificial Sequence
  Description of Artificial Sequence: Synthetic oligonucleotide
agugaagguaggaacacuc

SEQ ID NO: 2124651 - RNA, 19 nt, Artificial Sequence
  Description of Artificial Sequence: Synthetic oligonucleotide
ucgaucuccuucuugagau

SEQ ID NO: 2124652 - RNA, 19 nt, Artificial Sequence
  Description of Artificial Sequence: Synthetic oligonucleotide
gagacgcucaauugucugg

SEQ ID NO: 2124653 - RNA, 19 nt, Artificial Sequence
  Description of Artificial Sequence: Synthetic oligonucleotide
uggggagggagacagauua

SEQ ID NO: 2124654 - RNA, 19 nt, Artificial Sequence
  Description of Artificial Sequence: Synthetic oligonucleotide
uuuaagcuggggcuuggca

SEQ ID NO: 2124655 - RNA, 19 nt, Artificial Sequence
  Description of Artificial Sequence: Synthetic oligonucleotide
gaagguaggaacacucuug

SEQ ID NO: 2124656 - RNA, 19 nt, Artificial Sequence
  Description of Artificial Sequence: Synthetic oligonucleotide
ucucgcaguaagcagccgc

SEQ ID NO: 2124657 - RNA, 19 nt, Artificial Sequence
  Description of Artificial Sequence: Synthetic oligonucleotide
ucaggcucaacuccagcgc

SEQ ID NO: 2124658 - RNA, 19 nt, Artificial Sequence
  Description of Artificial Sequence: Synthetic oligonucleotide
uaagcagccgcucaucgau

SEQ ID NO: 2124659 - RNA, 19 nt, Artificial Sequence
  Description of Artificial Sequence: Synthetic oligonucleotide
ucgcguuucagcagcaucu

SEQ ID NO: 2124660 - RNA, 19 nt, Artificial Sequence
  Description of Artificial Sequence: Synthetic oligonucleotide
ugcuguagcgcaccauggg

SEQ ID NO: 2124661 - RNA, 19 nt, Artificial Sequence
  Description of Artificial Sequence: Synthetic oligonucleotide
caaccaucaggggagaagg

SEQ ID NO: 2124662 - RNA, 19 nt, Artificial Sequence
  Description of Artificial Sequence: Synthetic oligonucleotide
uuuucaguuuaagcugggg

SEQ ID NO: 2124663 - RNA, 19 nt, Artificial Sequence
  Description of Artificial Sequence: Synthetic oligonucleotide
cuguagcgcaccaugggcg

SEQ ID NO: 2124664 - RNA, 19 nt, Artificial Sequence
  Description of Artificial Sequence: Synthetic oligonucleotide
uguccacccagcuugauuu

SEQ ID NO: 2124665 - RNA, 19 nt, Artificial Sequence
  Description of Artificial Sequence: Synthetic oligonucleotide
ucgugagacgcucaauugu

SEQ ID NO: 2124666 - RNA, 19 nt, Artificial Sequence
  Description of Artificial Sequence: Synthetic oligonucleotide
aacaggcguaacgacgugg

SEQ ID NO: 2124667 - RNA, 19 nt, Artificial Sequence
  Description of Artificial Sequence: Synthetic oligonucleotide
ugaugaugcuucuucuugu

SEQ ID NO: 2124668 - RNA, 19 nt, Artificial Sequence
  Description of Artificial Sequence: Synthetic oligonucleotide
uucgugagacgcucaauug

SEQ ID NO: 2124669 - RNA, 19 nt, Artificial Sequence
  Description of Artificial Sequence: Synthetic oligonucleotide
cacugcaggcuacagagag

SEQ ID NO: 2124670 - RNA, 19 nt, Artificial Sequence
  Description of Artificial Sequence: Synthetic oligonucleotide
agacagauuacugucuuca

SEQ ID NO: 2124671 - RNA, 19 nt, Artificial Sequence
  Description of Artificial Sequence: Synthetic oligonucleotide
ugaacuccguggcugugag

SEQ ID NO: 2124672 - RNA, 19 nt, Artificial Sequence
  Description of Artificial Sequence: Synthetic oligonucleotide
ugagacgcucaauugucug

SEQ ID NO: 2124673 - RNA, 19 nt, Artificial Sequence
  Description of Artificial Sequence: Synthetic oligonucleotide
ugucucgcaguaagcagcc

SEQ ID NO: 2124674 - RNA, 19 nt, Artificial Sequence
  Description of Artificial Sequence: Synthetic oligonucleotide
acgcucaauugucugguuc

SEQ ID NO: 2124675 - RNA, 19 nt, Artificial Sequence
  Description of Artificial Sequence: Synthetic oligonucleotide
ugaugcuucuucuuguguu

SEQ ID NO: 2124676 - RNA, 19 nt, Artificial Sequence
  Description of Artificial Sequence: Synthetic oligonucleotide
cucgcugucucgcaguaag

SEQ ID NO: 2124677 - RNA, 19 nt, Artificial Sequence
  Description of Artificial Sequence: Synthetic oligonucleotide
agcagcaucucuuccguga

SEQ ID NO: 2124678 - RNA, 19 nt, Artificial Sequence
  Description of Artificial Sequence: Synthetic oligonucleotide
ggcguaacgacgugggugg

SEQ ID NO: 2124679 - RNA, 19 nt, Artificial Sequence
  Description of Artificial Sequence: Synthetic oligonucleotide
caucuagccaccucuguuc

SEQ ID NO: 2124680 - RNA, 19 nt, Artificial Sequence
  Description of Artificial Sequence: Synthetic oligonucleotide
agguugaugcgguagcacu

SEQ ID NO: 2124681 - RNA, 19 nt, Artificial Sequence
  Description of Artificial Sequence: Synthetic oligonucleotide
cucgguacugcuccagagg

SEQ ID NO: 2124682 - RNA, 19 nt, Artificial Sequence
  Description of Artificial Sequence: Synthetic oligonucleotide
ugaugcgguagcacugcag

SEQ ID NO: 2124683 - RNA, 19 nt, Artificial Sequence
  Description of Artificial Sequence: Synthetic oligonucleotide
augcgguagcacugcaggc

SEQ ID NO: 2124684 - RNA, 19 nt, Artificial Sequence
  Description of Artificial Sequence: Synthetic oligonucleotide
ugucuguccggccuccucu

SEQ ID NO: 2124685 - RNA, 19 nt, Artificial Sequence
  Description of Artificial Sequence: Synthetic oligonucleotide
acaaccaucaggggagaag

SEQ ID NO: 2124686 - RNA, 19 nt, Artificial Sequence
  Description of Artificial Sequence: Synthetic oligonucleotide
uccgcguccgcugggagcg

SEQ ID NO: 2124687 - RNA, 19 nt, Artificial Sequence
  Description of Artificial Sequence: Synthetic oligonucleotide
ucuuccgugagggcagggg

SEQ ID NO: 2124688 - RNA, 19 nt, Artificial Sequence
  Description of Artificial Sequence: Synthetic oligonucleotide
ugucugguucuugugcucc

SEQ ID NO: 2124689 - RNA, 19 nt, Artificial Sequence
  Description of Artificial Sequence: Synthetic oligonucleotide
ucuugugaacuccguggcu

SEQ ID NO: 2124690 - RNA, 19 nt, Artificial Sequence
  Description of Artificial Sequence: Synthetic oligonucleotide
agguuccucuucauugucc

SEQ ID NO: 2124691 - RNA, 19 nt, Artificial Sequence
  Description of Artificial Sequence: Synthetic oligonucleotide
aaaggacagcguggagccc

SEQ ID NO: 2124692 - RNA, 19 nt, Artificial Sequence
  Description of Artificial Sequence: Synthetic oligonucleotide
uaggaacacucuuggugcc

SEQ ID NO: 2124693 - RNA, 19 nt, Artificial Sequence
  Description of Artificial Sequence: Synthetic oligonucleotide
guccacaaccaucagggga

SEQ ID NO: 2124694 - RNA, 19 nt, Artificial Sequence
  Description of Artificial Sequence: Synthetic oligonucleotide
agauuacugucuucaucca

SEQ ID NO: 2124695 - RNA, 19 nt, Artificial Sequence
  Description of Artificial Sequence: Synthetic oligonucleotide
ugucaggcucaacuccagc

SEQ ID NO: 2124696 - RNA, 19 nt, Artificial Sequence
  Description of Artificial Sequence: Synthetic oligonucleotide
gacagcguggagcccuggg

SEQ ID NO: 2124697 - RNA, 19 nt, Artificial Sequence
  Description of Artificial Sequence: Synthetic oligonucleotide
aggaacacucuuggugccc

SEQ ID NO: 2124698 - RNA, 19 nt, Artificial Sequence
  Description of Artificial Sequence: Synthetic oligonucleotide
ugagcaccugucaggcuca

SEQ ID NO: 2124699 - RNA, 19 nt, Artificial Sequence
  Description of Artificial Sequence: Synthetic oligonucleotide
auuuucaguuuaagcuggg

SEQ ID NO: 2124700 - RNA, 19 nt, Artificial Sequence
  Description of Artificial Sequence: Synthetic oligonucleotide
cugugagcaccugucaggc

SEQ ID NO: 2124701 - RNA, 19 nt, Artificial Sequence
  Description of Artificial Sequence: Synthetic oligonucleotide
aggcguaacgacgugggug

SEQ ID NO: 2124702 - RNA, 19 nt, Artificial Sequence
  Description of Artificial Sequence: Synthetic oligonucleotide
gacaccgggaggaaaggac

SEQ ID NO: 2124703 - RNA, 19 nt, Artificial Sequence
  Description of Artificial Sequence: Synthetic oligonucleotide
caccccuuccauagguucc

SEQ ID NO: 2124704 - RNA, 19 nt, Artificial Sequence
  Description of Artificial Sequence: Synthetic oligonucleotide
gacuccgcgccuucuggag

SEQ ID NO: 2124705 - RNA, 19 nt, Artificial Sequence
  Description of Artificial Sequence: Synthetic oligonucleotide
ucaguuuaagcuggggcuu

SEQ ID NO: 2124706 - RNA, 19 nt, Artificial Sequence
  Description of Artificial Sequence: Synthetic oligonucleotide
guugaugcgguagcacugc

SEQ ID NO: 2124707 - RNA, 19 nt, Artificial Sequence
  Description of Artificial Sequence: Synthetic oligonucleotide
cucaucgaucuccuucuug

SEQ ID NO: 2124708 - RNA, 19 nt, Artificial Sequence
  Description of Artificial Sequence: Synthetic oligonucleotide
uugugaacuccguggcugu

SEQ ID NO: 2124709 - RNA, 19 nt, Artificial Sequence
  Description of Artificial Sequence: Synthetic oligonucleotide
cuggguuugacggggcggg

SEQ ID NO: 2124710 - RNA, 19 nt, Artificial Sequence
  Description of Artificial Sequence: Synthetic oligonucleotide
cagcguggagcccugggcc

SEQ ID NO: 2124711 - RNA, 19 nt, Artificial Sequence
  Description of Artificial Sequence: Synthetic oligonucleotide
gagacagauuacugucuuc

SEQ ID NO: 2124712 - RNA, 19 nt, Artificial Sequence
  Description of Artificial Sequence: Synthetic oligonucleotide
aguuuaagcuggggcuugg

SEQ ID NO: 2124713 - RNA, 19 nt, Artificial Sequence
  Description of Artificial Sequence: Synthetic oligonucleotide
guuccucgcguuucagcag

SEQ ID NO: 2124714 - RNA, 19 nt, Artificial Sequence
  Description of Artificial Sequence: Synthetic oligonucleotide
gguuugacggggcgggccg

SEQ ID NO: 2124715 - RNA, 19 nt, Artificial Sequence
  Description of Artificial Sequence: Synthetic oligonucleotide
gcggcgcuggguuugacgg

SEQ ID NO: 2124716 - RNA, 19 nt, Artificial Sequence
  Description of Artificial Sequence: Synthetic oligonucleotide
agagagccuggccggugcg

SEQ ID NO: 2124717 - RNA, 19 nt, Artificial Sequence
  Description of Artificial Sequence: Synthetic oligonucleotide
cugggagcggccgucuucg

SEQ ID NO: 2124718 - RNA, 19 nt, Artificial Sequence
  Description of Artificial Sequence: Synthetic oligonucleotide
ucccgaaguggggagggag

SEQ ID NO: 2124719 - RNA, 19 nt, Artificial Sequence
  Description of Artificial Sequence: Synthetic oligonucleotide
gcuguagcgcaccaugggc

SEQ ID NO: 2124720 - RNA, 19 nt, Artificial Sequence
  Description of Artificial Sequence: Synthetic oligonucleotide
aucucuuccgugagggcag

SEQ ID NO: 2124721 - RNA, 19 nt, Artificial Sequence
  Description of Artificial Sequence: Synthetic oligonucleotide
agacgcucaauugucuggu

SEQ ID NO: 2124722 - RNA, 19 nt, Artificial Sequence
  Description of Artificial Sequence: Synthetic oligonucleotide
uggcugugagcaccuguca

SEQ ID NO: 2124723 - RNA, 19 nt, Artificial Sequence
  Description of Artificial Sequence: Synthetic oligonucleotide
aguggggagggagacagau

SEQ ID NO: 2124724 - RNA, 19 nt, Artificial Sequence
  Description of Artificial Sequence: Synthetic oligonucleotide
gcugucucgcaguaagcag

SEQ ID NO: 2124725 - RNA, 19 nt, Artificial Sequence
  Description of Artificial Sequence: Synthetic oligonucleotide
accgggaggaaaggacagc

SEQ ID NO: 2124726 - RNA, 19 nt, Artificial Sequence
  Description of Artificial Sequence: Synthetic oligonucleotide
gaucacagugaagguagga

SEQ ID NO: 2124727 - RNA, 19 nt, Artificial Sequence
  Description of Artificial Sequence: Synthetic oligonucleotide
gagccugugucuguccggc

SEQ ID NO: 2124728 - RNA, 19 nt, Artificial Sequence
  Description of Artificial Sequence: Synthetic oligonucleotide
cuagccaccucuguuccuc

SEQ ID NO: 2124729 - RNA, 19 nt, Artificial Sequence
  Description of Artificial Sequence: Synthetic oligonucleotide
ugggcguaggggccggggc

SEQ ID NO: 2124730 - RNA, 19 nt, Artificial Sequence
  Description of Artificial Sequence: Synthetic oligonucleotide
agcagggcucgcugucucg

SEQ ID NO: 2124731 - RNA, 19 nt, Artificial Sequence
  Description of Artificial Sequence: Synthetic oligonucleotide
gaggcaccccuuccauagg

SEQ ID NO: 2124732 - RNA, 19 nt, Artificial Sequence
  Description of Artificial Sequence: Synthetic oligonucleotide
ucgcugucucgcaguaagc

SEQ ID NO: 2124733 - RNA, 19 nt, Artificial Sequence
  Description of Artificial Sequence: Synthetic oligonucleotide
cucgcguuucagcagcauc

SEQ ID NO: 2124734 - RNA, 19 nt, Artificial Sequence
  Description of Artificial Sequence: Synthetic oligonucleotide
ggcugugagcaccugucag

SEQ ID NO: 2124735 - RNA, 19 nt, Artificial Sequence
  Description of Artificial Sequence: Synthetic oligonucleotide
caccugucaggcucaacuc

SEQ ID NO: 2124736 - RNA, 19 nt, Artificial Sequence
  Description of Artificial Sequence: Synthetic oligonucleotide
cuguccggccuccucuucc

SEQ ID NO: 2124737 - RNA, 19 nt, Artificial Sequence
  Description of Artificial Sequence: Synthetic oligonucleotide
cucagggaucacagugaag

SEQ ID NO: 2124738 - RNA, 19 nt, Artificial Sequence
  Description of Artificial Sequence: Synthetic oligonucleotide
cagagagccuggccggugc

SEQ ID NO: 2124739 - RNA, 19 nt, Artificial Sequence
  Description of Artificial Sequence: Synthetic oligonucleotide
aggcaccccuuccauaggu

SEQ ID NO: 2124740 - RNA, 19 nt, Artificial Sequence
  Description of Artificial Sequence: Synthetic oligonucleotide
gaacacucuuggugcccag

SEQ ID NO: 2124741 - RNA, 19 nt, Artificial Sequence
  Description of Artificial Sequence: Synthetic oligonucleotide
guaagcagccgcucaucga

SEQ ID NO: 2124742 - RNA, 19 nt, Artificial Sequence
  Description of Artificial Sequence: Synthetic oligonucleotide
cugucaggcucaacuccag

SEQ ID NO: 2124743 - RNA, 19 nt, Artificial Sequence
  Description of Artificial Sequence: Synthetic oligonucleotide
gaacaggcguaacgacgug

SEQ ID NO: 2124744 - RNA, 19 nt, Artificial Sequence
  Description of Artificial Sequence: Synthetic oligonucleotide
agguaggaacacucuuggu

SEQ ID NO: 2124745 - RNA, 19 nt, Artificial Sequence
  Description of Artificial Sequence: Synthetic oligonucleotide
cuugccgccugcagccgcc

SEQ ID NO: 2124746 - RNA, 19 nt, Artificial Sequence
  Description of Artificial Sequence: Synthetic oligonucleotide
ccaggcucgguacugcucc

SEQ ID NO: 2124747 - RNA, 19 nt, Artificial Sequence
  Description of Artificial Sequence: Synthetic oligonucleotide
agggcucgcugucucgcag

SEQ ID NO: 2124748 - RNA, 19 nt, Artificial Sequence
  Description of Artificial Sequence: Synthetic oligonucleotide
uccauagguuccucuucau

SEQ ID NO: 2124749 - RNA, 19 nt, Artificial Sequence
  Description of Artificial Sequence: Synthetic oligonucleotide
accaugggcguaggggccg

SEQ ID NO: 2124750 - RNA, 19 nt, Artificial Sequence
  Description of Artificial Sequence: Synthetic oligonucleotide
ucuagccaccucuguuccu

SEQ ID NO: 2124751 - RNA, 19 nt, Artificial Sequence
  Description of Artificial Sequence: Synthetic oligonucleotide
uagcgcaccaugggcguag

SEQ ID NO: 2124752 - RNA, 19 nt, Artificial Sequence
  Description of Artificial Sequence: Synthetic oligonucleotide
ggugaucucggccccucag

SEQ ID NO: 2124753 - RNA, 19 nt, Artificial Sequence
  Description of Artificial Sequence: Synthetic oligonucleotide
agagcagcgcggcgcuggg

SEQ ID NO: 2124754 - RNA, 19 nt, Artificial Sequence
  Description of Artificial Sequence: Synthetic oligonucleotide
uguccggccuccucuuccu

SEQ ID NO: 2124755 - RNA, 19 nt, Artificial Sequence
  Description of Artificial Sequence: Synthetic oligonucleotide
ugugagcaccugucaggcu

SEQ ID NO: 2124756 - RNA, 19 nt, Artificial Sequence
  Description of Artificial Sequence: Synthetic oligonucleotide
cuuccgcgcccguuccucg

SEQ ID NO: 2124757 - RNA, 19 nt, Artificial Sequence
  Description of Artificial Sequence: Synthetic oligonucleotide
gguugaugcgguagcacug

SEQ ID NO: 2124758 - RNA, 19 nt, Artificial Sequence
  Description of Artificial Sequence: Synthetic oligonucleotide
ggagcggccgucuucguga

SEQ ID NO: 2124759 - RNA, 19 nt, Artificial Sequence
  Description of Artificial Sequence: Synthetic oligonucleotide
agauccccuggcagguccc

SEQ ID NO: 2124760 - RNA, 19 nt, Artificial Sequence
  Description of Artificial Sequence: Synthetic oligonucleotide
cagccggggacagagcagc

SEQ ID NO: 2124761 - RNA, 19 nt, Artificial Sequence
  Description of Artificial Sequence: Synthetic oligonucleotide
gcagcaucucuuccgugag

SEQ ID NO: 2124762 - RNA, 19 nt, Artificial Sequence
  Description of Artificial Sequence: Synthetic oligonucleotide
caggucccgaaguggggag

SEQ ID NO: 2124763 - RNA, 19 nt, Artificial Sequence
  Description of Artificial Sequence: Synthetic oligonucleotide
ugugaacuccguggcugug

SEQ ID NO: 2124764 - RNA, 19 nt, Artificial Sequence
  Description of Artificial Sequence: Synthetic oligonucleotide
guagcacugcaggcuacag

SEQ ID NO: 2124765 - RNA, 19 nt, Artificial Sequence
  Description of Artificial Sequence: Synthetic oligonucleotide
aaccaucaggggagaaggu

SEQ ID NO: 2124766 - RNA, 19 nt, Artificial Sequence
  Description of Artificial Sequence: Synthetic oligonucleotide
guuuaagcuggggcuuggc

SEQ ID NO: 2124767 - RNA, 19 nt, Artificial Sequence
  Description of Artificial Sequence: Synthetic oligonucleotide
ggagccugugucuguccgg

SEQ ID NO: 2124768 - RNA, 19 nt, Artificial Sequence
  Description of Artificial Sequence: Synthetic oligonucleotide
guggcugugagcaccuguc

SEQ ID NO: 2124769 - RNA, 19 nt, Artificial Sequence
  Description of Artificial Sequence: Synthetic oligonucleotide
caguuuaagcuggggcuug

SEQ ID NO: 2124770 - RNA, 19 nt, Artificial Sequence
  Description of Artificial Sequence: Synthetic oligonucleotide
cuccgcguccgcugggagc

SEQ ID NO: 2124771 - RNA, 19 nt, Artificial Sequence
  Description of Artificial Sequence: Synthetic oligonucleotide
gugcccaggaccuguccac

SEQ ID NO: 2124772 - RNA, 19 nt, Artificial Sequence
  Description of Artificial Sequence: Synthetic oligonucleotide
gaacuccguggcugugagc

SEQ ID NO: 2124773 - RNA, 19 nt, Artificial Sequence
  Description of Artificial Sequence: Synthetic oligonucleotide
uccacccagcuugauuuuc

SEQ ID NO: 2124774 - RNA, 19 nt, Artificial Sequence
  Description of Artificial Sequence: Synthetic oligonucleotide
ggcgcuggguuugacgggg

SEQ ID NO: 2124775 - RNA, 19 nt, Artificial Sequence
  Description of Artificial Sequence: Synthetic oligonucleotide
uucauccagccaggcucgg

SEQ ID NO: 2124776 - RNA, 19 nt, Artificial Sequence
  Description of Artificial Sequence: Synthetic oligonucleotide
ccgggaggaaaggacagcg

SEQ ID NO: 2124777 - RNA, 19 nt, Artificial Sequence
  Description of Artificial Sequence: Synthetic oligonucleotide
ccggggacagagcagcgcg

SEQ ID NO: 2124778 - RNA, 19 nt, Artificial Sequence
  Description of Artificial Sequence: Synthetic oligonucleotide
uccucgcguuucagcagca

SEQ ID NO: 2124779 - RNA, 19 nt, Artificial Sequence
  Description of Artificial Sequence: Synthetic oligonucleotide
ucuuccgcgcccguuccuc

SEQ ID NO: 2124780 - RNA, 19 nt, Artificial Sequence
  Description of Artificial Sequence: Synthetic oligonucleotide
gcaccugucaggcucaacu

SEQ ID NO: 2124781 - RNA, 19 nt, Artificial Sequence
  Description of Artificial Sequence: Synthetic oligonucleotide
ggacagagcagcgcggcgc

SEQ ID NO: 2124782 - RNA, 19 nt, Artificial Sequence
  Description of Artificial Sequence: Synthetic oligonucleotide
gagcggccgucuucgugag

SEQ ID NO: 2124783 - RNA, 19 nt, Artificial Sequence
  Description of Artificial Sequence: Synthetic oligonucleotide
gacagauuacugucuucau

SEQ ID NO: 2124784 - RNA, 19 nt, Artificial Sequence
  Description of Artificial Sequence: Synthetic oligonucleotide
cgugagacgcucaauuguc

SEQ ID NO: 2124785 - RNA, 19 nt, Artificial Sequence
  Description of Artificial Sequence: Synthetic oligonucleotide
aggucccgaaguggggagg

SEQ ID NO: 2124786 - RNA, 19 nt, Artificial Sequence
  Description of Artificial Sequence: Synthetic oligonucleotide
uggccggugcgggaacagg

SEQ ID NO: 2124787 - RNA, 19 nt, Artificial Sequence
  Description of Artificial Sequence: Synthetic oligonucleotide
ugacggggcgggccgcuga

SEQ ID NO: 2124788 - RNA, 19 nt, Artificial Sequence
  Description of Artificial Sequence: Synthetic oligonucleotide
ucuguccggccuccucuuc

SEQ ID NO: 2124789 - RNA, 19 nt, Artificial Sequence
  Description of Artificial Sequence: Synthetic oligonucleotide
ggacggcugacuccgcgcc

SEQ ID NO: 2124790 - RNA, 19 nt, Artificial Sequence
  Description of Artificial Sequence: Synthetic oligonucleotide
ugcaggcuacagagagccu

SEQ ID NO: 2124791 - RNA, 19 nt, Artificial Sequence
  Description of Artificial Sequence: Synthetic oligonucleotide
gacggggcgggccgcugag

SEQ ID NO: 2124792 - RNA, 19 nt, Artificial Sequence
  Description of Artificial Sequence: Synthetic oligonucleotide
gcuggguuugacggggcgg

SEQ ID NO: 2124793 - RNA, 19 nt, Artificial Sequence
  Description of Artificial Sequence: Synthetic oligonucleotide
uuggugcccaggaccuguc

SEQ ID NO: 2124794 - RNA, 19 nt, Artificial Sequence
  Description of Artificial Sequence: Synthetic oligonucleotide
gucuucgugagacgcucaa

SEQ ID NO: 2124795 - RNA, 19 nt, Artificial Sequence
  Description of Artificial Sequence: Synthetic oligonucleotide
agcuugauuuucaguuuaa

SEQ ID NO: 2124796 - RNA, 19 nt, Artificial Sequence
  Description of Artificial Sequence: Synthetic oligonucleotide
ggaucacagugaagguagg

SEQ ID NO: 2124797 - RNA, 19 nt, Artificial Sequence
  Description of Artificial Sequence: Synthetic oligonucleotide
ggggacggcugacuccgcg

SEQ ID NO: 2124798 - RNA, 19 nt, Artificial Sequence
  Description of Artificial Sequence: Synthetic oligonucleotide
augggcguaggggccgggg

SEQ ID NO: 2124799 - RNA, 19 nt, Artificial Sequence
  Description of Artificial Sequence: Synthetic oligonucleotide
ugugcuccucggcccgccu

SEQ ID NO: 2124800 - RNA, 19 nt, Artificial Sequence
  Description of Artificial Sequence: Synthetic oligonucleotide
ggugcccaggaccugucca

SEQ ID NO: 2124801 - RNA, 19 nt, Artificial Sequence
  Description of Artificial Sequence: Synthetic oligonucleotide
cucgcaguaagcagccgcu

SEQ ID NO: 2124802 - RNA, 19 nt, Artificial Sequence
  Description of Artificial Sequence: Synthetic oligonucleotide
ggaacaggcguaacgacgu

SEQ ID NO: 2124803 - RNA, 19 nt, Artificial Sequence
  Description of Artificial Sequence: Synthetic oligonucleotide
acagagagccuggccggug

SEQ ID NO: 2124804 - RNA, 19 nt, Artificial Sequence
  Description of Artificial Sequence: Synthetic oligonucleotide
caguaagcagccgcucauc

SEQ ID NO: 2124805 - RNA, 19 nt, Artificial Sequence
  Description of Artificial Sequence: Synthetic oligonucleotide
gacagagcagcgcggcgcu

SEQ ID NO: 2124806 - RNA, 19 nt, Artificial Sequence
  Description of Artificial Sequence: Synthetic oligonucleotide
uuugacggggcgggccgcu

SEQ ID NO: 2124807 - RNA, 19 nt, Artificial Sequence
  Description of Artificial Sequence: Synthetic oligonucleotide
gggacggcugacuccgcgc

SEQ ID NO: 2124808 - RNA, 19 nt, Artificial Sequence
  Description of Artificial Sequence: Synthetic oligonucleotide
agcaccugucaggcucaac

SEQ ID NO: 2124809 - RNA, 19 nt, Artificial Sequence
  Description of Artificial Sequence: Synthetic oligonucleotide
ccgcucaucgaucuccuuc

SEQ ID NO: 2124810 - RNA, 19 nt, Artificial Sequence
  Description of Artificial Sequence: Synthetic oligonucleotide
ggccgucuucgugagacgc

SEQ ID NO: 2124811 - RNA, 19 nt, Artificial Sequence
  Description of Artificial Sequence: Synthetic oligonucleotide
ucucggccccucagggauc

SEQ ID NO: 2124812 - RNA, 19 nt, Artificial Sequence
  Description of Artificial Sequence: Synthetic oligonucleotide
ccucagguccacccagccg

SEQ ID NO: 2124813 - RNA, 19 nt, Artificial Sequence
  Description of Artificial Sequence: Synthetic oligonucleotide
aggugaucucggccccuca

SEQ ID NO: 2124814 - RNA, 19 nt, Artificial Sequence
  Description of Artificial Sequence: Synthetic oligonucleotide
gcggccgucuucgugagac

SEQ ID NO: 2124815 - RNA, 19 nt, Artificial Sequence
  Description of Artificial Sequence: Synthetic oligonucleotide
gcagccgccucuuccgcgc

SEQ ID NO: 2124816 - RNA, 19 nt, Artificial Sequence
  Description of Artificial Sequence: Synthetic oligonucleotide
cugugucuguccggccucc

SEQ ID NO: 2124817 - RNA, 19 nt, Artificial Sequence
  Description of Artificial Sequence: Synthetic oligonucleotide
cguuccucgcguuucagca

SEQ ID NO: 2124818 - RNA, 19 nt, Artificial Sequence
  Description of Artificial Sequence: Synthetic oligonucleotide
gcgggaacaggcguaacga

SEQ ID NO: 2124819 - RNA, 19 nt, Artificial Sequence
  Description of Artificial Sequence: Synthetic oligonucleotide
ucgcaguaagcagccgcuc

SEQ ID NO: 2124820 - RNA, 19 nt, Artificial Sequence
  Description of Artificial Sequence: Synthetic oligonucleotide
gggccgcugagccaccgcc

SEQ ID NO: 2124821 - RNA, 19 nt, Artificial Sequence
  Description of Artificial Sequence: Synthetic oligonucleotide
ggaacacucuuggugccca

SEQ ID NO: 2124822 - RNA, 19 nt, Artificial Sequence
  Description of Artificial Sequence: Synthetic oligonucleotide
uggguuugacggggcgggc

SEQ ID NO: 2124823 - RNA, 19 nt, Artificial Sequence
  Description of Artificial Sequence: Synthetic oligonucleotide
gucucgcaguaagcagccg

SEQ ID NO: 2124824 - RNA, 19 nt, Artificial Sequence
  Description of Artificial Sequence: Synthetic oligonucleotide
aggcucgguacugcuccag

SEQ ID NO: 2124825 - RNA, 19 nt, Artificial Sequence
  Description of Artificial Sequence: Synthetic oligonucleotide
gugucuguccggccuccuc

SEQ ID NO: 2124826 - RNA, 19 nt, Artificial Sequence
  Description of Artificial Sequence: Synthetic oligonucleotide
ggagacagauuacugucuu

SEQ ID NO: 2124827 - RNA, 19 nt, Artificial Sequence
  Description of Artificial Sequence: Synthetic oligonucleotide
guuugacggggcgggccgc

SEQ ID NO: 2124828 - RNA, 19 nt, Artificial Sequence
  Description of Artificial Sequence: Synthetic oligonucleotide
ggguuugacggggcgggcc

SEQ ID NO: 2124829 - RNA, 19 nt, Artificial Sequence
  Description of Artificial Sequence: Synthetic oligonucleotide
ccaggaccuguccacccag

SEQ ID NO: 2124830 - RNA, 19 nt, Artificial Sequence
  Description of Artificial Sequence: Synthetic oligonucleotide
uccgcugggagcggccguc

SEQ ID NO: 2124831 - RNA, 19 nt, Artificial Sequence
  Description of Artificial Sequence: Synthetic oligonucleotide
agcgcaccaugggcguagg

SEQ ID NO: 2124832 - RNA, 19 nt, Artificial Sequence
  Description of Artificial Sequence: Synthetic oligonucleotide
gccggugcgggaacaggcg

SEQ ID NO: 2124833 - RNA, 19 nt, Artificial Sequence
  Description of Artificial Sequence: Synthetic oligonucleotide
gggagcggccgucuucgug

SEQ ID NO: 2124834 - RNA, 19 nt, Artificial Sequence
  Description of Artificial Sequence: Synthetic oligonucleotide
caucaggggagaaggugau

SEQ ID NO: 2124835 - RNA, 19 nt, Artificial Sequence
  Description of Artificial Sequence: Synthetic oligonucleotide
cuggccggugcgggaacag

SEQ ID NO: 2124836 - RNA, 19 nt, Artificial Sequence
  Description of Artificial Sequence: Synthetic oligonucleotide
cccucagguccacccagcc

SEQ ID NO: 2124837 - RNA, 19 nt, Artificial Sequence
  Description of Artificial Sequence: Synthetic oligonucleotide
gccucuuccgcgcccguuc

SEQ ID NO: 2124838 - RNA, 19 nt, Artificial Sequence
  Description of Artificial Sequence: Synthetic oligonucleotide
gggagggagacagauuacu

SEQ ID NO: 2124839 - RNA, 19 nt, Artificial Sequence
  Description of Artificial Sequence: Synthetic oligonucleotide
cuucuggagcagggcucgc

SEQ ID NO: 2124840 - RNA, 19 nt, Artificial Sequence
  Description of Artificial Sequence: Synthetic oligonucleotide
guaggggccggggcagcug

SEQ ID NO: 2124841 - RNA, 19 nt, Artificial Sequence
  Description of Artificial Sequence: Synthetic oligonucleotide
gcaggucccgaagugggga

SEQ ID NO: 2124842 - RNA, 19 nt, Artificial Sequence
  Description of Artificial Sequence: Synthetic oligonucleotide
ggcucaacuccagcgcuuc

SEQ ID NO: 2124843 - RNA, 19 nt, Artificial Sequence
  Description of Artificial Sequence: Synthetic oligonucleotide
ccgaaguggggagggagac

SEQ ID NO: 2124844 - RNA, 19 nt, Artificial Sequence
  Description of Artificial Sequence: Synthetic oligonucleotide
uugacggggcgggccgcug

SEQ ID NO: 2124845 - RNA, 19 nt, Artificial Sequence
  Description of Artificial Sequence: Synthetic oligonucleotide
ggcguaggggccggggcag

SEQ ID NO: 2124846 - RNA, 19 nt, Artificial Sequence
  Description of Artificial Sequence: Synthetic oligonucleotide
uggagcccugggccccgcu

SEQ ID NO: 2124847 - RNA, 19 nt, Artificial Sequence
  Description of Artificial Sequence: Synthetic oligonucleotide
gcugggagcggccgucuuc

SEQ ID NO: 2124848 - RNA, 19 nt, Artificial Sequence
  Description of Artificial Sequence: Synthetic oligonucleotide
uccgcgccuucuggagcag

SEQ ID NO: 2124849 - RNA, 19 nt, Artificial Sequence
  Description of Artificial Sequence: Synthetic oligonucleotide
aggacagcguggagcccug

SEQ ID NO: 2124850 - RNA, 19 nt, Artificial Sequence
  Description of Artificial Sequence: Synthetic oligonucleotide
ccugugucuguccggccuc

SEQ ID NO: 2124851 - RNA, 19 nt, Artificial Sequence
  Description of Artificial Sequence: Synthetic oligonucleotide
cagaggcaccccuuccaua

SEQ ID NO: 2124852 - RNA, 19 nt, Artificial Sequence
  Description of Artificial Sequence: Synthetic oligonucleotide
cguaacgacgugggugggg

SEQ ID NO: 2124853 - RNA, 19 nt, Artificial Sequence
  Description of Artificial Sequence: Synthetic oligonucleotide
gcaucuagccaccucuguu

SEQ ID NO: 2124854 - RNA, 19 nt, Artificial Sequence
  Description of Artificial Sequence: Synthetic oligonucleotide
acggcugacuccgcgccuu

SEQ ID NO: 2124855 - RNA, 19 nt, Artificial Sequence
  Description of Artificial Sequence: Synthetic oligonucleotide
gcagccggggacagagcag

SEQ ID NO: 2124856 - RNA, 19 nt, Artificial Sequence
  Description of Artificial Sequence: Synthetic oligonucleotide
gggagacagauuacugucu

SEQ ID NO: 2124857 - RNA, 19 nt, Artificial Sequence
  Description of Artificial Sequence: Synthetic oligonucleotide
ugggagcggccgucuucgu

SEQ ID NO: 2124858 - RNA, 19 nt, Artificial Sequence
  Description of Artificial Sequence: Synthetic oligonucleotide
cgggaacaggcguaacgac

SEQ ID NO: 2124859 - RNA, 19 nt, Artificial Sequence
  Description of Artificial Sequence: Synthetic oligonucleotide
gcaguaagcagccgcucau

SEQ ID NO: 2124860 - RNA, 19 nt, Artificial Sequence
  Description of Artificial Sequence: Synthetic oligonucleotide
caugggcguaggggccggg

SEQ ID NO: 2124861 - RNA, 19 nt, Artificial Sequence
  Description of Artificial Sequence: Synthetic oligonucleotide
ggacaccgggaggaaagga

SEQ ID NO: 2124862 - RNA, 19 nt, Artificial Sequence
  Description of Artificial Sequence: Synthetic oligonucleotide
gguccacccagccgcagcu

SEQ ID NO: 2124863 - RNA, 19 nt, Artificial Sequence
  Description of Artificial Sequence: Synthetic oligonucleotide
gcgguagcacugcaggcua

SEQ ID NO: 2124864 - RNA, 19 nt, Artificial Sequence
  Description of Artificial Sequence: Synthetic oligonucleotide
cagggcucgcugucucgca

SEQ ID NO: 2124865 - RNA, 19 nt, Artificial Sequence
  Description of Artificial Sequence: Synthetic oligonucleotide
ggugcgggaacaggcguaa

SEQ ID NO: 2124866 - RNA, 19 nt, Artificial Sequence
  Description of Artificial Sequence: Synthetic oligonucleotide
ggggagggagacagauuac

SEQ ID NO: 2124867 - RNA, 19 nt, Artificial Sequence
  Description of Artificial Sequence: Synthetic oligonucleotide
cucggccccucagggauca

SEQ ID NO: 2124868 - RNA, 19 nt, Artificial Sequence
  Description of Artificial Sequence: Synthetic oligonucleotide
ccgucuucgugagacgcuc

SEQ ID NO: 2124869 - RNA, 19 nt, Artificial Sequence
  Description of Artificial Sequence: Synthetic oligonucleotide
cagcgcggcgcuggguuug

SEQ ID NO: 2124870 - RNA, 19 nt, Artificial Sequence
  Description of Artificial Sequence: Synthetic oligonucleotide
gacgcucaauugucugguu

SEQ ID NO: 2124871 - RNA, 19 nt, Artificial Sequence
  Description of Artificial Sequence: Synthetic oligonucleotide
gacggcugacuccgcgccu

SEQ ID NO: 2124872 - RNA, 19 nt, Artificial Sequence
  Description of Artificial Sequence: Synthetic oligonucleotide
cgcggcgcuggguuugacg

SEQ ID NO: 2124873 - RNA, 19 nt, Artificial Sequence
  Description of Artificial Sequence: Synthetic oligonucleotide
ccuugccgccugcagccgc

SEQ ID NO: 2124874 - RNA, 19 nt, Artificial Sequence
  Description of Artificial Sequence: Synthetic oligonucleotide
cccgaaguggggagggaga

SEQ ID NO: 2124875 - RNA, 19 nt, Artificial Sequence
  Description of Artificial Sequence: Synthetic oligonucleotide
caggcucgguacugcucca

SEQ ID NO: 2124876 - RNA, 19 nt, Artificial Sequence
  Description of Artificial Sequence: Synthetic oligonucleotide
gccggggcagcuguccgcc

SEQ ID NO: 2124877 - RNA, 19 nt, Artificial Sequence
  Description of Artificial Sequence: Synthetic oligonucleotide
ggccggggcagcuguccgc

SEQ ID NO: 2124878 - RNA, 19 nt, Artificial Sequence
  Description of Artificial Sequence: Synthetic oligonucleotide
gccugugucuguccggccu

SEQ ID NO: 2124879 - RNA, 19 nt, Artificial Sequence
  Description of Artificial Sequence: Synthetic oligonucleotide
gccgccucuuccgcgcccg

SEQ ID NO: 2124880 - RNA, 19 nt, Artificial Sequence
  Description of Artificial Sequence: Synthetic oligonucleotide
gggcgggccgcugagccac

SEQ ID NO: 2124881 - RNA, 19 nt, Artificial Sequence
  Description of Artificial Sequence: Synthetic oligonucleotide
cagccgccagccacuggca

SEQ ID NO: 2124882 - RNA, 19 nt, Artificial Sequence
  Description of Artificial Sequence: Synthetic oligonucleotide
cgcucaauugucugguucu

SEQ ID NO: 2124883 - RNA, 19 nt, Artificial Sequence
  Description of Artificial Sequence: Synthetic oligonucleotide
gcgcaccaugggcguaggg

SEQ ID NO: 2124884 - RNA, 19 nt, Artificial Sequence
  Description of Artificial Sequence: Synthetic oligonucleotide
caccgccgcgggugcgggg

SEQ ID NO: 2124885 - RNA, 19 nt, Artificial Sequence
  Description of Artificial Sequence: Synthetic oligonucleotide
gccggggacagagcagcgc

SEQ ID NO: 2124886 - RNA, 19 nt, Artificial Sequence
  Description of Artificial Sequence: Synthetic oligonucleotide
cgcuggguuugacggggcg

SEQ ID NO: 2124887 - RNA, 19 nt, Artificial Sequence
  Description of Artificial Sequence: Synthetic oligonucleotide
cgcaguaagcagccgcuca

SEQ ID NO: 2124888 - RNA, 19 nt, Artificial Sequence
  Description of Artificial Sequence: Synthetic oligonucleotide
gcguaacgacguggguggg

SEQ ID NO: 2124889 - RNA, 19 nt, Artificial Sequence
  Description of Artificial Sequence: Synthetic oligonucleotide
cggggcgggccgcugagcc

SEQ ID NO: 2124890 - RNA, 19 nt, Artificial Sequence
  Description of Artificial Sequence: Synthetic oligonucleotide
gggcccucagguccaccca

SEQ ID NO: 2124891 - RNA, 19 nt, Artificial Sequence
  Description of Artificial Sequence: Synthetic oligonucleotide
ggacagcguggagcccugg

SEQ ID NO: 2124892 - RNA, 19 nt, Artificial Sequence
  Description of Artificial Sequence: Synthetic oligonucleotide
ggcucgcugucucgcagua

SEQ ID NO: 2124893 - RNA, 19 nt, Artificial Sequence
  Description of Artificial Sequence: Synthetic oligonucleotide
gcgccuucuggagcagggc

SEQ ID NO: 2124894 - RNA, 19 nt, Artificial Sequence
  Description of Artificial Sequence: Synthetic oligonucleotide
gugcgggaacaggcguaac

SEQ ID NO: 2124895 - RNA, 19 nt, Artificial Sequence
  Description of Artificial Sequence: Synthetic oligonucleotide
agcgcggcgcuggguuuga

SEQ ID NO: 2124896 - RNA, 19 nt, Artificial Sequence
  Description of Artificial Sequence: Synthetic oligonucleotide
ucggcccgccuugccgccu

SEQ ID NO: 2124897 - RNA, 19 nt, Artificial Sequence
  Description of Artificial Sequence: Synthetic oligonucleotide
gcguggagcccugggcccc

SEQ ID NO: 2124898 - RNA, 19 nt, Artificial Sequence
  Description of Artificial Sequence: Synthetic oligonucleotide
gucuguccggccuccucuu

SEQ ID NO: 2124899 - RNA, 19 nt, Artificial Sequence
  Description of Artificial Sequence: Synthetic oligonucleotide
guagcgcaccaugggcgua

SEQ ID NO: 2124900 - RNA, 19 nt, Artificial Sequence
  Description of Artificial Sequence: Synthetic oligonucleotide
cuuccugaugaugcuucuu

SEQ ID NO: 2124901 - RNA, 19 nt, Artificial Sequence
  Description of Artificial Sequence: Synthetic oligonucleotide
cccaggaccuguccaccca

SEQ ID NO: 2124902 - RNA, 19 nt, Artificial Sequence
  Description of Artificial Sequence: Synthetic oligonucleotide
gccuugccgccugcagccg

SEQ ID NO: 2124903 - RNA, 19 nt, Artificial Sequence
  Description of Artificial Sequence: Synthetic oligonucleotide
gcacugcaggcuacagaga

SEQ ID NO: 2124904 - RNA, 19 nt, Artificial Sequence
  Description of Artificial Sequence: Synthetic oligonucleotide
gcccguuccucgcguuuca

SEQ ID NO: 2124905 - RNA, 19 nt, Artificial Sequence
  Description of Artificial Sequence: Synthetic oligonucleotide
ccuccgcguccgcugggag

SEQ ID NO: 2124906 - RNA, 19 nt, Artificial Sequence
  Description of Artificial Sequence: Synthetic oligonucleotide
guccacccagcuugauuuu

SEQ ID NO: 2124907 - RNA, 19 nt, Artificial Sequence
  Description of Artificial Sequence: Synthetic oligonucleotide
cggcgcuggguuugacggg

SEQ ID NO: 2124908 - RNA, 19 nt, Artificial Sequence
  Description of Artificial Sequence: Synthetic oligonucleotide
ccaugggcguaggggccgg

SEQ ID NO: 2124909 - RNA, 19 nt, Artificial Sequence
  Description of Artificial Sequence: Synthetic oligonucleotide
cccacgcccuccgcguccg

SEQ ID NO: 2124910 - RNA, 19 nt, Artificial Sequence
  Description of Artificial Sequence: Synthetic oligonucleotide
gcucgccccgcgccgcccc

SEQ ID NO: 2124911 - RNA, 19 nt, Artificial Sequence
  Description of Artificial Sequence: Synthetic oligonucleotide
cgcguuucagcagcaucuc

SEQ ID NO: 2124912 - RNA, 19 nt, Artificial Sequence
  Description of Artificial Sequence: Synthetic oligonucleotide
cgguagcacugcaggcuac

SEQ ID NO: 2124913 - RNA, 19 nt, Artificial Sequence
  Description of Artificial Sequence: Synthetic oligonucleotide
cccguuccucgcguuucag

SEQ ID NO: 2124914 - RNA, 19 nt, Artificial Sequence
  Description of Artificial Sequence: Synthetic oligonucleotide
gcccuccgcguccgcuggg

SEQ ID NO: 2124915 - RNA, 19 nt, Artificial Sequence
  Description of Artificial Sequence: Synthetic oligonucleotide
cggccgucuucgugagacg

SEQ ID NO: 2124916 - RNA, 19 nt, Artificial Sequence
  Description of Artificial Sequence: Synthetic oligonucleotide
cguccgcugggagcggccg

SEQ ID NO: 2124917 - RNA, 19 nt, Artificial Sequence
  Description of Artificial Sequence: Synthetic oligonucleotide
guccgcugggagcggccgu

SEQ ID NO: 2124918 - RNA, 19 nt, Artificial Sequence
  Description of Artificial Sequence: Synthetic oligonucleotide
cgucuucgugagacgcuca

SEQ ID NO: 2124919 - RNA, 19 nt, Artificial Sequence
  Description of Artificial Sequence: Synthetic oligonucleotide
gcguccgcugggagcggcc

SEQ ID NO: 2124920 - RNA, 19 nt, Artificial Sequence
  Description of Artificial Sequence: Synthetic oligonucleotide
gcucaauugucugguucuu

SEQ ID NO: 2124921 - RNA, 19 nt, Artificial Sequence
  Description of Artificial Sequence: Synthetic oligonucleotide
ccgcgccuucuggagcagg

SEQ ID NO: 2124922 - RNA, 19 nt, Artificial Sequence
  Description of Artificial Sequence: Synthetic oligonucleotide
ccagauccccuggcagguc

SEQ ID NO: 2124923 - RNA, 19 nt, Artificial Sequence
  Description of Artificial Sequence: Synthetic oligonucleotide
gcgcuggguuugacggggc

SEQ ID NO: 2124924 - RNA, 19 nt, Artificial Sequence
  Description of Artificial Sequence: Synthetic oligonucleotide
gugcuccucggcccgccuu

SEQ ID NO: 2124925 - RNA, 19 nt, Artificial Sequence
  Description of Artificial Sequence: Synthetic oligonucleotide
ccacaaccaucaggggaga

SEQ ID NO: 2124926 - RNA, 19 nt, Artificial Sequence
  Description of Artificial Sequence: Synthetic oligonucleotide
ccggggcagcuguccgccc

SEQ ID NO: 2124927 - RNA, 19 nt, Artificial Sequence
  Description of Artificial Sequence: Synthetic oligonucleotide
ccaccgccgcgggugcggg

SEQ ID NO: 2124928 - RNA, 19 nt, Artificial Sequence
  Description of Artificial Sequence: Synthetic oligonucleotide
cugagccaccgccgcgggu

SEQ ID NO: 2124929 - RNA, 19 nt, Artificial Sequence
  Description of Artificial Sequence: Synthetic oligonucleotide
cucgccccgcgccgcccca

SEQ ID NO: 2124930 - RNA, 19 nt, Artificial Sequence
  Description of Artificial Sequence: Synthetic oligonucleotide
gcguaggggccggggcagc

SEQ ID NO: 2124931 - RNA, 19 nt, Artificial Sequence
  Description of Artificial Sequence: Synthetic oligonucleotide
gccccacgcccuccgcguc

SEQ ID NO: 2124932 - RNA, 19 nt, Artificial Sequence
  Description of Artificial Sequence: Synthetic oligonucleotide
ggcccgccuugccgccugc

SEQ ID NO: 2124933 - RNA, 19 nt, Artificial Sequence
  Description of Artificial Sequence: Synthetic oligonucleotide
gagcagcgcggcgcugggu

SEQ ID NO: 2124934 - RNA, 19 nt, Artificial Sequence
  Description of Artificial Sequence: Synthetic oligonucleotide
cacgcccuccgcguccgcu

SEQ ID NO: 2124935 - RNA, 19 nt, Artificial Sequence
  Description of Artificial Sequence: Synthetic oligonucleotide
gggcuuggcaggagccugu

SEQ ID NO: 2124936 - RNA, 19 nt, Artificial Sequence
  Description of Artificial Sequence: Synthetic oligonucleotide
gcucgcugucucgcaguaa

SEQ ID NO: 2124937 - RNA, 19 nt, Artificial Sequence
  Description of Artificial Sequence: Synthetic oligonucleotide
cgcccguuccucgcguuuc

SEQ ID NO: 2124938 - RNA, 19 nt, Artificial Sequence
  Description of Artificial Sequence: Synthetic oligonucleotide
gccccucagggaucacagu

SEQ ID NO: 2124939 - RNA, 19 nt, Artificial Sequence
  Description of Artificial Sequence: Synthetic oligonucleotide
ccggugcgggaacaggcgu

SEQ ID NO: 2124940 - RNA, 19 nt, Artificial Sequence
  Description of Artificial Sequence: Synthetic oligonucleotide
cgggccgcugagccaccgc

SEQ ID NO: 2124941 - RNA, 19 nt, Artificial Sequence
  Description of Artificial Sequence: Synthetic oligonucleotide
ccuggccggugcgggaaca

SEQ ID NO: 2124942 - RNA, 19 nt, Artificial Sequence
  Description of Artificial Sequence: Synthetic oligonucleotide
cgggaggaaaggacagcgu

SEQ ID NO: 2124943 - RNA, 19 nt, Artificial Sequence
  Description of Artificial Sequence: Synthetic oligonucleotide
cggugcgggaacaggcgua

SEQ ID NO: 2124944 - RNA, 19 nt, Artificial Sequence
  Description of Artificial Sequence: Synthetic oligonucleotide
ggcgggccgcugagccacc

SEQ ID NO: 2124945 - RNA, 19 nt, Artificial Sequence
  Description of Artificial Sequence: Synthetic oligonucleotide
ccgcugcuguagcgcacca

SEQ ID NO: 2124946 - RNA, 19 nt, Artificial Sequence
  Description of Artificial Sequence: Synthetic oligonucleotide
cccuccgcguccgcuggga

SEQ ID NO: 2124947 - RNA, 19 nt, Artificial Sequence
  Description of Artificial Sequence: Synthetic oligonucleotide
gcagcgcggcgcuggguuu

SEQ ID NO: 2124948 - RNA, 19 nt, Artificial Sequence
  Description of Artificial Sequence: Synthetic oligonucleotide
ccguggcugugagcaccug

SEQ ID NO: 2124949 - RNA, 19 nt, Artificial Sequence
  Description of Artificial Sequence: Synthetic oligonucleotide
gccgcucaucgaucuccuu

SEQ ID NO: 2124950 - RNA, 19 nt, Artificial Sequence
  Description of Artificial Sequence: Synthetic oligonucleotide
gcgcccguuccucgcguuu

SEQ ID NO: 2124951 - RNA, 19 nt, Artificial Sequence
  Description of Artificial Sequence: Synthetic oligonucleotide
cgcgccgccccacgcccuc

SEQ ID NO: 2124952 - RNA, 19 nt, Artificial Sequence
  Description of Artificial Sequence: Synthetic oligonucleotide
ccgcguccgcugggagcgg

SEQ ID NO: 2124953 - RNA, 19 nt, Artificial Sequence
  Description of Artificial Sequence: Synthetic oligonucleotide
cgccccacgcccuccgcgu

SEQ ID NO: 2124954 - RNA, 19 nt, Artificial Sequence
  Description of Artificial Sequence: Synthetic oligonucleotide
gcgcggcgcuggguuugac

SEQ ID NO: 2124955 - RNA, 19 nt, Artificial Sequence
  Description of Artificial Sequence: Synthetic oligonucleotide
ccucgcguuucagcagcau

SEQ ID NO: 2124956 - RNA, 19 nt, Artificial Sequence
  Description of Artificial Sequence: Synthetic oligonucleotide
ccuguccacccagcuugau

SEQ ID NO: 2124957 - RNA, 19 nt, Artificial Sequence
  Description of Artificial Sequence: Synthetic oligonucleotide
ccgcgcccguuccucgcgu

SEQ ID NO: 2124958 - RNA, 19 nt, Artificial Sequence
  Description of Artificial Sequence: Synthetic oligonucleotide
ccgcugggagcggccgucu

SEQ ID NO: 2124959 - RNA, 19 nt, Artificial Sequence
  Description of Artificial Sequence: Synthetic oligonucleotide
cgcgcccguuccucgcguu

SEQ ID NO: 2124960 - RNA, 19 nt, Artificial Sequence
  Description of Artificial Sequence: Synthetic oligonucleotide
auuuaaaucauacauuugg

SEQ ID NO: 2124961 - RNA, 19 nt, Artificial Sequence
  Description of Artificial Sequence: Synthetic oligonucleotide
aaaucauaaaccucuagcg

SEQ ID NO: 2124962 - RNA, 19 nt, Artificial Sequence
  Description of Artificial Sequence: Synthetic oligonucleotide
aaucauaaaccucuagcgc

SEQ ID NO: 2124963 - RNA, 19 nt, Artificial Sequence
  Description of Artificial Sequence: Synthetic oligonucleotide
aauaguaacaucuuacaca

SEQ ID NO: 2124964 - RNA, 19 nt, Artificial Sequence
  Description of Artificial Sequence: Synthetic oligonucleotide
ugaaguuuuacucuuaagc

SEQ ID NO: 2124965 - RNA, 19 nt, Artificial Sequence
  Description of Artificial Sequence: Synthetic oligonucleotide
aaaucauacauuugggcac

SEQ ID NO: 2124966 - RNA, 19 nt, Artificial Sequence
  Description of Artificial Sequence: Synthetic oligonucleotide
aaauaguaacaucuuacac

SEQ ID NO: 2124967 - RNA, 19 nt, Artificial Sequence
  Description of Artificial Sequence: Synthetic oligonucleotide
aaguauuaggcuuuucugg

SEQ ID NO: 2124968 - RNA, 19 nt, Artificial Sequence
  Description of Artificial Sequence: Synthetic oligonucleotide
aaguuuuacucuuaagcac

SEQ ID NO: 2124969 - RNA, 19 nt, Artificial Sequence
  Description of Artificial Sequence: Synthetic oligonucleotide
aaacgauugauuaaaaguc

SEQ ID NO: 2124970 - RNA, 19 nt, Artificial Sequence
  Description of Artificial Sequence: Synthetic oligonucleotide
uuuaaaucauacauuuggg

SEQ ID NO: 2124971 - RNA, 19 nt, Artificial Sequence
  Description of Artificial Sequence: Synthetic oligonucleotide
aaaacaaguaacgcgaagg

SEQ ID NO: 2124972 - RNA, 19 nt, Artificial Sequence
  Description of Artificial Sequence: Synthetic oligonucleotide
cauuacaagaaucaugucg

SEQ ID NO: 2124973 - RNA, 19 nt, Artificial Sequence
  Description of Artificial Sequence: Synthetic oligonucleotide
acaucuuacacauaauaac

SEQ ID NO: 2124974 - RNA, 19 nt, Artificial Sequence
  Description of Artificial Sequence: Synthetic oligonucleotide
uuaagcacaauccaauaag

SEQ ID NO: 2124975 - RNA, 19 nt, Artificial Sequence
  Description of Artificial Sequence: Synthetic oligonucleotide
acauauucaacaugugucc

SEQ ID NO: 2124976 - RNA, 19 nt, Artificial Sequence
  Description of Artificial Sequence: Synthetic oligonucleotide
auuuaaacagaucaaacga

SEQ ID NO: 2124977 - RNA, 19 nt, Artificial Sequence
  Description of Artificial Sequence: Synthetic oligonucleotide
aacaauuagguucuaccuc

SEQ ID NO: 2124978 - RNA, 19 nt, Artificial Sequence
  Description of Artificial Sequence: Synthetic oligonucleotide
uaaaucauacauuugggca

SEQ ID NO: 2124979 - RNA, 19 nt, Artificial Sequence
  Description of Artificial Sequence: Synthetic oligonucleotide
gucguauuuauuuagaaug

SEQ ID NO: 2124980 - RNA, 19 nt, Artificial Sequence
  Description of Artificial Sequence: Synthetic oligonucleotide
uuauuuagaaugaugauuu

SEQ ID NO: 2124981 - RNA, 19 nt, Artificial Sequence
  Description of Artificial Sequence: Synthetic oligonucleotide
uguguaaagguuuagggga

SEQ ID NO: 2124982 - RNA, 19 nt, Artificial Sequence
  Description of Artificial Sequence: Synthetic oligonucleotide
aauaaaccaagacaugugu

SEQ ID NO: 2124983 - RNA, 19 nt, Artificial Sequence
  Description of Artificial Sequence: Synthetic oligonucleotide
gauaguucggaucaaauca

SEQ ID NO: 2124984 - RNA, 19 nt, Artificial Sequence
  Description of Artificial Sequence: Synthetic oligonucleotide
uccaacuuguguuuaaacg

SEQ ID NO: 2124985 - RNA, 19 nt, Artificial Sequence
  Description of Artificial Sequence: Synthetic oligonucleotide
acucaaaacaaguaacgcg

SEQ ID NO: 2124986 - RNA, 19 nt, Artificial Sequence
  Description of Artificial Sequence: Synthetic oligonucleotide
aauccugagaauguuacuc

SEQ ID NO: 2124987 - RNA, 19 nt, Artificial Sequence
  Description of Artificial Sequence: Synthetic oligonucleotide
uacauauucaacauguguc

SEQ ID NO: 2124988 - RNA, 19 nt, Artificial Sequence
  Description of Artificial Sequence: Synthetic oligonucleotide
uuaaaucauacauuugggc

SEQ ID NO: 2124989 - RNA, 19 nt, Artificial Sequence
  Description of Artificial Sequence: Synthetic oligonucleotide
ugaacaauuagguucuacc

SEQ ID NO: 2124990 - RNA, 19 nt, Artificial Sequence
  Description of Artificial Sequence: Synthetic oligonucleotide
acaaguaacgcgaaggacc

SEQ ID NO: 2124991 - RNA, 19 nt, Artificial Sequence
  Description of Artificial Sequence: Synthetic oligonucleotide
aagucauuggcucuuaaga

SEQ ID NO: 2124992 - RNA, 19 nt, Artificial Sequence
  Description of Artificial Sequence: Synthetic oligonucleotide
ucauuggcucuuaagacgg

SEQ ID NO: 2124993 - RNA, 19 nt, Artificial Sequence
  Description of Artificial Sequence: Synthetic oligonucleotide
ucuaccucaucacugaagc

SEQ ID NO: 2124994 - RNA, 19 nt, Artificial Sequence
  Description of Artificial Sequence: Synthetic oligonucleotide
aagcaguuguaucagaaug

SEQ ID NO: 2124995 - RNA, 19 nt, Artificial Sequence
  Description of Artificial Sequence: Synthetic oligonucleotide
caaaucauaaaccucuagc

SEQ ID NO: 2124996 - RNA, 19 nt, Artificial Sequence
  Description of Artificial Sequence: Synthetic oligonucleotide
aguaacaucuuacacauaa

SEQ ID NO: 2124997 - RNA, 19 nt, Artificial Sequence
  Description of Artificial Sequence: Synthetic oligonucleotide
guuuaaacggcagacaccg

SEQ ID NO: 2124998 - RNA, 19 nt, Artificial Sequence
  Description of Artificial Sequence: Synthetic oligonucleotide
cauguguaaagguuuaggg

SEQ ID NO: 2124999 - RNA, 19 nt, Artificial Sequence
  Description of Artificial Sequence: Synthetic oligonucleotide
aaccaaauagucuucuuca

SEQ ID NO: 2125000 - RNA, 19 nt, Artificial Sequence
  Description of Artificial Sequence: Synthetic oligonucleotide
ucagucaggcucaaggacg

SEQ ID NO: 2125001 - RNA, 19 nt, Artificial Sequence
  Description of Artificial Sequence: Synthetic oligonucleotide
auguguaaagguuuagggg

SEQ ID NO: 2125002 - RNA, 19 nt, Artificial Sequence
  Description of Artificial Sequence: Synthetic oligonucleotide
auaagaguugccaaagagc

SEQ ID NO: 2125003 - RNA, 19 nt, Artificial Sequence
  Description of Artificial Sequence: Synthetic oligonucleotide
ggagcuaugaacuuccugg

SEQ ID NO: 2125004 - RNA, 19 nt, Artificial Sequence
  Description of Artificial Sequence: Synthetic oligonucleotide
uaaacagaucaaacgauug

SEQ ID NO: 2125005 - RNA, 19 nt, Artificial Sequence
  Description of Artificial Sequence: Synthetic oligonucleotide
guuggugugaacuugauaa

SEQ ID NO: 2125006 - RNA, 19 nt, Artificial Sequence
  Description of Artificial Sequence: Synthetic oligonucleotide
agucauuggcucuuaagac

SEQ ID NO: 2125007 - RNA, 19 nt, Artificial Sequence
  Description of Artificial Sequence: Synthetic oligonucleotide
aauguagauuuccaacuug

SEQ ID NO: 2125008 - RNA, 19 nt, Artificial Sequence
  Description of Artificial Sequence: Synthetic oligonucleotide
ugaaccuccacacaacucu

SEQ ID NO: 2125009 - RNA, 19 nt, Artificial Sequence
  Description of Artificial Sequence: Synthetic oligonucleotide
aagacggucucagucaggc

SEQ ID NO: 2125010 - RNA, 19 nt, Artificial Sequence
  Description of Artificial Sequence: Synthetic oligonucleotide
ucggaucaaaucauaaacc

SEQ ID NO: 2125011 - RNA, 19 nt, Artificial Sequence
  Description of Artificial Sequence: Synthetic oligonucleotide
ucaaacgauugauuaaaag

SEQ ID NO: 2125012 - RNA, 19 nt, Artificial Sequence
  Description of Artificial Sequence: Synthetic oligonucleotide
aguuguaucagaaugguca

SEQ ID NO: 2125013 - RNA, 19 nt, Artificial Sequence
  Description of Artificial Sequence: Synthetic oligonucleotide
uuuaaacagaucaaacgau

SEQ ID NO: 2125014 - RNA, 19 nt, Artificial Sequence
  Description of Artificial Sequence: Synthetic oligonucleotide
uacauuugggcacaguaga

SEQ ID NO: 2125015 - RNA, 19 nt, Artificial Sequence
  Description of Artificial Sequence: Synthetic oligonucleotide
aauccaauaagaguugcca

SEQ ID NO: 2125016 - RNA, 19 nt, Artificial Sequence
  Description of Artificial Sequence: Synthetic oligonucleotide
uuuauuuagaaugaugauu

SEQ ID NO: 2125017 - RNA, 19 nt, Artificial Sequence
  Description of Artificial Sequence: Synthetic oligonucleotide
ugucugaucacuuggauua

SEQ ID NO: 2125018 - RNA, 19 nt, Artificial Sequence
  Description of Artificial Sequence: Synthetic oligonucleotide
uguaucagaauggucauca

SEQ ID NO: 2125019 - RNA, 19 nt, Artificial Sequence
  Description of Artificial Sequence: Synthetic oligonucleotide
agauuuaaacagaucaaac

SEQ ID NO: 2125020 - RNA, 19 nt, Artificial Sequence
  Description of Artificial Sequence: Synthetic oligonucleotide
agugaguuccuucagaaau

SEQ ID NO: 2125021 - RNA, 19 nt, Artificial Sequence
  Description of Artificial Sequence: Synthetic oligonucleotide
ucuuaagacggucucaguc

SEQ ID NO: 2125022 - RNA, 19 nt, Artificial Sequence
  Description of Artificial Sequence: Synthetic oligonucleotide
gucauuggcucuuaagacg

SEQ ID NO: 2125023 - RNA, 19 nt, Artificial Sequence
  Description of Artificial Sequence: Synthetic oligonucleotide
guacaaaucaccuacauau

SEQ ID NO: 2125024 - RNA, 19 nt, Artificial Sequence
  Description of Artificial Sequence: Synthetic oligonucleotide
uuaaacggcagacaccgcu

SEQ ID NO: 2125025 - RNA, 19 nt, Artificial Sequence
  Description of Artificial Sequence: Synthetic oligonucleotide
auuacaagaaucaugucgu

SEQ ID NO: 2125026 - RNA, 19 nt, Artificial Sequence
  Description of Artificial Sequence: Synthetic oligonucleotide
uagauuuccaacuuguguu

SEQ ID NO: 2125027 - RNA, 19 nt, Artificial Sequence
  Description of Artificial Sequence: Synthetic oligonucleotide
uggauuagaaauccugaga

SEQ ID NO: 2125028 - RNA, 19 nt, Artificial Sequence
  Description of Artificial Sequence: Synthetic oligonucleotide
ucuuccaugauccggggcu

SEQ ID NO: 2125029 - RNA, 19 nt, Artificial Sequence
  Description of Artificial Sequence: Synthetic oligonucleotide
cucaaaacaaguaacgcga

SEQ ID NO: 2125030 - RNA, 19 nt, Artificial Sequence
  Description of Artificial Sequence: Synthetic oligonucleotide
ucaugucguauuuauuuag

SEQ ID NO: 2125031 - RNA, 19 nt, Artificial Sequence
  Description of Artificial Sequence: Synthetic oligonucleotide
agcacaauccaauaagagu

SEQ ID NO: 2125032 - RNA, 19 nt, Artificial Sequence
  Description of Artificial Sequence: Synthetic oligonucleotide
uuacucucugaacaauuag

SEQ ID NO: 2125033 - RNA, 19 nt, Artificial Sequence
  Description of Artificial Sequence: Synthetic oligonucleotide
aaauaaaccaagacaugug

SEQ ID NO: 2125034 - RNA, 19 nt, Artificial Sequence
  Description of Artificial Sequence: Synthetic oligonucleotide
uuaaacagaucaaacgauu

SEQ ID NO: 2125035 - RNA, 19 nt, Artificial Sequence
  Description of Artificial Sequence: Synthetic oligonucleotide
aaaucaccuacauauucaa

SEQ ID NO: 2125036 - RNA, 19 nt, Artificial Sequence
  Description of Artificial Sequence: Synthetic oligonucleotide
uguuuaaacggcagacacc

SEQ ID NO: 2125037 - RNA, 19 nt, Artificial Sequence
  Description of Artificial Sequence: Synthetic oligonucleotide
aaagccugagagccauagc

SEQ ID NO: 2125038 - RNA, 19 nt, Artificial Sequence
  Description of Artificial Sequence: Synthetic oligonucleotide
uguugagugaguuccuuca

SEQ ID NO: 2125039 - RNA, 19 nt, Artificial Sequence
  Description of Artificial Sequence: Synthetic oligonucleotide
aucacugaagccugcacag

SEQ ID NO: 2125040 - RNA, 19 nt, Artificial Sequence
  Description of Artificial Sequence: Synthetic oligonucleotide
aauuagguucuaccucauc

SEQ ID NO: 2125041 - RNA, 19 nt, Artificial Sequence
  Description of Artificial Sequence: Synthetic oligonucleotide
aacaucuuacacauaauaa

SEQ ID NO: 2125042 - RNA, 19 nt, Artificial Sequence
  Description of Artificial Sequence: Synthetic oligonucleotide
gaucacuuggauuagaaau

SEQ ID NO: 2125043 - RNA, 19 nt, Artificial Sequence
  Description of Artificial Sequence: Synthetic oligonucleotide
cauagcacccugcucagcg

SEQ ID NO: 2125044 - RNA, 19 nt, Artificial Sequence
  Description of Artificial Sequence: Synthetic oligonucleotide
caacuuguguuuaaacggc

SEQ ID NO: 2125045 - RNA, 19 nt, Artificial Sequence
  Description of Artificial Sequence: Synthetic oligonucleotide
ucaacauguguccucuaca

SEQ ID NO: 2125046 - RNA, 19 nt, Artificial Sequence
  Description of Artificial Sequence: Synthetic oligonucleotide
agccauagcacccugcuca

SEQ ID NO: 2125047 - RNA, 19 nt, Artificial Sequence
  Description of Artificial Sequence: Synthetic oligonucleotide
cucaaggacgcacuguucc

SEQ ID NO: 2125048 - RNA, 19 nt, Artificial Sequence
  Description of Artificial Sequence: Synthetic oligonucleotide
aacgauugauuaaaaguca

SEQ ID NO: 2125049 - RNA, 19 nt, Artificial Sequence
  Description of Artificial Sequence: Synthetic oligonucleotide
caaacgauugauuaaaagu

SEQ ID NO: 2125050 - RNA, 19 nt, Artificial Sequence
  Description of Artificial Sequence: Synthetic oligonucleotide
gauaauaaccaaauagucu

SEQ ID NO: 2125051 - RNA, 19 nt, Artificial Sequence
  Description of Artificial Sequence: Synthetic oligonucleotide
guguuuaaacggcagacac

SEQ ID NO: 2125052 - RNA, 19 nt, Artificial Sequence
  Description of Artificial Sequence: Synthetic oligonucleotide
acaauccaauaagaguugc

SEQ ID NO: 2125053 - RNA, 19 nt, Artificial Sequence
  Description of Artificial Sequence: Synthetic oligonucleotide
agagcaaugagguacuguu

SEQ ID NO: 2125054 - RNA, 19 nt, Artificial Sequence
  Description of Artificial Sequence: Synthetic oligonucleotide
uuagguucuaccucaucac

SEQ ID NO: 2125055 - RNA, 19 nt, Artificial Sequence
  Description of Artificial Sequence: Synthetic oligonucleotide
uccguuaccacuuccaguu

SEQ ID NO: 2125056 - RNA, 19 nt, Artificial Sequence
  Description of Artificial Sequence: Synthetic oligonucleotide
aagguuuaggggaccagac

SEQ ID NO: 2125057 - RNA, 19 nt, Artificial Sequence
  Description of Artificial Sequence: Synthetic oligonucleotide
uccaauaagaguugccaaa

SEQ ID NO: 2125058 - RNA, 19 nt, Artificial Sequence
  Description of Artificial Sequence: Synthetic oligonucleotide
caugaaaagcaguuguauc

SEQ ID NO: 2125059 - RNA, 19 nt, Artificial Sequence
  Description of Artificial Sequence: Synthetic oligonucleotide
acaagaaucaugucguauu

SEQ ID NO: 2125060 - RNA, 19 nt, Artificial Sequence
  Description of Artificial Sequence: Synthetic oligonucleotide
acauguguaaagguuuagg

SEQ ID NO: 2125061 - RNA, 19 nt, Artificial Sequence
  Description of Artificial Sequence: Synthetic oligonucleotide
uauuaggcuuuucuggguc

SEQ ID NO: 2125062 - RNA, 19 nt, Artificial Sequence
  Description of Artificial Sequence: Synthetic oligonucleotide
uaacgcgaaggaccuaggg

SEQ ID NO: 2125063 - RNA, 19 nt, Artificial Sequence
  Description of Artificial Sequence: Synthetic oligonucleotide
ugagugaguuccuucagaa

SEQ ID NO: 2125064 - RNA, 19 nt, Artificial Sequence
  Description of Artificial Sequence: Synthetic oligonucleotide
ucccggauaguucggauca

SEQ ID NO: 2125065 - RNA, 19 nt, Artificial Sequence
  Description of Artificial Sequence: Synthetic oligonucleotide
agccugcacagaaagaacc

SEQ ID NO: 2125066 - RNA, 19 nt, Artificial Sequence
  Description of Artificial Sequence: Synthetic oligonucleotide
agcaguuguaucagaaugg

SEQ ID NO: 2125067 - RNA, 19 nt, Artificial Sequence
  Description of Artificial Sequence: Synthetic oligonucleotide
cuuggauuagaaauccuga

SEQ ID NO: 2125068 - RNA, 19 nt, Artificial Sequence
  Description of Artificial Sequence: Synthetic oligonucleotide
auaauaacuagaaaauauu

SEQ ID NO: 2125069 - RNA, 19 nt, Artificial Sequence
  Description of Artificial Sequence: Synthetic oligonucleotide
guagauauuugacaugaaa

SEQ ID NO: 2125070 - RNA, 19 nt, Artificial Sequence
  Description of Artificial Sequence: Synthetic oligonucleotide
uuguguuuaaacggcagac

SEQ ID NO: 2125071 - RNA, 19 nt, Artificial Sequence
  Description of Artificial Sequence: Synthetic oligonucleotide
aguaacgcgaaggaccuag

SEQ ID NO: 2125072 - RNA, 19 nt, Artificial Sequence
  Description of Artificial Sequence: Synthetic oligonucleotide
ggauuagaaauccugagaa

SEQ ID NO: 2125073 - RNA, 19 nt, Artificial Sequence
  Description of Artificial Sequence: Synthetic oligonucleotide
uaaacggcagacaccgcug

SEQ ID NO: 2125074 - RNA, 19 nt, Artificial Sequence
  Description of Artificial Sequence: Synthetic oligonucleotide
gaucaaacgauugauuaaa

SEQ ID NO: 2125075 - RNA, 19 nt, Artificial Sequence
  Description of Artificial Sequence: Synthetic oligonucleotide
uuuaggggaccagacaaca

SEQ ID NO: 2125076 - RNA, 19 nt, Artificial Sequence
  Description of Artificial Sequence: Synthetic oligonucleotide
uccuggucuucaaauaaac

SEQ ID NO: 2125077 - RNA, 19 nt, Artificial Sequence
  Description of Artificial Sequence: Synthetic oligonucleotide
aaucauacauuugggcaca

SEQ ID NO: 2125078 - RNA, 19 nt, Artificial Sequence
  Description of Artificial Sequence: Synthetic oligonucleotide
acuuggauuagaaauccug

SEQ ID NO: 2125079 - RNA, 19 nt, Artificial Sequence
  Description of Artificial Sequence: Synthetic oligonucleotide
uugagugaguuccuucaga

SEQ ID NO: 2125080 - RNA, 19 nt, Artificial Sequence
  Description of Artificial Sequence: Synthetic oligonucleotide
agaucaaacgauugauuaa

SEQ ID NO: 2125081 - RNA, 19 nt, Artificial Sequence
  Description of Artificial Sequence: Synthetic oligonucleotide
acaauuucccguagguugg

SEQ ID NO: 2125082 - RNA, 19 nt, Artificial Sequence
  Description of Artificial Sequence: Synthetic oligonucleotide
cugggucccggauaguucg

SEQ ID NO: 2125083 - RNA, 19 nt, Artificial Sequence
  Description of Artificial Sequence: Synthetic oligonucleotide
aagacauguguaaagguuu

SEQ ID NO: 2125084 - RNA, 19 nt, Artificial Sequence
  Description of Artificial Sequence: Synthetic oligonucleotide
gacggucucagucaggcuc

SEQ ID NO: 2125085 - RNA, 19 nt, Artificial Sequence
  Description of Artificial Sequence: Synthetic oligonucleotide
acaguagauauuugacaug

SEQ ID NO: 2125086 - RNA, 19 nt, Artificial Sequence
  Description of Artificial Sequence: Synthetic oligonucleotide
aaccgagccaccgucuuuc

SEQ ID NO: 2125087 - RNA, 19 nt, Artificial Sequence
  Description of Artificial Sequence: Synthetic oligonucleotide
acucgcuccauccucacgu

SEQ ID NO: 2125088 - RNA, 19 nt, Artificial Sequence
  Description of Artificial Sequence: Synthetic oligonucleotide
caauccaauaagaguugcc

SEQ ID NO: 2125089 - RNA, 19 nt, Artificial Sequence
  Description of Artificial Sequence: Synthetic oligonucleotide
ucaaaacaaguaacgcgaa

SEQ ID NO: 2125090 - RNA, 19 nt, Artificial Sequence
  Description of Artificial Sequence: Synthetic oligonucleotide
uguguuuaaacggcagaca

SEQ ID NO: 2125091 - RNA, 19 nt, Artificial Sequence
  Description of Artificial Sequence: Synthetic oligonucleotide
auacauuugggcacaguag

SEQ ID NO: 2125092 - RNA, 19 nt, Artificial Sequence
  Description of Artificial Sequence: Synthetic oligonucleotide
caaaacaaguaacgcgaag

SEQ ID NO: 2125093 - RNA, 19 nt, Artificial Sequence
  Description of Artificial Sequence: Synthetic oligonucleotide
uuaggggaccagacaacag

SEQ ID NO: 2125094 - RNA, 19 nt, Artificial Sequence
  Description of Artificial Sequence: Synthetic oligonucleotide
caucuuacacauaauaacu

SEQ ID NO: 2125095 - RNA, 19 nt, Artificial Sequence
  Description of Artificial Sequence: Synthetic oligonucleotide
ggacucaaaacaaguaacg

SEQ ID NO: 2125096 - RNA, 19 nt, Artificial Sequence
  Description of Artificial Sequence: Synthetic oligonucleotide
ucuuaagcacaauccaaua

SEQ ID NO: 2125097 - RNA, 19 nt, Artificial Sequence
  Description of Artificial Sequence: Synthetic oligonucleotide
uagguucuaccucaucacu

SEQ ID NO: 2125098 - RNA, 19 nt, Artificial Sequence
  Description of Artificial Sequence: Synthetic oligonucleotide
acgcgaaggaccuagggaa

SEQ ID NO: 2125099 - RNA, 19 nt, Artificial Sequence
  Description of Artificial Sequence: Synthetic oligonucleotide
uuggcucuuaagacggucu

SEQ ID NO: 2125100 - RNA, 19 nt, Artificial Sequence
  Description of Artificial Sequence: Synthetic oligonucleotide
agcuaugaacuuccugguc

SEQ ID NO: 2125101 - RNA, 19 nt, Artificial Sequence
  Description of Artificial Sequence: Synthetic oligonucleotide
agaguugccaaagagcaau

SEQ ID NO: 2125102 - RNA, 19 nt, Artificial Sequence
  Description of Artificial Sequence: Synthetic oligonucleotide
accuccacacaacucuccg

SEQ ID NO: 2125103 - RNA, 19 nt, Artificial Sequence
  Description of Artificial Sequence: Synthetic oligonucleotide
ccaaagagcaaugagguac

SEQ ID NO: 2125104 - RNA, 19 nt, Artificial Sequence
  Description of Artificial Sequence: Synthetic oligonucleotide
cagaucaaacgauugauua

SEQ ID NO: 2125105 - RNA, 19 nt, Artificial Sequence
  Description of Artificial Sequence: Synthetic oligonucleotide
cugaaguuuuacucuuaag

SEQ ID NO: 2125106 - RNA, 19 nt, Artificial Sequence
  Description of Artificial Sequence: Synthetic oligonucleotide
uuaaaagucauuggcucuu

SEQ ID NO: 2125107 - RNA, 19 nt, Artificial Sequence
  Description of Artificial Sequence: Synthetic oligonucleotide
aacucuccguuaccacuuc

SEQ ID NO: 2125108 - RNA, 19 nt, Artificial Sequence
  Description of Artificial Sequence: Synthetic oligonucleotide
agagccauagcacccugcu

SEQ ID NO: 2125109 - RNA, 19 nt, Artificial Sequence
  Description of Artificial Sequence: Synthetic oligonucleotide
ucauaaaccucuagcgcuu

SEQ ID NO: 2125110 - RNA, 19 nt, Artificial Sequence
  Description of Artificial Sequence: Synthetic oligonucleotide
ugaucacuuggauuagaaa

SEQ ID NO: 2125111 - RNA, 19 nt, Artificial Sequence
  Description of Artificial Sequence: Synthetic oligonucleotide
cauacauuugggcacagua

SEQ ID NO: 2125112 - RNA, 19 nt, Artificial Sequence
  Description of Artificial Sequence: Synthetic oligonucleotide
augucguauuuauuuagaa

SEQ ID NO: 2125113 - RNA, 19 nt, Artificial Sequence
  Description of Artificial Sequence: Synthetic oligonucleotide
ugaguuccuucagaaaugu

SEQ ID NO: 2125114 - RNA, 19 nt, Artificial Sequence
  Description of Artificial Sequence: Synthetic oligonucleotide
acauaauaacuagaaaaua

SEQ ID NO: 2125115 - RNA, 19 nt, Artificial Sequence
  Description of Artificial Sequence: Synthetic oligonucleotide
guagauuuccaacuugugu

SEQ ID NO: 2125116 - RNA, 19 nt, Artificial Sequence
  Description of Artificial Sequence: Synthetic oligonucleotide
cucccugcucagaaaagcc

SEQ ID NO: 2125117 - RNA, 19 nt, Artificial Sequence
  Description of Artificial Sequence: Synthetic oligonucleotide
cuuaagcacaauccaauaa

SEQ ID NO: 2125118 - RNA, 19 nt, Artificial Sequence
  Description of Artificial Sequence: Synthetic oligonucleotide
acaugaaaagcaguuguau

SEQ ID NO: 2125119 - RNA, 19 nt, Artificial Sequence
  Description of Artificial Sequence: Synthetic oligonucleotide
cucagucaggcucaaggac

SEQ ID NO: 2125120 - RNA, 19 nt, Artificial Sequence
  Description of Artificial Sequence: Synthetic oligonucleotide
aaacggcagacaccgcuga

SEQ ID NO: 2125121 - RNA, 19 nt, Artificial Sequence
  Description of Artificial Sequence: Synthetic oligonucleotide
cuggcgacugucccaaccg

SEQ ID NO: 2125122 - RNA, 19 nt, Artificial Sequence
  Description of Artificial Sequence: Synthetic oligonucleotide
caaauaaaccaagacaugu

SEQ ID NO: 2125123 - RNA, 19 nt, Artificial Sequence
  Description of Artificial Sequence: Synthetic oligonucleotide
ucaggcucaaggacgcacu

SEQ ID NO: 2125124 - RNA, 19 nt, Artificial Sequence
  Description of Artificial Sequence: Synthetic oligonucleotide
aucaugucguauuuauuua

SEQ ID NO: 2125125 - RNA, 19 nt, Artificial Sequence
  Description of Artificial Sequence: Synthetic oligonucleotide
uaaaccucuagcgcuuucu

SEQ ID NO: 2125126 - RNA, 19 nt, Artificial Sequence
  Description of Artificial Sequence: Synthetic oligonucleotide
auuggcucuuaagacgguc

SEQ ID NO: 2125127 - RNA, 19 nt, Artificial Sequence
  Description of Artificial Sequence: Synthetic oligonucleotide
ucaaggacgcacuguucca

SEQ ID NO: 2125128 - RNA, 19 nt, Artificial Sequence
  Description of Artificial Sequence: Synthetic oligonucleotide
uuccuggucuucaaauaaa

SEQ ID NO: 2125129 - RNA, 19 nt, Artificial Sequence
  Description of Artificial Sequence: Synthetic oligonucleotide
auaaaccucuagcgcuuuc

SEQ ID NO: 2125130 - RNA, 19 nt, Artificial Sequence
  Description of Artificial Sequence: Synthetic oligonucleotide
caccgcugaaguuuuacuc

SEQ ID NO: 2125131 - RNA, 19 nt, Artificial Sequence
  Description of Artificial Sequence: Synthetic oligonucleotide
agauuuccaacuuguguuu

SEQ ID NO: 2125132 - RNA, 19 nt, Artificial Sequence
  Description of Artificial Sequence: Synthetic oligonucleotide
cagaauggucaucagaaaa

SEQ ID NO: 2125133 - RNA, 19 nt, Artificial Sequence
  Description of Artificial Sequence: Synthetic oligonucleotide
ugucccaaccgagccaccg

SEQ ID NO: 2125134 - RNA, 19 nt, Artificial Sequence
  Description of Artificial Sequence: Synthetic oligonucleotide
caugucguauuuauuuaga

SEQ ID NO: 2125135 - RNA, 19 nt, Artificial Sequence
  Description of Artificial Sequence: Synthetic oligonucleotide
caugauccggggcugccgg

SEQ ID NO: 2125136 - RNA, 19 nt, Artificial Sequence
  Description of Artificial Sequence: Synthetic oligonucleotide
aacuuguguuuaaacggca

SEQ ID NO: 2125137 - RNA, 19 nt, Artificial Sequence
  Description of Artificial Sequence: Synthetic oligonucleotide
ucucuuccaugauccgggg

SEQ ID NO: 2125138 - RNA, 19 nt, Artificial Sequence
  Description of Artificial Sequence: Synthetic oligonucleotide
gguuuaggggaccagacaa

SEQ ID NO: 2125139 - RNA, 19 nt, Artificial Sequence
  Description of Artificial Sequence: Synthetic oligonucleotide
ugccacucgcucuuuguca

SEQ ID NO: 2125140 - RNA, 19 nt, Artificial Sequence
  Description of Artificial Sequence: Synthetic oligonucleotide
ggauaguucggaucaaauc

SEQ ID NO: 2125141 - RNA, 19 nt, Artificial Sequence
  Description of Artificial Sequence: Synthetic oligonucleotide
cagucaggcucaaggacgc

SEQ ID NO: 2125142 - RNA, 19 nt, Artificial Sequence
  Description of Artificial Sequence: Synthetic oligonucleotide
guguccucuacauuuuaca

SEQ ID NO: 2125143 - RNA, 19 nt, Artificial Sequence
  Description of Artificial Sequence: Synthetic oligonucleotide
uuuaaacggcagacaccgc

SEQ ID NO: 2125144 - RNA, 19 nt, Artificial Sequence
  Description of Artificial Sequence: Synthetic oligonucleotide
uguuggugugaacuugaua

SEQ ID NO: 2125145 - RNA, 19 nt, Artificial Sequence
  Description of Artificial Sequence: Synthetic oligonucleotide
uccugagaauguuacucuc

SEQ ID NO: 2125146 - RNA, 19 nt, Artificial Sequence
  Description of Artificial Sequence: Synthetic oligonucleotide
aaaauagcucugagguaca

SEQ ID NO: 2125147 - RNA, 19 nt, Artificial Sequence
  Description of Artificial Sequence: Synthetic oligonucleotide
uccugaaccuccacacaac

SEQ ID NO: 2125148 - RNA, 19 nt, Artificial Sequence
  Description of Artificial Sequence: Synthetic oligonucleotide
agaaaagccugagagccau

SEQ ID NO: 2125149 - RNA, 19 nt, Artificial Sequence
  Description of Artificial Sequence: Synthetic oligonucleotide
guaucagaauggucaucag

SEQ ID NO: 2125150 - RNA, 19 nt, Artificial Sequence
  Description of Artificial Sequence: Synthetic oligonucleotide
uuggugugaacuugauaau

SEQ ID NO: 2125151 - RNA, 19 nt, Artificial Sequence
  Description of Artificial Sequence: Synthetic oligonucleotide
agguuuaggggaccagaca

SEQ ID NO: 2125152 - RNA, 19 nt, Artificial Sequence
  Description of Artificial Sequence: Synthetic oligonucleotide
ucgcucuuugucauuuauc

SEQ ID NO: 2125153 - RNA, 19 nt, Artificial Sequence
  Description of Artificial Sequence: Synthetic oligonucleotide
uggugugaacuugauaaua

SEQ ID NO: 2125154 - RNA, 19 nt, Artificial Sequence
  Description of Artificial Sequence: Synthetic oligonucleotide
ucuagcgcuuucucuucca

SEQ ID NO: 2125155 - RNA, 19 nt, Artificial Sequence
  Description of Artificial Sequence: Synthetic oligonucleotide
gugaguuccuucagaaaug

SEQ ID NO: 2125156 - RNA, 19 nt, Artificial Sequence
  Description of Artificial Sequence: Synthetic oligonucleotide
ucugggucccggauaguuc

SEQ ID NO: 2125157 - RNA, 19 nt, Artificial Sequence
  Description of Artificial Sequence: Synthetic oligonucleotide
uccuucagaaauguagauu

SEQ ID NO: 2125158 - RNA, 19 nt, Artificial Sequence
  Description of Artificial Sequence: Synthetic oligonucleotide
cuucuaaaguauuaggcuu

SEQ ID NO: 2125159 - RNA, 19 nt, Artificial Sequence
  Description of Artificial Sequence: Synthetic oligonucleotide
ggucuucaaauaaaccaag

SEQ ID NO: 2125160 - RNA, 19 nt, Artificial Sequence
  Description of Artificial Sequence: Synthetic oligonucleotide
acuuccuggucuucaaaua

SEQ ID NO: 2125161 - RNA, 19 nt, Artificial Sequence
  Description of Artificial Sequence: Synthetic oligonucleotide
aagaaucaugucguauuua

SEQ ID NO: 2125162 - RNA, 19 nt, Artificial Sequence
  Description of Artificial Sequence: Synthetic oligonucleotide
cacacaacucuccguuacc

SEQ ID NO: 2125163 - RNA, 19 nt, Artificial Sequence
  Description of Artificial Sequence: Synthetic oligonucleotide
guccucgggagcuaugaac

SEQ ID NO: 2125164 - RNA, 19 nt, Artificial Sequence
  Description of Artificial Sequence: Synthetic oligonucleotide
gggacucaaaacaaguaac

SEQ ID NO: 2125165 - RNA, 19 nt, Artificial Sequence
  Description of Artificial Sequence: Synthetic oligonucleotide
gauuagaaauccugagaau

SEQ ID NO: 2125166 - RNA, 19 nt, Artificial Sequence
  Description of Artificial Sequence: Synthetic oligonucleotide
uggcucuuaagacggucuc

SEQ ID NO: 2125167 - RNA, 19 nt, Artificial Sequence
  Description of Artificial Sequence: Synthetic oligonucleotide
uagcgcuuucucuuccaug

SEQ ID NO: 2125168 - RNA, 19 nt, Artificial Sequence
  Description of Artificial Sequence: Synthetic oligonucleotide
auaguucggaucaaaucau

SEQ ID NO: 2125169 - RNA, 19 nt, Artificial Sequence
  Description of Artificial Sequence: Synthetic oligonucleotide
aucuuacacauaauaacua

SEQ ID NO: 2125170 - RNA, 19 nt, Artificial Sequence
  Description of Artificial Sequence: Synthetic oligonucleotide
acaccgcugaaguuuuacu

SEQ ID NO: 2125171 - RNA, 19 nt, Artificial Sequence
  Description of Artificial Sequence: Synthetic oligonucleotide
cagacaacaggcgggacuc

SEQ ID NO: 2125172 - RNA, 19 nt, Artificial Sequence
  Description of Artificial Sequence: Synthetic oligonucleotide
gcacaguagauauuugaca

SEQ ID NO: 2125173 - RNA, 19 nt, Artificial Sequence
  Description of Artificial Sequence: Synthetic oligonucleotide
uuacaagaaucaugucgua

SEQ ID NO: 2125174 - RNA, 19 nt, Artificial Sequence
  Description of Artificial Sequence: Synthetic oligonucleotide
cacaacucuccguuaccac

SEQ ID NO: 2125175 - RNA, 19 nt, Artificial Sequence
  Description of Artificial Sequence: Synthetic oligonucleotide
ccaauaagaguugccaaag

SEQ ID NO: 2125176 - RNA, 19 nt, Artificial Sequence
  Description of Artificial Sequence: Synthetic oligonucleotide
ugggcacaguagauauuug

SEQ ID NO: 2125177 - RNA, 19 nt, Artificial Sequence
  Description of Artificial Sequence: Synthetic oligonucleotide
ucuaaaguauuaggcuuuu

SEQ ID NO: 2125178 - RNA, 19 nt, Artificial Sequence
  Description of Artificial Sequence: Synthetic oligonucleotide
auaaaccaagacaugugua

SEQ ID NO: 2125179 - RNA, 19 nt, Artificial Sequence
  Description of Artificial Sequence: Synthetic oligonucleotide
cugaaccuccacacaacuc

SEQ ID NO: 2125180 - RNA, 19 nt, Artificial Sequence
  Description of Artificial Sequence: Synthetic oligonucleotide
gguacuguuggugugaacu

SEQ ID NO: 2125181 - RNA, 19 nt, Artificial Sequence
  Description of Artificial Sequence: Synthetic oligonucleotide
cugaacaauuagguucuac

SEQ ID NO: 2125182 - RNA, 19 nt, Artificial Sequence
  Description of Artificial Sequence: Synthetic oligonucleotide
caucccuggcgacuguccc

SEQ ID NO: 2125183 - RNA, 19 nt, Artificial Sequence
  Description of Artificial Sequence: Synthetic oligonucleotide
ggcacaguagauauuugac

SEQ ID NO: 2125184 - RNA, 19 nt, Artificial Sequence
  Description of Artificial Sequence: Synthetic oligonucleotide
accgucuuucugcagccgu

SEQ ID NO: 2125185 - RNA, 19 nt, Artificial Sequence
  Description of Artificial Sequence: Synthetic oligonucleotide
acgauugauuaaaagucau

SEQ ID NO: 2125186 - RNA, 19 nt, Artificial Sequence
  Description of Artificial Sequence: Synthetic oligonucleotide
gacaccgcugaaguuuuac

SEQ ID NO: 2125187 - RNA, 19 nt, Artificial Sequence
  Description of Artificial Sequence: Synthetic oligonucleotide
guguaaagguuuaggggac

SEQ ID NO: 2125188 - RNA, 19 nt, Artificial Sequence
  Description of Artificial Sequence: Synthetic oligonucleotide
aaauagcucugagguacaa

SEQ ID NO: 2125189 - RNA, 19 nt, Artificial Sequence
  Description of Artificial Sequence: Synthetic oligonucleotide
auagucuucuucauuuauu

SEQ ID NO: 2125190 - RNA, 19 nt, Artificial Sequence
  Description of Artificial Sequence: Synthetic oligonucleotide
aguugccaaagagcaauga

SEQ ID NO: 2125191 - RNA, 19 nt, Artificial Sequence
  Description of Artificial Sequence: Synthetic oligonucleotide
gcucuuaagacggucucag

SEQ ID NO: 2125192 - RNA, 19 nt, Artificial Sequence
  Description of Artificial Sequence: Synthetic oligonucleotide
caaguaacgcgaaggaccu

SEQ ID NO: 2125193 - RNA, 19 nt, Artificial Sequence
  Description of Artificial Sequence: Synthetic oligonucleotide
ucccaaccgagccaccguc

SEQ ID NO: 2125194 - RNA, 19 nt, Artificial Sequence
  Description of Artificial Sequence: Synthetic oligonucleotide
gacaugaaaagcaguugua

SEQ ID NO: 2125195 - RNA, 19 nt, Artificial Sequence
  Description of Artificial Sequence: Synthetic oligonucleotide
cucuagcgcuuucucuucc

SEQ ID NO: 2125196 - RNA, 19 nt, Artificial Sequence
  Description of Artificial Sequence: Synthetic oligonucleotide
ggaccagacaacaggcggg

SEQ ID NO: 2125197 - RNA, 19 nt, Artificial Sequence
  Description of Artificial Sequence: Synthetic oligonucleotide
ggaucaaaucauaaaccuc

SEQ ID NO: 2125198 - RNA, 19 nt, Artificial Sequence
  Description of Artificial Sequence: Synthetic oligonucleotide
ugggucccggauaguucgg

SEQ ID NO: 2125199 - RNA, 19 nt, Artificial Sequence
  Description of Artificial Sequence: Synthetic oligonucleotide
agaaauccugagaauguua

SEQ ID NO: 2125200 - RNA, 19 nt, Artificial Sequence
  Description of Artificial Sequence: Synthetic oligonucleotide
uagcacccugcucagcguc

SEQ ID NO: 2125201 - RNA, 19 nt, Artificial Sequence
  Description of Artificial Sequence: Synthetic oligonucleotide
auccucacguuccgccauc

SEQ ID NO: 2125202 - RNA, 19 nt, Artificial Sequence
  Description of Artificial Sequence: Synthetic oligonucleotide
uuucugcagccguccucgg

SEQ ID NO: 2125203 - RNA, 19 nt, Artificial Sequence
  Description of Artificial Sequence: Synthetic oligonucleotide
cucuuccaugauccggggc

SEQ ID NO: 2125204 - RNA, 19 nt, Artificial Sequence
  Description of Artificial Sequence: Synthetic oligonucleotide
gccaccgucuuucugcagc

SEQ ID NO: 2125205 - RNA, 19 nt, Artificial Sequence
  Description of Artificial Sequence: Synthetic oligonucleotide
acagaucaaacgauugauu

SEQ ID NO: 2125206 - RNA, 19 nt, Artificial Sequence
  Description of Artificial Sequence: Synthetic oligonucleotide
gagugaguuccuucagaaa

SEQ ID NO: 2125207 - RNA, 19 nt, Artificial Sequence
  Description of Artificial Sequence: Synthetic oligonucleotide
cucuccguuaccacuucca

SEQ ID NO: 2125208 - RNA, 19 nt, Artificial Sequence
  Description of Artificial Sequence: Synthetic oligonucleotide
auagcacccugcucagcgu

SEQ ID NO: 2125209 - RNA, 19 nt, Artificial Sequence
  Description of Artificial Sequence: Synthetic oligonucleotide
cacguuccgccaucccugg

SEQ ID NO: 2125210 - RNA, 19 nt, Artificial Sequence
  Description of Artificial Sequence: Synthetic oligonucleotide
uggcgacugucccaaccga

SEQ ID NO: 2125211 - RNA, 19 nt, Artificial Sequence
  Description of Artificial Sequence: Synthetic oligonucleotide
gaaugaugauuuaaaucau

SEQ ID NO: 2125212 - RNA, 19 nt, Artificial Sequence
  Description of Artificial Sequence: Synthetic oligonucleotide
gagcuaugaacuuccuggu

SEQ ID NO: 2125213 - RNA, 19 nt, Artificial Sequence
  Description of Artificial Sequence: Synthetic oligonucleotide
gcucuuugucauuuaucug

SEQ ID NO: 2125214 - RNA, 19 nt, Artificial Sequence
  Description of Artificial Sequence: Synthetic oligonucleotide
caaagagcaaugagguacu

SEQ ID NO: 2125215 - RNA, 19 nt, Artificial Sequence
  Description of Artificial Sequence: Synthetic oligonucleotide
guaacgcgaaggaccuagg

SEQ ID NO: 2125216 - RNA, 19 nt, Artificial Sequence
  Description of Artificial Sequence: Synthetic oligonucleotide
caaggacgcacuguuccac

SEQ ID NO: 2125217 - RNA, 19 nt, Artificial Sequence
  Description of Artificial Sequence: Synthetic oligonucleotide
uuguaucagaauggucauc

SEQ ID NO: 2125218 - RNA, 19 nt, Artificial Sequence
  Description of Artificial Sequence: Synthetic oligonucleotide
gacugucccaaccgagcca

SEQ ID NO: 2125219 - RNA, 19 nt, Artificial Sequence
  Description of Artificial Sequence: Synthetic oligonucleotide
ucuguugagugaguuccuu

SEQ ID NO: 2125220 - RNA, 19 nt, Artificial Sequence
  Description of Artificial Sequence: Synthetic oligonucleotide
uucugggucccggauaguu

SEQ ID NO: 2125221 - RNA, 19 nt, Artificial Sequence
  Description of Artificial Sequence: Synthetic oligonucleotide
aacggcagacaccgcugaa

SEQ ID NO: 2125222 - RNA, 19 nt, Artificial Sequence
  Description of Artificial Sequence: Synthetic oligonucleotide
gacacucgcuccauccuca

SEQ ID NO: 2125223 - RNA, 19 nt, Artificial Sequence
  Description of Artificial Sequence: Synthetic oligonucleotide
augauccggggcugccggg

SEQ ID NO: 2125224 - RNA, 19 nt, Artificial Sequence
  Description of Artificial Sequence: Synthetic oligonucleotide
ccuacauauucaacaugug

SEQ ID NO: 2125225 - RNA, 19 nt, Artificial Sequence
  Description of Artificial Sequence: Synthetic oligonucleotide
ggggcugccgggcagcucc

SEQ ID NO: 2125226 - RNA, 19 nt, Artificial Sequence
  Description of Artificial Sequence: Synthetic oligonucleotide
gagguacaaaucaccuaca

SEQ ID NO: 2125227 - RNA, 19 nt, Artificial Sequence
  Description of Artificial Sequence: Synthetic oligonucleotide
aucaaacgauugauuaaaa

SEQ ID NO: 2125228 - RNA, 19 nt, Artificial Sequence
  Description of Artificial Sequence: Synthetic oligonucleotide
gucccggauaguucggauc

SEQ ID NO: 2125229 - RNA, 19 nt, Artificial Sequence
  Description of Artificial Sequence: Synthetic oligonucleotide
gaaccuccacacaacucuc

SEQ ID NO: 2125230 - RNA, 19 nt, Artificial Sequence
  Description of Artificial Sequence: Synthetic oligonucleotide
caacaggcgggacucaaaa

SEQ ID NO: 2125231 - RNA, 19 nt, Artificial Sequence
  Description of Artificial Sequence: Synthetic oligonucleotide
guauuaggcuuuucugggu

SEQ ID NO: 2125232 - RNA, 19 nt, Artificial Sequence
  Description of Artificial Sequence: Synthetic oligonucleotide
uccaugauccggggcugcc

SEQ ID NO: 2125233 - RNA, 19 nt, Artificial Sequence
  Description of Artificial Sequence: Synthetic oligonucleotide
cugagguacaaaucaccua

SEQ ID NO: 2125234 - RNA, 19 nt, Artificial Sequence
  Description of Artificial Sequence: Synthetic oligonucleotide
cugccgggcagcucccugc

SEQ ID NO: 2125235 - RNA, 19 nt, Artificial Sequence
  Description of Artificial Sequence: Synthetic oligonucleotide
gagccaccgucuuucugca

SEQ ID NO: 2125236 - RNA, 19 nt, Artificial Sequence
  Description of Artificial Sequence: Synthetic oligonucleotide
agacauguguaaagguuua

SEQ ID NO: 2125237 - RNA, 19 nt, Artificial Sequence
  Description of Artificial Sequence: Synthetic oligonucleotide
cacucgcuccauccucacg

SEQ ID NO: 2125238 - RNA, 19 nt, Artificial Sequence
  Description of Artificial Sequence: Synthetic oligonucleotide
cuuuucugggucccggaua

SEQ ID NO: 2125239 - RNA, 19 nt, Artificial Sequence
  Description of Artificial Sequence: Synthetic oligonucleotide
aggacgcacuguuccacaa

SEQ ID NO: 2125240 - RNA, 19 nt, Artificial Sequence
  Description of Artificial Sequence: Synthetic oligonucleotide
caggcgggacucaaaacaa

SEQ ID NO: 2125241 - RNA, 19 nt, Artificial Sequence
  Description of Artificial Sequence: Synthetic oligonucleotide
caggcucaaggacgcacug

SEQ ID NO: 2125242 - RNA, 19 nt, Artificial Sequence
  Description of Artificial Sequence: Synthetic oligonucleotide
gagccauagcacccugcuc

SEQ ID NO: 2125243 - RNA, 19 nt, Artificial Sequence
  Description of Artificial Sequence: Synthetic oligonucleotide
aucaaaucauaaaccucua

SEQ ID NO: 2125244 - RNA, 19 nt, Artificial Sequence
  Description of Artificial Sequence: Synthetic oligonucleotide
uccucacguuccgccaucc

SEQ ID NO: 2125245 - RNA, 19 nt, Artificial Sequence
  Description of Artificial Sequence: Synthetic oligonucleotide
ccacacaacucuccguuac

SEQ ID NO: 2125246 - RNA, 19 nt, Artificial Sequence
  Description of Artificial Sequence: Synthetic oligonucleotide
ccggacacucgcuccaucc

SEQ ID NO: 2125247 - RNA, 19 nt, Artificial Sequence
  Description of Artificial Sequence: Synthetic oligonucleotide
agcccggacacucgcucca

SEQ ID NO: 2125248 - RNA, 19 nt, Artificial Sequence
  Description of Artificial Sequence: Synthetic oligonucleotide
cauuugggcacaguagaua

SEQ ID NO: 2125249 - RNA, 19 nt, Artificial Sequence
  Description of Artificial Sequence: Synthetic oligonucleotide
aguagauauuugacaugaa

SEQ ID NO: 2125250 - RNA, 19 nt, Artificial Sequence
  Description of Artificial Sequence: Synthetic oligonucleotide
ugcagccguccucgggagc

SEQ ID NO: 2125251 - RNA, 19 nt, Artificial Sequence
  Description of Artificial Sequence: Synthetic oligonucleotide
cauauucaacauguguccu

SEQ ID NO: 2125252 - RNA, 19 nt, Artificial Sequence
  Description of Artificial Sequence: Synthetic oligonucleotide
guuccgccaucccuggcga

SEQ ID NO: 2125253 - RNA, 19 nt, Artificial Sequence
  Description of Artificial Sequence: Synthetic oligonucleotide
aggcgggacucaaaacaag

SEQ ID NO: 2125254 - RNA, 19 nt, Artificial Sequence
  Description of Artificial Sequence: Synthetic oligonucleotide
agacggucucagucaggcu

SEQ ID NO: 2125255 - RNA, 19 nt, Artificial Sequence
  Description of Artificial Sequence: Synthetic oligonucleotide
gacaacaggcgggacucaa

SEQ ID NO: 2125256 - RNA, 19 nt, Artificial Sequence
  Description of Artificial Sequence: Synthetic oligonucleotide
agcucccugcucagaaaag

SEQ ID NO: 2125257 - RNA, 19 nt, Artificial Sequence
  Description of Artificial Sequence: Synthetic oligonucleotide
gccauagcacccugcucag

SEQ ID NO: 2125258 - RNA, 19 nt, Artificial Sequence
  Description of Artificial Sequence: Synthetic oligonucleotide
ggacacucgcuccauccuc

SEQ ID NO: 2125259 - RNA, 19 nt, Artificial Sequence
  Description of Artificial Sequence: Synthetic oligonucleotide
ccuggcgacugucccaacc

SEQ ID NO: 2125260 - RNA, 19 nt, Artificial Sequence
  Description of Artificial Sequence: Synthetic oligonucleotide
cucucugaacaauuagguu

SEQ ID NO: 2125261 - RNA, 19 nt, Artificial Sequence
  Description of Artificial Sequence: Synthetic oligonucleotide
gaaucaugucguauuuauu

SEQ ID NO: 2125262 - RNA, 19 nt, Artificial Sequence
  Description of Artificial Sequence: Synthetic oligonucleotide
ggcgacugucccaaccgag

SEQ ID NO: 2125263 - RNA, 19 nt, Artificial Sequence
  Description of Artificial Sequence: Synthetic oligonucleotide
gauccggggcugccgggca

SEQ ID NO: 2125264 - RNA, 19 nt, Artificial Sequence
  Description of Artificial Sequence: Synthetic oligonucleotide
cggaucaaaucauaaaccu

SEQ ID NO: 2125265 - RNA, 19 nt, Artificial Sequence
  Description of Artificial Sequence: Synthetic oligonucleotide
guacuguuggugugaacuu

SEQ ID NO: 2125266 - RNA, 19 nt, Artificial Sequence
  Description of Artificial Sequence: Synthetic oligonucleotide
gcgacugucccaaccgagc

SEQ ID NO: 2125267 - RNA, 19 nt, Artificial Sequence
  Description of Artificial Sequence: Synthetic oligonucleotide
ccauuacaagaaucauguc

SEQ ID NO: 2125268 - RNA, 19 nt, Artificial Sequence
  Description of Artificial Sequence: Synthetic oligonucleotide
ucccguagguugggguucu

SEQ ID NO: 2125269 - RNA, 19 nt, Artificial Sequence
  Description of Artificial Sequence: Synthetic oligonucleotide
cuccguuaccacuuccagu

SEQ ID NO: 2125270 - RNA, 19 nt, Artificial Sequence
  Description of Artificial Sequence: Synthetic oligonucleotide
ccaucccuggcgacugucc

SEQ ID NO: 2125271 - RNA, 19 nt, Artificial Sequence
  Description of Artificial Sequence: Synthetic oligonucleotide
cgacugucccaaccgagcc

SEQ ID NO: 2125272 - RNA, 19 nt, Artificial Sequence
  Description of Artificial Sequence: Synthetic oligonucleotide
caacucuccguuaccacuu

SEQ ID NO: 2125273 - RNA, 19 nt, Artificial Sequence
  Description of Artificial Sequence: Synthetic oligonucleotide
acaacaggcgggacucaaa

SEQ ID NO: 2125274 - RNA, 19 nt, Artificial Sequence
  Description of Artificial Sequence: Synthetic oligonucleotide
accgagccaccgucuuucu

SEQ ID NO: 2125275 - RNA, 19 nt, Artificial Sequence
  Description of Artificial Sequence: Synthetic oligonucleotide
acucgcucuuugucauuua

SEQ ID NO: 2125276 - RNA, 19 nt, Artificial Sequence
  Description of Artificial Sequence: Synthetic oligonucleotide
gcaguuguaucagaauggu

SEQ ID NO: 2125277 - RNA, 19 nt, Artificial Sequence
  Description of Artificial Sequence: Synthetic oligonucleotide
aaguaacgcgaaggaccua

SEQ ID NO: 2125278 - RNA, 19 nt, Artificial Sequence
  Description of Artificial Sequence: Synthetic oligonucleotide
ggcucuuaagacggucuca

SEQ ID NO: 2125279 - RNA, 19 nt, Artificial Sequence
  Description of Artificial Sequence: Synthetic oligonucleotide
ccaagacauguguaaaggu

SEQ ID NO: 2125280 - RNA, 19 nt, Artificial Sequence
  Description of Artificial Sequence: Synthetic oligonucleotide
cucgcucuuugucauuuau

SEQ ID NO: 2125281 - RNA, 19 nt, Artificial Sequence
  Description of Artificial Sequence: Synthetic oligonucleotide
cucuuaagacggucucagu

SEQ ID NO: 2125282 - RNA, 19 nt, Artificial Sequence
  Description of Artificial Sequence: Synthetic oligonucleotide
ccaugauccggggcugccg

SEQ ID NO: 2125283 - RNA, 19 nt, Artificial Sequence
  Description of Artificial Sequence: Synthetic oligonucleotide
ggcgggacucaaaacaagu

SEQ ID NO: 2125284 - RNA, 19 nt, Artificial Sequence
  Description of Artificial Sequence: Synthetic oligonucleotide
acgcacuguuccacaauuu

SEQ ID NO: 2125285 - RNA, 19 nt, Artificial Sequence
  Description of Artificial Sequence: Synthetic oligonucleotide
cgucuuucugcagccgucc

SEQ ID NO: 2125286 - RNA, 19 nt, Artificial Sequence
  Description of Artificial Sequence: Synthetic oligonucleotide
agucaggcucaaggacgca

SEQ ID NO: 2125287 - RNA, 19 nt, Artificial Sequence
  Description of Artificial Sequence: Synthetic oligonucleotide
ccgucuuucugcagccguc

SEQ ID NO: 2125288 - RNA, 19 nt, Artificial Sequence
  Description of Artificial Sequence: Synthetic oligonucleotide
cuucuucuguugagugagu

SEQ ID NO: 2125289 - RNA, 19 nt, Artificial Sequence
  Description of Artificial Sequence: Synthetic oligonucleotide
gucuuucugcagccguccu

SEQ ID NO: 2125290 - RNA, 19 nt, Artificial Sequence
  Description of Artificial Sequence: Synthetic oligonucleotide
ccucuacauuuuacaaaga

SEQ ID NO: 2125291 - RNA, 19 nt, Artificial Sequence
  Description of Artificial Sequence: Synthetic oligonucleotide
guuaccacuuccaguucuu

SEQ ID NO: 2125292 - RNA, 19 nt, Artificial Sequence
  Description of Artificial Sequence: Synthetic oligonucleotide
ccguagguugggguucucc

SEQ ID NO: 2125293 - RNA, 19 nt, Artificial Sequence
  Description of Artificial Sequence: Synthetic oligonucleotide
cuagcgcuuucucuuccau

SEQ ID NO: 2125294 - RNA, 19 nt, Artificial Sequence
  Description of Artificial Sequence: Synthetic oligonucleotide
cuuugucauuuaucugcuu

SEQ ID NO: 2125295 - RNA, 19 nt, Artificial Sequence
  Description of Artificial Sequence: Synthetic oligonucleotide
gucccaaccgagccaccgu

SEQ ID NO: 2125296 - RNA, 19 nt, Artificial Sequence
  Description of Artificial Sequence: Synthetic oligonucleotide
ccagacaacaggcgggacu

SEQ ID NO: 2125297 - RNA, 19 nt, Artificial Sequence
  Description of Artificial Sequence: Synthetic oligonucleotide
cauuggcucuuaagacggu

SEQ ID NO: 2125298 - RNA, 19 nt, Artificial Sequence
  Description of Artificial Sequence: Synthetic oligonucleotide
ccucacguuccgccauccc

SEQ ID NO: 2125299 - RNA, 19 nt, Artificial Sequence
  Description of Artificial Sequence: Synthetic oligonucleotide
cauccucacguuccgccau

SEQ ID NO: 2125300 - RNA, 19 nt, Artificial Sequence
  Description of Artificial Sequence: Synthetic oligonucleotide
gcgggacucaaaacaagua

SEQ ID NO: 2125301 - RNA, 19 nt, Artificial Sequence
  Description of Artificial Sequence: Synthetic oligonucleotide
ccacuuccaguucuucuaa

SEQ ID NO: 2125302 - RNA, 19 nt, Artificial Sequence
  Description of Artificial Sequence: Synthetic oligonucleotide
agccguccucgggagcuau

SEQ ID NO: 2125303 - RNA, 19 nt, Artificial Sequence
  Description of Artificial Sequence: Synthetic oligonucleotide
ccguuaccacuuccaguuc

SEQ ID NO: 2125304 - RNA, 19 nt, Artificial Sequence
  Description of Artificial Sequence: Synthetic oligonucleotide
ccgagccaccgucuuucug

SEQ ID NO: 2125305 - RNA, 19 nt, Artificial Sequence
  Description of Artificial Sequence: Synthetic oligonucleotide
cguuaccacuuccaguucu

SEQ ID NO: 2125306 - RNA, 19 nt, Artificial Sequence
  Description of Artificial Sequence: Synthetic oligonucleotide
cauaaaccucuagcgcuuu

SEQ ID NO: 2125307 - RNA, 19 nt, Artificial Sequence
  Description of Artificial Sequence: Synthetic oligonucleotide
gggucccggauaguucgga

SEQ ID NO: 2125308 - RNA, 19 nt, Artificial Sequence
  Description of Artificial Sequence: Synthetic oligonucleotide
ggacgcacuguuccacaau

SEQ ID NO: 2125309 - RNA, 19 nt, Artificial Sequence
  Description of Artificial Sequence: Synthetic oligonucleotide
cgauugauuaaaagucauu

SEQ ID NO: 2125310 - RNA, 19 nt, Artificial Sequence
  Description of Artificial Sequence: Synthetic oligonucleotide
ccguccucgggagcuauga

SEQ ID NO: 2125311 - RNA, 19 nt, Artificial Sequence
  Description of Artificial Sequence: Synthetic oligonucleotide
agacaccgcugaaguuuua

SEQ ID NO: 2125312 - RNA, 19 nt, Artificial Sequence
  Description of Artificial Sequence: Synthetic oligonucleotide
cucgcuccauccucacguu

SEQ ID NO: 2125313 - RNA, 19 nt, Artificial Sequence
  Description of Artificial Sequence: Synthetic oligonucleotide
ccggauaguucggaucaaa

SEQ ID NO: 2125314 - RNA, 19 nt, Artificial Sequence
  Description of Artificial Sequence: Synthetic oligonucleotide
ggcagacaccgcugaaguu

SEQ ID NO: 2125315 - RNA, 19 nt, Artificial Sequence
  Description of Artificial Sequence: Synthetic oligonucleotide
caaccgagccaccgucuuu

SEQ ID NO: 2125316 - RNA, 19 nt, Artificial Sequence
  Description of Artificial Sequence: Synthetic oligonucleotide
cgcgaaggaccuagggaaa

SEQ ID NO: 2125317 - RNA, 19 nt, Artificial Sequence
  Description of Artificial Sequence: Synthetic oligonucleotide
cccggacacucgcuccauc

SEQ ID NO: 2125318 - RNA, 19 nt, Artificial Sequence
  Description of Artificial Sequence: Synthetic oligonucleotide
cgcugaaguuuuacucuua

SEQ ID NO: 2125319 - RNA, 19 nt, Artificial Sequence
  Description of Artificial Sequence: Synthetic oligonucleotide
gccguccucgggagcuaug

SEQ ID NO: 2125320 - RNA, 19 nt, Artificial Sequence
  Description of Artificial Sequence: Synthetic oligonucleotide
cccaaccgagccaccgucu

SEQ ID NO: 2125321 - RNA, 19 nt, Artificial Sequence
  Description of Artificial Sequence: Synthetic oligonucleotide
gcgcuuucucuuccaugau

SEQ ID NO: 2125322 - RNA, 19 nt, Artificial Sequence
  Description of Artificial Sequence: Synthetic oligonucleotide
gggcugccgggcagcuccc

SEQ ID NO: 2125323 - RNA, 19 nt, Artificial Sequence
  Description of Artificial Sequence: Synthetic oligonucleotide
ccaaccgagccaccgucuu

SEQ ID NO: 2125324 - RNA, 19 nt, Artificial Sequence
  Description of Artificial Sequence: Synthetic oligonucleotide
cggacacucgcuccauccu

SEQ ID NO: 2125325 - RNA, 19 nt, Artificial Sequence
  Description of Artificial Sequence: Synthetic oligonucleotide
cagccguccucgggagcua

SEQ ID NO: 2125326 - RNA, 19 nt, Artificial Sequence
  Description of Artificial Sequence: Synthetic oligonucleotide
cccggauaguucggaucaa

SEQ ID NO: 2125327 - RNA, 19 nt, Artificial Sequence
  Description of Artificial Sequence: Synthetic oligonucleotide
cccguagguugggguucuc

SEQ ID NO: 2125328 - RNA, 19 nt, Artificial Sequence
  Description of Artificial Sequence: Synthetic oligonucleotide
cgggagcuaugaacuuccu

SEQ ID NO: 2125329 - RNA, 19 nt, Artificial Sequence
  Description of Artificial Sequence: Synthetic oligonucleotide
gcccggacacucgcuccau

SEQ ID NO: 2125330 - RNA, 19 nt, Artificial Sequence
  Description of Artificial Sequence: Synthetic oligonucleotide
cggggcugccgggcagcuc

SEQ ID NO: 2125331 - RNA, 19 nt, Artificial Sequence
  Description of Artificial Sequence: Synthetic oligonucleotide
aauaaugucauguaauucu

SEQ ID NO: 2125332 - RNA, 19 nt, Artificial Sequence
  Description of Artificial Sequence: Synthetic oligonucleotide
uuuaccaacaugcugauca

SEQ ID NO: 2125333 - RNA, 19 nt, Artificial Sequence
  Description of Artificial Sequence: Synthetic oligonucleotide
aaauccaugagagaaaagg

SEQ ID NO: 2125334 - RNA, 19 nt, Artificial Sequence
  Description of Artificial Sequence: Synthetic oligonucleotide
aaagaugguagcaacaacc

SEQ ID NO: 2125335 - RNA, 19 nt, Artificial Sequence
  Description of Artificial Sequence: Synthetic oligonucleotide
gaugaaguagguucgaugg

SEQ ID NO: 2125336 - RNA, 19 nt, Artificial Sequence
  Description of Artificial Sequence: Synthetic oligonucleotide
uuauaauuucuucagagac

SEQ ID NO: 2125337 - RNA, 19 nt, Artificial Sequence
  Description of Artificial Sequence: Synthetic oligonucleotide
aacaaagucgaucaagaag

SEQ ID NO: 2125338 - RNA, 19 nt, Artificial Sequence
  Description of Artificial Sequence: Synthetic oligonucleotide
uuuauuauuccccaaacaa

SEQ ID NO: 2125339 - RNA, 19 nt, Artificial Sequence
  Description of Artificial Sequence: Synthetic oligonucleotide
uauuauuccccaaacaagc

SEQ ID NO: 2125340 - RNA, 19 nt, Artificial Sequence
  Description of Artificial Sequence: Synthetic oligonucleotide
auauacuugagucacuugg

SEQ ID NO: 2125341 - RNA, 19 nt, Artificial Sequence
  Description of Artificial Sequence: Synthetic oligonucleotide
aagucgaucaagaagaauc

SEQ ID NO: 2125342 - RNA, 19 nt, Artificial Sequence
  Description of Artificial Sequence: Synthetic oligonucleotide
aauccaagcuucuuuagag

SEQ ID NO: 2125343 - RNA, 19 nt, Artificial Sequence
  Description of Artificial Sequence: Synthetic oligonucleotide
guagcaacaacccacagag

SEQ ID NO: 2125344 - RNA, 19 nt, Artificial Sequence
  Description of Artificial Sequence: Synthetic oligonucleotide
cuucagagcaacaacagcg

SEQ ID NO: 2125345 - RNA, 19 nt, Artificial Sequence
  Description of Artificial Sequence: Synthetic oligonucleotide
aaauuccucagauaaaaga

SEQ ID NO: 2125346 - RNA, 19 nt, Artificial Sequence
  Description of Artificial Sequence: Synthetic oligonucleotide
uucgauggcaucaauaggc

SEQ ID NO: 2125347 - RNA, 19 nt, Artificial Sequence
  Description of Artificial Sequence: Synthetic oligonucleotide
aaugauauucugaagaaca

SEQ ID NO: 2125348 - RNA, 19 nt, Artificial Sequence
  Description of Artificial Sequence: Synthetic oligonucleotide
uuauuauuccccaaacaag

SEQ ID NO: 2125349 - RNA, 19 nt, Artificial Sequence
  Description of Artificial Sequence: Synthetic oligonucleotide
gugaauauauacuugaguc

SEQ ID NO: 2125350 - RNA, 19 nt, Artificial Sequence
  Description of Artificial Sequence: Synthetic oligonucleotide
uauaauuucuucagagacc

SEQ ID NO: 2125351 - RNA, 19 nt, Artificial Sequence
  Description of Artificial Sequence: Synthetic oligonucleotide
ucagauaacggcacauugg

SEQ ID NO: 2125352 - RNA, 19 nt, Artificial Sequence
  Description of Artificial Sequence: Synthetic oligonucleotide
agaaaggaagaacauuugg

SEQ ID NO: 2125353 - RNA, 19 nt, Artificial Sequence
  Description of Artificial Sequence: Synthetic oligonucleotide
agauauuucuguauugugc

SEQ ID NO: 2125354 - RNA, 19 nt, Artificial Sequence
  Description of Artificial Sequence: Synthetic oligonucleotide
ucagauaaaagaugguagc

SEQ ID NO: 2125355 - RNA, 19 nt, Artificial Sequence
  Description of Artificial Sequence: Synthetic oligonucleotide
aguuuauuauuccccaaac

SEQ ID NO: 2125356 - RNA, 19 nt, Artificial Sequence
  Description of Artificial Sequence: Synthetic oligonucleotide
uaauaaucuuuaaugauau

SEQ ID NO: 2125357 - RNA, 19 nt, Artificial Sequence
  Description of Artificial Sequence: Synthetic oligonucleotide
ucaauaguuuauuauuccc

SEQ ID NO: 2125358 - RNA, 19 nt, Artificial Sequence
  Description of Artificial Sequence: Synthetic oligonucleotide
uucaacauauuaaaugccu

SEQ ID NO: 2125359 - RNA, 19 nt, Artificial Sequence
  Description of Artificial Sequence: Synthetic oligonucleotide
aguucauucauucuaggcu

SEQ ID NO: 2125360 - RNA, 19 nt, Artificial Sequence
  Description of Artificial Sequence: Synthetic oligonucleotide
ugacauucuugcauuacgg

SEQ ID NO: 2125361 - RNA, 19 nt, Artificial Sequence
  Description of Artificial Sequence: Synthetic oligonucleotide
gauauuucuguauugugca

SEQ ID NO: 2125362 - RNA, 19 nt, Artificial Sequence
  Description of Artificial Sequence: Synthetic oligonucleotide
cucagauaaaagaugguag

SEQ ID NO: 2125363 - RNA, 19 nt, Artificial Sequence
  Description of Artificial Sequence: Synthetic oligonucleotide
caauaguuuauuauucccc

SEQ ID NO: 2125364 - RNA, 19 nt, Artificial Sequence
  Description of Artificial Sequence: Synthetic oligonucleotide
aacucccuugacuucagac

SEQ ID NO: 2125365 - RNA, 19 nt, Artificial Sequence
  Description of Artificial Sequence: Synthetic oligonucleotide
uccucuuucagauaacggc

SEQ ID NO: 2125366 - RNA, 19 nt, Artificial Sequence
  Description of Artificial Sequence: Synthetic oligonucleotide
agaagagugauucgguggg

SEQ ID NO: 2125367 - RNA, 19 nt, Artificial Sequence
  Description of Artificial Sequence: Synthetic oligonucleotide
aacggcacauuggaaaucc

SEQ ID NO: 2125368 - RNA, 19 nt, Artificial Sequence
  Description of Artificial Sequence: Synthetic oligonucleotide
uuuagagaccuucugacau

SEQ ID NO: 2125369 - RNA, 19 nt, Artificial Sequence
  Description of Artificial Sequence: Synthetic oligonucleotide
uuucaacauauuaaaugcc

SEQ ID NO: 2125370 - RNA, 19 nt, Artificial Sequence
  Description of Artificial Sequence: Synthetic oligonucleotide
agucacuugguuugguugc

SEQ ID NO: 2125371 - RNA, 19 nt, Artificial Sequence
  Description of Artificial Sequence: Synthetic oligonucleotide
agaacagcacgauagaaga

SEQ ID NO: 2125372 - RNA, 19 nt, Artificial Sequence
  Description of Artificial Sequence: Synthetic oligonucleotide
gccauaauaaucuuuaaug

SEQ ID NO: 2125373 - RNA, 19 nt, Artificial Sequence
  Description of Artificial Sequence: Synthetic oligonucleotide
acaaagucgaucaagaaga

SEQ ID NO: 2125374 - RNA, 19 nt, Artificial Sequence
  Description of Artificial Sequence: Synthetic oligonucleotide
cuuggaugcaaauauccgc

SEQ ID NO: 2125375 - RNA, 19 nt, Artificial Sequence
  Description of Artificial Sequence: Synthetic oligonucleotide
auuauaauuucuucagaga

SEQ ID NO: 2125376 - RNA, 19 nt, Artificial Sequence
  Description of Artificial Sequence: Synthetic oligonucleotide
uguuucuaugcaaggagcc

SEQ ID NO: 2125377 - RNA, 19 nt, Artificial Sequence
  Description of Artificial Sequence: Synthetic oligonucleotide
uuuagucugguuuucaaau

SEQ ID NO: 2125378 - RNA, 19 nt, Artificial Sequence
  Description of Artificial Sequence: Synthetic oligonucleotide
aguauuuggugccagguca

SEQ ID NO: 2125379 - RNA, 19 nt, Artificial Sequence
  Description of Artificial Sequence: Synthetic oligonucleotide
uaauucugaaucagcagug

SEQ ID NO: 2125380 - RNA, 19 nt, Artificial Sequence
  Description of Artificial Sequence: Synthetic oligonucleotide
agaccuucugacauaaucc

SEQ ID NO: 2125381 - RNA, 19 nt, Artificial Sequence
  Description of Artificial Sequence: Synthetic oligonucleotide
uugcauuacggccacaaca

SEQ ID NO: 2125382 - RNA, 19 nt, Artificial Sequence
  Description of Artificial Sequence: Synthetic oligonucleotide
uucagauaacggcacauug

SEQ ID NO: 2125383 - RNA, 19 nt, Artificial Sequence
  Description of Artificial Sequence: Synthetic oligonucleotide
ucuuuagagaccuucugac

SEQ ID NO: 2125384 - RNA, 19 nt, Artificial Sequence
  Description of Artificial Sequence: Synthetic oligonucleotide
uuggaugcaaauauccgca

SEQ ID NO: 2125385 - RNA, 19 nt, Artificial Sequence
  Description of Artificial Sequence: Synthetic oligonucleotide
ucauaguaguccauuauaa

SEQ ID NO: 2125386 - RNA, 19 nt, Artificial Sequence
  Description of Artificial Sequence: Synthetic oligonucleotide
caacauauuaaaugccucc

SEQ ID NO: 2125387 - RNA, 19 nt, Artificial Sequence
  Description of Artificial Sequence: Synthetic oligonucleotide
ugaaucagcagugauaaaa

SEQ ID NO: 2125388 - RNA, 19 nt, Artificial Sequence
  Description of Artificial Sequence: Synthetic oligonucleotide
uuagucaauaguuuauuau

SEQ ID NO: 2125389 - RNA, 19 nt, Artificial Sequence
  Description of Artificial Sequence: Synthetic oligonucleotide
uauuaaaugccuccaguuc

SEQ ID NO: 2125390 - RNA, 19 nt, Artificial Sequence
  Description of Artificial Sequence: Synthetic oligonucleotide
agcauguagaucuccuagc

SEQ ID NO: 2125391 - RNA, 19 nt, Artificial Sequence
  Description of Artificial Sequence: Synthetic oligonucleotide
uuaauaaugucauguaauu

SEQ ID NO: 2125392 - RNA, 19 nt, Artificial Sequence
  Description of Artificial Sequence: Synthetic oligonucleotide
agccagaacaacuuucaac

SEQ ID NO: 2125393 - RNA, 19 nt, Artificial Sequence
  Description of Artificial Sequence: Synthetic oligonucleotide
ucaguggugaauauauacu

SEQ ID NO: 2125394 - RNA, 19 nt, Artificial Sequence
  Description of Artificial Sequence: Synthetic oligonucleotide
caaacaacuucacaagagc

SEQ ID NO: 2125395 - RNA, 19 nt, Artificial Sequence
  Description of Artificial Sequence: Synthetic oligonucleotide
uaguaguccauuauaauuu

SEQ ID NO: 2125396 - RNA, 19 nt, Artificial Sequence
  Description of Artificial Sequence: Synthetic oligonucleotide
acuugagucacuugguuug

SEQ ID NO: 2125397 - RNA, 19 nt, Artificial Sequence
  Description of Artificial Sequence: Synthetic oligonucleotide
auauccgcagaguauuugg

SEQ ID NO: 2125398 - RNA, 19 nt, Artificial Sequence
  Description of Artificial Sequence: Synthetic oligonucleotide
ugcauuacggccacaacac

SEQ ID NO: 2125399 - RNA, 19 nt, Artificial Sequence
  Description of Artificial Sequence: Synthetic oligonucleotide
gauaacggcacauuggaaa

SEQ ID NO: 2125400 - RNA, 19 nt, Artificial Sequence
  Description of Artificial Sequence: Synthetic oligonucleotide
auaguaguccauuauaauu

SEQ ID NO: 2125401 - RNA, 19 nt, Artificial Sequence
  Description of Artificial Sequence: Synthetic oligonucleotide
aguaguccauuauaauuuc

SEQ ID NO: 2125402 - RNA, 19 nt, Artificial Sequence
  Description of Artificial Sequence: Synthetic oligonucleotide
uccaugagagaaaagguau

SEQ ID NO: 2125403 - RNA, 19 nt, Artificial Sequence
  Description of Artificial Sequence: Synthetic oligonucleotide
agucaauaguuuauuauuc

SEQ ID NO: 2125404 - RNA, 19 nt, Artificial Sequence
  Description of Artificial Sequence: Synthetic oligonucleotide
uuauuccccaaacaagcug

SEQ ID NO: 2125405 - RNA, 19 nt, Artificial Sequence
  Description of Artificial Sequence: Synthetic oligonucleotide
aacaacuucacaagagcag

SEQ ID NO: 2125406 - RNA, 19 nt, Artificial Sequence
  Description of Artificial Sequence: Synthetic oligonucleotide
ucgaucaagaagaaucagu

SEQ ID NO: 2125407 - RNA, 19 nt, Artificial Sequence
  Description of Artificial Sequence: Synthetic oligonucleotide
cugagaugaaguagguucg

SEQ ID NO: 2125408 - RNA, 19 nt, Artificial Sequence
  Description of Artificial Sequence: Synthetic oligonucleotide
gaaucagcagugauaaaag

SEQ ID NO: 2125409 - RNA, 19 nt, Artificial Sequence
  Description of Artificial Sequence: Synthetic oligonucleotide
uauuucuguauugugcacc

SEQ ID NO: 2125410 - RNA, 19 nt, Artificial Sequence
  Description of Artificial Sequence: Synthetic oligonucleotide
aacauauuaaaugccucca

SEQ ID NO: 2125411 - RNA, 19 nt, Artificial Sequence
  Description of Artificial Sequence: Synthetic oligonucleotide
uccccaaacaagcugauua

SEQ ID NO: 2125412 - RNA, 19 nt, Artificial Sequence
  Description of Artificial Sequence: Synthetic oligonucleotide
aacagcacgauagaagagu

SEQ ID NO: 2125413 - RNA, 19 nt, Artificial Sequence
  Description of Artificial Sequence: Synthetic oligonucleotide
aagaaucaguguuucuaug

SEQ ID NO: 2125414 - RNA, 19 nt, Artificial Sequence
  Description of Artificial Sequence: Synthetic oligonucleotide
uauacuugagucacuuggu

SEQ ID NO: 2125415 - RNA, 19 nt, Artificial Sequence
  Description of Artificial Sequence: Synthetic oligonucleotide
gagcauacucuuuagucug

SEQ ID NO: 2125416 - RNA, 19 nt, Artificial Sequence
  Description of Artificial Sequence: Synthetic oligonucleotide
aacccacagagcaaacucc

SEQ ID NO: 2125417 - RNA, 19 nt, Artificial Sequence
  Description of Artificial Sequence: Synthetic oligonucleotide
augaaguagguucgauggc

SEQ ID NO: 2125418 - RNA, 19 nt, Artificial Sequence
  Description of Artificial Sequence: Synthetic oligonucleotide
acaacagcguagcaucugg

SEQ ID NO: 2125419 - RNA, 19 nt, Artificial Sequence
  Description of Artificial Sequence: Synthetic oligonucleotide
aaacaacuucacaagagca

SEQ ID NO: 2125420 - RNA, 19 nt, Artificial Sequence
  Description of Artificial Sequence: Synthetic oligonucleotide
uguuccuucagguaacaaa

SEQ ID NO: 2125421 - RNA, 19 nt, Artificial Sequence
  Description of Artificial Sequence: Synthetic oligonucleotide
uuucuaugcaaggagccag

SEQ ID NO: 2125422 - RNA, 19 nt, Artificial Sequence
  Description of Artificial Sequence: Synthetic oligonucleotide
ugcaaauauccgcagagua

SEQ ID NO: 2125423 - RNA, 19 nt, Artificial Sequence
  Description of Artificial Sequence: Synthetic oligonucleotide
gucaguggugaauauauac

SEQ ID NO: 2125424 - RNA, 19 nt, Artificial Sequence
  Description of Artificial Sequence: Synthetic oligonucleotide
uggagacccaccauuaaac

SEQ ID NO: 2125425 - RNA, 19 nt, Artificial Sequence
  Description of Artificial Sequence: Synthetic oligonucleotide
aacaagcugauuagccacc

SEQ ID NO: 2125426 - RNA, 19 nt, Artificial Sequence
  Description of Artificial Sequence: Synthetic oligonucleotide
gguucgauggcaucaauag

SEQ ID NO: 2125427 - RNA, 19 nt, Artificial Sequence
  Description of Artificial Sequence: Synthetic oligonucleotide
cacgauagaagagugauuc

SEQ ID NO: 2125428 - RNA, 19 nt, Artificial Sequence
  Description of Artificial Sequence: Synthetic oligonucleotide
cugacauucuugcauuacg

SEQ ID NO: 2125429 - RNA, 19 nt, Artificial Sequence
  Description of Artificial Sequence: Synthetic oligonucleotide
uccgcagaguauuuggugc

SEQ ID NO: 2125430 - RNA, 19 nt, Artificial Sequence
  Description of Artificial Sequence: Synthetic oligonucleotide
gaaaggaagaacauuugga

SEQ ID NO: 2125431 - RNA, 19 nt, Artificial Sequence
  Description of Artificial Sequence: Synthetic oligonucleotide
acaacuuucaacauauuaa

SEQ ID NO: 2125432 - RNA, 19 nt, Artificial Sequence
  Description of Artificial Sequence: Synthetic oligonucleotide
ucuguauugugcaccugag

SEQ ID NO: 2125433 - RNA, 19 nt, Artificial Sequence
  Description of Artificial Sequence: Synthetic oligonucleotide
auauuaaaugccuccaguu

SEQ ID NO: 2125434 - RNA, 19 nt, Artificial Sequence
  Description of Artificial Sequence: Synthetic oligonucleotide
aauccaugagagaaaaggu

SEQ ID NO: 2125435 - RNA, 19 nt, Artificial Sequence
  Description of Artificial Sequence: Synthetic oligonucleotide
gagacccaccauuaaacag

SEQ ID NO: 2125436 - RNA, 19 nt, Artificial Sequence
  Description of Artificial Sequence: Synthetic oligonucleotide
aaauccccaguuuucuuga

SEQ ID NO: 2125437 - RNA, 19 nt, Artificial Sequence
  Description of Artificial Sequence: Synthetic oligonucleotide
gagaccuucugacauaauc

SEQ ID NO: 2125438 - RNA, 19 nt, Artificial Sequence
  Description of Artificial Sequence: Synthetic oligonucleotide
agaugaaguagguucgaug

SEQ ID NO: 2125439 - RNA, 19 nt, Artificial Sequence
  Description of Artificial Sequence: Synthetic oligonucleotide
gacauucuugcauuacggc

SEQ ID NO: 2125440 - RNA, 19 nt, Artificial Sequence
  Description of Artificial Sequence: Synthetic oligonucleotide
acaugcugaucacauuugg

SEQ ID NO: 2125441 - RNA, 19 nt, Artificial Sequence
  Description of Artificial Sequence: Synthetic oligonucleotide
agagcaaacucccuugacu

SEQ ID NO: 2125442 - RNA, 19 nt, Artificial Sequence
  Description of Artificial Sequence: Synthetic oligonucleotide
ugauuagccaccugcuuca

SEQ ID NO: 2125443 - RNA, 19 nt, Artificial Sequence
  Description of Artificial Sequence: Synthetic oligonucleotide
cuucagguaacaaagucga

SEQ ID NO: 2125444 - RNA, 19 nt, Artificial Sequence
  Description of Artificial Sequence: Synthetic oligonucleotide
agugauucggugggaagcc

SEQ ID NO: 2125445 - RNA, 19 nt, Artificial Sequence
  Description of Artificial Sequence: Synthetic oligonucleotide
ucuccucuuucagauaacg

SEQ ID NO: 2125446 - RNA, 19 nt, Artificial Sequence
  Description of Artificial Sequence: Synthetic oligonucleotide
ugaaguagguucgauggca

SEQ ID NO: 2125447 - RNA, 19 nt, Artificial Sequence
  Description of Artificial Sequence: Synthetic oligonucleotide
acugcaacccguuccaaug

SEQ ID NO: 2125448 - RNA, 19 nt, Artificial Sequence
  Description of Artificial Sequence: Synthetic oligonucleotide
agaacaacuuucaacauau

SEQ ID NO: 2125449 - RNA, 19 nt, Artificial Sequence
  Description of Artificial Sequence: Synthetic oligonucleotide
uccuccagaucuuuaauaa

SEQ ID NO: 2125450 - RNA, 19 nt, Artificial Sequence
  Description of Artificial Sequence: Synthetic oligonucleotide
aacagcguagcaucuggga

SEQ ID NO: 2125451 - RNA, 19 nt, Artificial Sequence
  Description of Artificial Sequence: Synthetic oligonucleotide
acagcguagcaucugggag

SEQ ID NO: 2125452 - RNA, 19 nt, Artificial Sequence
  Description of Artificial Sequence: Synthetic oligonucleotide
cagguaacaaagucgauca

SEQ ID NO: 2125453 - RNA, 19 nt, Artificial Sequence
  Description of Artificial Sequence: Synthetic oligonucleotide
ucacauuuggugaugccau

SEQ ID NO: 2125454 - RNA, 19 nt, Artificial Sequence
  Description of Artificial Sequence: Synthetic oligonucleotide
caguucauucauucuaggc

SEQ ID NO: 2125455 - RNA, 19 nt, Artificial Sequence
  Description of Artificial Sequence: Synthetic oligonucleotide
uucacaagagcagaccaug

SEQ ID NO: 2125456 - RNA, 19 nt, Artificial Sequence
  Description of Artificial Sequence: Synthetic oligonucleotide
uaauaaugucauguaauuc

SEQ ID NO: 2125457 - RNA, 19 nt, Artificial Sequence
  Description of Artificial Sequence: Synthetic oligonucleotide
auuucuguauugugcaccu

SEQ ID NO: 2125458 - RNA, 19 nt, Artificial Sequence
  Description of Artificial Sequence: Synthetic oligonucleotide
uuguuagucaauaguuuau

SEQ ID NO: 2125459 - RNA, 19 nt, Artificial Sequence
  Description of Artificial Sequence: Synthetic oligonucleotide
gaaucaguguuucuaugca

SEQ ID NO: 2125460 - RNA, 19 nt, Artificial Sequence
  Description of Artificial Sequence: Synthetic oligonucleotide
uggugaugccauaauaauc

SEQ ID NO: 2125461 - RNA, 19 nt, Artificial Sequence
  Description of Artificial Sequence: Synthetic oligonucleotide
uccuucagguaacaaaguc

SEQ ID NO: 2125462 - RNA, 19 nt, Artificial Sequence
  Description of Artificial Sequence: Synthetic oligonucleotide
aauauccgcagaguauuug

SEQ ID NO: 2125463 - RNA, 19 nt, Artificial Sequence
  Description of Artificial Sequence: Synthetic oligonucleotide
uucuugagcauacucuuua

SEQ ID NO: 2125464 - RNA, 19 nt, Artificial Sequence
  Description of Artificial Sequence: Synthetic oligonucleotide
ucuugagcauacucuuuag

SEQ ID NO: 2125465 - RNA, 19 nt, Artificial Sequence
  Description of Artificial Sequence: Synthetic oligonucleotide
cagagcaacaacagcguag

SEQ ID NO: 2125466 - RNA, 19 nt, Artificial Sequence
  Description of Artificial Sequence: Synthetic oligonucleotide
aaguagguucgauggcauc

SEQ ID NO: 2125467 - RNA, 19 nt, Artificial Sequence
  Description of Artificial Sequence: Synthetic oligonucleotide
uauauacuugagucacuug

SEQ ID NO: 2125468 - RNA, 19 nt, Artificial Sequence
  Description of Artificial Sequence: Synthetic oligonucleotide
guggugaauauauacuuga

SEQ ID NO: 2125469 - RNA, 19 nt, Artificial Sequence
  Description of Artificial Sequence: Synthetic oligonucleotide
uaaugauauucugaagaac

SEQ ID NO: 2125470 - RNA, 19 nt, Artificial Sequence
  Description of Artificial Sequence: Synthetic oligonucleotide
aguauggagacccaccauu

SEQ ID NO: 2125471 - RNA, 19 nt, Artificial Sequence
  Description of Artificial Sequence: Synthetic oligonucleotide
ucaucuaauccaagcuucu

SEQ ID NO: 2125472 - RNA, 19 nt, Artificial Sequence
  Description of Artificial Sequence: Synthetic oligonucleotide
aucaccacugcuucuucag

SEQ ID NO: 2125473 - RNA, 19 nt, Artificial Sequence
  Description of Artificial Sequence: Synthetic oligonucleotide
cuuuaauaaugucauguaa

SEQ ID NO: 2125474 - RNA, 19 nt, Artificial Sequence
  Description of Artificial Sequence: Synthetic oligonucleotide
auucuugcauuacggccac

SEQ ID NO: 2125475 - RNA, 19 nt, Artificial Sequence
  Description of Artificial Sequence: Synthetic oligonucleotide
guucgauggcaucaauagg

SEQ ID NO: 2125476 - RNA, 19 nt, Artificial Sequence
  Description of Artificial Sequence: Synthetic oligonucleotide
uuggugaugccauaauaau

SEQ ID NO: 2125477 - RNA, 19 nt, Artificial Sequence
  Description of Artificial Sequence: Synthetic oligonucleotide
aagaagaaucaguguuucu

SEQ ID NO: 2125478 - RNA, 19 nt, Artificial Sequence
  Description of Artificial Sequence: Synthetic oligonucleotide
acucccuugacuucagacu

SEQ ID NO: 2125479 - RNA, 19 nt, Artificial Sequence
  Description of Artificial Sequence: Synthetic oligonucleotide
auuaaacaguccuccagau

SEQ ID NO: 2125480 - RNA, 19 nt, Artificial Sequence
  Description of Artificial Sequence: Synthetic oligonucleotide
cuucaaguggcugagcaug

SEQ ID NO: 2125481 - RNA, 19 nt, Artificial Sequence
  Description of Artificial Sequence: Synthetic oligonucleotide
acgauagaagagugauucg

SEQ ID NO: 2125482 - RNA, 19 nt, Artificial Sequence
  Description of Artificial Sequence: Synthetic oligonucleotide
auauucugaagaacagcac

SEQ ID NO: 2125483 - RNA, 19 nt, Artificial Sequence
  Description of Artificial Sequence: Synthetic oligonucleotide
aacaccaucucuccucuuu

SEQ ID NO: 2125484 - RNA, 19 nt, Artificial Sequence
  Description of Artificial Sequence: Synthetic oligonucleotide
ucacaagagcagaccaugc

SEQ ID NO: 2125485 - RNA, 19 nt, Artificial Sequence
  Description of Artificial Sequence: Synthetic oligonucleotide
auaacggcacauuggaaau

SEQ ID NO: 2125486 - RNA, 19 nt, Artificial Sequence
  Description of Artificial Sequence: Synthetic oligonucleotide
cugauuagccaccugcuuc

SEQ ID NO: 2125487 - RNA, 19 nt, Artificial Sequence
  Description of Artificial Sequence: Synthetic oligonucleotide
auaaugucauguaauucug

SEQ ID NO: 2125488 - RNA, 19 nt, Artificial Sequence
  Description of Artificial Sequence: Synthetic oligonucleotide
uuaaaugccuccaguucau

SEQ ID NO: 2125489 - RNA, 19 nt, Artificial Sequence
  Description of Artificial Sequence: Synthetic oligonucleotide
auuagccaccugcuucagc

SEQ ID NO: 2125490 - RNA, 19 nt, Artificial Sequence
  Description of Artificial Sequence: Synthetic oligonucleotide
uucggugggaagcccuugg

SEQ ID NO: 2125491 - RNA, 19 nt, Artificial Sequence
  Description of Artificial Sequence: Synthetic oligonucleotide
gaccuucugacauaaucca

SEQ ID NO: 2125492 - RNA, 19 nt, Artificial Sequence
  Description of Artificial Sequence: Synthetic oligonucleotide
ucuuucagauaacggcaca

SEQ ID NO: 2125493 - RNA, 19 nt, Artificial Sequence
  Description of Artificial Sequence: Synthetic oligonucleotide
ucgauggcaucaauaggca

SEQ ID NO: 2125494 - RNA, 19 nt, Artificial Sequence
  Description of Artificial Sequence: Synthetic oligonucleotide
acccguuccaaugccaagc

SEQ ID NO: 2125495 - RNA, 19 nt, Artificial Sequence
  Description of Artificial Sequence: Synthetic oligonucleotide
caccauuaaacaguccucc

SEQ ID NO: 2125496 - RNA, 19 nt, Artificial Sequence
  Description of Artificial Sequence: Synthetic oligonucleotide
cauuaaacaguccuccaga

SEQ ID NO: 2125497 - RNA, 19 nt, Artificial Sequence
  Description of Artificial Sequence: Synthetic oligonucleotide
gucaccacaaguauggaga

SEQ ID NO: 2125498 - RNA, 19 nt, Artificial Sequence
  Description of Artificial Sequence: Synthetic oligonucleotide
guauugugcaccugagaug

SEQ ID NO: 2125499 - RNA, 19 nt, Artificial Sequence
  Description of Artificial Sequence: Synthetic oligonucleotide
ugggagacuucacaggguc

SEQ ID NO: 2125500 - RNA, 19 nt, Artificial Sequence
  Description of Artificial Sequence: Synthetic oligonucleotide
caaacaagcugauuagcca

SEQ ID NO: 2125501 - RNA, 19 nt, Artificial Sequence
  Description of Artificial Sequence: Synthetic oligonucleotide
uacucuuuagucugguuuu

SEQ ID NO: 2125502 - RNA, 19 nt, Artificial Sequence
  Description of Artificial Sequence: Synthetic oligonucleotide
aucacauuuggugaugcca

SEQ ID NO: 2125503 - RNA, 19 nt, Artificial Sequence
  Description of Artificial Sequence: Synthetic oligonucleotide
gagugauucggugggaagc

SEQ ID NO: 2125504 - RNA, 19 nt, Artificial Sequence
  Description of Artificial Sequence: Synthetic oligonucleotide
acaacuucacaagagcaga

SEQ ID NO: 2125505 - RNA, 19 nt, Artificial Sequence
  Description of Artificial Sequence: Synthetic oligonucleotide
cuccucuuucagauaacgg

SEQ ID NO: 2125506 - RNA, 19 nt, Artificial Sequence
  Description of Artificial Sequence: Synthetic oligonucleotide
acuucacagggucaaacaa

SEQ ID NO: 2125507 - RNA, 19 nt, Artificial Sequence
  Description of Artificial Sequence: Synthetic oligonucleotide
agacuucacagggucaaac

SEQ ID NO: 2125508 - RNA, 19 nt, Artificial Sequence
  Description of Artificial Sequence: Synthetic oligonucleotide
ugccauauuucuucucugu

SEQ ID NO: 2125509 - RNA, 19 nt, Artificial Sequence
  Description of Artificial Sequence: Synthetic oligonucleotide
aauauauacuugagucacu

SEQ ID NO: 2125510 - RNA, 19 nt, Artificial Sequence
  Description of Artificial Sequence: Synthetic oligonucleotide
gaagcccuuggccaacugc

SEQ ID NO: 2125511 - RNA, 19 nt, Artificial Sequence
  Description of Artificial Sequence: Synthetic oligonucleotide
cuagcuguuuucugauggc

SEQ ID NO: 2125512 - RNA, 19 nt, Artificial Sequence
  Description of Artificial Sequence: Synthetic oligonucleotide
agagugauucggugggaag

SEQ ID NO: 2125513 - RNA, 19 nt, Artificial Sequence
  Description of Artificial Sequence: Synthetic oligonucleotide
uuggccaacugcaacccgu

SEQ ID NO: 2125514 - RNA, 19 nt, Artificial Sequence
  Description of Artificial Sequence: Synthetic oligonucleotide
aucuaauccaagcuucuuu

SEQ ID NO: 2125515 - RNA, 19 nt, Artificial Sequence
  Description of Artificial Sequence: Synthetic oligonucleotide
gucaaacaacuucacaaga

SEQ ID NO: 2125516 - RNA, 19 nt, Artificial Sequence
  Description of Artificial Sequence: Synthetic oligonucleotide
uggaugcaaauauccgcag

SEQ ID NO: 2125517 - RNA, 19 nt, Artificial Sequence
  Description of Artificial Sequence: Synthetic oligonucleotide
ccuagcuguuuucugaugg

SEQ ID NO: 2125518 - RNA, 19 nt, Artificial Sequence
  Description of Artificial Sequence: Synthetic oligonucleotide
ugaucacauuuggugaugc

SEQ ID NO: 2125519 - RNA, 19 nt, Artificial Sequence
  Description of Artificial Sequence: Synthetic oligonucleotide
cacagagcaaacucccuug

SEQ ID NO: 2125520 - RNA, 19 nt, Artificial Sequence
  Description of Artificial Sequence: Synthetic oligonucleotide
uucauucuaggcuuauauu

SEQ ID NO: 2125521 - RNA, 19 nt, Artificial Sequence
  Description of Artificial Sequence: Synthetic oligonucleotide
cucuuucagauaacggcac

SEQ ID NO: 2125522 - RNA, 19 nt, Artificial Sequence
  Description of Artificial Sequence: Synthetic oligonucleotide
uuuggugccaggucaccac

SEQ ID NO: 2125523 - RNA, 19 nt, Artificial Sequence
  Description of Artificial Sequence: Synthetic oligonucleotide
cauuacggccacaacacca

SEQ ID NO: 2125524 - RNA, 19 nt, Artificial Sequence
  Description of Artificial Sequence: Synthetic oligonucleotide
uucuaugcaaggagccaga

SEQ ID NO: 2125525 - RNA, 19 nt, Artificial Sequence
  Description of Artificial Sequence: Synthetic oligonucleotide
gcaacaacagcguagcauc

SEQ ID NO: 2125526 - RNA, 19 nt, Artificial Sequence
  Description of Artificial Sequence: Synthetic oligonucleotide
cagugauaaaagaggucag

SEQ ID NO: 2125527 - RNA, 19 nt, Artificial Sequence
  Description of Artificial Sequence: Synthetic oligonucleotide
ugaugccauaauaaucuuu

SEQ ID NO: 2125528 - RNA, 19 nt, Artificial Sequence
  Description of Artificial Sequence: Synthetic oligonucleotide
agcacgauagaagagugau

SEQ ID NO: 2125529 - RNA, 19 nt, Artificial Sequence
  Description of Artificial Sequence: Synthetic oligonucleotide
guuuccucacuucagauau

SEQ ID NO: 2125530 - RNA, 19 nt, Artificial Sequence
  Description of Artificial Sequence: Synthetic oligonucleotide
aguggugaauauauacuug

SEQ ID NO: 2125531 - RNA, 19 nt, Artificial Sequence
  Description of Artificial Sequence: Synthetic oligonucleotide
auauauacuugagucacuu

SEQ ID NO: 2125532 - RNA, 19 nt, Artificial Sequence
  Description of Artificial Sequence: Synthetic oligonucleotide
aauccccaguuuucuugag

SEQ ID NO: 2125533 - RNA, 19 nt, Artificial Sequence
  Description of Artificial Sequence: Synthetic oligonucleotide
aagagcagaccaugcuaca

SEQ ID NO: 2125534 - RNA, 19 nt, Artificial Sequence
  Description of Artificial Sequence: Synthetic oligonucleotide
ugcaacccguuccaaugcc

SEQ ID NO: 2125535 - RNA, 19 nt, Artificial Sequence
  Description of Artificial Sequence: Synthetic oligonucleotide
gaucacauuuggugaugcc

SEQ ID NO: 2125536 - RNA, 19 nt, Artificial Sequence
  Description of Artificial Sequence: Synthetic oligonucleotide
ugauucggugggaagcccu

SEQ ID NO: 2125537 - RNA, 19 nt, Artificial Sequence
  Description of Artificial Sequence: Synthetic oligonucleotide
agacccaccauuaaacagu

SEQ ID NO: 2125538 - RNA, 19 nt, Artificial Sequence
  Description of Artificial Sequence: Synthetic oligonucleotide
ugccaggucaccacaagua

SEQ ID NO: 2125539 - RNA, 19 nt, Artificial Sequence
  Description of Artificial Sequence: Synthetic oligonucleotide
acauuggaaauccccaguu

SEQ ID NO: 2125540 - RNA, 19 nt, Artificial Sequence
  Description of Artificial Sequence: Synthetic oligonucleotide
uugugcaccugagaugaag

SEQ ID NO: 2125541 - RNA, 19 nt, Artificial Sequence
  Description of Artificial Sequence: Synthetic oligonucleotide
aacaacagcguagcaucug

SEQ ID NO: 2125542 - RNA, 19 nt, Artificial Sequence
  Description of Artificial Sequence: Synthetic oligonucleotide
uuagucugguuuucaaauu

SEQ ID NO: 2125543 - RNA, 19 nt, Artificial Sequence
  Description of Artificial Sequence: Synthetic oligonucleotide
acaacaccaucucuccucu

SEQ ID NO: 2125544 - RNA, 19 nt, Artificial Sequence
  Description of Artificial Sequence: Synthetic oligonucleotide
uugccauauuucuucucug

SEQ ID NO: 2125545 - RNA, 19 nt, Artificial Sequence
  Description of Artificial Sequence: Synthetic oligonucleotide
auccgcagaguauuuggug

SEQ ID NO: 2125546 - RNA, 19 nt, Artificial Sequence
  Description of Artificial Sequence: Synthetic oligonucleotide
uguuagucaauaguuuauu

SEQ ID NO: 2125547 - RNA, 19 nt, Artificial Sequence
  Description of Artificial Sequence: Synthetic oligonucleotide
aacccguuccaaugccaag

SEQ ID NO: 2125548 - RNA, 19 nt, Artificial Sequence
  Description of Artificial Sequence: Synthetic oligonucleotide
ucuugcauuacggccacaa

SEQ ID NO: 2125549 - RNA, 19 nt, Artificial Sequence
  Description of Artificial Sequence: Synthetic oligonucleotide
uggaaauccccaguuuucu

SEQ ID NO: 2125550 - RNA, 19 nt, Artificial Sequence
  Description of Artificial Sequence: Synthetic oligonucleotide
cgaucaagaagaaucagug

SEQ ID NO: 2125551 - RNA, 19 nt, Artificial Sequence
  Description of Artificial Sequence: Synthetic oligonucleotide
guguuucuaugcaaggagc

SEQ ID NO: 2125552 - RNA, 19 nt, Artificial Sequence
  Description of Artificial Sequence: Synthetic oligonucleotide
agaguauuuggugccaggu

SEQ ID NO: 2125553 - RNA, 19 nt, Artificial Sequence
  Description of Artificial Sequence: Synthetic oligonucleotide
auucugaaucagcagugau

SEQ ID NO: 2125554 - RNA, 19 nt, Artificial Sequence
  Description of Artificial Sequence: Synthetic oligonucleotide
ucagacuuggaugcaaaua

SEQ ID NO: 2125555 - RNA, 19 nt, Artificial Sequence
  Description of Artificial Sequence: Synthetic oligonucleotide
guuagucaauaguuuauua

SEQ ID NO: 2125556 - RNA, 19 nt, Artificial Sequence
  Description of Artificial Sequence: Synthetic oligonucleotide
agucgaucaagaagaauca

SEQ ID NO: 2125557 - RNA, 19 nt, Artificial Sequence
  Description of Artificial Sequence: Synthetic oligonucleotide
gaguauuuggugccagguc

SEQ ID NO: 2125558 - RNA, 19 nt, Artificial Sequence
  Description of Artificial Sequence: Synthetic oligonucleotide
cagaguauuuggugccagg

SEQ ID NO: 2125559 - RNA, 19 nt, Artificial Sequence
  Description of Artificial Sequence: Synthetic oligonucleotide
uccucagauaaaagauggu

SEQ ID NO: 2125560 - RNA, 19 nt, Artificial Sequence
  Description of Artificial Sequence: Synthetic oligonucleotide
uauggagacccaccauuaa

SEQ ID NO: 2125561 - RNA, 19 nt, Artificial Sequence
  Description of Artificial Sequence: Synthetic oligonucleotide
uagaucuccuagcuguuuu

SEQ ID NO: 2125562 - RNA, 19 nt, Artificial Sequence
  Description of Artificial Sequence: Synthetic oligonucleotide
caaguauggagacccacca

SEQ ID NO: 2125563 - RNA, 19 nt, Artificial Sequence
  Description of Artificial Sequence: Synthetic oligonucleotide
agcaacaacagcguagcau

SEQ ID NO: 2125564 - RNA, 19 nt, Artificial Sequence
  Description of Artificial Sequence: Synthetic oligonucleotide
cuuuagagaccuucugaca

SEQ ID NO: 2125565 - RNA, 19 nt, Artificial Sequence
  Description of Artificial Sequence: Synthetic oligonucleotide
gaagaaucaguguuucuau

SEQ ID NO: 2125566 - RNA, 19 nt, Artificial Sequence
  Description of Artificial Sequence: Synthetic oligonucleotide
aaagucgaucaagaagaau

SEQ ID NO: 2125567 - RNA, 19 nt, Artificial Sequence
  Description of Artificial Sequence: Synthetic oligonucleotide
auggagacccaccauuaaa

SEQ ID NO: 2125568 - RNA, 19 nt, Artificial Sequence
  Description of Artificial Sequence: Synthetic oligonucleotide
aaguggcugagcauguaga

SEQ ID NO: 2125569 - RNA, 19 nt, Artificial Sequence
  Description of Artificial Sequence: Synthetic oligonucleotide
uccuguuccuucagguaac

SEQ ID NO: 2125570 - RNA, 19 nt, Artificial Sequence
  Description of Artificial Sequence: Synthetic oligonucleotide
agaccuuggccucaucuaa

SEQ ID NO: 2125571 - RNA, 19 nt, Artificial Sequence
  Description of Artificial Sequence: Synthetic oligonucleotide
agggucaaacaacuucaca

SEQ ID NO: 2125572 - RNA, 19 nt, Artificial Sequence
  Description of Artificial Sequence: Synthetic oligonucleotide
uuagagaccuucugacaua

SEQ ID NO: 2125573 - RNA, 19 nt, Artificial Sequence
  Description of Artificial Sequence: Synthetic oligonucleotide
auuauuccccaaacaagcu

SEQ ID NO: 2125574 - RNA, 19 nt, Artificial Sequence
  Description of Artificial Sequence: Synthetic oligonucleotide
gaacagcacgauagaagag

SEQ ID NO: 2125575 - RNA, 19 nt, Artificial Sequence
  Description of Artificial Sequence: Synthetic oligonucleotide
gaucaagaagaaucagugu

SEQ ID NO: 2125576 - RNA, 19 nt, Artificial Sequence
  Description of Artificial Sequence: Synthetic oligonucleotide
agacuuggaugcaaauauc

SEQ ID NO: 2125577 - RNA, 19 nt, Artificial Sequence
  Description of Artificial Sequence: Synthetic oligonucleotide
auacuugagucacuugguu

SEQ ID NO: 2125578 - RNA, 19 nt, Artificial Sequence
  Description of Artificial Sequence: Synthetic oligonucleotide
gagcagaccaugcuacauc

SEQ ID NO: 2125579 - RNA, 19 nt, Artificial Sequence
  Description of Artificial Sequence: Synthetic oligonucleotide
caacagcguagcaucuggg

SEQ ID NO: 2125580 - RNA, 19 nt, Artificial Sequence
  Description of Artificial Sequence: Synthetic oligonucleotide
ucagagcaacaacagcgua

SEQ ID NO: 2125581 - RNA, 19 nt, Artificial Sequence
  Description of Artificial Sequence: Synthetic oligonucleotide
cuuuagucugguuuucaaa

SEQ ID NO: 2125582 - RNA, 19 nt, Artificial Sequence
  Description of Artificial Sequence: Synthetic oligonucleotide
cagauaaaagaugguagca

SEQ ID NO: 2125583 - RNA, 19 nt, Artificial Sequence
  Description of Artificial Sequence: Synthetic oligonucleotide
cauauuaaaugccuccagu

SEQ ID NO: 2125584 - RNA, 19 nt, Artificial Sequence
  Description of Artificial Sequence: Synthetic oligonucleotide
ggucaccacaaguauggag

SEQ ID NO: 2125585 - RNA, 19 nt, Artificial Sequence
  Description of Artificial Sequence: Synthetic oligonucleotide
aucuccuagcuguuuucug

SEQ ID NO: 2125586 - RNA, 19 nt, Artificial Sequence
  Description of Artificial Sequence: Synthetic oligonucleotide
aagagugauucggugggaa

SEQ ID NO: 2125587 - RNA, 19 nt, Artificial Sequence
  Description of Artificial Sequence: Synthetic oligonucleotide
uuggugccaggucaccaca

SEQ ID NO: 2125588 - RNA, 19 nt, Artificial Sequence
  Description of Artificial Sequence: Synthetic oligonucleotide
cuugagucacuugguuugg

SEQ ID NO: 2125589 - RNA, 19 nt, Artificial Sequence
  Description of Artificial Sequence: Synthetic oligonucleotide
uagagaccuucugacauaa

SEQ ID NO: 2125590 - RNA, 19 nt, Artificial Sequence
  Description of Artificial Sequence: Synthetic oligonucleotide
ugagcauguagaucuccua

SEQ ID NO: 2125591 - RNA, 19 nt, Artificial Sequence
  Description of Artificial Sequence: Synthetic oligonucleotide
cuaugcaaggagccagaac

SEQ ID NO: 2125592 - RNA, 19 nt, Artificial Sequence
  Description of Artificial Sequence: Synthetic oligonucleotide
ccauuaaacaguccuccag

SEQ ID NO: 2125593 - RNA, 19 nt, Artificial Sequence
  Description of Artificial Sequence: Synthetic oligonucleotide
guucauucauucuaggcuu

SEQ ID NO: 2125594 - RNA, 19 nt, Artificial Sequence
  Description of Artificial Sequence: Synthetic oligonucleotide
acagcacgauagaagagug

SEQ ID NO: 2125595 - RNA, 19 nt, Artificial Sequence
  Description of Artificial Sequence: Synthetic oligonucleotide
gauagaagagugauucggu

SEQ ID NO: 2125596 - RNA, 19 nt, Artificial Sequence
  Description of Artificial Sequence: Synthetic oligonucleotide
uuccucacuucagauauuu

SEQ ID NO: 2125597 - RNA, 19 nt, Artificial Sequence
  Description of Artificial Sequence: Synthetic oligonucleotide
ggugaauauauacuugagu

SEQ ID NO: 2125598 - RNA, 19 nt, Artificial Sequence
  Description of Artificial Sequence: Synthetic oligonucleotide
ucccuugacuucagacuug

SEQ ID NO: 2125599 - RNA, 19 nt, Artificial Sequence
  Description of Artificial Sequence: Synthetic oligonucleotide
cagacuuggaugcaaauau

SEQ ID NO: 2125600 - RNA, 19 nt, Artificial Sequence
  Description of Artificial Sequence: Synthetic oligonucleotide
gguagcaacaacccacaga

SEQ ID NO: 2125601 - RNA, 19 nt, Artificial Sequence
  Description of Artificial Sequence: Synthetic oligonucleotide
uccuagcuguuuucugaug

SEQ ID NO: 2125602 - RNA, 19 nt, Artificial Sequence
  Description of Artificial Sequence: Synthetic oligonucleotide
uuucagauaacggcacauu

SEQ ID NO: 2125603 - RNA, 19 nt, Artificial Sequence
  Description of Artificial Sequence: Synthetic oligonucleotide
auaauccagaaaggaagaa

SEQ ID NO: 2125604 - RNA, 19 nt, Artificial Sequence
  Description of Artificial Sequence: Synthetic oligonucleotide
ugcaaggagccagaacaac

SEQ ID NO: 2125605 - RNA, 19 nt, Artificial Sequence
  Description of Artificial Sequence: Synthetic oligonucleotide
agcauacucuuuagucugg

SEQ ID NO: 2125606 - RNA, 19 nt, Artificial Sequence
  Description of Artificial Sequence: Synthetic oligonucleotide
cgauagaagagugauucgg

SEQ ID NO: 2125607 - RNA, 19 nt, Artificial Sequence
  Description of Artificial Sequence: Synthetic oligonucleotide
auccaugagagaaaaggua

SEQ ID NO: 2125608 - RNA, 19 nt, Artificial Sequence
  Description of Artificial Sequence: Synthetic oligonucleotide
uucugaagaacagcacgau

SEQ ID NO: 2125609 - RNA, 19 nt, Artificial Sequence
  Description of Artificial Sequence: Synthetic oligonucleotide
ccaguuuucuugagcauac

SEQ ID NO: 2125610 - RNA, 19 nt, Artificial Sequence
  Description of Artificial Sequence: Synthetic oligonucleotide
cuuggccaacugcaacccg

SEQ ID NO: 2125611 - RNA, 19 nt, Artificial Sequence
  Description of Artificial Sequence: Synthetic oligonucleotide
caaacucccuugacuucag

SEQ ID NO: 2125612 - RNA, 19 nt, Artificial Sequence
  Description of Artificial Sequence: Synthetic oligonucleotide
acaacccacagagcaaacu

SEQ ID NO: 2125613 - RNA, 19 nt, Artificial Sequence
  Description of Artificial Sequence: Synthetic oligonucleotide
cacaaguauggagacccac

SEQ ID NO: 2125614 - RNA, 19 nt, Artificial Sequence
  Description of Artificial Sequence: Synthetic oligonucleotide
uucagguaacaaagucgau

SEQ ID NO: 2125615 - RNA, 19 nt, Artificial Sequence
  Description of Artificial Sequence: Synthetic oligonucleotide
cagaacaacuuucaacaua

SEQ ID NO: 2125616 - RNA, 19 nt, Artificial Sequence
  Description of Artificial Sequence: Synthetic oligonucleotide
accuucugacauaauccag

SEQ ID NO: 2125617 - RNA, 19 nt, Artificial Sequence
  Description of Artificial Sequence: Synthetic oligonucleotide
auuuggugccaggucacca

SEQ ID NO: 2125618 - RNA, 19 nt, Artificial Sequence
  Description of Artificial Sequence: Synthetic oligonucleotide
gccacaacaccaucucucc

SEQ ID NO: 2125619 - RNA, 19 nt, Artificial Sequence
  Description of Artificial Sequence: Synthetic oligonucleotide
ucuaugcaaggagccagaa

SEQ ID NO: 2125620 - RNA, 19 nt, Artificial Sequence
  Description of Artificial Sequence: Synthetic oligonucleotide
cagcguagcaucugggaga

SEQ ID NO: 2125621 - RNA, 19 nt, Artificial Sequence
  Description of Artificial Sequence: Synthetic oligonucleotide
aaauauccgcagaguauuu

SEQ ID NO: 2125622 - RNA, 19 nt, Artificial Sequence
  Description of Artificial Sequence: Synthetic oligonucleotide
augccauaauaaucuuuaa

SEQ ID NO: 2125623 - RNA, 19 nt, Artificial Sequence
  Description of Artificial Sequence: Synthetic oligonucleotide
augcaaauauccgcagagu

SEQ ID NO: 2125624 - RNA, 19 nt, Artificial Sequence
  Description of Artificial Sequence: Synthetic oligonucleotide
guauuuggugccaggucac

SEQ ID NO: 2125625 - RNA, 19 nt, Artificial Sequence
  Description of Artificial Sequence: Synthetic oligonucleotide
cagagcaaacucccuugac

SEQ ID NO: 2125626 - RNA, 19 nt, Artificial Sequence
  Description of Artificial Sequence: Synthetic oligonucleotide
acaagcugauuagccaccu

SEQ ID NO: 2125627 - RNA, 19 nt, Artificial Sequence
  Description of Artificial Sequence: Synthetic oligonucleotide
cauaguaguccauuauaau

SEQ ID NO: 2125628 - RNA, 19 nt, Artificial Sequence
  Description of Artificial Sequence: Synthetic oligonucleotide
ggagacccaccauuaaaca

SEQ ID NO: 2125629 - RNA, 19 nt, Artificial Sequence
  Description of Artificial Sequence: Synthetic oligonucleotide
ccaguucauucauucuagg

SEQ ID NO: 2125630 - RNA, 19 nt, Artificial Sequence
  Description of Artificial Sequence: Synthetic oligonucleotide
ucauucauucuaggcuuau

SEQ ID NO: 2125631 - RNA, 19 nt, Artificial Sequence
  Description of Artificial Sequence: Synthetic oligonucleotide
gauuagccaccugcuucag

SEQ ID NO: 2125632 - RNA, 19 nt, Artificial Sequence
  Description of Artificial Sequence: Synthetic oligonucleotide
ccccaaacaagcugauuag

SEQ ID NO: 2125633 - RNA, 19 nt, Artificial Sequence
  Description of Artificial Sequence: Synthetic oligonucleotide
cuucagacuuggaugcaaa

SEQ ID NO: 2125634 - RNA, 19 nt, Artificial Sequence
  Description of Artificial Sequence: Synthetic oligonucleotide
uuucuguauugugcaccug

SEQ ID NO: 2125635 - RNA, 19 nt, Artificial Sequence
  Description of Artificial Sequence: Synthetic oligonucleotide
acuugguuugguugccaua

SEQ ID NO: 2125636 - RNA, 19 nt, Artificial Sequence
  Description of Artificial Sequence: Synthetic oligonucleotide
aacaguccuccagaucuuu

SEQ ID NO: 2125637 - RNA, 19 nt, Artificial Sequence
  Description of Artificial Sequence: Synthetic oligonucleotide
caucucuccucuuucagau

SEQ ID NO: 2125638 - RNA, 19 nt, Artificial Sequence
  Description of Artificial Sequence: Synthetic oligonucleotide
uuacggccacaacaccauc

SEQ ID NO: 2125639 - RNA, 19 nt, Artificial Sequence
  Description of Artificial Sequence: Synthetic oligonucleotide
ugcugacauucuugcauua

SEQ ID NO: 2125640 - RNA, 19 nt, Artificial Sequence
  Description of Artificial Sequence: Synthetic oligonucleotide
uaacggcacauuggaaauc

SEQ ID NO: 2125641 - RNA, 19 nt, Artificial Sequence
  Description of Artificial Sequence: Synthetic oligonucleotide
cuguauugugcaccugaga

SEQ ID NO: 2125642 - RNA, 19 nt, Artificial Sequence
  Description of Artificial Sequence: Synthetic oligonucleotide
caaugccaagcaugcugac

SEQ ID NO: 2125643 - RNA, 19 nt, Artificial Sequence
  Description of Artificial Sequence: Synthetic oligonucleotide
caaagucgaucaagaagaa

SEQ ID NO: 2125644 - RNA, 19 nt, Artificial Sequence
  Description of Artificial Sequence: Synthetic oligonucleotide
caaauauccgcagaguauu

SEQ ID NO: 2125645 - RNA, 19 nt, Artificial Sequence
  Description of Artificial Sequence: Synthetic oligonucleotide
ucacuugguuugguugcca

SEQ ID NO: 2125646 - RNA, 19 nt, Artificial Sequence
  Description of Artificial Sequence: Synthetic oligonucleotide
acggcacauuggaaauccc

SEQ ID NO: 2125647 - RNA, 19 nt, Artificial Sequence
  Description of Artificial Sequence: Synthetic oligonucleotide
cuugguuugguugccauau

SEQ ID NO: 2125648 - RNA, 19 nt, Artificial Sequence
  Description of Artificial Sequence: Synthetic oligonucleotide
caugcugaucacauuuggu

SEQ ID NO: 2125649 - RNA, 19 nt, Artificial Sequence
  Description of Artificial Sequence: Synthetic oligonucleotide
uagguucgauggcaucaau

SEQ ID NO: 2125650 - RNA, 19 nt, Artificial Sequence
  Description of Artificial Sequence: Synthetic oligonucleotide
uuuccucacuucagauauu

SEQ ID NO: 2125651 - RNA, 19 nt, Artificial Sequence
  Description of Artificial Sequence: Synthetic oligonucleotide
caacaacccacagagcaaa

SEQ ID NO: 2125652 - RNA, 19 nt, Artificial Sequence
  Description of Artificial Sequence: Synthetic oligonucleotide
ggugccaggucaccacaag

SEQ ID NO: 2125653 - RNA, 19 nt, Artificial Sequence
  Description of Artificial Sequence: Synthetic oligonucleotide
cuugagcauacucuuuagu

SEQ ID NO: 2125654 - RNA, 19 nt, Artificial Sequence
  Description of Artificial Sequence: Synthetic oligonucleotide
gagccagaacaacuuucaa

SEQ ID NO: 2125655 - RNA, 19 nt, Artificial Sequence
  Description of Artificial Sequence: Synthetic oligonucleotide
guauggagacccaccauua

SEQ ID NO: 2125656 - RNA, 19 nt, Artificial Sequence
  Description of Artificial Sequence: Synthetic oligonucleotide
gaagagugauucgguggga

SEQ ID NO: 2125657 - RNA, 19 nt, Artificial Sequence
  Description of Artificial Sequence: Synthetic oligonucleotide
cuuccuguuccuucaggua

SEQ ID NO: 2125658 - RNA, 19 nt, Artificial Sequence
  Description of Artificial Sequence: Synthetic oligonucleotide
caacccguuccaaugccaa

SEQ ID NO: 2125659 - RNA, 19 nt, Artificial Sequence
  Description of Artificial Sequence: Synthetic oligonucleotide
ccuuggccucaucuaaucc

SEQ ID NO: 2125660 - RNA, 19 nt, Artificial Sequence
  Description of Artificial Sequence: Synthetic oligonucleotide
gaucuccuagcuguuuucu

SEQ ID NO: 2125661 - RNA, 19 nt, Artificial Sequence
  Description of Artificial Sequence: Synthetic oligonucleotide
gcauuacggccacaacacc

SEQ ID NO: 2125662 - RNA, 19 nt, Artificial Sequence
  Description of Artificial Sequence: Synthetic oligonucleotide
ccauuauaauuucuucaga

SEQ ID NO: 2125663 - RNA, 19 nt, Artificial Sequence
  Description of Artificial Sequence: Synthetic oligonucleotide
ccgcagaguauuuggugcc

SEQ ID NO: 2125664 - RNA, 19 nt, Artificial Sequence
  Description of Artificial Sequence: Synthetic oligonucleotide
agauaacggcacauuggaa

SEQ ID NO: 2125665 - RNA, 19 nt, Artificial Sequence
  Description of Artificial Sequence: Synthetic oligonucleotide
agguucgauggcaucaaua

SEQ ID NO: 2125666 - RNA, 19 nt, Artificial Sequence
  Description of Artificial Sequence: Synthetic oligonucleotide
gcauguagaucuccuagcu

SEQ ID NO: 2125667 - RNA, 19 nt, Artificial Sequence
  Description of Artificial Sequence: Synthetic oligonucleotide
cacauuggaaauccccagu

SEQ ID NO: 2125668 - RNA, 19 nt, Artificial Sequence
  Description of Artificial Sequence: Synthetic oligonucleotide
cccaccauuaaacaguccu

SEQ ID NO: 2125669 - RNA, 19 nt, Artificial Sequence
  Description of Artificial Sequence: Synthetic oligonucleotide
gugauucggugggaagccc

SEQ ID NO: 2125670 - RNA, 19 nt, Artificial Sequence
  Description of Artificial Sequence: Synthetic oligonucleotide
auucggugggaagcccuug

SEQ ID NO: 2125671 - RNA, 19 nt, Artificial Sequence
  Description of Artificial Sequence: Synthetic oligonucleotide
caugagagaaaagguauuu

SEQ ID NO: 2125672 - RNA, 19 nt, Artificial Sequence
  Description of Artificial Sequence: Synthetic oligonucleotide
cggcacauuggaaaucccc

SEQ ID NO: 2125673 - RNA, 19 nt, Artificial Sequence
  Description of Artificial Sequence: Synthetic oligonucleotide
cagcacgauagaagaguga

SEQ ID NO: 2125674 - RNA, 19 nt, Artificial Sequence
  Description of Artificial Sequence: Synthetic oligonucleotide
gagcaacaacagcguagca

SEQ ID NO: 2125675 - RNA, 19 nt, Artificial Sequence
  Description of Artificial Sequence: Synthetic oligonucleotide
cucccuugacuucagacuu

SEQ ID NO: 2125676 - RNA, 19 nt, Artificial Sequence
  Description of Artificial Sequence: Synthetic oligonucleotide
guagguucgauggcaucaa

SEQ ID NO: 2125677 - RNA, 19 nt, Artificial Sequence
  Description of Artificial Sequence: Synthetic oligonucleotide
cuuucagauaacggcacau

SEQ ID NO: 2125678 - RNA, 19 nt, Artificial Sequence
  Description of Artificial Sequence: Synthetic oligonucleotide
ugggaagcccuuggccaac

SEQ ID NO: 2125679 - RNA, 19 nt, Artificial Sequence
  Description of Artificial Sequence: Synthetic oligonucleotide
gugccaggucaccacaagu

SEQ ID NO: 2125680 - RNA, 19 nt, Artificial Sequence
  Description of Artificial Sequence: Synthetic oligonucleotide
cacauuuggugaugccaua

SEQ ID NO: 2125681 - RNA, 19 nt, Artificial Sequence
  Description of Artificial Sequence: Synthetic oligonucleotide
gagaugaaguagguucgau

SEQ ID NO: 2125682 - RNA, 19 nt, Artificial Sequence
  Description of Artificial Sequence: Synthetic oligonucleotide
caacaacagcguagcaucu

SEQ ID NO: 2125683 - RNA, 19 nt, Artificial Sequence
  Description of Artificial Sequence: Synthetic oligonucleotide
gcugaucacauuuggugau

SEQ ID NO: 2125684 - RNA, 19 nt, Artificial Sequence
  Description of Artificial Sequence: Synthetic oligonucleotide
gcaaauauccgcagaguau

SEQ ID NO: 2125685 - RNA, 19 nt, Artificial Sequence
  Description of Artificial Sequence: Synthetic oligonucleotide
auuccccaaacaagcugau

SEQ ID NO: 2125686 - RNA, 19 nt, Artificial Sequence
  Description of Artificial Sequence: Synthetic oligonucleotide
ccaucucuccucuuucaga

SEQ ID NO: 2125687 - RNA, 19 nt, Artificial Sequence
  Description of Artificial Sequence: Synthetic oligonucleotide
gcaugcugacauucuugca

SEQ ID NO: 2125688 - RNA, 19 nt, Artificial Sequence
  Description of Artificial Sequence: Synthetic oligonucleotide
cauucauucuaggcuuaua

SEQ ID NO: 2125689 - RNA, 19 nt, Artificial Sequence
  Description of Artificial Sequence: Synthetic oligonucleotide
gcaacaacccacagagcaa

SEQ ID NO: 2125690 - RNA, 19 nt, Artificial Sequence
  Description of Artificial Sequence: Synthetic oligonucleotide
gcccuuggccaacugcaac

SEQ ID NO: 2125691 - RNA, 19 nt, Artificial Sequence
  Description of Artificial Sequence: Synthetic oligonucleotide
uucuugcauuacggccaca

SEQ ID NO: 2125692 - RNA, 19 nt, Artificial Sequence
  Description of Artificial Sequence: Synthetic oligonucleotide
caccugagaugaaguaggu

SEQ ID NO: 2125693 - RNA, 19 nt, Artificial Sequence
  Description of Artificial Sequence: Synthetic oligonucleotide
cggugggaagcccuuggcc

SEQ ID NO: 2125694 - RNA, 19 nt, Artificial Sequence
  Description of Artificial Sequence: Synthetic oligonucleotide
cauacucuuuagucugguu

SEQ ID NO: 2125695 - RNA, 19 nt, Artificial Sequence
  Description of Artificial Sequence: Synthetic oligonucleotide
gccauauuucuucucuguu

SEQ ID NO: 2125696 - RNA, 19 nt, Artificial Sequence
  Description of Artificial Sequence: Synthetic oligonucleotide
gcaacccguuccaaugcca

SEQ ID NO: 2125697 - RNA, 19 nt, Artificial Sequence
  Description of Artificial Sequence: Synthetic oligonucleotide
gauucggugggaagcccuu

SEQ ID NO: 2125698 - RNA, 19 nt, Artificial Sequence
  Description of Artificial Sequence: Synthetic oligonucleotide
gccaggucaccacaaguau

SEQ ID NO: 2125699 - RNA, 19 nt, Artificial Sequence
  Description of Artificial Sequence: Synthetic oligonucleotide
gggagacuucacaggguca

SEQ ID NO: 2125700 - RNA, 19 nt, Artificial Sequence
  Description of Artificial Sequence: Synthetic oligonucleotide
agcccuuggccaacugcaa

SEQ ID NO: 2125701 - RNA, 19 nt, Artificial Sequence
  Description of Artificial Sequence: Synthetic oligonucleotide
ggaaauccccaguuuucuu

SEQ ID NO: 2125702 - RNA, 19 nt, Artificial Sequence
  Description of Artificial Sequence: Synthetic oligonucleotide
cuguuccuucagguaacaa

SEQ ID NO: 2125703 - RNA, 19 nt, Artificial Sequence
  Description of Artificial Sequence: Synthetic oligonucleotide
ccucaucuaauccaagcuu

SEQ ID NO: 2125704 - RNA, 19 nt, Artificial Sequence
  Description of Artificial Sequence: Synthetic oligonucleotide
cccguuccaaugccaagca

SEQ ID NO: 2125705 - RNA, 19 nt, Artificial Sequence
  Description of Artificial Sequence: Synthetic oligonucleotide
agagaccuucugacauaau

SEQ ID NO: 2125706 - RNA, 19 nt, Artificial Sequence
  Description of Artificial Sequence: Synthetic oligonucleotide
guagaucuccuagcuguuu

SEQ ID NO: 2125707 - RNA, 19 nt, Artificial Sequence
  Description of Artificial Sequence: Synthetic oligonucleotide
gcugauuagccaccugcuu

SEQ ID NO: 2125708 - RNA, 19 nt, Artificial Sequence
  Description of Artificial Sequence: Synthetic oligonucleotide
ccaagcaugcugacauucu

SEQ ID NO: 2125709 - RNA, 19 nt, Artificial Sequence
  Description of Artificial Sequence: Synthetic oligonucleotide
ccacaaguauggagaccca

SEQ ID NO: 2125710 - RNA, 19 nt, Artificial Sequence
  Description of Artificial Sequence: Synthetic oligonucleotide
gcauacucuuuagucuggu

SEQ ID NO: 2125711 - RNA, 19 nt, Artificial Sequence
  Description of Artificial Sequence: Synthetic oligonucleotide
ccagaacaacuuucaacau

SEQ ID NO: 2125712 - RNA, 19 nt, Artificial Sequence
  Description of Artificial Sequence: Synthetic oligonucleotide
ccuccagaucuuuaauaau

SEQ ID NO: 2125713 - RNA, 19 nt, Artificial Sequence
  Description of Artificial Sequence: Synthetic oligonucleotide
cguagcaucugggagacuu

SEQ ID NO: 2125714 - RNA, 19 nt, Artificial Sequence
  Description of Artificial Sequence: Synthetic oligonucleotide
ccuguuccuucagguaaca

SEQ ID NO: 2125715 - RNA, 19 nt, Artificial Sequence
  Description of Artificial Sequence: Synthetic oligonucleotide
gcacgauagaagagugauu

SEQ ID NO: 2125716 - RNA, 19 nt, Artificial Sequence
  Description of Artificial Sequence: Synthetic oligonucleotide
ccguuccaaugccaagcau

SEQ ID NO: 2125717 - RNA, 19 nt, Artificial Sequence
  Description of Artificial Sequence: Synthetic oligonucleotide
ugagaagugagccacaagg

SEQ ID NO: 2125718 - RNA, 19 nt, Artificial Sequence
  Description of Artificial Sequence: Synthetic oligonucleotide
aagaacaagggucuggccc

SEQ ID NO: 2125719 - RNA, 19 nt, Artificial Sequence
  Description of Artificial Sequence: Synthetic oligonucleotide
uauuuaaccuaauauaucc

SEQ ID NO: 2125720 - RNA, 19 nt, Artificial Sequence
  Description of Artificial Sequence: Synthetic oligonucleotide
gauuguaggagccuggugg

SEQ ID NO: 2125721 - RNA, 19 nt, Artificial Sequence
  Description of Artificial Sequence: Synthetic oligonucleotide
gaugauguaaaccaacugc

SEQ ID NO: 2125722 - RNA, 19 nt, Artificial Sequence
  Description of Artificial Sequence: Synthetic oligonucleotide
uguugcacugcccagaggg

SEQ ID NO: 2125723 - RNA, 19 nt, Artificial Sequence
  Description of Artificial Sequence: Synthetic oligonucleotide
uuagauauggcucuuccca

SEQ ID NO: 2125724 - RNA, 19 nt, Artificial Sequence
  Description of Artificial Sequence: Synthetic oligonucleotide
aagguggucaguuacaacu

SEQ ID NO: 2125725 - RNA, 19 nt, Artificial Sequence
  Description of Artificial Sequence: Synthetic oligonucleotide
ucuacuaccaccaggugcc

SEQ ID NO: 2125726 - RNA, 19 nt, Artificial Sequence
  Description of Artificial Sequence: Synthetic oligonucleotide
agugucauaggauuguagg

SEQ ID NO: 2125727 - RNA, 19 nt, Artificial Sequence
  Description of Artificial Sequence: Synthetic oligonucleotide
agagaugggaugaagacgc

SEQ ID NO: 2125728 - RNA, 19 nt, Artificial Sequence
  Description of Artificial Sequence: Synthetic oligonucleotide
uuugcacaaagccuagugg

SEQ ID NO: 2125729 - RNA, 19 nt, Artificial Sequence
  Description of Artificial Sequence: Synthetic oligonucleotide
acugcacaaggguagagcc

SEQ ID NO: 2125730 - RNA, 19 nt, Artificial Sequence
  Description of Artificial Sequence: Synthetic oligonucleotide
caacauguagucaacacag

SEQ ID NO: 2125731 - RNA, 19 nt, Artificial Sequence
  Description of Artificial Sequence: Synthetic oligonucleotide
acuuagauauggcucuucc

SEQ ID NO: 2125732 - RNA, 19 nt, Artificial Sequence
  Description of Artificial Sequence: Synthetic oligonucleotide
aagaaguagaccgagggug

SEQ ID NO: 2125733 - RNA, 19 nt, Artificial Sequence
  Description of Artificial Sequence: Synthetic oligonucleotide
augauguaaaccaacugcc

SEQ ID NO: 2125734 - RNA, 19 nt, Artificial Sequence
  Description of Artificial Sequence: Synthetic oligonucleotide
aucaucucaacauguaguc

SEQ ID NO: 2125735 - RNA, 19 nt, Artificial Sequence
  Description of Artificial Sequence: Synthetic oligonucleotide
ucaacauguagucaacaca

SEQ ID NO: 2125736 - RNA, 19 nt, Artificial Sequence
  Description of Artificial Sequence: Synthetic oligonucleotide
agugcugaugauguaaacc

SEQ ID NO: 2125737 - RNA, 19 nt, Artificial Sequence
  Description of Artificial Sequence: Synthetic oligonucleotide
uuuugauuguuuuauuuaa

SEQ ID NO: 2125738 - RNA, 19 nt, Artificial Sequence
  Description of Artificial Sequence: Synthetic oligonucleotide
uacaacuucugacaugcag

SEQ ID NO: 2125739 - RNA, 19 nt, Artificial Sequence
  Description of Artificial Sequence: Synthetic oligonucleotide
gaugccaaagagucgaccc

SEQ ID NO: 2125740 - RNA, 19 nt, Artificial Sequence
  Description of Artificial Sequence: Synthetic oligonucleotide
uaucaucucaacauguagu

SEQ ID NO: 2125741 - RNA, 19 nt, Artificial Sequence
  Description of Artificial Sequence: Synthetic oligonucleotide
ugauuguuuuauuuaaccu

SEQ ID NO: 2125742 - RNA, 19 nt, Artificial Sequence
  Description of Artificial Sequence: Synthetic oligonucleotide
agaagugagccacaagggg

SEQ ID NO: 2125743 - RNA, 19 nt, Artificial Sequence
  Description of Artificial Sequence: Synthetic oligonucleotide
uuauuuaaccuaauauauc

SEQ ID NO: 2125744 - RNA, 19 nt, Artificial Sequence
  Description of Artificial Sequence: Synthetic oligonucleotide
ucauggaacaggcugacaa

SEQ ID NO: 2125745 - RNA, 19 nt, Artificial Sequence
  Description of Artificial Sequence: Synthetic oligonucleotide
uuggguccaacuuagauau

SEQ ID NO: 2125746 - RNA, 19 nt, Artificial Sequence
  Description of Artificial Sequence: Synthetic oligonucleotide
uccaacuuagauauggcuc

SEQ ID NO: 2125747 - RNA, 19 nt, Artificial Sequence
  Description of Artificial Sequence: Synthetic oligonucleotide
auaucaucucaacauguag

SEQ ID NO: 2125748 - RNA, 19 nt, Artificial Sequence
  Description of Artificial Sequence: Synthetic oligonucleotide
cagauugcaggacagauug

SEQ ID NO: 2125749 - RNA, 19 nt, Artificial Sequence
  Description of Artificial Sequence: Synthetic oligonucleotide
ugucauaggauuguaggag

SEQ ID NO: 2125750 - RNA, 19 nt, Artificial Sequence
  Description of Artificial Sequence: Synthetic oligonucleotide
uuugguaccaagucuuuga

SEQ ID NO: 2125751 - RNA, 19 nt, Artificial Sequence
  Description of Artificial Sequence: Synthetic oligonucleotide
acacucgaggaagagaugc

SEQ ID NO: 2125752 - RNA, 19 nt, Artificial Sequence
  Description of Artificial Sequence: Synthetic oligonucleotide
aaagagucgaccccaggca

SEQ ID NO: 2125753 - RNA, 19 nt, Artificial Sequence
  Description of Artificial Sequence: Synthetic oligonucleotide
caucagggcauauuuaccc

SEQ ID NO: 2125754 - RNA, 19 nt, Artificial Sequence
  Description of Artificial Sequence: Synthetic oligonucleotide
uuugauuguuuuauuuaac

SEQ ID NO: 2125755 - RNA, 19 nt, Artificial Sequence
  Description of Artificial Sequence: Synthetic oligonucleotide
agcgagagcucuucaaggc

SEQ ID NO: 2125756 - RNA, 19 nt, Artificial Sequence
  Description of Artificial Sequence: Synthetic oligonucleotide
aacaacuugaacacucgag

SEQ ID NO: 2125757 - RNA, 19 nt, Artificial Sequence
  Description of Artificial Sequence: Synthetic oligonucleotide
aagagaugccuccaccaag

SEQ ID NO: 2125758 - RNA, 19 nt, Artificial Sequence
  Description of Artificial Sequence: Synthetic oligonucleotide
ugauguaaaccaacugccc

SEQ ID NO: 2125759 - RNA, 19 nt, Artificial Sequence
  Description of Artificial Sequence: Synthetic oligonucleotide
auauggcucuucccaaucc

SEQ ID NO: 2125760 - RNA, 19 nt, Artificial Sequence
  Description of Artificial Sequence: Synthetic oligonucleotide
cugacaacacucuucuccg

SEQ ID NO: 2125761 - RNA, 19 nt, Artificial Sequence
  Description of Artificial Sequence: Synthetic oligonucleotide
aaugcacacauuucauccu

SEQ ID NO: 2125762 - RNA, 19 nt, Artificial Sequence
  Description of Artificial Sequence: Synthetic oligonucleotide
gucaacacagaacugagga

SEQ ID NO: 2125763 - RNA, 19 nt, Artificial Sequence
  Description of Artificial Sequence: Synthetic oligonucleotide
aaauaucaucucaacaugu

SEQ ID NO: 2125764 - RNA, 19 nt, Artificial Sequence
  Description of Artificial Sequence: Synthetic oligonucleotide
gauguaaaccaacugccca

SEQ ID NO: 2125765 - RNA, 19 nt, Artificial Sequence
  Description of Artificial Sequence: Synthetic oligonucleotide
gacaacacucuucuccggg

SEQ ID NO: 2125766 - RNA, 19 nt, Artificial Sequence
  Description of Artificial Sequence: Synthetic oligonucleotide
uagucaacacagaacugag

SEQ ID NO: 2125767 - RNA, 19 nt, Artificial Sequence
  Description of Artificial Sequence: Synthetic oligonucleotide
aggaagagaugccuccacc

SEQ ID NO: 2125768 - RNA, 19 nt, Artificial Sequence
  Description of Artificial Sequence: Synthetic oligonucleotide
aagugcugaugauguaaac

SEQ ID NO: 2125769 - RNA, 19 nt, Artificial Sequence
  Description of Artificial Sequence: Synthetic oligonucleotide
ucauaggauuguaggagcc

SEQ ID NO: 2125770 - RNA, 19 nt, Artificial Sequence
  Description of Artificial Sequence: Synthetic oligonucleotide
caaagagucgaccccaggc

SEQ ID NO: 2125771 - RNA, 19 nt, Artificial Sequence
  Description of Artificial Sequence: Synthetic oligonucleotide
aguggagcaggcaaggugg

SEQ ID NO: 2125772 - RNA, 19 nt, Artificial Sequence
  Description of Artificial Sequence: Synthetic oligonucleotide
uuugaggacaggaugucau

SEQ ID NO: 2125773 - RNA, 19 nt, Artificial Sequence
  Description of Artificial Sequence: Synthetic oligonucleotide
ugcacaaagccuaguggag

SEQ ID NO: 2125774 - RNA, 19 nt, Artificial Sequence
  Description of Artificial Sequence: Synthetic oligonucleotide
auauuuacccgggucugcc

SEQ ID NO: 2125775 - RNA, 19 nt, Artificial Sequence
  Description of Artificial Sequence: Synthetic oligonucleotide
gacgccagcagauacugug

SEQ ID NO: 2125776 - RNA, 19 nt, Artificial Sequence
  Description of Artificial Sequence: Synthetic oligonucleotide
auccaaguggcucugagaa

SEQ ID NO: 2125777 - RNA, 19 nt, Artificial Sequence
  Description of Artificial Sequence: Synthetic oligonucleotide
augccaaagagucgacccc

SEQ ID NO: 2125778 - RNA, 19 nt, Artificial Sequence
  Description of Artificial Sequence: Synthetic oligonucleotide
uugguaccaagucuuugag

SEQ ID NO: 2125779 - RNA, 19 nt, Artificial Sequence
  Description of Artificial Sequence: Synthetic oligonucleotide
agagccaacccucacgucu

SEQ ID NO: 2125780 - RNA, 19 nt, Artificial Sequence
  Description of Artificial Sequence: Synthetic oligonucleotide
cuuagauauggcucuuccc

SEQ ID NO: 2125781 - RNA, 19 nt, Artificial Sequence
  Description of Artificial Sequence: Synthetic oligonucleotide
aucagggcauauuuacccg

SEQ ID NO: 2125782 - RNA, 19 nt, Artificial Sequence
  Description of Artificial Sequence: Synthetic oligonucleotide
gucuacuaccaccaggugc

SEQ ID NO: 2125783 - RNA, 19 nt, Artificial Sequence
  Description of Artificial Sequence: Synthetic oligonucleotide
gcugacaacacucuucucc

SEQ ID NO: 2125784 - RNA, 19 nt, Artificial Sequence
  Description of Artificial Sequence: Synthetic oligonucleotide
aggccauagguccagcagg

SEQ ID NO: 2125785 - RNA, 19 nt, Artificial Sequence
  Description of Artificial Sequence: Synthetic oligonucleotide
uccaccaagcugagcagcg

SEQ ID NO: 2125786 - RNA, 19 nt, Artificial Sequence
  Description of Artificial Sequence: Synthetic oligonucleotide
caacugcccaagaacaagg

SEQ ID NO: 2125787 - RNA, 19 nt, Artificial Sequence
  Description of Artificial Sequence: Synthetic oligonucleotide
aaagccuaguggagcaggc

SEQ ID NO: 2125788 - RNA, 19 nt, Artificial Sequence
  Description of Artificial Sequence: Synthetic oligonucleotide
cuuugcacaaagccuagug

SEQ ID NO: 2125789 - RNA, 19 nt, Artificial Sequence
  Description of Artificial Sequence: Synthetic oligonucleotide
caacuucugacaugcagag

SEQ ID NO: 2125790 - RNA, 19 nt, Artificial Sequence
  Description of Artificial Sequence: Synthetic oligonucleotide
acaccagucaggcccaggg

SEQ ID NO: 2125791 - RNA, 19 nt, Artificial Sequence
  Description of Artificial Sequence: Synthetic oligonucleotide
cucaacauguagucaacac

SEQ ID NO: 2125792 - RNA, 19 nt, Artificial Sequence
  Description of Artificial Sequence: Synthetic oligonucleotide
uugugguugucuacuacca

SEQ ID NO: 2125793 - RNA, 19 nt, Artificial Sequence
  Description of Artificial Sequence: Synthetic oligonucleotide
cugcccaagaacaaggguc

SEQ ID NO: 2125794 - RNA, 19 nt, Artificial Sequence
  Description of Artificial Sequence: Synthetic oligonucleotide
uaucuugccagguccuucc

SEQ ID NO: 2125795 - RNA, 19 nt, Artificial Sequence
  Description of Artificial Sequence: Synthetic oligonucleotide
gucauaggauuguaggagc

SEQ ID NO: 2125796 - RNA, 19 nt, Artificial Sequence
  Description of Artificial Sequence: Synthetic oligonucleotide
uguagucaacacagaacug

SEQ ID NO: 2125797 - RNA, 19 nt, Artificial Sequence
  Description of Artificial Sequence: Synthetic oligonucleotide
uagugucauaggauuguag

SEQ ID NO: 2125798 - RNA, 19 nt, Artificial Sequence
  Description of Artificial Sequence: Synthetic oligonucleotide
ucacgucugggccagcgag

SEQ ID NO: 2125799 - RNA, 19 nt, Artificial Sequence
  Description of Artificial Sequence: Synthetic oligonucleotide
uauggcucuucccaaucca

SEQ ID NO: 2125800 - RNA, 19 nt, Artificial Sequence
  Description of Artificial Sequence: Synthetic oligonucleotide
aacaaggaaagugcugaug

SEQ ID NO: 2125801 - RNA, 19 nt, Artificial Sequence
  Description of Artificial Sequence: Synthetic oligonucleotide
aaccaacugcccaagaaca

SEQ ID NO: 2125802 - RNA, 19 nt, Artificial Sequence
  Description of Artificial Sequence: Synthetic oligonucleotide
cuaggcgguaucuugccag

SEQ ID NO: 2125803 - RNA, 19 nt, Artificial Sequence
  Description of Artificial Sequence: Synthetic oligonucleotide
cacauuucauccuuggaga

SEQ ID NO: 2125804 - RNA, 19 nt, Artificial Sequence
  Description of Artificial Sequence: Synthetic oligonucleotide
ucgaggaagagaugccucc

SEQ ID NO: 2125805 - RNA, 19 nt, Artificial Sequence
  Description of Artificial Sequence: Synthetic oligonucleotide
aacacagaacugaggacag

SEQ ID NO: 2125806 - RNA, 19 nt, Artificial Sequence
  Description of Artificial Sequence: Synthetic oligonucleotide
uggucaguuacaacuucug

SEQ ID NO: 2125807 - RNA, 19 nt, Artificial Sequence
  Description of Artificial Sequence: Synthetic oligonucleotide
cuuccuggucaccaggccg

SEQ ID NO: 2125808 - RNA, 19 nt, Artificial Sequence
  Description of Artificial Sequence: Synthetic oligonucleotide
ucaacacagaacugaggac

SEQ ID NO: 2125809 - RNA, 19 nt, Artificial Sequence
  Description of Artificial Sequence: Synthetic oligonucleotide
aguuacaacuucugacaug

SEQ ID NO: 2125810 - RNA, 19 nt, Artificial Sequence
  Description of Artificial Sequence: Synthetic oligonucleotide
guagucaacacagaacuga

SEQ ID NO: 2125811 - RNA, 19 nt, Artificial Sequence
  Description of Artificial Sequence: Synthetic oligonucleotide
uguaaaccaacugcccaag

SEQ ID NO: 2125812 - RNA, 19 nt, Artificial Sequence
  Description of Artificial Sequence: Synthetic oligonucleotide
aacuucugacaugcagagc

SEQ ID NO: 2125813 - RNA, 19 nt, Artificial Sequence
  Description of Artificial Sequence: Synthetic oligonucleotide
ugagguaggacagggagau

SEQ ID NO: 2125814 - RNA, 19 nt, Artificial Sequence
  Description of Artificial Sequence: Synthetic oligonucleotide
cagguuugaggacaggaug

SEQ ID NO: 2125815 - RNA, 19 nt, Artificial Sequence
  Description of Artificial Sequence: Synthetic oligonucleotide
aacuuagauauggcucuuc

SEQ ID NO: 2125816 - RNA, 19 nt, Artificial Sequence
  Description of Artificial Sequence: Synthetic oligonucleotide
aauaucaucucaacaugua

SEQ ID NO: 2125817 - RNA, 19 nt, Artificial Sequence
  Description of Artificial Sequence: Synthetic oligonucleotide
gugccucaagcccagagcc

SEQ ID NO: 2125818 - RNA, 19 nt, Artificial Sequence
  Description of Artificial Sequence: Synthetic oligonucleotide
gaggccauagguccagcag

SEQ ID NO: 2125819 - RNA, 19 nt, Artificial Sequence
  Description of Artificial Sequence: Synthetic oligonucleotide
agaugccaaagagucgacc

SEQ ID NO: 2125820 - RNA, 19 nt, Artificial Sequence
  Description of Artificial Sequence: Synthetic oligonucleotide
aaggccucccuucccuagg

SEQ ID NO: 2125821 - RNA, 19 nt, Artificial Sequence
  Description of Artificial Sequence: Synthetic oligonucleotide
gauugugguugucuacuac

SEQ ID NO: 2125822 - RNA, 19 nt, Artificial Sequence
  Description of Artificial Sequence: Synthetic oligonucleotide
gugaacaggcccuaguguc

SEQ ID NO: 2125823 - RNA, 19 nt, Artificial Sequence
  Description of Artificial Sequence: Synthetic oligonucleotide
caucucaacauguagucaa

SEQ ID NO: 2125824 - RNA, 19 nt, Artificial Sequence
  Description of Artificial Sequence: Synthetic oligonucleotide
aacugcccaagaacaaggg

SEQ ID NO: 2125825 - RNA, 19 nt, Artificial Sequence
  Description of Artificial Sequence: Synthetic oligonucleotide
gaaagugcugaugauguaa

SEQ ID NO: 2125826 - RNA, 19 nt, Artificial Sequence
  Description of Artificial Sequence: Synthetic oligonucleotide
auguaaaccaacugcccaa

SEQ ID NO: 2125827 - RNA, 19 nt, Artificial Sequence
  Description of Artificial Sequence: Synthetic oligonucleotide
aagugagccacaaggggug

SEQ ID NO: 2125828 - RNA, 19 nt, Artificial Sequence
  Description of Artificial Sequence: Synthetic oligonucleotide
aaguagaccgagggugaac

SEQ ID NO: 2125829 - RNA, 19 nt, Artificial Sequence
  Description of Artificial Sequence: Synthetic oligonucleotide
uuuugguaccaagucuuug

SEQ ID NO: 2125830 - RNA, 19 nt, Artificial Sequence
  Description of Artificial Sequence: Synthetic oligonucleotide
  modified_base (13)..(13): a, c, u, g, unknown or other
cuucuccggggunuuaaag

SEQ ID NO: 2125831 - RNA, 19 nt, Artificial Sequence
  Description of Artificial Sequence: Synthetic oligonucleotide
auaggauuguaggagccug

SEQ ID NO: 2125832 - RNA, 19 nt, Artificial Sequence
  Description of Artificial Sequence: Synthetic oligonucleotide
gauauggcucuucccaauc

SEQ ID NO: 2125833 - RNA, 19 nt, Artificial Sequence
  Description of Artificial Sequence: Synthetic oligonucleotide
ugcaggacagauugcacau

SEQ ID NO: 2125834 - RNA, 19 nt, Artificial Sequence
  Description of Artificial Sequence: Synthetic oligonucleotide
auuuaaccuaauauaucca

SEQ ID NO: 2125835 - RNA, 19 nt, Artificial Sequence
  Description of Artificial Sequence: Synthetic oligonucleotide
aaagugcugaugauguaaa

SEQ ID NO: 2125836 - RNA, 19 nt, Artificial Sequence
  Description of Artificial Sequence: Synthetic oligonucleotide
aguagaccgagggugaaca

SEQ ID NO: 2125837 - RNA, 19 nt, Artificial Sequence
  Description of Artificial Sequence: Synthetic oligonucleotide
uucccuaggcgguaucuug

SEQ ID NO: 2125838 - RNA, 19 nt, Artificial Sequence
  Description of Artificial Sequence: Synthetic oligonucleotide
ugugguugucuacuaccac

SEQ ID NO: 2125839 - RNA, 19 nt, Artificial Sequence
  Description of Artificial Sequence: Synthetic oligonucleotide
acagauugcacaugcuuuu

SEQ ID NO: 2125840 - RNA, 19 nt, Artificial Sequence
  Description of Artificial Sequence: Synthetic oligonucleotide
ugacaacacucuucuccgg

SEQ ID NO: 2125841 - RNA, 19 nt, Artificial Sequence
  Description of Artificial Sequence: Synthetic oligonucleotide
ugcacacauuucauccuug

SEQ ID NO: 2125842 - RNA, 19 nt, Artificial Sequence
  Description of Artificial Sequence: Synthetic oligonucleotide
ggguccaacuuagauaugg

SEQ ID NO: 2125843 - RNA, 19 nt, Artificial Sequence
  Description of Artificial Sequence: Synthetic oligonucleotide
ucggguaccacugcacaag

SEQ ID NO: 2125844 - RNA, 19 nt, Artificial Sequence
  Description of Artificial Sequence: Synthetic oligonucleotide
agaucgcugccccugugag

SEQ ID NO: 2125845 - RNA, 19 nt, Artificial Sequence
  Description of Artificial Sequence: Synthetic oligonucleotide
ucccuaggcgguaucuugc

SEQ ID NO: 2125846 - RNA, 19 nt, Artificial Sequence
  Description of Artificial Sequence: Synthetic oligonucleotide
uagauauggcucuucccaa

SEQ ID NO: 2125847 - RNA, 19 nt, Artificial Sequence
  Description of Artificial Sequence: Synthetic oligonucleotide
cauggaacaggcugacaac

SEQ ID NO: 2125848 - RNA, 19 nt, Artificial Sequence
  Description of Artificial Sequence: Synthetic oligonucleotide
auuuacccgggucugccca

SEQ ID NO: 2125849 - RNA, 19 nt, Artificial Sequence
  Description of Artificial Sequence: Synthetic oligonucleotide
uccuuccuggucaccaggc

SEQ ID NO: 2125850 - RNA, 19 nt, Artificial Sequence
  Description of Artificial Sequence: Synthetic oligonucleotide
uggaacaggcugacaacac

SEQ ID NO: 2125851 - RNA, 19 nt, Artificial Sequence
  Description of Artificial Sequence: Synthetic oligonucleotide
gugucauaggauuguagga

SEQ ID NO: 2125852 - RNA, 19 nt, Artificial Sequence
  Description of Artificial Sequence: Synthetic oligonucleotide
caggagaagggcaagucca

SEQ ID NO: 2125853 - RNA, 19 nt, Artificial Sequence
  Description of Artificial Sequence: Synthetic oligonucleotide
caacccucacgucugggcc

SEQ ID NO: 2125854 - RNA, 19 nt, Artificial Sequence
  Description of Artificial Sequence: Synthetic oligonucleotide
auugcaggacagauugcac

SEQ ID NO: 2125855 - RNA, 19 nt, Artificial Sequence
  Description of Artificial Sequence: Synthetic oligonucleotide
ggaacaaggaaagugcuga

SEQ ID NO: 2125856 - RNA, 19 nt, Artificial Sequence
  Description of Artificial Sequence: Synthetic oligonucleotide
ucaucucaacauguaguca

SEQ ID NO: 2125857 - RNA, 19 nt, Artificial Sequence
  Description of Artificial Sequence: Synthetic oligonucleotide
uauuuacccgggucugccc

SEQ ID NO: 2125858 - RNA, 19 nt, Artificial Sequence
  Description of Artificial Sequence: Synthetic oligonucleotide
caggccgaccaccugauug

SEQ ID NO: 2125859 - RNA, 19 nt, Artificial Sequence
  Description of Artificial Sequence: Synthetic oligonucleotide
caaagccuaguggagcagg

SEQ ID NO: 2125860 - RNA, 19 nt, Artificial Sequence
  Description of Artificial Sequence: Synthetic oligonucleotide
  modified_base (14)..(14): a, c, u, g, unknown or other
ucuucuccggggunuuaaa

SEQ ID NO: 2125861 - RNA, 19 nt, Artificial Sequence
  Description of Artificial Sequence: Synthetic oligonucleotide
uccaaguggcucugagaag

SEQ ID NO: 2125862 - RNA, 19 nt, Artificial Sequence
  Description of Artificial Sequence: Synthetic oligonucleotide
auggaacaggcugacaaca

SEQ ID NO: 2125863 - RNA, 19 nt, Artificial Sequence
  Description of Artificial Sequence: Synthetic oligonucleotide
cuuggguccaacuuagaua

SEQ ID NO: 2125864 - RNA, 19 nt, Artificial Sequence
  Description of Artificial Sequence: Synthetic oligonucleotide
aucgcugccccugugaggu

SEQ ID NO: 2125865 - RNA, 19 nt, Artificial Sequence
  Description of Artificial Sequence: Synthetic oligonucleotide
agcggcucccaucagggca

SEQ ID NO: 2125866 - RNA, 19 nt, Artificial Sequence
  Description of Artificial Sequence: Synthetic oligonucleotide
acugcccaagaacaagggu

SEQ ID NO: 2125867 - RNA, 19 nt, Artificial Sequence
  Description of Artificial Sequence: Synthetic oligonucleotide
gaucgcugccccugugagg

SEQ ID NO: 2125868 - RNA, 19 nt, Artificial Sequence
  Description of Artificial Sequence: Synthetic oligonucleotide
aggcccuagugucauagga

SEQ ID NO: 2125869 - RNA, 19 nt, Artificial Sequence
  Description of Artificial Sequence: Synthetic oligonucleotide
caggcugacaacacucuuc

SEQ ID NO: 2125870 - RNA, 19 nt, Artificial Sequence
  Description of Artificial Sequence: Synthetic oligonucleotide
aacccucacgucugggcca

SEQ ID NO: 2125871 - RNA, 19 nt, Artificial Sequence
  Description of Artificial Sequence: Synthetic oligonucleotide
caagaacaagggucuggcc

SEQ ID NO: 2125872 - RNA, 19 nt, Artificial Sequence
  Description of Artificial Sequence: Synthetic oligonucleotide
aucucaacauguagucaac

SEQ ID NO: 2125873 - RNA, 19 nt, Artificial Sequence
  Description of Artificial Sequence: Synthetic oligonucleotide
agcccggaacaacuugaac

SEQ ID NO: 2125874 - RNA, 19 nt, Artificial Sequence
  Description of Artificial Sequence: Synthetic oligonucleotide
agguuugaggacaggaugu

SEQ ID NO: 2125875 - RNA, 19 nt, Artificial Sequence
  Description of Artificial Sequence: Synthetic oligonucleotide
gaagagaugccuccaccaa

SEQ ID NO: 2125876 - RNA, 19 nt, Artificial Sequence
  Description of Artificial Sequence: Synthetic oligonucleotide
gaacacucgaggaagagau

SEQ ID NO: 2125877 - RNA, 19 nt, Artificial Sequence
  Description of Artificial Sequence: Synthetic oligonucleotide
acaggcccuagugucauag

SEQ ID NO: 2125878 - RNA, 19 nt, Artificial Sequence
  Description of Artificial Sequence: Synthetic oligonucleotide
ggaacaacuugaacacucg

SEQ ID NO: 2125879 - RNA, 19 nt, Artificial Sequence
  Description of Artificial Sequence: Synthetic oligonucleotide
guaccaagucuuugaggcc

SEQ ID NO: 2125880 - RNA, 19 nt, Artificial Sequence
  Description of Artificial Sequence: Synthetic oligonucleotide
gcccggaacaacuugaaca

SEQ ID NO: 2125881 - RNA, 19 nt, Artificial Sequence
  Description of Artificial Sequence: Synthetic oligonucleotide
ugccaaagagucgacccca

SEQ ID NO: 2125882 - RNA, 19 nt, Artificial Sequence
  Description of Artificial Sequence: Synthetic oligonucleotide
cauauuuacccgggucugc

SEQ ID NO: 2125883 - RNA, 19 nt, Artificial Sequence
  Description of Artificial Sequence: Synthetic oligonucleotide
uuuacccgggucugcccag

SEQ ID NO: 2125884 - RNA, 19 nt, Artificial Sequence
  Description of Artificial Sequence: Synthetic oligonucleotide
agauauggcucuucccaau

SEQ ID NO: 2125885 - RNA, 19 nt, Artificial Sequence
  Description of Artificial Sequence: Synthetic oligonucleotide
ggagaugccaaagagucga

SEQ ID NO: 2125886 - RNA, 19 nt, Artificial Sequence
  Description of Artificial Sequence: Synthetic oligonucleotide
cacaaagccuaguggagca

SEQ ID NO: 2125887 - RNA, 19 nt, Artificial Sequence
  Description of Artificial Sequence: Synthetic oligonucleotide
gaagaaguagaccgagggu

SEQ ID NO: 2125888 - RNA, 19 nt, Artificial Sequence
  Description of Artificial Sequence: Synthetic oligonucleotide
agccuaguggagcaggcaa

SEQ ID NO: 2125889 - RNA, 19 nt, Artificial Sequence
  Description of Artificial Sequence: Synthetic oligonucleotide
gaagugagccacaaggggu

SEQ ID NO: 2125890 - RNA, 19 nt, Artificial Sequence
  Description of Artificial Sequence: Synthetic oligonucleotide
ugaggccauagguccagca

SEQ ID NO: 2125891 - RNA, 19 nt, Artificial Sequence
  Description of Artificial Sequence: Synthetic oligonucleotide
gguggaucauggaacaggc

SEQ ID NO: 2125892 - RNA, 19 nt, Artificial Sequence
  Description of Artificial Sequence: Synthetic oligonucleotide
guaggagccugguggauca

SEQ ID NO: 2125893 - RNA, 19 nt, Artificial Sequence
  Description of Artificial Sequence: Synthetic oligonucleotide
cucgaggaagagaugccuc

SEQ ID NO: 2125894 - RNA, 19 nt, Artificial Sequence
  Description of Artificial Sequence: Synthetic oligonucleotide
cccgggucugcccagaucg

SEQ ID NO: 2125895 - RNA, 19 nt, Artificial Sequence
  Description of Artificial Sequence: Synthetic oligonucleotide
agauugcaggacagauugc

SEQ ID NO: 2125896 - RNA, 19 nt, Artificial Sequence
  Description of Artificial Sequence: Synthetic oligonucleotide
uugcacugcccagaggggc

SEQ ID NO: 2125897 - RNA, 19 nt, Artificial Sequence
  Description of Artificial Sequence: Synthetic oligonucleotide
aggaagaaguagaccgagg

SEQ ID NO: 2125898 - RNA, 19 nt, Artificial Sequence
  Description of Artificial Sequence: Synthetic oligonucleotide
cacugcacaaggguagagc

SEQ ID NO: 2125899 - RNA, 19 nt, Artificial Sequence
  Description of Artificial Sequence: Synthetic oligonucleotide
caaggggugcaaaugcaca

SEQ ID NO: 2125900 - RNA, 19 nt, Artificial Sequence
  Description of Artificial Sequence: Synthetic oligonucleotide
ccccaaugagcagagaugg

SEQ ID NO: 2125901 - RNA, 19 nt, Artificial Sequence
  Description of Artificial Sequence: Synthetic oligonucleotide
cuucccaauccagagccac

SEQ ID NO: 2125902 - RNA, 19 nt, Artificial Sequence
  Description of Artificial Sequence: Synthetic oligonucleotide
agaaguagaccgaggguga

SEQ ID NO: 2125903 - RNA, 19 nt, Artificial Sequence
  Description of Artificial Sequence: Synthetic oligonucleotide
aggacagauugcaggacag

SEQ ID NO: 2125904 - RNA, 19 nt, Artificial Sequence
  Description of Artificial Sequence: Synthetic oligonucleotide
gaucauggaacaggcugac

SEQ ID NO: 2125905 - RNA, 19 nt, Artificial Sequence
  Description of Artificial Sequence: Synthetic oligonucleotide
cccaucagggcauauuuac

SEQ ID NO: 2125906 - RNA, 19 nt, Artificial Sequence
  Description of Artificial Sequence: Synthetic oligonucleotide
ugcccagaggggcaaggcu

SEQ ID NO: 2125907 - RNA, 19 nt, Artificial Sequence
  Description of Artificial Sequence: Synthetic oligonucleotide
ugccucaagcccagagccc

SEQ ID NO: 2125908 - RNA, 19 nt, Artificial Sequence
  Description of Artificial Sequence: Synthetic oligonucleotide
aggccgaccaccugauugu

SEQ ID NO: 2125909 - RNA, 19 nt, Artificial Sequence
  Description of Artificial Sequence: Synthetic oligonucleotide
guagagccaacccucacgu

SEQ ID NO: 2125910 - RNA, 19 nt, Artificial Sequence
  Description of Artificial Sequence: Synthetic oligonucleotide
ggcaugcccagguuugagg

SEQ ID NO: 2125911 - RNA, 19 nt, Artificial Sequence
  Description of Artificial Sequence: Synthetic oligonucleotide
agagcucuucaaggccucc

SEQ ID NO: 2125912 - RNA, 19 nt, Artificial Sequence
  Description of Artificial Sequence: Synthetic oligonucleotide
ggugccucaagcccagagc

SEQ ID NO: 2125913 - RNA, 19 nt, Artificial Sequence
  Description of Artificial Sequence: Synthetic oligonucleotide
caagguggucaguuacaac

SEQ ID NO: 2125914 - RNA, 19 nt, Artificial Sequence
  Description of Artificial Sequence: Synthetic oligonucleotide
gucgaccccaggcagcccc

SEQ ID NO: 2125915 - RNA, 19 nt, Artificial Sequence
  Description of Artificial Sequence: Synthetic oligonucleotide
ugaggacagauugcaggac

SEQ ID NO: 2125916 - RNA, 19 nt, Artificial Sequence
  Description of Artificial Sequence: Synthetic oligonucleotide
gggugaacaggcccuagug

SEQ ID NO: 2125917 - RNA, 19 nt, Artificial Sequence
  Description of Artificial Sequence: Synthetic oligonucleotide
agaugggaugaagacgcca

SEQ ID NO: 2125918 - RNA, 19 nt, Artificial Sequence
  Description of Artificial Sequence: Synthetic oligonucleotide
guagaccgagggugaacag

SEQ ID NO: 2125919 - RNA, 19 nt, Artificial Sequence
  Description of Artificial Sequence: Synthetic oligonucleotide
aacacucgaggaagagaug

SEQ ID NO: 2125920 - RNA, 19 nt, Artificial Sequence
  Description of Artificial Sequence: Synthetic oligonucleotide
acauuugcuccugcuguug

SEQ ID NO: 2125921 - RNA, 19 nt, Artificial Sequence
  Description of Artificial Sequence: Synthetic oligonucleotide
agggaacaaggaaagugcu

SEQ ID NO: 2125922 - RNA, 19 nt, Artificial Sequence
  Description of Artificial Sequence: Synthetic oligonucleotide
guugcacugcccagagggg

SEQ ID NO: 2125923 - RNA, 19 nt, Artificial Sequence
  Description of Artificial Sequence: Synthetic oligonucleotide
ucccaucagggcauauuua

SEQ ID NO: 2125924 - RNA, 19 nt, Artificial Sequence
  Description of Artificial Sequence: Synthetic oligonucleotide
gaugaagacgccagcagau

SEQ ID NO: 2125925 - RNA, 19 nt, Artificial Sequence
  Description of Artificial Sequence: Synthetic oligonucleotide
cacaaggggugcaaaugca

SEQ ID NO: 2125926 - RNA, 19 nt, Artificial Sequence
  Description of Artificial Sequence: Synthetic oligonucleotide
agagcccggaacaacuuga

SEQ ID NO: 2125927 - RNA, 19 nt, Artificial Sequence
  Description of Artificial Sequence: Synthetic oligonucleotide
guccaacuuagauauggcu

SEQ ID NO: 2125928 - RNA, 19 nt, Artificial Sequence
  Description of Artificial Sequence: Synthetic oligonucleotide
gagccaacccucacgucug

SEQ ID NO: 2125929 - RNA, 19 nt, Artificial Sequence
  Description of Artificial Sequence: Synthetic oligonucleotide
ccaggagaagggcaagucc

SEQ ID NO: 2125930 - RNA, 19 nt, Artificial Sequence
  Description of Artificial Sequence: Synthetic oligonucleotide
ggucaguuacaacuucuga

SEQ ID NO: 2125931 - RNA, 19 nt, Artificial Sequence
  Description of Artificial Sequence: Synthetic oligonucleotide
ccaucagggcauauuuacc

SEQ ID NO: 2125932 - RNA, 19 nt, Artificial Sequence
  Description of Artificial Sequence: Synthetic oligonucleotide
accaccugauugugguugu

SEQ ID NO: 2125933 - RNA, 19 nt, Artificial Sequence
  Description of Artificial Sequence: Synthetic oligonucleotide
cagagcccggaacaacuug

SEQ ID NO: 2125934 - RNA, 19 nt, Artificial Sequence
  Description of Artificial Sequence: Synthetic oligonucleotide
cuccaccaagcugagcagc

SEQ ID NO: 2125935 - RNA, 19 nt, Artificial Sequence
  Description of Artificial Sequence: Synthetic oligonucleotide
gacagauugcacaugcuuu

SEQ ID NO: 2125936 - RNA, 19 nt, Artificial Sequence
  Description of Artificial Sequence: Synthetic oligonucleotide
gacagauugcaggacagau

SEQ ID NO: 2125937 - RNA, 19 nt, Artificial Sequence
  Description of Artificial Sequence: Synthetic oligonucleotide
uggcugagaccagggaccc

SEQ ID NO: 2125938 - RNA, 19 nt, Artificial Sequence
  Description of Artificial Sequence: Synthetic oligonucleotide
guaaaccaacugcccaaga

SEQ ID NO: 2125939 - RNA, 19 nt, Artificial Sequence
  Description of Artificial Sequence: Synthetic oligonucleotide
agggcauauuuacccgggu

SEQ ID NO: 2125940 - RNA, 19 nt, Artificial Sequence
  Description of Artificial Sequence: Synthetic oligonucleotide
gcuguugcacugcccagag

SEQ ID NO: 2125941 - RNA, 19 nt, Artificial Sequence
  Description of Artificial Sequence: Synthetic oligonucleotide
agccacaaggggugcaaau

SEQ ID NO: 2125942 - RNA, 19 nt, Artificial Sequence
  Description of Artificial Sequence: Synthetic oligonucleotide
ccagcgagagcucuucaag

SEQ ID NO: 2125943 - RNA, 19 nt, Artificial Sequence
  Description of Artificial Sequence: Synthetic oligonucleotide
ccugugagguaggacaggg

SEQ ID NO: 2125944 - RNA, 19 nt, Artificial Sequence
  Description of Artificial Sequence: Synthetic oligonucleotide
uuucauccccuugggucca

SEQ ID NO: 2125945 - RNA, 19 nt, Artificial Sequence
  Description of Artificial Sequence: Synthetic oligonucleotide
ggacauuugcuccugcugu

SEQ ID NO: 2125946 - RNA, 19 nt, Artificial Sequence
  Description of Artificial Sequence: Synthetic oligonucleotide
gcgagagcucuucaaggcc

SEQ ID NO: 2125947 - RNA, 19 nt, Artificial Sequence
  Description of Artificial Sequence: Synthetic oligonucleotide
ggaucauggaacaggcuga

SEQ ID NO: 2125948 - RNA, 19 nt, Artificial Sequence
  Description of Artificial Sequence: Synthetic oligonucleotide
gcacaaagccuaguggagc

SEQ ID NO: 2125949 - RNA, 19 nt, Artificial Sequence
  Description of Artificial Sequence: Synthetic oligonucleotide
uggcaugcccagguuugag

SEQ ID NO: 2125950 - RNA, 19 nt, Artificial Sequence
  Description of Artificial Sequence: Synthetic oligonucleotide
caggcccuagugucauagg

SEQ ID NO: 2125951 - RNA, 19 nt, Artificial Sequence
  Description of Artificial Sequence: Synthetic oligonucleotide
ugccagguccuuccugguc

SEQ ID NO: 2125952 - RNA, 19 nt, Artificial Sequence
  Description of Artificial Sequence: Synthetic oligonucleotide
agagccaccccuggcuuug

SEQ ID NO: 2125953 - RNA, 19 nt, Artificial Sequence
  Description of Artificial Sequence: Synthetic oligonucleotide
cggaacaacuugaacacuc

SEQ ID NO: 2125954 - RNA, 19 nt, Artificial Sequence
  Description of Artificial Sequence: Synthetic oligonucleotide
gcauauuuacccgggucug

SEQ ID NO: 2125955 - RNA, 19 nt, Artificial Sequence
  Description of Artificial Sequence: Synthetic oligonucleotide
guaucuugccagguccuuc

SEQ ID NO: 2125956 - RNA, 19 nt, Artificial Sequence
  Description of Artificial Sequence: Synthetic oligonucleotide
ccugauugugguugucuac

SEQ ID NO: 2125957 - RNA, 19 nt, Artificial Sequence
  Description of Artificial Sequence: Synthetic oligonucleotide
ccuaguggagcaggcaagg

SEQ ID NO: 2125958 - RNA, 19 nt, Artificial Sequence
  Description of Artificial Sequence: Synthetic oligonucleotide
ccaacccucacgucugggc

SEQ ID NO: 2125959 - RNA, 19 nt, Artificial Sequence
  Description of Artificial Sequence: Synthetic oligonucleotide
gguggucaguuacaacuuc

SEQ ID NO: 2125960 - RNA, 19 nt, Artificial Sequence
  Description of Artificial Sequence: Synthetic oligonucleotide
ggucugcccagaucgcugc

SEQ ID NO: 2125961 - RNA, 19 nt, Artificial Sequence
  Description of Artificial Sequence: Synthetic oligonucleotide
ccaacuuagauauggcucu

SEQ ID NO: 2125962 - RNA, 19 nt, Artificial Sequence
  Description of Artificial Sequence: Synthetic oligonucleotide
uggguccaacuuagauaug

SEQ ID NO: 2125963 - RNA, 19 nt, Artificial Sequence
  Description of Artificial Sequence: Synthetic oligonucleotide
gguccaacuuagauauggc

SEQ ID NO: 2125964 - RNA, 19 nt, Artificial Sequence
  Description of Artificial Sequence: Synthetic oligonucleotide
gggcauauuuacccggguc

SEQ ID NO: 2125965 - RNA, 19 nt, Artificial Sequence
  Description of Artificial Sequence: Synthetic oligonucleotide
gguugucuacuaccaccag

SEQ ID NO: 2125966 - RNA, 19 nt, Artificial Sequence
  Description of Artificial Sequence: Synthetic oligonucleotide
cugcacaaggguagagcca

SEQ ID NO: 2125967 - RNA, 19 nt, Artificial Sequence
  Description of Artificial Sequence: Synthetic oligonucleotide
gggucagggaacaaggaaa

SEQ ID NO: 2125968 - RNA, 19 nt, Artificial Sequence
  Description of Artificial Sequence: Synthetic oligonucleotide
ccaacugcccaagaacaag

SEQ ID NO: 2125969 - RNA, 19 nt, Artificial Sequence
  Description of Artificial Sequence: Synthetic oligonucleotide
cugauugugguugucuacu

SEQ ID NO: 2125970 - RNA, 19 nt, Artificial Sequence
  Description of Artificial Sequence: Synthetic oligonucleotide
ggcaaguccaaggugugga

SEQ ID NO: 2125971 - RNA, 19 nt, Artificial Sequence
  Description of Artificial Sequence: Synthetic oligonucleotide
uaccaccaggugccucaag

SEQ ID NO: 2125972 - RNA, 19 nt, Artificial Sequence
  Description of Artificial Sequence: Synthetic oligonucleotide
gaagacgccagcagauacu

SEQ ID NO: 2125973 - RNA, 19 nt, Artificial Sequence
  Description of Artificial Sequence: Synthetic oligonucleotide
acccgggucugcccagauc

SEQ ID NO: 2125974 - RNA, 19 nt, Artificial Sequence
  Description of Artificial Sequence: Synthetic oligonucleotide
cugguggaucauggaacag

SEQ ID NO: 2125975 - RNA, 19 nt, Artificial Sequence
  Description of Artificial Sequence: Synthetic oligonucleotide
aggggcucggguaccacug

SEQ ID NO: 2125976 - RNA, 19 nt, Artificial Sequence
  Description of Artificial Sequence: Synthetic oligonucleotide
ggagaagggcaaguccaag

SEQ ID NO: 2125977 - RNA, 19 nt, Artificial Sequence
  Description of Artificial Sequence: Synthetic oligonucleotide
gguaggacagggagaugcc

SEQ ID NO: 2125978 - RNA, 19 nt, Artificial Sequence
  Description of Artificial Sequence: Synthetic oligonucleotide
cccuagugucauaggauug

SEQ ID NO: 2125979 - RNA, 19 nt, Artificial Sequence
  Description of Artificial Sequence: Synthetic oligonucleotide
gagaugccaaagagucgac

SEQ ID NO: 2125980 - RNA, 19 nt, Artificial Sequence
  Description of Artificial Sequence: Synthetic oligonucleotide
gaaguagaccgagggugaa

SEQ ID NO: 2125981 - RNA, 19 nt, Artificial Sequence
  Description of Artificial Sequence: Synthetic oligonucleotide
caccaggccgaccaccuga

SEQ ID NO: 2125982 - RNA, 19 nt, Artificial Sequence
  Description of Artificial Sequence: Synthetic oligonucleotide
uagagccaacccucacguc

SEQ ID NO: 2125983 - RNA, 19 nt, Artificial Sequence
  Description of Artificial Sequence: Synthetic oligonucleotide
agggcaaguccaaggugug

SEQ ID NO: 2125984 - RNA, 19 nt, Artificial Sequence
  Description of Artificial Sequence: Synthetic oligonucleotide
cagaucgcugccccuguga

SEQ ID NO: 2125985 - RNA, 19 nt, Artificial Sequence
  Description of Artificial Sequence: Synthetic oligonucleotide
ccccuuggguccaacuuag

SEQ ID NO: 2125986 - RNA, 19 nt, Artificial Sequence
  Description of Artificial Sequence: Synthetic oligonucleotide
agaggggcucggguaccac

SEQ ID NO: 2125987 - RNA, 19 nt, Artificial Sequence
  Description of Artificial Sequence: Synthetic oligonucleotide
ccaaagagucgaccccagg

SEQ ID NO: 2125988 - RNA, 19 nt, Artificial Sequence
  Description of Artificial Sequence: Synthetic oligonucleotide
aucauggaacaggcugaca

SEQ ID NO: 2125989 - RNA, 19 nt, Artificial Sequence
  Description of Artificial Sequence: Synthetic oligonucleotide
agguggucaguuacaacuu

SEQ ID NO: 2125990 - RNA, 19 nt, Artificial Sequence
  Description of Artificial Sequence: Synthetic oligonucleotide
cucggguaccacugcacaa

SEQ ID NO: 2125991 - RNA, 19 nt, Artificial Sequence
  Description of Artificial Sequence: Synthetic oligonucleotide
cacagaacugaggacagau

SEQ ID NO: 2125992 - RNA, 19 nt, Artificial Sequence
  Description of Artificial Sequence: Synthetic oligonucleotide
gguuugaggacaggauguc

SEQ ID NO: 2125993 - RNA, 19 nt, Artificial Sequence
  Description of Artificial Sequence: Synthetic oligonucleotide
cugugagguaggacaggga

SEQ ID NO: 2125994 - RNA, 19 nt, Artificial Sequence
  Description of Artificial Sequence: Synthetic oligonucleotide
gaccgagggugaacaggcc

SEQ ID NO: 2125995 - RNA, 19 nt, Artificial Sequence
  Description of Artificial Sequence: Synthetic oligonucleotide
ccauagguccagcaggcca

SEQ ID NO: 2125996 - RNA, 19 nt, Artificial Sequence
  Description of Artificial Sequence: Synthetic oligonucleotide
acgccagcagauacuguga

SEQ ID NO: 2125997 - RNA, 19 nt, Artificial Sequence
  Description of Artificial Sequence: Synthetic oligonucleotide
guggucaguuacaacuucu

SEQ ID NO: 2125998 - RNA, 19 nt, Artificial Sequence
  Description of Artificial Sequence: Synthetic oligonucleotide
acccucacgucugggccag

SEQ ID NO: 2125999 - RNA, 19 nt, Artificial Sequence
  Description of Artificial Sequence: Synthetic oligonucleotide
agucgaccccaggcagccc

SEQ ID NO: 2126000 - RNA, 19 nt, Artificial Sequence
  Description of Artificial Sequence: Synthetic oligonucleotide
aggguagagccaacccuca

SEQ ID NO: 2126001 - RNA, 19 nt, Artificial Sequence
  Description of Artificial Sequence: Synthetic oligonucleotide
ggcgguaucuugccagguc

SEQ ID NO: 2126002 - RNA, 19 nt, Artificial Sequence
  Description of Artificial Sequence: Synthetic oligonucleotide
gacccugggaggaggugca

SEQ ID NO: 2126003 - RNA, 19 nt, Artificial Sequence
  Description of Artificial Sequence: Synthetic oligonucleotide
aacaggcccuagugucaua

SEQ ID NO: 2126004 - RNA, 19 nt, Artificial Sequence
  Description of Artificial Sequence: Synthetic oligonucleotide
ggcuuugcacaaagccuag

SEQ ID NO: 2126005 - RNA, 19 nt, Artificial Sequence
  Description of Artificial Sequence: Synthetic oligonucleotide
gucugcccagaucgcugcc

SEQ ID NO: 2126006 - RNA, 19 nt, Artificial Sequence
  Description of Artificial Sequence: Synthetic oligonucleotide
uuacccgggucugcccaga

SEQ ID NO: 2126007 - RNA, 19 nt, Artificial Sequence
  Description of Artificial Sequence: Synthetic oligonucleotide
ccaggaagaaguagaccga

SEQ ID NO: 2126008 - RNA, 19 nt, Artificial Sequence
  Description of Artificial Sequence: Synthetic oligonucleotide
uacuaccaccaggugccuc

SEQ ID NO: 2126009 - RNA, 19 nt, Artificial Sequence
  Description of Artificial Sequence: Synthetic oligonucleotide
cacgucugggccagcgaga

SEQ ID NO: 2126010 - RNA, 19 nt, Artificial Sequence
  Description of Artificial Sequence: Synthetic oligonucleotide
cacaccagucaggcccagg

SEQ ID NO: 2126011 - RNA, 19 nt, Artificial Sequence
  Description of Artificial Sequence: Synthetic oligonucleotide
gcucggguaccacugcaca

SEQ ID NO: 2126012 - RNA, 19 nt, Artificial Sequence
  Description of Artificial Sequence: Synthetic oligonucleotide
gggcaaguccaaggugugg

SEQ ID NO: 2126013 - RNA, 19 nt, Artificial Sequence
  Description of Artificial Sequence: Synthetic oligonucleotide
cuagugucauaggauugua

SEQ ID NO: 2126014 - RNA, 19 nt, Artificial Sequence
  Description of Artificial Sequence: Synthetic oligonucleotide
cccuaggcgguaucuugcc

SEQ ID NO: 2126015 - RNA, 19 nt, Artificial Sequence
  Description of Artificial Sequence: Synthetic oligonucleotide
cuucugacaugcagagccu

SEQ ID NO: 2126016 - RNA, 19 nt, Artificial Sequence
  Description of Artificial Sequence: Synthetic oligonucleotide
uggagcaggcaaggugguc

SEQ ID NO: 2126017 - RNA, 19 nt, Artificial Sequence
  Description of Artificial Sequence: Synthetic oligonucleotide
ggucaccaggccgaccacc

SEQ ID NO: 2126018 - RNA, 19 nt, Artificial Sequence
  Description of Artificial Sequence: Synthetic oligonucleotide
ugccccugugagguaggac

SEQ ID NO: 2126019 - RNA, 19 nt, Artificial Sequence
  Description of Artificial Sequence: Synthetic oligonucleotide
gcaagguggucaguuacaa

SEQ ID NO: 2126020 - RNA, 19 nt, Artificial Sequence
  Description of Artificial Sequence: Synthetic oligonucleotide
ggcaagguggucaguuaca

SEQ ID NO: 2126021 - RNA, 19 nt, Artificial Sequence
  Description of Artificial Sequence: Synthetic oligonucleotide
caacacucuucuccggggu

SEQ ID NO: 2126022 - RNA, 19 nt, Artificial Sequence
  Description of Artificial Sequence: Synthetic oligonucleotide
caccagucaggcccaggga

SEQ ID NO: 2126023 - RNA, 19 nt, Artificial Sequence
  Description of Artificial Sequence: Synthetic oligonucleotide
gagcccggaacaacuugaa

SEQ ID NO: 2126024 - RNA, 19 nt, Artificial Sequence
  Description of Artificial Sequence: Synthetic oligonucleotide
cucacgucugggccagcga

SEQ ID NO: 2126025 - RNA, 19 nt, Artificial Sequence
  Description of Artificial Sequence: Synthetic oligonucleotide
uacccgggucugcccagau

SEQ ID NO: 2126026 - RNA, 19 nt, Artificial Sequence
  Description of Artificial Sequence: Synthetic oligonucleotide
ggguagagccaacccucac

SEQ ID NO: 2126027 - RNA, 19 nt, Artificial Sequence
  Description of Artificial Sequence: Synthetic oligonucleotide
gaacaggcccuagugucau

SEQ ID NO: 2126028 - RNA, 19 nt, Artificial Sequence
  Description of Artificial Sequence: Synthetic oligonucleotide
caggcaagguggucaguua

SEQ ID NO: 2126029 - RNA, 19 nt, Artificial Sequence
  Description of Artificial Sequence: Synthetic oligonucleotide
aggcgguaucuugccaggu

SEQ ID NO: 2126030 - RNA, 19 nt, Artificial Sequence
  Description of Artificial Sequence: Synthetic oligonucleotide
cggguaccacugcacaagg

SEQ ID NO: 2126031 - RNA, 19 nt, Artificial Sequence
  Description of Artificial Sequence: Synthetic oligonucleotide
gccaaagagucgaccccag

SEQ ID NO: 2126032 - RNA, 19 nt, Artificial Sequence
  Description of Artificial Sequence: Synthetic oligonucleotide
ucauccccuuggguccaac

SEQ ID NO: 2126033 - RNA, 19 nt, Artificial Sequence
  Description of Artificial Sequence: Synthetic oligonucleotide
gccgaccaccugauugugg

SEQ ID NO: 2126034 - RNA, 19 nt, Artificial Sequence
  Description of Artificial Sequence: Synthetic oligonucleotide
aggcccugugcaguguuuu

SEQ ID NO: 2126035 - RNA, 19 nt, Artificial Sequence
  Description of Artificial Sequence: Synthetic oligonucleotide
ccccuggcuuugcacaaag

SEQ ID NO: 2126036 - RNA, 19 nt, Artificial Sequence
  Description of Artificial Sequence: Synthetic oligonucleotide
ccucacgucugggccagcg

SEQ ID NO: 2126037 - RNA, 19 nt, Artificial Sequence
  Description of Artificial Sequence: Synthetic oligonucleotide
cccuggcuuugcacaaagc

SEQ ID NO: 2126038 - RNA, 19 nt, Artificial Sequence
  Description of Artificial Sequence: Synthetic oligonucleotide
gccagcgagagcucuucaa

SEQ ID NO: 2126039 - RNA, 19 nt, Artificial Sequence
  Description of Artificial Sequence: Synthetic oligonucleotide
ggggugcaaaugcacacau

SEQ ID NO: 2126040 - RNA, 19 nt, Artificial Sequence
  Description of Artificial Sequence: Synthetic oligonucleotide
cucaagcccagagcccgga

SEQ ID NO: 2126041 - RNA, 19 nt, Artificial Sequence
  Description of Artificial Sequence: Synthetic oligonucleotide
ggcucggguaccacugcac

SEQ ID NO: 2126042 - RNA, 19 nt, Artificial Sequence
  Description of Artificial Sequence: Synthetic oligonucleotide
gccaacccucacgucuggg

SEQ ID NO: 2126043 - RNA, 19 nt, Artificial Sequence
  Description of Artificial Sequence: Synthetic oligonucleotide
ucccuucccuaggcgguau

SEQ ID NO: 2126044 - RNA, 19 nt, Artificial Sequence
  Description of Artificial Sequence: Synthetic oligonucleotide
acccugggaggaggugcag

SEQ ID NO: 2126045 - RNA, 19 nt, Artificial Sequence
  Description of Artificial Sequence: Synthetic oligonucleotide
cuggcaugcccagguuuga

SEQ ID NO: 2126046 - RNA, 19 nt, Artificial Sequence
  Description of Artificial Sequence: Synthetic oligonucleotide
ccgaccaccugauuguggu

SEQ ID NO: 2126047 - RNA, 19 nt, Artificial Sequence
  Description of Artificial Sequence: Synthetic oligonucleotide
ccuagugucauaggauugu

SEQ ID NO: 2126048 - RNA, 19 nt, Artificial Sequence
  Description of Artificial Sequence: Synthetic oligonucleotide
gggcucggguaccacugca

SEQ ID NO: 2126049 - RNA, 19 nt, Artificial Sequence
  Description of Artificial Sequence: Synthetic oligonucleotide
gagccaccccuggcuuugc

SEQ ID NO: 2126050 - RNA, 19 nt, Artificial Sequence
  Description of Artificial Sequence: Synthetic oligonucleotide
ccacugcacaaggguagag

SEQ ID NO: 2126051 - RNA, 19 nt, Artificial Sequence
  Description of Artificial Sequence: Synthetic oligonucleotide
ccuaggcgguaucuugcca

SEQ ID NO: 2126052 - RNA, 19 nt, Artificial Sequence
  Description of Artificial Sequence: Synthetic oligonucleotide
uaggagccugguggaucau

SEQ ID NO: 2126053 - RNA, 19 nt, Artificial Sequence
  Description of Artificial Sequence: Synthetic oligonucleotide
ggccgaccaccugauugug

SEQ ID NO: 2126054 - RNA, 19 nt, Artificial Sequence
  Description of Artificial Sequence: Synthetic oligonucleotide
ccgggucugcccagaucgc

SEQ ID NO: 2126055 - RNA, 19 nt, Artificial Sequence
  Description of Artificial Sequence: Synthetic oligonucleotide
gggcaaggcuuuggcugag

SEQ ID NO: 2126056 - RNA, 19 nt, Artificial Sequence
  Description of Artificial Sequence: Synthetic oligonucleotide
ggcccuagugucauaggau

SEQ ID NO: 2126057 - RNA, 19 nt, Artificial Sequence
  Description of Artificial Sequence: Synthetic oligonucleotide
ccgagggugaacaggcccu

SEQ ID NO: 2126058 - RNA, 19 nt, Artificial Sequence
  Description of Artificial Sequence: Synthetic oligonucleotide
ggccagcgagagcucuuca

SEQ ID NO: 2126059 - RNA, 19 nt, Artificial Sequence
  Description of Artificial Sequence: Synthetic oligonucleotide
gcaggcaagguggucaguu

SEQ ID NO: 2126060 - RNA, 19 nt, Artificial Sequence
  Description of Artificial Sequence: Synthetic oligonucleotide
cuaccaccaggugccucaa

SEQ ID NO: 2126061 - RNA, 19 nt, Artificial Sequence
  Description of Artificial Sequence: Synthetic oligonucleotide
ucgcugccccugugaggua

SEQ ID NO: 2126062 - RNA, 19 nt, Artificial Sequence
  Description of Artificial Sequence: Synthetic oligonucleotide
caacuuagauauggcucuu

SEQ ID NO: 2126063 - RNA, 19 nt, Artificial Sequence
  Description of Artificial Sequence: Synthetic oligonucleotide
cuucccuaggcgguaucuu

SEQ ID NO: 2126064 - RNA, 19 nt, Artificial Sequence
  Description of Artificial Sequence: Synthetic oligonucleotide
ccaagucuuugaggcccug

SEQ ID NO: 2126065 - RNA, 19 nt, Artificial Sequence
  Description of Artificial Sequence: Synthetic oligonucleotide
gguaucuugccagguccuu

SEQ ID NO: 2126066 - RNA, 19 nt, Artificial Sequence
  Description of Artificial Sequence: Synthetic oligonucleotide
gcuuugcacaaagccuagu

SEQ ID NO: 2126067 - RNA, 19 nt, Artificial Sequence
  Description of Artificial Sequence: Synthetic oligonucleotide
ggaugucauccaaguggcu

SEQ ID NO: 2126068 - RNA, 19 nt, Artificial Sequence
  Description of Artificial Sequence: Synthetic oligonucleotide
ccaccugauugugguuguc

SEQ ID NO: 2126069 - RNA, 19 nt, Artificial Sequence
  Description of Artificial Sequence: Synthetic oligonucleotide
gaggcccugugcaguguuu

SEQ ID NO: 2126070 - RNA, 19 nt, Artificial Sequence
  Description of Artificial Sequence: Synthetic oligonucleotide
cuacuaccaccaggugccu

SEQ ID NO: 2126071 - RNA, 19 nt, Artificial Sequence
  Description of Artificial Sequence: Synthetic oligonucleotide
ccuucccuaggcgguaucu

SEQ ID NO: 2126072 - RNA, 19 nt, Artificial Sequence
  Description of Artificial Sequence: Synthetic oligonucleotide
gcucccaucagggcauauu

SEQ ID NO: 2126073 - RNA, 19 nt, Artificial Sequence
  Description of Artificial Sequence: Synthetic oligonucleotide
gcacugcccagaggggcaa

SEQ ID NO: 2126074 - RNA, 19 nt, Artificial Sequence
  Description of Artificial Sequence: Synthetic oligonucleotide
cccagaggggcaaggcuuu

SEQ ID NO: 2126075 - RNA, 19 nt, Artificial Sequence
  Description of Artificial Sequence: Synthetic oligonucleotide
caggugccucaagcccaga

SEQ ID NO: 2126076 - RNA, 19 nt, Artificial Sequence
  Description of Artificial Sequence: Synthetic oligonucleotide
gggugcaaaugcacacauu

SEQ ID NO: 2126077 - RNA, 19 nt, Artificial Sequence
  Description of Artificial Sequence: Synthetic oligonucleotide
ccggaacaacuugaacacu

SEQ ID NO: 2126078 - RNA, 19 nt, Artificial Sequence
  Description of Artificial Sequence: Synthetic oligonucleotide
cccagaucgcugccccugu

SEQ ID NO: 2126079 - RNA, 19 nt, Artificial Sequence
  Description of Artificial Sequence: Synthetic oligonucleotide
ggcugagaccagggacccu

SEQ ID NO: 2126080 - RNA, 19 nt, Artificial Sequence
  Description of Artificial Sequence: Synthetic oligonucleotide
cccucacgucugggccagc

SEQ ID NO: 2126081 - RNA, 19 nt, Artificial Sequence
  Description of Artificial Sequence: Synthetic oligonucleotide
ggcucccaucagggcauau

SEQ ID NO: 2126082 - RNA, 19 nt, Artificial Sequence
  Description of Artificial Sequence: Synthetic oligonucleotide
caggcccagggaggacauu

SEQ ID NO: 2126083 - RNA, 19 nt, Artificial Sequence
  Description of Artificial Sequence: Synthetic oligonucleotide
cggcucccaucagggcaua

SEQ ID NO: 2126084 - RNA, 19 nt, Artificial Sequence
  Description of Artificial Sequence: Synthetic oligonucleotide
aaauaacggagccaguucc

SEQ ID NO: 2126085 - RNA, 19 nt, Artificial Sequence
  Description of Artificial Sequence: Synthetic oligonucleotide
uuuagauuaagacacuucc

SEQ ID NO: 2126086 - RNA, 19 nt, Artificial Sequence
  Description of Artificial Sequence: Synthetic oligonucleotide
uaaacgauugaauugaacc

SEQ ID NO: 2126087 - RNA, 19 nt, Artificial Sequence
  Description of Artificial Sequence: Synthetic oligonucleotide
acaacaauugcauggagcc

SEQ ID NO: 2126088 - RNA, 19 nt, Artificial Sequence
  Description of Artificial Sequence: Synthetic oligonucleotide
auugaauugaaccaccugg

SEQ ID NO: 2126089 - RNA, 19 nt, Artificial Sequence
  Description of Artificial Sequence: Synthetic oligonucleotide
ucaaggaucaaauacacug

SEQ ID NO: 2126090 - RNA, 19 nt, Artificial Sequence
  Description of Artificial Sequence: Synthetic oligonucleotide
aauugaaccaccugguagg

SEQ ID NO: 2126091 - RNA, 19 nt, Artificial Sequence
  Description of Artificial Sequence: Synthetic oligonucleotide
uuauuauuuguacuaagcc

SEQ ID NO: 2126092 - RNA, 19 nt, Artificial Sequence
  Description of Artificial Sequence: Synthetic oligonucleotide
uuuaauaacaggcacccca

SEQ ID NO: 2126093 - RNA, 19 nt, Artificial Sequence
  Description of Artificial Sequence: Synthetic oligonucleotide
uguacuaagccauuuaucu

SEQ ID NO: 2126094 - RNA, 19 nt, Artificial Sequence
  Description of Artificial Sequence: Synthetic oligonucleotide
aauacaacaauugaucugu

SEQ ID NO: 2126095 - RNA, 19 nt, Artificial Sequence
  Description of Artificial Sequence: Synthetic oligonucleotide
cagagcaucaaucugaucc

SEQ ID NO: 2126096 - RNA, 19 nt, Artificial Sequence
  Description of Artificial Sequence: Synthetic oligonucleotide
uaaaguauuacuguggucu

SEQ ID NO: 2126097 - RNA, 19 nt, Artificial Sequence
  Description of Artificial Sequence: Synthetic oligonucleotide
cacuuuuagauuaagacac

SEQ ID NO: 2126098 - RNA, 19 nt, Artificial Sequence
  Description of Artificial Sequence: Synthetic oligonucleotide
aucguuuuagaucauccgc

SEQ ID NO: 2126099 - RNA, 19 nt, Artificial Sequence
  Description of Artificial Sequence: Synthetic oligonucleotide
cauagauaaaguauuacug

SEQ ID NO: 2126100 - RNA, 19 nt, Artificial Sequence
  Description of Artificial Sequence: Synthetic oligonucleotide
auuauuauuuguacuaagc

SEQ ID NO: 2126101 - RNA, 19 nt, Artificial Sequence
  Description of Artificial Sequence: Synthetic oligonucleotide
ugacacaacaauugcaugg

SEQ ID NO: 2126102 - RNA, 19 nt, Artificial Sequence
  Description of Artificial Sequence: Synthetic oligonucleotide
ugguauauacucaucuucg

SEQ ID NO: 2126103 - RNA, 19 nt, Artificial Sequence
  Description of Artificial Sequence: Synthetic oligonucleotide
caagguauacaucaaaacc

SEQ ID NO: 2126104 - RNA, 19 nt, Artificial Sequence
  Description of Artificial Sequence: Synthetic oligonucleotide
auuacuguggucuaaagau

SEQ ID NO: 2126105 - RNA, 19 nt, Artificial Sequence
  Description of Artificial Sequence: Synthetic oligonucleotide
uguaagguggaaaagcggc

SEQ ID NO: 2126106 - RNA, 19 nt, Artificial Sequence
  Description of Artificial Sequence: Synthetic oligonucleotide
aauugaucugucuauaaau

SEQ ID NO: 2126107 - RNA, 19 nt, Artificial Sequence
  Description of Artificial Sequence: Synthetic oligonucleotide
aaucguuuuagaucauccg

SEQ ID NO: 2126108 - RNA, 19 nt, Artificial Sequence
  Description of Artificial Sequence: Synthetic oligonucleotide
aaacgauugaauugaacca

SEQ ID NO: 2126109 - RNA, 19 nt, Artificial Sequence
  Description of Artificial Sequence: Synthetic oligonucleotide
agaaguuagugauuguacg

SEQ ID NO: 2126110 - RNA, 19 nt, Artificial Sequence
  Description of Artificial Sequence: Synthetic oligonucleotide
aacgauugaauugaaccac

SEQ ID NO: 2126111 - RNA, 19 nt, Artificial Sequence
  Description of Artificial Sequence: Synthetic oligonucleotide
uuauaguaacagaugauac

SEQ ID NO: 2126112 - RNA, 19 nt, Artificial Sequence
  Description of Artificial Sequence: Synthetic oligonucleotide
gaauugaaccaccugguag

SEQ ID NO: 2126113 - RNA, 19 nt, Artificial Sequence
  Description of Artificial Sequence: Synthetic oligonucleotide
uacguauuuauuauuauuu

SEQ ID NO: 2126114 - RNA, 19 nt, Artificial Sequence
  Description of Artificial Sequence: Synthetic oligonucleotide
aauacauagauaaaguauu

SEQ ID NO: 2126115 - RNA, 19 nt, Artificial Sequence
  Description of Artificial Sequence: Synthetic oligonucleotide
uuuaguguaagguggaaaa

SEQ ID NO: 2126116 - RNA, 19 nt, Artificial Sequence
  Description of Artificial Sequence: Synthetic oligonucleotide
ucauccgccaugaugaccc

SEQ ID NO: 2126117 - RNA, 19 nt, Artificial Sequence
  Description of Artificial Sequence: Synthetic oligonucleotide
uauaguaacagaugauacu

SEQ ID NO: 2126118 - RNA, 19 nt, Artificial Sequence
  Description of Artificial Sequence: Synthetic oligonucleotide
aauauguccucauuauuau

SEQ ID NO: 2126119 - RNA, 19 nt, Artificial Sequence
  Description of Artificial Sequence: Synthetic oligonucleotide
ucguuuuagaucauccgcc

SEQ ID NO: 2126120 - RNA, 19 nt, Artificial Sequence
  Description of Artificial Sequence: Synthetic oligonucleotide
cacacuaacuccaugggag

SEQ ID NO: 2126121 - RNA, 19 nt, Artificial Sequence
  Description of Artificial Sequence: Synthetic oligonucleotide
ucugucuauaaauuauagc

SEQ ID NO: 2126122 - RNA, 19 nt, Artificial Sequence
  Description of Artificial Sequence: Synthetic oligonucleotide
uuaucaggcauccacacua

SEQ ID NO: 2126123 - RNA, 19 nt, Artificial Sequence
  Description of Artificial Sequence: Synthetic oligonucleotide
uuuugaaaguccgaguuug

SEQ ID NO: 2126124 - RNA, 19 nt, Artificial Sequence
  Description of Artificial Sequence: Synthetic oligonucleotide
guggucuaaagauugcugg

SEQ ID NO: 2126125 - RNA, 19 nt, Artificial Sequence
  Description of Artificial Sequence: Synthetic oligonucleotide
uuagauuaagacacuucca

SEQ ID NO: 2126126 - RNA, 19 nt, Artificial Sequence
  Description of Artificial Sequence: Synthetic oligonucleotide
uagaucauccgccaugaug

SEQ ID NO: 2126127 - RNA, 19 nt, Artificial Sequence
  Description of Artificial Sequence: Synthetic oligonucleotide
cuucaaauaacggagccag

SEQ ID NO: 2126128 - RNA, 19 nt, Artificial Sequence
  Description of Artificial Sequence: Synthetic oligonucleotide
ugaauacauagauaaagua

SEQ ID NO: 2126129 - RNA, 19 nt, Artificial Sequence
  Description of Artificial Sequence: Synthetic oligonucleotide
aacaauugcauggagcccu

SEQ ID NO: 2126130 - RNA, 19 nt, Artificial Sequence
  Description of Artificial Sequence: Synthetic oligonucleotide
uuuuguacaggaaucguuu

SEQ ID NO: 2126131 - RNA, 19 nt, Artificial Sequence
  Description of Artificial Sequence: Synthetic oligonucleotide
uucgcugagaucauauaca

SEQ ID NO: 2126132 - RNA, 19 nt, Artificial Sequence
  Description of Artificial Sequence: Synthetic oligonucleotide
ugauuguacguauuuauua

SEQ ID NO: 2126133 - RNA, 19 nt, Artificial Sequence
  Description of Artificial Sequence: Synthetic oligonucleotide
acaauuaguccuguguugg

SEQ ID NO: 2126134 - RNA, 19 nt, Artificial Sequence
  Description of Artificial Sequence: Synthetic oligonucleotide
guugcgagggcaaaggugg

SEQ ID NO: 2126135 - RNA, 19 nt, Artificial Sequence
  Description of Artificial Sequence: Synthetic oligonucleotide
aaggaucaaauacacuggu

SEQ ID NO: 2126136 - RNA, 19 nt, Artificial Sequence
  Description of Artificial Sequence: Synthetic oligonucleotide
agauaaaguauuacugugg

SEQ ID NO: 2126137 - RNA, 19 nt, Artificial Sequence
  Description of Artificial Sequence: Synthetic oligonucleotide
ugucuauaaauuauagcua

SEQ ID NO: 2126138 - RNA, 19 nt, Artificial Sequence
  Description of Artificial Sequence: Synthetic oligonucleotide
auaccacccauuaucaggc

SEQ ID NO: 2126139 - RNA, 19 nt, Artificial Sequence
  Description of Artificial Sequence: Synthetic oligonucleotide
ucucacuaaguaagaaaag

SEQ ID NO: 2126140 - RNA, 19 nt, Artificial Sequence
  Description of Artificial Sequence: Synthetic oligonucleotide
auuauuuguacuaagccau

SEQ ID NO: 2126141 - RNA, 19 nt, Artificial Sequence
  Description of Artificial Sequence: Synthetic oligonucleotide
ugaaaguccgaguuugcug

SEQ ID NO: 2126142 - RNA, 19 nt, Artificial Sequence
  Description of Artificial Sequence: Synthetic oligonucleotide
uauagcuauaggcucuucu

SEQ ID NO: 2126143 - RNA, 19 nt, Artificial Sequence
  Description of Artificial Sequence: Synthetic oligonucleotide
acguauuuauuauuauuug

SEQ ID NO: 2126144 - RNA, 19 nt, Artificial Sequence
  Description of Artificial Sequence: Synthetic oligonucleotide
uccuguguuggcauuacug

SEQ ID NO: 2126145 - RNA, 19 nt, Artificial Sequence
  Description of Artificial Sequence: Synthetic oligonucleotide
agagguaaacgauugaauu

SEQ ID NO: 2126146 - RNA, 19 nt, Artificial Sequence
  Description of Artificial Sequence: Synthetic oligonucleotide
uauacagacagaaguuagu

SEQ ID NO: 2126147 - RNA, 19 nt, Artificial Sequence
  Description of Artificial Sequence: Synthetic oligonucleotide
agugauuguacguauuuau

SEQ ID NO: 2126148 - RNA, 19 nt, Artificial Sequence
  Description of Artificial Sequence: Synthetic oligonucleotide
acaacaauugaucugucua

SEQ ID NO: 2126149 - RNA, 19 nt, Artificial Sequence
  Description of Artificial Sequence: Synthetic oligonucleotide
aaaagcggcccucugaaua

SEQ ID NO: 2126150 - RNA, 19 nt, Artificial Sequence
  Description of Artificial Sequence: Synthetic oligonucleotide
aaaguccgaguuugcugcc

SEQ ID NO: 2126151 - RNA, 19 nt, Artificial Sequence
  Description of Artificial Sequence: Synthetic oligonucleotide
uuucuaggcugacaauuag

SEQ ID NO: 2126152 - RNA, 19 nt, Artificial Sequence
  Description of Artificial Sequence: Synthetic oligonucleotide
uuguacguauuuauuauua

SEQ ID NO: 2126153 - RNA, 19 nt, Artificial Sequence
  Description of Artificial Sequence: Synthetic oligonucleotide
caggaaucguuuuagauca

SEQ ID NO: 2126154 - RNA, 19 nt, Artificial Sequence
  Description of Artificial Sequence: Synthetic oligonucleotide
auaaaguauuacugugguc

SEQ ID NO: 2126155 - RNA, 19 nt, Artificial Sequence
  Description of Artificial Sequence: Synthetic oligonucleotide
agaucauccgccaugauga

SEQ ID NO: 2126156 - RNA, 19 nt, Artificial Sequence
  Description of Artificial Sequence: Synthetic oligonucleotide
gaaucguuuuagaucaucc

SEQ ID NO: 2126157 - RNA, 19 nt, Artificial Sequence
  Description of Artificial Sequence: Synthetic oligonucleotide
gacaauuaguccuguguug

SEQ ID NO: 2126158 - RNA, 19 nt, Artificial Sequence
  Description of Artificial Sequence: Synthetic oligonucleotide
auuauaguaacagaugaua

SEQ ID NO: 2126159 - RNA, 19 nt, Artificial Sequence
  Description of Artificial Sequence: Synthetic oligonucleotide
acacuaacuccaugggagc

SEQ ID NO: 2126160 - RNA, 19 nt, Artificial Sequence
  Description of Artificial Sequence: Synthetic oligonucleotide
caaauacacugguauauac

SEQ ID NO: 2126161 - RNA, 19 nt, Artificial Sequence
  Description of Artificial Sequence: Synthetic oligonucleotide
aauugcauggagcccuuca

SEQ ID NO: 2126162 - RNA, 19 nt, Artificial Sequence
  Description of Artificial Sequence: Synthetic oligonucleotide
uuaucuuccucacacccaa

SEQ ID NO: 2126163 - RNA, 19 nt, Artificial Sequence
  Description of Artificial Sequence: Synthetic oligonucleotide
cuggcuaugaaacucacga

SEQ ID NO: 2126164 - RNA, 19 nt, Artificial Sequence
  Description of Artificial Sequence: Synthetic oligonucleotide
ugaaccaccugguagguau

SEQ ID NO: 2126165 - RNA, 19 nt, Artificial Sequence
  Description of Artificial Sequence: Synthetic oligonucleotide
ucgcugagaucauauacag

SEQ ID NO: 2126166 - RNA, 19 nt, Artificial Sequence
  Description of Artificial Sequence: Synthetic oligonucleotide
gauugaauugaaccaccug

SEQ ID NO: 2126167 - RNA, 19 nt, Artificial Sequence
  Description of Artificial Sequence: Synthetic oligonucleotide
uuuaucaguucuucaaaua

SEQ ID NO: 2126168 - RNA, 19 nt, Artificial Sequence
  Description of Artificial Sequence: Synthetic oligonucleotide
uguugcgagggcaaaggug

SEQ ID NO: 2126169 - RNA, 19 nt, Artificial Sequence
  Description of Artificial Sequence: Synthetic oligonucleotide
ucaggcauccacacuaacu

SEQ ID NO: 2126170 - RNA, 19 nt, Artificial Sequence
  Description of Artificial Sequence: Synthetic oligonucleotide
uuaauaacaggcaccccau

SEQ ID NO: 2126171 - RNA, 19 nt, Artificial Sequence
  Description of Artificial Sequence: Synthetic oligonucleotide
ugacaauuaguccuguguu

SEQ ID NO: 2126172 - RNA, 19 nt, Artificial Sequence
  Description of Artificial Sequence: Synthetic oligonucleotide
uuagugauuguacguauuu

SEQ ID NO: 2126173 - RNA, 19 nt, Artificial Sequence
  Description of Artificial Sequence: Synthetic oligonucleotide
gauaaaguauuacuguggu

SEQ ID NO: 2126174 - RNA, 19 nt, Artificial Sequence
  Description of Artificial Sequence: Synthetic oligonucleotide
uuuagaucauccgccauga

SEQ ID NO: 2126175 - RNA, 19 nt, Artificial Sequence
  Description of Artificial Sequence: Synthetic oligonucleotide
agguauacaucaaaaccac

SEQ ID NO: 2126176 - RNA, 19 nt, Artificial Sequence
  Description of Artificial Sequence: Synthetic oligonucleotide
cuucgcugagaucauauac

SEQ ID NO: 2126177 - RNA, 19 nt, Artificial Sequence
  Description of Artificial Sequence: Synthetic oligonucleotide
cagaaguuagugauuguac

SEQ ID NO: 2126178 - RNA, 19 nt, Artificial Sequence
  Description of Artificial Sequence: Synthetic oligonucleotide
ucuguugcgagggcaaagg

SEQ ID NO: 2126179 - RNA, 19 nt, Artificial Sequence
  Description of Artificial Sequence: Synthetic oligonucleotide
ugguagguauuauaguaac

SEQ ID NO: 2126180 - RNA, 19 nt, Artificial Sequence
  Description of Artificial Sequence: Synthetic oligonucleotide
auauacucaucuucgcuga

SEQ ID NO: 2126181 - RNA, 19 nt, Artificial Sequence
  Description of Artificial Sequence: Synthetic oligonucleotide
agacagaaguuagugauug

SEQ ID NO: 2126182 - RNA, 19 nt, Artificial Sequence
  Description of Artificial Sequence: Synthetic oligonucleotide
agccauuuaucuuccucac

SEQ ID NO: 2126183 - RNA, 19 nt, Artificial Sequence
  Description of Artificial Sequence: Synthetic oligonucleotide
aauuaguccuguguuggca

SEQ ID NO: 2126184 - RNA, 19 nt, Artificial Sequence
  Description of Artificial Sequence: Synthetic oligonucleotide
uuuuguggcguuuccagau

SEQ ID NO: 2126185 - RNA, 19 nt, Artificial Sequence
  Description of Artificial Sequence: Synthetic oligonucleotide
uacauagauaaaguauuac

SEQ ID NO: 2126186 - RNA, 19 nt, Artificial Sequence
  Description of Artificial Sequence: Synthetic oligonucleotide
uuguacuaagccauuuauc

SEQ ID NO: 2126187 - RNA, 19 nt, Artificial Sequence
  Description of Artificial Sequence: Synthetic oligonucleotide
ccagaucucacuaaguaag

SEQ ID NO: 2126188 - RNA, 19 nt, Artificial Sequence
  Description of Artificial Sequence: Synthetic oligonucleotide
cuaggcugacaauuagucc

SEQ ID NO: 2126189 - RNA, 19 nt, Artificial Sequence
  Description of Artificial Sequence: Synthetic oligonucleotide
agguauuauaguaacagau

SEQ ID NO: 2126190 - RNA, 19 nt, Artificial Sequence
  Description of Artificial Sequence: Synthetic oligonucleotide
acuaagccauuuaucuucc

SEQ ID NO: 2126191 - RNA, 19 nt, Artificial Sequence
  Description of Artificial Sequence: Synthetic oligonucleotide
uguacguauuuauuauuau

SEQ ID NO: 2126192 - RNA, 19 nt, Artificial Sequence
  Description of Artificial Sequence: Synthetic oligonucleotide
cauuaucaggcauccacac

SEQ ID NO: 2126193 - RNA, 19 nt, Artificial Sequence
  Description of Artificial Sequence: Synthetic oligonucleotide
caggcauccacacuaacuc

SEQ ID NO: 2126194 - RNA, 19 nt, Artificial Sequence
  Description of Artificial Sequence: Synthetic oligonucleotide
uacaacaauugaucugucu

SEQ ID NO: 2126195 - RNA, 19 nt, Artificial Sequence
  Description of Artificial Sequence: Synthetic oligonucleotide
aaaguauuacuguggucua

SEQ ID NO: 2126196 - RNA, 19 nt, Artificial Sequence
  Description of Artificial Sequence: Synthetic oligonucleotide
acgauugaauugaaccacc

SEQ ID NO: 2126197 - RNA, 19 nt, Artificial Sequence
  Description of Artificial Sequence: Synthetic oligonucleotide
aaucugauccugaugcacu

SEQ ID NO: 2126198 - RNA, 19 nt, Artificial Sequence
  Description of Artificial Sequence: Synthetic oligonucleotide
gauugcuggacugguacag

SEQ ID NO: 2126199 - RNA, 19 nt, Artificial Sequence
  Description of Artificial Sequence: Synthetic oligonucleotide
uucuaggcugacaauuagu

SEQ ID NO: 2126200 - RNA, 19 nt, Artificial Sequence
  Description of Artificial Sequence: Synthetic oligonucleotide
uacucaucuucgcugagau

SEQ ID NO: 2126201 - RNA, 19 nt, Artificial Sequence
  Description of Artificial Sequence: Synthetic oligonucleotide
uccagaucucacuaaguaa

SEQ ID NO: 2126202 - RNA, 19 nt, Artificial Sequence
  Description of Artificial Sequence: Synthetic oligonucleotide
ucaaauaacggagccaguu

SEQ ID NO: 2126203 - RNA, 19 nt, Artificial Sequence
  Description of Artificial Sequence: Synthetic oligonucleotide
ucuauaaauuauagcuaua

SEQ ID NO: 2126204 - RNA, 19 nt, Artificial Sequence
  Description of Artificial Sequence: Synthetic oligonucleotide
cacuggguagaauaccacc

SEQ ID NO: 2126205 - RNA, 19 nt, Artificial Sequence
  Description of Artificial Sequence: Synthetic oligonucleotide
uuauucucaggaagucucu

SEQ ID NO: 2126206 - RNA, 19 nt, Artificial Sequence
  Description of Artificial Sequence: Synthetic oligonucleotide
uuauuauucucaggaaguc

SEQ ID NO: 2126207 - RNA, 19 nt, Artificial Sequence
  Description of Artificial Sequence: Synthetic oligonucleotide
uggaaaagcggcccucuga

SEQ ID NO: 2126208 - RNA, 19 nt, Artificial Sequence
  Description of Artificial Sequence: Synthetic oligonucleotide
auagcuauaggcucuucuu

SEQ ID NO: 2126209 - RNA, 19 nt, Artificial Sequence
  Description of Artificial Sequence: Synthetic oligonucleotide
uaacaggcaccccaucucu

SEQ ID NO: 2126210 - RNA, 19 nt, Artificial Sequence
  Description of Artificial Sequence: Synthetic oligonucleotide
uucaaggaucaaauacacu

SEQ ID NO: 2126211 - RNA, 19 nt, Artificial Sequence
  Description of Artificial Sequence: Synthetic oligonucleotide
ucacacccaaugcaaagaa

SEQ ID NO: 2126212 - RNA, 19 nt, Artificial Sequence
  Description of Artificial Sequence: Synthetic oligonucleotide
cucacuaaguaagaaaaga

SEQ ID NO: 2126213 - RNA, 19 nt, Artificial Sequence
  Description of Artificial Sequence: Synthetic oligonucleotide
aaguuagugauuguacgua

SEQ ID NO: 2126214 - RNA, 19 nt, Artificial Sequence
  Description of Artificial Sequence: Synthetic oligonucleotide
gauuguacguauuuauuau

SEQ ID NO: 2126215 - RNA, 19 nt, Artificial Sequence
  Description of Artificial Sequence: Synthetic oligonucleotide
caaauaacggagccaguuc

SEQ ID NO: 2126216 - RNA, 19 nt, Artificial Sequence
  Description of Artificial Sequence: Synthetic oligonucleotide
aguuagugauuguacguau

SEQ ID NO: 2126217 - RNA, 19 nt, Artificial Sequence
  Description of Artificial Sequence: Synthetic oligonucleotide
agaaaagacuuuauacaca

SEQ ID NO: 2126218 - RNA, 19 nt, Artificial Sequence
  Description of Artificial Sequence: Synthetic oligonucleotide
augaaacucacgaccagag

SEQ ID NO: 2126219 - RNA, 19 nt, Artificial Sequence
  Description of Artificial Sequence: Synthetic oligonucleotide
acaauugaucugucuauaa

SEQ ID NO: 2126220 - RNA, 19 nt, Artificial Sequence
  Description of Artificial Sequence: Synthetic oligonucleotide
auuguacguauuuauuauu

SEQ ID NO: 2126221 - RNA, 19 nt, Artificial Sequence
  Description of Artificial Sequence: Synthetic oligonucleotide
agaauaccacccauuauca

SEQ ID NO: 2126222 - RNA, 19 nt, Artificial Sequence
  Description of Artificial Sequence: Synthetic oligonucleotide
ugaauugaaccaccuggua

SEQ ID NO: 2126223 - RNA, 19 nt, Artificial Sequence
  Description of Artificial Sequence: Synthetic oligonucleotide
guauuacuguggucuaaag

SEQ ID NO: 2126224 - RNA, 19 nt, Artificial Sequence
  Description of Artificial Sequence: Synthetic oligonucleotide
ucacugcucgcccacgcgc

SEQ ID NO: 2126225 - RNA, 19 nt, Artificial Sequence
  Description of Artificial Sequence: Synthetic oligonucleotide
uuguacaggaaucguuuua

SEQ ID NO: 2126226 - RNA, 19 nt, Artificial Sequence
  Description of Artificial Sequence: Synthetic oligonucleotide
gguauauacucaucuucgc

SEQ ID NO: 2126227 - RNA, 19 nt, Artificial Sequence
  Description of Artificial Sequence: Synthetic oligonucleotide
uuguggcguuuccagaucu

SEQ ID NO: 2126228 - RNA, 19 nt, Artificial Sequence
  Description of Artificial Sequence: Synthetic oligonucleotide
uuacuguggucuaaagauu

SEQ ID NO: 2126229 - RNA, 19 nt, Artificial Sequence
  Description of Artificial Sequence: Synthetic oligonucleotide
uugcuggacugguacagug

SEQ ID NO: 2126230 - RNA, 19 nt, Artificial Sequence
  Description of Artificial Sequence: Synthetic oligonucleotide
acacccaaugcaaagaaau

SEQ ID NO: 2126231 - RNA, 19 nt, Artificial Sequence
  Description of Artificial Sequence: Synthetic oligonucleotide
caguguuguugcaaugaag

SEQ ID NO: 2126232 - RNA, 19 nt, Artificial Sequence
  Description of Artificial Sequence: Synthetic oligonucleotide
gacacaacaauugcaugga

SEQ ID NO: 2126233 - RNA, 19 nt, Artificial Sequence
  Description of Artificial Sequence: Synthetic oligonucleotide
uggccacuuuaauaacagg

SEQ ID NO: 2126234 - RNA, 19 nt, Artificial Sequence
  Description of Artificial Sequence: Synthetic oligonucleotide
gaucgaucacugcucgccc

SEQ ID NO: 2126235 - RNA, 19 nt, Artificial Sequence
  Description of Artificial Sequence: Synthetic oligonucleotide
uugcauggagcccuucaac

SEQ ID NO: 2126236 - RNA, 19 nt, Artificial Sequence
  Description of Artificial Sequence: Synthetic oligonucleotide
augcacuggguagaauacc

SEQ ID NO: 2126237 - RNA, 19 nt, Artificial Sequence
  Description of Artificial Sequence: Synthetic oligonucleotide
aaccacuuuuagauuaaga

SEQ ID NO: 2126238 - RNA, 19 nt, Artificial Sequence
  Description of Artificial Sequence: Synthetic oligonucleotide
acuguggucuaaagauugc

SEQ ID NO: 2126239 - RNA, 19 nt, Artificial Sequence
  Description of Artificial Sequence: Synthetic oligonucleotide
aauaacggagccaguuccu

SEQ ID NO: 2126240 - RNA, 19 nt, Artificial Sequence
  Description of Artificial Sequence: Synthetic oligonucleotide
guguaagguggaaaagcgg

SEQ ID NO: 2126241 - RNA, 19 nt, Artificial Sequence
  Description of Artificial Sequence: Synthetic oligonucleotide
auugaucugucuauaaauu

SEQ ID NO: 2126242 - RNA, 19 nt, Artificial Sequence
  Description of Artificial Sequence: Synthetic oligonucleotide
uuauuuguacuaagccauu

SEQ ID NO: 2126243 - RNA, 19 nt, Artificial Sequence
  Description of Artificial Sequence: Synthetic oligonucleotide
caggaucgaucacugcucg

SEQ ID NO: 2126244 - RNA, 19 nt, Artificial Sequence
  Description of Artificial Sequence: Synthetic oligonucleotide
cugacacaacaauugcaug

SEQ ID NO: 2126245 - RNA, 19 nt, Artificial Sequence
  Description of Artificial Sequence: Synthetic oligonucleotide
caauuaguccuguguuggc

SEQ ID NO: 2126246 - RNA, 19 nt, Artificial Sequence
  Description of Artificial Sequence: Synthetic oligonucleotide
aucauccgccaugaugacc

SEQ ID NO: 2126247 - RNA, 19 nt, Artificial Sequence
  Description of Artificial Sequence: Synthetic oligonucleotide
uagcuauaggcucuucuuu

SEQ ID NO: 2126248 - RNA, 19 nt, Artificial Sequence
  Description of Artificial Sequence: Synthetic oligonucleotide
uccgaguuugcugccuugg

SEQ ID NO: 2126249 - RNA, 19 nt, Artificial Sequence
  Description of Artificial Sequence: Synthetic oligonucleotide
acacaacaauugcauggag

SEQ ID NO: 2126250 - RNA, 19 nt, Artificial Sequence
  Description of Artificial Sequence: Synthetic oligonucleotide
ucaacgcuuggcaacuuuu

SEQ ID NO: 2126251 - RNA, 19 nt, Artificial Sequence
  Description of Artificial Sequence: Synthetic oligonucleotide
ucacgaccagagguaaacg

SEQ ID NO: 2126252 - RNA, 19 nt, Artificial Sequence
  Description of Artificial Sequence: Synthetic oligonucleotide
agcuauaggcucuucuuua

SEQ ID NO: 2126253 - RNA, 19 nt, Artificial Sequence
  Description of Artificial Sequence: Synthetic oligonucleotide
aggaucgaucacugcucgc

SEQ ID NO: 2126254 - RNA, 19 nt, Artificial Sequence
  Description of Artificial Sequence: Synthetic oligonucleotide
auugcauggagcccuucaa

SEQ ID NO: 2126255 - RNA, 19 nt, Artificial Sequence
  Description of Artificial Sequence: Synthetic oligonucleotide
caccccaucucuaucugac

SEQ ID NO: 2126256 - RNA, 19 nt, Artificial Sequence
  Description of Artificial Sequence: Synthetic oligonucleotide
cucacgaccagagguaaac

SEQ ID NO: 2126257 - RNA, 19 nt, Artificial Sequence
  Description of Artificial Sequence: Synthetic oligonucleotide
caaucugauccugaugcac

SEQ ID NO: 2126258 - RNA, 19 nt, Artificial Sequence
  Description of Artificial Sequence: Synthetic oligonucleotide
guaagguggaaaagcggcc

SEQ ID NO: 2126259 - RNA, 19 nt, Artificial Sequence
  Description of Artificial Sequence: Synthetic oligonucleotide
guauauacucaucuucgcu

SEQ ID NO: 2126260 - RNA, 19 nt, Artificial Sequence
  Description of Artificial Sequence: Synthetic oligonucleotide
caacuuuuaucaguucuuc

SEQ ID NO: 2126261 - RNA, 19 nt, Artificial Sequence
  Description of Artificial Sequence: Synthetic oligonucleotide
acaguguuguugcaaugaa

SEQ ID NO: 2126262 - RNA, 19 nt, Artificial Sequence
  Description of Artificial Sequence: Synthetic oligonucleotide
guaaacgauugaauugaac

SEQ ID NO: 2126263 - RNA, 19 nt, Artificial Sequence
  Description of Artificial Sequence: Synthetic oligonucleotide
ggaucaaauacacugguau

SEQ ID NO: 2126264 - RNA, 19 nt, Artificial Sequence
  Description of Artificial Sequence: Synthetic oligonucleotide
uaauaacaggcaccccauc

SEQ ID NO: 2126265 - RNA, 19 nt, Artificial Sequence
  Description of Artificial Sequence: Synthetic oligonucleotide
ugcuggacugguacagugu

SEQ ID NO: 2126266 - RNA, 19 nt, Artificial Sequence
  Description of Artificial Sequence: Synthetic oligonucleotide
acugucguuggccacuuua

SEQ ID NO: 2126267 - RNA, 19 nt, Artificial Sequence
  Description of Artificial Sequence: Synthetic oligonucleotide
agauugcuggacugguaca

SEQ ID NO: 2126268 - RNA, 19 nt, Artificial Sequence
  Description of Artificial Sequence: Synthetic oligonucleotide
gguagaauaccacccauua

SEQ ID NO: 2126269 - RNA, 19 nt, Artificial Sequence
  Description of Artificial Sequence: Synthetic oligonucleotide
aaacucacgaccagaggua

SEQ ID NO: 2126270 - RNA, 19 nt, Artificial Sequence
  Description of Artificial Sequence: Synthetic oligonucleotide
gcuauaggcucuucuuuag

SEQ ID NO: 2126271 - RNA, 19 nt, Artificial Sequence
  Description of Artificial Sequence: Synthetic oligonucleotide
caauugaucugucuauaaa

SEQ ID NO: 2126272 - RNA, 19 nt, Artificial Sequence
  Description of Artificial Sequence: Synthetic oligonucleotide
ucccgcgcaggaucgauca

SEQ ID NO: 2126273 - RNA, 19 nt, Artificial Sequence
  Description of Artificial Sequence: Synthetic oligonucleotide
ccacuuuuagauuaagaca

SEQ ID NO: 2126274 - RNA, 19 nt, Artificial Sequence
  Description of Artificial Sequence: Synthetic oligonucleotide
gauaagaagccaggccuca

SEQ ID NO: 2126275 - RNA, 19 nt, Artificial Sequence
  Description of Artificial Sequence: Synthetic oligonucleotide
ugucguuggccacuuuaau

SEQ ID NO: 2126276 - RNA, 19 nt, Artificial Sequence
  Description of Artificial Sequence: Synthetic oligonucleotide
gaucugucuauaaauuaua

SEQ ID NO: 2126277 - RNA, 19 nt, Artificial Sequence
  Description of Artificial Sequence: Synthetic oligonucleotide
ucgaucacugcucgcccac

SEQ ID NO: 2126278 - RNA, 19 nt, Artificial Sequence
  Description of Artificial Sequence: Synthetic oligonucleotide
caaugaaggcaagguauac

SEQ ID NO: 2126279 - RNA, 19 nt, Artificial Sequence
  Description of Artificial Sequence: Synthetic oligonucleotide
ggaucgaucacugcucgcc

SEQ ID NO: 2126280 - RNA, 19 nt, Artificial Sequence
  Description of Artificial Sequence: Synthetic oligonucleotide
aggcaccccaucucuaucu

SEQ ID NO: 2126281 - RNA, 19 nt, Artificial Sequence
  Description of Artificial Sequence: Synthetic oligonucleotide
cauauacagacagaaguua

SEQ ID NO: 2126282 - RNA, 19 nt, Artificial Sequence
  Description of Artificial Sequence: Synthetic oligonucleotide
guauacaucaaaaccacuu

SEQ ID NO: 2126283 - RNA, 19 nt, Artificial Sequence
  Description of Artificial Sequence: Synthetic oligonucleotide
agcaccuucaaggaucaaa

SEQ ID NO: 2126284 - RNA, 19 nt, Artificial Sequence
  Description of Artificial Sequence: Synthetic oligonucleotide
cugacaauuaguccugugu

SEQ ID NO: 2126285 - RNA, 19 nt, Artificial Sequence
  Description of Artificial Sequence: Synthetic oligonucleotide
acaacuuuuaucaguucuu

SEQ ID NO: 2126286 - RNA, 19 nt, Artificial Sequence
  Description of Artificial Sequence: Synthetic oligonucleotide
aacucacgaccagagguaa

SEQ ID NO: 2126287 - RNA, 19 nt, Artificial Sequence
  Description of Artificial Sequence: Synthetic oligonucleotide
caacaauugcauggagccc

SEQ ID NO: 2126288 - RNA, 19 nt, Artificial Sequence
  Description of Artificial Sequence: Synthetic oligonucleotide
uagugauuguacguauuua

SEQ ID NO: 2126289 - RNA, 19 nt, Artificial Sequence
  Description of Artificial Sequence: Synthetic oligonucleotide
uucaacgcuuggcaacuuu

SEQ ID NO: 2126290 - RNA, 19 nt, Artificial Sequence
  Description of Artificial Sequence: Synthetic oligonucleotide
ucuucgcugagaucauaua

SEQ ID NO: 2126291 - RNA, 19 nt, Artificial Sequence
  Description of Artificial Sequence: Synthetic oligonucleotide
acugcucgcccacgcgcgc

SEQ ID NO: 2126292 - RNA, 19 nt, Artificial Sequence
  Description of Artificial Sequence: Synthetic oligonucleotide
agaucucacuaaguaagaa

SEQ ID NO: 2126293 - RNA, 19 nt, Artificial Sequence
  Description of Artificial Sequence: Synthetic oligonucleotide
cacugcucgcccacgcgcg

SEQ ID NO: 2126294 - RNA, 19 nt, Artificial Sequence
  Description of Artificial Sequence: Synthetic oligonucleotide
ugcuggcuaugaaacucac

SEQ ID NO: 2126295 - RNA, 19 nt, Artificial Sequence
  Description of Artificial Sequence: Synthetic oligonucleotide
gucguuggccacuuuaaua

SEQ ID NO: 2126296 - RNA, 19 nt, Artificial Sequence
  Description of Artificial Sequence: Synthetic oligonucleotide
acuuuuagauuaagacacu

SEQ ID NO: 2126297 - RNA, 19 nt, Artificial Sequence
  Description of Artificial Sequence: Synthetic oligonucleotide
auaagaagccaggccucag

SEQ ID NO: 2126298 - RNA, 19 nt, Artificial Sequence
  Description of Artificial Sequence: Synthetic oligonucleotide
uggcauuacugcuggcuau

SEQ ID NO: 2126299 - RNA, 19 nt, Artificial Sequence
  Description of Artificial Sequence: Synthetic oligonucleotide
guacguauuuauuauuauu

SEQ ID NO: 2126300 - RNA, 19 nt, Artificial Sequence
  Description of Artificial Sequence: Synthetic oligonucleotide
gucuaaagauugcuggacu

SEQ ID NO: 2126301 - RNA, 19 nt, Artificial Sequence
  Description of Artificial Sequence: Synthetic oligonucleotide
gagcccuucaacgcuuggc

SEQ ID NO: 2126302 - RNA, 19 nt, Artificial Sequence
  Description of Artificial Sequence: Synthetic oligonucleotide
ggucuaaagauugcuggac

SEQ ID NO: 2126303 - RNA, 19 nt, Artificial Sequence
  Description of Artificial Sequence: Synthetic oligonucleotide
gcauggagcccuucaacgc

SEQ ID NO: 2126304 - RNA, 19 nt, Artificial Sequence
  Description of Artificial Sequence: Synthetic oligonucleotide
cagaucucacuaaguaaga

SEQ ID NO: 2126305 - RNA, 19 nt, Artificial Sequence
  Description of Artificial Sequence: Synthetic oligonucleotide
acaggcaccccaucucuau

SEQ ID NO: 2126306 - RNA, 19 nt, Artificial Sequence
  Description of Artificial Sequence: Synthetic oligonucleotide
gaucauccgccaugaugac

SEQ ID NO: 2126307 - RNA, 19 nt, Artificial Sequence
  Description of Artificial Sequence: Synthetic oligonucleotide
cuccaugggagcugcacca

SEQ ID NO: 2126308 - RNA, 19 nt, Artificial Sequence
  Description of Artificial Sequence: Synthetic oligonucleotide
aaagauugcuggacuggua

SEQ ID NO: 2126309 - RNA, 19 nt, Artificial Sequence
  Description of Artificial Sequence: Synthetic oligonucleotide
ggaaaagcggcccucugaa

SEQ ID NO: 2126310 - RNA, 19 nt, Artificial Sequence
  Description of Artificial Sequence: Synthetic oligonucleotide
accacccauuaucaggcau

SEQ ID NO: 2126311 - RNA, 19 nt, Artificial Sequence
  Description of Artificial Sequence: Synthetic oligonucleotide
auugaaccaccugguaggu

SEQ ID NO: 2126312 - RNA, 19 nt, Artificial Sequence
  Description of Artificial Sequence: Synthetic oligonucleotide
aaggcaagguauacaucaa

SEQ ID NO: 2126313 - RNA, 19 nt, Artificial Sequence
  Description of Artificial Sequence: Synthetic oligonucleotide
aaaagacuuuauacacaua

SEQ ID NO: 2126314 - RNA, 19 nt, Artificial Sequence
  Description of Artificial Sequence: Synthetic oligonucleotide
gagggcaaagguggauaag

SEQ ID NO: 2126315 - RNA, 19 nt, Artificial Sequence
  Description of Artificial Sequence: Synthetic oligonucleotide
acgaccagagguaaacgau

SEQ ID NO: 2126316 - RNA, 19 nt, Artificial Sequence
  Description of Artificial Sequence: Synthetic oligonucleotide
caacaauugaucugucuau

SEQ ID NO: 2126317 - RNA, 19 nt, Artificial Sequence
  Description of Artificial Sequence: Synthetic oligonucleotide
uggagcccuucaacgcuug

SEQ ID NO: 2126318 - RNA, 19 nt, Artificial Sequence
  Description of Artificial Sequence: Synthetic oligonucleotide
uccaugggagcugcaccag

SEQ ID NO: 2126319 - RNA, 19 nt, Artificial Sequence
  Description of Artificial Sequence: Synthetic oligonucleotide
uuaguccuguguuggcauu

SEQ ID NO: 2126320 - RNA, 19 nt, Artificial Sequence
  Description of Artificial Sequence: Synthetic oligonucleotide
uuagaucauccgccaugau

SEQ ID NO: 2126321 - RNA, 19 nt, Artificial Sequence
  Description of Artificial Sequence: Synthetic oligonucleotide
aucuucgcugagaucauau

SEQ ID NO: 2126322 - RNA, 19 nt, Artificial Sequence
  Description of Artificial Sequence: Synthetic oligonucleotide
guuggcauuacugcuggcu

SEQ ID NO: 2126323 - RNA, 19 nt, Artificial Sequence
  Description of Artificial Sequence: Synthetic oligonucleotide
gucuguugcgagggcaaag

SEQ ID NO: 2126324 - RNA, 19 nt, Artificial Sequence
  Description of Artificial Sequence: Synthetic oligonucleotide
ggcaagguauacaucaaaa

SEQ ID NO: 2126325 - RNA, 19 nt, Artificial Sequence
  Description of Artificial Sequence: Synthetic oligonucleotide
auugcuggacugguacagu

SEQ ID NO: 2126326 - RNA, 19 nt, Artificial Sequence
  Description of Artificial Sequence: Synthetic oligonucleotide
cugucguuggccacuuuaa

SEQ ID NO: 2126327 - RNA, 19 nt, Artificial Sequence
  Description of Artificial Sequence: Synthetic oligonucleotide
gguagguauuauaguaaca

SEQ ID NO: 2126328 - RNA, 19 nt, Artificial Sequence
  Description of Artificial Sequence: Synthetic oligonucleotide
caucucuaucugacacaac

SEQ ID NO: 2126329 - RNA, 19 nt, Artificial Sequence
  Description of Artificial Sequence: Synthetic oligonucleotide
accccaucucuaucugaca

SEQ ID NO: 2126330 - RNA, 19 nt, Artificial Sequence
  Description of Artificial Sequence: Synthetic oligonucleotide
ccccaucucuaucugacac

SEQ ID NO: 2126331 - RNA, 19 nt, Artificial Sequence
  Description of Artificial Sequence: Synthetic oligonucleotide
ccauuaucaggcauccaca

SEQ ID NO: 2126332 - RNA, 19 nt, Artificial Sequence
  Description of Artificial Sequence: Synthetic oligonucleotide
guagaauaccacccauuau

SEQ ID NO: 2126333 - RNA, 19 nt, Artificial Sequence
  Description of Artificial Sequence: Synthetic oligonucleotide
cagagguaaacgauugaau

SEQ ID NO: 2126334 - RNA, 19 nt, Artificial Sequence
  Description of Artificial Sequence: Synthetic oligonucleotide
ggaaucguuuuagaucauc

SEQ ID NO: 2126335 - RNA, 19 nt, Artificial Sequence
  Description of Artificial Sequence: Synthetic oligonucleotide
ggagcgggagcacugugca

SEQ ID NO: 2126336 - RNA, 19 nt, Artificial Sequence
  Description of Artificial Sequence: Synthetic oligonucleotide
auaacggagccaguuccuu

SEQ ID NO: 2126337 - RNA, 19 nt, Artificial Sequence
  Description of Artificial Sequence: Synthetic oligonucleotide
guacuaagccauuuaucuu

SEQ ID NO: 2126338 - RNA, 19 nt, Artificial Sequence
  Description of Artificial Sequence: Synthetic oligonucleotide
guggcguuuccagaucuca

SEQ ID NO: 2126339 - RNA, 19 nt, Artificial Sequence
  Description of Artificial Sequence: Synthetic oligonucleotide
uaguccuguguuggcauua

SEQ ID NO: 2126340 - RNA, 19 nt, Artificial Sequence
  Description of Artificial Sequence: Synthetic oligonucleotide
uuauagcuauaggcucuuc

SEQ ID NO: 2126341 - RNA, 19 nt, Artificial Sequence
  Description of Artificial Sequence: Synthetic oligonucleotide
aggaucaaauacacuggua

SEQ ID NO: 2126342 - RNA, 19 nt, Artificial Sequence
  Description of Artificial Sequence: Synthetic oligonucleotide
gcuggcuaugaaacucacg

SEQ ID NO: 2126343 - RNA, 19 nt, Artificial Sequence
  Description of Artificial Sequence: Synthetic oligonucleotide
cauggagcccuucaacgcu

SEQ ID NO: 2126344 - RNA, 19 nt, Artificial Sequence
  Description of Artificial Sequence: Synthetic oligonucleotide
guccgaguuugcugccuug

SEQ ID NO: 2126345 - RNA, 19 nt, Artificial Sequence
  Description of Artificial Sequence: Synthetic oligonucleotide
cauuacugcuggcuaugaa

SEQ ID NO: 2126346 - RNA, 19 nt, Artificial Sequence
  Description of Artificial Sequence: Synthetic oligonucleotide
aagcggcccucugaauaca

SEQ ID NO: 2126347 - RNA, 19 nt, Artificial Sequence
  Description of Artificial Sequence: Synthetic oligonucleotide
guuuuagaucauccgccau

SEQ ID NO: 2126348 - RNA, 19 nt, Artificial Sequence
  Description of Artificial Sequence: Synthetic oligonucleotide
gcaggaucgaucacugcuc

SEQ ID NO: 2126349 - RNA, 19 nt, Artificial Sequence
  Description of Artificial Sequence: Synthetic oligonucleotide
caggcaccccaucucuauc

SEQ ID NO: 2126350 - RNA, 19 nt, Artificial Sequence
  Description of Artificial Sequence: Synthetic oligonucleotide
gugauuguacguauuuauu

SEQ ID NO: 2126351 - RNA, 19 nt, Artificial Sequence
  Description of Artificial Sequence: Synthetic oligonucleotide
gccauuuaucuuccucaca

SEQ ID NO: 2126352 - RNA, 19 nt, Artificial Sequence
  Description of Artificial Sequence: Synthetic oligonucleotide
ggagcccuucaacgcuugg

SEQ ID NO: 2126353 - RNA, 19 nt, Artificial Sequence
  Description of Artificial Sequence: Synthetic oligonucleotide
gaaaagcggcccucugaau

SEQ ID NO: 2126354 - RNA, 19 nt, Artificial Sequence
  Description of Artificial Sequence: Synthetic oligonucleotide
ccucucccgcgcaggaucg

SEQ ID NO: 2126355 - RNA, 19 nt, Artificial Sequence
  Description of Artificial Sequence: Synthetic oligonucleotide
cguuuuagaucauccgcca

SEQ ID NO: 2126356 - RNA, 19 nt, Artificial Sequence
  Description of Artificial Sequence: Synthetic oligonucleotide
gcaaugaaggcaagguaua

SEQ ID NO: 2126357 - RNA, 19 nt, Artificial Sequence
  Description of Artificial Sequence: Synthetic oligonucleotide
cucccgcgcaggaucgauc

SEQ ID NO: 2126358 - RNA, 19 nt, Artificial Sequence
  Description of Artificial Sequence: Synthetic oligonucleotide
guuagugauuguacguauu

SEQ ID NO: 2126359 - RNA, 19 nt, Artificial Sequence
  Description of Artificial Sequence: Synthetic oligonucleotide
ccacacuaacuccauggga

SEQ ID NO: 2126360 - RNA, 19 nt, Artificial Sequence
  Description of Artificial Sequence: Synthetic oligonucleotide
ucucccgcgcaggaucgau

SEQ ID NO: 2126361 - RNA, 19 nt, Artificial Sequence
  Description of Artificial Sequence: Synthetic oligonucleotide
cgaguuugcugccuugguc

SEQ ID NO: 2126362 - RNA, 19 nt, Artificial Sequence
  Description of Artificial Sequence: Synthetic oligonucleotide
gguauacaucaaaaccacu

SEQ ID NO: 2126363 - RNA, 19 nt, Artificial Sequence
  Description of Artificial Sequence: Synthetic oligonucleotide
acaauugcauggagcccuu

SEQ ID NO: 2126364 - RNA, 19 nt, Artificial Sequence
  Description of Artificial Sequence: Synthetic oligonucleotide
auggagcccuucaacgcuu

SEQ ID NO: 2126365 - RNA, 19 nt, Artificial Sequence
  Description of Artificial Sequence: Synthetic oligonucleotide
caauugcauggagcccuuc

SEQ ID NO: 2126366 - RNA, 19 nt, Artificial Sequence
  Description of Artificial Sequence: Synthetic oligonucleotide
cacuaacuccaugggagcu

SEQ ID NO: 2126367 - RNA, 19 nt, Artificial Sequence
  Description of Artificial Sequence: Synthetic oligonucleotide
gcacuggguagaauaccac

SEQ ID NO: 2126368 - RNA, 19 nt, Artificial Sequence
  Description of Artificial Sequence: Synthetic oligonucleotide
acccauuaucaggcaucca

SEQ ID NO: 2126369 - RNA, 19 nt, Artificial Sequence
  Description of Artificial Sequence: Synthetic oligonucleotide
cgcgcaggaucgaucacug

SEQ ID NO: 2126370 - RNA, 19 nt, Artificial Sequence
  Description of Artificial Sequence: Synthetic oligonucleotide
cuguugcgagggcaaaggu

SEQ ID NO: 2126371 - RNA, 19 nt, Artificial Sequence
  Description of Artificial Sequence: Synthetic oligonucleotide
ucgcccacgcgcgcgcgcu

SEQ ID NO: 2126372 - RNA, 19 nt, Artificial Sequence
  Description of Artificial Sequence: Synthetic oligonucleotide
cucgcccacgcgcgcgcgc

SEQ ID NO: 2126373 - RNA, 19 nt, Artificial Sequence
  Description of Artificial Sequence: Synthetic oligonucleotide
ggcccucugaauacauaga

SEQ ID NO: 2126374 - RNA, 19 nt, Artificial Sequence
  Description of Artificial Sequence: Synthetic oligonucleotide
aggaaucguuuuagaucau

SEQ ID NO: 2126375 - RNA, 19 nt, Artificial Sequence
  Description of Artificial Sequence: Synthetic oligonucleotide
gcccuucaacgcuuggcaa

SEQ ID NO: 2126376 - RNA, 19 nt, Artificial Sequence
  Description of Artificial Sequence: Synthetic oligonucleotide
gcgcaggaucgaucacugc

SEQ ID NO: 2126377 - RNA, 19 nt, Artificial Sequence
  Description of Artificial Sequence: Synthetic oligonucleotide
gcgcgcgcgcuccagccug

SEQ ID NO: 2126378 - RNA, 19 nt, Artificial Sequence
  Description of Artificial Sequence: Synthetic oligonucleotide
caucuucgcugagaucaua

SEQ ID NO: 2126379 - RNA, 19 nt, Artificial Sequence
  Description of Artificial Sequence: Synthetic oligonucleotide
guuugcugccuuggucugu

SEQ ID NO: 2126380 - RNA, 19 nt, Artificial Sequence
  Description of Artificial Sequence: Synthetic oligonucleotide
gcgagggcaaagguggaua

SEQ ID NO: 2126381 - RNA, 19 nt, Artificial Sequence
  Description of Artificial Sequence: Synthetic oligonucleotide
cgauugaauugaaccaccu

SEQ ID NO: 2126382 - RNA, 19 nt, Artificial Sequence
  Description of Artificial Sequence: Synthetic oligonucleotide
cgagggcaaagguggauaa

SEQ ID NO: 2126383 - RNA, 19 nt, Artificial Sequence
  Description of Artificial Sequence: Synthetic oligonucleotide
ccuucaacgcuuggcaacu

SEQ ID NO: 2126384 - RNA, 19 nt, Artificial Sequence
  Description of Artificial Sequence: Synthetic oligonucleotide
ggguagaauaccacccauu

SEQ ID NO: 2126385 - RNA, 19 nt, Artificial Sequence
  Description of Artificial Sequence: Synthetic oligonucleotide
ggucuguugcgagggcaaa

SEQ ID NO: 2126386 - RNA, 19 nt, Artificial Sequence
  Description of Artificial Sequence: Synthetic oligonucleotide
ccggcuguccccgcaguuc

SEQ ID NO: 2126387 - RNA, 19 nt, Artificial Sequence
  Description of Artificial Sequence: Synthetic oligonucleotide
ccuuuucuaggcugacaau

SEQ ID NO: 2126388 - RNA, 19 nt, Artificial Sequence
  Description of Artificial Sequence: Synthetic oligonucleotide
gcgggagcacugugcagcu

SEQ ID NO: 2126389 - RNA, 19 nt, Artificial Sequence
  Description of Artificial Sequence: Synthetic oligonucleotide
gcucgcccacgcgcgcgcg

SEQ ID NO: 2126390 - RNA, 19 nt, Artificial Sequence
  Description of Artificial Sequence: Synthetic oligonucleotide
gcccacgcgcgcgcgcucc

SEQ ID NO: 2126391 - RNA, 19 nt, Artificial Sequence
  Description of Artificial Sequence: Synthetic oligonucleotide
cccgcgcaggaucgaucac

SEQ ID NO: 2126392 - RNA, 19 nt, Artificial Sequence
  Description of Artificial Sequence: Synthetic oligonucleotide
cucucccgcgcaggaucga

SEQ ID NO: 2126393 - RNA, 19 nt, Artificial Sequence
  Description of Artificial Sequence: Synthetic oligonucleotide
ggacugguacaguguuguu

SEQ ID NO: 2126394 - RNA, 19 nt, Artificial Sequence
  Description of Artificial Sequence: Synthetic oligonucleotide
cuucaacgcuuggcaacuu

SEQ ID NO: 2126395 - RNA, 19 nt, Artificial Sequence
  Description of Artificial Sequence: Synthetic oligonucleotide
ccgcgcaggaucgaucacu

SEQ ID NO: 2126396 - RNA, 19 nt, Artificial Sequence
  Description of Artificial Sequence: Synthetic oligonucleotide
ccacgcgcgcgcgcuccag

SEQ ID NO: 2126397 - RNA, 19 nt, Artificial Sequence
  Description of Artificial Sequence: Synthetic oligonucleotide
cacugucguuggccacuuu

SEQ ID NO: 2126398 - RNA, 19 nt, Artificial Sequence
  Description of Artificial Sequence: Synthetic oligonucleotide
cgcccacgcgcgcgcgcuc

SEQ ID NO: 2126399 - RNA, 19 nt, Artificial Sequence
  Description of Artificial Sequence: Synthetic oligonucleotide
aauggaagguauaauaccc

SEQ ID NO: 2126400 - RNA, 19 nt, Artificial Sequence
  Description of Artificial Sequence: Synthetic oligonucleotide
ugaacaucgauaaucauca

SEQ ID NO: 2126401 - RNA, 19 nt, Artificial Sequence
  Description of Artificial Sequence: Synthetic oligonucleotide
uaugugaagaaauagugug

SEQ ID NO: 2126402 - RNA, 19 nt, Artificial Sequence
  Description of Artificial Sequence: Synthetic oligonucleotide
aaaauggaagguauaauac

SEQ ID NO: 2126403 - RNA, 19 nt, Artificial Sequence
  Description of Artificial Sequence: Synthetic oligonucleotide
cuaguaaaucuucagagcg

SEQ ID NO: 2126404 - RNA, 19 nt, Artificial Sequence
  Description of Artificial Sequence: Synthetic oligonucleotide
ugaagaaauaguguggugg

SEQ ID NO: 2126405 - RNA, 19 nt, Artificial Sequence
  Description of Artificial Sequence: Synthetic oligonucleotide
uaggauguaaaccagucag

SEQ ID NO: 2126406 - RNA, 19 nt, Artificial Sequence
  Description of Artificial Sequence: Synthetic oligonucleotide
ugugaauccgguaugaaca

SEQ ID NO: 2126407 - RNA, 19 nt, Artificial Sequence
  Description of Artificial Sequence: Synthetic oligonucleotide
auagugauuugacagugcc

SEQ ID NO: 2126408 - RNA, 19 nt, Artificial Sequence
  Description of Artificial Sequence: Synthetic oligonucleotide
gauguuguagaaaaugugg

SEQ ID NO: 2126409 - RNA, 19 nt, Artificial Sequence
  Description of Artificial Sequence: Synthetic oligonucleotide
agcagcaggauuucgagcc

SEQ ID NO: 2126410 - RNA, 19 nt, Artificial Sequence
  Description of Artificial Sequence: Synthetic oligonucleotide
ucuuucagagauaaaacca

SEQ ID NO: 2126411 - RNA, 19 nt, Artificial Sequence
  Description of Artificial Sequence: Synthetic oligonucleotide
uuagcauucguuauccucc

SEQ ID NO: 2126412 - RNA, 19 nt, Artificial Sequence
  Description of Artificial Sequence: Synthetic oligonucleotide
ucagagauaaaaccauccg

SEQ ID NO: 2126413 - RNA, 19 nt, Artificial Sequence
  Description of Artificial Sequence: Synthetic oligonucleotide
aaagguagcaccuaugaua

SEQ ID NO: 2126414 - RNA, 19 nt, Artificial Sequence
  Description of Artificial Sequence: Synthetic oligonucleotide
ugauacaacauuguugacg

SEQ ID NO: 2126415 - RNA, 19 nt, Artificial Sequence
  Description of Artificial Sequence: Synthetic oligonucleotide
ugauaauuggaaauucacc

SEQ ID NO: 2126416 - RNA, 19 nt, Artificial Sequence
  Description of Artificial Sequence: Synthetic oligonucleotide
aauguaucugaaaaucugg

SEQ ID NO: 2126417 - RNA, 19 nt, Artificial Sequence
  Description of Artificial Sequence: Synthetic oligonucleotide
ucgauaaucaucagggagc

SEQ ID NO: 2126418 - RNA, 19 nt, Artificial Sequence
  Description of Artificial Sequence: Synthetic oligonucleotide
aggauuucgagccauuugg

SEQ ID NO: 2126419 - RNA, 19 nt, Artificial Sequence
  Description of Artificial Sequence: Synthetic oligonucleotide
agcgauagugauuugacag

SEQ ID NO: 2126420 - RNA, 19 nt, Artificial Sequence
  Description of Artificial Sequence: Synthetic oligonucleotide
acaucgauaaucaucaggg

SEQ ID NO: 2126421 - RNA, 19 nt, Artificial Sequence
  Description of Artificial Sequence: Synthetic oligonucleotide
ugauaaacaugucaauagc

SEQ ID NO: 2126422 - RNA, 19 nt, Artificial Sequence
  Description of Artificial Sequence: Synthetic oligonucleotide
uguugcuacacacucuggg

SEQ ID NO: 2126423 - RNA, 19 nt, Artificial Sequence
  Description of Artificial Sequence: Synthetic oligonucleotide
aaucgggcuauagacaccc

SEQ ID NO: 2126424 - RNA, 19 nt, Artificial Sequence
  Description of Artificial Sequence: Synthetic oligonucleotide
acauuguugacguaggaug

SEQ ID NO: 2126425 - RNA, 19 nt, Artificial Sequence
  Description of Artificial Sequence: Synthetic oligonucleotide
uguuggacaugccaugugg

SEQ ID NO: 2126426 - RNA, 19 nt, Artificial Sequence
  Description of Artificial Sequence: Synthetic oligonucleotide
aucgauaaucaucagggag

SEQ ID NO: 2126427 - RNA, 19 nt, Artificial Sequence
  Description of Artificial Sequence: Synthetic oligonucleotide
ucuaguaaaucuucagagc

SEQ ID NO: 2126428 - RNA, 19 nt, Artificial Sequence
  Description of Artificial Sequence: Synthetic oligonucleotide
acauugguagaacacuucg

SEQ ID NO: 2126429 - RNA, 19 nt, Artificial Sequence
  Description of Artificial Sequence: Synthetic oligonucleotide
ugacguaggauguaaacca

SEQ ID NO: 2126430 - RNA, 19 nt, Artificial Sequence
  Description of Artificial Sequence: Synthetic oligonucleotide
gaaaccaccugauacaaca

SEQ ID NO: 2126431 - RNA, 19 nt, Artificial Sequence
  Description of Artificial Sequence: Synthetic oligonucleotide
uaauuggaaauucaccaac

SEQ ID NO: 2126432 - RNA, 19 nt, Artificial Sequence
  Description of Artificial Sequence: Synthetic oligonucleotide
ugaaacuguaauaucucca

SEQ ID NO: 2126433 - RNA, 19 nt, Artificial Sequence
  Description of Artificial Sequence: Synthetic oligonucleotide
cuauguacugacucaagcc

SEQ ID NO: 2126434 - RNA, 19 nt, Artificial Sequence
  Description of Artificial Sequence: Synthetic oligonucleotide
gaauccgguaugaacaucg

SEQ ID NO: 2126435 - RNA, 19 nt, Artificial Sequence
  Description of Artificial Sequence: Synthetic oligonucleotide
gagauaaaaccauccgagg

SEQ ID NO: 2126436 - RNA, 19 nt, Artificial Sequence
  Description of Artificial Sequence: Synthetic oligonucleotide
uuaugaagagagauuccag

SEQ ID NO: 2126437 - RNA, 19 nt, Artificial Sequence
  Description of Artificial Sequence: Synthetic oligonucleotide
auguaaaccagucaguaaa

SEQ ID NO: 2126438 - RNA, 19 nt, Artificial Sequence
  Description of Artificial Sequence: Synthetic oligonucleotide
uguaaaccagucaguaaag

SEQ ID NO: 2126439 - RNA, 19 nt, Artificial Sequence
  Description of Artificial Sequence: Synthetic oligonucleotide
aguaaguaguuaugaagag

SEQ ID NO: 2126440 - RNA, 19 nt, Artificial Sequence
  Description of Artificial Sequence: Synthetic oligonucleotide
gcuauagacacccugaaug

SEQ ID NO: 2126441 - RNA, 19 nt, Artificial Sequence
  Description of Artificial Sequence: Synthetic oligonucleotide
auuucgagccauuuggucu

SEQ ID NO: 2126442 - RNA, 19 nt, Artificial Sequence
  Description of Artificial Sequence: Synthetic oligonucleotide
uggggaaaccaccugauac

SEQ ID NO: 2126443 - RNA, 19 nt, Artificial Sequence
  Description of Artificial Sequence: Synthetic oligonucleotide
gagauuccagcauugauuc

SEQ ID NO: 2126444 - RNA, 19 nt, Artificial Sequence
  Description of Artificial Sequence: Synthetic oligonucleotide
cugauaauuggaaauucac

SEQ ID NO: 2126445 - RNA, 19 nt, Artificial Sequence
  Description of Artificial Sequence: Synthetic oligonucleotide
aauagugugguggguguac

SEQ ID NO: 2126446 - RNA, 19 nt, Artificial Sequence
  Description of Artificial Sequence: Synthetic oligonucleotide
gauacaacauuguugacgu

SEQ ID NO: 2126447 - RNA, 19 nt, Artificial Sequence
  Description of Artificial Sequence: Synthetic oligonucleotide
uaguuaugaagagagauuc

SEQ ID NO: 2126448 - RNA, 19 nt, Artificial Sequence
  Description of Artificial Sequence: Synthetic oligonucleotide
gaauguaucugaaaaucug

SEQ ID NO: 2126449 - RNA, 19 nt, Artificial Sequence
  Description of Artificial Sequence: Synthetic oligonucleotide
ucgauaugugaagaaauag

SEQ ID NO: 2126450 - RNA, 19 nt, Artificial Sequence
  Description of Artificial Sequence: Synthetic oligonucleotide
auucguauauccgaccugg

SEQ ID NO: 2126451 - RNA, 19 nt, Artificial Sequence
  Description of Artificial Sequence: Synthetic oligonucleotide
ucaacaucuaguaaaucuu

SEQ ID NO: 2126452 - RNA, 19 nt, Artificial Sequence
  Description of Artificial Sequence: Synthetic oligonucleotide
aaagggagacaguauuuca

SEQ ID NO: 2126453 - RNA, 19 nt, Artificial Sequence
  Description of Artificial Sequence: Synthetic oligonucleotide
uuuagcauucguuauccuc

SEQ ID NO: 2126454 - RNA, 19 nt, Artificial Sequence
  Description of Artificial Sequence: Synthetic oligonucleotide
accuaugauaaacauguca

SEQ ID NO: 2126455 - RNA, 19 nt, Artificial Sequence
  Description of Artificial Sequence: Synthetic oligonucleotide
ucguuauccuccaguagcg

SEQ ID NO: 2126456 - RNA, 19 nt, Artificial Sequence
  Description of Artificial Sequence: Synthetic oligonucleotide
gaaaaucuggucucugaug

SEQ ID NO: 2126457 - RNA, 19 nt, Artificial Sequence
  Description of Artificial Sequence: Synthetic oligonucleotide
gacuauccaacugacaggc

SEQ ID NO: 2126458 - RNA, 19 nt, Artificial Sequence
  Description of Artificial Sequence: Synthetic oligonucleotide
uccgguaugaacaucgaua

SEQ ID NO: 2126459 - RNA, 19 nt, Artificial Sequence
  Description of Artificial Sequence: Synthetic oligonucleotide
aucccuugacauuucaauc

SEQ ID NO: 2126460 - RNA, 19 nt, Artificial Sequence
  Description of Artificial Sequence: Synthetic oligonucleotide
aguaguuaugaagagagau

SEQ ID NO: 2126461 - RNA, 19 nt, Artificial Sequence
  Description of Artificial Sequence: Synthetic oligonucleotide
cuugcaaccaaucugagcu

SEQ ID NO: 2126462 - RNA, 19 nt, Artificial Sequence
  Description of Artificial Sequence: Synthetic oligonucleotide
uugacguaggauguaaacc

SEQ ID NO: 2126463 - RNA, 19 nt, Artificial Sequence
  Description of Artificial Sequence: Synthetic oligonucleotide
ugugaagaaauaguguggu

SEQ ID NO: 2126464 - RNA, 19 nt, Artificial Sequence
  Description of Artificial Sequence: Synthetic oligonucleotide
guuguugcuacacacucug

SEQ ID NO: 2126465 - RNA, 19 nt, Artificial Sequence
  Description of Artificial Sequence: Synthetic oligonucleotide
uaauggucaauguaucuuc

SEQ ID NO: 2126466 - RNA, 19 nt, Artificial Sequence
  Description of Artificial Sequence: Synthetic oligonucleotide
ugcgccuucuuucagagau

SEQ ID NO: 2126467 - RNA, 19 nt, Artificial Sequence
  Description of Artificial Sequence: Synthetic oligonucleotide
uccugauucgauaugugaa

SEQ ID NO: 2126468 - RNA, 19 nt, Artificial Sequence
  Description of Artificial Sequence: Synthetic oligonucleotide
ugauuugacagugccauac

SEQ ID NO: 2126469 - RNA, 19 nt, Artificial Sequence
  Description of Artificial Sequence: Synthetic oligonucleotide
uauaauacccuuccauaua

SEQ ID NO: 2126470 - RNA, 19 nt, Artificial Sequence
  Description of Artificial Sequence: Synthetic oligonucleotide
ugaaaaucuggucucugau

SEQ ID NO: 2126471 - RNA, 19 nt, Artificial Sequence
  Description of Artificial Sequence: Synthetic oligonucleotide
ugauggggaaaccaccuga

SEQ ID NO: 2126472 - RNA, 19 nt, Artificial Sequence
  Description of Artificial Sequence: Synthetic oligonucleotide
uguauucguauauccgacc

SEQ ID NO: 2126473 - RNA, 19 nt, Artificial Sequence
  Description of Artificial Sequence: Synthetic oligonucleotide
uucccagcaacccuggaac

SEQ ID NO: 2126474 - RNA, 19 nt, Artificial Sequence
  Description of Artificial Sequence: Synthetic oligonucleotide
aaacuguaauaucuccagu

SEQ ID NO: 2126475 - RNA, 19 nt, Artificial Sequence
  Description of Artificial Sequence: Synthetic oligonucleotide
auaauuggaaauucaccaa

SEQ ID NO: 2126476 - RNA, 19 nt, Artificial Sequence
  Description of Artificial Sequence: Synthetic oligonucleotide
aauuggaaauucaccaacu

SEQ ID NO: 2126477 - RNA, 19 nt, Artificial Sequence
  Description of Artificial Sequence: Synthetic oligonucleotide
gaaccacuaacuucugccc

SEQ ID NO: 2126478 - RNA, 19 nt, Artificial Sequence
  Description of Artificial Sequence: Synthetic oligonucleotide
guaaagguagcaccuauga

SEQ ID NO: 2126479 - RNA, 19 nt, Artificial Sequence
  Description of Artificial Sequence: Synthetic oligonucleotide
aacaugucaauagcagcag

SEQ ID NO: 2126480 - RNA, 19 nt, Artificial Sequence
  Description of Artificial Sequence: Synthetic oligonucleotide
ggaaccacuaacuucugcc

SEQ ID NO: 2126481 - RNA, 19 nt, Artificial Sequence
  Description of Artificial Sequence: Synthetic oligonucleotide
uucaauccugauucgauau

SEQ ID NO: 2126482 - RNA, 19 nt, Artificial Sequence
  Description of Artificial Sequence: Synthetic oligonucleotide
gaauguuggacaugccaug

SEQ ID NO: 2126483 - RNA, 19 nt, Artificial Sequence
  Description of Artificial Sequence: Synthetic oligonucleotide
uuauccuccaguagcgacu

SEQ ID NO: 2126484 - RNA, 19 nt, Artificial Sequence
  Description of Artificial Sequence: Synthetic oligonucleotide
uucgauaugugaagaaaua

SEQ ID NO: 2126485 - RNA, 19 nt, Artificial Sequence
  Description of Artificial Sequence: Synthetic oligonucleotide
uuucgagccauuuggucug

SEQ ID NO: 2126486 - RNA, 19 nt, Artificial Sequence
  Description of Artificial Sequence: Synthetic oligonucleotide
aauagcagcaggauuucga

SEQ ID NO: 2126487 - RNA, 19 nt, Artificial Sequence
  Description of Artificial Sequence: Synthetic oligonucleotide
aaaccauccgaggacaccu

SEQ ID NO: 2126488 - RNA, 19 nt, Artificial Sequence
  Description of Artificial Sequence: Synthetic oligonucleotide
uccauauagccugauguug

SEQ ID NO: 2126489 - RNA, 19 nt, Artificial Sequence
  Description of Artificial Sequence: Synthetic oligonucleotide
gguaugaacaucgauaauc

SEQ ID NO: 2126490 - RNA, 19 nt, Artificial Sequence
  Description of Artificial Sequence: Synthetic oligonucleotide
agugccauacuucccagca

SEQ ID NO: 2126491 - RNA, 19 nt, Artificial Sequence
  Description of Artificial Sequence: Synthetic oligonucleotide
agcagcauaauggucaaug

SEQ ID NO: 2126492 - RNA, 19 nt, Artificial Sequence
  Description of Artificial Sequence: Synthetic oligonucleotide
uuucagagauaaaaccauc

SEQ ID NO: 2126493 - RNA, 19 nt, Artificial Sequence
  Description of Artificial Sequence: Synthetic oligonucleotide
aguuaugaagagagauucc

SEQ ID NO: 2126494 - RNA, 19 nt, Artificial Sequence
  Description of Artificial Sequence: Synthetic oligonucleotide
agaaauaguguggugggug

SEQ ID NO: 2126495 - RNA, 19 nt, Artificial Sequence
  Description of Artificial Sequence: Synthetic oligonucleotide
ucguauauccgaccugggc

SEQ ID NO: 2126496 - RNA, 19 nt, Artificial Sequence
  Description of Artificial Sequence: Synthetic oligonucleotide
agguauaauacccuuccau

SEQ ID NO: 2126497 - RNA, 19 nt, Artificial Sequence
  Description of Artificial Sequence: Synthetic oligonucleotide
uuaaagggagacaguauuu

SEQ ID NO: 2126498 - RNA, 19 nt, Artificial Sequence
  Description of Artificial Sequence: Synthetic oligonucleotide
ucugaugauggggaaacca

SEQ ID NO: 2126499 - RNA, 19 nt, Artificial Sequence
  Description of Artificial Sequence: Synthetic oligonucleotide
agagcgauagugauuugac

SEQ ID NO: 2126500 - RNA, 19 nt, Artificial Sequence
  Description of Artificial Sequence: Synthetic oligonucleotide
gacaguauuucaaucccug

SEQ ID NO: 2126501 - RNA, 19 nt, Artificial Sequence
  Description of Artificial Sequence: Synthetic oligonucleotide
guuaugaagagagauucca

SEQ ID NO: 2126502 - RNA, 19 nt, Artificial Sequence
  Description of Artificial Sequence: Synthetic oligonucleotide
aauguuggacaugccaugu

SEQ ID NO: 2126503 - RNA, 19 nt, Artificial Sequence
  Description of Artificial Sequence: Synthetic oligonucleotide
guagcgacuauccaacuga

SEQ ID NO: 2126504 - RNA, 19 nt, Artificial Sequence
  Description of Artificial Sequence: Synthetic oligonucleotide
acagcuauguacugacuca

SEQ ID NO: 2126505 - RNA, 19 nt, Artificial Sequence
  Description of Artificial Sequence: Synthetic oligonucleotide
uggacacugaaacuguaau

SEQ ID NO: 2126506 - RNA, 19 nt, Artificial Sequence
  Description of Artificial Sequence: Synthetic oligonucleotide
ugggucaugaauguaucug

SEQ ID NO: 2126507 - RNA, 19 nt, Artificial Sequence
  Description of Artificial Sequence: Synthetic oligonucleotide
ugggcugauaauuggaaau

SEQ ID NO: 2126508 - RNA, 19 nt, Artificial Sequence
  Description of Artificial Sequence: Synthetic oligonucleotide
uaaucaucagggagcuugc

SEQ ID NO: 2126509 - RNA, 19 nt, Artificial Sequence
  Description of Artificial Sequence: Synthetic oligonucleotide
guugacguaggauguaaac

SEQ ID NO: 2126510 - RNA, 19 nt, Artificial Sequence
  Description of Artificial Sequence: Synthetic oligonucleotide
acauuucaauccugauucg

SEQ ID NO: 2126511 - RNA, 19 nt, Artificial Sequence
  Description of Artificial Sequence: Synthetic oligonucleotide
guaaaccagucaguaaagg

SEQ ID NO: 2126512 - RNA, 19 nt, Artificial Sequence
  Description of Artificial Sequence: Synthetic oligonucleotide
guauauccgaccugggcug

SEQ ID NO: 2126513 - RNA, 19 nt, Artificial Sequence
  Description of Artificial Sequence: Synthetic oligonucleotide
cuugacauuucaauccuga

SEQ ID NO: 2126514 - RNA, 19 nt, Artificial Sequence
  Description of Artificial Sequence: Synthetic oligonucleotide
gauuucgagccauuugguc

SEQ ID NO: 2126515 - RNA, 19 nt, Artificial Sequence
  Description of Artificial Sequence: Synthetic oligonucleotide
guaugaacaucgauaauca

SEQ ID NO: 2126516 - RNA, 19 nt, Artificial Sequence
  Description of Artificial Sequence: Synthetic oligonucleotide
auucguuauccuccaguag

SEQ ID NO: 2126517 - RNA, 19 nt, Artificial Sequence
  Description of Artificial Sequence: Synthetic oligonucleotide
uaaagguagcaccuaugau

SEQ ID NO: 2126518 - RNA, 19 nt, Artificial Sequence
  Description of Artificial Sequence: Synthetic oligonucleotide
cuggacauugguagaacac

SEQ ID NO: 2126519 - RNA, 19 nt, Artificial Sequence
  Description of Artificial Sequence: Synthetic oligonucleotide
uggacauugguagaacacu

SEQ ID NO: 2126520 - RNA, 19 nt, Artificial Sequence
  Description of Artificial Sequence: Synthetic oligonucleotide
auccugauucgauauguga

SEQ ID NO: 2126521 - RNA, 19 nt, Artificial Sequence
  Description of Artificial Sequence: Synthetic oligonucleotide
caguauuucaaucccuguc

SEQ ID NO: 2126522 - RNA, 19 nt, Artificial Sequence
  Description of Artificial Sequence: Synthetic oligonucleotide
auagacacccugaauguug

SEQ ID NO: 2126523 - RNA, 19 nt, Artificial Sequence
  Description of Artificial Sequence: Synthetic oligonucleotide
caugucaauagcagcagga

SEQ ID NO: 2126524 - RNA, 19 nt, Artificial Sequence
  Description of Artificial Sequence: Synthetic oligonucleotide
uucguauauccgaccuggg

SEQ ID NO: 2126525 - RNA, 19 nt, Artificial Sequence
  Description of Artificial Sequence: Synthetic oligonucleotide
uggucaauguaucuuccua

SEQ ID NO: 2126526 - RNA, 19 nt, Artificial Sequence
  Description of Artificial Sequence: Synthetic oligonucleotide
caucagggagcuugcaacc

SEQ ID NO: 2126527 - RNA, 19 nt, Artificial Sequence
  Description of Artificial Sequence: Synthetic oligonucleotide
ucugggucaugaauguauc

SEQ ID NO: 2126528 - RNA, 19 nt, Artificial Sequence
  Description of Artificial Sequence: Synthetic oligonucleotide
ugauguggacacugaaacu

SEQ ID NO: 2126529 - RNA, 19 nt, Artificial Sequence
  Description of Artificial Sequence: Synthetic oligonucleotide
gaccugggcugauaauugg

SEQ ID NO: 2126530 - RNA, 19 nt, Artificial Sequence
  Description of Artificial Sequence: Synthetic oligonucleotide
uguacugacucaagcccgu

SEQ ID NO: 2126531 - RNA, 19 nt, Artificial Sequence
  Description of Artificial Sequence: Synthetic oligonucleotide
agcuucuacagcauccagg

SEQ ID NO: 2126532 - RNA, 19 nt, Artificial Sequence
  Description of Artificial Sequence: Synthetic oligonucleotide
gauguaaaccagucaguaa

SEQ ID NO: 2126533 - RNA, 19 nt, Artificial Sequence
  Description of Artificial Sequence: Synthetic oligonucleotide
guuauccuccaguagcgac

SEQ ID NO: 2126534 - RNA, 19 nt, Artificial Sequence
  Description of Artificial Sequence: Synthetic oligonucleotide
ucgggcuauagacacccug

SEQ ID NO: 2126535 - RNA, 19 nt, Artificial Sequence
  Description of Artificial Sequence: Synthetic oligonucleotide
aacccuggaaccacuaacu

SEQ ID NO: 2126536 - RNA, 19 nt, Artificial Sequence
  Description of Artificial Sequence: Synthetic oligonucleotide
uccuccggcagcaguauca

SEQ ID NO: 2126537 - RNA, 19 nt, Artificial Sequence
  Description of Artificial Sequence: Synthetic oligonucleotide
gcuauguacugacucaagc

SEQ ID NO: 2126538 - RNA, 19 nt, Artificial Sequence
  Description of Artificial Sequence: Synthetic oligonucleotide
cucaagcccguauguaugc

SEQ ID NO: 2126539 - RNA, 19 nt, Artificial Sequence
  Description of Artificial Sequence: Synthetic oligonucleotide
caccaacuacuccaggucc

SEQ ID NO: 2126540 - RNA, 19 nt, Artificial Sequence
  Description of Artificial Sequence: Synthetic oligonucleotide
gucaauguaucuuccuaca

SEQ ID NO: 2126541 - RNA, 19 nt, Artificial Sequence
  Description of Artificial Sequence: Synthetic oligonucleotide
uggaaccacuaacuucugc

SEQ ID NO: 2126542 - RNA, 19 nt, Artificial Sequence
  Description of Artificial Sequence: Synthetic oligonucleotide
uaucuuccuacaucugagu

SEQ ID NO: 2126543 - RNA, 19 nt, Artificial Sequence
  Description of Artificial Sequence: Synthetic oligonucleotide
gagcuugcaaccaaucuga

SEQ ID NO: 2126544 - RNA, 19 nt, Artificial Sequence
  Description of Artificial Sequence: Synthetic oligonucleotide
gggauggcaacauuaaaga

SEQ ID NO: 2126545 - RNA, 19 nt, Artificial Sequence
  Description of Artificial Sequence: Synthetic oligonucleotide
caacccuggaaccacuaac

SEQ ID NO: 2126546 - RNA, 19 nt, Artificial Sequence
  Description of Artificial Sequence: Synthetic oligonucleotide
aauccugauucgauaugug

SEQ ID NO: 2126547 - RNA, 19 nt, Artificial Sequence
  Description of Artificial Sequence: Synthetic oligonucleotide
gacguaggauguaaaccag

SEQ ID NO: 2126548 - RNA, 19 nt, Artificial Sequence
  Description of Artificial Sequence: Synthetic oligonucleotide
agggagacaguauuucaau

SEQ ID NO: 2126549 - RNA, 19 nt, Artificial Sequence
  Description of Artificial Sequence: Synthetic oligonucleotide
auuugacagugccauacuu

SEQ ID NO: 2126550 - RNA, 19 nt, Artificial Sequence
  Description of Artificial Sequence: Synthetic oligonucleotide
uccuacaucugaguaagua

SEQ ID NO: 2126551 - RNA, 19 nt, Artificial Sequence
  Description of Artificial Sequence: Synthetic oligonucleotide
uguugacguaggauguaaa

SEQ ID NO: 2126552 - RNA, 19 nt, Artificial Sequence
  Description of Artificial Sequence: Synthetic oligonucleotide
guauuucaaucccugucuc

SEQ ID NO: 2126553 - RNA, 19 nt, Artificial Sequence
  Description of Artificial Sequence: Synthetic oligonucleotide
guaggauguaaaccaguca

SEQ ID NO: 2126554 - RNA, 19 nt, Artificial Sequence
  Description of Artificial Sequence: Synthetic oligonucleotide
auauagccugauguuguag

SEQ ID NO: 2126555 - RNA, 19 nt, Artificial Sequence
  Description of Artificial Sequence: Synthetic oligonucleotide
guauaauacccuuccauau

SEQ ID NO: 2126556 - RNA, 19 nt, Artificial Sequence
  Description of Artificial Sequence: Synthetic oligonucleotide
cuggcagaaaugaugugga

SEQ ID NO: 2126557 - RNA, 19 nt, Artificial Sequence
  Description of Artificial Sequence: Synthetic oligonucleotide
uccggaagggcaucccuug

SEQ ID NO: 2126558 - RNA, 19 nt, Artificial Sequence
  Description of Artificial Sequence: Synthetic oligonucleotide
auguaucugaaaaucuggu

SEQ ID NO: 2126559 - RNA, 19 nt, Artificial Sequence
  Description of Artificial Sequence: Synthetic oligonucleotide
ugacagugccauacuuccc

SEQ ID NO: 2126560 - RNA, 19 nt, Artificial Sequence
  Description of Artificial Sequence: Synthetic oligonucleotide
aguaaagguagcaccuaug

SEQ ID NO: 2126561 - RNA, 19 nt, Artificial Sequence
  Description of Artificial Sequence: Synthetic oligonucleotide
auagccugauguuguagaa

SEQ ID NO: 2126562 - RNA, 19 nt, Artificial Sequence
  Description of Artificial Sequence: Synthetic oligonucleotide
ccaaucgggcuauagacac

SEQ ID NO: 2126563 - RNA, 19 nt, Artificial Sequence
  Description of Artificial Sequence: Synthetic oligonucleotide
cccguauguaugcaaaagg

SEQ ID NO: 2126564 - RNA, 19 nt, Artificial Sequence
  Description of Artificial Sequence: Synthetic oligonucleotide
ugcccauugugaauccggu

SEQ ID NO: 2126565 - RNA, 19 nt, Artificial Sequence
  Description of Artificial Sequence: Synthetic oligonucleotide
gaacaucgauaaucaucag

SEQ ID NO: 2126566 - RNA, 19 nt, Artificial Sequence
  Description of Artificial Sequence: Synthetic oligonucleotide
auggucaauguaucuuccu

SEQ ID NO: 2126567 - RNA, 19 nt, Artificial Sequence
  Description of Artificial Sequence: Synthetic oligonucleotide
uccgaggacaccugggcuc

SEQ ID NO: 2126568 - RNA, 19 nt, Artificial Sequence
  Description of Artificial Sequence: Synthetic oligonucleotide
gcaccuaugauaaacaugu

SEQ ID NO: 2126569 - RNA, 19 nt, Artificial Sequence
  Description of Artificial Sequence: Synthetic oligonucleotide
guauucguauauccgaccu

SEQ ID NO: 2126570 - RNA, 19 nt, Artificial Sequence
  Description of Artificial Sequence: Synthetic oligonucleotide
uaucuccaguuguugcuac

SEQ ID NO: 2126571 - RNA, 19 nt, Artificial Sequence
  Description of Artificial Sequence: Synthetic oligonucleotide
ucacgugcgccuucuuuca

SEQ ID NO: 2126572 - RNA, 19 nt, Artificial Sequence
  Description of Artificial Sequence: Synthetic oligonucleotide
uagcgacuauccaacugac

SEQ ID NO: 2126573 - RNA, 19 nt, Artificial Sequence
  Description of Artificial Sequence: Synthetic oligonucleotide
uagcauucguuauccucca

SEQ ID NO: 2126574 - RNA, 19 nt, Artificial Sequence
  Description of Artificial Sequence: Synthetic oligonucleotide
guguauucguauauccgac

SEQ ID NO: 2126575 - RNA, 19 nt, Artificial Sequence
  Description of Artificial Sequence: Synthetic oligonucleotide
cagucaguaaagguagcac

SEQ ID NO: 2126576 - RNA, 19 nt, Artificial Sequence
  Description of Artificial Sequence: Synthetic oligonucleotide
gagcgauagugauuugaca

SEQ ID NO: 2126577 - RNA, 19 nt, Artificial Sequence
  Description of Artificial Sequence: Synthetic oligonucleotide
aaguaguuaugaagagaga

SEQ ID NO: 2126578 - RNA, 19 nt, Artificial Sequence
  Description of Artificial Sequence: Synthetic oligonucleotide
uuguugacguaggauguaa

SEQ ID NO: 2126579 - RNA, 19 nt, Artificial Sequence
  Description of Artificial Sequence: Synthetic oligonucleotide
cauucguuauccuccagua

SEQ ID NO: 2126580 - RNA, 19 nt, Artificial Sequence
  Description of Artificial Sequence: Synthetic oligonucleotide
cuauagacacccugaaugu

SEQ ID NO: 2126581 - RNA, 19 nt, Artificial Sequence
  Description of Artificial Sequence: Synthetic oligonucleotide
auguuggacaugccaugug

SEQ ID NO: 2126582 - RNA, 19 nt, Artificial Sequence
  Description of Artificial Sequence: Synthetic oligonucleotide
ccuuuagcauucguuaucc

SEQ ID NO: 2126583 - RNA, 19 nt, Artificial Sequence
  Description of Artificial Sequence: Synthetic oligonucleotide
acucaagcccguauguaug

SEQ ID NO: 2126584 - RNA, 19 nt, Artificial Sequence
  Description of Artificial Sequence: Synthetic oligonucleotide
ugcaaccaaucugagcuuc

SEQ ID NO: 2126585 - RNA, 19 nt, Artificial Sequence
  Description of Artificial Sequence: Synthetic oligonucleotide
uacugacucaagcccguau

SEQ ID NO: 2126586 - RNA, 19 nt, Artificial Sequence
  Description of Artificial Sequence: Synthetic oligonucleotide
auggaagguauaauacccu

SEQ ID NO: 2126587 - RNA, 19 nt, Artificial Sequence
  Description of Artificial Sequence: Synthetic oligonucleotide
ccuccaguagcgacuaucc

SEQ ID NO: 2126588 - RNA, 19 nt, Artificial Sequence
  Description of Artificial Sequence: Synthetic oligonucleotide
caaucgggcuauagacacc

SEQ ID NO: 2126589 - RNA, 19 nt, Artificial Sequence
  Description of Artificial Sequence: Synthetic oligonucleotide
gggucaugaauguaucuga

SEQ ID NO: 2126590 - RNA, 19 nt, Artificial Sequence
  Description of Artificial Sequence: Synthetic oligonucleotide
uauagacacccugaauguu

SEQ ID NO: 2126591 - RNA, 19 nt, Artificial Sequence
  Description of Artificial Sequence: Synthetic oligonucleotide
gacaccugggcuccaagua

SEQ ID NO: 2126592 - RNA, 19 nt, Artificial Sequence
  Description of Artificial Sequence: Synthetic oligonucleotide
cauuguugacguaggaugu

SEQ ID NO: 2126593 - RNA, 19 nt, Artificial Sequence
  Description of Artificial Sequence: Synthetic oligonucleotide
gacucaagcccguauguau

SEQ ID NO: 2126594 - RNA, 19 nt, Artificial Sequence
  Description of Artificial Sequence: Synthetic oligonucleotide
ugguggguguacagagcug

SEQ ID NO: 2126595 - RNA, 19 nt, Artificial Sequence
  Description of Artificial Sequence: Synthetic oligonucleotide
uggcagaaaugauguggac

SEQ ID NO: 2126596 - RNA, 19 nt, Artificial Sequence
  Description of Artificial Sequence: Synthetic oligonucleotide
ggugcagcuuguguauucg

SEQ ID NO: 2126597 - RNA, 19 nt, Artificial Sequence
  Description of Artificial Sequence: Synthetic oligonucleotide
uggugcagcuuguguauuc

SEQ ID NO: 2126598 - RNA, 19 nt, Artificial Sequence
  Description of Artificial Sequence: Synthetic oligonucleotide
aggauguaaaccagucagu

SEQ ID NO: 2126599 - RNA, 19 nt, Artificial Sequence
  Description of Artificial Sequence: Synthetic oligonucleotide
caucgauaaucaucaggga

SEQ ID NO: 2126600 - RNA, 19 nt, Artificial Sequence
  Description of Artificial Sequence: Synthetic oligonucleotide
aaauaguguggugggugua

SEQ ID NO: 2126601 - RNA, 19 nt, Artificial Sequence
  Description of Artificial Sequence: Synthetic oligonucleotide
aagcccguauguaugcaaa

SEQ ID NO: 2126602 - RNA, 19 nt, Artificial Sequence
  Description of Artificial Sequence: Synthetic oligonucleotide
aauccgguaugaacaucga

SEQ ID NO: 2126603 - RNA, 19 nt, Artificial Sequence
  Description of Artificial Sequence: Synthetic oligonucleotide
agauuccagcauugauucu

SEQ ID NO: 2126604 - RNA, 19 nt, Artificial Sequence
  Description of Artificial Sequence: Synthetic oligonucleotide
gcuucuacagcauccaggu

SEQ ID NO: 2126605 - RNA, 19 nt, Artificial Sequence
  Description of Artificial Sequence: Synthetic oligonucleotide
gcuugcaaccaaucugagc

SEQ ID NO: 2126606 - RNA, 19 nt, Artificial Sequence
  Description of Artificial Sequence: Synthetic oligonucleotide
gagagauuccagcauugau

SEQ ID NO: 2126607 - RNA, 19 nt, Artificial Sequence
  Description of Artificial Sequence: Synthetic oligonucleotide
auccaacugacaggccuuc

SEQ ID NO: 2126608 - RNA, 19 nt, Artificial Sequence
  Description of Artificial Sequence: Synthetic oligonucleotide
auccgguaugaacaucgau

SEQ ID NO: 2126609 - RNA, 19 nt, Artificial Sequence
  Description of Artificial Sequence: Synthetic oligonucleotide
ucaagcccguauguaugca

SEQ ID NO: 2126610 - RNA, 19 nt, Artificial Sequence
  Description of Artificial Sequence: Synthetic oligonucleotide
agcauucguuauccuccag

SEQ ID NO: 2126611 - RNA, 19 nt, Artificial Sequence
  Description of Artificial Sequence: Synthetic oligonucleotide
uagccugauguuguagaaa

SEQ ID NO: 2126612 - RNA, 19 nt, Artificial Sequence
  Description of Artificial Sequence: Synthetic oligonucleotide
uauccuccaguagcgacua

SEQ ID NO: 2126613 - RNA, 19 nt, Artificial Sequence
  Description of Artificial Sequence: Synthetic oligonucleotide
guuggacaugccaugugga

SEQ ID NO: 2126614 - RNA, 19 nt, Artificial Sequence
  Description of Artificial Sequence: Synthetic oligonucleotide
gggagacaguauuucaauc

SEQ ID NO: 2126615 - RNA, 19 nt, Artificial Sequence
  Description of Artificial Sequence: Synthetic oligonucleotide
ugacaggccuucuccggaa

SEQ ID NO: 2126616 - RNA, 19 nt, Artificial Sequence
  Description of Artificial Sequence: Synthetic oligonucleotide
agcuauguacugacucaag

SEQ ID NO: 2126617 - RNA, 19 nt, Artificial Sequence
  Description of Artificial Sequence: Synthetic oligonucleotide
agggagcuugcaaccaauc

SEQ ID NO: 2126618 - RNA, 19 nt, Artificial Sequence
  Description of Artificial Sequence: Synthetic oligonucleotide
cauacuucccagcaacccu

SEQ ID NO: 2126619 - RNA, 19 nt, Artificial Sequence
  Description of Artificial Sequence: Synthetic oligonucleotide
ugaauccgguaugaacauc

SEQ ID NO: 2126620 - RNA, 19 nt, Artificial Sequence
  Description of Artificial Sequence: Synthetic oligonucleotide
cagcauaauggucaaugua

SEQ ID NO: 2126621 - RNA, 19 nt, Artificial Sequence
  Description of Artificial Sequence: Synthetic oligonucleotide
acgugcgccuucuuucaga

SEQ ID NO: 2126622 - RNA, 19 nt, Artificial Sequence
  Description of Artificial Sequence: Synthetic oligonucleotide
cagagcgauagugauuuga

SEQ ID NO: 2126623 - RNA, 19 nt, Artificial Sequence
  Description of Artificial Sequence: Synthetic oligonucleotide
gaagggcaucccuugacau

SEQ ID NO: 2126624 - RNA, 19 nt, Artificial Sequence
  Description of Artificial Sequence: Synthetic oligonucleotide
ggauguaaaccagucagua

SEQ ID NO: 2126625 - RNA, 19 nt, Artificial Sequence
  Description of Artificial Sequence: Synthetic oligonucleotide
uucgagccauuuggucugg

SEQ ID NO: 2126626 - RNA, 19 nt, Artificial Sequence
  Description of Artificial Sequence: Synthetic oligonucleotide
auccgaccugggcugauaa

SEQ ID NO: 2126627 - RNA, 19 nt, Artificial Sequence
  Description of Artificial Sequence: Synthetic oligonucleotide
agcccguauguaugcaaaa

SEQ ID NO: 2126628 - RNA, 19 nt, Artificial Sequence
  Description of Artificial Sequence: Synthetic oligonucleotide
gguggguguacagagcuga

SEQ ID NO: 2126629 - RNA, 19 nt, Artificial Sequence
  Description of Artificial Sequence: Synthetic oligonucleotide
accaacuacuccagguccu

SEQ ID NO: 2126630 - RNA, 19 nt, Artificial Sequence
  Description of Artificial Sequence: Synthetic oligonucleotide
gcauaauggucaauguauc

SEQ ID NO: 2126631 - RNA, 19 nt, Artificial Sequence
  Description of Artificial Sequence: Synthetic oligonucleotide
cgacuauccaacugacagg

SEQ ID NO: 2126632 - RNA, 19 nt, Artificial Sequence
  Description of Artificial Sequence: Synthetic oligonucleotide
ccgguaugaacaucgauaa

SEQ ID NO: 2126633 - RNA, 19 nt, Artificial Sequence
  Description of Artificial Sequence: Synthetic oligonucleotide
caauccugauucgauaugu

SEQ ID NO: 2126634 - RNA, 19 nt, Artificial Sequence
  Description of Artificial Sequence: Synthetic oligonucleotide
guaguuaugaagagagauu

SEQ ID NO: 2126635 - RNA, 19 nt, Artificial Sequence
  Description of Artificial Sequence: Synthetic oligonucleotide
ggcugauaauuggaaauuc

SEQ ID NO: 2126636 - RNA, 19 nt, Artificial Sequence
  Description of Artificial Sequence: Synthetic oligonucleotide
uuccuacaucugaguaagu

SEQ ID NO: 2126637 - RNA, 19 nt, Artificial Sequence
  Description of Artificial Sequence: Synthetic oligonucleotide
auuguugacguaggaugua

SEQ ID NO: 2126638 - RNA, 19 nt, Artificial Sequence
  Description of Artificial Sequence: Synthetic oligonucleotide
ccauacuucccagcaaccc

SEQ ID NO: 2126639 - RNA, 19 nt, Artificial Sequence
  Description of Artificial Sequence: Synthetic oligonucleotide
cauauagccugauguugua

SEQ ID NO: 2126640 - RNA, 19 nt, Artificial Sequence
  Description of Artificial Sequence: Synthetic oligonucleotide
cuucuccggaagggcaucc

SEQ ID NO: 2126641 - RNA, 19 nt, Artificial Sequence
  Description of Artificial Sequence: Synthetic oligonucleotide
cuggaaccacuaacuucug

SEQ ID NO: 2126642 - RNA, 19 nt, Artificial Sequence
  Description of Artificial Sequence: Synthetic oligonucleotide
gucuggacauugguagaac

SEQ ID NO: 2126643 - RNA, 19 nt, Artificial Sequence
  Description of Artificial Sequence: Synthetic oligonucleotide
caagcccguauguaugcaa

SEQ ID NO: 2126644 - RNA, 19 nt, Artificial Sequence
  Description of Artificial Sequence: Synthetic oligonucleotide
agcuugcaaccaaucugag

SEQ ID NO: 2126645 - RNA, 19 nt, Artificial Sequence
  Description of Artificial Sequence: Synthetic oligonucleotide
acauccccuuuagcauucg

SEQ ID NO: 2126646 - RNA, 19 nt, Artificial Sequence
  Description of Artificial Sequence: Synthetic oligonucleotide
gugaauccgguaugaacau

SEQ ID NO: 2126647 - RNA, 19 nt, Artificial Sequence
  Description of Artificial Sequence: Synthetic oligonucleotide
cagcuuguguauucguaua

SEQ ID NO: 2126648 - RNA, 19 nt, Artificial Sequence
  Description of Artificial Sequence: Synthetic oligonucleotide
ccguauguaugcaaaaggu

SEQ ID NO: 2126649 - RNA, 19 nt, Artificial Sequence
  Description of Artificial Sequence: Synthetic oligonucleotide
gauggggaaaccaccugau

SEQ ID NO: 2126650 - RNA, 19 nt, Artificial Sequence
  Description of Artificial Sequence: Synthetic oligonucleotide
cacgugcgccuucuuucag

SEQ ID NO: 2126651 - RNA, 19 nt, Artificial Sequence
  Description of Artificial Sequence: Synthetic oligonucleotide
agcgacuauccaacugaca

SEQ ID NO: 2126652 - RNA, 19 nt, Artificial Sequence
  Description of Artificial Sequence: Synthetic oligonucleotide
uccgaccugggcugauaau

SEQ ID NO: 2126653 - RNA, 19 nt, Artificial Sequence
  Description of Artificial Sequence: Synthetic oligonucleotide
cagcuauguacugacucaa

SEQ ID NO: 2126654 - RNA, 19 nt, Artificial Sequence
  Description of Artificial Sequence: Synthetic oligonucleotide
cgugcgccuucuuucagag

SEQ ID NO: 2126655 - RNA, 19 nt, Artificial Sequence
  Description of Artificial Sequence: Synthetic oligonucleotide
ccauauagccugauguugu

SEQ ID NO: 2126656 - RNA, 19 nt, Artificial Sequence
  Description of Artificial Sequence: Synthetic oligonucleotide
gggaaaccaccugauacaa

SEQ ID NO: 2126657 - RNA, 19 nt, Artificial Sequence
  Description of Artificial Sequence: Synthetic oligonucleotide
cguauauccgaccugggcu

SEQ ID NO: 2126658 - RNA, 19 nt, Artificial Sequence
  Description of Artificial Sequence: Synthetic oligonucleotide
cugggucaugaauguaucu

SEQ ID NO: 2126659 - RNA, 19 nt, Artificial Sequence
  Description of Artificial Sequence: Synthetic oligonucleotide
gggagcuugcaaccaaucu

SEQ ID NO: 2126660 - RNA, 19 nt, Artificial Sequence
  Description of Artificial Sequence: Synthetic oligonucleotide
uauccgaccugggcugaua

SEQ ID NO: 2126661 - RNA, 19 nt, Artificial Sequence
  Description of Artificial Sequence: Synthetic oligonucleotide
ggaaaccaccugauacaac

SEQ ID NO: 2126662 - RNA, 19 nt, Artificial Sequence
  Description of Artificial Sequence: Synthetic oligonucleotide
gggcuauagacacccugaa

SEQ ID NO: 2126663 - RNA, 19 nt, Artificial Sequence
  Description of Artificial Sequence: Synthetic oligonucleotide
ccugggcugauaauuggaa

SEQ ID NO: 2126664 - RNA, 19 nt, Artificial Sequence
  Description of Artificial Sequence: Synthetic oligonucleotide
ucgagccauuuggucugga

SEQ ID NO: 2126665 - RNA, 19 nt, Artificial Sequence
  Description of Artificial Sequence: Synthetic oligonucleotide
cgggcuauagacacccuga

SEQ ID NO: 2126666 - RNA, 19 nt, Artificial Sequence
  Description of Artificial Sequence: Synthetic oligonucleotide
gcagcaggauuucgagcca

SEQ ID NO: 2126667 - RNA, 19 nt, Artificial Sequence
  Description of Artificial Sequence: Synthetic oligonucleotide
ccgaggacaccugggcucc

SEQ ID NO: 2126668 - RNA, 19 nt, Artificial Sequence
  Description of Artificial Sequence: Synthetic oligonucleotide
gcaacccuggaaccacuaa

SEQ ID NO: 2126669 - RNA, 19 nt, Artificial Sequence
  Description of Artificial Sequence: Synthetic oligonucleotide
ggauuucgagccauuuggu

SEQ ID NO: 2126670 - RNA, 19 nt, Artificial Sequence
  Description of Artificial Sequence: Synthetic oligonucleotide
auauccgaccugggcugau

SEQ ID NO: 2126671 - RNA, 19 nt, Artificial Sequence
  Description of Artificial Sequence: Synthetic oligonucleotide
ggcuauagacacccugaau

SEQ ID NO: 2126672 - RNA, 19 nt, Artificial Sequence
  Description of Artificial Sequence: Synthetic oligonucleotide
gugcgccuucuuucagaga

SEQ ID NO: 2126673 - RNA, 19 nt, Artificial Sequence
  Description of Artificial Sequence: Synthetic oligonucleotide
acccuuccauauagccuga

SEQ ID NO: 2126674 - RNA, 19 nt, Artificial Sequence
  Description of Artificial Sequence: Synthetic oligonucleotide
cccuugacauuucaauccu

SEQ ID NO: 2126675 - RNA, 19 nt, Artificial Sequence
  Description of Artificial Sequence: Synthetic oligonucleotide
gggcugauaauuggaaauu

SEQ ID NO: 2126676 - RNA, 19 nt, Artificial Sequence
  Description of Artificial Sequence: Synthetic oligonucleotide
gcagcaguaucaacaucua

SEQ ID NO: 2126677 - RNA, 19 nt, Artificial Sequence
  Description of Artificial Sequence: Synthetic oligonucleotide
aucgggcuauagacacccu

SEQ ID NO: 2126678 - RNA, 19 nt, Artificial Sequence
  Description of Artificial Sequence: Synthetic oligonucleotide
cauccccuuuagcauucgu

SEQ ID NO: 2126679 - RNA, 19 nt, Artificial Sequence
  Description of Artificial Sequence: Synthetic oligonucleotide
guacugacucaagcccgua

SEQ ID NO: 2126680 - RNA, 19 nt, Artificial Sequence
  Description of Artificial Sequence: Synthetic oligonucleotide
accugggcuccaaguacuu

SEQ ID NO: 2126681 - RNA, 19 nt, Artificial Sequence
  Description of Artificial Sequence: Synthetic oligonucleotide
cagcaacccuggaaccacu

SEQ ID NO: 2126682 - RNA, 19 nt, Artificial Sequence
  Description of Artificial Sequence: Synthetic oligonucleotide
cgauaaucaucagggagcu

SEQ ID NO: 2126683 - RNA, 19 nt, Artificial Sequence
  Description of Artificial Sequence: Synthetic oligonucleotide
ccccuuuagcauucguuau

SEQ ID NO: 2126684 - RNA, 19 nt, Artificial Sequence
  Description of Artificial Sequence: Synthetic oligonucleotide
ccgaccugggcugauaauu

SEQ ID NO: 2126685 - RNA, 19 nt, Artificial Sequence
  Description of Artificial Sequence: Synthetic oligonucleotide
ccuccggcagcaguaucaa

SEQ ID NO: 2126686 - RNA, 19 nt, Artificial Sequence
  Description of Artificial Sequence: Synthetic oligonucleotide
gcgccuucuuucagagaua

SEQ ID NO: 2126687 - RNA, 19 nt, Artificial Sequence
  Description of Artificial Sequence: Synthetic oligonucleotide
ccaacuacuccagguccuu

SEQ ID NO: 2126688 - RNA, 19 nt, Artificial Sequence
  Description of Artificial Sequence: Synthetic oligonucleotide
cgguaugaacaucgauaau

SEQ ID NO: 2126689 - RNA, 19 nt, Artificial Sequence
  Description of Artificial Sequence: Synthetic oligonucleotide
cccuuccauauagccugau

SEQ ID NO: 2126690 - RNA, 19 nt, Artificial Sequence
  Description of Artificial Sequence: Synthetic oligonucleotide
ucaacuagcaaacacacgg

SEQ ID NO: 2126691 - RNA, 19 nt, Artificial Sequence
  Description of Artificial Sequence: Synthetic oligonucleotide
aaagucaacuagcaaacac

SEQ ID NO: 2126692 - RNA, 19 nt, Artificial Sequence
  Description of Artificial Sequence: Synthetic oligonucleotide
acuauagaaagucaacuag

SEQ ID NO: 2126693 - RNA, 19 nt, Artificial Sequence
  Description of Artificial Sequence: Synthetic oligonucleotide
uagagguccaccaucacgg

SEQ ID NO: 2126694 - RNA, 19 nt, Artificial Sequence
  Description of Artificial Sequence: Synthetic oligonucleotide
aaauccuccccacagucac

SEQ ID NO: 2126695 - RNA, 19 nt, Artificial Sequence
  Description of Artificial Sequence: Synthetic oligonucleotide
aaagcauuaaaucccacaa

SEQ ID NO: 2126696 - RNA, 19 nt, Artificial Sequence
  Description of Artificial Sequence: Synthetic oligonucleotide
uagaaagucaacuagcaaa

SEQ ID NO: 2126697 - RNA, 19 nt, Artificial Sequence
  Description of Artificial Sequence: Synthetic oligonucleotide
cuugggaauaucuaugcgg

SEQ ID NO: 2126698 - RNA, 19 nt, Artificial Sequence
  Description of Artificial Sequence: Synthetic oligonucleotide
acuguugucagccaccuuc

SEQ ID NO: 2126699 - RNA, 19 nt, Artificial Sequence
  Description of Artificial Sequence: Synthetic oligonucleotide
aaagaccuccuccucagac

SEQ ID NO: 2126700 - RNA, 19 nt, Artificial Sequence
  Description of Artificial Sequence: Synthetic oligonucleotide
uucaugaucuccaggaagc

SEQ ID NO: 2126701 - RNA, 19 nt, Artificial Sequence
  Description of Artificial Sequence: Synthetic oligonucleotide
uucaacuugccauucuugg

SEQ ID NO: 2126702 - RNA, 19 nt, Artificial Sequence
  Description of Artificial Sequence: Synthetic oligonucleotide
uuguucacauagcugauag

SEQ ID NO: 2126703 - RNA, 19 nt, Artificial Sequence
  Description of Artificial Sequence: Synthetic oligonucleotide
uauuacuauagaaagucaa

SEQ ID NO: 2126704 - RNA, 19 nt, Artificial Sequence
  Description of Artificial Sequence: Synthetic oligonucleotide
aucuuguucacauagcuga

SEQ ID NO: 2126705 - RNA, 19 nt, Artificial Sequence
  Description of Artificial Sequence: Synthetic oligonucleotide
cauuaaaucccacaaugag

SEQ ID NO: 2126706 - RNA, 19 nt, Artificial Sequence
  Description of Artificial Sequence: Synthetic oligonucleotide
gaaugagagaacuagaggu

SEQ ID NO: 2126707 - RNA, 19 nt, Artificial Sequence
  Description of Artificial Sequence: Synthetic oligonucleotide
ucucacacgacccacugcc

SEQ ID NO: 2126708 - RNA, 19 nt, Artificial Sequence
  Description of Artificial Sequence: Synthetic oligonucleotide
uucaauugcagucccaccu

SEQ ID NO: 2126709 - RNA, 19 nt, Artificial Sequence
  Description of Artificial Sequence: Synthetic oligonucleotide
ucuaggaaggaccuguaga

SEQ ID NO: 2126710 - RNA, 19 nt, Artificial Sequence
  Description of Artificial Sequence: Synthetic oligonucleotide
acccuuaguaugcagcugc

SEQ ID NO: 2126711 - RNA, 19 nt, Artificial Sequence
  Description of Artificial Sequence: Synthetic oligonucleotide
cuucugauaggugugaagg

SEQ ID NO: 2126712 - RNA, 19 nt, Artificial Sequence
  Description of Artificial Sequence: Synthetic oligonucleotide
ugccaaaacaacuuuauua

SEQ ID NO: 2126713 - RNA, 19 nt, Artificial Sequence
  Description of Artificial Sequence: Synthetic oligonucleotide
aaugagagaacuagagguc

SEQ ID NO: 2126714 - RNA, 19 nt, Artificial Sequence
  Description of Artificial Sequence: Synthetic oligonucleotide
ugaucuuguucacauagcu

SEQ ID NO: 2126715 - RNA, 19 nt, Artificial Sequence
  Description of Artificial Sequence: Synthetic oligonucleotide
ugugcaguaaccaaaccau

SEQ ID NO: 2126716 - RNA, 19 nt, Artificial Sequence
  Description of Artificial Sequence: Synthetic oligonucleotide
auuacuauagaaagucaac

SEQ ID NO: 2126717 - RNA, 19 nt, Artificial Sequence
  Description of Artificial Sequence: Synthetic oligonucleotide
aaaccauacaacugcacau

SEQ ID NO: 2126718 - RNA, 19 nt, Artificial Sequence
  Description of Artificial Sequence: Synthetic oligonucleotide
aauaucuaugcgguauccg

SEQ ID NO: 2126719 - RNA, 19 nt, Artificial Sequence
  Description of Artificial Sequence: Synthetic oligonucleotide
uguucaucucacacgaccc

SEQ ID NO: 2126720 - RNA, 19 nt, Artificial Sequence
  Description of Artificial Sequence: Synthetic oligonucleotide
uugggaauaucuaugcggu

SEQ ID NO: 2126721 - RNA, 19 nt, Artificial Sequence
  Description of Artificial Sequence: Synthetic oligonucleotide
uuacuauagaaagucaacu

SEQ ID NO: 2126722 - RNA, 19 nt, Artificial Sequence
  Description of Artificial Sequence: Synthetic oligonucleotide
uuauuacuauagaaaguca

SEQ ID NO: 2126723 - RNA, 19 nt, Artificial Sequence
  Description of Artificial Sequence: Synthetic oligonucleotide
acauuucaauugcaguccc

SEQ ID NO: 2126724 - RNA, 19 nt, Artificial Sequence
  Description of Artificial Sequence: Synthetic oligonucleotide
cuugaaauccuccccacag

SEQ ID NO: 2126725 - RNA, 19 nt, Artificial Sequence
  Description of Artificial Sequence: Synthetic oligonucleotide
ucuguaaagaccuccuccu

SEQ ID NO: 2126726 - RNA, 19 nt, Artificial Sequence
  Description of Artificial Sequence: Synthetic oligonucleotide
ucuugggaauaucuaugcg

SEQ ID NO: 2126727 - RNA, 19 nt, Artificial Sequence
  Description of Artificial Sequence: Synthetic oligonucleotide
uaggacaucugcuugaaau

SEQ ID NO: 2126728 - RNA, 19 nt, Artificial Sequence
  Description of Artificial Sequence: Synthetic oligonucleotide
ucaacuugccauucuuggg

SEQ ID NO: 2126729 - RNA, 19 nt, Artificial Sequence
  Description of Artificial Sequence: Synthetic oligonucleotide
aucuaugcgguauccgagc

SEQ ID NO: 2126730 - RNA, 19 nt, Artificial Sequence
  Description of Artificial Sequence: Synthetic oligonucleotide
cuuuugaacuccuucauga

SEQ ID NO: 2126731 - RNA, 19 nt, Artificial Sequence
  Description of Artificial Sequence: Synthetic oligonucleotide
uagcugauagcauuguuga

SEQ ID NO: 2126732 - RNA, 19 nt, Artificial Sequence
  Description of Artificial Sequence: Synthetic oligonucleotide
uucuugggaauaucuaugc

SEQ ID NO: 2126733 - RNA, 19 nt, Artificial Sequence
  Description of Artificial Sequence: Synthetic oligonucleotide
uaucuaugcgguauccgag

SEQ ID NO: 2126734 - RNA, 19 nt, Artificial Sequence
  Description of Artificial Sequence: Synthetic oligonucleotide
ugcaguaaccaaaccauac

SEQ ID NO: 2126735 - RNA, 19 nt, Artificial Sequence
  Description of Artificial Sequence: Synthetic oligonucleotide
uugucagccaccuucacuc

SEQ ID NO: 2126736 - RNA, 19 nt, Artificial Sequence
  Description of Artificial Sequence: Synthetic oligonucleotide
ucuaugcgguauccgagcg

SEQ ID NO: 2126737 - RNA, 19 nt, Artificial Sequence
  Description of Artificial Sequence: Synthetic oligonucleotide
auugcagucccaccuuggc

SEQ ID NO: 2126738 - RNA, 19 nt, Artificial Sequence
  Description of Artificial Sequence: Synthetic oligonucleotide
gaugcucuggcuuuugaac

SEQ ID NO: 2126739 - RNA, 19 nt, Artificial Sequence
  Description of Artificial Sequence: Synthetic oligonucleotide
gaaagcauuaaaucccaca

SEQ ID NO: 2126740 - RNA, 19 nt, Artificial Sequence
  Description of Artificial Sequence: Synthetic oligonucleotide
uaugcgguauccgagcggg

SEQ ID NO: 2126741 - RNA, 19 nt, Artificial Sequence
  Description of Artificial Sequence: Synthetic oligonucleotide
agucaacuagcaaacacac

SEQ ID NO: 2126742 - RNA, 19 nt, Artificial Sequence
  Description of Artificial Sequence: Synthetic oligonucleotide
acacuguucaucucacacg

SEQ ID NO: 2126743 - RNA, 19 nt, Artificial Sequence
  Description of Artificial Sequence: Synthetic oligonucleotide
ugauaggugugaaggaucu

SEQ ID NO: 2126744 - RNA, 19 nt, Artificial Sequence
  Description of Artificial Sequence: Synthetic oligonucleotide
aggaucucuaggaaggacc

SEQ ID NO: 2126745 - RNA, 19 nt, Artificial Sequence
  Description of Artificial Sequence: Synthetic oligonucleotide
auaucuaugcgguauccga

SEQ ID NO: 2126746 - RNA, 19 nt, Artificial Sequence
  Description of Artificial Sequence: Synthetic oligonucleotide
aggacaucugcuugaaauc

SEQ ID NO: 2126747 - RNA, 19 nt, Artificial Sequence
  Description of Artificial Sequence: Synthetic oligonucleotide
cucuguaaagaccuccucc

SEQ ID NO: 2126748 - RNA, 19 nt, Artificial Sequence
  Description of Artificial Sequence: Synthetic oligonucleotide
gaagagcugagacacgcgc

SEQ ID NO: 2126749 - RNA, 19 nt, Artificial Sequence
  Description of Artificial Sequence: Synthetic oligonucleotide
aagucaacuagcaaacaca

SEQ ID NO: 2126750 - RNA, 19 nt, Artificial Sequence
  Description of Artificial Sequence: Synthetic oligonucleotide
aacacacggaaugagagaa

SEQ ID NO: 2126751 - RNA, 19 nt, Artificial Sequence
  Description of Artificial Sequence: Synthetic oligonucleotide
cuuguuguguuccaggcuc

SEQ ID NO: 2126752 - RNA, 19 nt, Artificial Sequence
  Description of Artificial Sequence: Synthetic oligonucleotide
gaauggacgacccuuagua

SEQ ID NO: 2126753 - RNA, 19 nt, Artificial Sequence
  Description of Artificial Sequence: Synthetic oligonucleotide
ggaccuguagaucucaggg

SEQ ID NO: 2126754 - RNA, 19 nt, Artificial Sequence
  Description of Artificial Sequence: Synthetic oligonucleotide
cuagagguccaccaucacg

SEQ ID NO: 2126755 - RNA, 19 nt, Artificial Sequence
  Description of Artificial Sequence: Synthetic oligonucleotide
aguaaccaaaccauacaac

SEQ ID NO: 2126756 - RNA, 19 nt, Artificial Sequence
  Description of Artificial Sequence: Synthetic oligonucleotide
cugaccacggaagagauug

SEQ ID NO: 2126757 - RNA, 19 nt, Artificial Sequence
  Description of Artificial Sequence: Synthetic oligonucleotide
uacuauagaaagucaacua

SEQ ID NO: 2126758 - RNA, 19 nt, Artificial Sequence
  Description of Artificial Sequence: Synthetic oligonucleotide
caucacggggugaugagcg

SEQ ID NO: 2126759 - RNA, 19 nt, Artificial Sequence
  Description of Artificial Sequence: Synthetic oligonucleotide
cacaaugaggucagggugc

SEQ ID NO: 2126760 - RNA, 19 nt, Artificial Sequence
  Description of Artificial Sequence: Synthetic oligonucleotide
uggacgacccuuaguaugc

SEQ ID NO: 2126761 - RNA, 19 nt, Artificial Sequence
  Description of Artificial Sequence: Synthetic oligonucleotide
aaacacacggaaugagaga

SEQ ID NO: 2126762 - RNA, 19 nt, Artificial Sequence
  Description of Artificial Sequence: Synthetic oligonucleotide
guucacauagcugauagca

SEQ ID NO: 2126763 - RNA, 19 nt, Artificial Sequence
  Description of Artificial Sequence: Synthetic oligonucleotide
ggaaugagagaacuagagg

SEQ ID NO: 2126764 - RNA, 19 nt, Artificial Sequence
  Description of Artificial Sequence: Synthetic oligonucleotide
aggaacuguugucagccac

SEQ ID NO: 2126765 - RNA, 19 nt, Artificial Sequence
  Description of Artificial Sequence: Synthetic oligonucleotide
aacuagcaaacacacggaa

SEQ ID NO: 2126766 - RNA, 19 nt, Artificial Sequence
  Description of Artificial Sequence: Synthetic oligonucleotide
acaacugcacauuucaauu

SEQ ID NO: 2126767 - RNA, 19 nt, Artificial Sequence
  Description of Artificial Sequence: Synthetic oligonucleotide
uacaacugcacauuucaau

SEQ ID NO: 2126768 - RNA, 19 nt, Artificial Sequence
  Description of Artificial Sequence: Synthetic oligonucleotide
aacgaccccagcgggagcc

SEQ ID NO: 2126769 - RNA, 19 nt, Artificial Sequence
  Description of Artificial Sequence: Synthetic oligonucleotide
ugggaguucuccuggcugg

SEQ ID NO: 2126770 - RNA, 19 nt, Artificial Sequence
  Description of Artificial Sequence: Synthetic oligonucleotide
guaaagaccuccuccucag

SEQ ID NO: 2126771 - RNA, 19 nt, Artificial Sequence
  Description of Artificial Sequence: Synthetic oligonucleotide
gucaccauggcugugggag

SEQ ID NO: 2126772 - RNA, 19 nt, Artificial Sequence
  Description of Artificial Sequence: Synthetic oligonucleotide
auggacgacccuuaguaug

SEQ ID NO: 2126773 - RNA, 19 nt, Artificial Sequence
  Description of Artificial Sequence: Synthetic oligonucleotide
uguacacuguucaucucac

SEQ ID NO: 2126774 - RNA, 19 nt, Artificial Sequence
  Description of Artificial Sequence: Synthetic oligonucleotide
gaacuguccaaacucugac

SEQ ID NO: 2126775 - RNA, 19 nt, Artificial Sequence
  Description of Artificial Sequence: Synthetic oligonucleotide
cacggaaugagagaacuag

SEQ ID NO: 2126776 - RNA, 19 nt, Artificial Sequence
  Description of Artificial Sequence: Synthetic oligonucleotide
ugaugagcggggcaggaac

SEQ ID NO: 2126777 - RNA, 19 nt, Artificial Sequence
  Description of Artificial Sequence: Synthetic oligonucleotide
ggagugagggccgagagcg

SEQ ID NO: 2126778 - RNA, 19 nt, Artificial Sequence
  Description of Artificial Sequence: Synthetic oligonucleotide
cauaccacggaauggacga

SEQ ID NO: 2126779 - RNA, 19 nt, Artificial Sequence
  Description of Artificial Sequence: Synthetic oligonucleotide
gagaacuagagguccacca

SEQ ID NO: 2126780 - RNA, 19 nt, Artificial Sequence
  Description of Artificial Sequence: Synthetic oligonucleotide
aggaagccguuguaggugg

SEQ ID NO: 2126781 - RNA, 19 nt, Artificial Sequence
  Description of Artificial Sequence: Synthetic oligonucleotide
auaggugugaaggaucucu

SEQ ID NO: 2126782 - RNA, 19 nt, Artificial Sequence
  Description of Artificial Sequence: Synthetic oligonucleotide
accuggucaagguagguga

SEQ ID NO: 2126783 - RNA, 19 nt, Artificial Sequence
  Description of Artificial Sequence: Synthetic oligonucleotide
caaaccauacaacugcaca

SEQ ID NO: 2126784 - RNA, 19 nt, Artificial Sequence
  Description of Artificial Sequence: Synthetic oligonucleotide
cugccugugaacagggacc

SEQ ID NO: 2126785 - RNA, 19 nt, Artificial Sequence
  Description of Artificial Sequence: Synthetic oligonucleotide
agaguccgacuccaagggc

SEQ ID NO: 2126786 - RNA, 19 nt, Artificial Sequence
  Description of Artificial Sequence: Synthetic oligonucleotide
aauggacgacccuuaguau

SEQ ID NO: 2126787 - RNA, 19 nt, Artificial Sequence
  Description of Artificial Sequence: Synthetic oligonucleotide
gaauaucuaugcgguaucc

SEQ ID NO: 2126788 - RNA, 19 nt, Artificial Sequence
  Description of Artificial Sequence: Synthetic oligonucleotide
aauugcagucccaccuugg

SEQ ID NO: 2126789 - RNA, 19 nt, Artificial Sequence
  Description of Artificial Sequence: Synthetic oligonucleotide
auagaaagucaacuagcaa

SEQ ID NO: 2126790 - RNA, 19 nt, Artificial Sequence
  Description of Artificial Sequence: Synthetic oligonucleotide
ugagagaacuagaggucca

SEQ ID NO: 2126791 - RNA, 19 nt, Artificial Sequence
  Description of Artificial Sequence: Synthetic oligonucleotide
uguucaacuugccauucuu

SEQ ID NO: 2126792 - RNA, 19 nt, Artificial Sequence
  Description of Artificial Sequence: Synthetic oligonucleotide
agagaacuagagguccacc

SEQ ID NO: 2126793 - RNA, 19 nt, Artificial Sequence
  Description of Artificial Sequence: Synthetic oligonucleotide
gaucuuguucacauagcug

SEQ ID NO: 2126794 - RNA, 19 nt, Artificial Sequence
  Description of Artificial Sequence: Synthetic oligonucleotide
agacauaccacggaaugga

SEQ ID NO: 2126795 - RNA, 19 nt, Artificial Sequence
  Description of Artificial Sequence: Synthetic oligonucleotide
acgacccuuaguaugcagc

SEQ ID NO: 2126796 - RNA, 19 nt, Artificial Sequence
  Description of Artificial Sequence: Synthetic oligonucleotide
augcucuggcuuuugaacu

SEQ ID NO: 2126797 - RNA, 19 nt, Artificial Sequence
  Description of Artificial Sequence: Synthetic oligonucleotide
ugaacagggaccgcuuugc

SEQ ID NO: 2126798 - RNA, 19 nt, Artificial Sequence
  Description of Artificial Sequence: Synthetic oligonucleotide
agcccgaacgaccccagcg

SEQ ID NO: 2126799 - RNA, 19 nt, Artificial Sequence
  Description of Artificial Sequence: Synthetic oligonucleotide
gaucacaccaggggugucg

SEQ ID NO: 2126800 - RNA, 19 nt, Artificial Sequence
  Description of Artificial Sequence: Synthetic oligonucleotide
ucugauaggugugaaggau

SEQ ID NO: 2126801 - RNA, 19 nt, Artificial Sequence
  Description of Artificial Sequence: Synthetic oligonucleotide
uugaaauccuccccacagu

SEQ ID NO: 2126802 - RNA, 19 nt, Artificial Sequence
  Description of Artificial Sequence: Synthetic oligonucleotide
auucuugggaauaucuaug

SEQ ID NO: 2126803 - RNA, 19 nt, Artificial Sequence
  Description of Artificial Sequence: Synthetic oligonucleotide
aucucacacgacccacugc

SEQ ID NO: 2126804 - RNA, 19 nt, Artificial Sequence
  Description of Artificial Sequence: Synthetic oligonucleotide
agaaaugccaaaacaacuu

SEQ ID NO: 2126805 - RNA, 19 nt, Artificial Sequence
  Description of Artificial Sequence: Synthetic oligonucleotide
uucacauagcugauagcau

SEQ ID NO: 2126806 - RNA, 19 nt, Artificial Sequence
  Description of Artificial Sequence: Synthetic oligonucleotide
gaacuagagguccaccauc

SEQ ID NO: 2126807 - RNA, 19 nt, Artificial Sequence
  Description of Artificial Sequence: Synthetic oligonucleotide
agauuggccaccucuguaa

SEQ ID NO: 2126808 - RNA, 19 nt, Artificial Sequence
  Description of Artificial Sequence: Synthetic oligonucleotide
ggugagagcguccuccacg

SEQ ID NO: 2126809 - RNA, 19 nt, Artificial Sequence
  Description of Artificial Sequence: Synthetic oligonucleotide
cugauaggugugaaggauc

SEQ ID NO: 2126810 - RNA, 19 nt, Artificial Sequence
  Description of Artificial Sequence: Synthetic oligonucleotide
ugccugugaacagggaccg

SEQ ID NO: 2126811 - RNA, 19 nt, Artificial Sequence
  Description of Artificial Sequence: Synthetic oligonucleotide
acauaccacggaauggacg

SEQ ID NO: 2126812 - RNA, 19 nt, Artificial Sequence
  Description of Artificial Sequence: Synthetic oligonucleotide
gcacauuucaauugcaguc

SEQ ID NO: 2126813 - RNA, 19 nt, Artificial Sequence
  Description of Artificial Sequence: Synthetic oligonucleotide
agagcugagacacgcgccu

SEQ ID NO: 2126814 - RNA, 19 nt, Artificial Sequence
  Description of Artificial Sequence: Synthetic oligonucleotide
ugcucauggaagagcugag

SEQ ID NO: 2126815 - RNA, 19 nt, Artificial Sequence
  Description of Artificial Sequence: Synthetic oligonucleotide
agaacuagagguccaccau

SEQ ID NO: 2126816 - RNA, 19 nt, Artificial Sequence
  Description of Artificial Sequence: Synthetic oligonucleotide
caacuugccauucuuggga

SEQ ID NO: 2126817 - RNA, 19 nt, Artificial Sequence
  Description of Artificial Sequence: Synthetic oligonucleotide
cacuguucaucucacacga

SEQ ID NO: 2126818 - RNA, 19 nt, Artificial Sequence
  Description of Artificial Sequence: Synthetic oligonucleotide
cuggcuuuugaacuccuuc

SEQ ID NO: 2126819 - RNA, 19 nt, Artificial Sequence
  Description of Artificial Sequence: Synthetic oligonucleotide
aaagcgggucuugaucuug

SEQ ID NO: 2126820 - RNA, 19 nt, Artificial Sequence
  Description of Artificial Sequence: Synthetic oligonucleotide
agcaaacacacggaaugag

SEQ ID NO: 2126821 - RNA, 19 nt, Artificial Sequence
  Description of Artificial Sequence: Synthetic oligonucleotide
cuucucguggccuccggag

SEQ ID NO: 2126822 - RNA, 19 nt, Artificial Sequence
  Description of Artificial Sequence: Synthetic oligonucleotide
agggugcucauggaagagc

SEQ ID NO: 2126823 - RNA, 19 nt, Artificial Sequence
  Description of Artificial Sequence: Synthetic oligonucleotide
acggaagagauuggccacc

SEQ ID NO: 2126824 - RNA, 19 nt, Artificial Sequence
  Description of Artificial Sequence: Synthetic oligonucleotide
auagcauuguugaacucca

SEQ ID NO: 2126825 - RNA, 19 nt, Artificial Sequence
  Description of Artificial Sequence: Synthetic oligonucleotide
aguaugcagcugcuccuuc

SEQ ID NO: 2126826 - RNA, 19 nt, Artificial Sequence
  Description of Artificial Sequence: Synthetic oligonucleotide
ucaauugcagucccaccuu

SEQ ID NO: 2126827 - RNA, 19 nt, Artificial Sequence
  Description of Artificial Sequence: Synthetic oligonucleotide
ucaucucacacgacccacu

SEQ ID NO: 2126828 - RNA, 19 nt, Artificial Sequence
  Description of Artificial Sequence: Synthetic oligonucleotide
cagaaagcgggucuugauc

SEQ ID NO: 2126829 - RNA, 19 nt, Artificial Sequence
  Description of Artificial Sequence: Synthetic oligonucleotide
aaccauacaacugcacauu

SEQ ID NO: 2126830 - RNA, 19 nt, Artificial Sequence
  Description of Artificial Sequence: Synthetic oligonucleotide
agcgggagccgccgaaccc

SEQ ID NO: 2126831 - RNA, 19 nt, Artificial Sequence
  Description of Artificial Sequence: Synthetic oligonucleotide
cucgcucuucuguacacug

SEQ ID NO: 2126832 - RNA, 19 nt, Artificial Sequence
  Description of Artificial Sequence: Synthetic oligonucleotide
accacggaauggacgaccc

SEQ ID NO: 2126833 - RNA, 19 nt, Artificial Sequence
  Description of Artificial Sequence: Synthetic oligonucleotide
ugcgguauccgagcgggag

SEQ ID NO: 2126834 - RNA, 19 nt, Artificial Sequence
  Description of Artificial Sequence: Synthetic oligonucleotide
cuucuguacacuguucauc

SEQ ID NO: 2126835 - RNA, 19 nt, Artificial Sequence
  Description of Artificial Sequence: Synthetic oligonucleotide
ucaagguaggugagagcgu

SEQ ID NO: 2126836 - RNA, 19 nt, Artificial Sequence
  Description of Artificial Sequence: Synthetic oligonucleotide
aagccguuguagguggcag

SEQ ID NO: 2126837 - RNA, 19 nt, Artificial Sequence
  Description of Artificial Sequence: Synthetic oligonucleotide
uagaucucaggguggucca

SEQ ID NO: 2126838 - RNA, 19 nt, Artificial Sequence
  Description of Artificial Sequence: Synthetic oligonucleotide
agaccuccuccucagacau

SEQ ID NO: 2126839 - RNA, 19 nt, Artificial Sequence
  Description of Artificial Sequence: Synthetic oligonucleotide
uugcagucccaccuuggcu

SEQ ID NO: 2126840 - RNA, 19 nt, Artificial Sequence
  Description of Artificial Sequence: Synthetic oligonucleotide
agagauuggccaccucugu

SEQ ID NO: 2126841 - RNA, 19 nt, Artificial Sequence
  Description of Artificial Sequence: Synthetic oligonucleotide
ugugggaguucuccuggcu

SEQ ID NO: 2126842 - RNA, 19 nt, Artificial Sequence
  Description of Artificial Sequence: Synthetic oligonucleotide
cagaaaugccaaaacaacu

SEQ ID NO: 2126843 - RNA, 19 nt, Artificial Sequence
  Description of Artificial Sequence: Synthetic oligonucleotide
acuggauguucaacuugcc

SEQ ID NO: 2126844 - RNA, 19 nt, Artificial Sequence
  Description of Artificial Sequence: Synthetic oligonucleotide
ucacggggugaugagcggg

SEQ ID NO: 2126845 - RNA, 19 nt, Artificial Sequence
  Description of Artificial Sequence: Synthetic oligonucleotide
cagggucgcugccaaagcg

SEQ ID NO: 2126846 - RNA, 19 nt, Artificial Sequence
  Description of Artificial Sequence: Synthetic oligonucleotide
uagcaaacacacggaauga

SEQ ID NO: 2126847 - RNA, 19 nt, Artificial Sequence
  Description of Artificial Sequence: Synthetic oligonucleotide
uucaucucacacgacccac

SEQ ID NO: 2126848 - RNA, 19 nt, Artificial Sequence
  Description of Artificial Sequence: Synthetic oligonucleotide
gucaacuagcaaacacacg

SEQ ID NO: 2126849 - RNA, 19 nt, Artificial Sequence
  Description of Artificial Sequence: Synthetic oligonucleotide
ugcuugaaauccuccccac

SEQ ID NO: 2126850 - RNA, 19 nt, Artificial Sequence
  Description of Artificial Sequence: Synthetic oligonucleotide
ccugcgugcgccauguugg

SEQ ID NO: 2126851 - RNA, 19 nt, Artificial Sequence
  Description of Artificial Sequence: Synthetic oligonucleotide
cuaugcgguauccgagcgg

SEQ ID NO: 2126852 - RNA, 19 nt, Artificial Sequence
  Description of Artificial Sequence: Synthetic oligonucleotide
agagguccaccaucacggg

SEQ ID NO: 2126853 - RNA, 19 nt, Artificial Sequence
  Description of Artificial Sequence: Synthetic oligonucleotide
cucuaggaaggaccuguag

SEQ ID NO: 2126854 - RNA, 19 nt, Artificial Sequence
  Description of Artificial Sequence: Synthetic oligonucleotide
cagggugguccagaaagcg

SEQ ID NO: 2126855 - RNA, 19 nt, Artificial Sequence
  Description of Artificial Sequence: Synthetic oligonucleotide
gugggaguucuccuggcug

SEQ ID NO: 2126856 - RNA, 19 nt, Artificial Sequence
  Description of Artificial Sequence: Synthetic oligonucleotide
cugauagcauuguugaacu

SEQ ID NO: 2126857 - RNA, 19 nt, Artificial Sequence
  Description of Artificial Sequence: Synthetic oligonucleotide
uuguuguguuccaggcucu

SEQ ID NO: 2126858 - RNA, 19 nt, Artificial Sequence
  Description of Artificial Sequence: Synthetic oligonucleotide
aggaaagcauuaaauccca

SEQ ID NO: 2126859 - RNA, 19 nt, Artificial Sequence
  Description of Artificial Sequence: Synthetic oligonucleotide
accaucacggggugaugag

SEQ ID NO: 2126860 - RNA, 19 nt, Artificial Sequence
  Description of Artificial Sequence: Synthetic oligonucleotide
gacgacccuuaguaugcag

SEQ ID NO: 2126861 - RNA, 19 nt, Artificial Sequence
  Description of Artificial Sequence: Synthetic oligonucleotide
gugaacagggaccgcuuug

SEQ ID NO: 2126862 - RNA, 19 nt, Artificial Sequence
  Description of Artificial Sequence: Synthetic oligonucleotide
acacgcgccugaucacacc

SEQ ID NO: 2126863 - RNA, 19 nt, Artificial Sequence
  Description of Artificial Sequence: Synthetic oligonucleotide
uaaagaccuccuccucaga

SEQ ID NO: 2126864 - RNA, 19 nt, Artificial Sequence
  Description of Artificial Sequence: Synthetic oligonucleotide
caagguaggugagagcguc

SEQ ID NO: 2126865 - RNA, 19 nt, Artificial Sequence
  Description of Artificial Sequence: Synthetic oligonucleotide
cagggcgcaggagugaggg

SEQ ID NO: 2126866 - RNA, 19 nt, Artificial Sequence
  Description of Artificial Sequence: Synthetic oligonucleotide
uccugaccacggaagagau

SEQ ID NO: 2126867 - RNA, 19 nt, Artificial Sequence
  Description of Artificial Sequence: Synthetic oligonucleotide
uaccacggaauggacgacc

SEQ ID NO: 2126868 - RNA, 19 nt, Artificial Sequence
  Description of Artificial Sequence: Synthetic oligonucleotide
agccguuguagguggcagg

SEQ ID NO: 2126869 - RNA, 19 nt, Artificial Sequence
  Description of Artificial Sequence: Synthetic oligonucleotide
gaacagggaccgcuuugcc

SEQ ID NO: 2126870 - RNA, 19 nt, Artificial Sequence
  Description of Artificial Sequence: Synthetic oligonucleotide
caauugcagucccaccuug

SEQ ID NO: 2126871 - RNA, 19 nt, Artificial Sequence
  Description of Artificial Sequence: Synthetic oligonucleotide
aucacggggugaugagcgg

SEQ ID NO: 2126872 - RNA, 19 nt, Artificial Sequence
  Description of Artificial Sequence: Synthetic oligonucleotide
aggggugucgaugcucugg

SEQ ID NO: 2126873 - RNA, 19 nt, Artificial Sequence
  Description of Artificial Sequence: Synthetic oligonucleotide
accauacaacugcacauuu

SEQ ID NO: 2126874 - RNA, 19 nt, Artificial Sequence
  Description of Artificial Sequence: Synthetic oligonucleotide
auguucaacuugccauucu

SEQ ID NO: 2126875 - RNA, 19 nt, Artificial Sequence
  Description of Artificial Sequence: Synthetic oligonucleotide
agggucgcugccaaagcgg

SEQ ID NO: 2126876 - RNA, 19 nt, Artificial Sequence
  Description of Artificial Sequence: Synthetic oligonucleotide
agcguccuccacgugcacc

SEQ ID NO: 2126877 - RNA, 19 nt, Artificial Sequence
  Description of Artificial Sequence: Synthetic oligonucleotide
gccaaagcggaucuucacc

SEQ ID NO: 2126878 - RNA, 19 nt, Artificial Sequence
  Description of Artificial Sequence: Synthetic oligonucleotide
cuaggaaggaccuguagau

SEQ ID NO: 2126879 - RNA, 19 nt, Artificial Sequence
  Description of Artificial Sequence: Synthetic oligonucleotide
uaggugagagcguccucca

SEQ ID NO: 2126880 - RNA, 19 nt, Artificial Sequence
  Description of Artificial Sequence: Synthetic oligonucleotide
ucgaugcucuggcuuuuga

SEQ ID NO: 2126881 - RNA, 19 nt, Artificial Sequence
  Description of Artificial Sequence: Synthetic oligonucleotide
caacuagcaaacacacgga

SEQ ID NO: 2126882 - RNA, 19 nt, Artificial Sequence
  Description of Artificial Sequence: Synthetic oligonucleotide
ugauagcauuguugaacuc

SEQ ID NO: 2126883 - RNA, 19 nt, Artificial Sequence
  Description of Artificial Sequence: Synthetic oligonucleotide
uucuccucgcucuucugua

SEQ ID NO: 2126884 - RNA, 19 nt, Artificial Sequence
  Description of Artificial Sequence: Synthetic oligonucleotide
acuagcaaacacacggaau

SEQ ID NO: 2126885 - RNA, 19 nt, Artificial Sequence
  Description of Artificial Sequence: Synthetic oligonucleotide
ggaauaucuaugcgguauc

SEQ ID NO: 2126886 - RNA, 19 nt, Artificial Sequence
  Description of Artificial Sequence: Synthetic oligonucleotide
auccgagcgggaggaaagc

SEQ ID NO: 2126887 - RNA, 19 nt, Artificial Sequence
  Description of Artificial Sequence: Synthetic oligonucleotide
guucaucucacacgaccca

SEQ ID NO: 2126888 - RNA, 19 nt, Artificial Sequence
  Description of Artificial Sequence: Synthetic oligonucleotide
gcaguaaccaaaccauaca

SEQ ID NO: 2126889 - RNA, 19 nt, Artificial Sequence
  Description of Artificial Sequence: Synthetic oligonucleotide
gagagaacuagagguccac

SEQ ID NO: 2126890 - RNA, 19 nt, Artificial Sequence
  Description of Artificial Sequence: Synthetic oligonucleotide
cuggauguucaacuugcca

SEQ ID NO: 2126891 - RNA, 19 nt, Artificial Sequence
  Description of Artificial Sequence: Synthetic oligonucleotide
aggugagagcguccuccac

SEQ ID NO: 2126892 - RNA, 19 nt, Artificial Sequence
  Description of Artificial Sequence: Synthetic oligonucleotide
aaggaccuguagaucucag

SEQ ID NO: 2126893 - RNA, 19 nt, Artificial Sequence
  Description of Artificial Sequence: Synthetic oligonucleotide
augccaaaacaacuuuauu

SEQ ID NO: 2126894 - RNA, 19 nt, Artificial Sequence
  Description of Artificial Sequence: Synthetic oligonucleotide
ccacaaugaggucagggug

SEQ ID NO: 2126895 - RNA, 19 nt, Artificial Sequence
  Description of Artificial Sequence: Synthetic oligonucleotide
cuccggagcccgaacgacc

SEQ ID NO: 2126896 - RNA, 19 nt, Artificial Sequence
  Description of Artificial Sequence: Synthetic oligonucleotide
gagagcgcuucuuguugug

SEQ ID NO: 2126897 - RNA, 19 nt, Artificial Sequence
  Description of Artificial Sequence: Synthetic oligonucleotide
ucuguacacuguucaucuc

SEQ ID NO: 2126898 - RNA, 19 nt, Artificial Sequence
  Description of Artificial Sequence: Synthetic oligonucleotide
gacauaccacggaauggac

SEQ ID NO: 2126899 - RNA, 19 nt, Artificial Sequence
  Description of Artificial Sequence: Synthetic oligonucleotide
cuguaaagaccuccuccuc

SEQ ID NO: 2126900 - RNA, 19 nt, Artificial Sequence
  Description of Artificial Sequence: Synthetic oligonucleotide
gacccacugccugugaaca

SEQ ID NO: 2126901 - RNA, 19 nt, Artificial Sequence
  Description of Artificial Sequence: Synthetic oligonucleotide
cagcagguccuccugacca

SEQ ID NO: 2126902 - RNA, 19 nt, Artificial Sequence
  Description of Artificial Sequence: Synthetic oligonucleotide
uccucgcucuucuguacac

SEQ ID NO: 2126903 - RNA, 19 nt, Artificial Sequence
  Description of Artificial Sequence: Synthetic oligonucleotide
uccgacuccaagggcaccu

SEQ ID NO: 2126904 - RNA, 19 nt, Artificial Sequence
  Description of Artificial Sequence: Synthetic oligonucleotide
gaaggaccuguagaucuca

SEQ ID NO: 2126905 - RNA, 19 nt, Artificial Sequence
  Description of Artificial Sequence: Synthetic oligonucleotide
acacacggaaugagagaac

SEQ ID NO: 2126906 - RNA, 19 nt, Artificial Sequence
  Description of Artificial Sequence: Synthetic oligonucleotide
ccugaucacaccaggggug

SEQ ID NO: 2126907 - RNA, 19 nt, Artificial Sequence
  Description of Artificial Sequence: Synthetic oligonucleotide
gagauuggccaccucugua

SEQ ID NO: 2126908 - RNA, 19 nt, Artificial Sequence
  Description of Artificial Sequence: Synthetic oligonucleotide
ggaacuguugucagccacc

SEQ ID NO: 2126909 - RNA, 19 nt, Artificial Sequence
  Description of Artificial Sequence: Synthetic oligonucleotide
ggccaaaggugacuggaug

SEQ ID NO: 2126910 - RNA, 19 nt, Artificial Sequence
  Description of Artificial Sequence: Synthetic oligonucleotide
gaccgcuuugccucaggca

SEQ ID NO: 2126911 - RNA, 19 nt, Artificial Sequence
  Description of Artificial Sequence: Synthetic oligonucleotide
auaccacggaauggacgac

SEQ ID NO: 2126912 - RNA, 19 nt, Artificial Sequence
  Description of Artificial Sequence: Synthetic oligonucleotide
gcgugcgccauguuggaag

SEQ ID NO: 2126913 - RNA, 19 nt, Artificial Sequence
  Description of Artificial Sequence: Synthetic oligonucleotide
ccucaguugugcaguaacc

SEQ ID NO: 2126914 - RNA, 19 nt, Artificial Sequence
  Description of Artificial Sequence: Synthetic oligonucleotide
uggccaccucuguaaagac

SEQ ID NO: 2126915 - RNA, 19 nt, Artificial Sequence
  Description of Artificial Sequence: Synthetic oligonucleotide
acggaaugagagaacuaga

SEQ ID NO: 2126916 - RNA, 19 nt, Artificial Sequence
  Description of Artificial Sequence: Synthetic oligonucleotide
cagguccuccugaccacgg

SEQ ID NO: 2126917 - RNA, 19 nt, Artificial Sequence
  Description of Artificial Sequence: Synthetic oligonucleotide
acugcacauuucaauugca

SEQ ID NO: 2126918 - RNA, 19 nt, Artificial Sequence
  Description of Artificial Sequence: Synthetic oligonucleotide
ugggaauaucuaugcggua

SEQ ID NO: 2126919 - RNA, 19 nt, Artificial Sequence
  Description of Artificial Sequence: Synthetic oligonucleotide
agggcgcaggagugagggc

SEQ ID NO: 2126920 - RNA, 19 nt, Artificial Sequence
  Description of Artificial Sequence: Synthetic oligonucleotide
gaccuguagaucucagggu

SEQ ID NO: 2126921 - RNA, 19 nt, Artificial Sequence
  Description of Artificial Sequence: Synthetic oligonucleotide
agcugauagcauuguugaa

SEQ ID NO: 2126922 - RNA, 19 nt, Artificial Sequence
  Description of Artificial Sequence: Synthetic oligonucleotide
gagacacgcgccugaucac

SEQ ID NO: 2126923 - RNA, 19 nt, Artificial Sequence
  Description of Artificial Sequence: Synthetic oligonucleotide
gacccuuaguaugcagcug

SEQ ID NO: 2126924 - RNA, 19 nt, Artificial Sequence
  Description of Artificial Sequence: Synthetic oligonucleotide
aguucuccuggcuggccaa

SEQ ID NO: 2126925 - RNA, 19 nt, Artificial Sequence
  Description of Artificial Sequence: Synthetic oligonucleotide
uccgagcgggaggaaagca

SEQ ID NO: 2126926 - RNA, 19 nt, Artificial Sequence
  Description of Artificial Sequence: Synthetic oligonucleotide
gcccgaacgaccccagcgg

SEQ ID NO: 2126927 - RNA, 19 nt, Artificial Sequence
  Description of Artificial Sequence: Synthetic oligonucleotide
caccuucacuccucaguug

SEQ ID NO: 2126928 - RNA, 19 nt, Artificial Sequence
  Description of Artificial Sequence: Synthetic oligonucleotide
caccuggucaagguaggug

SEQ ID NO: 2126929 - RNA, 19 nt, Artificial Sequence
  Description of Artificial Sequence: Synthetic oligonucleotide
gccguuguagguggcaggg

SEQ ID NO: 2126930 - RNA, 19 nt, Artificial Sequence
  Description of Artificial Sequence: Synthetic oligonucleotide
ggggugucgaugcucuggc

SEQ ID NO: 2126931 - RNA, 19 nt, Artificial Sequence
  Description of Artificial Sequence: Synthetic oligonucleotide
aagcgggucuugaucuugu

SEQ ID NO: 2126932 - RNA, 19 nt, Artificial Sequence
  Description of Artificial Sequence: Synthetic oligonucleotide
agagcguccuccacgugca

SEQ ID NO: 2126933 - RNA, 19 nt, Artificial Sequence
  Description of Artificial Sequence: Synthetic oligonucleotide
agacacgcgccugaucaca

SEQ ID NO: 2126934 - RNA, 19 nt, Artificial Sequence
  Description of Artificial Sequence: Synthetic oligonucleotide
ggcaggaacuguugucagc

SEQ ID NO: 2126935 - RNA, 19 nt, Artificial Sequence
  Description of Artificial Sequence: Synthetic oligonucleotide
ggaagagcugagacacgcg

SEQ ID NO: 2126936 - RNA, 19 nt, Artificial Sequence
  Description of Artificial Sequence: Synthetic oligonucleotide
ggggugaugagcggggcag

SEQ ID NO: 2126937 - RNA, 19 nt, Artificial Sequence
  Description of Artificial Sequence: Synthetic oligonucleotide
gaucucagggugguccaga

SEQ ID NO: 2126938 - RNA, 19 nt, Artificial Sequence
  Description of Artificial Sequence: Synthetic oligonucleotide
gaagccguuguagguggca

SEQ ID NO: 2126939 - RNA, 19 nt, Artificial Sequence
  Description of Artificial Sequence: Synthetic oligonucleotide
ggucaagguaggugagagc

SEQ ID NO: 2126940 - RNA, 19 nt, Artificial Sequence
  Description of Artificial Sequence: Synthetic oligonucleotide
acggggugaugagcggggc

SEQ ID NO: 2126941 - RNA, 19 nt, Artificial Sequence
  Description of Artificial Sequence: Synthetic oligonucleotide
ggaacuguccaaacucuga

SEQ ID NO: 2126942 - RNA, 19 nt, Artificial Sequence
  Description of Artificial Sequence: Synthetic oligonucleotide
agagcgcuucuuguugugu

SEQ ID NO: 2126943 - RNA, 19 nt, Artificial Sequence
  Description of Artificial Sequence: Synthetic oligonucleotide
ccaaaccauacaacugcac

SEQ ID NO: 2126944 - RNA, 19 nt, Artificial Sequence
  Description of Artificial Sequence: Synthetic oligonucleotide
cacagggcgcaggagugag

SEQ ID NO: 2126945 - RNA, 19 nt, Artificial Sequence
  Description of Artificial Sequence: Synthetic oligonucleotide
gauaggugugaaggaucuc

SEQ ID NO: 2126946 - RNA, 19 nt, Artificial Sequence
  Description of Artificial Sequence: Synthetic oligonucleotide
guacacuguucaucucaca

SEQ ID NO: 2126947 - RNA, 19 nt, Artificial Sequence
  Description of Artificial Sequence: Synthetic oligonucleotide
uaguaugcagcugcuccuu

SEQ ID NO: 2126948 - RNA, 19 nt, Artificial Sequence
  Description of Artificial Sequence: Synthetic oligonucleotide
agaucucagggugguccag

SEQ ID NO: 2126949 - RNA, 19 nt, Artificial Sequence
  Description of Artificial Sequence: Synthetic oligonucleotide
gggcgcaggagugagggcc

SEQ ID NO: 2126950 - RNA, 19 nt, Artificial Sequence
  Description of Artificial Sequence: Synthetic oligonucleotide
gacacgcgccugaucacac

SEQ ID NO: 2126951 - RNA, 19 nt, Artificial Sequence
  Description of Artificial Sequence: Synthetic oligonucleotide
gcgguauccgagcgggagg

SEQ ID NO: 2126952 - RNA, 19 nt, Artificial Sequence
  Description of Artificial Sequence: Synthetic oligonucleotide
cacgcgccugaucacacca

SEQ ID NO: 2126953 - RNA, 19 nt, Artificial Sequence
  Description of Artificial Sequence: Synthetic oligonucleotide
cacacggaaugagagaacu

SEQ ID NO: 2126954 - RNA, 19 nt, Artificial Sequence
  Description of Artificial Sequence: Synthetic oligonucleotide
gaacuguugucagccaccu

SEQ ID NO: 2126955 - RNA, 19 nt, Artificial Sequence
  Description of Artificial Sequence: Synthetic oligonucleotide
aucacaccaggggugucga

SEQ ID NO: 2126956 - RNA, 19 nt, Artificial Sequence
  Description of Artificial Sequence: Synthetic oligonucleotide
ucaccuggucaagguaggu

SEQ ID NO: 2126957 - RNA, 19 nt, Artificial Sequence
  Description of Artificial Sequence: Synthetic oligonucleotide
caccggcagcuucucgugg

SEQ ID NO: 2126958 - RNA, 19 nt, Artificial Sequence
  Description of Artificial Sequence: Synthetic oligonucleotide
acgacccacugccugugaa

SEQ ID NO: 2126959 - RNA, 19 nt, Artificial Sequence
  Description of Artificial Sequence: Synthetic oligonucleotide
agucccaccuuggcuggag

SEQ ID NO: 2126960 - RNA, 19 nt, Artificial Sequence
  Description of Artificial Sequence: Synthetic oligonucleotide
gaacgaccccagcgggagc

SEQ ID NO: 2126961 - RNA, 19 nt, Artificial Sequence
  Description of Artificial Sequence: Synthetic oligonucleotide
gugagagcguccuccacgu

SEQ ID NO: 2126962 - RNA, 19 nt, Artificial Sequence
  Description of Artificial Sequence: Synthetic oligonucleotide
ggccuccggagcccgaacg

SEQ ID NO: 2126963 - RNA, 19 nt, Artificial Sequence
  Description of Artificial Sequence: Synthetic oligonucleotide
cagggugcucauggaagag

SEQ ID NO: 2126964 - RNA, 19 nt, Artificial Sequence
  Description of Artificial Sequence: Synthetic oligonucleotide
ugccauucuugggaauauc

SEQ ID NO: 2126965 - RNA, 19 nt, Artificial Sequence
  Description of Artificial Sequence: Synthetic oligonucleotide
ggaccgcuuugccucaggc

SEQ ID NO: 2126966 - RNA, 19 nt, Artificial Sequence
  Description of Artificial Sequence: Synthetic oligonucleotide
guaugcagcugcuccuucu

SEQ ID NO: 2126967 - RNA, 19 nt, Artificial Sequence
  Description of Artificial Sequence: Synthetic oligonucleotide
accauggcugugggaguuc

SEQ ID NO: 2126968 - RNA, 19 nt, Artificial Sequence
  Description of Artificial Sequence: Synthetic oligonucleotide
cagcgggagccgccgaacc

SEQ ID NO: 2126969 - RNA, 19 nt, Artificial Sequence
  Description of Artificial Sequence: Synthetic oligonucleotide
gccugcgugcgccauguug

SEQ ID NO: 2126970 - RNA, 19 nt, Artificial Sequence
  Description of Artificial Sequence: Synthetic oligonucleotide
ccuggucaagguaggugag

SEQ ID NO: 2126971 - RNA, 19 nt, Artificial Sequence
  Description of Artificial Sequence: Synthetic oligonucleotide
caccaucacggggugauga

SEQ ID NO: 2126972 - RNA, 19 nt, Artificial Sequence
  Description of Artificial Sequence: Synthetic oligonucleotide
agguccuccugaccacgga

SEQ ID NO: 2126973 - RNA, 19 nt, Artificial Sequence
  Description of Artificial Sequence: Synthetic oligonucleotide
agccaccuucacuccucag

SEQ ID NO: 2126974 - RNA, 19 nt, Artificial Sequence
  Description of Artificial Sequence: Synthetic oligonucleotide
cgccugaucacaccagggg

SEQ ID NO: 2126975 - RNA, 19 nt, Artificial Sequence
  Description of Artificial Sequence: Synthetic oligonucleotide
gcuugaaauccuccccaca

SEQ ID NO: 2126976 - RNA, 19 nt, Artificial Sequence
  Description of Artificial Sequence: Synthetic oligonucleotide
agcgggaggaaagcauuaa

SEQ ID NO: 2126977 - RNA, 19 nt, Artificial Sequence
  Description of Artificial Sequence: Synthetic oligonucleotide
gggaauaucuaugcgguau

SEQ ID NO: 2126978 - RNA, 19 nt, Artificial Sequence
  Description of Artificial Sequence: Synthetic oligonucleotide
ggagcagacacagggcgca

SEQ ID NO: 2126979 - RNA, 19 nt, Artificial Sequence
  Description of Artificial Sequence: Synthetic oligonucleotide
cuuguucacauagcugaua

SEQ ID NO: 2126980 - RNA, 19 nt, Artificial Sequence
  Description of Artificial Sequence: Synthetic oligonucleotide
guauccgagcgggaggaaa

SEQ ID NO: 2126981 - RNA, 19 nt, Artificial Sequence
  Description of Artificial Sequence: Synthetic oligonucleotide
ucguggccuccggagcccg

SEQ ID NO: 2126982 - RNA, 19 nt, Artificial Sequence
  Description of Artificial Sequence: Synthetic oligonucleotide
cugagacacgcgccugauc

SEQ ID NO: 2126983 - RNA, 19 nt, Artificial Sequence
  Description of Artificial Sequence: Synthetic oligonucleotide
gugacuggauguucaacuu

SEQ ID NO: 2126984 - RNA, 19 nt, Artificial Sequence
  Description of Artificial Sequence: Synthetic oligonucleotide
acacgacccacugccugug

SEQ ID NO: 2126985 - RNA, 19 nt, Artificial Sequence
  Description of Artificial Sequence: Synthetic oligonucleotide
cucagacauaccacggaau

SEQ ID NO: 2126986 - RNA, 19 nt, Artificial Sequence
  Description of Artificial Sequence: Synthetic oligonucleotide
ggaaagcauuaaaucccac

SEQ ID NO: 2126987 - RNA, 19 nt, Artificial Sequence
  Description of Artificial Sequence: Synthetic oligonucleotide
gucccaccuuggcuggagc

SEQ ID NO: 2126988 - RNA, 19 nt, Artificial Sequence
  Description of Artificial Sequence: Synthetic oligonucleotide
agcggggcaggaacuguug

SEQ ID NO: 2126989 - RNA, 19 nt, Artificial Sequence
  Description of Artificial Sequence: Synthetic oligonucleotide
cccgaacgaccccagcggg

SEQ ID NO: 2126990 - RNA, 19 nt, Artificial Sequence
  Description of Artificial Sequence: Synthetic oligonucleotide
gcagguccuccugaccacg

SEQ ID NO: 2126991 - RNA, 19 nt, Artificial Sequence
  Description of Artificial Sequence: Synthetic oligonucleotide
gggccgagagcgcuucuug

SEQ ID NO: 2126992 - RNA, 19 nt, Artificial Sequence
  Description of Artificial Sequence: Synthetic oligonucleotide
caggaacuguugucagcca

SEQ ID NO: 2126993 - RNA, 19 nt, Artificial Sequence
  Description of Artificial Sequence: Synthetic oligonucleotide
acagggcgcaggagugagg

SEQ ID NO: 2126994 - RNA, 19 nt, Artificial Sequence
  Description of Artificial Sequence: Synthetic oligonucleotide
gagugagggccgagagcgc

SEQ ID NO: 2126995 - RNA, 19 nt, Artificial Sequence
  Description of Artificial Sequence: Synthetic oligonucleotide
ggucuugaucuuguucaca

SEQ ID NO: 2126996 - RNA, 19 nt, Artificial Sequence
  Description of Artificial Sequence: Synthetic oligonucleotide
ugucgaugcucuggcuuuu

SEQ ID NO: 2126997 - RNA, 19 nt, Artificial Sequence
  Description of Artificial Sequence: Synthetic oligonucleotide
acggaauggacgacccuua

SEQ ID NO: 2126998 - RNA, 19 nt, Artificial Sequence
  Description of Artificial Sequence: Synthetic oligonucleotide
cucguggccuccggagccc

SEQ ID NO: 2126999 - RNA, 19 nt, Artificial Sequence
  Description of Artificial Sequence: Synthetic oligonucleotide
gccauucuugggaauaucu

SEQ ID NO: 2127000 - RNA, 19 nt, Artificial Sequence
  Description of Artificial Sequence: Synthetic oligonucleotide
guggcagggucgcugccaa

SEQ ID NO: 2127001 - RNA, 19 nt, Artificial Sequence
  Description of Artificial Sequence: Synthetic oligonucleotide
uggccuccggagcccgaac

SEQ ID NO: 2127002 - RNA, 19 nt, Artificial Sequence
  Description of Artificial Sequence: Synthetic oligonucleotide
ugaucacaccagggguguc

SEQ ID NO: 2127003 - RNA, 19 nt, Artificial Sequence
  Description of Artificial Sequence: Synthetic oligonucleotide
gugcaguaaccaaaccaua

SEQ ID NO: 2127004 - RNA, 19 nt, Artificial Sequence
  Description of Artificial Sequence: Synthetic oligonucleotide
gcgccugaucacaccaggg

SEQ ID NO: 2127005 - RNA, 19 nt, Artificial Sequence
  Description of Artificial Sequence: Synthetic oligonucleotide
ggaauggacgacccuuagu

SEQ ID NO: 2127006 - RNA, 19 nt, Artificial Sequence
  Description of Artificial Sequence: Synthetic oligonucleotide
ccucagacauaccacggaa

SEQ ID NO: 2127007 - RNA, 19 nt, Artificial Sequence
  Description of Artificial Sequence: Synthetic oligonucleotide
ccaucacggggugaugagc

SEQ ID NO: 2127008 - RNA, 19 nt, Artificial Sequence
  Description of Artificial Sequence: Synthetic oligonucleotide
ggugucgaugcucuggcuu

SEQ ID NO: 2127009 - RNA, 19 nt, Artificial Sequence
  Description of Artificial Sequence: Synthetic oligonucleotide
acacggaaugagagaacua

SEQ ID NO: 2127010 - RNA, 19 nt, Artificial Sequence
  Description of Artificial Sequence: Synthetic oligonucleotide
ggcuuuugaacuccuucau

SEQ ID NO: 2127011 - RNA, 19 nt, Artificial Sequence
  Description of Artificial Sequence: Synthetic oligonucleotide
ccgcuuugccucaggcagg

SEQ ID NO: 2127012 - RNA, 19 nt, Artificial Sequence
  Description of Artificial Sequence: Synthetic oligonucleotide
gggaccgcuuugccucagg

SEQ ID NO: 2127013 - RNA, 19 nt, Artificial Sequence
  Description of Artificial Sequence: Synthetic oligonucleotide
agcgggucuugaucuuguu

SEQ ID NO: 2127014 - RNA, 19 nt, Artificial Sequence
  Description of Artificial Sequence: Synthetic oligonucleotide
ugcgugcgccauguuggaa

SEQ ID NO: 2127015 - RNA, 19 nt, Artificial Sequence
  Description of Artificial Sequence: Synthetic oligonucleotide
cugaucacaccaggggugu

SEQ ID NO: 2127016 - RNA, 19 nt, Artificial Sequence
  Description of Artificial Sequence: Synthetic oligonucleotide
acgaccccagcgggagccg

SEQ ID NO: 2127017 - RNA, 19 nt, Artificial Sequence
  Description of Artificial Sequence: Synthetic oligonucleotide
acgcgccugaucacaccag

SEQ ID NO: 2127018 - RNA, 19 nt, Artificial Sequence
  Description of Artificial Sequence: Synthetic oligonucleotide
ggaagagauuggccaccuc

SEQ ID NO: 2127019 - RNA, 19 nt, Artificial Sequence
  Description of Artificial Sequence: Synthetic oligonucleotide
cgaacgaccccagcgggag

SEQ ID NO: 2127020 - RNA, 19 nt, Artificial Sequence
  Description of Artificial Sequence: Synthetic oligonucleotide
cgcgccugaucacaccagg

SEQ ID NO: 2127021 - RNA, 19 nt, Artificial Sequence
  Description of Artificial Sequence: Synthetic oligonucleotide
gccucaggcaggaacuguc

SEQ ID NO: 2127022 - RNA, 19 nt, Artificial Sequence
  Description of Artificial Sequence: Synthetic oligonucleotide
caggggugucgaugcucug

SEQ ID NO: 2127023 - RNA, 19 nt, Artificial Sequence
  Description of Artificial Sequence: Synthetic oligonucleotide
gcgggagccgccgaacccc

SEQ ID NO: 2127024 - RNA, 19 nt, Artificial Sequence
  Description of Artificial Sequence: Synthetic oligonucleotide
cugcgugcgccauguugga

SEQ ID NO: 2127025 - RNA, 19 nt, Artificial Sequence
  Description of Artificial Sequence: Synthetic oligonucleotide
cacggaauggacgacccuu

SEQ ID NO: 2127026 - RNA, 19 nt, Artificial Sequence
  Description of Artificial Sequence: Synthetic oligonucleotide
cacugccugugaacaggga

SEQ ID NO: 2127027 - RNA, 19 nt, Artificial Sequence
  Description of Artificial Sequence: Synthetic oligonucleotide
gcuucucguggccuccgga

SEQ ID NO: 2127028 - RNA, 19 nt, Artificial Sequence
  Description of Artificial Sequence: Synthetic oligonucleotide
guccgacuccaagggcacc

SEQ ID NO: 2127029 - RNA, 19 nt, Artificial Sequence
  Description of Artificial Sequence: Synthetic oligonucleotide
cgacccacugccugugaac

SEQ ID NO: 2127030 - RNA, 19 nt, Artificial Sequence
  Description of Artificial Sequence: Synthetic oligonucleotide
gggucgcugccaaagcgga

SEQ ID NO: 2127031 - RNA, 19 nt, Artificial Sequence
  Description of Artificial Sequence: Synthetic oligonucleotide
cagggaccgcuuugccuca

SEQ ID NO: 2127032 - RNA, 19 nt, Artificial Sequence
  Description of Artificial Sequence: Synthetic oligonucleotide
cggaauggacgacccuuag

SEQ ID NO: 2127033 - RNA, 19 nt, Artificial Sequence
  Description of Artificial Sequence: Synthetic oligonucleotide
cucacacgacccacugccu

SEQ ID NO: 2127034 - RNA, 19 nt, Artificial Sequence
  Description of Artificial Sequence: Synthetic oligonucleotide
ggaagccguuguagguggc

SEQ ID NO: 2127035 - RNA, 19 nt, Artificial Sequence
  Description of Artificial Sequence: Synthetic oligonucleotide
uggcagggucgcugccaaa

SEQ ID NO: 2127036 - RNA, 19 nt, Artificial Sequence
  Description of Artificial Sequence: Synthetic oligonucleotide
gccuccggagcccgaacga

SEQ ID NO: 2127037 - RNA, 19 nt, Artificial Sequence
  Description of Artificial Sequence: Synthetic oligonucleotide
ccugugaacagggaccgcu

SEQ ID NO: 2127038 - RNA, 19 nt, Artificial Sequence
  Description of Artificial Sequence: Synthetic oligonucleotide
cgggaggaaagcauuaaau

SEQ ID NO: 2127039 - RNA, 19 nt, Artificial Sequence
  Description of Artificial Sequence: Synthetic oligonucleotide
ccaggggugucgaugcucu

SEQ ID NO: 2127040 - RNA, 19 nt, Artificial Sequence
  Description of Artificial Sequence: Synthetic oligonucleotide
cacgacccacugccuguga

SEQ ID NO: 2127041 - RNA, 19 nt, Artificial Sequence
  Description of Artificial Sequence: Synthetic oligonucleotide
ccuccggagcccgaacgac

SEQ ID NO: 2127042 - RNA, 19 nt, Artificial Sequence
  Description of Artificial Sequence: Synthetic oligonucleotide
ggccgagagcgcuucuugu

SEQ ID NO: 2127043 - RNA, 19 nt, Artificial Sequence
  Description of Artificial Sequence: Synthetic oligonucleotide
ggacgacccuuaguaugca

SEQ ID NO: 2127044 - RNA, 19 nt, Artificial Sequence
  Description of Artificial Sequence: Synthetic oligonucleotide
cgacccuuaguaugcagcu

SEQ ID NO: 2127045 - RNA, 19 nt, Artificial Sequence
  Description of Artificial Sequence: Synthetic oligonucleotide
augcgguauccgagcggga

SEQ ID NO: 2127046 - RNA, 19 nt, Artificial Sequence
  Description of Artificial Sequence: Synthetic oligonucleotide
ccgaacgaccccagcggga

SEQ ID NO: 2127047 - RNA, 19 nt, Artificial Sequence
  Description of Artificial Sequence: Synthetic oligonucleotide
caagggcaccuggccucug

SEQ ID NO: 2127048 - RNA, 19 nt, Artificial Sequence
  Description of Artificial Sequence: Synthetic oligonucleotide
guccaccaucacgggguga

SEQ ID NO: 2127049 - RNA, 19 nt, Artificial Sequence
  Description of Artificial Sequence: Synthetic oligonucleotide
ccagaaagcgggucuugau

SEQ ID NO: 2127050 - RNA, 19 nt, Artificial Sequence
  Description of Artificial Sequence: Synthetic oligonucleotide
ccagcgggagccgccgaac

SEQ ID NO: 2127051 - RNA, 19 nt, Artificial Sequence
  Description of Artificial Sequence: Synthetic oligonucleotide
gccgccugcgugcgccaug

SEQ ID NO: 2127052 - RNA, 19 nt, Artificial Sequence
  Description of Artificial Sequence: Synthetic oligonucleotide
ccacagucaccauggcugu

SEQ ID NO: 2127053 - RNA, 19 nt, Artificial Sequence
  Description of Artificial Sequence: Synthetic oligonucleotide
ggugguccagaaagcgggu

SEQ ID NO: 2127054 - RNA, 19 nt, Artificial Sequence
  Description of Artificial Sequence: Synthetic oligonucleotide
gcggggcaggaacuguugu

SEQ ID NO: 2127055 - RNA, 19 nt, Artificial Sequence
  Description of Artificial Sequence: Synthetic oligonucleotide
gagggccgagagcgcuucu

SEQ ID NO: 2127056 - RNA, 19 nt, Artificial Sequence
  Description of Artificial Sequence: Synthetic oligonucleotide
ccggagcccgaacgacccc

SEQ ID NO: 2127057 - RNA, 19 nt, Artificial Sequence
  Description of Artificial Sequence: Synthetic oligonucleotide
gguccagaaagcgggucuu

SEQ ID NO: 2127058 - RNA, 19 nt, Artificial Sequence
  Description of Artificial Sequence: Synthetic oligonucleotide
gccugugaacagggaccgc

SEQ ID NO: 2127059 - RNA, 19 nt, Artificial Sequence
  Description of Artificial Sequence: Synthetic oligonucleotide
cgguauccgagcgggagga

SEQ ID NO: 2127060 - RNA, 19 nt, Artificial Sequence
  Description of Artificial Sequence: Synthetic oligonucleotide
cccuuaguaugcagcugcu

SEQ ID NO: 2127061 - RNA, 19 nt, Artificial Sequence
  Description of Artificial Sequence: Synthetic oligonucleotide
gguauccgagcgggaggaa

SEQ ID NO: 2127062 - RNA, 19 nt, Artificial Sequence
  Description of Artificial Sequence: Synthetic oligonucleotide
cgagagcgcuucuuguugu

SEQ ID NO: 2127063 - RNA, 19 nt, Artificial Sequence
  Description of Artificial Sequence: Synthetic oligonucleotide
ccgagcgggaggaaagcau

SEQ ID NO: 2127064 - RNA, 19 nt, Artificial Sequence
  Description of Artificial Sequence: Synthetic oligonucleotide
ccaccaucacggggugaug

SEQ ID NO: 2127065 - RNA, 19 nt, Artificial Sequence
  Description of Artificial Sequence: Synthetic oligonucleotide
ggccucuguccuccuugua

SEQ ID NO: 2127066 - RNA, 19 nt, Artificial Sequence
  Description of Artificial Sequence: Synthetic oligonucleotide
ccacagaguccgacuccaa

SEQ ID NO: 2127067 - RNA, 19 nt, Artificial Sequence
  Description of Artificial Sequence: Synthetic oligonucleotide
gcugagacacgcgccugau

SEQ ID NO: 2127068 - RNA, 19 nt, Artificial Sequence
  Description of Artificial Sequence: Synthetic oligonucleotide
cgagcgggaggaaagcauu

SEQ ID NO: 2127069 - RNA, 19 nt, Artificial Sequence
  Description of Artificial Sequence: Synthetic oligonucleotide
cccagcgggagccgccgaa

SEQ ID NO: 2127070 - RNA, 19 nt, Artificial Sequence
  Description of Artificial Sequence: Synthetic oligonucleotide
ccacggaauggacgacccu

SEQ ID NO: 2127071 - RNA, 19 nt, Artificial Sequence
  Description of Artificial Sequence: Synthetic oligonucleotide
ggucgcugccaaagcggau

SEQ ID NO: 2127072 - RNA, 19 nt, Artificial Sequence
  Description of Artificial Sequence: Synthetic oligonucleotide
ccugaccacggaagagauu

SEQ ID NO: 2127073 - RNA, 19 nt, Artificial Sequence
  Description of Artificial Sequence: Synthetic oligonucleotide
ccgccugcgugcgccaugu

SEQ ID NO: 2127074 - RNA, 19 nt, Artificial Sequence
  Description of Artificial Sequence: Synthetic oligonucleotide
cguggccuccggagcccga

SEQ ID NO: 2127075 - RNA, 19 nt, Artificial Sequence
  Description of Artificial Sequence: Synthetic oligonucleotide
cgccgccugcgugcgccau

SEQ ID NO: 2127076 - RNA, 19 nt, Artificial Sequence
  Description of Artificial Sequence: Synthetic oligonucleotide
aauaaauaguaguucuucc

SEQ ID NO: 2127077 - RNA, 19 nt, Artificial Sequence
  Description of Artificial Sequence: Synthetic oligonucleotide
uacuaauaaagucacacag

SEQ ID NO: 2127078 - RNA, 19 nt, Artificial Sequence
  Description of Artificial Sequence: Synthetic oligonucleotide
auaaauaguaguucuuccc

SEQ ID NO: 2127079 - RNA, 19 nt, Artificial Sequence
  Description of Artificial Sequence: Synthetic oligonucleotide
uaaauaguaguucuucccg

SEQ ID NO: 2127080 - RNA, 19 nt, Artificial Sequence
  Description of Artificial Sequence: Synthetic oligonucleotide
aaagaugugggguacaaca

SEQ ID NO: 2127081 - RNA, 19 nt, Artificial Sequence
  Description of Artificial Sequence: Synthetic oligonucleotide
aaauaaauaguaguucuuc

SEQ ID NO: 2127082 - RNA, 19 nt, Artificial Sequence
  Description of Artificial Sequence: Synthetic oligonucleotide
aaaagaaguacgguguccc

SEQ ID NO: 2127083 - RNA, 19 nt, Artificial Sequence
  Description of Artificial Sequence: Synthetic oligonucleotide
uggcacaacagcaaaaggg

SEQ ID NO: 2127084 - RNA, 19 nt, Artificial Sequence
  Description of Artificial Sequence: Synthetic oligonucleotide
ucaauguccuuccagaccc

SEQ ID NO: 2127085 - RNA, 19 nt, Artificial Sequence
  Description of Artificial Sequence: Synthetic oligonucleotide
gaagcgaacugcuucaugg

SEQ ID NO: 2127086 - RNA, 19 nt, Artificial Sequence
  Description of Artificial Sequence: Synthetic oligonucleotide
uccucaacaacucauuugc

SEQ ID NO: 2127087 - RNA, 19 nt, Artificial Sequence
  Description of Artificial Sequence: Synthetic oligonucleotide
ucuuaucagggacagagcc

SEQ ID NO: 2127088 - RNA, 19 nt, Artificial Sequence
  Description of Artificial Sequence: Synthetic oligonucleotide
uuuuauuacacacuugcau

SEQ ID NO: 2127089 - RNA, 19 nt, Artificial Sequence
  Description of Artificial Sequence: Synthetic oligonucleotide
aaagggauuagaguccagc

SEQ ID NO: 2127090 - RNA, 19 nt, Artificial Sequence
  Description of Artificial Sequence: Synthetic oligonucleotide
uguacuaauaaagucacac

SEQ ID NO: 2127091 - RNA, 19 nt, Artificial Sequence
  Description of Artificial Sequence: Synthetic oligonucleotide
aacacuuguccucaacaac

SEQ ID NO: 2127092 - RNA, 19 nt, Artificial Sequence
  Description of Artificial Sequence: Synthetic oligonucleotide
ucguaguuagugaagaagc

SEQ ID NO: 2127093 - RNA, 19 nt, Artificial Sequence
  Description of Artificial Sequence: Synthetic oligonucleotide
uuagugaagaagcggaagc

SEQ ID NO: 2127094 - RNA, 19 nt, Artificial Sequence
  Description of Artificial Sequence: Synthetic oligonucleotide
cuaauaaagucacacaguc

SEQ ID NO: 2127095 - RNA, 19 nt, Artificial Sequence
  Description of Artificial Sequence: Synthetic oligonucleotide
ugggguacaacacuugucc

SEQ ID NO: 2127096 - RNA, 19 nt, Artificial Sequence
  Description of Artificial Sequence: Synthetic oligonucleotide
agucaaaagaaguacggug

SEQ ID NO: 2127097 - RNA, 19 nt, Artificial Sequence
  Description of Artificial Sequence: Synthetic oligonucleotide
aaaccaggaagcgaacugc

SEQ ID NO: 2127098 - RNA, 19 nt, Artificial Sequence
  Description of Artificial Sequence: Synthetic oligonucleotide
aagggaaugguaccuggcg

SEQ ID NO: 2127099 - RNA, 19 nt, Artificial Sequence
  Description of Artificial Sequence: Synthetic oligonucleotide
ucaacaacucauuugcaug

SEQ ID NO: 2127100 - RNA, 19 nt, Artificial Sequence
  Description of Artificial Sequence: Synthetic oligonucleotide
uuggcuuccccuauguccg

SEQ ID NO: 2127101 - RNA, 19 nt, Artificial Sequence
  Description of Artificial Sequence: Synthetic oligonucleotide
gaucacagaacuuuggcga

SEQ ID NO: 2127102 - RNA, 19 nt, Artificial Sequence
  Description of Artificial Sequence: Synthetic oligonucleotide
uucaaggccaaccaaaaua

SEQ ID NO: 2127103 - RNA, 19 nt, Artificial Sequence
  Description of Artificial Sequence: Synthetic oligonucleotide
uauguccggacauugaaca

SEQ ID NO: 2127104 - RNA, 19 nt, Artificial Sequence
  Description of Artificial Sequence: Synthetic oligonucleotide
ucaaggccaaccaaaauaa

SEQ ID NO: 2127105 - RNA, 19 nt, Artificial Sequence
  Description of Artificial Sequence: Synthetic oligonucleotide
agcaaacauggauuggccc

SEQ ID NO: 2127106 - RNA, 19 nt, Artificial Sequence
  Description of Artificial Sequence: Synthetic oligonucleotide
uuggcgacugaccacagcc

SEQ ID NO: 2127107 - RNA, 19 nt, Artificial Sequence
  Description of Artificial Sequence: Synthetic oligonucleotide
caugacagcaccccgacag

SEQ ID NO: 2127108 - RNA, 19 nt, Artificial Sequence
  Description of Artificial Sequence: Synthetic oligonucleotide
uaauaaagucacacagucc

SEQ ID NO: 2127109 - RNA, 19 nt, Artificial Sequence
  Description of Artificial Sequence: Synthetic oligonucleotide
cuccuuuccacucagguac

SEQ ID NO: 2127110 - RNA, 19 nt, Artificial Sequence
  Description of Artificial Sequence: Synthetic oligonucleotide
aguagaagacaagggaggc

SEQ ID NO: 2127111 - RNA, 19 nt, Artificial Sequence
  Description of Artificial Sequence: Synthetic oligonucleotide
aaagaaguacggugucccg

SEQ ID NO: 2127112 - RNA, 19 nt, Artificial Sequence
  Description of Artificial Sequence: Synthetic oligonucleotide
ugcauguacuaauaaaguc

SEQ ID NO: 2127113 - RNA, 19 nt, Artificial Sequence
  Description of Artificial Sequence: Synthetic oligonucleotide
aagggauuagaguccagcu

SEQ ID NO: 2127114 - RNA, 19 nt, Artificial Sequence
  Description of Artificial Sequence: Synthetic oligonucleotide
acauugaacagccuccuca

SEQ ID NO: 2127115 - RNA, 19 nt, Artificial Sequence
  Description of Artificial Sequence: Synthetic oligonucleotide
ucaaaugccucucgguccc

SEQ ID NO: 2127116 - RNA, 19 nt, Artificial Sequence
  Description of Artificial Sequence: Synthetic oligonucleotide
agucagaugagccuccuca

SEQ ID NO: 2127117 - RNA, 19 nt, Artificial Sequence
  Description of Artificial Sequence: Synthetic oligonucleotide
aggagcucuuaucagggac

SEQ ID NO: 2127118 - RNA, 19 nt, Artificial Sequence
  Description of Artificial Sequence: Synthetic oligonucleotide
aagcgaacugcuucauggg

SEQ ID NO: 2127119 - RNA, 19 nt, Artificial Sequence
  Description of Artificial Sequence: Synthetic oligonucleotide
aguaacaaguucaaggcca

SEQ ID NO: 2127120 - RNA, 19 nt, Artificial Sequence
  Description of Artificial Sequence: Synthetic oligonucleotide
auggauuggcccuggcucc

SEQ ID NO: 2127121 - RNA, 19 nt, Artificial Sequence
  Description of Artificial Sequence: Synthetic oligonucleotide
gaugagccuccucaaaugc

SEQ ID NO: 2127122 - RNA, 19 nt, Artificial Sequence
  Description of Artificial Sequence: Synthetic oligonucleotide
ucccaguagaagacaaggg

SEQ ID NO: 2127123 - RNA, 19 nt, Artificial Sequence
  Description of Artificial Sequence: Synthetic oligonucleotide
guaguuagugaagaagcgg

SEQ ID NO: 2127124 - RNA, 19 nt, Artificial Sequence
  Description of Artificial Sequence: Synthetic oligonucleotide
agcaaaaggggugaggaag

SEQ ID NO: 2127125 - RNA, 19 nt, Artificial Sequence
  Description of Artificial Sequence: Synthetic oligonucleotide
aagaugugggguacaacac

SEQ ID NO: 2127126 - RNA, 19 nt, Artificial Sequence
  Description of Artificial Sequence: Synthetic oligonucleotide
acaacucauuugcauguac

SEQ ID NO: 2127127 - RNA, 19 nt, Artificial Sequence
  Description of Artificial Sequence: Synthetic oligonucleotide
ucaacacaggagaggauug

SEQ ID NO: 2127128 - RNA, 19 nt, Artificial Sequence
  Description of Artificial Sequence: Synthetic oligonucleotide
aagcggaagccauccuugc

SEQ ID NO: 2127129 - RNA, 19 nt, Artificial Sequence
  Description of Artificial Sequence: Synthetic oligonucleotide
aucacagaacuuuggcgac

SEQ ID NO: 2127130 - RNA, 19 nt, Artificial Sequence
  Description of Artificial Sequence: Synthetic oligonucleotide
gaguaacaaguucaaggcc

SEQ ID NO: 2127131 - RNA, 19 nt, Artificial Sequence
  Description of Artificial Sequence: Synthetic oligonucleotide
uuuccacucagguacuccc

SEQ ID NO: 2127132 - RNA, 19 nt, Artificial Sequence
  Description of Artificial Sequence: Synthetic oligonucleotide
ccgaguaacaaguucaagg

SEQ ID NO: 2127133 - RNA, 19 nt, Artificial Sequence
  Description of Artificial Sequence: Synthetic oligonucleotide
uucgaaggucgcccgaacg

SEQ ID NO: 2127134 - RNA, 19 nt, Artificial Sequence
  Description of Artificial Sequence: Synthetic oligonucleotide
acaacacuuguccucaaca

SEQ ID NO: 2127135 - RNA, 19 nt, Artificial Sequence
  Description of Artificial Sequence: Synthetic oligonucleotide
ugggaucacagaacuuugg

SEQ ID NO: 2127136 - RNA, 19 nt, Artificial Sequence
  Description of Artificial Sequence: Synthetic oligonucleotide
agacacauagcauuggcuu

SEQ ID NO: 2127137 - RNA, 19 nt, Artificial Sequence
  Description of Artificial Sequence: Synthetic oligonucleotide
ugcuucaugggguccagag

SEQ ID NO: 2127138 - RNA, 19 nt, Artificial Sequence
  Description of Artificial Sequence: Synthetic oligonucleotide
uuagaguccagcucuuuuc

SEQ ID NO: 2127139 - RNA, 19 nt, Artificial Sequence
  Description of Artificial Sequence: Synthetic oligonucleotide
uggaaaugacagcugagau

SEQ ID NO: 2127140 - RNA, 19 nt, Artificial Sequence
  Description of Artificial Sequence: Synthetic oligonucleotide
ggaucacagaacuuuggcg

SEQ ID NO: 2127141 - RNA, 19 nt, Artificial Sequence
  Description of Artificial Sequence: Synthetic oligonucleotide
cauggauuggcccuggcuc

SEQ ID NO: 2127142 - RNA, 19 nt, Artificial Sequence
  Description of Artificial Sequence: Synthetic oligonucleotide
aaugccucucgguccccgc

SEQ ID NO: 2127143 - RNA, 19 nt, Artificial Sequence
  Description of Artificial Sequence: Synthetic oligonucleotide
aagucaaaagaaguacggu

SEQ ID NO: 2127144 - RNA, 19 nt, Artificial Sequence
  Description of Artificial Sequence: Synthetic oligonucleotide
agcgaacugcuucaugggg

SEQ ID NO: 2127145 - RNA, 19 nt, Artificial Sequence
  Description of Artificial Sequence: Synthetic oligonucleotide
uccacucagguacucccgg

SEQ ID NO: 2127146 - RNA, 19 nt, Artificial Sequence
  Description of Artificial Sequence: Synthetic oligonucleotide
ugugggguacaacacuugu

SEQ ID NO: 2127147 - RNA, 19 nt, Artificial Sequence
  Description of Artificial Sequence: Synthetic oligonucleotide
uaguaguucuucccggcug

SEQ ID NO: 2127148 - RNA, 19 nt, Artificial Sequence
  Description of Artificial Sequence: Synthetic oligonucleotide
ggcacaacagcaaaagggg

SEQ ID NO: 2127149 - RNA, 19 nt, Artificial Sequence
  Description of Artificial Sequence: Synthetic oligonucleotide
acugaccacagccccaauc

SEQ ID NO: 2127150 - RNA, 19 nt, Artificial Sequence
  Description of Artificial Sequence: Synthetic oligonucleotide
aaugguaccuggcgguggu

SEQ ID NO: 2127151 - RNA, 19 nt, Artificial Sequence
  Description of Artificial Sequence: Synthetic oligonucleotide
agaugagccuccucaaaug

SEQ ID NO: 2127152 - RNA, 19 nt, Artificial Sequence
  Description of Artificial Sequence: Synthetic oligonucleotide
uuuuccaucucuggugcag

SEQ ID NO: 2127153 - RNA, 19 nt, Artificial Sequence
  Description of Artificial Sequence: Synthetic oligonucleotide
aacauggauuggcccuggc

SEQ ID NO: 2127154 - RNA, 19 nt, Artificial Sequence
  Description of Artificial Sequence: Synthetic oligonucleotide
auggcacaacagcaaaagg

SEQ ID NO: 2127155 - RNA, 19 nt, Artificial Sequence
  Description of Artificial Sequence: Synthetic oligonucleotide
cucguaguuagugaagaag

SEQ ID NO: 2127156 - RNA, 19 nt, Artificial Sequence
  Description of Artificial Sequence: Synthetic oligonucleotide
ucacacacggccgacaagu

SEQ ID NO: 2127157 - RNA, 19 nt, Artificial Sequence
  Description of Artificial Sequence: Synthetic oligonucleotide
aggucaauguccuuccaga

SEQ ID NO: 2127158 - RNA, 19 nt, Artificial Sequence
  Description of Artificial Sequence: Synthetic oligonucleotide
ucauuugcauguacuaaua

SEQ ID NO: 2127159 - RNA, 19 nt, Artificial Sequence
  Description of Artificial Sequence: Synthetic oligonucleotide
acuaauaaagucacacagu

SEQ ID NO: 2127160 - RNA, 19 nt, Artificial Sequence
  Description of Artificial Sequence: Synthetic oligonucleotide
cagagccugaaguacacac

SEQ ID NO: 2127161 - RNA, 19 nt, Artificial Sequence
  Description of Artificial Sequence: Synthetic oligonucleotide
guuagugaagaagcggaag

SEQ ID NO: 2127162 - RNA, 19 nt, Artificial Sequence
  Description of Artificial Sequence: Synthetic oligonucleotide
gcucuuaucagggacagag

SEQ ID NO: 2127163 - RNA, 19 nt, Artificial Sequence
  Description of Artificial Sequence: Synthetic oligonucleotide
ggugcagguagccagacac

SEQ ID NO: 2127164 - RNA, 19 nt, Artificial Sequence
  Description of Artificial Sequence: Synthetic oligonucleotide
ucacaggucccuccacacg

SEQ ID NO: 2127165 - RNA, 19 nt, Artificial Sequence
  Description of Artificial Sequence: Synthetic oligonucleotide
agaugugggguacaacacu

SEQ ID NO: 2127166 - RNA, 19 nt, Artificial Sequence
  Description of Artificial Sequence: Synthetic oligonucleotide
ucgaaggucgcccgaacgu

SEQ ID NO: 2127167 - RNA, 19 nt, Artificial Sequence
  Description of Artificial Sequence: Synthetic oligonucleotide
uguccggacauugaacagc

SEQ ID NO: 2127168 - RNA, 19 nt, Artificial Sequence
  Description of Artificial Sequence: Synthetic oligonucleotide
ccaguagaagacaagggag

SEQ ID NO: 2127169 - RNA, 19 nt, Artificial Sequence
  Description of Artificial Sequence: Synthetic oligonucleotide
agcggaagccauccuugcc

SEQ ID NO: 2127170 - RNA, 19 nt, Artificial Sequence
  Description of Artificial Sequence: Synthetic oligonucleotide
gacacauagcauuggcuuc

SEQ ID NO: 2127171 - RNA, 19 nt, Artificial Sequence
  Description of Artificial Sequence: Synthetic oligonucleotide
acacuuguccucaacaacu

SEQ ID NO: 2127172 - RNA, 19 nt, Artificial Sequence
  Description of Artificial Sequence: Synthetic oligonucleotide
gaauggaaguaguccucag

SEQ ID NO: 2127173 - RNA, 19 nt, Artificial Sequence
  Description of Artificial Sequence: Synthetic oligonucleotide
cuauguccggacauugaac

SEQ ID NO: 2127174 - RNA, 19 nt, Artificial Sequence
  Description of Artificial Sequence: Synthetic oligonucleotide
gagaagucagaugagccuc

SEQ ID NO: 2127175 - RNA, 19 nt, Artificial Sequence
  Description of Artificial Sequence: Synthetic oligonucleotide
uccauggcacaacagcaaa

SEQ ID NO: 2127176 - RNA, 19 nt, Artificial Sequence
  Description of Artificial Sequence: Synthetic oligonucleotide
acaacagcaaaagggguga

SEQ ID NO: 2127177 - RNA, 19 nt, Artificial Sequence
  Description of Artificial Sequence: Synthetic oligonucleotide
gcauguacuaauaaaguca

SEQ ID NO: 2127178 - RNA, 19 nt, Artificial Sequence
  Description of Artificial Sequence: Synthetic oligonucleotide
auaguaguucuucccggcu

SEQ ID NO: 2127179 - RNA, 19 nt, Artificial Sequence
  Description of Artificial Sequence: Synthetic oligonucleotide
aacacaggagaggauugcu

SEQ ID NO: 2127180 - RNA, 19 nt, Artificial Sequence
  Description of Artificial Sequence: Synthetic oligonucleotide
ugucccgaguaacaaguuc

SEQ ID NO: 2127181 - RNA, 19 nt, Artificial Sequence
  Description of Artificial Sequence: Synthetic oligonucleotide
auuagaguccagcucuuuu

SEQ ID NO: 2127182 - RNA, 19 nt, Artificial Sequence
  Description of Artificial Sequence: Synthetic oligonucleotide
auagcauuggcuuccccua

SEQ ID NO: 2127183 - RNA, 19 nt, Artificial Sequence
  Description of Artificial Sequence: Synthetic oligonucleotide
uacaacacuuguccucaac

SEQ ID NO: 2127184 - RNA, 19 nt, Artificial Sequence
  Description of Artificial Sequence: Synthetic oligonucleotide
acaggagaggauugcuuug

SEQ ID NO: 2127185 - RNA, 19 nt, Artificial Sequence
  Description of Artificial Sequence: Synthetic oligonucleotide
uaaaagaugugggguacaa

SEQ ID NO: 2127186 - RNA, 19 nt, Artificial Sequence
  Description of Artificial Sequence: Synthetic oligonucleotide
aacgccggucacgugcccc

SEQ ID NO: 2127187 - RNA, 19 nt, Artificial Sequence
  Description of Artificial Sequence: Synthetic oligonucleotide
uccaugacagcaccccgac

SEQ ID NO: 2127188 - RNA, 19 nt, Artificial Sequence
  Description of Artificial Sequence: Synthetic oligonucleotide
gguagccagacacauagca

SEQ ID NO: 2127189 - RNA, 19 nt, Artificial Sequence
  Description of Artificial Sequence: Synthetic oligonucleotide
ugugggaacgccggucacg

SEQ ID NO: 2127190 - RNA, 19 nt, Artificial Sequence
  Description of Artificial Sequence: Synthetic oligonucleotide
caggcuuaagugaggaauc

SEQ ID NO: 2127191 - RNA, 19 nt, Artificial Sequence
  Description of Artificial Sequence: Synthetic oligonucleotide
agugaagaagcggaagcca

SEQ ID NO: 2127192 - RNA, 19 nt, Artificial Sequence
  Description of Artificial Sequence: Synthetic oligonucleotide
gaaggucgcccgaacgucg

SEQ ID NO: 2127193 - RNA, 19 nt, Artificial Sequence
  Description of Artificial Sequence: Synthetic oligonucleotide
aaguacggugucccgagua

SEQ ID NO: 2127194 - RNA, 19 nt, Artificial Sequence
  Description of Artificial Sequence: Synthetic oligonucleotide
ggaagggaaugguaccugg

SEQ ID NO: 2127195 - RNA, 19 nt, Artificial Sequence
  Description of Artificial Sequence: Synthetic oligonucleotide
aucaacacaggagaggauu

SEQ ID NO: 2127196 - RNA, 19 nt, Artificial Sequence
  Description of Artificial Sequence: Synthetic oligonucleotide
ucagaugagccuccucaaa

SEQ ID NO: 2127197 - RNA, 19 nt, Artificial Sequence
  Description of Artificial Sequence: Synthetic oligonucleotide
aaaaggggugaggaaggga

SEQ ID NO: 2127198 - RNA, 19 nt, Artificial Sequence
  Description of Artificial Sequence: Synthetic oligonucleotide
aaacauggauuggcccugg

SEQ ID NO: 2127199 - RNA, 19 nt, Artificial Sequence
  Description of Artificial Sequence: Synthetic oligonucleotide
cuugggccgggaauggaag

SEQ ID NO: 2127200 - RNA, 19 nt, Artificial Sequence
  Description of Artificial Sequence: Synthetic oligonucleotide
acauagcauuggcuucccc

SEQ ID NO: 2127201 - RNA, 19 nt, Artificial Sequence
  Description of Artificial Sequence: Synthetic oligonucleotide
gaaugguaccuggcggugg

SEQ ID NO: 2127202 - RNA, 19 nt, Artificial Sequence
  Description of Artificial Sequence: Synthetic oligonucleotide
acauggauuggcccuggcu

SEQ ID NO: 2127203 - RNA, 19 nt, Artificial Sequence
  Description of Artificial Sequence: Synthetic oligonucleotide
guuggaaaugacagcugag

SEQ ID NO: 2127204 - RNA, 19 nt, Artificial Sequence
  Description of Artificial Sequence: Synthetic oligonucleotide
agacccaggcuuaagugag

SEQ ID NO: 2127205 - RNA, 19 nt, Artificial Sequence
  Description of Artificial Sequence: Synthetic oligonucleotide
caggucaauguccuuccag

SEQ ID NO: 2127206 - RNA, 19 nt, Artificial Sequence
  Description of Artificial Sequence: Synthetic oligonucleotide
gacggagguagccuggcca

SEQ ID NO: 2127207 - RNA, 19 nt, Artificial Sequence
  Description of Artificial Sequence: Synthetic oligonucleotide
aguccauggcacaacagca

SEQ ID NO: 2127208 - RNA, 19 nt, Artificial Sequence
  Description of Artificial Sequence: Synthetic oligonucleotide
aaggucgcccgaacgucgc

SEQ ID NO: 2127209 - RNA, 19 nt, Artificial Sequence
  Description of Artificial Sequence: Synthetic oligonucleotide
gucgcggugacgcucagca

SEQ ID NO: 2127210 - RNA, 19 nt, Artificial Sequence
  Description of Artificial Sequence: Synthetic oligonucleotide
auguccggacauugaacag

SEQ ID NO: 2127211 - RNA, 19 nt, Artificial Sequence
  Description of Artificial Sequence: Synthetic oligonucleotide
gggaucacagaacuuuggc

SEQ ID NO: 2127212 - RNA, 19 nt, Artificial Sequence
  Description of Artificial Sequence: Synthetic oligonucleotide
uuuggcgacugaccacagc

SEQ ID NO: 2127213 - RNA, 19 nt, Artificial Sequence
  Description of Artificial Sequence: Synthetic oligonucleotide
acucagguacucccggucu

SEQ ID NO: 2127214 - RNA, 19 nt, Artificial Sequence
  Description of Artificial Sequence: Synthetic oligonucleotide
gucacgugccccgacgucg

SEQ ID NO: 2127215 - RNA, 19 nt, Artificial Sequence
  Description of Artificial Sequence: Synthetic oligonucleotide
cugggaucacagaacuuug

SEQ ID NO: 2127216 - RNA, 19 nt, Artificial Sequence
  Description of Artificial Sequence: Synthetic oligonucleotide
gaagggaaugguaccuggc

SEQ ID NO: 2127217 - RNA, 19 nt, Artificial Sequence
  Description of Artificial Sequence: Synthetic oligonucleotide
gucaaaagaaguacggugu

SEQ ID NO: 2127218 - RNA, 19 nt, Artificial Sequence
  Description of Artificial Sequence: Synthetic oligonucleotide
ucccggucugggaucacag

SEQ ID NO: 2127219 - RNA, 19 nt, Artificial Sequence
  Description of Artificial Sequence: Synthetic oligonucleotide
uacacacuugcauguugga

SEQ ID NO: 2127220 - RNA, 19 nt, Artificial Sequence
  Description of Artificial Sequence: Synthetic oligonucleotide
gagcucuuaucagggacag

SEQ ID NO: 2127221 - RNA, 19 nt, Artificial Sequence
  Description of Artificial Sequence: Synthetic oligonucleotide
uccucaaaccaggaagcga

SEQ ID NO: 2127222 - RNA, 19 nt, Artificial Sequence
  Description of Artificial Sequence: Synthetic oligonucleotide
aggccaaccaaaauaaaua

SEQ ID NO: 2127223 - RNA, 19 nt, Artificial Sequence
  Description of Artificial Sequence: Synthetic oligonucleotide
cagaacuuuggcgacugac

SEQ ID NO: 2127224 - RNA, 19 nt, Artificial Sequence
  Description of Artificial Sequence: Synthetic oligonucleotide
aguacggugucccgaguaa

SEQ ID NO: 2127225 - RNA, 19 nt, Artificial Sequence
  Description of Artificial Sequence: Synthetic oligonucleotide
gcaaaaggggugaggaagg

SEQ ID NO: 2127226 - RNA, 19 nt, Artificial Sequence
  Description of Artificial Sequence: Synthetic oligonucleotide
gucccgaguaacaaguuca

SEQ ID NO: 2127227 - RNA, 19 nt, Artificial Sequence
  Description of Artificial Sequence: Synthetic oligonucleotide
cguaguuagugaagaagcg

SEQ ID NO: 2127228 - RNA, 19 nt, Artificial Sequence
  Description of Artificial Sequence: Synthetic oligonucleotide
gggaacgccggucacgugc

SEQ ID NO: 2127229 - RNA, 19 nt, Artificial Sequence
  Description of Artificial Sequence: Synthetic oligonucleotide
ggugacgcucagcagcgcg

SEQ ID NO: 2127230 - RNA, 19 nt, Artificial Sequence
  Description of Artificial Sequence: Synthetic oligonucleotide
uuccccuauguccggacau

SEQ ID NO: 2127231 - RNA, 19 nt, Artificial Sequence
  Description of Artificial Sequence: Synthetic oligonucleotide
ucccgaguaacaaguucaa

SEQ ID NO: 2127232 - RNA, 19 nt, Artificial Sequence
  Description of Artificial Sequence: Synthetic oligonucleotide
ccuccucaaaccaggaagc

SEQ ID NO: 2127233 - RNA, 19 nt, Artificial Sequence
  Description of Artificial Sequence: Synthetic oligonucleotide
agggacagagccugaagua

SEQ ID NO: 2127234 - RNA, 19 nt, Artificial Sequence
  Description of Artificial Sequence: Synthetic oligonucleotide
ugacagcaccccgacagca

SEQ ID NO: 2127235 - RNA, 19 nt, Artificial Sequence
  Description of Artificial Sequence: Synthetic oligonucleotide
uucccuuucggcucucgua

SEQ ID NO: 2127236 - RNA, 19 nt, Artificial Sequence
  Description of Artificial Sequence: Synthetic oligonucleotide
cuccucaaaccaggaagcg

SEQ ID NO: 2127237 - RNA, 19 nt, Artificial Sequence
  Description of Artificial Sequence: Synthetic oligonucleotide
ugcgcaucggucccagguc

SEQ ID NO: 2127238 - RNA, 19 nt, Artificial Sequence
  Description of Artificial Sequence: Synthetic oligonucleotide
gacagagccugaaguacac

SEQ ID NO: 2127239 - RNA, 19 nt, Artificial Sequence
  Description of Artificial Sequence: Synthetic oligonucleotide
ggcaaagggauuagagucc

SEQ ID NO: 2127240 - RNA, 19 nt, Artificial Sequence
  Description of Artificial Sequence: Synthetic oligonucleotide
augugggaacgccggucac

SEQ ID NO: 2127241 - RNA, 19 nt, Artificial Sequence
  Description of Artificial Sequence: Synthetic oligonucleotide
ucacgugccccgacgucgc

SEQ ID NO: 2127242 - RNA, 19 nt, Artificial Sequence
  Description of Artificial Sequence: Synthetic oligonucleotide
caacacaggagaggauugc

SEQ ID NO: 2127243 - RNA, 19 nt, Artificial Sequence
  Description of Artificial Sequence: Synthetic oligonucleotide
acgucaugugggaacgccg

SEQ ID NO: 2127244 - RNA, 19 nt, Artificial Sequence
  Description of Artificial Sequence: Synthetic oligonucleotide
cacgucaugugggaacgcc

SEQ ID NO: 2127245 - RNA, 19 nt, Artificial Sequence
  Description of Artificial Sequence: Synthetic oligonucleotide
augccucucgguccccgcg

SEQ ID NO: 2127246 - RNA, 19 nt, Artificial Sequence
  Description of Artificial Sequence: Synthetic oligonucleotide
cagcgcgcacgucaugugg

SEQ ID NO: 2127247 - RNA, 19 nt, Artificial Sequence
  Description of Artificial Sequence: Synthetic oligonucleotide
aacaacucauuugcaugua

SEQ ID NO: 2127248 - RNA, 19 nt, Artificial Sequence
  Description of Artificial Sequence: Synthetic oligonucleotide
caccugccgguucaggggc

SEQ ID NO: 2127249 - RNA, 19 nt, Artificial Sequence
  Description of Artificial Sequence: Synthetic oligonucleotide
gguccagagaagucagaug

SEQ ID NO: 2127250 - RNA, 19 nt, Artificial Sequence
  Description of Artificial Sequence: Synthetic oligonucleotide
cucaacaacucauuugcau

SEQ ID NO: 2127251 - RNA, 19 nt, Artificial Sequence
  Description of Artificial Sequence: Synthetic oligonucleotide
aggaagggaaugguaccug

SEQ ID NO: 2127252 - RNA, 19 nt, Artificial Sequence
  Description of Artificial Sequence: Synthetic oligonucleotide
acgccggucacgugccccg

SEQ ID NO: 2127253 - RNA, 19 nt, Artificial Sequence
  Description of Artificial Sequence: Synthetic oligonucleotide
ggguacaacacuuguccuc

SEQ ID NO: 2127254 - RNA, 19 nt, Artificial Sequence
  Description of Artificial Sequence: Synthetic oligonucleotide
ccucaaaugccucucgguc

SEQ ID NO: 2127255 - RNA, 19 nt, Artificial Sequence
  Description of Artificial Sequence: Synthetic oligonucleotide
aggcuuaagugaggaauca

SEQ ID NO: 2127256 - RNA, 19 nt, Artificial Sequence
  Description of Artificial Sequence: Synthetic oligonucleotide
agcgcgcacgucauguggg

SEQ ID NO: 2127257 - RNA, 19 nt, Artificial Sequence
  Description of Artificial Sequence: Synthetic oligonucleotide
uugggccgggaauggaagu

SEQ ID NO: 2127258 - RNA, 19 nt, Artificial Sequence
  Description of Artificial Sequence: Synthetic oligonucleotide
cuuaucagggacagagccu

SEQ ID NO: 2127259 - RNA, 19 nt, Artificial Sequence
  Description of Artificial Sequence: Synthetic oligonucleotide
cggacauugaacagccucc

SEQ ID NO: 2127260 - RNA, 19 nt, Artificial Sequence
  Description of Artificial Sequence: Synthetic oligonucleotide
ggcgacugaccacagcccc

SEQ ID NO: 2127261 - RNA, 19 nt, Artificial Sequence
  Description of Artificial Sequence: Synthetic oligonucleotide
aacgucgcggugacgcuca

SEQ ID NO: 2127262 - RNA, 19 nt, Artificial Sequence
  Description of Artificial Sequence: Synthetic oligonucleotide
uagcauuggcuuccccuau

SEQ ID NO: 2127263 - RNA, 19 nt, Artificial Sequence
  Description of Artificial Sequence: Synthetic oligonucleotide
acgcucagcagcgcgcacg

SEQ ID NO: 2127264 - RNA, 19 nt, Artificial Sequence
  Description of Artificial Sequence: Synthetic oligonucleotide
acacgcaccugccgguuca

SEQ ID NO: 2127265 - RNA, 19 nt, Artificial Sequence
  Description of Artificial Sequence: Synthetic oligonucleotide
cccgcgguaacucuugcgc

SEQ ID NO: 2127266 - RNA, 19 nt, Artificial Sequence
  Description of Artificial Sequence: Synthetic oligonucleotide
gcaccugccgguucagggg

SEQ ID NO: 2127267 - RNA, 19 nt, Artificial Sequence
  Description of Artificial Sequence: Synthetic oligonucleotide
uaucagggacagagccuga

SEQ ID NO: 2127268 - RNA, 19 nt, Artificial Sequence
  Description of Artificial Sequence: Synthetic oligonucleotide
agcagcgcgcacgucaugu

SEQ ID NO: 2127269 - RNA, 19 nt, Artificial Sequence
  Description of Artificial Sequence: Synthetic oligonucleotide
cuucccggcugagucacag

SEQ ID NO: 2127270 - RNA, 19 nt, Artificial Sequence
  Description of Artificial Sequence: Synthetic oligonucleotide
acacacuugcauguuggaa

SEQ ID NO: 2127271 - RNA, 19 nt, Artificial Sequence
  Description of Artificial Sequence: Synthetic oligonucleotide
cuggcgguggucacagguc

SEQ ID NO: 2127272 - RNA, 19 nt, Artificial Sequence
  Description of Artificial Sequence: Synthetic oligonucleotide
ccucaaaccaggaagcgaa

SEQ ID NO: 2127273 - RNA, 19 nt, Artificial Sequence
  Description of Artificial Sequence: Synthetic oligonucleotide
cuuuggcgacugaccacag

SEQ ID NO: 2127274 - RNA, 19 nt, Artificial Sequence
  Description of Artificial Sequence: Synthetic oligonucleotide
caccccgacagcacaggug

SEQ ID NO: 2127275 - RNA, 19 nt, Artificial Sequence
  Description of Artificial Sequence: Synthetic oligonucleotide
gacccaggcuuaagugagg

SEQ ID NO: 2127276 - RNA, 19 nt, Artificial Sequence
  Description of Artificial Sequence: Synthetic oligonucleotide
ccgggaauggaaguagucc

SEQ ID NO: 2127277 - RNA, 19 nt, Artificial Sequence
  Description of Artificial Sequence: Synthetic oligonucleotide
ccuaaaagaugugggguac

SEQ ID NO: 2127278 - RNA, 19 nt, Artificial Sequence
  Description of Artificial Sequence: Synthetic oligonucleotide
aggucccuccacacgcacc

SEQ ID NO: 2127279 - RNA, 19 nt, Artificial Sequence
  Description of Artificial Sequence: Synthetic oligonucleotide
ugacgcucagcagcgcgca

SEQ ID NO: 2127280 - RNA, 19 nt, Artificial Sequence
  Description of Artificial Sequence: Synthetic oligonucleotide
agcugagaucacguuaaaa

SEQ ID NO: 2127281 - RNA, 19 nt, Artificial Sequence
  Description of Artificial Sequence: Synthetic oligonucleotide
acacacggccgacaaguuu

SEQ ID NO: 2127282 - RNA, 19 nt, Artificial Sequence
  Description of Artificial Sequence: Synthetic oligonucleotide
uucggcucucguaguuagu

SEQ ID NO: 2127283 - RNA, 19 nt, Artificial Sequence
  Description of Artificial Sequence: Synthetic oligonucleotide
ccggacauugaacagccuc

SEQ ID NO: 2127284 - RNA, 19 nt, Artificial Sequence
  Description of Artificial Sequence: Synthetic oligonucleotide
ggaauggaaguaguccuca

SEQ ID NO: 2127285 - RNA, 19 nt, Artificial Sequence
  Description of Artificial Sequence: Synthetic oligonucleotide
ccgaacgucgcggugacgc

SEQ ID NO: 2127286 - RNA, 19 nt, Artificial Sequence
  Description of Artificial Sequence: Synthetic oligonucleotide
cauuggcuuccccuauguc

SEQ ID NO: 2127287 - RNA, 19 nt, Artificial Sequence
  Description of Artificial Sequence: Synthetic oligonucleotide
uggcuuccccuauguccgg

SEQ ID NO: 2127288 - RNA, 19 nt, Artificial Sequence
  Description of Artificial Sequence: Synthetic oligonucleotide
gaggaagggaaugguaccu

SEQ ID NO: 2127289 - RNA, 19 nt, Artificial Sequence
  Description of Artificial Sequence: Synthetic oligonucleotide
agcaccccgacagcacagg

SEQ ID NO: 2127290 - RNA, 19 nt, Artificial Sequence
  Description of Artificial Sequence: Synthetic oligonucleotide
gguaacucuugcgcaucgg

SEQ ID NO: 2127291 - RNA, 19 nt, Artificial Sequence
  Description of Artificial Sequence: Synthetic oligonucleotide
gacagcaccccgacagcac

SEQ ID NO: 2127292 - RNA, 19 nt, Artificial Sequence
  Description of Artificial Sequence: Synthetic oligonucleotide
ucucgguccccgcgguaac

SEQ ID NO: 2127293 - RNA, 19 nt, Artificial Sequence
  Description of Artificial Sequence: Synthetic oligonucleotide
ggcucucguaguuagugaa

SEQ ID NO: 2127294 - RNA, 19 nt, Artificial Sequence
  Description of Artificial Sequence: Synthetic oligonucleotide
cacauagcauuggcuuccc

SEQ ID NO: 2127295 - RNA, 19 nt, Artificial Sequence
  Description of Artificial Sequence: Synthetic oligonucleotide
ggucugggaucacagaacu

SEQ ID NO: 2127296 - RNA, 19 nt, Artificial Sequence
  Description of Artificial Sequence: Synthetic oligonucleotide
ugcgggcagaggguuuucc

SEQ ID NO: 2127297 - RNA, 19 nt, Artificial Sequence
  Description of Artificial Sequence: Synthetic oligonucleotide
guagccuggccacuucgaa

SEQ ID NO: 2127298 - RNA, 19 nt, Artificial Sequence
  Description of Artificial Sequence: Synthetic oligonucleotide
cagggacagagccugaagu

SEQ ID NO: 2127299 - RNA, 19 nt, Artificial Sequence
  Description of Artificial Sequence: Synthetic oligonucleotide
aggucgcccgaacgucgcg

SEQ ID NO: 2127300 - RNA, 19 nt, Artificial Sequence
  Description of Artificial Sequence: Synthetic oligonucleotide
cagcaccccgacagcacag

SEQ ID NO: 2127301 - RNA, 19 nt, Artificial Sequence
  Description of Artificial Sequence: Synthetic oligonucleotide
gugacgcucagcagcgcgc

SEQ ID NO: 2127302 - RNA, 19 nt, Artificial Sequence
  Description of Artificial Sequence: Synthetic oligonucleotide
acuucgaaggucgcccgaa

SEQ ID NO: 2127303 - RNA, 19 nt, Artificial Sequence
  Description of Artificial Sequence: Synthetic oligonucleotide
gugggguacaacacuuguc

SEQ ID NO: 2127304 - RNA, 19 nt, Artificial Sequence
  Description of Artificial Sequence: Synthetic oligonucleotide
acagaacuuuggcgacuga

SEQ ID NO: 2127305 - RNA, 19 nt, Artificial Sequence
  Description of Artificial Sequence: Synthetic oligonucleotide
guacggugucccgaguaac

SEQ ID NO: 2127306 - RNA, 19 nt, Artificial Sequence
  Description of Artificial Sequence: Synthetic oligonucleotide
ccgacagcacaggugacgg

SEQ ID NO: 2127307 - RNA, 19 nt, Artificial Sequence
  Description of Artificial Sequence: Synthetic oligonucleotide
cacacggccgacaaguuuu

SEQ ID NO: 2127308 - RNA, 19 nt, Artificial Sequence
  Description of Artificial Sequence: Synthetic oligonucleotide
guaguucuucccggcugag

SEQ ID NO: 2127309 - RNA, 19 nt, Artificial Sequence
  Description of Artificial Sequence: Synthetic oligonucleotide
gaacgucgcggugacgcuc

SEQ ID NO: 2127310 - RNA, 19 nt, Artificial Sequence
  Description of Artificial Sequence: Synthetic oligonucleotide
ucgcggugacgcucagcag

SEQ ID NO: 2127311 - RNA, 19 nt, Artificial Sequence
  Description of Artificial Sequence: Synthetic oligonucleotide
aggauugcuuugggaggag

SEQ ID NO: 2127312 - RNA, 19 nt, Artificial Sequence
  Description of Artificial Sequence: Synthetic oligonucleotide
cuugcgcaucggucccagg

SEQ ID NO: 2127313 - RNA, 19 nt, Artificial Sequence
  Description of Artificial Sequence: Synthetic oligonucleotide
cgcggugacgcucagcagc

SEQ ID NO: 2127314 - RNA, 19 nt, Artificial Sequence
  Description of Artificial Sequence: Synthetic oligonucleotide
uccggacauugaacagccu

SEQ ID NO: 2127315 - RNA, 19 nt, Artificial Sequence
  Description of Artificial Sequence: Synthetic oligonucleotide
ucggucccagguccaugac

SEQ ID NO: 2127316 - RNA, 19 nt, Artificial Sequence
  Description of Artificial Sequence: Synthetic oligonucleotide
gcaaagggauuagagucca

SEQ ID NO: 2127317 - RNA, 19 nt, Artificial Sequence
  Description of Artificial Sequence: Synthetic oligonucleotide
acagagccugaaguacaca

SEQ ID NO: 2127318 - RNA, 19 nt, Artificial Sequence
  Description of Artificial Sequence: Synthetic oligonucleotide
ggaaugguaccuggcggug

SEQ ID NO: 2127319 - RNA, 19 nt, Artificial Sequence
  Description of Artificial Sequence: Synthetic oligonucleotide
guacucccggucugggauc

SEQ ID NO: 2127320 - RNA, 19 nt, Artificial Sequence
  Description of Artificial Sequence: Synthetic oligonucleotide
guccaugacagcaccccga

SEQ ID NO: 2127321 - RNA, 19 nt, Artificial Sequence
  Description of Artificial Sequence: Synthetic oligonucleotide
gcgcaucggucccaggucc

SEQ ID NO: 2127322 - RNA, 19 nt, Artificial Sequence
  Description of Artificial Sequence: Synthetic oligonucleotide
gguggucacaggucaaugu

SEQ ID NO: 2127323 - RNA, 19 nt, Artificial Sequence
  Description of Artificial Sequence: Synthetic oligonucleotide
gugacggagguagccuggc

SEQ ID NO: 2127324 - RNA, 19 nt, Artificial Sequence
  Description of Artificial Sequence: Synthetic oligonucleotide
gcggugacgcucagcagcg

SEQ ID NO: 2127325 - RNA, 19 nt, Artificial Sequence
  Description of Artificial Sequence: Synthetic oligonucleotide
cuuccccuauguccggaca

SEQ ID NO: 2127326 - RNA, 19 nt, Artificial Sequence
  Description of Artificial Sequence: Synthetic oligonucleotide
ucgcccgaacgucgcggug

SEQ ID NO: 2127327 - RNA, 19 nt, Artificial Sequence
  Description of Artificial Sequence: Synthetic oligonucleotide
ggauugcuuugggaggagc

SEQ ID NO: 2127328 - RNA, 19 nt, Artificial Sequence
  Description of Artificial Sequence: Synthetic oligonucleotide
ccuauguccggacauugaa

SEQ ID NO: 2127329 - RNA, 19 nt, Artificial Sequence
  Description of Artificial Sequence: Synthetic oligonucleotide
guccauggcacaacagcaa

SEQ ID NO: 2127330 - RNA, 19 nt, Artificial Sequence
  Description of Artificial Sequence: Synthetic oligonucleotide
ccacuucgaaggucgcccg

SEQ ID NO: 2127331 - RNA, 19 nt, Artificial Sequence
  Description of Artificial Sequence: Synthetic oligonucleotide
guucaaggccaaccaaaau

SEQ ID NO: 2127332 - RNA, 19 nt, Artificial Sequence
  Description of Artificial Sequence: Synthetic oligonucleotide
caggucccuccacacgcac

SEQ ID NO: 2127333 - RNA, 19 nt, Artificial Sequence
  Description of Artificial Sequence: Synthetic oligonucleotide
gggaaugguaccuggcggu

SEQ ID NO: 2127334 - RNA, 19 nt, Artificial Sequence
  Description of Artificial Sequence: Synthetic oligonucleotide
ggaacgccggucacgugcc

SEQ ID NO: 2127335 - RNA, 19 nt, Artificial Sequence
  Description of Artificial Sequence: Synthetic oligonucleotide
gggcaguuucuucacaggu

SEQ ID NO: 2127336 - RNA, 19 nt, Artificial Sequence
  Description of Artificial Sequence: Synthetic oligonucleotide
gugaagaagcggaagccau

SEQ ID NO: 2127337 - RNA, 19 nt, Artificial Sequence
  Description of Artificial Sequence: Synthetic oligonucleotide
agcaugcgggcagaggguu

SEQ ID NO: 2127338 - RNA, 19 nt, Artificial Sequence
  Description of Artificial Sequence: Synthetic oligonucleotide
ggucgcccgaacgucgcgg

SEQ ID NO: 2127339 - RNA, 19 nt, Artificial Sequence
  Description of Artificial Sequence: Synthetic oligonucleotide
guagccagacacauagcau

SEQ ID NO: 2127340 - RNA, 19 nt, Artificial Sequence
  Description of Artificial Sequence: Synthetic oligonucleotide
gaacgccggucacgugccc

SEQ ID NO: 2127341 - RNA, 19 nt, Artificial Sequence
  Description of Artificial Sequence: Synthetic oligonucleotide
ucgguccccgcgguaacuc

SEQ ID NO: 2127342 - RNA, 19 nt, Artificial Sequence
  Description of Artificial Sequence: Synthetic oligonucleotide
uccccuauguccggacauu

SEQ ID NO: 2127343 - RNA, 19 nt, Artificial Sequence
  Description of Artificial Sequence: Synthetic oligonucleotide
cccuaaaagauguggggua

SEQ ID NO: 2127344 - RNA, 19 nt, Artificial Sequence
  Description of Artificial Sequence: Synthetic oligonucleotide
ugggaacgccggucacgug

SEQ ID NO: 2127345 - RNA, 19 nt, Artificial Sequence
  Description of Artificial Sequence: Synthetic oligonucleotide
cacacgcaccugccgguuc

SEQ ID NO: 2127346 - RNA, 19 nt, Artificial Sequence
  Description of Artificial Sequence: Synthetic oligonucleotide
gcucuugggccgggaaugg

SEQ ID NO: 2127347 - RNA, 19 nt, Artificial Sequence
  Description of Artificial Sequence: Synthetic oligonucleotide
gcucccaguagaagacaag

SEQ ID NO: 2127348 - RNA, 19 nt, Artificial Sequence
  Description of Artificial Sequence: Synthetic oligonucleotide
gcuccuuuccacucaggua

SEQ ID NO: 2127349 - RNA, 19 nt, Artificial Sequence
  Description of Artificial Sequence: Synthetic oligonucleotide
ccccaaagucaaaagaagu

SEQ ID NO: 2127350 - RNA, 19 nt, Artificial Sequence
  Description of Artificial Sequence: Synthetic oligonucleotide
gacgcucagcagcgcgcac

SEQ ID NO: 2127351 - RNA, 19 nt, Artificial Sequence
  Description of Artificial Sequence: Synthetic oligonucleotide
aggaagcgaacugcuucau

SEQ ID NO: 2127352 - RNA, 19 nt, Artificial Sequence
  Description of Artificial Sequence: Synthetic oligonucleotide
caucggucccagguccaug

SEQ ID NO: 2127353 - RNA, 19 nt, Artificial Sequence
  Description of Artificial Sequence: Synthetic oligonucleotide
gaagucagaugagccuccu

SEQ ID NO: 2127354 - RNA, 19 nt, Artificial Sequence
  Description of Artificial Sequence: Synthetic oligonucleotide
ggucacaggucaauguccu

SEQ ID NO: 2127355 - RNA, 19 nt, Artificial Sequence
  Description of Artificial Sequence: Synthetic oligonucleotide
agccccaaucuggcugcuc

SEQ ID NO: 2127356 - RNA, 19 nt, Artificial Sequence
  Description of Artificial Sequence: Synthetic oligonucleotide
acgucgccaggcccugggu

SEQ ID NO: 2127357 - RNA, 19 nt, Artificial Sequence
  Description of Artificial Sequence: Synthetic oligonucleotide
cggucugggaucacagaac

SEQ ID NO: 2127358 - RNA, 19 nt, Artificial Sequence
  Description of Artificial Sequence: Synthetic oligonucleotide
cacuucgaaggucgcccga

SEQ ID NO: 2127359 - RNA, 19 nt, Artificial Sequence
  Description of Artificial Sequence: Synthetic oligonucleotide
gugggaacgccggucacgu

SEQ ID NO: 2127360 - RNA, 19 nt, Artificial Sequence
  Description of Artificial Sequence: Synthetic oligonucleotide
ccggucugggaucacagaa

SEQ ID NO: 2127361 - RNA, 19 nt, Artificial Sequence
  Description of Artificial Sequence: Synthetic oligonucleotide
cgguaacucuugcgcaucg

SEQ ID NO: 2127362 - RNA, 19 nt, Artificial Sequence
  Description of Artificial Sequence: Synthetic oligonucleotide
augcgggcagaggguuuuc

SEQ ID NO: 2127363 - RNA, 19 nt, Artificial Sequence
  Description of Artificial Sequence: Synthetic oligonucleotide
ccggucacgugccccgacg

SEQ ID NO: 2127364 - RNA, 19 nt, Artificial Sequence
  Description of Artificial Sequence: Synthetic oligonucleotide
gauuagaguccagcucuuu

SEQ ID NO: 2127365 - RNA, 19 nt, Artificial Sequence
  Description of Artificial Sequence: Synthetic oligonucleotide
guaccuggcgguggucaca

SEQ ID NO: 2127366 - RNA, 19 nt, Artificial Sequence
  Description of Artificial Sequence: Synthetic oligonucleotide
cccgaguaacaaguucaag

SEQ ID NO: 2127367 - RNA, 19 nt, Artificial Sequence
  Description of Artificial Sequence: Synthetic oligonucleotide
gucaugugggaacgccggu

SEQ ID NO: 2127368 - RNA, 19 nt, Artificial Sequence
  Description of Artificial Sequence: Synthetic oligonucleotide
ggcuuaagugaggaaucaa

SEQ ID NO: 2127369 - RNA, 19 nt, Artificial Sequence
  Description of Artificial Sequence: Synthetic oligonucleotide
ccucaacaacucauuugca

SEQ ID NO: 2127370 - RNA, 19 nt, Artificial Sequence
  Description of Artificial Sequence: Synthetic oligonucleotide
ccaaagcccuucagcagca

SEQ ID NO: 2127371 - RNA, 19 nt, Artificial Sequence
  Description of Artificial Sequence: Synthetic oligonucleotide
cucucgguccccgcgguaa

SEQ ID NO: 2127372 - RNA, 19 nt, Artificial Sequence
  Description of Artificial Sequence: Synthetic oligonucleotide
gggguacaacacuuguccu

SEQ ID NO: 2127373 - RNA, 19 nt, Artificial Sequence
  Description of Artificial Sequence: Synthetic oligonucleotide
gcagcgcgcacgucaugug

SEQ ID NO: 2127374 - RNA, 19 nt, Artificial Sequence
  Description of Artificial Sequence: Synthetic oligonucleotide
ccccgcgguaacucuugcg

SEQ ID NO: 2127375 - RNA, 19 nt, Artificial Sequence
  Description of Artificial Sequence: Synthetic oligonucleotide
ccaggcuuaagugaggaau

SEQ ID NO: 2127376 - RNA, 19 nt, Artificial Sequence
  Description of Artificial Sequence: Synthetic oligonucleotide
gguagccuggccacuucga

SEQ ID NO: 2127377 - RNA, 19 nt, Artificial Sequence
  Description of Artificial Sequence: Synthetic oligonucleotide
acgugccccgacgucgcca

SEQ ID NO: 2127378 - RNA, 19 nt, Artificial Sequence
  Description of Artificial Sequence: Synthetic oligonucleotide
ggucacgugccccgacguc

SEQ ID NO: 2127379 - RNA, 19 nt, Artificial Sequence
  Description of Artificial Sequence: Synthetic oligonucleotide
cugccgguucaggggcucc

SEQ ID NO: 2127380 - RNA, 19 nt, Artificial Sequence
  Description of Artificial Sequence: Synthetic oligonucleotide
ggacauugaacagccuccu

SEQ ID NO: 2127381 - RNA, 19 nt, Artificial Sequence
  Description of Artificial Sequence: Synthetic oligonucleotide
cggugucccgaguaacaag

SEQ ID NO: 2127382 - RNA, 19 nt, Artificial Sequence
  Description of Artificial Sequence: Synthetic oligonucleotide
ccggcugagucacagcaaa

SEQ ID NO: 2127383 - RNA, 19 nt, Artificial Sequence
  Description of Artificial Sequence: Synthetic oligonucleotide
gccgggaauggaaguaguc

SEQ ID NO: 2127384 - RNA, 19 nt, Artificial Sequence
  Description of Artificial Sequence: Synthetic oligonucleotide
ccccuauguccggacauug

SEQ ID NO: 2127385 - RNA, 19 nt, Artificial Sequence
  Description of Artificial Sequence: Synthetic oligonucleotide
cacgcaccugccgguucag

SEQ ID NO: 2127386 - RNA, 19 nt, Artificial Sequence
  Description of Artificial Sequence: Synthetic oligonucleotide
acgucgcggugacgcucag

SEQ ID NO: 2127387 - RNA, 19 nt, Artificial Sequence
  Description of Artificial Sequence: Synthetic oligonucleotide
caggugacggagguagccu

SEQ ID NO: 2127388 - RNA, 19 nt, Artificial Sequence
  Description of Artificial Sequence: Synthetic oligonucleotide
cccuauguccggacauuga

SEQ ID NO: 2127389 - RNA, 19 nt, Artificial Sequence
  Description of Artificial Sequence: Synthetic oligonucleotide
gcacaacagcaaaaggggu

SEQ ID NO: 2127390 - RNA, 19 nt, Artificial Sequence
  Description of Artificial Sequence: Synthetic oligonucleotide
gauuggcccuggcuccuuu

SEQ ID NO: 2127391 - RNA, 19 nt, Artificial Sequence
  Description of Artificial Sequence: Synthetic oligonucleotide
gucgcccgaacgucgcggu

SEQ ID NO: 2127392 - RNA, 19 nt, Artificial Sequence
  Description of Artificial Sequence: Synthetic oligonucleotide
gcgguaacucuugcgcauc

SEQ ID NO: 2127393 - RNA, 19 nt, Artificial Sequence
  Description of Artificial Sequence: Synthetic oligonucleotide
cagcagcgcgcacgucaug

SEQ ID NO: 2127394 - RNA, 19 nt, Artificial Sequence
  Description of Artificial Sequence: Synthetic oligonucleotide
ccgcgguaacucuugcgca

SEQ ID NO: 2127395 - RNA, 19 nt, Artificial Sequence
  Description of Artificial Sequence: Synthetic oligonucleotide
cgaaggucgcccgaacguc

SEQ ID NO: 2127396 - RNA, 19 nt, Artificial Sequence
  Description of Artificial Sequence: Synthetic oligonucleotide
ccccuaaaagauguggggu

SEQ ID NO: 2127397 - RNA, 19 nt, Artificial Sequence
  Description of Artificial Sequence: Synthetic oligonucleotide
ccgguucaggggcucccag

SEQ ID NO: 2127398 - RNA, 19 nt, Artificial Sequence
  Description of Artificial Sequence: Synthetic oligonucleotide
gucacaggucaauguccuu

SEQ ID NO: 2127399 - RNA, 19 nt, Artificial Sequence
  Description of Artificial Sequence: Synthetic oligonucleotide
gcgacugaccacagcccca

SEQ ID NO: 2127400 - RNA, 19 nt, Artificial Sequence
  Description of Artificial Sequence: Synthetic oligonucleotide
cggcugagucacagcaaac

SEQ ID NO: 2127401 - RNA, 19 nt, Artificial Sequence
  Description of Artificial Sequence: Synthetic oligonucleotide
ccccgacgucgccaggccc

SEQ ID NO: 2127402 - RNA, 19 nt, Artificial Sequence
  Description of Artificial Sequence: Synthetic oligonucleotide
cacacacggccgacaaguu

SEQ ID NO: 2127403 - RNA, 19 nt, Artificial Sequence
  Description of Artificial Sequence: Synthetic oligonucleotide
cccggucugggaucacaga

SEQ ID NO: 2127404 - RNA, 19 nt, Artificial Sequence
  Description of Artificial Sequence: Synthetic oligonucleotide
gccggucacgugccccgac

SEQ ID NO: 2127405 - RNA, 19 nt, Artificial Sequence
  Description of Artificial Sequence: Synthetic oligonucleotide
gugucccgaguaacaaguu

SEQ ID NO: 2127406 - RNA, 19 nt, Artificial Sequence
  Description of Artificial Sequence: Synthetic oligonucleotide
ggauuagaguccagcucuu

SEQ ID NO: 2127407 - RNA, 19 nt, Artificial Sequence
  Description of Artificial Sequence: Synthetic oligonucleotide
cccgacgucgccaggcccu

SEQ ID NO: 2127408 - RNA, 19 nt, Artificial Sequence
  Description of Artificial Sequence: Synthetic oligonucleotide
gcaccccgacagcacaggu

SEQ ID NO: 2127409 - RNA, 19 nt, Artificial Sequence
  Description of Artificial Sequence: Synthetic oligonucleotide
ggagguagccuggccacuu

SEQ ID NO: 2127410 - RNA, 19 nt, Artificial Sequence
  Description of Artificial Sequence: Synthetic oligonucleotide
ggcgguggucacaggucaa

SEQ ID NO: 2127411 - RNA, 19 nt, Artificial Sequence
  Description of Artificial Sequence: Synthetic oligonucleotide
ggccgggaauggaaguagu

SEQ ID NO: 2127412 - RNA, 19 nt, Artificial Sequence
  Description of Artificial Sequence: Synthetic oligonucleotide
ccuuucggcucucguaguu

SEQ ID NO: 2127413 - RNA, 19 nt, Artificial Sequence
  Description of Artificial Sequence: Synthetic oligonucleotide
cccgaacgucgcggugacg

SEQ ID NO: 2127414 - RNA, 19 nt, Artificial Sequence
  Description of Artificial Sequence: Synthetic oligonucleotide
cgcaucggucccaggucca

SEQ ID NO: 2127415 - RNA, 19 nt, Artificial Sequence
  Description of Artificial Sequence: Synthetic oligonucleotide
ccgacgucgccaggcccug

SEQ ID NO: 2127416 - RNA, 19 nt, Artificial Sequence
  Description of Artificial Sequence: Synthetic oligonucleotide
cgacugaccacagccccaa

SEQ ID NO: 2127417 - RNA, 19 nt, Artificial Sequence
  Description of Artificial Sequence: Synthetic oligonucleotide
cgcccgaacgucgcgguga

SEQ ID NO: 2127418 - RNA, 19 nt, Artificial Sequence
  Description of Artificial Sequence: Synthetic oligonucleotide
cgcgguaacucuugcgcau

SEQ ID NO: 2127419 - RNA, 19 nt, Artificial Sequence
  Description of Artificial Sequence: Synthetic oligonucleotide
cgacagcacaggugacgga

SEQ ID NO: 2127420 - RNA, 19 nt, Artificial Sequence
  Description of Artificial Sequence: Synthetic oligonucleotide
cccuuucggcucucguagu

SEQ ID NO: 2127421 - RNA, 19 nt, Artificial Sequence
  Description of Artificial Sequence: Synthetic oligonucleotide
cgucgcggugacgcucagc

SEQ ID NO: 2127422 - RNA, 19 nt, Artificial Sequence
  Description of Artificial Sequence: Synthetic oligonucleotide
gguccccgcgguaacucuu

SEQ ID NO: 2127423 - RNA, 19 nt, Artificial Sequence
  Description of Artificial Sequence: Synthetic oligonucleotide
gcaucggucccagguccau

SEQ ID NO: 2127424 - RNA, 19 nt, Artificial Sequence
  Description of Artificial Sequence: Synthetic oligonucleotide
cgaacgucgcggugacgcu

SEQ ID NO: 2127425 - RNA, 19 nt, Artificial Sequence
  Description of Artificial Sequence: Synthetic oligonucleotide
cggugacgcucagcagcgc

SEQ ID NO: 2127426 - RNA, 19 nt, Artificial Sequence
  Description of Artificial Sequence: Synthetic oligonucleotide
cgacgucgccaggcccugg

SEQ ID NO: 2127427 - RNA, 19 nt, Artificial Sequence
  Description of Artificial Sequence: Synthetic oligonucleotide
cggucacgugccccgacgu

SEQ ID NO: 2127428 - RNA, 19 nt, Artificial Sequence
  Description of Artificial Sequence: Synthetic oligonucleotide
cagccccaaucuggcugcu

SEQ ID NO: 2127429 - RNA, 19 nt, Artificial Sequence
  Description of Artificial Sequence: Synthetic oligonucleotide
ggauuggcccuggcuccuu

SEQ ID NO: 2127430 - RNA, 19 nt, Artificial Sequence
  Description of Artificial Sequence: Synthetic oligonucleotide
cgucgccaggcccuggguu

SEQ ID NO: 2127431 - RNA, 19 nt, Artificial Sequence
  Description of Artificial Sequence: Synthetic oligonucleotide
ccacacgcaccugccgguu

SEQ ID NO: 2127432 - RNA, 19 nt, Artificial Sequence
  Description of Artificial Sequence: Synthetic oligonucleotide
cggagguagccuggccacu

SEQ ID NO: 2127433 - RNA, 19 nt, Artificial Sequence
  Description of Artificial Sequence: Synthetic oligonucleotide
cgccggucacgugccccga

SEQ ID NO: 2127434 - RNA, 19 nt, Artificial Sequence
  Description of Artificial Sequence: Synthetic oligonucleotide
aagucaaucacuuuaauac

SEQ ID NO: 2127435 - RNA, 19 nt, Artificial Sequence
  Description of Artificial Sequence: Synthetic oligonucleotide
aaucauacaagcuaguugg

SEQ ID NO: 2127436 - RNA, 19 nt, Artificial Sequence
  Description of Artificial Sequence: Synthetic oligonucleotide
acuaaaauaauucucgggc

SEQ ID NO: 2127437 - RNA, 19 nt, Artificial Sequence
  Description of Artificial Sequence: Synthetic oligonucleotide
aaacuugcgcaccagaggc

SEQ ID NO: 2127438 - RNA, 19 nt, Artificial Sequence
  Description of Artificial Sequence: Synthetic oligonucleotide
ucuugauaagcucauagag

SEQ ID NO: 2127439 - RNA, 19 nt, Artificial Sequence
  Description of Artificial Sequence: Synthetic oligonucleotide
ucaaacgucaugcagaugu

SEQ ID NO: 2127440 - RNA, 19 nt, Artificial Sequence
  Description of Artificial Sequence: Synthetic oligonucleotide
aacuaaaauaauucucggg

SEQ ID NO: 2127441 - RNA, 19 nt, Artificial Sequence
  Description of Artificial Sequence: Synthetic oligonucleotide
cauaguguugucuuuaucc

SEQ ID NO: 2127442 - RNA, 19 nt, Artificial Sequence
  Description of Artificial Sequence: Synthetic oligonucleotide
aaauauauuucaggguagc

SEQ ID NO: 2127443 - RNA, 19 nt, Artificial Sequence
  Description of Artificial Sequence: Synthetic oligonucleotide
aaagcauccaaacacugca

SEQ ID NO: 2127444 - RNA, 19 nt, Artificial Sequence
  Description of Artificial Sequence: Synthetic oligonucleotide
uugauaagcucauagaggu

SEQ ID NO: 2127445 - RNA, 19 nt, Artificial Sequence
  Description of Artificial Sequence: Synthetic oligonucleotide
gaagguaaaauucuccagc

SEQ ID NO: 2127446 - RNA, 19 nt, Artificial Sequence
  Description of Artificial Sequence: Synthetic oligonucleotide
cuugauaagcucauagagg

SEQ ID NO: 2127447 - RNA, 19 nt, Artificial Sequence
  Description of Artificial Sequence: Synthetic oligonucleotide
agaaauauauuucagggua

SEQ ID NO: 2127448 - RNA, 19 nt, Artificial Sequence
  Description of Artificial Sequence: Synthetic oligonucleotide
auaauucucgggcuuaagg

SEQ ID NO: 2127449 - RNA, 19 nt, Artificial Sequence
  Description of Artificial Sequence: Synthetic oligonucleotide
aacacugcaggaucgagug

SEQ ID NO: 2127450 - RNA, 19 nt, Artificial Sequence
  Description of Artificial Sequence: Synthetic oligonucleotide
uaacuaaaauaauucucgg

SEQ ID NO: 2127451 - RNA, 19 nt, Artificial Sequence
  Description of Artificial Sequence: Synthetic oligonucleotide
acuuuaauacugcuucuac

SEQ ID NO: 2127452 - RNA, 19 nt, Artificial Sequence
  Description of Artificial Sequence: Synthetic oligonucleotide
aaggaucacuuccggagcc

SEQ ID NO: 2127453 - RNA, 19 nt, Artificial Sequence
  Description of Artificial Sequence: Synthetic oligonucleotide
uagguuguuuccaagauuc

SEQ ID NO: 2127454 - RNA, 19 nt, Artificial Sequence
  Description of Artificial Sequence: Synthetic oligonucleotide
uaagaguugugacagugca

SEQ ID NO: 2127455 - RNA, 19 nt, Artificial Sequence
  Description of Artificial Sequence: Synthetic oligonucleotide
auacaagcuaguugguccc

SEQ ID NO: 2127456 - RNA, 19 nt, Artificial Sequence
  Description of Artificial Sequence: Synthetic oligonucleotide
uacauaugaucccugguca

SEQ ID NO: 2127457 - RNA, 19 nt, Artificial Sequence
  Description of Artificial Sequence: Synthetic oligonucleotide
aaagucaaucacuuuaaua

SEQ ID NO: 2127458 - RNA, 19 nt, Artificial Sequence
  Description of Artificial Sequence: Synthetic oligonucleotide
cuuuaauacugcuucuacc

SEQ ID NO: 2127459 - RNA, 19 nt, Artificial Sequence
  Description of Artificial Sequence: Synthetic oligonucleotide
ugcauuuggacccaagaaa

SEQ ID NO: 2127460 - RNA, 19 nt, Artificial Sequence
  Description of Artificial Sequence: Synthetic oligonucleotide
accuugaggaccucguacc

SEQ ID NO: 2127461 - RNA, 19 nt, Artificial Sequence
  Description of Artificial Sequence: Synthetic oligonucleotide
uguacguguagacacgcug

SEQ ID NO: 2127462 - RNA, 19 nt, Artificial Sequence
  Description of Artificial Sequence: Synthetic oligonucleotide
ugugcaaagcauccaaaca

SEQ ID NO: 2127463 - RNA, 19 nt, Artificial Sequence
  Description of Artificial Sequence: Synthetic oligonucleotide
ucauagagguucaugcuca

SEQ ID NO: 2127464 - RNA, 19 nt, Artificial Sequence
  Description of Artificial Sequence: Synthetic oligonucleotide
cuucuugauaagcucauag

SEQ ID NO: 2127465 - RNA, 19 nt, Artificial Sequence
  Description of Artificial Sequence: Synthetic oligonucleotide
cauaucaaugggcaugccg

SEQ ID NO: 2127466 - RNA, 19 nt, Artificial Sequence
  Description of Artificial Sequence: Synthetic oligonucleotide
ucguuuggaagcauccagg

SEQ ID NO: 2127467 - RNA, 19 nt, Artificial Sequence
  Description of Artificial Sequence: Synthetic oligonucleotide
augcucagcaacucaaacg

SEQ ID NO: 2127468 - RNA, 19 nt, Artificial Sequence
  Description of Artificial Sequence: Synthetic oligonucleotide
uaauacugcuucuaccuug

SEQ ID NO: 2127469 - RNA, 19 nt, Artificial Sequence
  Description of Artificial Sequence: Synthetic oligonucleotide
gauaagcucauagagguuc

SEQ ID NO: 2127470 - RNA, 19 nt, Artificial Sequence
  Description of Artificial Sequence: Synthetic oligonucleotide
gguaaaauucuccagcaug

SEQ ID NO: 2127471 - RNA, 19 nt, Artificial Sequence
  Description of Artificial Sequence: Synthetic oligonucleotide
acuacugagccauaagagu

SEQ ID NO: 2127472 - RNA, 19 nt, Artificial Sequence
  Description of Artificial Sequence: Synthetic oligonucleotide
caaucauacaagcuaguug

SEQ ID NO: 2127473 - RNA, 19 nt, Artificial Sequence
  Description of Artificial Sequence: Synthetic oligonucleotide
uccguugaggacuacugag

SEQ ID NO: 2127474 - RNA, 19 nt, Artificial Sequence
  Description of Artificial Sequence: Synthetic oligonucleotide
uucuugauaagcucauaga

SEQ ID NO: 2127475 - RNA, 19 nt, Artificial Sequence
  Description of Artificial Sequence: Synthetic oligonucleotide
gugcaaagcauccaaacac

SEQ ID NO: 2127476 - RNA, 19 nt, Artificial Sequence
  Description of Artificial Sequence: Synthetic oligonucleotide
auaggccuugaccaccugc

SEQ ID NO: 2127477 - RNA, 19 nt, Artificial Sequence
  Description of Artificial Sequence: Synthetic oligonucleotide
uaaccugucaggaguuccg

SEQ ID NO: 2127478 - RNA, 19 nt, Artificial Sequence
  Description of Artificial Sequence: Synthetic oligonucleotide
ugcuucaucgcuuguucgg

SEQ ID NO: 2127479 - RNA, 19 nt, Artificial Sequence
  Description of Artificial Sequence: Synthetic oligonucleotide
auccaaacacugcaggauc

SEQ ID NO: 2127480 - RNA, 19 nt, Artificial Sequence
  Description of Artificial Sequence: Synthetic oligonucleotide
auaguguugucuuuauccu

SEQ ID NO: 2127481 - RNA, 19 nt, Artificial Sequence
  Description of Artificial Sequence: Synthetic oligonucleotide
gacuacugagccauaagag

SEQ ID NO: 2127482 - RNA, 19 nt, Artificial Sequence
  Description of Artificial Sequence: Synthetic oligonucleotide
ugcaguaccggggauaacc

SEQ ID NO: 2127483 - RNA, 19 nt, Artificial Sequence
  Description of Artificial Sequence: Synthetic oligonucleotide
agcucaaucauacaagcua

SEQ ID NO: 2127484 - RNA, 19 nt, Artificial Sequence
  Description of Artificial Sequence: Synthetic oligonucleotide
agucaaucacuuuaauacu

SEQ ID NO: 2127485 - RNA, 19 nt, Artificial Sequence
  Description of Artificial Sequence: Synthetic oligonucleotide
uggugcucauaacaacugg

SEQ ID NO: 2127486 - RNA, 19 nt, Artificial Sequence
  Description of Artificial Sequence: Synthetic oligonucleotide
gacuuuguggucauaggcc

SEQ ID NO: 2127487 - RNA, 19 nt, Artificial Sequence
  Description of Artificial Sequence: Synthetic oligonucleotide
uaacccuuggagcucacga

SEQ ID NO: 2127488 - RNA, 19 nt, Artificial Sequence
  Description of Artificial Sequence: Synthetic oligonucleotide
aauauauuucaggguagcu

SEQ ID NO: 2127489 - RNA, 19 nt, Artificial Sequence
  Description of Artificial Sequence: Synthetic oligonucleotide
aaacgucaugcagaugugg

SEQ ID NO: 2127490 - RNA, 19 nt, Artificial Sequence
  Description of Artificial Sequence: Synthetic oligonucleotide
uggaugacguucauagugu

SEQ ID NO: 2127491 - RNA, 19 nt, Artificial Sequence
  Description of Artificial Sequence: Synthetic oligonucleotide
auaagaguugugacagugc

SEQ ID NO: 2127492 - RNA, 19 nt, Artificial Sequence
  Description of Artificial Sequence: Synthetic oligonucleotide
agccacgugaucauggggc

SEQ ID NO: 2127493 - RNA, 19 nt, Artificial Sequence
  Description of Artificial Sequence: Synthetic oligonucleotide
caaacuugcgcaccagagg

SEQ ID NO: 2127494 - RNA, 19 nt, Artificial Sequence
  Description of Artificial Sequence: Synthetic oligonucleotide
aguugugacagugcaguac

SEQ ID NO: 2127495 - RNA, 19 nt, Artificial Sequence
  Description of Artificial Sequence: Synthetic oligonucleotide
uguacauaugaucccuggu

SEQ ID NO: 2127496 - RNA, 19 nt, Artificial Sequence
  Description of Artificial Sequence: Synthetic oligonucleotide
uaagccacgugaucauggg

SEQ ID NO: 2127497 - RNA, 19 nt, Artificial Sequence
  Description of Artificial Sequence: Synthetic oligonucleotide
guaccuguaagccacguga

SEQ ID NO: 2127498 - RNA, 19 nt, Artificial Sequence
  Description of Artificial Sequence: Synthetic oligonucleotide
aaagcuccccuucccaaug

SEQ ID NO: 2127499 - RNA, 19 nt, Artificial Sequence
  Description of Artificial Sequence: Synthetic oligonucleotide
guacauaugaucccugguc

SEQ ID NO: 2127500 - RNA, 19 nt, Artificial Sequence
  Description of Artificial Sequence: Synthetic oligonucleotide
auaucaaugggcaugccgu

SEQ ID NO: 2127501 - RNA, 19 nt, Artificial Sequence
  Description of Artificial Sequence: Synthetic oligonucleotide
augcccaaaagcucaauca

SEQ ID NO: 2127502 - RNA, 19 nt, Artificial Sequence
  Description of Artificial Sequence: Synthetic oligonucleotide
agaguugugacagugcagu

SEQ ID NO: 2127503 - RNA, 19 nt, Artificial Sequence
  Description of Artificial Sequence: Synthetic oligonucleotide
ucaaugggcaugccguacc

SEQ ID NO: 2127504 - RNA, 19 nt, Artificial Sequence
  Description of Artificial Sequence: Synthetic oligonucleotide
agauucggauucuuccuuc

SEQ ID NO: 2127505 - RNA, 19 nt, Artificial Sequence
  Description of Artificial Sequence: Synthetic oligonucleotide
aucgagugggcaaacuugc

SEQ ID NO: 2127506 - RNA, 19 nt, Artificial Sequence
  Description of Artificial Sequence: Synthetic oligonucleotide
augacguucauaguguugu

SEQ ID NO: 2127507 - RNA, 19 nt, Artificial Sequence
  Description of Artificial Sequence: Synthetic oligonucleotide
cuguacauaugaucccugg

SEQ ID NO: 2127508 - RNA, 19 nt, Artificial Sequence
  Description of Artificial Sequence: Synthetic oligonucleotide
uugcggaagguaaaauucu

SEQ ID NO: 2127509 - RNA, 19 nt, Artificial Sequence
  Description of Artificial Sequence: Synthetic oligonucleotide
ugugacagugcaguaccgg

SEQ ID NO: 2127510 - RNA, 19 nt, Artificial Sequence
  Description of Artificial Sequence: Synthetic oligonucleotide
aagccacgugaucaugggg

SEQ ID NO: 2127511 - RNA, 19 nt, Artificial Sequence
  Description of Artificial Sequence: Synthetic oligonucleotide
agccauaagaguugugaca

SEQ ID NO: 2127512 - RNA, 19 nt, Artificial Sequence
  Description of Artificial Sequence: Synthetic oligonucleotide
gaucgagugggcaaacuug

SEQ ID NO: 2127513 - RNA, 19 nt, Artificial Sequence
  Description of Artificial Sequence: Synthetic oligonucleotide
uugcuucaucgcuuguucg

SEQ ID NO: 2127514 - RNA, 19 nt, Artificial Sequence
  Description of Artificial Sequence: Synthetic oligonucleotide
aauaauucucgggcuuaag

SEQ ID NO: 2127515 - RNA, 19 nt, Artificial Sequence
  Description of Artificial Sequence: Synthetic oligonucleotide
uccggagcccgguagaagc

SEQ ID NO: 2127516 - RNA, 19 nt, Artificial Sequence
  Description of Artificial Sequence: Synthetic oligonucleotide
guugcggaagguaaaauuc

SEQ ID NO: 2127517 - RNA, 19 nt, Artificial Sequence
  Description of Artificial Sequence: Synthetic oligonucleotide
cucguuuggaagcauccag

SEQ ID NO: 2127518 - RNA, 19 nt, Artificial Sequence
  Description of Artificial Sequence: Synthetic oligonucleotide
aaccugucaggaguuccgc

SEQ ID NO: 2127519 - RNA, 19 nt, Artificial Sequence
  Description of Artificial Sequence: Synthetic oligonucleotide
aggaccucguaccuguaag

SEQ ID NO: 2127520 - RNA, 19 nt, Artificial Sequence
  Description of Artificial Sequence: Synthetic oligonucleotide
ugcccaaaagcucaaucau

SEQ ID NO: 2127521 - RNA, 19 nt, Artificial Sequence
  Description of Artificial Sequence: Synthetic oligonucleotide
guagaagcgcgacuggaug

SEQ ID NO: 2127522 - RNA, 19 nt, Artificial Sequence
  Description of Artificial Sequence: Synthetic oligonucleotide
ggaagguaaaauucuccag

SEQ ID NO: 2127523 - RNA, 19 nt, Artificial Sequence
  Description of Artificial Sequence: Synthetic oligonucleotide
gagugggcaaacuugcgca

SEQ ID NO: 2127524 - RNA, 19 nt, Artificial Sequence
  Description of Artificial Sequence: Synthetic oligonucleotide
guacguguagacacgcugg

SEQ ID NO: 2127525 - RNA, 19 nt, Artificial Sequence
  Description of Artificial Sequence: Synthetic oligonucleotide
cacauaucaaugggcaugc

SEQ ID NO: 2127526 - RNA, 19 nt, Artificial Sequence
  Description of Artificial Sequence: Synthetic oligonucleotide
uuuggacccaagaaauaua

SEQ ID NO: 2127527 - RNA, 19 nt, Artificial Sequence
  Description of Artificial Sequence: Synthetic oligonucleotide
gacccaagaaauauauuuc

SEQ ID NO: 2127528 - RNA, 19 nt, Artificial Sequence
  Description of Artificial Sequence: Synthetic oligonucleotide
gagccauaagaguugugac

SEQ ID NO: 2127529 - RNA, 19 nt, Artificial Sequence
  Description of Artificial Sequence: Synthetic oligonucleotide
aguuccgcgaggaugcaac

SEQ ID NO: 2127530 - RNA, 19 nt, Artificial Sequence
  Description of Artificial Sequence: Synthetic oligonucleotide
gauguacguguagacacgc

SEQ ID NO: 2127531 - RNA, 19 nt, Artificial Sequence
  Description of Artificial Sequence: Synthetic oligonucleotide
auauauuucaggguagcua

SEQ ID NO: 2127532 - RNA, 19 nt, Artificial Sequence
  Description of Artificial Sequence: Synthetic oligonucleotide
uuaauacugcuucuaccuu

SEQ ID NO: 2127533 - RNA, 19 nt, Artificial Sequence
  Description of Artificial Sequence: Synthetic oligonucleotide
uccuucugccgccugccgg

SEQ ID NO: 2127534 - RNA, 19 nt, Artificial Sequence
  Description of Artificial Sequence: Synthetic oligonucleotide
uaaaauucuccagcaugug

SEQ ID NO: 2127535 - RNA, 19 nt, Artificial Sequence
  Description of Artificial Sequence: Synthetic oligonucleotide
uugugacagugcaguaccg

SEQ ID NO: 2127536 - RNA, 19 nt, Artificial Sequence
  Description of Artificial Sequence: Synthetic oligonucleotide
ucuuuauccugcuuccgua

SEQ ID NO: 2127537 - RNA, 19 nt, Artificial Sequence
  Description of Artificial Sequence: Synthetic oligonucleotide
gaucggaccuccguugagg

SEQ ID NO: 2127538 - RNA, 19 nt, Artificial Sequence
  Description of Artificial Sequence: Synthetic oligonucleotide
ccaaggaucacuuccggag

SEQ ID NO: 2127539 - RNA, 19 nt, Artificial Sequence
  Description of Artificial Sequence: Synthetic oligonucleotide
gaccuugaggaccucguac

SEQ ID NO: 2127540 - RNA, 19 nt, Artificial Sequence
  Description of Artificial Sequence: Synthetic oligonucleotide
uccgcgaggaugcaaccca

SEQ ID NO: 2127541 - RNA, 19 nt, Artificial Sequence
  Description of Artificial Sequence: Synthetic oligonucleotide
guuuggaagcauccaggag

SEQ ID NO: 2127542 - RNA, 19 nt, Artificial Sequence
  Description of Artificial Sequence: Synthetic oligonucleotide
aacgucaugcagauguggu

SEQ ID NO: 2127543 - RNA, 19 nt, Artificial Sequence
  Description of Artificial Sequence: Synthetic oligonucleotide
ucacuuuaauacugcuucu

SEQ ID NO: 2127544 - RNA, 19 nt, Artificial Sequence
  Description of Artificial Sequence: Synthetic oligonucleotide
caaggaucacuuccggagc

SEQ ID NO: 2127545 - RNA, 19 nt, Artificial Sequence
  Description of Artificial Sequence: Synthetic oligonucleotide
ucgagugggcaaacuugcg

SEQ ID NO: 2127546 - RNA, 19 nt, Artificial Sequence
  Description of Artificial Sequence: Synthetic oligonucleotide
uucaucgcuuguucgggug

SEQ ID NO: 2127547 - RNA, 19 nt, Artificial Sequence
  Description of Artificial Sequence: Synthetic oligonucleotide
cccaaaagcucaaucauac

SEQ ID NO: 2127548 - RNA, 19 nt, Artificial Sequence
  Description of Artificial Sequence: Synthetic oligonucleotide
uguuggguccaccugucau

SEQ ID NO: 2127549 - RNA, 19 nt, Artificial Sequence
  Description of Artificial Sequence: Synthetic oligonucleotide
guuguuuccaagauucgga

SEQ ID NO: 2127550 - RNA, 19 nt, Artificial Sequence
  Description of Artificial Sequence: Synthetic oligonucleotide
aaucacuuuaauacugcuu

SEQ ID NO: 2127551 - RNA, 19 nt, Artificial Sequence
  Description of Artificial Sequence: Synthetic oligonucleotide
caugcucagcaacucaaac

SEQ ID NO: 2127552 - RNA, 19 nt, Artificial Sequence
  Description of Artificial Sequence: Synthetic oligonucleotide
aaacacugcaggaucgagu

SEQ ID NO: 2127553 - RNA, 19 nt, Artificial Sequence
  Description of Artificial Sequence: Synthetic oligonucleotide
uagaagcgcgacuggaugu

SEQ ID NO: 2127554 - RNA, 19 nt, Artificial Sequence
  Description of Artificial Sequence: Synthetic oligonucleotide
ugcggaagguaaaauucuc

SEQ ID NO: 2127555 - RNA, 19 nt, Artificial Sequence
  Description of Artificial Sequence: Synthetic oligonucleotide
gguuguuuccaagauucgg

SEQ ID NO: 2127556 - RNA, 19 nt, Artificial Sequence
  Description of Artificial Sequence: Synthetic oligonucleotide
aaaaucucaugguguucaa

SEQ ID NO: 2127557 - RNA, 19 nt, Artificial Sequence
  Description of Artificial Sequence: Synthetic oligonucleotide
ucaaucauacaagcuaguu

SEQ ID NO: 2127558 - RNA, 19 nt, Artificial Sequence
  Description of Artificial Sequence: Synthetic oligonucleotide
cuaaaauaauucucgggcu

SEQ ID NO: 2127559 - RNA, 19 nt, Artificial Sequence
  Description of Artificial Sequence: Synthetic oligonucleotide
auaugaucccuggucauca

SEQ ID NO: 2127560 - RNA, 19 nt, Artificial Sequence
  Description of Artificial Sequence: Synthetic oligonucleotide
auagagguucaugcucagc

SEQ ID NO: 2127561 - RNA, 19 nt, Artificial Sequence
  Description of Artificial Sequence: Synthetic oligonucleotide
aagaguugugacagugcag

SEQ ID NO: 2127562 - RNA, 19 nt, Artificial Sequence
  Description of Artificial Sequence: Synthetic oligonucleotide
augaucccuggucaucauc

SEQ ID NO: 2127563 - RNA, 19 nt, Artificial Sequence
  Description of Artificial Sequence: Synthetic oligonucleotide
ucauaggccuugaccaccu

SEQ ID NO: 2127564 - RNA, 19 nt, Artificial Sequence
  Description of Artificial Sequence: Synthetic oligonucleotide
gaccucguaccuguaagcc

SEQ ID NO: 2127565 - RNA, 19 nt, Artificial Sequence
  Description of Artificial Sequence: Synthetic oligonucleotide
aacccuuggagcucacgaa

SEQ ID NO: 2127566 - RNA, 19 nt, Artificial Sequence
  Description of Artificial Sequence: Synthetic oligonucleotide
aucaaugggcaugccguac

SEQ ID NO: 2127567 - RNA, 19 nt, Artificial Sequence
  Description of Artificial Sequence: Synthetic oligonucleotide
cuggugcucauaacaacug

SEQ ID NO: 2127568 - RNA, 19 nt, Artificial Sequence
  Description of Artificial Sequence: Synthetic oligonucleotide
ucauacaagcuaguugguc

SEQ ID NO: 2127569 - RNA, 19 nt, Artificial Sequence
  Description of Artificial Sequence: Synthetic oligonucleotide
ucauggggcaccuguacau

SEQ ID NO: 2127570 - RNA, 19 nt, Artificial Sequence
  Description of Artificial Sequence: Synthetic oligonucleotide
ucguuccgcaccaucuuca

SEQ ID NO: 2127571 - RNA, 19 nt, Artificial Sequence
  Description of Artificial Sequence: Synthetic oligonucleotide
gaugacguucauaguguug

SEQ ID NO: 2127572 - RNA, 19 nt, Artificial Sequence
  Description of Artificial Sequence: Synthetic oligonucleotide
uacguguagacacgcuggu

SEQ ID NO: 2127573 - RNA, 19 nt, Artificial Sequence
  Description of Artificial Sequence: Synthetic oligonucleotide
agcgcuucucguuccgcac

SEQ ID NO: 2127574 - RNA, 19 nt, Artificial Sequence
  Description of Artificial Sequence: Synthetic oligonucleotide
uccguagguuguuuccaag

SEQ ID NO: 2127575 - RNA, 19 nt, Artificial Sequence
  Description of Artificial Sequence: Synthetic oligonucleotide
gcauguauugcuucaucgc

SEQ ID NO: 2127576 - RNA, 19 nt, Artificial Sequence
  Description of Artificial Sequence: Synthetic oligonucleotide
aaauaauucucgggcuuaa

SEQ ID NO: 2127577 - RNA, 19 nt, Artificial Sequence
  Description of Artificial Sequence: Synthetic oligonucleotide
caugcccaaaagcucaauc

SEQ ID NO: 2127578 - RNA, 19 nt, Artificial Sequence
  Description of Artificial Sequence: Synthetic oligonucleotide
aagcgcuucucguuccgca

SEQ ID NO: 2127579 - RNA, 19 nt, Artificial Sequence
  Description of Artificial Sequence: Synthetic oligonucleotide
acguucauaguguugucuu

SEQ ID NO: 2127580 - RNA, 19 nt, Artificial Sequence
  Description of Artificial Sequence: Synthetic oligonucleotide
uucaaaggcugugaguuuu

SEQ ID NO: 2127581 - RNA, 19 nt, Artificial Sequence
  Description of Artificial Sequence: Synthetic oligonucleotide
ucaucgcuuguucgggugu

SEQ ID NO: 2127582 - RNA, 19 nt, Artificial Sequence
  Description of Artificial Sequence: Synthetic oligonucleotide
uuuggcucguuuggaagca

SEQ ID NO: 2127583 - RNA, 19 nt, Artificial Sequence
  Description of Artificial Sequence: Synthetic oligonucleotide
uuggguccaccugucaugc

SEQ ID NO: 2127584 - RNA, 19 nt, Artificial Sequence
  Description of Artificial Sequence: Synthetic oligonucleotide
aggaguuucugggagggca

SEQ ID NO: 2127585 - RNA, 19 nt, Artificial Sequence
  Description of Artificial Sequence: Synthetic oligonucleotide
ugccuuggcguuucuuugc

SEQ ID NO: 2127586 - RNA, 19 nt, Artificial Sequence
  Description of Artificial Sequence: Synthetic oligonucleotide
aagcucaaucauacaagcu

SEQ ID NO: 2127587 - RNA, 19 nt, Artificial Sequence
  Description of Artificial Sequence: Synthetic oligonucleotide
uaccuggcuccaaggauca

SEQ ID NO: 2127588 - RNA, 19 nt, Artificial Sequence
  Description of Artificial Sequence: Synthetic oligonucleotide
guaaccugucaggaguucc

SEQ ID NO: 2127589 - RNA, 19 nt, Artificial Sequence
  Description of Artificial Sequence: Synthetic oligonucleotide
caccuguacauaugauccc

SEQ ID NO: 2127590 - RNA, 19 nt, Artificial Sequence
  Description of Artificial Sequence: Synthetic oligonucleotide
accugucaggaguuccgcg

SEQ ID NO: 2127591 - RNA, 19 nt, Artificial Sequence
  Description of Artificial Sequence: Synthetic oligonucleotide
ggacuacugagccauaaga

SEQ ID NO: 2127592 - RNA, 19 nt, Artificial Sequence
  Description of Artificial Sequence: Synthetic oligonucleotide
cacgcuggugcucauaaca

SEQ ID NO: 2127593 - RNA, 19 nt, Artificial Sequence
  Description of Artificial Sequence: Synthetic oligonucleotide
acuugcgcaccagaggcag

SEQ ID NO: 2127594 - RNA, 19 nt, Artificial Sequence
  Description of Artificial Sequence: Synthetic oligonucleotide
ggcguuucuuugcauuugg

SEQ ID NO: 2127595 - RNA, 19 nt, Artificial Sequence
  Description of Artificial Sequence: Synthetic oligonucleotide
cccaagaaauauauuucag

SEQ ID NO: 2127596 - RNA, 19 nt, Artificial Sequence
  Description of Artificial Sequence: Synthetic oligonucleotide
uccacauaucaaugggcau

SEQ ID NO: 2127597 - RNA, 19 nt, Artificial Sequence
  Description of Artificial Sequence: Synthetic oligonucleotide
cucucugcucucuggcggg

SEQ ID NO: 2127598 - RNA, 19 nt, Artificial Sequence
  Description of Artificial Sequence: Synthetic oligonucleotide
accugucaugccuuggcgu

SEQ ID NO: 2127599 - RNA, 19 nt, Artificial Sequence
  Description of Artificial Sequence: Synthetic oligonucleotide
cauagagguucaugcucag

SEQ ID NO: 2127600 - RNA, 19 nt, Artificial Sequence
  Description of Artificial Sequence: Synthetic oligonucleotide
agguaaaauucuccagcau

SEQ ID NO: 2127601 - RNA, 19 nt, Artificial Sequence
  Description of Artificial Sequence: Synthetic oligonucleotide
accuguacauaugaucccu

SEQ ID NO: 2127602 - RNA, 19 nt, Artificial Sequence
  Description of Artificial Sequence: Synthetic oligonucleotide
accucguaccuguaagcca

SEQ ID NO: 2127603 - RNA, 19 nt, Artificial Sequence
  Description of Artificial Sequence: Synthetic oligonucleotide
uaccuguaagccacgugau

SEQ ID NO: 2127604 - RNA, 19 nt, Artificial Sequence
  Description of Artificial Sequence: Synthetic oligonucleotide
uuggcguuucuuugcauuu

SEQ ID NO: 2127605 - RNA, 19 nt, Artificial Sequence
  Description of Artificial Sequence: Synthetic oligonucleotide
agggcaugcccaaaagcuc

SEQ ID NO: 2127606 - RNA, 19 nt, Artificial Sequence
  Description of Artificial Sequence: Synthetic oligonucleotide
ugaucauggggcaccugua

SEQ ID NO: 2127607 - RNA, 19 nt, Artificial Sequence
  Description of Artificial Sequence: Synthetic oligonucleotide
cacgugaucauggggcacc

SEQ ID NO: 2127608 - RNA, 19 nt, Artificial Sequence
  Description of Artificial Sequence: Synthetic oligonucleotide
aagcgcgacuggauguacg

SEQ ID NO: 2127609 - RNA, 19 nt, Artificial Sequence
  Description of Artificial Sequence: Synthetic oligonucleotide
ggacccaagaaauauauuu

SEQ ID NO: 2127610 - RNA, 19 nt, Artificial Sequence
  Description of Artificial Sequence: Synthetic oligonucleotide
agcgcgacuggauguacgu

SEQ ID NO: 2127611 - RNA, 19 nt, Artificial Sequence
  Description of Artificial Sequence: Synthetic oligonucleotide
aucggaccuccguugagga

SEQ ID NO: 2127612 - RNA, 19 nt, Artificial Sequence
  Description of Artificial Sequence: Synthetic oligonucleotide
cuugcugcuuuaacuaaaa

SEQ ID NO: 2127613 - RNA, 19 nt, Artificial Sequence
  Description of Artificial Sequence: Synthetic oligonucleotide
ugggagggcaugcccaaaa

SEQ ID NO: 2127614 - RNA, 19 nt, Artificial Sequence
  Description of Artificial Sequence: Synthetic oligonucleotide
guaccuggcuccaaggauc

SEQ ID NO: 2127615 - RNA, 19 nt, Artificial Sequence
  Description of Artificial Sequence: Synthetic oligonucleotide
uguggucauaggccuugac

SEQ ID NO: 2127616 - RNA, 19 nt, Artificial Sequence
  Description of Artificial Sequence: Synthetic oligonucleotide
acccuuggagcucacgaaa

SEQ ID NO: 2127617 - RNA, 19 nt, Artificial Sequence
  Description of Artificial Sequence: Synthetic oligonucleotide
ucgggcuuaaggucacagu

SEQ ID NO: 2127618 - RNA, 19 nt, Artificial Sequence
  Description of Artificial Sequence: Synthetic oligonucleotide
acauaucaaugggcaugcc

SEQ ID NO: 2127619 - RNA, 19 nt, Artificial Sequence
  Description of Artificial Sequence: Synthetic oligonucleotide
guggaagcgcuucucguuc

SEQ ID NO: 2127620 - RNA, 19 nt, Artificial Sequence
  Description of Artificial Sequence: Synthetic oligonucleotide
aagcuccccuucccaauga

SEQ ID NO: 2127621 - RNA, 19 nt, Artificial Sequence
  Description of Artificial Sequence: Synthetic oligonucleotide
ccucguaccuguaagccac

SEQ ID NO: 2127622 - RNA, 19 nt, Artificial Sequence
  Description of Artificial Sequence: Synthetic oligonucleotide
auaacccuuggagcucacg

SEQ ID NO: 2127623 - RNA, 19 nt, Artificial Sequence
  Description of Artificial Sequence: Synthetic oligonucleotide
acacgcuggugcucauaac

SEQ ID NO: 2127624 - RNA, 19 nt, Artificial Sequence
  Description of Artificial Sequence: Synthetic oligonucleotide
uuccguagguuguuuccaa

SEQ ID NO: 2127625 - RNA, 19 nt, Artificial Sequence
  Description of Artificial Sequence: Synthetic oligonucleotide
ccggggauaacccuuggag

SEQ ID NO: 2127626 - RNA, 19 nt, Artificial Sequence
  Description of Artificial Sequence: Synthetic oligonucleotide
ugggcaugccguaccuggc

SEQ ID NO: 2127627 - RNA, 19 nt, Artificial Sequence
  Description of Artificial Sequence: Synthetic oligonucleotide
uccgggaucggaccuccgu

SEQ ID NO: 2127628 - RNA, 19 nt, Artificial Sequence
  Description of Artificial Sequence: Synthetic oligonucleotide
ccuggucaucaucauaacc

SEQ ID NO: 2127629 - RNA, 19 nt, Artificial Sequence
  Description of Artificial Sequence: Synthetic oligonucleotide
augguguucaaaggcugug

SEQ ID NO: 2127630 - RNA, 19 nt, Artificial Sequence
  Description of Artificial Sequence: Synthetic oligonucleotide
cuacugagccauaagaguu

SEQ ID NO: 2127631 - RNA, 19 nt, Artificial Sequence
  Description of Artificial Sequence: Synthetic oligonucleotide
cuuaaggucacaguggauu

SEQ ID NO: 2127632 - RNA, 19 nt, Artificial Sequence
  Description of Artificial Sequence: Synthetic oligonucleotide
aggucacaguggauuauuc

SEQ ID NO: 2127633 - RNA, 19 nt, Artificial Sequence
  Description of Artificial Sequence: Synthetic oligonucleotide
uaccggggauaacccuugg

SEQ ID NO: 2127634 - RNA, 19 nt, Artificial Sequence
  Description of Artificial Sequence: Synthetic oligonucleotide
agugcaguaccggggauaa

SEQ ID NO: 2127635 - RNA, 19 nt, Artificial Sequence
  Description of Artificial Sequence: Synthetic oligonucleotide
gcuuccguagguuguuucc

SEQ ID NO: 2127636 - RNA, 19 nt, Artificial Sequence
  Description of Artificial Sequence: Synthetic oligonucleotide
agguuguuuccaagauucg

SEQ ID NO: 2127637 - RNA, 19 nt, Artificial Sequence
  Description of Artificial Sequence: Synthetic oligonucleotide
ucugccgccugccggugga

SEQ ID NO: 2127638 - RNA, 19 nt, Artificial Sequence
  Description of Artificial Sequence: Synthetic oligonucleotide
auaagcucauagagguuca

SEQ ID NO: 2127639 - RNA, 19 nt, Artificial Sequence
  Description of Artificial Sequence: Synthetic oligonucleotide
acuuccggagcccgguaga

SEQ ID NO: 2127640 - RNA, 19 nt, Artificial Sequence
  Description of Artificial Sequence: Synthetic oligonucleotide
uacaagcuaguuggucccc

SEQ ID NO: 2127641 - RNA, 19 nt, Artificial Sequence
  Description of Artificial Sequence: Synthetic oligonucleotide
ugcuuccguagguuguuuc

SEQ ID NO: 2127642 - RNA, 19 nt, Artificial Sequence
  Description of Artificial Sequence: Synthetic oligonucleotide
ucccucuccgggaucggac

SEQ ID NO: 2127643 - RNA, 19 nt, Artificial Sequence
  Description of Artificial Sequence: Synthetic oligonucleotide
uggacccaagaaauauauu

SEQ ID NO: 2127644 - RNA, 19 nt, Artificial Sequence
  Description of Artificial Sequence: Synthetic oligonucleotide
uuccgcgaggaugcaaccc

SEQ ID NO: 2127645 - RNA, 19 nt, Artificial Sequence
  Description of Artificial Sequence: Synthetic oligonucleotide
gauucggauucuuccuucu

SEQ ID NO: 2127646 - RNA, 19 nt, Artificial Sequence
  Description of Artificial Sequence: Synthetic oligonucleotide
uggcguuucuuugcauuug

SEQ ID NO: 2127647 - RNA, 19 nt, Artificial Sequence
  Description of Artificial Sequence: Synthetic oligonucleotide
ugaccuugaggaccucgua

SEQ ID NO: 2127648 - RNA, 19 nt, Artificial Sequence
  Description of Artificial Sequence: Synthetic oligonucleotide
gcuucaucgcuuguucggg

SEQ ID NO: 2127649 - RNA, 19 nt, Artificial Sequence
  Description of Artificial Sequence: Synthetic oligonucleotide
uggcucguuuggaagcauc

SEQ ID NO: 2127650 - RNA, 19 nt, Artificial Sequence
  Description of Artificial Sequence: Synthetic oligonucleotide
ccacauaucaaugggcaug

SEQ ID NO: 2127651 - RNA, 19 nt, Artificial Sequence
  Description of Artificial Sequence: Synthetic oligonucleotide
auggggcaccuguacauau

SEQ ID NO: 2127652 - RNA, 19 nt, Artificial Sequence
  Description of Artificial Sequence: Synthetic oligonucleotide
cucguaccuguaagccacg

SEQ ID NO: 2127653 - RNA, 19 nt, Artificial Sequence
  Description of Artificial Sequence: Synthetic oligonucleotide
ggaccucguaccuguaagc

SEQ ID NO: 2127654 - RNA, 19 nt, Artificial Sequence
  Description of Artificial Sequence: Synthetic oligonucleotide
ggggauaacccuuggagcu

SEQ ID NO: 2127655 - RNA, 19 nt, Artificial Sequence
  Description of Artificial Sequence: Synthetic oligonucleotide
acgucaugcagaugugguu

SEQ ID NO: 2127656 - RNA, 19 nt, Artificial Sequence
  Description of Artificial Sequence: Synthetic oligonucleotide
ugacguucauaguguuguc

SEQ ID NO: 2127657 - RNA, 19 nt, Artificial Sequence
  Description of Artificial Sequence: Synthetic oligonucleotide
ccguugaggacuacugagc

SEQ ID NO: 2127658 - RNA, 19 nt, Artificial Sequence
  Description of Artificial Sequence: Synthetic oligonucleotide
gucuuuauccugcuuccgu

SEQ ID NO: 2127659 - RNA, 19 nt, Artificial Sequence
  Description of Artificial Sequence: Synthetic oligonucleotide
gcgaggaugcaacccaggc

SEQ ID NO: 2127660 - RNA, 19 nt, Artificial Sequence
  Description of Artificial Sequence: Synthetic oligonucleotide
guuccgcgaggaugcaacc

SEQ ID NO: 2127661 - RNA, 19 nt, Artificial Sequence
  Description of Artificial Sequence: Synthetic oligonucleotide
uaugaucccuggucaucau

SEQ ID NO: 2127662 - RNA, 19 nt, Artificial Sequence
  Description of Artificial Sequence: Synthetic oligonucleotide
ggugcucauaacaacugga

SEQ ID NO: 2127663 - RNA, 19 nt, Artificial Sequence
  Description of Artificial Sequence: Synthetic oligonucleotide
auguauugcuucaucgcuu

SEQ ID NO: 2127664 - RNA, 19 nt, Artificial Sequence
  Description of Artificial Sequence: Synthetic oligonucleotide
ucuccgggaucggaccucc

SEQ ID NO: 2127665 - RNA, 19 nt, Artificial Sequence
  Description of Artificial Sequence: Synthetic oligonucleotide
caguggauuauucuguuuu

SEQ ID NO: 2127666 - RNA, 19 nt, Artificial Sequence
  Description of Artificial Sequence: Synthetic oligonucleotide
cauaacaacuggagccaaa

SEQ ID NO: 2127667 - RNA, 19 nt, Artificial Sequence
  Description of Artificial Sequence: Synthetic oligonucleotide
agcccgguagaagcgcgac

SEQ ID NO: 2127668 - RNA, 19 nt, Artificial Sequence
  Description of Artificial Sequence: Synthetic oligonucleotide
gcuccacauaucaaugggc

SEQ ID NO: 2127669 - RNA, 19 nt, Artificial Sequence
  Description of Artificial Sequence: Synthetic oligonucleotide
ggaagcgcuucucguuccg

SEQ ID NO: 2127670 - RNA, 19 nt, Artificial Sequence
  Description of Artificial Sequence: Synthetic oligonucleotide
gacguucauaguguugucu

SEQ ID NO: 2127671 - RNA, 19 nt, Artificial Sequence
  Description of Artificial Sequence: Synthetic oligonucleotide
ugucaugccuuggcguuuc

SEQ ID NO: 2127672 - RNA, 19 nt, Artificial Sequence
  Description of Artificial Sequence: Synthetic oligonucleotide
gaguuucugggagggcaug

SEQ ID NO: 2127673 - RNA, 19 nt, Artificial Sequence
  Description of Artificial Sequence: Synthetic oligonucleotide
ggucauaggccuugaccac

SEQ ID NO: 2127674 - RNA, 19 nt, Artificial Sequence
  Description of Artificial Sequence: Synthetic oligonucleotide
ucuggcgggcccuccaguu

SEQ ID NO: 2127675 - RNA, 19 nt, Artificial Sequence
  Description of Artificial Sequence: Synthetic oligonucleotide
aucauacaagcuaguuggu

SEQ ID NO: 2127676 - RNA, 19 nt, Artificial Sequence
  Description of Artificial Sequence: Synthetic oligonucleotide
ggaucacuuccggagcccg

SEQ ID NO: 2127677 - RNA, 19 nt, Artificial Sequence
  Description of Artificial Sequence: Synthetic oligonucleotide
ccuccguugaggacuacug

SEQ ID NO: 2127678 - RNA, 19 nt, Artificial Sequence
  Description of Artificial Sequence: Synthetic oligonucleotide
ggcucguuuggaagcaucc

SEQ ID NO: 2127679 - RNA, 19 nt, Artificial Sequence
  Description of Artificial Sequence: Synthetic oligonucleotide
cuuccguagguuguuucca

SEQ ID NO: 2127680 - RNA, 19 nt, Artificial Sequence
  Description of Artificial Sequence: Synthetic oligonucleotide
gcaacucaaacgucaugca

SEQ ID NO: 2127681 - RNA, 19 nt, Artificial Sequence
  Description of Artificial Sequence: Synthetic oligonucleotide
gggguaaccugucaggagu

SEQ ID NO: 2127682 - RNA, 19 nt, Artificial Sequence
  Description of Artificial Sequence: Synthetic oligonucleotide
gaggaccucguaccuguaa

SEQ ID NO: 2127683 - RNA, 19 nt, Artificial Sequence
  Description of Artificial Sequence: Synthetic oligonucleotide
cuccguugaggacuacuga

SEQ ID NO: 2127684 - RNA, 19 nt, Artificial Sequence
  Description of Artificial Sequence: Synthetic oligonucleotide
cggggauaacccuuggagc

SEQ ID NO: 2127685 - RNA, 19 nt, Artificial Sequence
  Description of Artificial Sequence: Synthetic oligonucleotide
gggagggcaugcccaaaag

SEQ ID NO: 2127686 - RNA, 19 nt, Artificial Sequence
  Description of Artificial Sequence: Synthetic oligonucleotide
uucuaccuugcugcuuuaa

SEQ ID NO: 2127687 - RNA, 19 nt, Artificial Sequence
  Description of Artificial Sequence: Synthetic oligonucleotide
uuucccucuccgggaucgg

SEQ ID NO: 2127688 - RNA, 19 nt, Artificial Sequence
  Description of Artificial Sequence: Synthetic oligonucleotide
ugguugcggaagguaaaau

SEQ ID NO: 2127689 - RNA, 19 nt, Artificial Sequence
  Description of Artificial Sequence: Synthetic oligonucleotide
uaagcucauagagguucau

SEQ ID NO: 2127690 - RNA, 19 nt, Artificial Sequence
  Description of Artificial Sequence: Synthetic oligonucleotide
agaugugguugcggaaggu

SEQ ID NO: 2127691 - RNA, 19 nt, Artificial Sequence
  Description of Artificial Sequence: Synthetic oligonucleotide
gaagcgcgacuggauguac

SEQ ID NO: 2127692 - RNA, 19 nt, Artificial Sequence
  Description of Artificial Sequence: Synthetic oligonucleotide
ucggaccuccguugaggac

SEQ ID NO: 2127693 - RNA, 19 nt, Artificial Sequence
  Description of Artificial Sequence: Synthetic oligonucleotide
guguucaaaggcugugagu

SEQ ID NO: 2127694 - RNA, 19 nt, Artificial Sequence
  Description of Artificial Sequence: Synthetic oligonucleotide
caugguguucaaaggcugu

SEQ ID NO: 2127695 - RNA, 19 nt, Artificial Sequence
  Description of Artificial Sequence: Synthetic oligonucleotide
accuccguugaggacuacu

SEQ ID NO: 2127696 - RNA, 19 nt, Artificial Sequence
  Description of Artificial Sequence: Synthetic oligonucleotide
ucguaccuguaagccacgu

SEQ ID NO: 2127697 - RNA, 19 nt, Artificial Sequence
  Description of Artificial Sequence: Synthetic oligonucleotide
caugccuuggcguuucuuu

SEQ ID NO: 2127698 - RNA, 19 nt, Artificial Sequence
  Description of Artificial Sequence: Synthetic oligonucleotide
cuuggcguuucuuugcauu

SEQ ID NO: 2127699 - RNA, 19 nt, Artificial Sequence
  Description of Artificial Sequence: Synthetic oligonucleotide
gaguugugacagugcagua

SEQ ID NO: 2127700 - RNA, 19 nt, Artificial Sequence
  Description of Artificial Sequence: Synthetic oligonucleotide
gcaguaccggggauaaccc

SEQ ID NO: 2127701 - RNA, 19 nt, Artificial Sequence
  Description of Artificial Sequence: Synthetic oligonucleotide
agaagcgcgacuggaugua

SEQ ID NO: 2127702 - RNA, 19 nt, Artificial Sequence
  Description of Artificial Sequence: Synthetic oligonucleotide
cucaaucauacaagcuagu

SEQ ID NO: 2127703 - RNA, 19 nt, Artificial Sequence
  Description of Artificial Sequence: Synthetic oligonucleotide
gguugcggaagguaaaauu

SEQ ID NO: 2127704 - RNA, 19 nt, Artificial Sequence
  Description of Artificial Sequence: Synthetic oligonucleotide
caggcugaagcccuggaau

SEQ ID NO: 2127705 - RNA, 19 nt, Artificial Sequence
  Description of Artificial Sequence: Synthetic oligonucleotide
acgcuggugcucauaacaa

SEQ ID NO: 2127706 - RNA, 19 nt, Artificial Sequence
  Description of Artificial Sequence: Synthetic oligonucleotide
ucacuuccggagcccggua

SEQ ID NO: 2127707 - RNA, 19 nt, Artificial Sequence
  Description of Artificial Sequence: Synthetic oligonucleotide
uucccucuccgggaucgga

SEQ ID NO: 2127708 - RNA, 19 nt, Artificial Sequence
  Description of Artificial Sequence: Synthetic oligonucleotide
ccugucaggaguuccgcga

SEQ ID NO: 2127709 - RNA, 19 nt, Artificial Sequence
  Description of Artificial Sequence: Synthetic oligonucleotide
ccgguggaagcgcuucucg

SEQ ID NO: 2127710 - RNA, 19 nt, Artificial Sequence
  Description of Artificial Sequence: Synthetic oligonucleotide
caucgcuuguucggguguc

SEQ ID NO: 2127711 - RNA, 19 nt, Artificial Sequence
  Description of Artificial Sequence: Synthetic oligonucleotide
ggauaacccuuggagcuca

SEQ ID NO: 2127712 - RNA, 19 nt, Artificial Sequence
  Description of Artificial Sequence: Synthetic oligonucleotide
gcuggugcucauaacaacu

SEQ ID NO: 2127713 - RNA, 19 nt, Artificial Sequence
  Description of Artificial Sequence: Synthetic oligonucleotide
cucaaacgucaugcagaug

SEQ ID NO: 2127714 - RNA, 19 nt, Artificial Sequence
  Description of Artificial Sequence: Synthetic oligonucleotide
cuuggagcucacgaaauuu

SEQ ID NO: 2127715 - RNA, 19 nt, Artificial Sequence
  Description of Artificial Sequence: Synthetic oligonucleotide
cauaggccuugaccaccug

SEQ ID NO: 2127716 - RNA, 19 nt, Artificial Sequence
  Description of Artificial Sequence: Synthetic oligonucleotide
uggcuccaaggaucacuuc

SEQ ID NO: 2127717 - RNA, 19 nt, Artificial Sequence
  Description of Artificial Sequence: Synthetic oligonucleotide
ugcuucuaccuugcugcuu

SEQ ID NO: 2127718 - RNA, 19 nt, Artificial Sequence
  Description of Artificial Sequence: Synthetic oligonucleotide
caggaguuucugggagggc

SEQ ID NO: 2127719 - RNA, 19 nt, Artificial Sequence
  Description of Artificial Sequence: Synthetic oligonucleotide
ggcaugccguaccuggcuc

SEQ ID NO: 2127720 - RNA, 19 nt, Artificial Sequence
  Description of Artificial Sequence: Synthetic oligonucleotide
ccggagcccgguagaagcg

SEQ ID NO: 2127721 - RNA, 19 nt, Artificial Sequence
  Description of Artificial Sequence: Synthetic oligonucleotide
acgugaucauggggcaccu

SEQ ID NO: 2127722 - RNA, 19 nt, Artificial Sequence
  Description of Artificial Sequence: Synthetic oligonucleotide
cccucuccgggaucggacc

SEQ ID NO: 2127723 - RNA, 19 nt, Artificial Sequence
  Description of Artificial Sequence: Synthetic oligonucleotide
gccacgugaucauggggca

SEQ ID NO: 2127724 - RNA, 19 nt, Artificial Sequence
  Description of Artificial Sequence: Synthetic oligonucleotide
gggaucggaccuccguuga

SEQ ID NO: 2127725 - RNA, 19 nt, Artificial Sequence
  Description of Artificial Sequence: Synthetic oligonucleotide
caggaucgagugggcaaac

SEQ ID NO: 2127726 - RNA, 19 nt, Artificial Sequence
  Description of Artificial Sequence: Synthetic oligonucleotide
ggguccaccugucaugccu

SEQ ID NO: 2127727 - RNA, 19 nt, Artificial Sequence
  Description of Artificial Sequence: Synthetic oligonucleotide
gaucccuggucaucaucau

SEQ ID NO: 2127728 - RNA, 19 nt, Artificial Sequence
  Description of Artificial Sequence: Synthetic oligonucleotide
ccaguuucccucuccggga

SEQ ID NO: 2127729 - RNA, 19 nt, Artificial Sequence
  Description of Artificial Sequence: Synthetic oligonucleotide
cugccgguggaagcgcuuc

SEQ ID NO: 2127730 - RNA, 19 nt, Artificial Sequence
  Description of Artificial Sequence: Synthetic oligonucleotide
cuucaucgcuuguucgggu

SEQ ID NO: 2127731 - RNA, 19 nt, Artificial Sequence
  Description of Artificial Sequence: Synthetic oligonucleotide
caaagcuccccuucccaau

SEQ ID NO: 2127732 - RNA, 19 nt, Artificial Sequence
  Description of Artificial Sequence: Synthetic oligonucleotide
gccuugaccaccugcccaa

SEQ ID NO: 2127733 - RNA, 19 nt, Artificial Sequence
  Description of Artificial Sequence: Synthetic oligonucleotide
ggaucgagugggcaaacuu

SEQ ID NO: 2127734 - RNA, 19 nt, Artificial Sequence
  Description of Artificial Sequence: Synthetic oligonucleotide
cacaguggauuauucuguu

SEQ ID NO: 2127735 - RNA, 19 nt, Artificial Sequence
  Description of Artificial Sequence: Synthetic oligonucleotide
cuguaagccacgugaucau

SEQ ID NO: 2127736 - RNA, 19 nt, Artificial Sequence
  Description of Artificial Sequence: Synthetic oligonucleotide
cuccgggaucggaccuccg

SEQ ID NO: 2127737 - RNA, 19 nt, Artificial Sequence
  Description of Artificial Sequence: Synthetic oligonucleotide
guguugucuuuauccugcu

SEQ ID NO: 2127738 - RNA, 19 nt, Artificial Sequence
  Description of Artificial Sequence: Synthetic oligonucleotide
gggauaacccuuggagcuc

SEQ ID NO: 2127739 - RNA, 19 nt, Artificial Sequence
  Description of Artificial Sequence: Synthetic oligonucleotide
gccuuggcguuucuuugca

SEQ ID NO: 2127740 - RNA, 19 nt, Artificial Sequence
  Description of Artificial Sequence: Synthetic oligonucleotide
ccgguagaagcgcgacugg

SEQ ID NO: 2127741 - RNA, 19 nt, Artificial Sequence
  Description of Artificial Sequence: Synthetic oligonucleotide
gguaaccugucaggaguuc

SEQ ID NO: 2127742 - RNA, 19 nt, Artificial Sequence
  Description of Artificial Sequence: Synthetic oligonucleotide
caugccguaccuggcucca

SEQ ID NO: 2127743 - RNA, 19 nt, Artificial Sequence
  Description of Artificial Sequence: Synthetic oligonucleotide
caaugggcaugccguaccu

SEQ ID NO: 2127744 - RNA, 19 nt, Artificial Sequence
  Description of Artificial Sequence: Synthetic oligonucleotide
guauugcuucaucgcuugu

SEQ ID NO: 2127745 - RNA, 19 nt, Artificial Sequence
  Description of Artificial Sequence: Synthetic oligonucleotide
cucuccgggaucggaccuc

SEQ ID NO: 2127746 - RNA, 19 nt, Artificial Sequence
  Description of Artificial Sequence: Synthetic oligonucleotide
ccccuucccaaugaccuug

SEQ ID NO: 2127747 - RNA, 19 nt, Artificial Sequence
  Description of Artificial Sequence: Synthetic oligonucleotide
cguuccgcaccaucuucag

SEQ ID NO: 2127748 - RNA, 19 nt, Artificial Sequence
  Description of Artificial Sequence: Synthetic oligonucleotide
cguaccuguaagccacgug

SEQ ID NO: 2127749 - RNA, 19 nt, Artificial Sequence
  Description of Artificial Sequence: Synthetic oligonucleotide
caguaccggggauaacccu

SEQ ID NO: 2127750 - RNA, 19 nt, Artificial Sequence
  Description of Artificial Sequence: Synthetic oligonucleotide
cauggggcaccuguacaua

SEQ ID NO: 2127751 - RNA, 19 nt, Artificial Sequence
  Description of Artificial Sequence: Synthetic oligonucleotide
gcccaaaagcucaaucaua

SEQ ID NO: 2127752 - RNA, 19 nt, Artificial Sequence
  Description of Artificial Sequence: Synthetic oligonucleotide
cgggaucggaccuccguug

SEQ ID NO: 2127753 - RNA, 19 nt, Artificial Sequence
  Description of Artificial Sequence: Synthetic oligonucleotide
cagugcaguaccggggaua

SEQ ID NO: 2127754 - RNA, 19 nt, Artificial Sequence
  Description of Artificial Sequence: Synthetic oligonucleotide
ccgcgaggaugcaacccag

SEQ ID NO: 2127755 - RNA, 19 nt, Artificial Sequence
  Description of Artificial Sequence: Synthetic oligonucleotide
cuucugccgccugccggug

SEQ ID NO: 2127756 - RNA, 19 nt, Artificial Sequence
  Description of Artificial Sequence: Synthetic oligonucleotide
cuuccggagcccgguagaa

SEQ ID NO: 2127757 - RNA, 19 nt, Artificial Sequence
  Description of Artificial Sequence: Synthetic oligonucleotide
gguagaagcgcgacuggau

SEQ ID NO: 2127758 - RNA, 19 nt, Artificial Sequence
  Description of Artificial Sequence: Synthetic oligonucleotide
uggaagcauccaggaguuu

SEQ ID NO: 2127759 - RNA, 19 nt, Artificial Sequence
  Description of Artificial Sequence: Synthetic oligonucleotide
cuucuaccuugcugcuuua

SEQ ID NO: 2127760 - RNA, 19 nt, Artificial Sequence
  Description of Artificial Sequence: Synthetic oligonucleotide
ggaugacguucauaguguu

SEQ ID NO: 2127761 - RNA, 19 nt, Artificial Sequence
  Description of Artificial Sequence: Synthetic oligonucleotide
agacacgcuggugcucaua

SEQ ID NO: 2127762 - RNA, 19 nt, Artificial Sequence
  Description of Artificial Sequence: Synthetic oligonucleotide
gcguuucuuugcauuugga

SEQ ID NO: 2127763 - RNA, 19 nt, Artificial Sequence
  Description of Artificial Sequence: Synthetic oligonucleotide
ccguaccuggcuccaagga

SEQ ID NO: 2127764 - RNA, 19 nt, Artificial Sequence
  Description of Artificial Sequence: Synthetic oligonucleotide
caguuucccucuccgggau

SEQ ID NO: 2127765 - RNA, 19 nt, Artificial Sequence
  Description of Artificial Sequence: Synthetic oligonucleotide
acgugcugguggacuuugu

SEQ ID NO: 2127766 - RNA, 19 nt, Artificial Sequence
  Description of Artificial Sequence: Synthetic oligonucleotide
caaugaccuugaggaccuc

SEQ ID NO: 2127767 - RNA, 19 nt, Artificial Sequence
  Description of Artificial Sequence: Synthetic oligonucleotide
gggcaugccguaccuggcu

SEQ ID NO: 2127768 - RNA, 19 nt, Artificial Sequence
  Description of Artificial Sequence: Synthetic oligonucleotide
gcgcgacuggauguacgug

SEQ ID NO: 2127769 - RNA, 19 nt, Artificial Sequence
  Description of Artificial Sequence: Synthetic oligonucleotide
cgcgacuggauguacgugu

SEQ ID NO: 2127770 - RNA, 19 nt, Artificial Sequence
  Description of Artificial Sequence: Synthetic oligonucleotide
gugcaguaccggggauaac

SEQ ID NO: 2127771 - RNA, 19 nt, Artificial Sequence
  Description of Artificial Sequence: Synthetic oligonucleotide
ccugucaugccuuggcguu

SEQ ID NO: 2127772 - RNA, 19 nt, Artificial Sequence
  Description of Artificial Sequence: Synthetic oligonucleotide
ccacgugaucauggggcac

SEQ ID NO: 2127773 - RNA, 19 nt, Artificial Sequence
  Description of Artificial Sequence: Synthetic oligonucleotide
gcgacuggauguacgugua

SEQ ID NO: 2127774 - RNA, 19 nt, Artificial Sequence
  Description of Artificial Sequence: Synthetic oligonucleotide
ccccauuguuggguccacc

SEQ ID NO: 2127775 - RNA, 19 nt, Artificial Sequence
  Description of Artificial Sequence: Synthetic oligonucleotide
ccuugaggaccucguaccu

SEQ ID NO: 2127776 - RNA, 19 nt, Artificial Sequence
  Description of Artificial Sequence: Synthetic oligonucleotide
ccuggcuccaaggaucacu

SEQ ID NO: 2127777 - RNA, 19 nt, Artificial Sequence
  Description of Artificial Sequence: Synthetic oligonucleotide
augccguaccuggcuccaa

SEQ ID NO: 2127778 - RNA, 19 nt, Artificial Sequence
  Description of Artificial Sequence: Synthetic oligonucleotide
ggcccuccaguuucccucu

SEQ ID NO: 2127779 - RNA, 19 nt, Artificial Sequence
  Description of Artificial Sequence: Synthetic oligonucleotide
gaccuccguugaggacuac

SEQ ID NO: 2127780 - RNA, 19 nt, Artificial Sequence
  Description of Artificial Sequence: Synthetic oligonucleotide
cucuggcgggcccuccagu

SEQ ID NO: 2127781 - RNA, 19 nt, Artificial Sequence
  Description of Artificial Sequence: Synthetic oligonucleotide
cccuuggagcucacgaaau

SEQ ID NO: 2127782 - RNA, 19 nt, Artificial Sequence
  Description of Artificial Sequence: Synthetic oligonucleotide
ggaccuccguugaggacua

SEQ ID NO: 2127783 - RNA, 19 nt, Artificial Sequence
  Description of Artificial Sequence: Synthetic oligonucleotide
cugggagggcaugcccaaa

SEQ ID NO: 2127784 - RNA, 19 nt, Artificial Sequence
  Description of Artificial Sequence: Synthetic oligonucleotide
cguaccuggcuccaaggau

SEQ ID NO: 2127785 - RNA, 19 nt, Artificial Sequence
  Description of Artificial Sequence: Synthetic oligonucleotide
ggguaaccugucaggaguu

SEQ ID NO: 2127786 - RNA, 19 nt, Artificial Sequence
  Description of Artificial Sequence: Synthetic oligonucleotide
cgguagaagcgcgacugga

SEQ ID NO: 2127787 - RNA, 19 nt, Artificial Sequence
  Description of Artificial Sequence: Synthetic oligonucleotide
ggccacgugcugguggacu

SEQ ID NO: 2127788 - RNA, 19 nt, Artificial Sequence
  Description of Artificial Sequence: Synthetic oligonucleotide
cugucaugccuuggcguuu

SEQ ID NO: 2127789 - RNA, 19 nt, Artificial Sequence
  Description of Artificial Sequence: Synthetic oligonucleotide
ccuuggagcucacgaaauu

SEQ ID NO: 2127790 - RNA, 19 nt, Artificial Sequence
  Description of Artificial Sequence: Synthetic oligonucleotide
cuggcgggcccuccaguuu

SEQ ID NO: 2127791 - RNA, 19 nt, Artificial Sequence
  Description of Artificial Sequence: Synthetic oligonucleotide
cguucauaguguugucuuu

SEQ ID NO: 2127792 - RNA, 19 nt, Artificial Sequence
  Description of Artificial Sequence: Synthetic oligonucleotide
gguggacuuuguggucaua

SEQ ID NO: 2127793 - RNA, 19 nt, Artificial Sequence
  Description of Artificial Sequence: Synthetic oligonucleotide
gcccgguagaagcgcgacu

SEQ ID NO: 2127794 - RNA, 19 nt, Artificial Sequence
  Description of Artificial Sequence: Synthetic oligonucleotide
gcgggcccuccaguuuccc

SEQ ID NO: 2127795 - RNA, 19 nt, Artificial Sequence
  Description of Artificial Sequence: Synthetic oligonucleotide
ccucuccgggaucggaccu

SEQ ID NO: 2127796 - RNA, 19 nt, Artificial Sequence
  Description of Artificial Sequence: Synthetic oligonucleotide
cugcuuccguagguuguuu

SEQ ID NO: 2127797 - RNA, 19 nt, Artificial Sequence
  Description of Artificial Sequence: Synthetic oligonucleotide
ccuuggcguuucuuugcau

SEQ ID NO: 2127798 - RNA, 19 nt, Artificial Sequence
  Description of Artificial Sequence: Synthetic oligonucleotide
ccgggaucggaccuccguu

SEQ ID NO: 2127799 - RNA, 19 nt, Artificial Sequence
  Description of Artificial Sequence: Synthetic oligonucleotide
ccuugaccaccugcccaaa

SEQ ID NO: 2127800 - RNA, 19 nt, Artificial Sequence
  Description of Artificial Sequence: Synthetic oligonucleotide
cugccgccugccgguggaa

SEQ ID NO: 2127801 - RNA, 19 nt, Artificial Sequence
  Description of Artificial Sequence: Synthetic oligonucleotide
gccccuaaaauucugaggc

SEQ ID NO: 2127802 - RNA, 19 nt, Artificial Sequence
  Description of Artificial Sequence: Synthetic oligonucleotide
agccccuaaaauucugagg

SEQ ID NO: 2127803 - RNA, 19 nt, Artificial Sequence
  Description of Artificial Sequence: Synthetic oligonucleotide
ugagccccuaaaauucuga

SEQ ID NO: 2127804 - RNA, 19 nt, Artificial Sequence
  Description of Artificial Sequence: Synthetic oligonucleotide
gagccccuaaaauucugag

SEQ ID NO: 2127805 - RNA, 19 nt, Artificial Sequence
  Description of Artificial Sequence: Synthetic oligonucleotide
acagagaggaguguugacu

SEQ ID NO: 2127806 - RNA, 19 nt, Artificial Sequence
  Description of Artificial Sequence: Synthetic oligonucleotide
uggggugagccccuaaaau

SEQ ID NO: 2127807 - RNA, 19 nt, Artificial Sequence
  Description of Artificial Sequence: Synthetic oligonucleotide
gaggaguguugacuugggc

SEQ ID NO: 2127808 - RNA, 19 nt, Artificial Sequence
  Description of Artificial Sequence: Synthetic oligonucleotide
agagaggaguguugacuug

SEQ ID NO: 2127809 - RNA, 19 nt, Artificial Sequence
  Description of Artificial Sequence: Synthetic oligonucleotide
  modified_base (4)..(4): a, c, u, g, unknown or other
ggcncuuauuucuguuucc

SEQ ID NO: 2127810 - RNA, 19 nt, Artificial Sequence
  Description of Artificial Sequence: Synthetic oligonucleotide
  modified_base (7)..(7): a, c, u, g, unknown or other
uugggcncuuauuucuguu

SEQ ID NO: 2127811 - RNA, 19 nt, Artificial Sequence
  Description of Artificial Sequence: Synthetic oligonucleotide
  modified_base (6)..(6): a, c, u, g, unknown or other
ugggcncuuauuucuguuu

SEQ ID NO: 2127812 - RNA, 19 nt, Artificial Sequence
  Description of Artificial Sequence: Synthetic oligonucleotide
accccacccuuccuucccc

SEQ ID NO: 2127813 - RNA, 19 nt, Artificial Sequence
  Description of Artificial Sequence: Synthetic oligonucleotide
uacgggcacagagaggagu

SEQ ID NO: 2127814 - RNA, 19 nt, Artificial Sequence
  Description of Artificial Sequence: Synthetic oligonucleotide
  modified_base (2)..(2): a, c, u, g, unknown or other
cncuuauuucuguuuccca

SEQ ID NO: 2127815 - RNA, 19 nt, Artificial Sequence
  Description of Artificial Sequence: Synthetic oligonucleotide
  modified_base (3)..(3): a, c, u, g, unknown or other
gcncuuauuucuguuuccc

SEQ ID NO: 2127816 - RNA, 19 nt, Artificial Sequence
  Description of Artificial Sequence: Synthetic oligonucleotide
agaggaguguugacuuggg

SEQ ID NO: 2127817 - RNA, 19 nt, Artificial Sequence
  Description of Artificial Sequence: Synthetic oligonucleotide
acugaccccacccuuccuu

SEQ ID NO: 2127818 - RNA, 19 nt, Artificial Sequence
  Description of Artificial Sequence: Synthetic oligonucleotide
  modified_base (9)..(9): a, c, u, g, unknown or other
acuugggcncuuauuucug

SEQ ID NO: 2127819 - RNA, 19 nt, Artificial Sequence
  Description of Artificial Sequence: Synthetic oligonucleotide
cacagagaggaguguugac

SEQ ID NO: 2127820 - RNA, 19 nt, Artificial Sequence
  Description of Artificial Sequence: Synthetic oligonucleotide
gaccccacccuuccuuccc

SEQ ID NO: 2127821 - RNA, 19 nt, Artificial Sequence
  Description of Artificial Sequence: Synthetic oligonucleotide
  modified_base (5)..(5): a, c, u, g, unknown or other
gggcncuuauuucuguuuc

SEQ ID NO: 2127822 - RNA, 19 nt, Artificial Sequence
  Description of Artificial Sequence: Synthetic oligonucleotide
ugaccccacccuuccuucc

SEQ ID NO: 2127823 - RNA, 19 nt, Artificial Sequence
  Description of Artificial Sequence: Synthetic oligonucleotide
cccucuuugcauauucaac

SEQ ID NO: 2127824 - RNA, 19 nt, Artificial Sequence
  Description of Artificial Sequence: Synthetic oligonucleotide
ccuacgggcacagagagga

SEQ ID NO: 2127825 - RNA, 19 nt, Artificial Sequence
  Description of Artificial Sequence: Synthetic oligonucleotide
gggugagccccuaaaauuc

SEQ ID NO: 2127826 - RNA, 19 nt, Artificial Sequence
  Description of Artificial Sequence: Synthetic oligonucleotide
cugaccccacccuuccuuc

SEQ ID NO: 2127827 - RNA, 19 nt, Artificial Sequence
  Description of Artificial Sequence: Synthetic oligonucleotide
acgggcacagagaggagug

SEQ ID NO: 2127828 - RNA, 19 nt, Artificial Sequence
  Description of Artificial Sequence: Synthetic oligonucleotide
gugagccccuaaaauucug

SEQ ID NO: 2127829 - RNA, 19 nt, Artificial Sequence
  Description of Artificial Sequence: Synthetic oligonucleotide
cuacgggcacagagaggag

SEQ ID NO: 2127830 - RNA, 19 nt, Artificial Sequence
  Description of Artificial Sequence: Synthetic oligonucleotide
ggcacagagaggaguguug

SEQ ID NO: 2127831 - RNA, 19 nt, Artificial Sequence
  Description of Artificial Sequence: Synthetic oligonucleotide
cagagaggaguguugacuu

SEQ ID NO: 2127832 - RNA, 19 nt, Artificial Sequence
  Description of Artificial Sequence: Synthetic oligonucleotide
ccccuacgggcacagagag

SEQ ID NO: 2127833 - RNA, 19 nt, Artificial Sequence
  Description of Artificial Sequence: Synthetic oligonucleotide
cuaggaccacugaccccac

SEQ ID NO: 2127834 - RNA, 19 nt, Artificial Sequence
  Description of Artificial Sequence: Synthetic oligonucleotide
  modified_base (8)..(8): a, c, u, g, unknown or other
cuugggcncuuauuucugu

SEQ ID NO: 2127835 - RNA, 19 nt, Artificial Sequence
  Description of Artificial Sequence: Synthetic oligonucleotide
cuggggugagccccuaaaa

SEQ ID NO: 2127836 - RNA, 19 nt, Artificial Sequence
  Description of Artificial Sequence: Synthetic oligonucleotide
gcacagagaggaguguuga

SEQ ID NO: 2127837 - RNA, 19 nt, Artificial Sequence
  Description of Artificial Sequence: Synthetic oligonucleotide
ccacugaccccacccuucc

SEQ ID NO: 2127838 - RNA, 19 nt, Artificial Sequence
  Description of Artificial Sequence: Synthetic oligonucleotide
ggggugagccccuaaaauu

SEQ ID NO: 2127839 - RNA, 19 nt, Artificial Sequence
  Description of Artificial Sequence: Synthetic oligonucleotide
uccuggggugagccccuaa

SEQ ID NO: 2127840 - RNA, 19 nt, Artificial Sequence
  Description of Artificial Sequence: Synthetic oligonucleotide
gaccacugaccccacccuu

SEQ ID NO: 2127841 - RNA, 19 nt, Artificial Sequence
  Description of Artificial Sequence: Synthetic oligonucleotide
cccuacgggcacagagagg

SEQ ID NO: 2127842 - RNA, 19 nt, Artificial Sequence
  Description of Artificial Sequence: Synthetic oligonucleotide
ccccucuuugcauauucaa

SEQ ID NO: 2127843 - RNA, 19 nt, Artificial Sequence
  Description of Artificial Sequence: Synthetic oligonucleotide
ggugagccccuaaaauucu

SEQ ID NO: 2127844 - RNA, 19 nt, Artificial Sequence
  Description of Artificial Sequence: Synthetic oligonucleotide
cacugaccccacccuuccu

SEQ ID NO: 2127845 - RNA, 19 nt, Artificial Sequence
  Description of Artificial Sequence: Synthetic oligonucleotide
gggcacagagaggaguguu

SEQ ID NO: 2127846 - RNA, 19 nt, Artificial Sequence
  Description of Artificial Sequence: Synthetic oligonucleotide
auccuggggugagccccua

SEQ ID NO: 2127847 - RNA, 19 nt, Artificial Sequence
  Description of Artificial Sequence: Synthetic oligonucleotide
ccccaggggcaccucugga

SEQ ID NO: 2127848 - RNA, 19 nt, Artificial Sequence
  Description of Artificial Sequence: Synthetic oligonucleotide
cgggcacagagaggagugu

SEQ ID NO: 2127849 - RNA, 19 nt, Artificial Sequence
  Description of Artificial Sequence: Synthetic oligonucleotide
gaaccaauggcaaagagcg

SEQ ID NO: 2127850 - RNA, 19 nt, Artificial Sequence
  Description of Artificial Sequence: Synthetic oligonucleotide
uagaauggauucuugaggg

SEQ ID NO: 2127851 - RNA, 19 nt, Artificial Sequence
  Description of Artificial Sequence: Synthetic oligonucleotide
uuuccaaggaguagaaugg

SEQ ID NO: 2127852 - RNA, 19 nt, Artificial Sequence
  Description of Artificial Sequence: Synthetic oligonucleotide
auuacagcauugcuaagcc

SEQ ID NO: 2127853 - RNA, 19 nt, Artificial Sequence
  Description of Artificial Sequence: Synthetic oligonucleotide
ucagguuuuggucaaacag

SEQ ID NO: 2127854 - RNA, 19 nt, Artificial Sequence
  Description of Artificial Sequence: Synthetic oligonucleotide
ugucuuuugucccagaaca

SEQ ID NO: 2127855 - RNA, 19 nt, Artificial Sequence
  Description of Artificial Sequence: Synthetic oligonucleotide
aauagaaacagcaaagccu

SEQ ID NO: 2127856 - RNA, 19 nt, Artificial Sequence
  Description of Artificial Sequence: Synthetic oligonucleotide
guaacugaaagucuucucg

SEQ ID NO: 2127857 - RNA, 19 nt, Artificial Sequence
  Description of Artificial Sequence: Synthetic oligonucleotide
aacagcucgcaucugauag

SEQ ID NO: 2127858 - RNA, 19 nt, Artificial Sequence
  Description of Artificial Sequence: Synthetic oligonucleotide
aagaucgccaucucugcgc

SEQ ID NO: 2127859 - RNA, 19 nt, Artificial Sequence
  Description of Artificial Sequence: Synthetic oligonucleotide
auaggacugugauauauac

SEQ ID NO: 2127860 - RNA, 19 nt, Artificial Sequence
  Description of Artificial Sequence: Synthetic oligonucleotide
guagaauggauucuugagg

SEQ ID NO: 2127861 - RNA, 19 nt, Artificial Sequence
  Description of Artificial Sequence: Synthetic oligonucleotide
uaaaucuguacagagcagg

SEQ ID NO: 2127862 - RNA, 19 nt, Artificial Sequence
  Description of Artificial Sequence: Synthetic oligonucleotide
ucucguuagagguaaggcg

SEQ ID NO: 2127863 - RNA, 19 nt, Artificial Sequence
  Description of Artificial Sequence: Synthetic oligonucleotide
aguagaauggauucuugag

SEQ ID NO: 2127864 - RNA, 19 nt, Artificial Sequence
  Description of Artificial Sequence: Synthetic oligonucleotide
acauuaacagggcuacugc

SEQ ID NO: 2127865 - RNA, 19 nt, Artificial Sequence
  Description of Artificial Sequence: Synthetic oligonucleotide
cucguuagagguaaggcgg

SEQ ID NO: 2127866 - RNA, 19 nt, Artificial Sequence
  Description of Artificial Sequence: Synthetic oligonucleotide
aagcagugcaguuuaaaug

SEQ ID NO: 2127867 - RNA, 19 nt, Artificial Sequence
  Description of Artificial Sequence: Synthetic oligonucleotide
cagccuaugacccaggucc

SEQ ID NO: 2127868 - RNA, 19 nt, Artificial Sequence
  Description of Artificial Sequence: Synthetic oligonucleotide
gaacauggcauucuagucc

SEQ ID NO: 2127869 - RNA, 19 nt, Artificial Sequence
  Description of Artificial Sequence: Synthetic oligonucleotide
aguacauuaacagggcuac

SEQ ID NO: 2127870 - RNA, 19 nt, Artificial Sequence
  Description of Artificial Sequence: Synthetic oligonucleotide
uaacugaaagucuucucgg

SEQ ID NO: 2127871 - RNA, 19 nt, Artificial Sequence
  Description of Artificial Sequence: Synthetic oligonucleotide
cuaaagaucgccaucucug

SEQ ID NO: 2127872 - RNA, 19 nt, Artificial Sequence
  Description of Artificial Sequence: Synthetic oligonucleotide
ucugauaggcauuuccaag

SEQ ID NO: 2127873 - RNA, 19 nt, Artificial Sequence
  Description of Artificial Sequence: Synthetic oligonucleotide
uguucucccauuuucaagu

SEQ ID NO: 2127874 - RNA, 19 nt, Artificial Sequence
  Description of Artificial Sequence: Synthetic oligonucleotide
aauggcaaagagcgagugg

SEQ ID NO: 2127875 - RNA, 19 nt, Artificial Sequence
  Description of Artificial Sequence: Synthetic oligonucleotide
ugguaaaucaggccgccgg

SEQ ID NO: 2127876 - RNA, 19 nt, Artificial Sequence
  Description of Artificial Sequence: Synthetic oligonucleotide
gaaucgaauggacaccggg

SEQ ID NO: 2127877 - RNA, 19 nt, Artificial Sequence
  Description of Artificial Sequence: Synthetic oligonucleotide
uauuacagcauugcuaagc

SEQ ID NO: 2127878 - RNA, 19 nt, Artificial Sequence
  Description of Artificial Sequence: Synthetic oligonucleotide
aaagaucgccaucucugcg

SEQ ID NO: 2127879 - RNA, 19 nt, Artificial Sequence
  Description of Artificial Sequence: Synthetic oligonucleotide
acguacacacuaaagaucg

SEQ ID NO: 2127880 - RNA, 19 nt, Artificial Sequence
  Description of Artificial Sequence: Synthetic oligonucleotide
aacuugaucccugucagug

SEQ ID NO: 2127881 - RNA, 19 nt, Artificial Sequence
  Description of Artificial Sequence: Synthetic oligonucleotide
gaugccgucgcgcuggccg

SEQ ID NO: 2127882 - RNA, 19 nt, Artificial Sequence
  Description of Artificial Sequence: Synthetic oligonucleotide
aacagggcuacugcaaugg

SEQ ID NO: 2127883 - RNA, 19 nt, Artificial Sequence
  Description of Artificial Sequence: Synthetic oligonucleotide
uuaaaugugucuguuucca

SEQ ID NO: 2127884 - RNA, 19 nt, Artificial Sequence
  Description of Artificial Sequence: Synthetic oligonucleotide
uccucacuggaauagaaac

SEQ ID NO: 2127885 - RNA, 19 nt, Artificial Sequence
  Description of Artificial Sequence: Synthetic oligonucleotide
ugcuaagccagcuuccucc

SEQ ID NO: 2127886 - RNA, 19 nt, Artificial Sequence
  Description of Artificial Sequence: Synthetic oligonucleotide
auggacaccggguaauugg

SEQ ID NO: 2127887 - RNA, 19 nt, Artificial Sequence
  Description of Artificial Sequence: Synthetic oligonucleotide
gauucuugagggcaaaguc

SEQ ID NO: 2127888 - RNA, 19 nt, Artificial Sequence
  Description of Artificial Sequence: Synthetic oligonucleotide
accacguacacacuaaaga

SEQ ID NO: 2127889 - RNA, 19 nt, Artificial Sequence
  Description of Artificial Sequence: Synthetic oligonucleotide
agugccagccuucucugcc

SEQ ID NO: 2127890 - RNA, 19 nt, Artificial Sequence
  Description of Artificial Sequence: Synthetic oligonucleotide
uuuccgacguuccagcccc

SEQ ID NO: 2127891 - RNA, 19 nt, Artificial Sequence
  Description of Artificial Sequence: Synthetic oligonucleotide
cagguuuuggucaaacagc

SEQ ID NO: 2127892 - RNA, 19 nt, Artificial Sequence
  Description of Artificial Sequence: Synthetic oligonucleotide
uuagagguaaggcggggcc

SEQ ID NO: 2127893 - RNA, 19 nt, Artificial Sequence
  Description of Artificial Sequence: Synthetic oligonucleotide
ggcagaguuacccagauac

SEQ ID NO: 2127894 - RNA, 19 nt, Artificial Sequence
  Description of Artificial Sequence: Synthetic oligonucleotide
ugaguaaaucucauaaauu

SEQ ID NO: 2127895 - RNA, 19 nt, Artificial Sequence
  Description of Artificial Sequence: Synthetic oligonucleotide
gacugugauauauacagaa

SEQ ID NO: 2127896 - RNA, 19 nt, Artificial Sequence
  Description of Artificial Sequence: Synthetic oligonucleotide
agaguuacccagauacucc

SEQ ID NO: 2127897 - RNA, 19 nt, Artificial Sequence
  Description of Artificial Sequence: Synthetic oligonucleotide
ugucccacugguaaaucag

SEQ ID NO: 2127898 - RNA, 19 nt, Artificial Sequence
  Description of Artificial Sequence: Synthetic oligonucleotide
ucuaguccaggauccaucc

SEQ ID NO: 2127899 - RNA, 19 nt, Artificial Sequence
  Description of Artificial Sequence: Synthetic oligonucleotide
uacauuaacagggcuacug

SEQ ID NO: 2127900 - RNA, 19 nt, Artificial Sequence
  Description of Artificial Sequence: Synthetic oligonucleotide
uacacacuaaagaucgcca

SEQ ID NO: 2127901 - RNA, 19 nt, Artificial Sequence
  Description of Artificial Sequence: Synthetic oligonucleotide
ucgucgugcaguuucagca

SEQ ID NO: 2127902 - RNA, 19 nt, Artificial Sequence
  Description of Artificial Sequence: Synthetic oligonucleotide
cuagcuucagguuuugguc

SEQ ID NO: 2127903 - RNA, 19 nt, Artificial Sequence
  Description of Artificial Sequence: Synthetic oligonucleotide
uaaagaucgccaucucugc

SEQ ID NO: 2127904 - RNA, 19 nt, Artificial Sequence
  Description of Artificial Sequence: Synthetic oligonucleotide
aaagucugaguaaaucuca

SEQ ID NO: 2127905 - RNA, 19 nt, Artificial Sequence
  Description of Artificial Sequence: Synthetic oligonucleotide
gaguaaaucucauaaauuu

SEQ ID NO: 2127906 - RNA, 19 nt, Artificial Sequence
  Description of Artificial Sequence: Synthetic oligonucleotide
gugauauauacagaagggc

SEQ ID NO: 2127907 - RNA, 19 nt, Artificial Sequence
  Description of Artificial Sequence: Synthetic oligonucleotide
ucuauuccagcuugccuag

SEQ ID NO: 2127908 - RNA, 19 nt, Artificial Sequence
  Description of Artificial Sequence: Synthetic oligonucleotide
aucuauuccagcuugccua

SEQ ID NO: 2127909 - RNA, 19 nt, Artificial Sequence
  Description of Artificial Sequence: Synthetic oligonucleotide
accaauggcaaagagcgag

SEQ ID NO: 2127910 - RNA, 19 nt, Artificial Sequence
  Description of Artificial Sequence: Synthetic oligonucleotide
acuaaagaucgccaucucu

SEQ ID NO: 2127911 - RNA, 19 nt, Artificial Sequence
  Description of Artificial Sequence: Synthetic oligonucleotide
uaugacccagguccaaaag

SEQ ID NO: 2127912 - RNA, 19 nt, Artificial Sequence
  Description of Artificial Sequence: Synthetic oligonucleotide
cugguucagccuaugaccc

SEQ ID NO: 2127913 - RNA, 19 nt, Artificial Sequence
  Description of Artificial Sequence: Synthetic oligonucleotide
aggacugcgugacccaccc

SEQ ID NO: 2127914 - RNA, 19 nt, Artificial Sequence
  Description of Artificial Sequence: Synthetic oligonucleotide
agcaucucaaugccugaac

SEQ ID NO: 2127915 - RNA, 19 nt, Artificial Sequence
  Description of Artificial Sequence: Synthetic oligonucleotide
ugauaggcauuuccaagga

SEQ ID NO: 2127916 - RNA, 19 nt, Artificial Sequence
  Description of Artificial Sequence: Synthetic oligonucleotide
agaacaaaggaauguuuau

SEQ ID NO: 2127917 - RNA, 19 nt, Artificial Sequence
  Description of Artificial Sequence: Synthetic oligonucleotide
ugaacuucccuguuccgga

SEQ ID NO: 2127918 - RNA, 19 nt, Artificial Sequence
  Description of Artificial Sequence: Synthetic oligonucleotide
ucguuagagguaaggcggg

SEQ ID NO: 2127919 - RNA, 19 nt, Artificial Sequence
  Description of Artificial Sequence: Synthetic oligonucleotide
gacaccggguaauuggcag

SEQ ID NO: 2127920 - RNA, 19 nt, Artificial Sequence
  Description of Artificial Sequence: Synthetic oligonucleotide
ugagggcaaagucugagua

SEQ ID NO: 2127921 - RNA, 19 nt, Artificial Sequence
  Description of Artificial Sequence: Synthetic oligonucleotide
acugcaauggauccucacu

SEQ ID NO: 2127922 - RNA, 19 nt, Artificial Sequence
  Description of Artificial Sequence: Synthetic oligonucleotide
uucucguuagagguaaggc

SEQ ID NO: 2127923 - RNA, 19 nt, Artificial Sequence
  Description of Artificial Sequence: Synthetic oligonucleotide
agcaugagcuucucguuag

SEQ ID NO: 2127924 - RNA, 19 nt, Artificial Sequence
  Description of Artificial Sequence: Synthetic oligonucleotide
gauaggcauuuccaaggag

SEQ ID NO: 2127925 - RNA, 19 nt, Artificial Sequence
  Description of Artificial Sequence: Synthetic oligonucleotide
uuaacagggcuacugcaau

SEQ ID NO: 2127926 - RNA, 19 nt, Artificial Sequence
  Description of Artificial Sequence: Synthetic oligonucleotide
uccugguucagccuaugac

SEQ ID NO: 2127927 - RNA, 19 nt, Artificial Sequence
  Description of Artificial Sequence: Synthetic oligonucleotide
agugcaguuuaaauguguc

SEQ ID NO: 2127928 - RNA, 19 nt, Artificial Sequence
  Description of Artificial Sequence: Synthetic oligonucleotide
uggucaaacagcucgcauc

SEQ ID NO: 2127929 - RNA, 19 nt, Artificial Sequence
  Description of Artificial Sequence: Synthetic oligonucleotide
auagaaacagcaaagccuu

SEQ ID NO: 2127930 - RNA, 19 nt, Artificial Sequence
  Description of Artificial Sequence: Synthetic oligonucleotide
uagagcuagcuucagguuu

SEQ ID NO: 2127931 - RNA, 19 nt, Artificial Sequence
  Description of Artificial Sequence: Synthetic oligonucleotide
acacuaaagaucgccaucu

SEQ ID NO: 2127932 - RNA, 19 nt, Artificial Sequence
  Description of Artificial Sequence: Synthetic oligonucleotide
agcacuucuuucccgucgg

SEQ ID NO: 2127933 - RNA, 19 nt, Artificial Sequence
  Description of Artificial Sequence: Synthetic oligonucleotide
aaucgaauggacaccgggu

SEQ ID NO: 2127934 - RNA, 19 nt, Artificial Sequence
  Description of Artificial Sequence: Synthetic oligonucleotide
uggacaccggguaauuggc

SEQ ID NO: 2127935 - RNA, 19 nt, Artificial Sequence
  Description of Artificial Sequence: Synthetic oligonucleotide
gaaucuauuccagcuugcc

SEQ ID NO: 2127936 - RNA, 19 nt, Artificial Sequence
  Description of Artificial Sequence: Synthetic oligonucleotide
gagaacauggcauucuagu

SEQ ID NO: 2127937 - RNA, 19 nt, Artificial Sequence
  Description of Artificial Sequence: Synthetic oligonucleotide
uggauccucacuggaauag

SEQ ID NO: 2127938 - RNA, 19 nt, Artificial Sequence
  Description of Artificial Sequence: Synthetic oligonucleotide
cauugcuaagccagcuucc

SEQ ID NO: 2127939 - RNA, 19 nt, Artificial Sequence
  Description of Artificial Sequence: Synthetic oligonucleotide
ugugucuguuuccagcauc

SEQ ID NO: 2127940 - RNA, 19 nt, Artificial Sequence
  Description of Artificial Sequence: Synthetic oligonucleotide
uucuaguccaggauccauc

SEQ ID NO: 2127941 - RNA, 19 nt, Artificial Sequence
  Description of Artificial Sequence: Synthetic oligonucleotide
guuuauuacagcauugcua

SEQ ID NO: 2127942 - RNA, 19 nt, Artificial Sequence
  Description of Artificial Sequence: Synthetic oligonucleotide
ucuuuugucccagaacaaa

SEQ ID NO: 2127943 - RNA, 19 nt, Artificial Sequence
  Description of Artificial Sequence: Synthetic oligonucleotide
ucggagaagagaaucuauu

SEQ ID NO: 2127944 - RNA, 19 nt, Artificial Sequence
  Description of Artificial Sequence: Synthetic oligonucleotide
guagcugucccacugguaa

SEQ ID NO: 2127945 - RNA, 19 nt, Artificial Sequence
  Description of Artificial Sequence: Synthetic oligonucleotide
ccuaggaucugccaggacc

SEQ ID NO: 2127946 - RNA, 19 nt, Artificial Sequence
  Description of Artificial Sequence: Synthetic oligonucleotide
acagcucgcaucugauagg

SEQ ID NO: 2127947 - RNA, 19 nt, Artificial Sequence
  Description of Artificial Sequence: Synthetic oligonucleotide
uucggagaagagaaucuau

SEQ ID NO: 2127948 - RNA, 19 nt, Artificial Sequence
  Description of Artificial Sequence: Synthetic oligonucleotide
aaguacauuaacagggcua

SEQ ID NO: 2127949 - RNA, 19 nt, Artificial Sequence
  Description of Artificial Sequence: Synthetic oligonucleotide
aaacuugaucccugucagu

SEQ ID NO: 2127950 - RNA, 19 nt, Artificial Sequence
  Description of Artificial Sequence: Synthetic oligonucleotide
aauggacaccggguaauug

SEQ ID NO: 2127951 - RNA, 19 nt, Artificial Sequence
  Description of Artificial Sequence: Synthetic oligonucleotide
aaggaguagaauggauucu

SEQ ID NO: 2127952 - RNA, 19 nt, Artificial Sequence
  Description of Artificial Sequence: Synthetic oligonucleotide
cugaacuucccuguuccgg

SEQ ID NO: 2127953 - RNA, 19 nt, Artificial Sequence
  Description of Artificial Sequence: Synthetic oligonucleotide
aguuuaaaugugucuguuu

SEQ ID NO: 2127954 - RNA, 19 nt, Artificial Sequence
  Description of Artificial Sequence: Synthetic oligonucleotide
gaguuacccagauacucca

SEQ ID NO: 2127955 - RNA, 19 nt, Artificial Sequence
  Description of Artificial Sequence: Synthetic oligonucleotide
caaugccugaacuucccug

SEQ ID NO: 2127956 - RNA, 19 nt, Artificial Sequence
  Description of Artificial Sequence: Synthetic oligonucleotide
guguucucccauuuucaag

SEQ ID NO: 2127957 - RNA, 19 nt, Artificial Sequence
  Description of Artificial Sequence: Synthetic oligonucleotide
cacugguaaaucaggccgc

SEQ ID NO: 2127958 - RNA, 19 nt, Artificial Sequence
  Description of Artificial Sequence: Synthetic oligonucleotide
cuuuccgacguuccagccc

SEQ ID NO: 2127959 - RNA, 19 nt, Artificial Sequence
  Description of Artificial Sequence: Synthetic oligonucleotide
cuaggaucugccaggacca

SEQ ID NO: 2127960 - RNA, 19 nt, Artificial Sequence
  Description of Artificial Sequence: Synthetic oligonucleotide
ggaaccaauggcaaagagc

SEQ ID NO: 2127961 - RNA, 19 nt, Artificial Sequence
  Description of Artificial Sequence: Synthetic oligonucleotide
uggccgaaggccaccagca

SEQ ID NO: 2127962 - RNA, 19 nt, Artificial Sequence
  Description of Artificial Sequence: Synthetic oligonucleotide
uaacagggcuacugcaaug

SEQ ID NO: 2127963 - RNA, 19 nt, Artificial Sequence
  Description of Artificial Sequence: Synthetic oligonucleotide
cagaguuacccagauacuc

SEQ ID NO: 2127964 - RNA, 19 nt, Artificial Sequence
  Description of Artificial Sequence: Synthetic oligonucleotide
uccggagacagcugggaac

SEQ ID NO: 2127965 - RNA, 19 nt, Artificial Sequence
  Description of Artificial Sequence: Synthetic oligonucleotide
auaaaucuguacagagcag

SEQ ID NO: 2127966 - RNA, 19 nt, Artificial Sequence
  Description of Artificial Sequence: Synthetic oligonucleotide
uuacagcauugcuaagcca

SEQ ID NO: 2127967 - RNA, 19 nt, Artificial Sequence
  Description of Artificial Sequence: Synthetic oligonucleotide
ugcgugacccacccggaug

SEQ ID NO: 2127968 - RNA, 19 nt, Artificial Sequence
  Description of Artificial Sequence: Synthetic oligonucleotide
uuuggaagcagugcaguuu

SEQ ID NO: 2127969 - RNA, 19 nt, Artificial Sequence
  Description of Artificial Sequence: Synthetic oligonucleotide
aagccagcuuccuccauaa

SEQ ID NO: 2127970 - RNA, 19 nt, Artificial Sequence
  Description of Artificial Sequence: Synthetic oligonucleotide
ucaaugccugaacuucccu

SEQ ID NO: 2127971 - RNA, 19 nt, Artificial Sequence
  Description of Artificial Sequence: Synthetic oligonucleotide
aucgaauggacaccgggua

SEQ ID NO: 2127972 - RNA, 19 nt, Artificial Sequence
  Description of Artificial Sequence: Synthetic oligonucleotide
ucgaauggacaccggguaa

SEQ ID NO: 2127973 - RNA, 19 nt, Artificial Sequence
  Description of Artificial Sequence: Synthetic oligonucleotide
ucuuuccgacguuccagcc

SEQ ID NO: 2127974 - RNA, 19 nt, Artificial Sequence
  Description of Artificial Sequence: Synthetic oligonucleotide
uuucccgucggccguguac

SEQ ID NO: 2127975 - RNA, 19 nt, Artificial Sequence
  Description of Artificial Sequence: Synthetic oligonucleotide
ccauugauggccaggacug

SEQ ID NO: 2127976 - RNA, 19 nt, Artificial Sequence
  Description of Artificial Sequence: Synthetic oligonucleotide
cacacuaaagaucgccauc

SEQ ID NO: 2127977 - RNA, 19 nt, Artificial Sequence
  Description of Artificial Sequence: Synthetic oligonucleotide
gauccggccucuuuccgac

SEQ ID NO: 2127978 - RNA, 19 nt, Artificial Sequence
  Description of Artificial Sequence: Synthetic oligonucleotide
aauggauucuugagggcaa

SEQ ID NO: 2127979 - RNA, 19 nt, Artificial Sequence
  Description of Artificial Sequence: Synthetic oligonucleotide
caccacguacacacuaaag

SEQ ID NO: 2127980 - RNA, 19 nt, Artificial Sequence
  Description of Artificial Sequence: Synthetic oligonucleotide
uuuggucaaacagcucgca

SEQ ID NO: 2127981 - RNA, 19 nt, Artificial Sequence
  Description of Artificial Sequence: Synthetic oligonucleotide
uuuguucaccacguacaca

SEQ ID NO: 2127982 - RNA, 19 nt, Artificial Sequence
  Description of Artificial Sequence: Synthetic oligonucleotide
ugcgauccggccucuuucc

SEQ ID NO: 2127983 - RNA, 19 nt, Artificial Sequence
  Description of Artificial Sequence: Synthetic oligonucleotide
gaacuucccuguuccggag

SEQ ID NO: 2127984 - RNA, 19 nt, Artificial Sequence
  Description of Artificial Sequence: Synthetic oligonucleotide
auuaacagggcuacugcaa

SEQ ID NO: 2127985 - RNA, 19 nt, Artificial Sequence
  Description of Artificial Sequence: Synthetic oligonucleotide
ugaucccugucaguguuug

SEQ ID NO: 2127986 - RNA, 19 nt, Artificial Sequence
  Description of Artificial Sequence: Synthetic oligonucleotide
ggguaauuggcagaguuac

SEQ ID NO: 2127987 - RNA, 19 nt, Artificial Sequence
  Description of Artificial Sequence: Synthetic oligonucleotide
ggcauucuaguccaggauc

SEQ ID NO: 2127988 - RNA, 19 nt, Artificial Sequence
  Description of Artificial Sequence: Synthetic oligonucleotide
agagguaaggcggggccgg

SEQ ID NO: 2127989 - RNA, 19 nt, Artificial Sequence
  Description of Artificial Sequence: Synthetic oligonucleotide
acuugaucccugucagugu

SEQ ID NO: 2127990 - RNA, 19 nt, Artificial Sequence
  Description of Artificial Sequence: Synthetic oligonucleotide
uuucggagaagagaaucua

SEQ ID NO: 2127991 - RNA, 19 nt, Artificial Sequence
  Description of Artificial Sequence: Synthetic oligonucleotide
ucagccuaugacccagguc

SEQ ID NO: 2127992 - RNA, 19 nt, Artificial Sequence
  Description of Artificial Sequence: Synthetic oligonucleotide
cagcggguaacugaaaguc

SEQ ID NO: 2127993 - RNA, 19 nt, Artificial Sequence
  Description of Artificial Sequence: Synthetic oligonucleotide
uucagccuaugacccaggu

SEQ ID NO: 2127994 - RNA, 19 nt, Artificial Sequence
  Description of Artificial Sequence: Synthetic oligonucleotide
ucuugagggcaaagucuga

SEQ ID NO: 2127995 - RNA, 19 nt, Artificial Sequence
  Description of Artificial Sequence: Synthetic oligonucleotide
cauccaugccauugauggc

SEQ ID NO: 2127996 - RNA, 19 nt, Artificial Sequence
  Description of Artificial Sequence: Synthetic oligonucleotide
ugacccacccggaugccgu

SEQ ID NO: 2127997 - RNA, 19 nt, Artificial Sequence
  Description of Artificial Sequence: Synthetic oligonucleotide
agaucgccaucucugcgcu

SEQ ID NO: 2127998 - RNA, 19 nt, Artificial Sequence
  Description of Artificial Sequence: Synthetic oligonucleotide
uuccaaggaguagaaugga

SEQ ID NO: 2127999 - RNA, 19 nt, Artificial Sequence
  Description of Artificial Sequence: Synthetic oligonucleotide
auugcuaagccagcuuccu

SEQ ID NO: 2128000 - RNA, 19 nt, Artificial Sequence
  Description of Artificial Sequence: Synthetic oligonucleotide
ggccgaaucgaauggacac

SEQ ID NO: 2128001 - RNA, 19 nt, Artificial Sequence
  Description of Artificial Sequence: Synthetic oligonucleotide
gaucccugucaguguuugg

SEQ ID NO: 2128002 - RNA, 19 nt, Artificial Sequence
  Description of Artificial Sequence: Synthetic oligonucleotide
uacugcaauggauccucac

SEQ ID NO: 2128003 - RNA, 19 nt, Artificial Sequence
  Description of Artificial Sequence: Synthetic oligonucleotide
gguaaaucaggccgccggc

SEQ ID NO: 2128004 - RNA, 19 nt, Artificial Sequence
  Description of Artificial Sequence: Synthetic oligonucleotide
gacguuccagccccggaac

SEQ ID NO: 2128005 - RNA, 19 nt, Artificial Sequence
  Description of Artificial Sequence: Synthetic oligonucleotide
uggauucuugagggcaaag

SEQ ID NO: 2128006 - RNA, 19 nt, Artificial Sequence
  Description of Artificial Sequence: Synthetic oligonucleotide
gucgugcaguuucagcagc

SEQ ID NO: 2128007 - RNA, 19 nt, Artificial Sequence
  Description of Artificial Sequence: Synthetic oligonucleotide
gcauugcuaagccagcuuc

SEQ ID NO: 2128008 - RNA, 19 nt, Artificial Sequence
  Description of Artificial Sequence: Synthetic oligonucleotide
gcauucuaguccaggaucc

SEQ ID NO: 2128009 - RNA, 19 nt, Artificial Sequence
  Description of Artificial Sequence: Synthetic oligonucleotide
uguucaccacguacacacu

SEQ ID NO: 2128010 - RNA, 19 nt, Artificial Sequence
  Description of Artificial Sequence: Synthetic oligonucleotide
cagcucgcaucugauaggc

SEQ ID NO: 2128011 - RNA, 19 nt, Artificial Sequence
  Description of Artificial Sequence: Synthetic oligonucleotide
agcaugucucagauccugg

SEQ ID NO: 2128012 - RNA, 19 nt, Artificial Sequence
  Description of Artificial Sequence: Synthetic oligonucleotide
ggcauuuccaaggaguaga

SEQ ID NO: 2128013 - RNA, 19 nt, Artificial Sequence
  Description of Artificial Sequence: Synthetic oligonucleotide
caauggcaaagagcgagug

SEQ ID NO: 2128014 - RNA, 19 nt, Artificial Sequence
  Description of Artificial Sequence: Synthetic oligonucleotide
gguaaggcggggccggccg

SEQ ID NO: 2128015 - RNA, 19 nt, Artificial Sequence
  Description of Artificial Sequence: Synthetic oligonucleotide
aggaguagaauggauucuu

SEQ ID NO: 2128016 - RNA, 19 nt, Artificial Sequence
  Description of Artificial Sequence: Synthetic oligonucleotide
ugccugaacuucccuguuc

SEQ ID NO: 2128017 - RNA, 19 nt, Artificial Sequence
  Description of Artificial Sequence: Synthetic oligonucleotide
ggaacugcugucacggccc

SEQ ID NO: 2128018 - RNA, 19 nt, Artificial Sequence
  Description of Artificial Sequence: Synthetic oligonucleotide
uuccggagacagcugggaa

SEQ ID NO: 2128019 - RNA, 19 nt, Artificial Sequence
  Description of Artificial Sequence: Synthetic oligonucleotide
uugcuaagccagcuuccuc

SEQ ID NO: 2128020 - RNA, 19 nt, Artificial Sequence
  Description of Artificial Sequence: Synthetic oligonucleotide
acaccggguaauuggcaga

SEQ ID NO: 2128021 - RNA, 19 nt, Artificial Sequence
  Description of Artificial Sequence: Synthetic oligonucleotide
agcuucucguuagagguaa

SEQ ID NO: 2128022 - RNA, 19 nt, Artificial Sequence
  Description of Artificial Sequence: Synthetic oligonucleotide
cauaggacugugauauaua

SEQ ID NO: 2128023 - RNA, 19 nt, Artificial Sequence
  Description of Artificial Sequence: Synthetic oligonucleotide
cugaaagucuucucggccu

SEQ ID NO: 2128024 - RNA, 19 nt, Artificial Sequence
  Description of Artificial Sequence: Synthetic oligonucleotide
gcuuuguucaccacguaca

SEQ ID NO: 2128025 - RNA, 19 nt, Artificial Sequence
  Description of Artificial Sequence: Synthetic oligonucleotide
uucccgucggccguguacu

SEQ ID NO: 2128026 - RNA, 19 nt, Artificial Sequence
  Description of Artificial Sequence: Synthetic oligonucleotide
gauccucacuggaauagaa

SEQ ID NO: 2128027 - RNA, 19 nt, Artificial Sequence
  Description of Artificial Sequence: Synthetic oligonucleotide
agcauugcuaagccagcuu

SEQ ID NO: 2128028 - RNA, 19 nt, Artificial Sequence
  Description of Artificial Sequence: Synthetic oligonucleotide
gaacugcugucacggcccc

SEQ ID NO: 2128029 - RNA, 19 nt, Artificial Sequence
  Description of Artificial Sequence: Synthetic oligonucleotide
guucaccacguacacacua

SEQ ID NO: 2128030 - RNA, 19 nt, Artificial Sequence
  Description of Artificial Sequence: Synthetic oligonucleotide
cagcaugucucagauccug

SEQ ID NO: 2128031 - RNA, 19 nt, Artificial Sequence
  Description of Artificial Sequence: Synthetic oligonucleotide
ucgcgcuggccgaaggcca

SEQ ID NO: 2128032 - RNA, 19 nt, Artificial Sequence
  Description of Artificial Sequence: Synthetic oligonucleotide
ccgaaucgaauggacaccg

SEQ ID NO: 2128033 - RNA, 19 nt, Artificial Sequence
  Description of Artificial Sequence: Synthetic oligonucleotide
gauggccaggacugcguga

SEQ ID NO: 2128034 - RNA, 19 nt, Artificial Sequence
  Description of Artificial Sequence: Synthetic oligonucleotide
aggccgccggcuuuguuca

SEQ ID NO: 2128035 - RNA, 19 nt, Artificial Sequence
  Description of Artificial Sequence: Synthetic oligonucleotide
ggaccacaaacuugauccc

SEQ ID NO: 2128036 - RNA, 19 nt, Artificial Sequence
  Description of Artificial Sequence: Synthetic oligonucleotide
aguuacccagauacuccag

SEQ ID NO: 2128037 - RNA, 19 nt, Artificial Sequence
  Description of Artificial Sequence: Synthetic oligonucleotide
cuaugacccagguccaaaa

SEQ ID NO: 2128038 - RNA, 19 nt, Artificial Sequence
  Description of Artificial Sequence: Synthetic oligonucleotide
agggcauaggacugugaua

SEQ ID NO: 2128039 - RNA, 19 nt, Artificial Sequence
  Description of Artificial Sequence: Synthetic oligonucleotide
auucuaguccaggauccau

SEQ ID NO: 2128040 - RNA, 19 nt, Artificial Sequence
  Description of Artificial Sequence: Synthetic oligonucleotide
acagggcuacugcaaugga

SEQ ID NO: 2128041 - RNA, 19 nt, Artificial Sequence
  Description of Artificial Sequence: Synthetic oligonucleotide
cugcgauccggccucuuuc

SEQ ID NO: 2128042 - RNA, 19 nt, Artificial Sequence
  Description of Artificial Sequence: Synthetic oligonucleotide
agguaaggcggggccggcc

SEQ ID NO: 2128043 - RNA, 19 nt, Artificial Sequence
  Description of Artificial Sequence: Synthetic oligonucleotide
uggcgaguagcugucccac

SEQ ID NO: 2128044 - RNA, 19 nt, Artificial Sequence
  Description of Artificial Sequence: Synthetic oligonucleotide
caggacugcgugacccacc

SEQ ID NO: 2128045 - RNA, 19 nt, Artificial Sequence
  Description of Artificial Sequence: Synthetic oligonucleotide
gggcuacugcaauggaucc

SEQ ID NO: 2128046 - RNA, 19 nt, Artificial Sequence
  Description of Artificial Sequence: Synthetic oligonucleotide
agagcuagcuucagguuuu

SEQ ID NO: 2128047 - RNA, 19 nt, Artificial Sequence
  Description of Artificial Sequence: Synthetic oligonucleotide
cccggaacugcugucacgg

SEQ ID NO: 2128048 - RNA, 19 nt, Artificial Sequence
  Description of Artificial Sequence: Synthetic oligonucleotide
gcgaguagcugucccacug

SEQ ID NO: 2128049 - RNA, 19 nt, Artificial Sequence
  Description of Artificial Sequence: Synthetic oligonucleotide
ggaguagaauggauucuug

SEQ ID NO: 2128050 - RNA, 19 nt, Artificial Sequence
  Description of Artificial Sequence: Synthetic oligonucleotide
agcggguaacugaaagucu

SEQ ID NO: 2128051 - RNA, 19 nt, Artificial Sequence
  Description of Artificial Sequence: Synthetic oligonucleotide
gccgaaggccaccagcacc

SEQ ID NO: 2128052 - RNA, 19 nt, Artificial Sequence
  Description of Artificial Sequence: Synthetic oligonucleotide
uagcugucccacugguaaa

SEQ ID NO: 2128053 - RNA, 19 nt, Artificial Sequence
  Description of Artificial Sequence: Synthetic oligonucleotide
gguaauuggcagaguuacc

SEQ ID NO: 2128054 - RNA, 19 nt, Artificial Sequence
  Description of Artificial Sequence: Synthetic oligonucleotide
agacagcugggaaccaaug

SEQ ID NO: 2128055 - RNA, 19 nt, Artificial Sequence
  Description of Artificial Sequence: Synthetic oligonucleotide
caaguacauuaacagggcu

SEQ ID NO: 2128056 - RNA, 19 nt, Artificial Sequence
  Description of Artificial Sequence: Synthetic oligonucleotide
gcgugacccacccggaugc

SEQ ID NO: 2128057 - RNA, 19 nt, Artificial Sequence
  Description of Artificial Sequence: Synthetic oligonucleotide
gcuuccuccauaaauaaau

SEQ ID NO: 2128058 - RNA, 19 nt, Artificial Sequence
  Description of Artificial Sequence: Synthetic oligonucleotide
uugaucccugucaguguuu

SEQ ID NO: 2128059 - RNA, 19 nt, Artificial Sequence
  Description of Artificial Sequence: Synthetic oligonucleotide
ucgcaucugauaggcauuu

SEQ ID NO: 2128060 - RNA, 19 nt, Artificial Sequence
  Description of Artificial Sequence: Synthetic oligonucleotide
gucgcgcuggccgaaggcc

SEQ ID NO: 2128061 - RNA, 19 nt, Artificial Sequence
  Description of Artificial Sequence: Synthetic oligonucleotide
gggcauaggacugugauau

SEQ ID NO: 2128062 - RNA, 19 nt, Artificial Sequence
  Description of Artificial Sequence: Synthetic oligonucleotide
uggaagcagugcaguuuaa

SEQ ID NO: 2128063 - RNA, 19 nt, Artificial Sequence
  Description of Artificial Sequence: Synthetic oligonucleotide
ggcaaagagcgaguggaac

SEQ ID NO: 2128064 - RNA, 19 nt, Artificial Sequence
  Description of Artificial Sequence: Synthetic oligonucleotide
ucccuguuccggagacagc

SEQ ID NO: 2128065 - RNA, 19 nt, Artificial Sequence
  Description of Artificial Sequence: Synthetic oligonucleotide
gugacccacccggaugccg

SEQ ID NO: 2128066 - RNA, 19 nt, Artificial Sequence
  Description of Artificial Sequence: Synthetic oligonucleotide
ucccauuuucaaguacauu

SEQ ID NO: 2128067 - RNA, 19 nt, Artificial Sequence
  Description of Artificial Sequence: Synthetic oligonucleotide
cuauuccagcuugccuagg

SEQ ID NO: 2128068 - RNA, 19 nt, Artificial Sequence
  Description of Artificial Sequence: Synthetic oligonucleotide
ggcggggccggccgaaucg

SEQ ID NO: 2128069 - RNA, 19 nt, Artificial Sequence
  Description of Artificial Sequence: Synthetic oligonucleotide
guggcgaguagcuguccca

SEQ ID NO: 2128070 - RNA, 19 nt, Artificial Sequence
  Description of Artificial Sequence: Synthetic oligonucleotide
gccaucucugcgcugccgc

SEQ ID NO: 2128071 - RNA, 19 nt, Artificial Sequence
  Description of Artificial Sequence: Synthetic oligonucleotide
uuccgacguuccagccccg

SEQ ID NO: 2128072 - RNA, 19 nt, Artificial Sequence
  Description of Artificial Sequence: Synthetic oligonucleotide
gggccggccgaaucgaaug

SEQ ID NO: 2128073 - RNA, 19 nt, Artificial Sequence
  Description of Artificial Sequence: Synthetic oligonucleotide
ccggagacagcugggaacc

SEQ ID NO: 2128074 - RNA, 19 nt, Artificial Sequence
  Description of Artificial Sequence: Synthetic oligonucleotide
cagagaacauggcauucua

SEQ ID NO: 2128075 - RNA, 19 nt, Artificial Sequence
  Description of Artificial Sequence: Synthetic oligonucleotide
ggccggccgaaucgaaugg

SEQ ID NO: 2128076 - RNA, 19 nt, Artificial Sequence
  Description of Artificial Sequence: Synthetic oligonucleotide
gaccacaaacuugaucccu

SEQ ID NO: 2128077 - RNA, 19 nt, Artificial Sequence
  Description of Artificial Sequence: Synthetic oligonucleotide
aggcgcugcgauccggccu

SEQ ID NO: 2128078 - RNA, 19 nt, Artificial Sequence
  Description of Artificial Sequence: Synthetic oligonucleotide
cagugcaguuuaaaugugu

SEQ ID NO: 2128079 - RNA, 19 nt, Artificial Sequence
  Description of Artificial Sequence: Synthetic oligonucleotide
agagcgaguggaacaugga

SEQ ID NO: 2128080 - RNA, 19 nt, Artificial Sequence
  Description of Artificial Sequence: Synthetic oligonucleotide
gcaucucaaugccugaacu

SEQ ID NO: 2128081 - RNA, 19 nt, Artificial Sequence
  Description of Artificial Sequence: Synthetic oligonucleotide
uggcagaguuacccagaua

SEQ ID NO: 2128082 - RNA, 19 nt, Artificial Sequence
  Description of Artificial Sequence: Synthetic oligonucleotide
gcaguuuaaaugugucugu

SEQ ID NO: 2128083 - RNA, 19 nt, Artificial Sequence
  Description of Artificial Sequence: Synthetic oligonucleotide
gaucgccaucucugcgcug

SEQ ID NO: 2128084 - RNA, 19 nt, Artificial Sequence
  Description of Artificial Sequence: Synthetic oligonucleotide
guuccggagacagcuggga

SEQ ID NO: 2128085 - RNA, 19 nt, Artificial Sequence
  Description of Artificial Sequence: Synthetic oligonucleotide
agcuuccuccauaaauaaa

SEQ ID NO: 2128086 - RNA, 19 nt, Artificial Sequence
  Description of Artificial Sequence: Synthetic oligonucleotide
cuugaucccugucaguguu

SEQ ID NO: 2128087 - RNA, 19 nt, Artificial Sequence
  Description of Artificial Sequence: Synthetic oligonucleotide
ucgccaucucugcgcugcc

SEQ ID NO: 2128088 - RNA, 19 nt, Artificial Sequence
  Description of Artificial Sequence: Synthetic oligonucleotide
gccgaaucgaauggacacc

SEQ ID NO: 2128089 - RNA, 19 nt, Artificial Sequence
  Description of Artificial Sequence: Synthetic oligonucleotide
ugccaccucuagagcuagc

SEQ ID NO: 2128090 - RNA, 19 nt, Artificial Sequence
  Description of Artificial Sequence: Synthetic oligonucleotide
cagcaugagcuucucguua

SEQ ID NO: 2128091 - RNA, 19 nt, Artificial Sequence
  Description of Artificial Sequence: Synthetic oligonucleotide
aggcggggccggccgaauc

SEQ ID NO: 2128092 - RNA, 19 nt, Artificial Sequence
  Description of Artificial Sequence: Synthetic oligonucleotide
gucucagauccugguucag

SEQ ID NO: 2128093 - RNA, 19 nt, Artificial Sequence
  Description of Artificial Sequence: Synthetic oligonucleotide
ccgucggccguguacuugc

SEQ ID NO: 2128094 - RNA, 19 nt, Artificial Sequence
  Description of Artificial Sequence: Synthetic oligonucleotide
ccguguacuugccauucac

SEQ ID NO: 2128095 - RNA, 19 nt, Artificial Sequence
  Description of Artificial Sequence: Synthetic oligonucleotide
caaagagcgaguggaacau

SEQ ID NO: 2128096 - RNA, 19 nt, Artificial Sequence
  Description of Artificial Sequence: Synthetic oligonucleotide
cugaggcgcugcgauccgg

SEQ ID NO: 2128097 - RNA, 19 nt, Artificial Sequence
  Description of Artificial Sequence: Synthetic oligonucleotide
gcucgcaucugauaggcau

SEQ ID NO: 2128098 - RNA, 19 nt, Artificial Sequence
  Description of Artificial Sequence: Synthetic oligonucleotide
guaaaucaggccgccggcu

SEQ ID NO: 2128099 - RNA, 19 nt, Artificial Sequence
  Description of Artificial Sequence: Synthetic oligonucleotide
augccgucgcgcuggccga

SEQ ID NO: 2128100 - RNA, 19 nt, Artificial Sequence
  Description of Artificial Sequence: Synthetic oligonucleotide
gcgauccggccucuuuccg

SEQ ID NO: 2128101 - RNA, 19 nt, Artificial Sequence
  Description of Artificial Sequence: Synthetic oligonucleotide
cgaguagcugucccacugg

SEQ ID NO: 2128102 - RNA, 19 nt, Artificial Sequence
  Description of Artificial Sequence: Synthetic oligonucleotide
acccacccggaugccgucg

SEQ ID NO: 2128103 - RNA, 19 nt, Artificial Sequence
  Description of Artificial Sequence: Synthetic oligonucleotide
cugccgcugaggcgcugcg

SEQ ID NO: 2128104 - RNA, 19 nt, Artificial Sequence
  Description of Artificial Sequence: Synthetic oligonucleotide
ggacugugauauauacaga

SEQ ID NO: 2128105 - RNA, 19 nt, Artificial Sequence
  Description of Artificial Sequence: Synthetic oligonucleotide
agccuaugacccaggucca

SEQ ID NO: 2128106 - RNA, 19 nt, Artificial Sequence
  Description of Artificial Sequence: Synthetic oligonucleotide
cuagagcuagcuucagguu

SEQ ID NO: 2128107 - RNA, 19 nt, Artificial Sequence
  Description of Artificial Sequence: Synthetic oligonucleotide
gguccagcggguaacugaa

SEQ ID NO: 2128108 - RNA, 19 nt, Artificial Sequence
  Description of Artificial Sequence: Synthetic oligonucleotide
ucuuucccgucggccgugu

SEQ ID NO: 2128109 - RNA, 19 nt, Artificial Sequence
  Description of Artificial Sequence: Synthetic oligonucleotide
gaccaggcacaguguucuc

SEQ ID NO: 2128110 - RNA, 19 nt, Artificial Sequence
  Description of Artificial Sequence: Synthetic oligonucleotide
agauccugguucagccuau

SEQ ID NO: 2128111 - RNA, 19 nt, Artificial Sequence
  Description of Artificial Sequence: Synthetic oligonucleotide
cucccauuuucaaguacau

SEQ ID NO: 2128112 - RNA, 19 nt, Artificial Sequence
  Description of Artificial Sequence: Synthetic oligonucleotide
cgaaucgaauggacaccgg

SEQ ID NO: 2128113 - RNA, 19 nt, Artificial Sequence
  Description of Artificial Sequence: Synthetic oligonucleotide
cuucuuucccgucggccgu

SEQ ID NO: 2128114 - RNA, 19 nt, Artificial Sequence
  Description of Artificial Sequence: Synthetic oligonucleotide
ccggccgaaucgaauggac

SEQ ID NO: 2128115 - RNA, 19 nt, Artificial Sequence
  Description of Artificial Sequence: Synthetic oligonucleotide
cguacacacuaaagaucgc

SEQ ID NO: 2128116 - RNA, 19 nt, Artificial Sequence
  Description of Artificial Sequence: Synthetic oligonucleotide
ggauccucacuggaauaga

SEQ ID NO: 2128117 - RNA, 19 nt, Artificial Sequence
  Description of Artificial Sequence: Synthetic oligonucleotide
uaaggcggggccggccgaa

SEQ ID NO: 2128118 - RNA, 19 nt, Artificial Sequence
  Description of Artificial Sequence: Synthetic oligonucleotide
cucagcccguggcgaguag

SEQ ID NO: 2128119 - RNA, 19 nt, Artificial Sequence
  Description of Artificial Sequence: Synthetic oligonucleotide
guaaggcggggccggccga

SEQ ID NO: 2128120 - RNA, 19 nt, Artificial Sequence
  Description of Artificial Sequence: Synthetic oligonucleotide
cugcugucacggccccgcc

SEQ ID NO: 2128121 - RNA, 19 nt, Artificial Sequence
  Description of Artificial Sequence: Synthetic oligonucleotide
ggguaacugaaagucuucu

SEQ ID NO: 2128122 - RNA, 19 nt, Artificial Sequence
  Description of Artificial Sequence: Synthetic oligonucleotide
gacccacccggaugccguc

SEQ ID NO: 2128123 - RNA, 19 nt, Artificial Sequence
  Description of Artificial Sequence: Synthetic oligonucleotide
ccgcucgucgugcaguuuc

SEQ ID NO: 2128124 - RNA, 19 nt, Artificial Sequence
  Description of Artificial Sequence: Synthetic oligonucleotide
gcugucacggccccgccua

SEQ ID NO: 2128125 - RNA, 19 nt, Artificial Sequence
  Description of Artificial Sequence: Synthetic oligonucleotide
cagcacccgcucgucgugc

SEQ ID NO: 2128126 - RNA, 19 nt, Artificial Sequence
  Description of Artificial Sequence: Synthetic oligonucleotide
ccuguuccggagacagcug

SEQ ID NO: 2128127 - RNA, 19 nt, Artificial Sequence
  Description of Artificial Sequence: Synthetic oligonucleotide
cguggcgaguagcuguccc

SEQ ID NO: 2128128 - RNA, 19 nt, Artificial Sequence
  Description of Artificial Sequence: Synthetic oligonucleotide
ggccguguacuugccauuc

SEQ ID NO: 2128129 - RNA, 19 nt, Artificial Sequence
  Description of Artificial Sequence: Synthetic oligonucleotide
ggccucagcccguggcgag

SEQ ID NO: 2128130 - RNA, 19 nt, Artificial Sequence
  Description of Artificial Sequence: Synthetic oligonucleotide
caguuuaaaugugucuguu

SEQ ID NO: 2128131 - RNA, 19 nt, Artificial Sequence
  Description of Artificial Sequence: Synthetic oligonucleotide
acccgcucgucgugcaguu

SEQ ID NO: 2128132 - RNA, 19 nt, Artificial Sequence
  Description of Artificial Sequence: Synthetic oligonucleotide
ggacugcgugacccacccg

SEQ ID NO: 2128133 - RNA, 19 nt, Artificial Sequence
  Description of Artificial Sequence: Synthetic oligonucleotide
ucaggccgccggcuuuguu

SEQ ID NO: 2128134 - RNA, 19 nt, Artificial Sequence
  Description of Artificial Sequence: Synthetic oligonucleotide
cucgcaucugauaggcauu

SEQ ID NO: 2128135 - RNA, 19 nt, Artificial Sequence
  Description of Artificial Sequence: Synthetic oligonucleotide
ccccggaacugcugucacg

SEQ ID NO: 2128136 - RNA, 19 nt, Artificial Sequence
  Description of Artificial Sequence: Synthetic oligonucleotide
accggguaauuggcagagu

SEQ ID NO: 2128137 - RNA, 19 nt, Artificial Sequence
  Description of Artificial Sequence: Synthetic oligonucleotide
ggagacagcugggaaccaa

SEQ ID NO: 2128138 - RNA, 19 nt, Artificial Sequence
  Description of Artificial Sequence: Synthetic oligonucleotide
ggacaccggguaauuggca

SEQ ID NO: 2128139 - RNA, 19 nt, Artificial Sequence
  Description of Artificial Sequence: Synthetic oligonucleotide
guacauuaacagggcuacu

SEQ ID NO: 2128140 - RNA, 19 nt, Artificial Sequence
  Description of Artificial Sequence: Synthetic oligonucleotide
gcuucucguuagagguaag

SEQ ID NO: 2128141 - RNA, 19 nt, Artificial Sequence
  Description of Artificial Sequence: Synthetic oligonucleotide
gcucgucgugcaguuucag

SEQ ID NO: 2128142 - RNA, 19 nt, Artificial Sequence
  Description of Artificial Sequence: Synthetic oligonucleotide
aaggcggggccggccgaau

SEQ ID NO: 2128143 - RNA, 19 nt, Artificial Sequence
  Description of Artificial Sequence: Synthetic oligonucleotide
cccguggcgaguagcuguc

SEQ ID NO: 2128144 - RNA, 19 nt, Artificial Sequence
  Description of Artificial Sequence: Synthetic oligonucleotide
gcugccgcugaggcgcugc

SEQ ID NO: 2128145 - RNA, 19 nt, Artificial Sequence
  Description of Artificial Sequence: Synthetic oligonucleotide
ccggcuuuguucaccacgu

SEQ ID NO: 2128146 - RNA, 19 nt, Artificial Sequence
  Description of Artificial Sequence: Synthetic oligonucleotide
gccguguacuugccauuca

SEQ ID NO: 2128147 - RNA, 19 nt, Artificial Sequence
  Description of Artificial Sequence: Synthetic oligonucleotide
ccggaacugcugucacggc

SEQ ID NO: 2128148 - RNA, 19 nt, Artificial Sequence
  Description of Artificial Sequence: Synthetic oligonucleotide
ucccgucggccguguacuu

SEQ ID NO: 2128149 - RNA, 19 nt, Artificial Sequence
  Description of Artificial Sequence: Synthetic oligonucleotide
gccgccggcuuuguucacc

SEQ ID NO: 2128150 - RNA, 19 nt, Artificial Sequence
  Description of Artificial Sequence: Synthetic oligonucleotide
gccccggaacugcugucac

SEQ ID NO: 2128151 - RNA, 19 nt, Artificial Sequence
  Description of Artificial Sequence: Synthetic oligonucleotide
gcacccgcucgucgugcag

SEQ ID NO: 2128152 - RNA, 19 nt, Artificial Sequence
  Description of Artificial Sequence: Synthetic oligonucleotide
gcggguaacugaaagucuu

SEQ ID NO: 2128153 - RNA, 19 nt, Artificial Sequence
  Description of Artificial Sequence: Synthetic oligonucleotide
cccacccggaugccgucgc

SEQ ID NO: 2128154 - RNA, 19 nt, Artificial Sequence
  Description of Artificial Sequence: Synthetic oligonucleotide
aucaggccgccggcuuugu

SEQ ID NO: 2128155 - RNA, 19 nt, Artificial Sequence
  Description of Artificial Sequence: Synthetic oligonucleotide
ggcauaggacugugauaua

SEQ ID NO: 2128156 - RNA, 19 nt, Artificial Sequence
  Description of Artificial Sequence: Synthetic oligonucleotide
gccuaggaucugccaggac

SEQ ID NO: 2128157 - RNA, 19 nt, Artificial Sequence
  Description of Artificial Sequence: Synthetic oligonucleotide
ccuaugacccagguccaaa

SEQ ID NO: 2128158 - RNA, 19 nt, Artificial Sequence
  Description of Artificial Sequence: Synthetic oligonucleotide
cgucgcgcuggccgaaggc

SEQ ID NO: 2128159 - RNA, 19 nt, Artificial Sequence
  Description of Artificial Sequence: Synthetic oligonucleotide
ccggguaauuggcagaguu

SEQ ID NO: 2128160 - RNA, 19 nt, Artificial Sequence
  Description of Artificial Sequence: Synthetic oligonucleotide
ggcuacugcaauggauccu

SEQ ID NO: 2128161 - RNA, 19 nt, Artificial Sequence
  Description of Artificial Sequence: Synthetic oligonucleotide
cggguaauuggcagaguua

SEQ ID NO: 2128162 - RNA, 19 nt, Artificial Sequence
  Description of Artificial Sequence: Synthetic oligonucleotide
ccacccggaugccgucgcg

SEQ ID NO: 2128163 - RNA, 19 nt, Artificial Sequence
  Description of Artificial Sequence: Synthetic oligonucleotide
gccgcugaggcgcugcgau

SEQ ID NO: 2128164 - RNA, 19 nt, Artificial Sequence
  Description of Artificial Sequence: Synthetic oligonucleotide
ccgucgcgcuggccgaagg

SEQ ID NO: 2128165 - RNA, 19 nt, Artificial Sequence
  Description of Artificial Sequence: Synthetic oligonucleotide
ugccgucgcgcuggccgaa

SEQ ID NO: 2128166 - RNA, 19 nt, Artificial Sequence
  Description of Artificial Sequence: Synthetic oligonucleotide
cgauccggccucuuuccga

SEQ ID NO: 2128167 - RNA, 19 nt, Artificial Sequence
  Description of Artificial Sequence: Synthetic oligonucleotide
gccggccgaaucgaaugga

SEQ ID NO: 2128168 - RNA, 19 nt, Artificial Sequence
  Description of Artificial Sequence: Synthetic oligonucleotide
ggcgaguagcugucccacu

SEQ ID NO: 2128169 - RNA, 19 nt, Artificial Sequence
  Description of Artificial Sequence: Synthetic oligonucleotide
guccaggauccauccccau

SEQ ID NO: 2128170 - RNA, 19 nt, Artificial Sequence
  Description of Artificial Sequence: Synthetic oligonucleotide
guccagcggguaacugaaa

SEQ ID NO: 2128171 - RNA, 19 nt, Artificial Sequence
  Description of Artificial Sequence: Synthetic oligonucleotide
ccgccggcuuuguucacca

SEQ ID NO: 2128172 - RNA, 19 nt, Artificial Sequence
  Description of Artificial Sequence: Synthetic oligonucleotide
cgacguuccagccccggaa

SEQ ID NO: 2128173 - RNA, 19 nt, Artificial Sequence
  Description of Artificial Sequence: Synthetic oligonucleotide
cccgucggccguguacuug

SEQ ID NO: 2128174 - RNA, 19 nt, Artificial Sequence
  Description of Artificial Sequence: Synthetic oligonucleotide
cccggaugccgucgcgcug

SEQ ID NO: 2128175 - RNA, 19 nt, Artificial Sequence
  Description of Artificial Sequence: Synthetic oligonucleotide
cugcgugacccacccggau

SEQ ID NO: 2128176 - RNA, 19 nt, Artificial Sequence
  Description of Artificial Sequence: Synthetic oligonucleotide
cuuucccgucggccgugua

SEQ ID NO: 2128177 - RNA, 19 nt, Artificial Sequence
  Description of Artificial Sequence: Synthetic oligonucleotide
gcugcgauccggccucuuu

SEQ ID NO: 2128178 - RNA, 19 nt, Artificial Sequence
  Description of Artificial Sequence: Synthetic oligonucleotide
cgcgcuggccgaaggccac

SEQ ID NO: 2128179 - RNA, 19 nt, Artificial Sequence
  Description of Artificial Sequence: Synthetic oligonucleotide
ccagccccggaacugcugu

SEQ ID NO: 2128180 - RNA, 19 nt, Artificial Sequence
  Description of Artificial Sequence: Synthetic oligonucleotide
cgucggccguguacuugcc

SEQ ID NO: 2128181 - RNA, 19 nt, Artificial Sequence
  Description of Artificial Sequence: Synthetic oligonucleotide
ccgcugaggcgcugcgauc

SEQ ID NO: 2128182 - RNA, 19 nt, Artificial Sequence
  Description of Artificial Sequence: Synthetic oligonucleotide
gccuaugacccagguccaa

SEQ ID NO: 2128183 - RNA, 19 nt, Artificial Sequence
  Description of Artificial Sequence: Synthetic oligonucleotide
ggaugccgucgcgcuggcc

SEQ ID NO: 2128184 - RNA, 19 nt, Artificial Sequence
  Description of Artificial Sequence: Synthetic oligonucleotide
ccgacguuccagccccgga

SEQ ID NO: 2128185 - RNA, 19 nt, Artificial Sequence
  Description of Artificial Sequence: Synthetic oligonucleotide
cgccaucucugcgcugccg

SEQ ID NO: 2128186 - RNA, 19 nt, Artificial Sequence
  Description of Artificial Sequence: Synthetic oligonucleotide
ccguggcgaguagcugucc

SEQ ID NO: 2128187 - RNA, 19 nt, Artificial Sequence
  Description of Artificial Sequence: Synthetic oligonucleotide
gccgucgcgcuggccgaag

SEQ ID NO: 2128188 - RNA, 19 nt, Artificial Sequence
  Description of Artificial Sequence: Synthetic oligonucleotide
cgcucgucgugcaguuuca

SEQ ID NO: 2128189 - RNA, 19 nt, Artificial Sequence
  Description of Artificial Sequence: Synthetic oligonucleotide
gcgcuggccgaaggccacc

SEQ ID NO: 2128190 - RNA, 19 nt, Artificial Sequence
  Description of Artificial Sequence: Synthetic oligonucleotide
cgugacccacccggaugcc

SEQ ID NO: 2128191 - RNA, 19 nt, Artificial Sequence
  Description of Artificial Sequence: Synthetic oligonucleotide
cgaauggacaccggguaau

SEQ ID NO: 2128192 - RNA, 19 nt, Artificial Sequence
  Description of Artificial Sequence: Synthetic oligonucleotide
ggggccggccgaaucgaau

SEQ ID NO: 2128193 - RNA, 19 nt, Artificial Sequence
  Description of Artificial Sequence: Synthetic oligonucleotide
cggaugccgucgcgcuggc

SEQ ID NO: 2128194 - RNA, 19 nt, Artificial Sequence
  Description of Artificial Sequence: Synthetic oligonucleotide
gccucagcccguggcgagu

SEQ ID NO: 2128195 - RNA, 19 nt, Artificial Sequence
  Description of Artificial Sequence: Synthetic oligonucleotide
cggcuuuguucaccacgua

SEQ ID NO: 2128196 - RNA, 19 nt, Artificial Sequence
  Description of Artificial Sequence: Synthetic oligonucleotide
cggggccggccgaaucgaa

SEQ ID NO: 2128197 - RNA, 19 nt, Artificial Sequence
  Description of Artificial Sequence: Synthetic oligonucleotide
ccccaugaccaggcacagu

SEQ ID NO: 2128198 - RNA, 19 nt, Artificial Sequence
  Description of Artificial Sequence: Synthetic oligonucleotide
ccggccucuuuccgacguu

SEQ ID NO: 2128199 - RNA, 19 nt, Artificial Sequence
  Description of Artificial Sequence: Synthetic oligonucleotide
cgcugccgcugaggcgcug

SEQ ID NO: 2128200 - RNA, 19 nt, Artificial Sequence
  Description of Artificial Sequence: Synthetic oligonucleotide
gcgcugcgauccggccucu

SEQ ID NO: 2128201 - RNA, 19 nt, Artificial Sequence
  Description of Artificial Sequence: Synthetic oligonucleotide
cccgcucgucgugcaguuu

SEQ ID NO: 2128202 - RNA, 19 nt, Artificial Sequence
  Description of Artificial Sequence: Synthetic oligonucleotide
cgcugcgauccggccucuu

SEQ ID NO: 2128203 - RNA, 19 nt, Artificial Sequence
  Description of Artificial Sequence: Synthetic oligonucleotide
aauuaauucaggaagacgc

SEQ ID NO: 2128204 - RNA, 19 nt, Artificial Sequence
  Description of Artificial Sequence: Synthetic oligonucleotide
gauaaauuaauucaggaag

SEQ ID NO: 2128205 - RNA, 19 nt, Artificial Sequence
  Description of Artificial Sequence: Synthetic oligonucleotide
aacagagucuccuuaaggc

SEQ ID NO: 2128206 - RNA, 19 nt, Artificial Sequence
  Description of Artificial Sequence: Synthetic oligonucleotide
uguguugugaauaaggaca

SEQ ID NO: 2128207 - RNA, 19 nt, Artificial Sequence
  Description of Artificial Sequence: Synthetic oligonucleotide
aaaucggacucccugaaac

SEQ ID NO: 2128208 - RNA, 19 nt, Artificial Sequence
  Description of Artificial Sequence: Synthetic oligonucleotide
ugugucaauguccagaaag

SEQ ID NO: 2128209 - RNA, 19 nt, Artificial Sequence
  Description of Artificial Sequence: Synthetic oligonucleotide
gauaauuuccaugaugugg

SEQ ID NO: 2128210 - RNA, 19 nt, Artificial Sequence
  Description of Artificial Sequence: Synthetic oligonucleotide
gaagagauaaauuaauuca

SEQ ID NO: 2128211 - RNA, 19 nt, Artificial Sequence
  Description of Artificial Sequence: Synthetic oligonucleotide
aauaaggacaugccugcgg

SEQ ID NO: 2128212 - RNA, 19 nt, Artificial Sequence
  Description of Artificial Sequence: Synthetic oligonucleotide
aauucauuccacucccagg

SEQ ID NO: 2128213 - RNA, 19 nt, Artificial Sequence
  Description of Artificial Sequence: Synthetic oligonucleotide
aaauuaauucaggaagacg

SEQ ID NO: 2128214 - RNA, 19 nt, Artificial Sequence
  Description of Artificial Sequence: Synthetic oligonucleotide
aguuuuauguucucugagg

SEQ ID NO: 2128215 - RNA, 19 nt, Artificial Sequence
  Description of Artificial Sequence: Synthetic oligonucleotide
acaagggucacauccaagg

SEQ ID NO: 2128216 - RNA, 19 nt, Artificial Sequence
  Description of Artificial Sequence: Synthetic oligonucleotide
uuuauguucucugaggccc

SEQ ID NO: 2128217 - RNA, 19 nt, Artificial Sequence
  Description of Artificial Sequence: Synthetic oligonucleotide
aagggucacauccaaggac

SEQ ID NO: 2128218 - RNA, 19 nt, Artificial Sequence
  Description of Artificial Sequence: Synthetic oligonucleotide
uguguaagugagaaaucgg

SEQ ID NO: 2128219 - RNA, 19 nt, Artificial Sequence
  Description of Artificial Sequence: Synthetic oligonucleotide
ugaauaaggacaugccugc

SEQ ID NO: 2128220 - RNA, 19 nt, Artificial Sequence
  Description of Artificial Sequence: Synthetic oligonucleotide
gaagaguccuuuuccaccg

SEQ ID NO: 2128221 - RNA, 19 nt, Artificial Sequence
  Description of Artificial Sequence: Synthetic oligonucleotide
ugagaaaucggacucccug

SEQ ID NO: 2128222 - RNA, 19 nt, Artificial Sequence
  Description of Artificial Sequence: Synthetic oligonucleotide
guuuuauguucucugaggc

SEQ ID NO: 2128223 - RNA, 19 nt, Artificial Sequence
  Description of Artificial Sequence: Synthetic oligonucleotide
gaagaaguguguaagugag

SEQ ID NO: 2128224 - RNA, 19 nt, Artificial Sequence
  Description of Artificial Sequence: Synthetic oligonucleotide
uaagugagaaaucggacuc

SEQ ID NO: 2128225 - RNA, 19 nt, Artificial Sequence
  Description of Artificial Sequence: Synthetic oligonucleotide
uaggauaauuuccaugaug

SEQ ID NO: 2128226 - RNA, 19 nt, Artificial Sequence
  Description of Artificial Sequence: Synthetic oligonucleotide
gaaucucccaaguaccggg

SEQ ID NO: 2128227 - RNA, 19 nt, Artificial Sequence
  Description of Artificial Sequence: Synthetic oligonucleotide
cauggauguauccagcucc

SEQ ID NO: 2128228 - RNA, 19 nt, Artificial Sequence
  Description of Artificial Sequence: Synthetic oligonucleotide
augugguccaauucauucc

SEQ ID NO: 2128229 - RNA, 19 nt, Artificial Sequence
  Description of Artificial Sequence: Synthetic oligonucleotide
aauucaggaagacgcaccu

SEQ ID NO: 2128230 - RNA, 19 nt, Artificial Sequence
  Description of Artificial Sequence: Synthetic oligonucleotide
acagggagaaaucuucuuc

SEQ ID NO: 2128231 - RNA, 19 nt, Artificial Sequence
  Description of Artificial Sequence: Synthetic oligonucleotide
cuggacuuuguccagagag

SEQ ID NO: 2128232 - RNA, 19 nt, Artificial Sequence
  Description of Artificial Sequence: Synthetic oligonucleotide
uguaagugagaaaucggac

SEQ ID NO: 2128233 - RNA, 19 nt, Artificial Sequence
  Description of Artificial Sequence: Synthetic oligonucleotide
uccagagagauucggagca

SEQ ID NO: 2128234 - RNA, 19 nt, Artificial Sequence
  Description of Artificial Sequence: Synthetic oligonucleotide
uccuuaaggcaucuggaag

SEQ ID NO: 2128235 - RNA, 19 nt, Artificial Sequence
  Description of Artificial Sequence: Synthetic oligonucleotide
uaauucaggaagacgcacc

SEQ ID NO: 2128236 - RNA, 19 nt, Artificial Sequence
  Description of Artificial Sequence: Synthetic oligonucleotide
aguaccgggagcucagagc

SEQ ID NO: 2128237 - RNA, 19 nt, Artificial Sequence
  Description of Artificial Sequence: Synthetic oligonucleotide
uguccagagagauucggag

SEQ ID NO: 2128238 - RNA, 19 nt, Artificial Sequence
  Description of Artificial Sequence: Synthetic oligonucleotide
aaggaccccaccaugaguc

SEQ ID NO: 2128239 - RNA, 19 nt, Artificial Sequence
  Description of Artificial Sequence: Synthetic oligonucleotide
aucuggaagagauaaauua

SEQ ID NO: 2128240 - RNA, 19 nt, Artificial Sequence
  Description of Artificial Sequence: Synthetic oligonucleotide
agagauaaauuaauucagg

SEQ ID NO: 2128241 - RNA, 19 nt, Artificial Sequence
  Description of Artificial Sequence: Synthetic oligonucleotide
uuuuauuuccaaggagagg

SEQ ID NO: 2128242 - RNA, 19 nt, Artificial Sequence
  Description of Artificial Sequence: Synthetic oligonucleotide
uuuuauguucucugaggcc

SEQ ID NO: 2128243 - RNA, 19 nt, Artificial Sequence
  Description of Artificial Sequence: Synthetic oligonucleotide
cucggcuaaacacacauac

SEQ ID NO: 2128244 - RNA, 19 nt, Artificial Sequence
  Description of Artificial Sequence: Synthetic oligonucleotide
agcuucgaagaccagcugg

SEQ ID NO: 2128245 - RNA, 19 nt, Artificial Sequence
  Description of Artificial Sequence: Synthetic oligonucleotide
agagauucggagcagggcu

SEQ ID NO: 2128246 - RNA, 19 nt, Artificial Sequence
  Description of Artificial Sequence: Synthetic oligonucleotide
guguguaagugagaaaucg

SEQ ID NO: 2128247 - RNA, 19 nt, Artificial Sequence
  Description of Artificial Sequence: Synthetic oligonucleotide
auaauuuccaugauguggu

SEQ ID NO: 2128248 - RNA, 19 nt, Artificial Sequence
  Description of Artificial Sequence: Synthetic oligonucleotide
aauccugacaggaggaaag

SEQ ID NO: 2128249 - RNA, 19 nt, Artificial Sequence
  Description of Artificial Sequence: Synthetic oligonucleotide
ugugguccaauucauucca

SEQ ID NO: 2128250 - RNA, 19 nt, Artificial Sequence
  Description of Artificial Sequence: Synthetic oligonucleotide
ugagucuuaggauccuagg

SEQ ID NO: 2128251 - RNA, 19 nt, Artificial Sequence
  Description of Artificial Sequence: Synthetic oligonucleotide
aagugagaaaucggacucc

SEQ ID NO: 2128252 - RNA, 19 nt, Artificial Sequence
  Description of Artificial Sequence: Synthetic oligonucleotide
aggggaugccaucucaccc

SEQ ID NO: 2128253 - RNA, 19 nt, Artificial Sequence
  Description of Artificial Sequence: Synthetic oligonucleotide
cuugcugguagcuucgaag

SEQ ID NO: 2128254 - RNA, 19 nt, Artificial Sequence
  Description of Artificial Sequence: Synthetic oligonucleotide
gucuccuuaaggcaucugg

SEQ ID NO: 2128255 - RNA, 19 nt, Artificial Sequence
  Description of Artificial Sequence: Synthetic oligonucleotide
auaaauuaauucaggaaga

SEQ ID NO: 2128256 - RNA, 19 nt, Artificial Sequence
  Description of Artificial Sequence: Synthetic oligonucleotide
uucaggaagacgcaccuuc

SEQ ID NO: 2128257 - RNA, 19 nt, Artificial Sequence
  Description of Artificial Sequence: Synthetic oligonucleotide
uggggcaucguuucauucg

SEQ ID NO: 2128258 - RNA, 19 nt, Artificial Sequence
  Description of Artificial Sequence: Synthetic oligonucleotide
ucgaagaccagcuggacuc

SEQ ID NO: 2128259 - RNA, 19 nt, Artificial Sequence
  Description of Artificial Sequence: Synthetic oligonucleotide
agggucacauccaaggacc

SEQ ID NO: 2128260 - RNA, 19 nt, Artificial Sequence
  Description of Artificial Sequence: Synthetic oligonucleotide
ggaagagauaaauuaauuc

SEQ ID NO: 2128261 - RNA, 19 nt, Artificial Sequence
  Description of Artificial Sequence: Synthetic oligonucleotide
uuuuccaccgcagaugugu

SEQ ID NO: 2128262 - RNA, 19 nt, Artificial Sequence
  Description of Artificial Sequence: Synthetic oligonucleotide
gugaauaaggacaugccug

SEQ ID NO: 2128263 - RNA, 19 nt, Artificial Sequence
  Description of Artificial Sequence: Synthetic oligonucleotide
agugagaaaucggacuccc

SEQ ID NO: 2128264 - RNA, 19 nt, Artificial Sequence
  Description of Artificial Sequence: Synthetic oligonucleotide
ggaagacgcaccuucacgg

SEQ ID NO: 2128265 - RNA, 19 nt, Artificial Sequence
  Description of Artificial Sequence: Synthetic oligonucleotide
aggauccuaggauaauuuc

SEQ ID NO: 2128266 - RNA, 19 nt, Artificial Sequence
  Description of Artificial Sequence: Synthetic oligonucleotide
gaaagaagucauccaggcc

SEQ ID NO: 2128267 - RNA, 19 nt, Artificial Sequence
  Description of Artificial Sequence: Synthetic oligonucleotide
gauguauccagcucccuga

SEQ ID NO: 2128268 - RNA, 19 nt, Artificial Sequence
  Description of Artificial Sequence: Synthetic oligonucleotide
auaaggacaugccugcgga

SEQ ID NO: 2128269 - RNA, 19 nt, Artificial Sequence
  Description of Artificial Sequence: Synthetic oligonucleotide
uccuaggauaauuuccaug

SEQ ID NO: 2128270 - RNA, 19 nt, Artificial Sequence
  Description of Artificial Sequence: Synthetic oligonucleotide
gacagguccaguuuuaugu

SEQ ID NO: 2128271 - RNA, 19 nt, Artificial Sequence
  Description of Artificial Sequence: Synthetic oligonucleotide
acugcugagagccucggcu

SEQ ID NO: 2128272 - RNA, 19 nt, Artificial Sequence
  Description of Artificial Sequence: Synthetic oligonucleotide
caugaugugguccaauuca

SEQ ID NO: 2128273 - RNA, 19 nt, Artificial Sequence
  Description of Artificial Sequence: Synthetic oligonucleotide
uuuguccagagagauucgg

SEQ ID NO: 2128274 - RNA, 19 nt, Artificial Sequence
  Description of Artificial Sequence: Synthetic oligonucleotide
ucuuaggauccuaggauaa

SEQ ID NO: 2128275 - RNA, 19 nt, Artificial Sequence
  Description of Artificial Sequence: Synthetic oligonucleotide
uugcugguagcuucgaaga

SEQ ID NO: 2128276 - RNA, 19 nt, Artificial Sequence
  Description of Artificial Sequence: Synthetic oligonucleotide
accaugagucuuaggaucc

SEQ ID NO: 2128277 - RNA, 19 nt, Artificial Sequence
  Description of Artificial Sequence: Synthetic oligonucleotide
uggaagagauaaauuaauu

SEQ ID NO: 2128278 - RNA, 19 nt, Artificial Sequence
  Description of Artificial Sequence: Synthetic oligonucleotide
ugaaacagagucuccuuaa

SEQ ID NO: 2128279 - RNA, 19 nt, Artificial Sequence
  Description of Artificial Sequence: Synthetic oligonucleotide
agccaauggugguagacag

SEQ ID NO: 2128280 - RNA, 19 nt, Artificial Sequence
  Description of Artificial Sequence: Synthetic oligonucleotide
aaucggacucccugaaaca

SEQ ID NO: 2128281 - RNA, 19 nt, Artificial Sequence
  Description of Artificial Sequence: Synthetic oligonucleotide
caguccacugcugagagcc

SEQ ID NO: 2128282 - RNA, 19 nt, Artificial Sequence
  Description of Artificial Sequence: Synthetic oligonucleotide
cauccaaggacccagcuca

SEQ ID NO: 2128283 - RNA, 19 nt, Artificial Sequence
  Description of Artificial Sequence: Synthetic oligonucleotide
aagaguccuuuuccaccgc

SEQ ID NO: 2128284 - RNA, 19 nt, Artificial Sequence
  Description of Artificial Sequence: Synthetic oligonucleotide
acagagucuccuuaaggca

SEQ ID NO: 2128285 - RNA, 19 nt, Artificial Sequence
  Description of Artificial Sequence: Synthetic oligonucleotide
gagagccucggcuaaacac

SEQ ID NO: 2128286 - RNA, 19 nt, Artificial Sequence
  Description of Artificial Sequence: Synthetic oligonucleotide
uuuccaaggagaggcagcc

SEQ ID NO: 2128287 - RNA, 19 nt, Artificial Sequence
  Description of Artificial Sequence: Synthetic oligonucleotide
guauccagcucccugagga

SEQ ID NO: 2128288 - RNA, 19 nt, Artificial Sequence
  Description of Artificial Sequence: Synthetic oligonucleotide
cagaaucucccaaguaccg

SEQ ID NO: 2128289 - RNA, 19 nt, Artificial Sequence
  Description of Artificial Sequence: Synthetic oligonucleotide
uuaauucaggaagacgcac

SEQ ID NO: 2128290 - RNA, 19 nt, Artificial Sequence
  Description of Artificial Sequence: Synthetic oligonucleotide
gauccuaggauaauuucca

SEQ ID NO: 2128291 - RNA, 19 nt, Artificial Sequence
  Description of Artificial Sequence: Synthetic oligonucleotide
acauccaaggacccagcuc

SEQ ID NO: 2128292 - RNA, 19 nt, Artificial Sequence
  Description of Artificial Sequence: Synthetic oligonucleotide
agggcuugcugguagcuuc

SEQ ID NO: 2128293 - RNA, 19 nt, Artificial Sequence
  Description of Artificial Sequence: Synthetic oligonucleotide
uggacuuuguccagagaga

SEQ ID NO: 2128294 - RNA, 19 nt, Artificial Sequence
  Description of Artificial Sequence: Synthetic oligonucleotide
aaguaccgggagcucagag

SEQ ID NO: 2128295 - RNA, 19 nt, Artificial Sequence
  Description of Artificial Sequence: Synthetic oligonucleotide
gagucuuaggauccuagga

SEQ ID NO: 2128296 - RNA, 19 nt, Artificial Sequence
  Description of Artificial Sequence: Synthetic oligonucleotide
uggaauccugacaggagga

SEQ ID NO: 2128297 - RNA, 19 nt, Artificial Sequence
  Description of Artificial Sequence: Synthetic oligonucleotide
caguuuuauguucucugag

SEQ ID NO: 2128298 - RNA, 19 nt, Artificial Sequence
  Description of Artificial Sequence: Synthetic oligonucleotide
uuauuuccaaggagaggca

SEQ ID NO: 2128299 - RNA, 19 nt, Artificial Sequence
  Description of Artificial Sequence: Synthetic oligonucleotide
cuagugguggcaagggcag

SEQ ID NO: 2128300 - RNA, 19 nt, Artificial Sequence
  Description of Artificial Sequence: Synthetic oligonucleotide
agaugugucaauguccaga

SEQ ID NO: 2128301 - RNA, 19 nt, Artificial Sequence
  Description of Artificial Sequence: Synthetic oligonucleotide
caccaugagucuuaggauc

SEQ ID NO: 2128302 - RNA, 19 nt, Artificial Sequence
  Description of Artificial Sequence: Synthetic oligonucleotide
gagaaaucggacucccuga

SEQ ID NO: 2128303 - RNA, 19 nt, Artificial Sequence
  Description of Artificial Sequence: Synthetic oligonucleotide
agagccaauggugguagac

SEQ ID NO: 2128304 - RNA, 19 nt, Artificial Sequence
  Description of Artificial Sequence: Synthetic oligonucleotide
auagagccaauggugguag

SEQ ID NO: 2128305 - RNA, 19 nt, Artificial Sequence
  Description of Artificial Sequence: Synthetic oligonucleotide
ucucccaaguaccgggagc

SEQ ID NO: 2128306 - RNA, 19 nt, Artificial Sequence
  Description of Artificial Sequence: Synthetic oligonucleotide
ucggcuaaacacacauaca

SEQ ID NO: 2128307 - RNA, 19 nt, Artificial Sequence
  Description of Artificial Sequence: Synthetic oligonucleotide
guguguugugaauaaggac

SEQ ID NO: 2128308 - RNA, 19 nt, Artificial Sequence
  Description of Artificial Sequence: Synthetic oligonucleotide
caggaagagaggcucuggg

SEQ ID NO: 2128309 - RNA, 19 nt, Artificial Sequence
  Description of Artificial Sequence: Synthetic oligonucleotide
uaggauccuaggauaauuu

SEQ ID NO: 2128310 - RNA, 19 nt, Artificial Sequence
  Description of Artificial Sequence: Synthetic oligonucleotide
aggcagcccgucuaucacc

SEQ ID NO: 2128311 - RNA, 19 nt, Artificial Sequence
  Description of Artificial Sequence: Synthetic oligonucleotide
auggauguauccagcuccc

SEQ ID NO: 2128312 - RNA, 19 nt, Artificial Sequence
  Description of Artificial Sequence: Synthetic oligonucleotide
gaauaaggacaugccugcg

SEQ ID NO: 2128313 - RNA, 19 nt, Artificial Sequence
  Description of Artificial Sequence: Synthetic oligonucleotide
agggcaguuuguggaaucc

SEQ ID NO: 2128314 - RNA, 19 nt, Artificial Sequence
  Description of Artificial Sequence: Synthetic oligonucleotide
ggauccuaggauaauuucc

SEQ ID NO: 2128315 - RNA, 19 nt, Artificial Sequence
  Description of Artificial Sequence: Synthetic oligonucleotide
uggaguguguugugaauaa

SEQ ID NO: 2128316 - RNA, 19 nt, Artificial Sequence
  Description of Artificial Sequence: Synthetic oligonucleotide
aguguguaagugagaaauc

SEQ ID NO: 2128317 - RNA, 19 nt, Artificial Sequence
  Description of Artificial Sequence: Synthetic oligonucleotide
uuugacagguccaguuuua

SEQ ID NO: 2128318 - RNA, 19 nt, Artificial Sequence
  Description of Artificial Sequence: Synthetic oligonucleotide
ucacccuuugacaggucca

SEQ ID NO: 2128319 - RNA, 19 nt, Artificial Sequence
  Description of Artificial Sequence: Synthetic oligonucleotide
guguaagugagaaaucgga

SEQ ID NO: 2128320 - RNA, 19 nt, Artificial Sequence
  Description of Artificial Sequence: Synthetic oligonucleotide
ccagaaucucccaaguacc

SEQ ID NO: 2128321 - RNA, 19 nt, Artificial Sequence
  Description of Artificial Sequence: Synthetic oligonucleotide
guccagagagauucggagc

SEQ ID NO: 2128322 - RNA, 19 nt, Artificial Sequence
  Description of Artificial Sequence: Synthetic oligonucleotide
ggcaucguuucauucgggg

SEQ ID NO: 2128323 - RNA, 19 nt, Artificial Sequence
  Description of Artificial Sequence: Synthetic oligonucleotide
cauacaagggucacaucca

SEQ ID NO: 2128324 - RNA, 19 nt, Artificial Sequence
  Description of Artificial Sequence: Synthetic oligonucleotide
ugguccaauucauuccacu

SEQ ID NO: 2128325 - RNA, 19 nt, Artificial Sequence
  Description of Artificial Sequence: Synthetic oligonucleotide
ggcagaagaaguguguaag

SEQ ID NO: 2128326 - RNA, 19 nt, Artificial Sequence
  Description of Artificial Sequence: Synthetic oligonucleotide
gggguaaccagacaugcac

SEQ ID NO: 2128327 - RNA, 19 nt, Artificial Sequence
  Description of Artificial Sequence: Synthetic oligonucleotide
gacgcaccuucacggaagg

SEQ ID NO: 2128328 - RNA, 19 nt, Artificial Sequence
  Description of Artificial Sequence: Synthetic oligonucleotide
aagacgcaccuucacggaa

SEQ ID NO: 2128329 - RNA, 19 nt, Artificial Sequence
  Description of Artificial Sequence: Synthetic oligonucleotide
gaggggaugccaucucacc

SEQ ID NO: 2128330 - RNA, 19 nt, Artificial Sequence
  Description of Artificial Sequence: Synthetic oligonucleotide
uaaggacaugccugcggag

SEQ ID NO: 2128331 - RNA, 19 nt, Artificial Sequence
  Description of Artificial Sequence: Synthetic oligonucleotide
cacaguccacugcugagag

SEQ ID NO: 2128332 - RNA, 19 nt, Artificial Sequence
  Description of Artificial Sequence: Synthetic oligonucleotide
agaggcagcccgucuauca

SEQ ID NO: 2128333 - RNA, 19 nt, Artificial Sequence
  Description of Artificial Sequence: Synthetic oligonucleotide
cugaugccaggaaggaccc

SEQ ID NO: 2128334 - RNA, 19 nt, Artificial Sequence
  Description of Artificial Sequence: Synthetic oligonucleotide
aucggacucccugaaacag

SEQ ID NO: 2128335 - RNA, 19 nt, Artificial Sequence
  Description of Artificial Sequence: Synthetic oligonucleotide
gcgaauggcagccuggagc

SEQ ID NO: 2128336 - RNA, 19 nt, Artificial Sequence
  Description of Artificial Sequence: Synthetic oligonucleotide
agagagauucggagcaggg

SEQ ID NO: 2128337 - RNA, 19 nt, Artificial Sequence
  Description of Artificial Sequence: Synthetic oligonucleotide
cuggauucggaggggaugc

SEQ ID NO: 2128338 - RNA, 19 nt, Artificial Sequence
  Description of Artificial Sequence: Synthetic oligonucleotide
uguucucugaggcccuagu

SEQ ID NO: 2128339 - RNA, 19 nt, Artificial Sequence
  Description of Artificial Sequence: Synthetic oligonucleotide
cugguagcuucgaagacca

SEQ ID NO: 2128340 - RNA, 19 nt, Artificial Sequence
  Description of Artificial Sequence: Synthetic oligonucleotide
ugguagacagggagaaauc

SEQ ID NO: 2128341 - RNA, 19 nt, Artificial Sequence
  Description of Artificial Sequence: Synthetic oligonucleotide
guaaccagacaugcacacg

SEQ ID NO: 2128342 - RNA, 19 nt, Artificial Sequence
  Description of Artificial Sequence: Synthetic oligonucleotide
agaaaucggacucccugaa

SEQ ID NO: 2128343 - RNA, 19 nt, Artificial Sequence
  Description of Artificial Sequence: Synthetic oligonucleotide
gagagauucggagcagggc

SEQ ID NO: 2128344 - RNA, 19 nt, Artificial Sequence
  Description of Artificial Sequence: Synthetic oligonucleotide
ccuggagcacagaagaggc

SEQ ID NO: 2128345 - RNA, 19 nt, Artificial Sequence
  Description of Artificial Sequence: Synthetic oligonucleotide
aguccuuuuccaccgcaga

SEQ ID NO: 2128346 - RNA, 19 nt, Artificial Sequence
  Description of Artificial Sequence: Synthetic oligonucleotide
gguaaccagacaugcacac

SEQ ID NO: 2128347 - RNA, 19 nt, Artificial Sequence
  Description of Artificial Sequence: Synthetic oligonucleotide
ucggacucccugaaacaga

SEQ ID NO: 2128348 - RNA, 19 nt, Artificial Sequence
  Description of Artificial Sequence: Synthetic oligonucleotide
guucucugaggcccuagug

SEQ ID NO: 2128349 - RNA, 19 nt, Artificial Sequence
  Description of Artificial Sequence: Synthetic oligonucleotide
ccgucuaucacccuuugac

SEQ ID NO: 2128350 - RNA, 19 nt, Artificial Sequence
  Description of Artificial Sequence: Synthetic oligonucleotide
agagccucggcuaaacaca

SEQ ID NO: 2128351 - RNA, 19 nt, Artificial Sequence
  Description of Artificial Sequence: Synthetic oligonucleotide
cucaaagaggcugaugcca

SEQ ID NO: 2128352 - RNA, 19 nt, Artificial Sequence
  Description of Artificial Sequence: Synthetic oligonucleotide
auucggaggggaugccauc

SEQ ID NO: 2128353 - RNA, 19 nt, Artificial Sequence
  Description of Artificial Sequence: Synthetic oligonucleotide
cucccugaaacagagucuc

SEQ ID NO: 2128354 - RNA, 19 nt, Artificial Sequence
  Description of Artificial Sequence: Synthetic oligonucleotide
gacaugcacacgggcaggg

SEQ ID NO: 2128355 - RNA, 19 nt, Artificial Sequence
  Description of Artificial Sequence: Synthetic oligonucleotide
agcucccugaggauagagc

SEQ ID NO: 2128356 - RNA, 19 nt, Artificial Sequence
  Description of Artificial Sequence: Synthetic oligonucleotide
agaggcuucgaggaggcgu

SEQ ID NO: 2128357 - RNA, 19 nt, Artificial Sequence
  Description of Artificial Sequence: Synthetic oligonucleotide
auacaagggucacauccaa

SEQ ID NO: 2128358 - RNA, 19 nt, Artificial Sequence
  Description of Artificial Sequence: Synthetic oligonucleotide
ugcugguagcuucgaagac

SEQ ID NO: 2128359 - RNA, 19 nt, Artificial Sequence
  Description of Artificial Sequence: Synthetic oligonucleotide
ggggcaucguuucauucgg

SEQ ID NO: 2128360 - RNA, 19 nt, Artificial Sequence
  Description of Artificial Sequence: Synthetic oligonucleotide
gagcacagaagaggcuucg

SEQ ID NO: 2128361 - RNA, 19 nt, Artificial Sequence
  Description of Artificial Sequence: Synthetic oligonucleotide
accgcagaugugucaaugu

SEQ ID NO: 2128362 - RNA, 19 nt, Artificial Sequence
  Description of Artificial Sequence: Synthetic oligonucleotide
auccugacaggaggaaagg

SEQ ID NO: 2128363 - RNA, 19 nt, Artificial Sequence
  Description of Artificial Sequence: Synthetic oligonucleotide
acuggauucggaggggaug

SEQ ID NO: 2128364 - RNA, 19 nt, Artificial Sequence
  Description of Artificial Sequence: Synthetic oligonucleotide
gaagacgcaccuucacgga

SEQ ID NO: 2128365 - RNA, 19 nt, Artificial Sequence
  Description of Artificial Sequence: Synthetic oligonucleotide
gggagaaaucuucuucccc

SEQ ID NO: 2128366 - RNA, 19 nt, Artificial Sequence
  Description of Artificial Sequence: Synthetic oligonucleotide
gguccaauucauuccacuc

SEQ ID NO: 2128367 - RNA, 19 nt, Artificial Sequence
  Description of Artificial Sequence: Synthetic oligonucleotide
gugucaauguccagaaaga

SEQ ID NO: 2128368 - RNA, 19 nt, Artificial Sequence
  Description of Artificial Sequence: Synthetic oligonucleotide
guaccgggagcucagagcu

SEQ ID NO: 2128369 - RNA, 19 nt, Artificial Sequence
  Description of Artificial Sequence: Synthetic oligonucleotide
caggcgaauggcagccugg

SEQ ID NO: 2128370 - RNA, 19 nt, Artificial Sequence
  Description of Artificial Sequence: Synthetic oligonucleotide
ggcuaaacacacauacaag

SEQ ID NO: 2128371 - RNA, 19 nt, Artificial Sequence
  Description of Artificial Sequence: Synthetic oligonucleotide
cccaccaugagucuuagga

SEQ ID NO: 2128372 - RNA, 19 nt, Artificial Sequence
  Description of Artificial Sequence: Synthetic oligonucleotide
uguugugaauaaggacaug

SEQ ID NO: 2128373 - RNA, 19 nt, Artificial Sequence
  Description of Artificial Sequence: Synthetic oligonucleotide
uucuccuccuccuccuccu

SEQ ID NO: 2128374 - RNA, 19 nt, Artificial Sequence
  Description of Artificial Sequence: Synthetic oligonucleotide
agugguggcaagggcagug

SEQ ID NO: 2128375 - RNA, 19 nt, Artificial Sequence
  Description of Artificial Sequence: Synthetic oligonucleotide
gaggcagcccgucuaucac

SEQ ID NO: 2128376 - RNA, 19 nt, Artificial Sequence
  Description of Artificial Sequence: Synthetic oligonucleotide
uccaccgcagaugugucaa

SEQ ID NO: 2128377 - RNA, 19 nt, Artificial Sequence
  Description of Artificial Sequence: Synthetic oligonucleotide
gauagagccaaugguggua

SEQ ID NO: 2128378 - RNA, 19 nt, Artificial Sequence
  Description of Artificial Sequence: Synthetic oligonucleotide
uagcuucgaagaccagcug

SEQ ID NO: 2128379 - RNA, 19 nt, Artificial Sequence
  Description of Artificial Sequence: Synthetic oligonucleotide
aaucucccaaguaccggga

SEQ ID NO: 2128380 - RNA, 19 nt, Artificial Sequence
  Description of Artificial Sequence: Synthetic oligonucleotide
ucccugaaacagagucucc

SEQ ID NO: 2128381 - RNA, 19 nt, Artificial Sequence
  Description of Artificial Sequence: Synthetic oligonucleotide
gcugcgcuggacuuugucc

SEQ ID NO: 2128382 - RNA, 19 nt, Artificial Sequence
  Description of Artificial Sequence: Synthetic oligonucleotide
cugcgcuggacuuugucca

SEQ ID NO: 2128383 - RNA, 19 nt, Artificial Sequence
  Description of Artificial Sequence: Synthetic oligonucleotide
agguccaguuuuauguucu

SEQ ID NO: 2128384 - RNA, 19 nt, Artificial Sequence
  Description of Artificial Sequence: Synthetic oligonucleotide
gagccaauggugguagaca

SEQ ID NO: 2128385 - RNA, 19 nt, Artificial Sequence
  Description of Artificial Sequence: Synthetic oligonucleotide
cuggaagagauaaauuaau

SEQ ID NO: 2128386 - RNA, 19 nt, Artificial Sequence
  Description of Artificial Sequence: Synthetic oligonucleotide
cuucgaggaggcgucuggg

SEQ ID NO: 2128387 - RNA, 19 nt, Artificial Sequence
  Description of Artificial Sequence: Synthetic oligonucleotide
aggacccagcucaaagagg

SEQ ID NO: 2128388 - RNA, 19 nt, Artificial Sequence
  Description of Artificial Sequence: Synthetic oligonucleotide
ccaaggacccagcucaaag

SEQ ID NO: 2128389 - RNA, 19 nt, Artificial Sequence
  Description of Artificial Sequence: Synthetic oligonucleotide
gaagucauccaggccagaa

SEQ ID NO: 2128390 - RNA, 19 nt, Artificial Sequence
  Description of Artificial Sequence: Synthetic oligonucleotide
guagcuucgaagaccagcu

SEQ ID NO: 2128391 - RNA, 19 nt, Artificial Sequence
  Description of Artificial Sequence: Synthetic oligonucleotide
agacgcaccuucacggaag

SEQ ID NO: 2128392 - RNA, 19 nt, Artificial Sequence
  Description of Artificial Sequence: Synthetic oligonucleotide
gaaaucggacucccugaaa

SEQ ID NO: 2128393 - RNA, 19 nt, Artificial Sequence
  Description of Artificial Sequence: Synthetic oligonucleotide
caggaagacgcaccuucac

SEQ ID NO: 2128394 - RNA, 19 nt, Artificial Sequence
  Description of Artificial Sequence: Synthetic oligonucleotide
cuccuuaaggcaucuggaa

SEQ ID NO: 2128395 - RNA, 19 nt, Artificial Sequence
  Description of Artificial Sequence: Synthetic oligonucleotide
uuccaccgcagauguguca

SEQ ID NO: 2128396 - RNA, 19 nt, Artificial Sequence
  Description of Artificial Sequence: Synthetic oligonucleotide
gaauccugacaggaggaaa

SEQ ID NO: 2128397 - RNA, 19 nt, Artificial Sequence
  Description of Artificial Sequence: Synthetic oligonucleotide
auccuaggauaauuuccau

SEQ ID NO: 2128398 - RNA, 19 nt, Artificial Sequence
  Description of Artificial Sequence: Synthetic oligonucleotide
caagggucacauccaagga

SEQ ID NO: 2128399 - RNA, 19 nt, Artificial Sequence
  Description of Artificial Sequence: Synthetic oligonucleotide
cugaaacagagucuccuua

SEQ ID NO: 2128400 - RNA, 19 nt, Artificial Sequence
  Description of Artificial Sequence: Synthetic oligonucleotide
gcucaaagaggcugaugcc

SEQ ID NO: 2128401 - RNA, 19 nt, Artificial Sequence
  Description of Artificial Sequence: Synthetic oligonucleotide
cacccuuugacagguccag

SEQ ID NO: 2128402 - RNA, 19 nt, Artificial Sequence
  Description of Artificial Sequence: Synthetic oligonucleotide
uccuccuccuccuccuccu

SEQ ID NO: 2128403 - RNA, 19 nt, Artificial Sequence
  Description of Artificial Sequence: Synthetic oligonucleotide
cuggggcaucguuucauuc

SEQ ID NO: 2128404 - RNA, 19 nt, Artificial Sequence
  Description of Artificial Sequence: Synthetic oligonucleotide
aagaggcuucgaggaggcg

SEQ ID NO: 2128405 - RNA, 19 nt, Artificial Sequence
  Description of Artificial Sequence: Synthetic oligonucleotide
augaugugguccaauucau

SEQ ID NO: 2128406 - RNA, 19 nt, Artificial Sequence
  Description of Artificial Sequence: Synthetic oligonucleotide
uugacagguccaguuuuau

SEQ ID NO: 2128407 - RNA, 19 nt, Artificial Sequence
  Description of Artificial Sequence: Synthetic oligonucleotide
ccuagugguggcaagggca

SEQ ID NO: 2128408 - RNA, 19 nt, Artificial Sequence
  Description of Artificial Sequence: Synthetic oligonucleotide
aucucacccauggauguau

SEQ ID NO: 2128409 - RNA, 19 nt, Artificial Sequence
  Description of Artificial Sequence: Synthetic oligonucleotide
aggagaggcagcccgucua

SEQ ID NO: 2128410 - RNA, 19 nt, Artificial Sequence
  Description of Artificial Sequence: Synthetic oligonucleotide
gagccucggcuaaacacac

SEQ ID NO: 2128411 - RNA, 19 nt, Artificial Sequence
  Description of Artificial Sequence: Synthetic oligonucleotide
gugguagacagggagaaau

SEQ ID NO: 2128412 - RNA, 19 nt, Artificial Sequence
  Description of Artificial Sequence: Synthetic oligonucleotide
gaaggaccccaccaugagu

SEQ ID NO: 2128413 - RNA, 19 nt, Artificial Sequence
  Description of Artificial Sequence: Synthetic oligonucleotide
ggagcucagagcuucuaaa

SEQ ID NO: 2128414 - RNA, 19 nt, Artificial Sequence
  Description of Artificial Sequence: Synthetic oligonucleotide
cuccuccuccuccuccucc

SEQ ID NO: 2128415 - RNA, 19 nt, Artificial Sequence
  Description of Artificial Sequence: Synthetic oligonucleotide
ugguagcuucgaagaccag

SEQ ID NO: 2128416 - RNA, 19 nt, Artificial Sequence
  Description of Artificial Sequence: Synthetic oligonucleotide
cuucgaagaccagcuggac

SEQ ID NO: 2128417 - RNA, 19 nt, Artificial Sequence
  Description of Artificial Sequence: Synthetic oligonucleotide
caccgcagaugugucaaug

SEQ ID NO: 2128418 - RNA, 19 nt, Artificial Sequence
  Description of Artificial Sequence: Synthetic oligonucleotide
cugagagccucggcuaaac

SEQ ID NO: 2128419 - RNA, 19 nt, Artificial Sequence
  Description of Artificial Sequence: Synthetic oligonucleotide
ggaguguguugugaauaag

SEQ ID NO: 2128420 - RNA, 19 nt, Artificial Sequence
  Description of Artificial Sequence: Synthetic oligonucleotide
gauucggagcagggcuugc

SEQ ID NO: 2128421 - RNA, 19 nt, Artificial Sequence
  Description of Artificial Sequence: Synthetic oligonucleotide
cagagucuccuuaaggcau

SEQ ID NO: 2128422 - RNA, 19 nt, Artificial Sequence
  Description of Artificial Sequence: Synthetic oligonucleotide
ucggaggggaugccaucuc

SEQ ID NO: 2128423 - RNA, 19 nt, Artificial Sequence
  Description of Artificial Sequence: Synthetic oligonucleotide
caugccugcggaggcuggg

SEQ ID NO: 2128424 - RNA, 19 nt, Artificial Sequence
  Description of Artificial Sequence: Synthetic oligonucleotide
cuggaguguguugugaaua

SEQ ID NO: 2128425 - RNA, 19 nt, Artificial Sequence
  Description of Artificial Sequence: Synthetic oligonucleotide
aggaucagccuggggcauc

SEQ ID NO: 2128426 - RNA, 19 nt, Artificial Sequence
  Description of Artificial Sequence: Synthetic oligonucleotide
auguucucugaggcccuag

SEQ ID NO: 2128427 - RNA, 19 nt, Artificial Sequence
  Description of Artificial Sequence: Synthetic oligonucleotide
uggcaagggcagugggaac

SEQ ID NO: 2128428 - RNA, 19 nt, Artificial Sequence
  Description of Artificial Sequence: Synthetic oligonucleotide
cggacucccugaaacagag

SEQ ID NO: 2128429 - RNA, 19 nt, Artificial Sequence
  Description of Artificial Sequence: Synthetic oligonucleotide
cuuugacagguccaguuuu

SEQ ID NO: 2128430 - RNA, 19 nt, Artificial Sequence
  Description of Artificial Sequence: Synthetic oligonucleotide
gacagggagaaaucuucuu

SEQ ID NO: 2128431 - RNA, 19 nt, Artificial Sequence
  Description of Artificial Sequence: Synthetic oligonucleotide
uggauguauccagcucccu

SEQ ID NO: 2128432 - RNA, 19 nt, Artificial Sequence
  Description of Artificial Sequence: Synthetic oligonucleotide
acgcaccuucacggaaggc

SEQ ID NO: 2128433 - RNA, 19 nt, Artificial Sequence
  Description of Artificial Sequence: Synthetic oligonucleotide
cacacauacaagggucaca

SEQ ID NO: 2128434 - RNA, 19 nt, Artificial Sequence
  Description of Artificial Sequence: Synthetic oligonucleotide
uaucacccuuugacagguc

SEQ ID NO: 2128435 - RNA, 19 nt, Artificial Sequence
  Description of Artificial Sequence: Synthetic oligonucleotide
cacugcugagagccucggc

SEQ ID NO: 2128436 - RNA, 19 nt, Artificial Sequence
  Description of Artificial Sequence: Synthetic oligonucleotide
cggcuaaacacacauacaa

SEQ ID NO: 2128437 - RNA, 19 nt, Artificial Sequence
  Description of Artificial Sequence: Synthetic oligonucleotide
ggcccuagugguggcaagg

SEQ ID NO: 2128438 - RNA, 19 nt, Artificial Sequence
  Description of Artificial Sequence: Synthetic oligonucleotide
ugcggaggcugggugcucu

SEQ ID NO: 2128439 - RNA, 19 nt, Artificial Sequence
  Description of Artificial Sequence: Synthetic oligonucleotide
guguugugaauaaggacau

SEQ ID NO: 2128440 - RNA, 19 nt, Artificial Sequence
  Description of Artificial Sequence: Synthetic oligonucleotide
gaagaccagcuggacucca

SEQ ID NO: 2128441 - RNA, 19 nt, Artificial Sequence
  Description of Artificial Sequence: Synthetic oligonucleotide
ggcagcccgucuaucaccc

SEQ ID NO: 2128442 - RNA, 19 nt, Artificial Sequence
  Description of Artificial Sequence: Synthetic oligonucleotide
uccaaggacccagcucaaa

SEQ ID NO: 2128443 - RNA, 19 nt, Artificial Sequence
  Description of Artificial Sequence: Synthetic oligonucleotide
ucuccuccuccuccuccuc

SEQ ID NO: 2128444 - RNA, 19 nt, Artificial Sequence
  Description of Artificial Sequence: Synthetic oligonucleotide
gcuucgaagaccagcugga

SEQ ID NO: 2128445 - RNA, 19 nt, Artificial Sequence
  Description of Artificial Sequence: Synthetic oligonucleotide
ugaugccaggaaggacccc

SEQ ID NO: 2128446 - RNA, 19 nt, Artificial Sequence
  Description of Artificial Sequence: Synthetic oligonucleotide
gauucggaggggaugccau

SEQ ID NO: 2128447 - RNA, 19 nt, Artificial Sequence
  Description of Artificial Sequence: Synthetic oligonucleotide
caauggugguagacaggga

SEQ ID NO: 2128448 - RNA, 19 nt, Artificial Sequence
  Description of Artificial Sequence: Synthetic oligonucleotide
ccugaggauagagccaaug

SEQ ID NO: 2128449 - RNA, 19 nt, Artificial Sequence
  Description of Artificial Sequence: Synthetic oligonucleotide
uauguucucugaggcccua

SEQ ID NO: 2128450 - RNA, 19 nt, Artificial Sequence
  Description of Artificial Sequence: Synthetic oligonucleotide
cagcucccugaggauagag

SEQ ID NO: 2128451 - RNA, 19 nt, Artificial Sequence
  Description of Artificial Sequence: Synthetic oligonucleotide
gcagaagaaguguguaagu

SEQ ID NO: 2128452 - RNA, 19 nt, Artificial Sequence
  Description of Artificial Sequence: Synthetic oligonucleotide
cugcugagagccucggcua

SEQ ID NO: 2128453 - RNA, 19 nt, Artificial Sequence
  Description of Artificial Sequence: Synthetic oligonucleotide
acaugccugcggaggcugg

SEQ ID NO: 2128454 - RNA, 19 nt, Artificial Sequence
  Description of Artificial Sequence: Synthetic oligonucleotide
ggguaaccagacaugcaca

SEQ ID NO: 2128455 - RNA, 19 nt, Artificial Sequence
  Description of Artificial Sequence: Synthetic oligonucleotide
ggcgaauggcagccuggag

SEQ ID NO: 2128456 - RNA, 19 nt, Artificial Sequence
  Description of Artificial Sequence: Synthetic oligonucleotide
cagcucaaagaggcugaug

SEQ ID NO: 2128457 - RNA, 19 nt, Artificial Sequence
  Description of Artificial Sequence: Synthetic oligonucleotide
guagacagggagaaaucuu

SEQ ID NO: 2128458 - RNA, 19 nt, Artificial Sequence
  Description of Artificial Sequence: Synthetic oligonucleotide
gugguccaauucauuccac

SEQ ID NO: 2128459 - RNA, 19 nt, Artificial Sequence
  Description of Artificial Sequence: Synthetic oligonucleotide
ccgcagaugugucaauguc

SEQ ID NO: 2128460 - RNA, 19 nt, Artificial Sequence
  Description of Artificial Sequence: Synthetic oligonucleotide
gcccuagugguggcaaggg

SEQ ID NO: 2128461 - RNA, 19 nt, Artificial Sequence
  Description of Artificial Sequence: Synthetic oligonucleotide
cucccaaguaccgggagcu

SEQ ID NO: 2128462 - RNA, 19 nt, Artificial Sequence
  Description of Artificial Sequence: Synthetic oligonucleotide
gggagcucagagcuucuaa

SEQ ID NO: 2128463 - RNA, 19 nt, Artificial Sequence
  Description of Artificial Sequence: Synthetic oligonucleotide
uggggcccaggcugcgcug

SEQ ID NO: 2128464 - RNA, 19 nt, Artificial Sequence
  Description of Artificial Sequence: Synthetic oligonucleotide
gaccccaccaugagucuua

SEQ ID NO: 2128465 - RNA, 19 nt, Artificial Sequence
  Description of Artificial Sequence: Synthetic oligonucleotide
agaagucauccaggccaga

SEQ ID NO: 2128466 - RNA, 19 nt, Artificial Sequence
  Description of Artificial Sequence: Synthetic oligonucleotide
ggacuuuguccagagagau

SEQ ID NO: 2128467 - RNA, 19 nt, Artificial Sequence
  Description of Artificial Sequence: Synthetic oligonucleotide
cccuagugguggcaagggc

SEQ ID NO: 2128468 - RNA, 19 nt, Artificial Sequence
  Description of Artificial Sequence: Synthetic oligonucleotide
gguggcaagggcaguggga

SEQ ID NO: 2128469 - RNA, 19 nt, Artificial Sequence
  Description of Artificial Sequence: Synthetic oligonucleotide
gccacuggauucggagggg

SEQ ID NO: 2128470 - RNA, 19 nt, Artificial Sequence
  Description of Artificial Sequence: Synthetic oligonucleotide
gccucggcuaaacacacau

SEQ ID NO: 2128471 - RNA, 19 nt, Artificial Sequence
  Description of Artificial Sequence: Synthetic oligonucleotide
caugagucuuaggauccua

SEQ ID NO: 2128472 - RNA, 19 nt, Artificial Sequence
  Description of Artificial Sequence: Synthetic oligonucleotide
ggauucggaggggaugcca

SEQ ID NO: 2128473 - RNA, 19 nt, Artificial Sequence
  Description of Artificial Sequence: Synthetic oligonucleotide
uaccgggagcucagagcuu

SEQ ID NO: 2128474 - RNA, 19 nt, Artificial Sequence
  Description of Artificial Sequence: Synthetic oligonucleotide
gggcaucguuucauucggg

SEQ ID NO: 2128475 - RNA, 19 nt, Artificial Sequence
  Description of Artificial Sequence: Synthetic oligonucleotide
ucccaaguaccgggagcuc

SEQ ID NO: 2128476 - RNA, 19 nt, Artificial Sequence
  Description of Artificial Sequence: Synthetic oligonucleotide
ggcaagggcagugggaacu

SEQ ID NO: 2128477 - RNA, 19 nt, Artificial Sequence
  Description of Artificial Sequence: Synthetic oligonucleotide
gagauucggagcagggcuu

SEQ ID NO: 2128478 - RNA, 19 nt, Artificial Sequence
  Description of Artificial Sequence: Synthetic oligonucleotide
ggaggcagaagaagugugu

SEQ ID NO: 2128479 - RNA, 19 nt, Artificial Sequence
  Description of Artificial Sequence: Synthetic oligonucleotide
ggcugcgcuggacuuuguc

SEQ ID NO: 2128480 - RNA, 19 nt, Artificial Sequence
  Description of Artificial Sequence: Synthetic oligonucleotide
cgcuggacuuuguccagag

SEQ ID NO: 2128481 - RNA, 19 nt, Artificial Sequence
  Description of Artificial Sequence: Synthetic oligonucleotide
ggccagaaucucccaagua

SEQ ID NO: 2128482 - RNA, 19 nt, Artificial Sequence
  Description of Artificial Sequence: Synthetic oligonucleotide
agcccgucuaucacccuuu

SEQ ID NO: 2128483 - RNA, 19 nt, Artificial Sequence
  Description of Artificial Sequence: Synthetic oligonucleotide
cccaggaagagaggcucug

SEQ ID NO: 2128484 - RNA, 19 nt, Artificial Sequence
  Description of Artificial Sequence: Synthetic oligonucleotide
gugagaaaucggacucccu

SEQ ID NO: 2128485 - RNA, 19 nt, Artificial Sequence
  Description of Artificial Sequence: Synthetic oligonucleotide
auccaaggacccagcucaa

SEQ ID NO: 2128486 - RNA, 19 nt, Artificial Sequence
  Description of Artificial Sequence: Synthetic oligonucleotide
gcccgucuaucacccuuug

SEQ ID NO: 2128487 - RNA, 19 nt, Artificial Sequence
  Description of Artificial Sequence: Synthetic oligonucleotide
agccucggcuaaacacaca

SEQ ID NO: 2128488 - RNA, 19 nt, Artificial Sequence
  Description of Artificial Sequence: Synthetic oligonucleotide
caucucacccauggaugua

SEQ ID NO: 2128489 - RNA, 19 nt, Artificial Sequence
  Description of Artificial Sequence: Synthetic oligonucleotide
ugggugcucuggggcccag

SEQ ID NO: 2128490 - RNA, 19 nt, Artificial Sequence
  Description of Artificial Sequence: Synthetic oligonucleotide
cgaagaccagcuggacucc

SEQ ID NO: 2128491 - RNA, 19 nt, Artificial Sequence
  Description of Artificial Sequence: Synthetic oligonucleotide
cacuggauucggaggggau

SEQ ID NO: 2128492 - RNA, 19 nt, Artificial Sequence
  Description of Artificial Sequence: Synthetic oligonucleotide
ggcgggagugaagaguccu

SEQ ID NO: 2128493 - RNA, 19 nt, Artificial Sequence
  Description of Artificial Sequence: Synthetic oligonucleotide
ggagaggcagcccgucuau

SEQ ID NO: 2128494 - RNA, 19 nt, Artificial Sequence
  Description of Artificial Sequence: Synthetic oligonucleotide
ggugguagacagggagaaa

SEQ ID NO: 2128495 - RNA, 19 nt, Artificial Sequence
  Description of Artificial Sequence: Synthetic oligonucleotide
gugcucuggggcccaggcu

SEQ ID NO: 2128496 - RNA, 19 nt, Artificial Sequence
  Description of Artificial Sequence: Synthetic oligonucleotide
ccccaccaugagucuuagg

SEQ ID NO: 2128497 - RNA, 19 nt, Artificial Sequence
  Description of Artificial Sequence: Synthetic oligonucleotide
cagcccgucuaucacccuu

SEQ ID NO: 2128498 - RNA, 19 nt, Artificial Sequence
  Description of Artificial Sequence: Synthetic oligonucleotide
gggcgggagugaagagucc

SEQ ID NO: 2128499 - RNA, 19 nt, Artificial Sequence
  Description of Artificial Sequence: Synthetic oligonucleotide
gcggaggcugggugcucug

SEQ ID NO: 2128500 - RNA, 19 nt, Artificial Sequence
  Description of Artificial Sequence: Synthetic oligonucleotide
gcugagagccucggcuaaa

SEQ ID NO: 2128501 - RNA, 19 nt, Artificial Sequence
  Description of Artificial Sequence: Synthetic oligonucleotide
cccgucuaucacccuuuga

SEQ ID NO: 2128502 - RNA, 19 nt, Artificial Sequence
  Description of Artificial Sequence: Synthetic oligonucleotide
ggagcagggcuugcuggua

SEQ ID NO: 2128503 - RNA, 19 nt, Artificial Sequence
  Description of Artificial Sequence: Synthetic oligonucleotide
ggcuugcugguagcuucga

SEQ ID NO: 2128504 - RNA, 19 nt, Artificial Sequence
  Description of Artificial Sequence: Synthetic oligonucleotide
ccaaggagaggcagcccgu

SEQ ID NO: 2128505 - RNA, 19 nt, Artificial Sequence
  Description of Artificial Sequence: Synthetic oligonucleotide
cggaggggaugccaucuca

SEQ ID NO: 2128506 - RNA, 19 nt, Artificial Sequence
  Description of Artificial Sequence: Synthetic oligonucleotide
cacgggcagggcaguuugu

SEQ ID NO: 2128507 - RNA, 19 nt, Artificial Sequence
  Description of Artificial Sequence: Synthetic oligonucleotide
gcgcuggacuuuguccaga

SEQ ID NO: 2128508 - RNA, 19 nt, Artificial Sequence
  Description of Artificial Sequence: Synthetic oligonucleotide
cugcggaggcugggugcuc

SEQ ID NO: 2128509 - RNA, 19 nt, Artificial Sequence
  Description of Artificial Sequence: Synthetic oligonucleotide
ggacaugccugcggaggcu

SEQ ID NO: 2128510 - RNA, 19 nt, Artificial Sequence
  Description of Artificial Sequence: Synthetic oligonucleotide
ccuccuccuccuccuccuc

SEQ ID NO: 2128511 - RNA, 19 nt, Artificial Sequence
  Description of Artificial Sequence: Synthetic oligonucleotide
gaucagccuggggcaucgu

SEQ ID NO: 2128512 - RNA, 19 nt, Artificial Sequence
  Description of Artificial Sequence: Synthetic oligonucleotide
caggaucagccuggggcau

SEQ ID NO: 2128513 - RNA, 19 nt, Artificial Sequence
  Description of Artificial Sequence: Synthetic oligonucleotide
cacacgggcagggcaguuu

SEQ ID NO: 2128514 - RNA, 19 nt, Artificial Sequence
  Description of Artificial Sequence: Synthetic oligonucleotide
gcagggcaguuuguggaau

SEQ ID NO: 2128515 - RNA, 19 nt, Artificial Sequence
  Description of Artificial Sequence: Synthetic oligonucleotide
gccuggggcaucguuucau

SEQ ID NO: 2128516 - RNA, 19 nt, Artificial Sequence
  Description of Artificial Sequence: Synthetic oligonucleotide
ggaccccaccaugagucuu

SEQ ID NO: 2128517 - RNA, 19 nt, Artificial Sequence
  Description of Artificial Sequence: Synthetic oligonucleotide
ccugcggaggcugggugcu

SEQ ID NO: 2128518 - RNA, 19 nt, Artificial Sequence
  Description of Artificial Sequence: Synthetic oligonucleotide
gcagcccgucuaucacccu

SEQ ID NO: 2128519 - RNA, 19 nt, Artificial Sequence
  Description of Artificial Sequence: Synthetic oligonucleotide
gcgggagugaagaguccuu

SEQ ID NO: 2128520 - RNA, 19 nt, Artificial Sequence
  Description of Artificial Sequence: Synthetic oligonucleotide
ccaccgcagaugugucaau

SEQ ID NO: 2128521 - RNA, 19 nt, Artificial Sequence
  Description of Artificial Sequence: Synthetic oligonucleotide
auuaguaggguacaggaac

SEQ ID NO: 2128522 - RNA, 19 nt, Artificial Sequence
  Description of Artificial Sequence: Synthetic oligonucleotide
aaagauaaggacccgcuug

SEQ ID NO: 2128523 - RNA, 19 nt, Artificial Sequence
  Description of Artificial Sequence: Synthetic oligonucleotide
ucucggaagaaacagaaac

SEQ ID NO: 2128524 - RNA, 19 nt, Artificial Sequence
  Description of Artificial Sequence: Synthetic oligonucleotide
agcaccgugaacucaaacc

SEQ ID NO: 2128525 - RNA, 19 nt, Artificial Sequence
  Description of Artificial Sequence: Synthetic oligonucleotide
ugaacucaaacccaaugag

SEQ ID NO: 2128526 - RNA, 19 nt, Artificial Sequence
  Description of Artificial Sequence: Synthetic oligonucleotide
ugucaguuugauaugcggg

SEQ ID NO: 2128527 - RNA, 19 nt, Artificial Sequence
  Description of Artificial Sequence: Synthetic oligonucleotide
uacucuauaaccgugguca

SEQ ID NO: 2128528 - RNA, 19 nt, Artificial Sequence
  Description of Artificial Sequence: Synthetic oligonucleotide
uaaccaaggcauuaguagg

SEQ ID NO: 2128529 - RNA, 19 nt, Artificial Sequence
  Description of Artificial Sequence: Synthetic oligonucleotide
uuugcauaagacacgaccu

SEQ ID NO: 2128530 - RNA, 19 nt, Artificial Sequence
  Description of Artificial Sequence: Synthetic oligonucleotide
aacucaaagaccaucucgg

SEQ ID NO: 2128531 - RNA, 19 nt, Artificial Sequence
  Description of Artificial Sequence: Synthetic oligonucleotide
ucauguacgaagcaaagau

SEQ ID NO: 2128532 - RNA, 19 nt, Artificial Sequence
  Description of Artificial Sequence: Synthetic oligonucleotide
gaagcaaagauaaggaccc

SEQ ID NO: 2128533 - RNA, 19 nt, Artificial Sequence
  Description of Artificial Sequence: Synthetic oligonucleotide
guaaccaaggcauuaguag

SEQ ID NO: 2128534 - RNA, 19 nt, Artificial Sequence
  Description of Artificial Sequence: Synthetic oligonucleotide
uuuaaacuccuaauuuugc

SEQ ID NO: 2128535 - RNA, 19 nt, Artificial Sequence
  Description of Artificial Sequence: Synthetic oligonucleotide
uuguguguaaccaaggcau

SEQ ID NO: 2128536 - RNA, 19 nt, Artificial Sequence
  Description of Artificial Sequence: Synthetic oligonucleotide
auaugcgggaacuucuccc

SEQ ID NO: 2128537 - RNA, 19 nt, Artificial Sequence
  Description of Artificial Sequence: Synthetic oligonucleotide
cuuuaaacuccuaauuuug

SEQ ID NO: 2128538 - RNA, 19 nt, Artificial Sequence
  Description of Artificial Sequence: Synthetic oligonucleotide
ugagguaacacuuggcucu

SEQ ID NO: 2128539 - RNA, 19 nt, Artificial Sequence
  Description of Artificial Sequence: Synthetic oligonucleotide
uacgaagcaaagauaagga

SEQ ID NO: 2128540 - RNA, 19 nt, Artificial Sequence
  Description of Artificial Sequence: Synthetic oligonucleotide
aaucagcugcuucacuucg

SEQ ID NO: 2128541 - RNA, 19 nt, Artificial Sequence
  Description of Artificial Sequence: Synthetic oligonucleotide
gaaacagaaacgccgccgg

SEQ ID NO: 2128542 - RNA, 19 nt, Artificial Sequence
  Description of Artificial Sequence: Synthetic oligonucleotide
ugugggucauccaagaggu

SEQ ID NO: 2128543 - RNA, 19 nt, Artificial Sequence
  Description of Artificial Sequence: Synthetic oligonucleotide
acagguuugugucuugaac

SEQ ID NO: 2128544 - RNA, 19 nt, Artificial Sequence
  Description of Artificial Sequence: Synthetic oligonucleotide
guacgaagcaaagauaagg

SEQ ID NO: 2128545 - RNA, 19 nt, Artificial Sequence
  Description of Artificial Sequence: Synthetic oligonucleotide
uucuagccaagccacaugc

SEQ ID NO: 2128546 - RNA, 19 nt, Artificial Sequence
  Description of Artificial Sequence: Synthetic oligonucleotide
cucggaagaaacagaaacg

SEQ ID NO: 2128547 - RNA, 19 nt, Artificial Sequence
  Description of Artificial Sequence: Synthetic oligonucleotide
ucuguucuagccaagccac

SEQ ID NO: 2128548 - RNA, 19 nt, Artificial Sequence
  Description of Artificial Sequence: Synthetic oligonucleotide
uuaaacuccuaauuuugcu

SEQ ID NO: 2128549 - RNA, 19 nt, Artificial Sequence
  Description of Artificial Sequence: Synthetic oligonucleotide
ugugcuucccacauggcca

SEQ ID NO: 2128550 - RNA, 19 nt, Artificial Sequence
  Description of Artificial Sequence: Synthetic oligonucleotide
ggaagaaacagaaacgccg

SEQ ID NO: 2128551 - RNA, 19 nt, Artificial Sequence
  Description of Artificial Sequence: Synthetic oligonucleotide
ucuauaaccguggucaugu

SEQ ID NO: 2128552 - RNA, 19 nt, Artificial Sequence
  Description of Artificial Sequence: Synthetic oligonucleotide
agugagguaacacuuggcu

SEQ ID NO: 2128553 - RNA, 19 nt, Artificial Sequence
  Description of Artificial Sequence: Synthetic oligonucleotide
aagauaaggacccgcuugu

SEQ ID NO: 2128554 - RNA, 19 nt, Artificial Sequence
  Description of Artificial Sequence: Synthetic oligonucleotide
acgaagcaaagauaaggac

SEQ ID NO: 2128555 - RNA, 19 nt, Artificial Sequence
  Description of Artificial Sequence: Synthetic oligonucleotide
auaaccguggucauguacg

SEQ ID NO: 2128556 - RNA, 19 nt, Artificial Sequence
  Description of Artificial Sequence: Synthetic oligonucleotide
ucggaagaaacagaaacgc

SEQ ID NO: 2128557 - RNA, 19 nt, Artificial Sequence
  Description of Artificial Sequence: Synthetic oligonucleotide
aggucucuucuguugaacc

SEQ ID NO: 2128558 - RNA, 19 nt, Artificial Sequence
  Description of Artificial Sequence: Synthetic oligonucleotide
uucuguugaaccggaaucg

SEQ ID NO: 2128559 - RNA, 19 nt, Artificial Sequence
  Description of Artificial Sequence: Synthetic oligonucleotide
uaagacacgaccuuuccau

SEQ ID NO: 2128560 - RNA, 19 nt, Artificial Sequence
  Description of Artificial Sequence: Synthetic oligonucleotide
uguugaaccggaaucguuc

SEQ ID NO: 2128561 - RNA, 19 nt, Artificial Sequence
  Description of Artificial Sequence: Synthetic oligonucleotide
aacgccgccggaugggugc

SEQ ID NO: 2128562 - RNA, 19 nt, Artificial Sequence
  Description of Artificial Sequence: Synthetic oligonucleotide
uucuccauagggcaggacu

SEQ ID NO: 2128563 - RNA, 19 nt, Artificial Sequence
  Description of Artificial Sequence: Synthetic oligonucleotide
ucugggcuagaacugcugg

SEQ ID NO: 2128564 - RNA, 19 nt, Artificial Sequence
  Description of Artificial Sequence: Synthetic oligonucleotide
agagguugggguuguauuc

SEQ ID NO: 2128565 - RNA, 19 nt, Artificial Sequence
  Description of Artificial Sequence: Synthetic oligonucleotide
aggaacuuugcauaagaca

SEQ ID NO: 2128566 - RNA, 19 nt, Artificial Sequence
  Description of Artificial Sequence: Synthetic oligonucleotide
uguagugagguaacacuug

SEQ ID NO: 2128567 - RNA, 19 nt, Artificial Sequence
  Description of Artificial Sequence: Synthetic oligonucleotide
guagugagguaacacuugg

SEQ ID NO: 2128568 - RNA, 19 nt, Artificial Sequence
  Description of Artificial Sequence: Synthetic oligonucleotide
uucacuucgcccuugcgga

SEQ ID NO: 2128569 - RNA, 19 nt, Artificial Sequence
  Description of Artificial Sequence: Synthetic oligonucleotide
aguugccucuguucuagcc

SEQ ID NO: 2128570 - RNA, 19 nt, Artificial Sequence
  Description of Artificial Sequence: Synthetic oligonucleotide
cuaguucugugccagcugg

SEQ ID NO: 2128571 - RNA, 19 nt, Artificial Sequence
  Description of Artificial Sequence: Synthetic oligonucleotide
cuucacuucgcccuugcgg

SEQ ID NO: 2128572 - RNA, 19 nt, Artificial Sequence
  Description of Artificial Sequence: Synthetic oligonucleotide
uccaucguuuccuaguucu

SEQ ID NO: 2128573 - RNA, 19 nt, Artificial Sequence
  Description of Artificial Sequence: Synthetic oligonucleotide
auuccacugccucuccucc

SEQ ID NO: 2128574 - RNA, 19 nt, Artificial Sequence
  Description of Artificial Sequence: Synthetic oligonucleotide
gauaaggacccgcuugugc

SEQ ID NO: 2128575 - RNA, 19 nt, Artificial Sequence
  Description of Artificial Sequence: Synthetic oligonucleotide
uaauuuugcucagugucag

SEQ ID NO: 2128576 - RNA, 19 nt, Artificial Sequence
  Description of Artificial Sequence: Synthetic oligonucleotide
gaagaaacagaaacgccgc

SEQ ID NO: 2128577 - RNA, 19 nt, Artificial Sequence
  Description of Artificial Sequence: Synthetic oligonucleotide
guagguacagguuuguguc

SEQ ID NO: 2128578 - RNA, 19 nt, Artificial Sequence
  Description of Artificial Sequence: Synthetic oligonucleotide
auaaggacccgcuugugcu

SEQ ID NO: 2128579 - RNA, 19 nt, Artificial Sequence
  Description of Artificial Sequence: Synthetic oligonucleotide
uuugcgguugugcuuguug

SEQ ID NO: 2128580 - RNA, 19 nt, Artificial Sequence
  Description of Artificial Sequence: Synthetic oligonucleotide
acacguaggccauggacac

SEQ ID NO: 2128581 - RNA, 19 nt, Artificial Sequence
  Description of Artificial Sequence: Synthetic oligonucleotide
cugugggucauccaagagg

SEQ ID NO: 2128582 - RNA, 19 nt, Artificial Sequence
  Description of Artificial Sequence: Synthetic oligonucleotide
uguacgaagcaaagauaag

SEQ ID NO: 2128583 - RNA, 19 nt, Artificial Sequence
  Description of Artificial Sequence: Synthetic oligonucleotide
agaaacagaaacgccgccg

SEQ ID NO: 2128584 - RNA, 19 nt, Artificial Sequence
  Description of Artificial Sequence: Synthetic oligonucleotide
aacuuugcauaagacacga

SEQ ID NO: 2128585 - RNA, 19 nt, Artificial Sequence
  Description of Artificial Sequence: Synthetic oligonucleotide
aagacacgaccuuuccauc

SEQ ID NO: 2128586 - RNA, 19 nt, Artificial Sequence
  Description of Artificial Sequence: Synthetic oligonucleotide
uguaaccaaggcauuagua

SEQ ID NO: 2128587 - RNA, 19 nt, Artificial Sequence
  Description of Artificial Sequence: Synthetic oligonucleotide
accguggucauguacgaag

SEQ ID NO: 2128588 - RNA, 19 nt, Artificial Sequence
  Description of Artificial Sequence: Synthetic oligonucleotide
aagccacaugccuuccuac

SEQ ID NO: 2128589 - RNA, 19 nt, Artificial Sequence
  Description of Artificial Sequence: Synthetic oligonucleotide
uguguaaccaaggcauuag

SEQ ID NO: 2128590 - RNA, 19 nt, Artificial Sequence
  Description of Artificial Sequence: Synthetic oligonucleotide
gaccgcuuggcacagauga

SEQ ID NO: 2128591 - RNA, 19 nt, Artificial Sequence
  Description of Artificial Sequence: Synthetic oligonucleotide
gugucaguuugauaugcgg

SEQ ID NO: 2128592 - RNA, 19 nt, Artificial Sequence
  Description of Artificial Sequence: Synthetic oligonucleotide
cucuccgggagguacaggg

SEQ ID NO: 2128593 - RNA, 19 nt, Artificial Sequence
  Description of Artificial Sequence: Synthetic oligonucleotide
ucauucuuguguguaacca

SEQ ID NO: 2128594 - RNA, 19 nt, Artificial Sequence
  Description of Artificial Sequence: Synthetic oligonucleotide
ucacauacucuauaaccgu

SEQ ID NO: 2128595 - RNA, 19 nt, Artificial Sequence
  Description of Artificial Sequence: Synthetic oligonucleotide
aacgcaagcuccagcacac

SEQ ID NO: 2128596 - RNA, 19 nt, Artificial Sequence
  Description of Artificial Sequence: Synthetic oligonucleotide
gaacuuugcauaagacacg

SEQ ID NO: 2128597 - RNA, 19 nt, Artificial Sequence
  Description of Artificial Sequence: Synthetic oligonucleotide
acaggaacuuugcauaaga

SEQ ID NO: 2128598 - RNA, 19 nt, Artificial Sequence
  Description of Artificial Sequence: Synthetic oligonucleotide
aaguacacguaggccaugg

SEQ ID NO: 2128599 - RNA, 19 nt, Artificial Sequence
  Description of Artificial Sequence: Synthetic oligonucleotide
uaggguacaggaacuuugc

SEQ ID NO: 2128600 - RNA, 19 nt, Artificial Sequence
  Description of Artificial Sequence: Synthetic oligonucleotide
uuugauaugcgggaacuuc

SEQ ID NO: 2128601 - RNA, 19 nt, Artificial Sequence
  Description of Artificial Sequence: Synthetic oligonucleotide
aagcaccgugaacucaaac

SEQ ID NO: 2128602 - RNA, 19 nt, Artificial Sequence
  Description of Artificial Sequence: Synthetic oligonucleotide
agccacaugccuuccuacc

SEQ ID NO: 2128603 - RNA, 19 nt, Artificial Sequence
  Description of Artificial Sequence: Synthetic oligonucleotide
ugacugucauucuugugug

SEQ ID NO: 2128604 - RNA, 19 nt, Artificial Sequence
  Description of Artificial Sequence: Synthetic oligonucleotide
uuuccuaguucugugccag

SEQ ID NO: 2128605 - RNA, 19 nt, Artificial Sequence
  Description of Artificial Sequence: Synthetic oligonucleotide
agugcaguguuggaggagg

SEQ ID NO: 2128606 - RNA, 19 nt, Artificial Sequence
  Description of Artificial Sequence: Synthetic oligonucleotide
auacucuauaaccgugguc

SEQ ID NO: 2128607 - RNA, 19 nt, Artificial Sequence
  Description of Artificial Sequence: Synthetic oligonucleotide
uaccaagcagccuuccugc

SEQ ID NO: 2128608 - RNA, 19 nt, Artificial Sequence
  Description of Artificial Sequence: Synthetic oligonucleotide
cauaagacacgaccuuucc

SEQ ID NO: 2128609 - RNA, 19 nt, Artificial Sequence
  Description of Artificial Sequence: Synthetic oligonucleotide
ugccuuccuaccaagcagc

SEQ ID NO: 2128610 - RNA, 19 nt, Artificial Sequence
  Description of Artificial Sequence: Synthetic oligonucleotide
caagccgugacugucauuc

SEQ ID NO: 2128611 - RNA, 19 nt, Artificial Sequence
  Description of Artificial Sequence: Synthetic oligonucleotide
gauaugcgggaacuucucc

SEQ ID NO: 2128612 - RNA, 19 nt, Artificial Sequence
  Description of Artificial Sequence: Synthetic oligonucleotide
uggucauguacgaagcaaa

SEQ ID NO: 2128613 - RNA, 19 nt, Artificial Sequence
  Description of Artificial Sequence: Synthetic oligonucleotide
aagagguugggguuguauu

SEQ ID NO: 2128614 - RNA, 19 nt, Artificial Sequence
  Description of Artificial Sequence: Synthetic oligonucleotide
accaucucggaagaaacag

SEQ ID NO: 2128615 - RNA, 19 nt, Artificial Sequence
  Description of Artificial Sequence: Synthetic oligonucleotide
gagguacagggccaguucc

SEQ ID NO: 2128616 - RNA, 19 nt, Artificial Sequence
  Description of Artificial Sequence: Synthetic oligonucleotide
acauacucuauaaccgugg

SEQ ID NO: 2128617 - RNA, 19 nt, Artificial Sequence
  Description of Artificial Sequence: Synthetic oligonucleotide
agaccaucucggaagaaac

SEQ ID NO: 2128618 - RNA, 19 nt, Artificial Sequence
  Description of Artificial Sequence: Synthetic oligonucleotide
ugauccggaggccuucucc

SEQ ID NO: 2128619 - RNA, 19 nt, Artificial Sequence
  Description of Artificial Sequence: Synthetic oligonucleotide
auguacgaagcaaagauaa

SEQ ID NO: 2128620 - RNA, 19 nt, Artificial Sequence
  Description of Artificial Sequence: Synthetic oligonucleotide
ugaggcgucuguagugagg

SEQ ID NO: 2128621 - RNA, 19 nt, Artificial Sequence
  Description of Artificial Sequence: Synthetic oligonucleotide
cuugguagguacagguuug

SEQ ID NO: 2128622 - RNA, 19 nt, Artificial Sequence
  Description of Artificial Sequence: Synthetic oligonucleotide
acacaguuugcgguugugc

SEQ ID NO: 2128623 - RNA, 19 nt, Artificial Sequence
  Description of Artificial Sequence: Synthetic oligonucleotide
auucuuguguguaaccaag

SEQ ID NO: 2128624 - RNA, 19 nt, Artificial Sequence
  Description of Artificial Sequence: Synthetic oligonucleotide
uauucugggcuagaacugc

SEQ ID NO: 2128625 - RNA, 19 nt, Artificial Sequence
  Description of Artificial Sequence: Synthetic oligonucleotide
guugaaccggaaucguucc

SEQ ID NO: 2128626 - RNA, 19 nt, Artificial Sequence
  Description of Artificial Sequence: Synthetic oligonucleotide
auaagacacgaccuuucca

SEQ ID NO: 2128627 - RNA, 19 nt, Artificial Sequence
  Description of Artificial Sequence: Synthetic oligonucleotide
gaaggccgcacacagggac

SEQ ID NO: 2128628 - RNA, 19 nt, Artificial Sequence
  Description of Artificial Sequence: Synthetic oligonucleotide
agaacgcaagcuccagcac

SEQ ID NO: 2128629 - RNA, 19 nt, Artificial Sequence
  Description of Artificial Sequence: Synthetic oligonucleotide
cuaccaagcagccuuccug

SEQ ID NO: 2128630 - RNA, 19 nt, Artificial Sequence
  Description of Artificial Sequence: Synthetic oligonucleotide
ucagugucaguuugauaug

SEQ ID NO: 2128631 - RNA, 19 nt, Artificial Sequence
  Description of Artificial Sequence: Synthetic oligonucleotide
gucaguuugauaugcggga

SEQ ID NO: 2128632 - RNA, 19 nt, Artificial Sequence
  Description of Artificial Sequence: Synthetic oligonucleotide
uaugcgggaacuucucccu

SEQ ID NO: 2128633 - RNA, 19 nt, Artificial Sequence
  Description of Artificial Sequence: Synthetic oligonucleotide
gugacugucauucuugugu

SEQ ID NO: 2128634 - RNA, 19 nt, Artificial Sequence
  Description of Artificial Sequence: Synthetic oligonucleotide
acgccuuccaacucaaaga

SEQ ID NO: 2128635 - RNA, 19 nt, Artificial Sequence
  Description of Artificial Sequence: Synthetic oligonucleotide
guaacacuuggcucuccgg

SEQ ID NO: 2128636 - RNA, 19 nt, Artificial Sequence
  Description of Artificial Sequence: Synthetic oligonucleotide
aagaccaucucggaagaaa

SEQ ID NO: 2128637 - RNA, 19 nt, Artificial Sequence
  Description of Artificial Sequence: Synthetic oligonucleotide
aauuuugcucagugucagu

SEQ ID NO: 2128638 - RNA, 19 nt, Artificial Sequence
  Description of Artificial Sequence: Synthetic oligonucleotide
uccuaauuuugcucagugu

SEQ ID NO: 2128639 - RNA, 19 nt, Artificial Sequence
  Description of Artificial Sequence: Synthetic oligonucleotide
cuccuaauuuugcucagug

SEQ ID NO: 2128640 - RNA, 19 nt, Artificial Sequence
  Description of Artificial Sequence: Synthetic oligonucleotide
uugaaccugguggaacacg

SEQ ID NO: 2128641 - RNA, 19 nt, Artificial Sequence
  Description of Artificial Sequence: Synthetic oligonucleotide
gaacgcaagcuccagcaca

SEQ ID NO: 2128642 - RNA, 19 nt, Artificial Sequence
  Description of Artificial Sequence: Synthetic oligonucleotide
uagugagguaacacuuggc

SEQ ID NO: 2128643 - RNA, 19 nt, Artificial Sequence
  Description of Artificial Sequence: Synthetic oligonucleotide
gucucuucuguugaaccgg

SEQ ID NO: 2128644 - RNA, 19 nt, Artificial Sequence
  Description of Artificial Sequence: Synthetic oligonucleotide
cuaguugccucuguucuag

SEQ ID NO: 2128645 - RNA, 19 nt, Artificial Sequence
  Description of Artificial Sequence: Synthetic oligonucleotide
gcaccgugaacucaaaccc

SEQ ID NO: 2128646 - RNA, 19 nt, Artificial Sequence
  Description of Artificial Sequence: Synthetic oligonucleotide
agccaagccacaugccuuc

SEQ ID NO: 2128647 - RNA, 19 nt, Artificial Sequence
  Description of Artificial Sequence: Synthetic oligonucleotide
ucguuuccuaguucugugc

SEQ ID NO: 2128648 - RNA, 19 nt, Artificial Sequence
  Description of Artificial Sequence: Synthetic oligonucleotide
agacacgaccuuuccaucu

SEQ ID NO: 2128649 - RNA, 19 nt, Artificial Sequence
  Description of Artificial Sequence: Synthetic oligonucleotide
ucuagccaagccacaugcc

SEQ ID NO: 2128650 - RNA, 19 nt, Artificial Sequence
  Description of Artificial Sequence: Synthetic oligonucleotide
uguugacuugguagguaca

SEQ ID NO: 2128651 - RNA, 19 nt, Artificial Sequence
  Description of Artificial Sequence: Synthetic oligonucleotide
guaggguacaggaacuuug

SEQ ID NO: 2128652 - RNA, 19 nt, Artificial Sequence
  Description of Artificial Sequence: Synthetic oligonucleotide
uccuccaucguuuccuagu

SEQ ID NO: 2128653 - RNA, 19 nt, Artificial Sequence
  Description of Artificial Sequence: Synthetic oligonucleotide
guguugacuugguagguac

SEQ ID NO: 2128654 - RNA, 19 nt, Artificial Sequence
  Description of Artificial Sequence: Synthetic oligonucleotide
gaaccggaaucguuccucc

SEQ ID NO: 2128655 - RNA, 19 nt, Artificial Sequence
  Description of Artificial Sequence: Synthetic oligonucleotide
ggucucuucuguugaaccg

SEQ ID NO: 2128656 - RNA, 19 nt, Artificial Sequence
  Description of Artificial Sequence: Synthetic oligonucleotide
aaggcauuaguaggguaca

SEQ ID NO: 2128657 - RNA, 19 nt, Artificial Sequence
  Description of Artificial Sequence: Synthetic oligonucleotide
ugauaugcgggaacuucuc

SEQ ID NO: 2128658 - RNA, 19 nt, Artificial Sequence
  Description of Artificial Sequence: Synthetic oligonucleotide
acuggacacuaguugccuc

SEQ ID NO: 2128659 - RNA, 19 nt, Artificial Sequence
  Description of Artificial Sequence: Synthetic oligonucleotide
uguauuccacugccucucc

SEQ ID NO: 2128660 - RNA, 19 nt, Artificial Sequence
  Description of Artificial Sequence: Synthetic oligonucleotide
caggucacugauccggagg

SEQ ID NO: 2128661 - RNA, 19 nt, Artificial Sequence
  Description of Artificial Sequence: Synthetic oligonucleotide
ggcugcacuccucagacag

SEQ ID NO: 2128662 - RNA, 19 nt, Artificial Sequence
  Description of Artificial Sequence: Synthetic oligonucleotide
aaacagaaacgccgccgga

SEQ ID NO: 2128663 - RNA, 19 nt, Artificial Sequence
  Description of Artificial Sequence: Synthetic oligonucleotide
acgaccuuuccaucugcuc

SEQ ID NO: 2128664 - RNA, 19 nt, Artificial Sequence
  Description of Artificial Sequence: Synthetic oligonucleotide
gacacgaccuuuccaucug

SEQ ID NO: 2128665 - RNA, 19 nt, Artificial Sequence
  Description of Artificial Sequence: Synthetic oligonucleotide
gcauuaguaggguacagga

SEQ ID NO: 2128666 - RNA, 19 nt, Artificial Sequence
  Description of Artificial Sequence: Synthetic oligonucleotide
acagggugcgcaucucccg

SEQ ID NO: 2128667 - RNA, 19 nt, Artificial Sequence
  Description of Artificial Sequence: Synthetic oligonucleotide
caucucggaagaaacagaa

SEQ ID NO: 2128668 - RNA, 19 nt, Artificial Sequence
  Description of Artificial Sequence: Synthetic oligonucleotide
aacagaaacgccgccggau

SEQ ID NO: 2128669 - RNA, 19 nt, Artificial Sequence
  Description of Artificial Sequence: Synthetic oligonucleotide
gguacaggaacuuugcaua

SEQ ID NO: 2128670 - RNA, 19 nt, Artificial Sequence
  Description of Artificial Sequence: Synthetic oligonucleotide
cauagggcaggacugagaa

SEQ ID NO: 2128671 - RNA, 19 nt, Artificial Sequence
  Description of Artificial Sequence: Synthetic oligonucleotide
ucccgcuuuaaacuccuaa

SEQ ID NO: 2128672 - RNA, 19 nt, Artificial Sequence
  Description of Artificial Sequence: Synthetic oligonucleotide
cucuguucuagccaagcca

SEQ ID NO: 2128673 - RNA, 19 nt, Artificial Sequence
  Description of Artificial Sequence: Synthetic oligonucleotide
cagaacgcaagcuccagca

SEQ ID NO: 2128674 - RNA, 19 nt, Artificial Sequence
  Description of Artificial Sequence: Synthetic oligonucleotide
aagcaaagauaaggacccg

SEQ ID NO: 2128675 - RNA, 19 nt, Artificial Sequence
  Description of Artificial Sequence: Synthetic oligonucleotide
gugagguaacacuuggcuc

SEQ ID NO: 2128676 - RNA, 19 nt, Artificial Sequence
  Description of Artificial Sequence: Synthetic oligonucleotide
uugcauaagacacgaccuu

SEQ ID NO: 2128677 - RNA, 19 nt, Artificial Sequence
  Description of Artificial Sequence: Synthetic oligonucleotide
cugcacuccucagacaggg

SEQ ID NO: 2128678 - RNA, 19 nt, Artificial Sequence
  Description of Artificial Sequence: Synthetic oligonucleotide
auuuugcucagugucaguu

SEQ ID NO: 2128679 - RNA, 19 nt, Artificial Sequence
  Description of Artificial Sequence: Synthetic oligonucleotide
agugucaguuugauaugcg

SEQ ID NO: 2128680 - RNA, 19 nt, Artificial Sequence
  Description of Artificial Sequence: Synthetic oligonucleotide
uuguauuccacugccucuc

SEQ ID NO: 2128681 - RNA, 19 nt, Artificial Sequence
  Description of Artificial Sequence: Synthetic oligonucleotide
uuugugucuugaaccuggu

SEQ ID NO: 2128682 - RNA, 19 nt, Artificial Sequence
  Description of Artificial Sequence: Synthetic oligonucleotide
uacaggaacuuugcauaag

SEQ ID NO: 2128683 - RNA, 19 nt, Artificial Sequence
  Description of Artificial Sequence: Synthetic oligonucleotide
gguuguauuccacugccuc

SEQ ID NO: 2128684 - RNA, 19 nt, Artificial Sequence
  Description of Artificial Sequence: Synthetic oligonucleotide
ugggugaggcgucuguagu

SEQ ID NO: 2128685 - RNA, 19 nt, Artificial Sequence
  Description of Artificial Sequence: Synthetic oligonucleotide
uaaccguggucauguacga

SEQ ID NO: 2128686 - RNA, 19 nt, Artificial Sequence
  Description of Artificial Sequence: Synthetic oligonucleotide
ucccugaaggucucauuca

SEQ ID NO: 2128687 - RNA, 19 nt, Artificial Sequence
  Description of Artificial Sequence: Synthetic oligonucleotide
uugugucuugaaccuggug

SEQ ID NO: 2128688 - RNA, 19 nt, Artificial Sequence
  Description of Artificial Sequence: Synthetic oligonucleotide
gauccggaggccuucucca

SEQ ID NO: 2128689 - RNA, 19 nt, Artificial Sequence
  Description of Artificial Sequence: Synthetic oligonucleotide
cagcucaacgccuuccaac

SEQ ID NO: 2128690 - RNA, 19 nt, Artificial Sequence
  Description of Artificial Sequence: Synthetic oligonucleotide
acucaaagaccaucucgga

SEQ ID NO: 2128691 - RNA, 19 nt, Artificial Sequence
  Description of Artificial Sequence: Synthetic oligonucleotide
cacuauucugggcuagaac

SEQ ID NO: 2128692 - RNA, 19 nt, Artificial Sequence
  Description of Artificial Sequence: Synthetic oligonucleotide
ugaaccggaaucguuccuc

SEQ ID NO: 2128693 - RNA, 19 nt, Artificial Sequence
  Description of Artificial Sequence: Synthetic oligonucleotide
gacugagaaggccgcacac

SEQ ID NO: 2128694 - RNA, 19 nt, Artificial Sequence
  Description of Artificial Sequence: Synthetic oligonucleotide
aggacugagaaggccgcac

SEQ ID NO: 2128695 - RNA, 19 nt, Artificial Sequence
  Description of Artificial Sequence: Synthetic oligonucleotide
cuccgggagguacagggcc

SEQ ID NO: 2128696 - RNA, 19 nt, Artificial Sequence
  Description of Artificial Sequence: Synthetic oligonucleotide
ucuguugaaccggaaucgu

SEQ ID NO: 2128697 - RNA, 19 nt, Artificial Sequence
  Description of Artificial Sequence: Synthetic oligonucleotide
ucucccgcuuuaaacuccu

SEQ ID NO: 2128698 - RNA, 19 nt, Artificial Sequence
  Description of Artificial Sequence: Synthetic oligonucleotide
cagaaacgccgccggaugg

SEQ ID NO: 2128699 - RNA, 19 nt, Artificial Sequence
  Description of Artificial Sequence: Synthetic oligonucleotide
caucucccgcuuuaaacuc

SEQ ID NO: 2128700 - RNA, 19 nt, Artificial Sequence
  Description of Artificial Sequence: Synthetic oligonucleotide
agccacaagcaccgugaac

SEQ ID NO: 2128701 - RNA, 19 nt, Artificial Sequence
  Description of Artificial Sequence: Synthetic oligonucleotide
caguuugcgguugugcuug

SEQ ID NO: 2128702 - RNA, 19 nt, Artificial Sequence
  Description of Artificial Sequence: Synthetic oligonucleotide
cuugcggaggucacugcug

SEQ ID NO: 2128703 - RNA, 19 nt, Artificial Sequence
  Description of Artificial Sequence: Synthetic oligonucleotide
gggguuguauuccacugcc

SEQ ID NO: 2128704 - RNA, 19 nt, Artificial Sequence
  Description of Artificial Sequence: Synthetic oligonucleotide
ucaacgccuuccaacucaa

SEQ ID NO: 2128705 - RNA, 19 nt, Artificial Sequence
  Description of Artificial Sequence: Synthetic oligonucleotide
uagguacagguuugugucu

SEQ ID NO: 2128706 - RNA, 19 nt, Artificial Sequence
  Description of Artificial Sequence: Synthetic oligonucleotide
agaaacgccgccggauggg

SEQ ID NO: 2128707 - RNA, 19 nt, Artificial Sequence
  Description of Artificial Sequence: Synthetic oligonucleotide
aaucguuccuccagcuugu

SEQ ID NO: 2128708 - RNA, 19 nt, Artificial Sequence
  Description of Artificial Sequence: Synthetic oligonucleotide
caguuugauaugcgggaac

SEQ ID NO: 2128709 - RNA, 19 nt, Artificial Sequence
  Description of Artificial Sequence: Synthetic oligonucleotide
cugggugaggcgucuguag

SEQ ID NO: 2128710 - RNA, 19 nt, Artificial Sequence
  Description of Artificial Sequence: Synthetic oligonucleotide
uuccaacucaaagaccauc

SEQ ID NO: 2128711 - RNA, 19 nt, Artificial Sequence
  Description of Artificial Sequence: Synthetic oligonucleotide
ugcauaagacacgaccuuu

SEQ ID NO: 2128712 - RNA, 19 nt, Artificial Sequence
  Description of Artificial Sequence: Synthetic oligonucleotide
uguguguaaccaaggcauu

SEQ ID NO: 2128713 - RNA, 19 nt, Artificial Sequence
  Description of Artificial Sequence: Synthetic oligonucleotide
uccuaguucugugccagcu

SEQ ID NO: 2128714 - RNA, 19 nt, Artificial Sequence
  Description of Artificial Sequence: Synthetic oligonucleotide
uugaaccggaaucguuccu

SEQ ID NO: 2128715 - RNA, 19 nt, Artificial Sequence
  Description of Artificial Sequence: Synthetic oligonucleotide
ucuccgggagguacagggc

SEQ ID NO: 2128716 - RNA, 19 nt, Artificial Sequence
  Description of Artificial Sequence: Synthetic oligonucleotide
cauucuuguguguaaccaa

SEQ ID NO: 2128717 - RNA, 19 nt, Artificial Sequence
  Description of Artificial Sequence: Synthetic oligonucleotide
cacaugccuuccuaccaag

SEQ ID NO: 2128718 - RNA, 19 nt, Artificial Sequence
  Description of Artificial Sequence: Synthetic oligonucleotide
cucaacgccuuccaacuca

SEQ ID NO: 2128719 - RNA, 19 nt, Artificial Sequence
  Description of Artificial Sequence: Synthetic oligonucleotide
gggugcacacuauucuggg

SEQ ID NO: 2128720 - RNA, 19 nt, Artificial Sequence
  Description of Artificial Sequence: Synthetic oligonucleotide
uagccaagccacaugccuu

SEQ ID NO: 2128721 - RNA, 19 nt, Artificial Sequence
  Description of Artificial Sequence: Synthetic oligonucleotide
aaaguacacguaggccaug

SEQ ID NO: 2128722 - RNA, 19 nt, Artificial Sequence
  Description of Artificial Sequence: Synthetic oligonucleotide
cauguacgaagcaaagaua

SEQ ID NO: 2128723 - RNA, 19 nt, Artificial Sequence
  Description of Artificial Sequence: Synthetic oligonucleotide
gaaccugguggaacacggg

SEQ ID NO: 2128724 - RNA, 19 nt, Artificial Sequence
  Description of Artificial Sequence: Synthetic oligonucleotide
acugucauucuugugugua

SEQ ID NO: 2128725 - RNA, 19 nt, Artificial Sequence
  Description of Artificial Sequence: Synthetic oligonucleotide
cauuaguaggguacaggaa

SEQ ID NO: 2128726 - RNA, 19 nt, Artificial Sequence
  Description of Artificial Sequence: Synthetic oligonucleotide
guuuccuaguucugugcca

SEQ ID NO: 2128727 - RNA, 19 nt, Artificial Sequence
  Description of Artificial Sequence: Synthetic oligonucleotide
ggggcaagugcaguguugg

SEQ ID NO: 2128728 - RNA, 19 nt, Artificial Sequence
  Description of Artificial Sequence: Synthetic oligonucleotide
aggguacaggaacuuugca

SEQ ID NO: 2128729 - RNA, 19 nt, Artificial Sequence
  Description of Artificial Sequence: Synthetic oligonucleotide
caaagaccaucucggaaga

SEQ ID NO: 2128730 - RNA, 19 nt, Artificial Sequence
  Description of Artificial Sequence: Synthetic oligonucleotide
uccgggagguacagggcca

SEQ ID NO: 2128731 - RNA, 19 nt, Artificial Sequence
  Description of Artificial Sequence: Synthetic oligonucleotide
gccauggacacggucacgg

SEQ ID NO: 2128732 - RNA, 19 nt, Artificial Sequence
  Description of Artificial Sequence: Synthetic oligonucleotide
acgggcuccaggcugcacu

SEQ ID NO: 2128733 - RNA, 19 nt, Artificial Sequence
  Description of Artificial Sequence: Synthetic oligonucleotide
auggacacggucacgggcu

SEQ ID NO: 2128734 - RNA, 19 nt, Artificial Sequence
  Description of Artificial Sequence: Synthetic oligonucleotide
acaagcaccgugaacucaa

SEQ ID NO: 2128735 - RNA, 19 nt, Artificial Sequence
  Description of Artificial Sequence: Synthetic oligonucleotide
acugagaaggccgcacaca

SEQ ID NO: 2128736 - RNA, 19 nt, Artificial Sequence
  Description of Artificial Sequence: Synthetic oligonucleotide
ugcacacuauucugggcua

SEQ ID NO: 2128737 - RNA, 19 nt, Artificial Sequence
  Description of Artificial Sequence: Synthetic oligonucleotide
ucacuucgcccuugcggag

SEQ ID NO: 2128738 - RNA, 19 nt, Artificial Sequence
  Description of Artificial Sequence: Synthetic oligonucleotide
gguagguacagguuugugu

SEQ ID NO: 2128739 - RNA, 19 nt, Artificial Sequence
  Description of Artificial Sequence: Synthetic oligonucleotide
cuguccacccucaggucac

SEQ ID NO: 2128740 - RNA, 19 nt, Artificial Sequence
  Description of Artificial Sequence: Synthetic oligonucleotide
ugccucuccuccaucguuu

SEQ ID NO: 2128741 - RNA, 19 nt, Artificial Sequence
  Description of Artificial Sequence: Synthetic oligonucleotide
cacacagggaccgcuuggc

SEQ ID NO: 2128742 - RNA, 19 nt, Artificial Sequence
  Description of Artificial Sequence: Synthetic oligonucleotide
acuaguugccucuguucua

SEQ ID NO: 2128743 - RNA, 19 nt, Artificial Sequence
  Description of Artificial Sequence: Synthetic oligonucleotide
cgaccuuuccaucugcucc

SEQ ID NO: 2128744 - RNA, 19 nt, Artificial Sequence
  Description of Artificial Sequence: Synthetic oligonucleotide
ggcugugaggggcaagugc

SEQ ID NO: 2128745 - RNA, 19 nt, Artificial Sequence
  Description of Artificial Sequence: Synthetic oligonucleotide
acucuauaaccguggucau

SEQ ID NO: 2128746 - RNA, 19 nt, Artificial Sequence
  Description of Artificial Sequence: Synthetic oligonucleotide
ugugccagcugguguugac

SEQ ID NO: 2128747 - RNA, 19 nt, Artificial Sequence
  Description of Artificial Sequence: Synthetic oligonucleotide
gcuagaacugcugggugag

SEQ ID NO: 2128748 - RNA, 19 nt, Artificial Sequence
  Description of Artificial Sequence: Synthetic oligonucleotide
ugguagguacagguuugug

SEQ ID NO: 2128749 - RNA, 19 nt, Artificial Sequence
  Description of Artificial Sequence: Synthetic oligonucleotide
aaacccaaugaggucucuu

SEQ ID NO: 2128750 - RNA, 19 nt, Artificial Sequence
  Description of Artificial Sequence: Synthetic oligonucleotide
uugguagguacagguuugu

SEQ ID NO: 2128751 - RNA, 19 nt, Artificial Sequence
  Description of Artificial Sequence: Synthetic oligonucleotide
cuuccuaccaagcagccuu

SEQ ID NO: 2128752 - RNA, 19 nt, Artificial Sequence
  Description of Artificial Sequence: Synthetic oligonucleotide
ggaugggugccucugcuuc

SEQ ID NO: 2128753 - RNA, 19 nt, Artificial Sequence
  Description of Artificial Sequence: Synthetic oligonucleotide
cucuauaaccguggucaug

SEQ ID NO: 2128754 - RNA, 19 nt, Artificial Sequence
  Description of Artificial Sequence: Synthetic oligonucleotide
cuagccaagccacaugccu

SEQ ID NO: 2128755 - RNA, 19 nt, Artificial Sequence
  Description of Artificial Sequence: Synthetic oligonucleotide
cacuaguugccucuguucu

SEQ ID NO: 2128756 - RNA, 19 nt, Artificial Sequence
  Description of Artificial Sequence: Synthetic oligonucleotide
ugguguugacuugguaggu

SEQ ID NO: 2128757 - RNA, 19 nt, Artificial Sequence
  Description of Artificial Sequence: Synthetic oligonucleotide
agcagaacgcaagcuccag

SEQ ID NO: 2128758 - RNA, 19 nt, Artificial Sequence
  Description of Artificial Sequence: Synthetic oligonucleotide
uuccuaguucugugccagc

SEQ ID NO: 2128759 - RNA, 19 nt, Artificial Sequence
  Description of Artificial Sequence: Synthetic oligonucleotide
cuugaaccugguggaacac

SEQ ID NO: 2128760 - RNA, 19 nt, Artificial Sequence
  Description of Artificial Sequence: Synthetic oligonucleotide
caagugcaguguuggagga

SEQ ID NO: 2128761 - RNA, 19 nt, Artificial Sequence
  Description of Artificial Sequence: Synthetic oligonucleotide
gaccaucucggaagaaaca

SEQ ID NO: 2128762 - RNA, 19 nt, Artificial Sequence
  Description of Artificial Sequence: Synthetic oligonucleotide
gccacaagcaccgugaacu

SEQ ID NO: 2128763 - RNA, 19 nt, Artificial Sequence
  Description of Artificial Sequence: Synthetic oligonucleotide
accaaggcauuaguagggu

SEQ ID NO: 2128764 - RNA, 19 nt, Artificial Sequence
  Description of Artificial Sequence: Synthetic oligonucleotide
ggugcacacuauucugggc

SEQ ID NO: 2128765 - RNA, 19 nt, Artificial Sequence
  Description of Artificial Sequence: Synthetic oligonucleotide
cacaguuugcgguugugcu

SEQ ID NO: 2128766 - RNA, 19 nt, Artificial Sequence
  Description of Artificial Sequence: Synthetic oligonucleotide
cacuuggcucuccgggagg

SEQ ID NO: 2128767 - RNA, 19 nt, Artificial Sequence
  Description of Artificial Sequence: Synthetic oligonucleotide
ugccucuguucuagccaag

SEQ ID NO: 2128768 - RNA, 19 nt, Artificial Sequence
  Description of Artificial Sequence: Synthetic oligonucleotide
agauaaggacccgcuugug

SEQ ID NO: 2128769 - RNA, 19 nt, Artificial Sequence
  Description of Artificial Sequence: Synthetic oligonucleotide
gugaggcgucuguagugag

SEQ ID NO: 2128770 - RNA, 19 nt, Artificial Sequence
  Description of Artificial Sequence: Synthetic oligonucleotide
aguaggguacaggaacuuu

SEQ ID NO: 2128771 - RNA, 19 nt, Artificial Sequence
  Description of Artificial Sequence: Synthetic oligonucleotide
agcacacaguuugcgguug

SEQ ID NO: 2128772 - RNA, 19 nt, Artificial Sequence
  Description of Artificial Sequence: Synthetic oligonucleotide
aggccgcacacagggaccg

SEQ ID NO: 2128773 - RNA, 19 nt, Artificial Sequence
  Description of Artificial Sequence: Synthetic oligonucleotide
ugucuugaaccugguggaa

SEQ ID NO: 2128774 - RNA, 19 nt, Artificial Sequence
  Description of Artificial Sequence: Synthetic oligonucleotide
gcagccagcagaacgcaag

SEQ ID NO: 2128775 - RNA, 19 nt, Artificial Sequence
  Description of Artificial Sequence: Synthetic oligonucleotide
augcgggaacuucucccug

SEQ ID NO: 2128776 - RNA, 19 nt, Artificial Sequence
  Description of Artificial Sequence: Synthetic oligonucleotide
cgugaacucaaacccaaug

SEQ ID NO: 2128777 - RNA, 19 nt, Artificial Sequence
  Description of Artificial Sequence: Synthetic oligonucleotide
gccagcagaacgcaagcuc

SEQ ID NO: 2128778 - RNA, 19 nt, Artificial Sequence
  Description of Artificial Sequence: Synthetic oligonucleotide
gaggcgucuguagugaggu

SEQ ID NO: 2128779 - RNA, 19 nt, Artificial Sequence
  Description of Artificial Sequence: Synthetic oligonucleotide
caccgugaacucaaaccca

SEQ ID NO: 2128780 - RNA, 19 nt, Artificial Sequence
  Description of Artificial Sequence: Synthetic oligonucleotide
ucacugauccggaggccuu

SEQ ID NO: 2128781 - RNA, 19 nt, Artificial Sequence
  Description of Artificial Sequence: Synthetic oligonucleotide
cacuucgcccuugcggagg

SEQ ID NO: 2128782 - RNA, 19 nt, Artificial Sequence
  Description of Artificial Sequence: Synthetic oligonucleotide
acuucgcccuugcggaggu

SEQ ID NO: 2128783 - RNA, 19 nt, Artificial Sequence
  Description of Artificial Sequence: Synthetic oligonucleotide
uccaagagguugggguugu

SEQ ID NO: 2128784 - RNA, 19 nt, Artificial Sequence
  Description of Artificial Sequence: Synthetic oligonucleotide
ggcuagaacugcuggguga

SEQ ID NO: 2128785 - RNA, 19 nt, Artificial Sequence
  Description of Artificial Sequence: Synthetic oligonucleotide
cuagaacugcugggugagg

SEQ ID NO: 2128786 - RNA, 19 nt, Artificial Sequence
  Description of Artificial Sequence: Synthetic oligonucleotide
cacggucacgggcuccagg

SEQ ID NO: 2128787 - RNA, 19 nt, Artificial Sequence
  Description of Artificial Sequence: Synthetic oligonucleotide
uggcucuccgggagguaca

SEQ ID NO: 2128788 - RNA, 19 nt, Artificial Sequence
  Description of Artificial Sequence: Synthetic oligonucleotide
agcaagccgugacugucau

SEQ ID NO: 2128789 - RNA, 19 nt, Artificial Sequence
  Description of Artificial Sequence: Synthetic oligonucleotide
guaggccauggacacgguc

SEQ ID NO: 2128790 - RNA, 19 nt, Artificial Sequence
  Description of Artificial Sequence: Synthetic oligonucleotide
uccggaggccuucuccaua

SEQ ID NO: 2128791 - RNA, 19 nt, Artificial Sequence
  Description of Artificial Sequence: Synthetic oligonucleotide
uccuaccaagcagccuucc

SEQ ID NO: 2128792 - RNA, 19 nt, Artificial Sequence
  Description of Artificial Sequence: Synthetic oligonucleotide
caaaguacacguaggccau

SEQ ID NO: 2128793 - RNA, 19 nt, Artificial Sequence
  Description of Artificial Sequence: Synthetic oligonucleotide
acacuauucugggcuagaa

SEQ ID NO: 2128794 - RNA, 19 nt, Artificial Sequence
  Description of Artificial Sequence: Synthetic oligonucleotide
cccaaugaggucucuucug

SEQ ID NO: 2128795 - RNA, 19 nt, Artificial Sequence
  Description of Artificial Sequence: Synthetic oligonucleotide
uaguaggguacaggaacuu

SEQ ID NO: 2128796 - RNA, 19 nt, Artificial Sequence
  Description of Artificial Sequence: Synthetic oligonucleotide
gacacuaguugccucuguu

SEQ ID NO: 2128797 - RNA, 19 nt, Artificial Sequence
  Description of Artificial Sequence: Synthetic oligonucleotide
gccacugugggucauccaa

SEQ ID NO: 2128798 - RNA, 19 nt, Artificial Sequence
  Description of Artificial Sequence: Synthetic oligonucleotide
cauacucuauaaccguggu

SEQ ID NO: 2128799 - RNA, 19 nt, Artificial Sequence
  Description of Artificial Sequence: Synthetic oligonucleotide
ccucuguucuagccaagcc

SEQ ID NO: 2128800 - RNA, 19 nt, Artificial Sequence
  Description of Artificial Sequence: Synthetic oligonucleotide
cgcaucucccgcuuuaaac

SEQ ID NO: 2128801 - RNA, 19 nt, Artificial Sequence
  Description of Artificial Sequence: Synthetic oligonucleotide
gagguaacacuuggcucuc

SEQ ID NO: 2128802 - RNA, 19 nt, Artificial Sequence
  Description of Artificial Sequence: Synthetic oligonucleotide
cuggacacuaguugccucu

SEQ ID NO: 2128803 - RNA, 19 nt, Artificial Sequence
  Description of Artificial Sequence: Synthetic oligonucleotide
gucacgggcuccaggcugc

SEQ ID NO: 2128804 - RNA, 19 nt, Artificial Sequence
  Description of Artificial Sequence: Synthetic oligonucleotide
guguaaccaaggcauuagu

SEQ ID NO: 2128805 - RNA, 19 nt, Artificial Sequence
  Description of Artificial Sequence: Synthetic oligonucleotide
gcauaagacacgaccuuuc

SEQ ID NO: 2128806 - RNA, 19 nt, Artificial Sequence
  Description of Artificial Sequence: Synthetic oligonucleotide
aaacgccgccggaugggug

SEQ ID NO: 2128807 - RNA, 19 nt, Artificial Sequence
  Description of Artificial Sequence: Synthetic oligonucleotide
gaugggugccucugcuucu

SEQ ID NO: 2128808 - RNA, 19 nt, Artificial Sequence
  Description of Artificial Sequence: Synthetic oligonucleotide
aaccguggucauguacgaa

SEQ ID NO: 2128809 - RNA, 19 nt, Artificial Sequence
  Description of Artificial Sequence: Synthetic oligonucleotide
ggucauccaagagguuggg

SEQ ID NO: 2128810 - RNA, 19 nt, Artificial Sequence
  Description of Artificial Sequence: Synthetic oligonucleotide
guacagggccaguuccaga

SEQ ID NO: 2128811 - RNA, 19 nt, Artificial Sequence
  Description of Artificial Sequence: Synthetic oligonucleotide
cagcagaacgcaagcucca

SEQ ID NO: 2128812 - RNA, 19 nt, Artificial Sequence
  Description of Artificial Sequence: Synthetic oligonucleotide
gccgugacugucauucuug

SEQ ID NO: 2128813 - RNA, 19 nt, Artificial Sequence
  Description of Artificial Sequence: Synthetic oligonucleotide
guguguaaccaaggcauua

SEQ ID NO: 2128814 - RNA, 19 nt, Artificial Sequence
  Description of Artificial Sequence: Synthetic oligonucleotide
cacguaggccauggacacg

SEQ ID NO: 2128815 - RNA, 19 nt, Artificial Sequence
  Description of Artificial Sequence: Synthetic oligonucleotide
ggcgucuguagugagguaa

SEQ ID NO: 2128816 - RNA, 19 nt, Artificial Sequence
  Description of Artificial Sequence: Synthetic oligonucleotide
ggugaggcgucuguaguga

SEQ ID NO: 2128817 - RNA, 19 nt, Artificial Sequence
  Description of Artificial Sequence: Synthetic oligonucleotide
cagcaagccgugacuguca

SEQ ID NO: 2128818 - RNA, 19 nt, Artificial Sequence
  Description of Artificial Sequence: Synthetic oligonucleotide
aggggcaagugcaguguug

SEQ ID NO: 2128819 - RNA, 19 nt, Artificial Sequence
  Description of Artificial Sequence: Synthetic oligonucleotide
ggacugagaaggccgcaca

SEQ ID NO: 2128820 - RNA, 19 nt, Artificial Sequence
  Description of Artificial Sequence: Synthetic oligonucleotide
ucgcccuugcggaggucac

SEQ ID NO: 2128821 - RNA, 19 nt, Artificial Sequence
  Description of Artificial Sequence: Synthetic oligonucleotide
accgcuuggcacagaugag

SEQ ID NO: 2128822 - RNA, 19 nt, Artificial Sequence
  Description of Artificial Sequence: Synthetic oligonucleotide
cuguucuagccaagccaca

SEQ ID NO: 2128823 - RNA, 19 nt, Artificial Sequence
  Description of Artificial Sequence: Synthetic oligonucleotide
acugauccggaggccuucu

SEQ ID NO: 2128824 - RNA, 19 nt, Artificial Sequence
  Description of Artificial Sequence: Synthetic oligonucleotide
ccuaguucugugccagcug

SEQ ID NO: 2128825 - RNA, 19 nt, Artificial Sequence
  Description of Artificial Sequence: Synthetic oligonucleotide
gacugucauucuugugugu

SEQ ID NO: 2128826 - RNA, 19 nt, Artificial Sequence
  Description of Artificial Sequence: Synthetic oligonucleotide
aucguuccuccagcuuguc

SEQ ID NO: 2128827 - RNA, 19 nt, Artificial Sequence
  Description of Artificial Sequence: Synthetic oligonucleotide
ccaacucaaagaccaucuc

SEQ ID NO: 2128828 - RNA, 19 nt, Artificial Sequence
  Description of Artificial Sequence: Synthetic oligonucleotide
ccgcuuggcacagaugagc

SEQ ID NO: 2128829 - RNA, 19 nt, Artificial Sequence
  Description of Artificial Sequence: Synthetic oligonucleotide
auccggaggccuucuccau

SEQ ID NO: 2128830 - RNA, 19 nt, Artificial Sequence
  Description of Artificial Sequence: Synthetic oligonucleotide
cacaagcaccgugaacuca

SEQ ID NO: 2128831 - RNA, 19 nt, Artificial Sequence
  Description of Artificial Sequence: Synthetic oligonucleotide
ggggacgcugggccgaggc

SEQ ID NO: 2128832 - RNA, 19 nt, Artificial Sequence
  Description of Artificial Sequence: Synthetic oligonucleotide
caucguuuccuaguucugu

SEQ ID NO: 2128833 - RNA, 19 nt, Artificial Sequence
  Description of Artificial Sequence: Synthetic oligonucleotide
gcaaagauaaggacccgcu

SEQ ID NO: 2128834 - RNA, 19 nt, Artificial Sequence
  Description of Artificial Sequence: Synthetic oligonucleotide
aggagggacuggacacuag

SEQ ID NO: 2128835 - RNA, 19 nt, Artificial Sequence
  Description of Artificial Sequence: Synthetic oligonucleotide
ggagggacuggacacuagu

SEQ ID NO: 2128836 - RNA, 19 nt, Artificial Sequence
  Description of Artificial Sequence: Synthetic oligonucleotide
caaagauaaggacccgcuu

SEQ ID NO: 2128837 - RNA, 19 nt, Artificial Sequence
  Description of Artificial Sequence: Synthetic oligonucleotide
gcagcaagccgugacuguc

SEQ ID NO: 2128838 - RNA, 19 nt, Artificial Sequence
  Description of Artificial Sequence: Synthetic oligonucleotide
guauuccacugccucuccu

SEQ ID NO: 2128839 - RNA, 19 nt, Artificial Sequence
  Description of Artificial Sequence: Synthetic oligonucleotide
gcacacuauucugggcuag

SEQ ID NO: 2128840 - RNA, 19 nt, Artificial Sequence
  Description of Artificial Sequence: Synthetic oligonucleotide
cacacuauucugggcuaga

SEQ ID NO: 2128841 - RNA, 19 nt, Artificial Sequence
  Description of Artificial Sequence: Synthetic oligonucleotide
cgcaagcuccagcacacag

SEQ ID NO: 2128842 - RNA, 19 nt, Artificial Sequence
  Description of Artificial Sequence: Synthetic oligonucleotide
ugcggaggucacugcugau

SEQ ID NO: 2128843 - RNA, 19 nt, Artificial Sequence
  Description of Artificial Sequence: Synthetic oligonucleotide
gccuuccaacucaaagacc

SEQ ID NO: 2128844 - RNA, 19 nt, Artificial Sequence
  Description of Artificial Sequence: Synthetic oligonucleotide
acgccgccggaugggugcc

SEQ ID NO: 2128845 - RNA, 19 nt, Artificial Sequence
  Description of Artificial Sequence: Synthetic oligonucleotide
cuucuccauagggcaggac

SEQ ID NO: 2128846 - RNA, 19 nt, Artificial Sequence
  Description of Artificial Sequence: Synthetic oligonucleotide
agaaggccgcacacaggga

SEQ ID NO: 2128847 - RNA, 19 nt, Artificial Sequence
  Description of Artificial Sequence: Synthetic oligonucleotide
cugauccggaggccuucuc

SEQ ID NO: 2128848 - RNA, 19 nt, Artificial Sequence
  Description of Artificial Sequence: Synthetic oligonucleotide
ccacaagcaccgugaacuc

SEQ ID NO: 2128849 - RNA, 19 nt, Artificial Sequence
  Description of Artificial Sequence: Synthetic oligonucleotide
cgaggcuggggcagcaagc

SEQ ID NO: 2128850 - RNA, 19 nt, Artificial Sequence
  Description of Artificial Sequence: Synthetic oligonucleotide
gaaacgccgccggaugggu

SEQ ID NO: 2128851 - RNA, 19 nt, Artificial Sequence
  Description of Artificial Sequence: Synthetic oligonucleotide
cuauaaccguggucaugua

SEQ ID NO: 2128852 - RNA, 19 nt, Artificial Sequence
  Description of Artificial Sequence: Synthetic oligonucleotide
cuguugaaccggaaucguu

SEQ ID NO: 2128853 - RNA, 19 nt, Artificial Sequence
  Description of Artificial Sequence: Synthetic oligonucleotide
ggucacugauccggaggcc

SEQ ID NO: 2128854 - RNA, 19 nt, Artificial Sequence
  Description of Artificial Sequence: Synthetic oligonucleotide
gcgucuguagugagguaac

SEQ ID NO: 2128855 - RNA, 19 nt, Artificial Sequence
  Description of Artificial Sequence: Synthetic oligonucleotide
agggccaguuccagagcca

SEQ ID NO: 2128856 - RNA, 19 nt, Artificial Sequence
  Description of Artificial Sequence: Synthetic oligonucleotide
caagcaccgugaacucaaa

SEQ ID NO: 2128857 - RNA, 19 nt, Artificial Sequence
  Description of Artificial Sequence: Synthetic oligonucleotide
caucugcucccagcucaac

SEQ ID NO: 2128858 - RNA, 19 nt, Artificial Sequence
  Description of Artificial Sequence: Synthetic oligonucleotide
cacgaccuuuccaucugcu

SEQ ID NO: 2128859 - RNA, 19 nt, Artificial Sequence
  Description of Artificial Sequence: Synthetic oligonucleotide
gugcgcaucucccgcuuua

SEQ ID NO: 2128860 - RNA, 19 nt, Artificial Sequence
  Description of Artificial Sequence: Synthetic oligonucleotide
caaugaggucucuucuguu

SEQ ID NO: 2128861 - RNA, 19 nt, Artificial Sequence
  Description of Artificial Sequence: Synthetic oligonucleotide
cccucaggucacugauccg

SEQ ID NO: 2128862 - RNA, 19 nt, Artificial Sequence
  Description of Artificial Sequence: Synthetic oligonucleotide
cgugacugucauucuugug

SEQ ID NO: 2128863 - RNA, 19 nt, Artificial Sequence
  Description of Artificial Sequence: Synthetic oligonucleotide
gcucaacgccuuccaacuc

SEQ ID NO: 2128864 - RNA, 19 nt, Artificial Sequence
  Description of Artificial Sequence: Synthetic oligonucleotide
guuugauaugcgggaacuu

SEQ ID NO: 2128865 - RNA, 19 nt, Artificial Sequence
  Description of Artificial Sequence: Synthetic oligonucleotide
caagagguugggguuguau

SEQ ID NO: 2128866 - RNA, 19 nt, Artificial Sequence
  Description of Artificial Sequence: Synthetic oligonucleotide
gccggaugggugccucugc

SEQ ID NO: 2128867 - RNA, 19 nt, Artificial Sequence
  Description of Artificial Sequence: Synthetic oligonucleotide
ccauagggcaggacugaga

SEQ ID NO: 2128868 - RNA, 19 nt, Artificial Sequence
  Description of Artificial Sequence: Synthetic oligonucleotide
gaggggcaagugcaguguu

SEQ ID NO: 2128869 - RNA, 19 nt, Artificial Sequence
  Description of Artificial Sequence: Synthetic oligonucleotide
guccacccucaggucacug

SEQ ID NO: 2128870 - RNA, 19 nt, Artificial Sequence
  Description of Artificial Sequence: Synthetic oligonucleotide
cccgcuuuaaacuccuaau

SEQ ID NO: 2128871 - RNA, 19 nt, Artificial Sequence
  Description of Artificial Sequence: Synthetic oligonucleotide
acgcaagcuccagcacaca

SEQ ID NO: 2128872 - RNA, 19 nt, Artificial Sequence
  Description of Artificial Sequence: Synthetic oligonucleotide
aggcgucuguagugaggua

SEQ ID NO: 2128873 - RNA, 19 nt, Artificial Sequence
  Description of Artificial Sequence: Synthetic oligonucleotide
ccacaugccuuccuaccaa

SEQ ID NO: 2128874 - RNA, 19 nt, Artificial Sequence
  Description of Artificial Sequence: Synthetic oligonucleotide
ggacacggucacgggcucc

SEQ ID NO: 2128875 - RNA, 19 nt, Artificial Sequence
  Description of Artificial Sequence: Synthetic oligonucleotide
ggaccgcuuggcacagaug

SEQ ID NO: 2128876 - RNA, 19 nt, Artificial Sequence
  Description of Artificial Sequence: Synthetic oligonucleotide
caacgccuuccaacucaaa

SEQ ID NO: 2128877 - RNA, 19 nt, Artificial Sequence
  Description of Artificial Sequence: Synthetic oligonucleotide
gggaccgcuuggcacagau

SEQ ID NO: 2128878 - RNA, 19 nt, Artificial Sequence
  Description of Artificial Sequence: Synthetic oligonucleotide
ggcagcaagccgugacugu

SEQ ID NO: 2128879 - RNA, 19 nt, Artificial Sequence
  Description of Artificial Sequence: Synthetic oligonucleotide
ccgcuuuaaacuccuaauu

SEQ ID NO: 2128880 - RNA, 19 nt, Artificial Sequence
  Description of Artificial Sequence: Synthetic oligonucleotide
ggacacuaguugccucugu

SEQ ID NO: 2128881 - RNA, 19 nt, Artificial Sequence
  Description of Artificial Sequence: Synthetic oligonucleotide
ccgggagguacagggccag

SEQ ID NO: 2128882 - RNA, 19 nt, Artificial Sequence
  Description of Artificial Sequence: Synthetic oligonucleotide
ggguuguauuccacugccu

SEQ ID NO: 2128883 - RNA, 19 nt, Artificial Sequence
  Description of Artificial Sequence: Synthetic oligonucleotide
gcacacaguuugcgguugu

SEQ ID NO: 2128884 - RNA, 19 nt, Artificial Sequence
  Description of Artificial Sequence: Synthetic oligonucleotide
ccuaccaagcagccuuccu

SEQ ID NO: 2128885 - RNA, 19 nt, Artificial Sequence
  Description of Artificial Sequence: Synthetic oligonucleotide
ccgugacugucauucuugu

SEQ ID NO: 2128886 - RNA, 19 nt, Artificial Sequence
  Description of Artificial Sequence: Synthetic oligonucleotide
cuuggcucuccgggaggua

SEQ ID NO: 2128887 - RNA, 19 nt, Artificial Sequence
  Description of Artificial Sequence: Synthetic oligonucleotide
gggagguacagggccaguu

SEQ ID NO: 2128888 - RNA, 19 nt, Artificial Sequence
  Description of Artificial Sequence: Synthetic oligonucleotide
ccuccaucguuuccuaguu

SEQ ID NO: 2128889 - RNA, 19 nt, Artificial Sequence
  Description of Artificial Sequence: Synthetic oligonucleotide
agggaccgcuuggcacaga

SEQ ID NO: 2128890 - RNA, 19 nt, Artificial Sequence
  Description of Artificial Sequence: Synthetic oligonucleotide
gggacgcugggccgaggcu

SEQ ID NO: 2128891 - RNA, 19 nt, Artificial Sequence
  Description of Artificial Sequence: Synthetic oligonucleotide
cgucuguagugagguaaca

SEQ ID NO: 2128892 - RNA, 19 nt, Artificial Sequence
  Description of Artificial Sequence: Synthetic oligonucleotide
gggccgaggcuggggcagc

SEQ ID NO: 2128893 - RNA, 19 nt, Artificial Sequence
  Description of Artificial Sequence: Synthetic oligonucleotide
guuugcgguugugcuuguu

SEQ ID NO: 2128894 - RNA, 19 nt, Artificial Sequence
  Description of Artificial Sequence: Synthetic oligonucleotide
ccggaugggugccucugcu

SEQ ID NO: 2128895 - RNA, 19 nt, Artificial Sequence
  Description of Artificial Sequence: Synthetic oligonucleotide
ggugcgcaucucccgcuuu

SEQ ID NO: 2128896 - RNA, 19 nt, Artificial Sequence
  Description of Artificial Sequence: Synthetic oligonucleotide
gccgccggaugggugccuc

SEQ ID NO: 2128897 - RNA, 19 nt, Artificial Sequence
  Description of Artificial Sequence: Synthetic oligonucleotide
ccuuccuaccaagcagccu

SEQ ID NO: 2128898 - RNA, 19 nt, Artificial Sequence
  Description of Artificial Sequence: Synthetic oligonucleotide
cauggccacugugggucau

SEQ ID NO: 2128899 - RNA, 19 nt, Artificial Sequence
  Description of Artificial Sequence: Synthetic oligonucleotide
gugggucauccaagagguu

SEQ ID NO: 2128900 - RNA, 19 nt, Artificial Sequence
  Description of Artificial Sequence: Synthetic oligonucleotide
gcaagccgugacugucauu

SEQ ID NO: 2128901 - RNA, 19 nt, Artificial Sequence
  Description of Artificial Sequence: Synthetic oligonucleotide
gccgaggcuggggcagcaa

SEQ ID NO: 2128902 - RNA, 19 nt, Artificial Sequence
  Description of Artificial Sequence: Synthetic oligonucleotide
ccaagagguugggguugua

SEQ ID NO: 2128903 - RNA, 19 nt, Artificial Sequence
  Description of Artificial Sequence: Synthetic oligonucleotide
cguaggccauggacacggu

SEQ ID NO: 2128904 - RNA, 19 nt, Artificial Sequence
  Description of Artificial Sequence: Synthetic oligonucleotide
ccgccggaugggugccucu

SEQ ID NO: 2128905 - RNA, 19 nt, Artificial Sequence
  Description of Artificial Sequence: Synthetic oligonucleotide
cgcccuugcggaggucacu

SEQ ID NO: 2128906 - RNA, 19 nt, Artificial Sequence
  Description of Artificial Sequence: Synthetic oligonucleotide
cgggagguacagggccagu

SEQ ID NO: 2128907 - RNA, 19 nt, Artificial Sequence
  Description of Artificial Sequence: Synthetic oligonucleotide
cgccgccggaugggugccu

SEQ ID NO: 2128908 - RNA, 19 nt, Artificial Sequence
  Description of Artificial Sequence: Synthetic oligonucleotide
aaaguaguagcucauagcc

SEQ ID NO: 2128909 - RNA, 19 nt, Artificial Sequence
  Description of Artificial Sequence: Synthetic oligonucleotide
aauacuuaggaaucuagac

SEQ ID NO: 2128910 - RNA, 19 nt, Artificial Sequence
  Description of Artificial Sequence: Synthetic oligonucleotide
aaacaaugcauacucauac

SEQ ID NO: 2128911 - RNA, 19 nt, Artificial Sequence
  Description of Artificial Sequence: Synthetic oligonucleotide
acucauacgaaguacagcg

SEQ ID NO: 2128912 - RNA, 19 nt, Artificial Sequence
  Description of Artificial Sequence: Synthetic oligonucleotide
aaucaguuugcuaagaggg

SEQ ID NO: 2128913 - RNA, 19 nt, Artificial Sequence
  Description of Artificial Sequence: Synthetic oligonucleotide
aaaucugcagcugaggccc

SEQ ID NO: 2128914 - RNA, 19 nt, Artificial Sequence
  Description of Artificial Sequence: Synthetic oligonucleotide
ugauaaaucaguuugcuaa

SEQ ID NO: 2128915 - RNA, 19 nt, Artificial Sequence
  Description of Artificial Sequence: Synthetic oligonucleotide
aaaccaaauacuuaggaau

SEQ ID NO: 2128916 - RNA, 19 nt, Artificial Sequence
  Description of Artificial Sequence: Synthetic oligonucleotide
aacaguaacugucucuucg

SEQ ID NO: 2128917 - RNA, 19 nt, Artificial Sequence
  Description of Artificial Sequence: Synthetic oligonucleotide
uccaaauugcucauaaugc

SEQ ID NO: 2128918 - RNA, 19 nt, Artificial Sequence
  Description of Artificial Sequence: Synthetic oligonucleotide
uuuguuuuauucaguagag

SEQ ID NO: 2128919 - RNA, 19 nt, Artificial Sequence
  Description of Artificial Sequence: Synthetic oligonucleotide
agcaaugaaacacugaaca

SEQ ID NO: 2128920 - RNA, 19 nt, Artificial Sequence
  Description of Artificial Sequence: Synthetic oligonucleotide
ugggaaaccaaauacuuag

SEQ ID NO: 2128921 - RNA, 19 nt, Artificial Sequence
  Description of Artificial Sequence: Synthetic oligonucleotide
auacaguugaaguuuuggc

SEQ ID NO: 2128922 - RNA, 19 nt, Artificial Sequence
  Description of Artificial Sequence: Synthetic oligonucleotide
uacuuaggaaucuagaccu

SEQ ID NO: 2128923 - RNA, 19 nt, Artificial Sequence
  Description of Artificial Sequence: Synthetic oligonucleotide
gauagcauuccugagauug

SEQ ID NO: 2128924 - RNA, 19 nt, Artificial Sequence
  Description of Artificial Sequence: Synthetic oligonucleotide
uuacacuugaccucuaagc

SEQ ID NO: 2128925 - RNA, 19 nt, Artificial Sequence
  Description of Artificial Sequence: Synthetic oligonucleotide
aacaaugcauacucauacg

SEQ ID NO: 2128926 - RNA, 19 nt, Artificial Sequence
  Description of Artificial Sequence: Synthetic oligonucleotide
aguaacugucucuucgugc

SEQ ID NO: 2128927 - RNA, 19 nt, Artificial Sequence
  Description of Artificial Sequence: Synthetic oligonucleotide
acacauaguuccaauaucc

SEQ ID NO: 2128928 - RNA, 19 nt, Artificial Sequence
  Description of Artificial Sequence: Synthetic oligonucleotide
uacacuugaccucuaagcc

SEQ ID NO: 2128929 - RNA, 19 nt, Artificial Sequence
  Description of Artificial Sequence: Synthetic oligonucleotide
acuugggcuaaccauaagg

SEQ ID NO: 2128930 - RNA, 19 nt, Artificial Sequence
  Description of Artificial Sequence: Synthetic oligonucleotide
aaaccuccagguucuauac

SEQ ID NO: 2128931 - RNA, 19 nt, Artificial Sequence
  Description of Artificial Sequence: Synthetic oligonucleotide
uaugcaaagcugaugggcc

SEQ ID NO: 2128932 - RNA, 19 nt, Artificial Sequence
  Description of Artificial Sequence: Synthetic oligonucleotide
uauacaguugaaguuuugg

SEQ ID NO: 2128933 - RNA, 19 nt, Artificial Sequence
  Description of Artificial Sequence: Synthetic oligonucleotide
ugugauagcauuccugaga

SEQ ID NO: 2128934 - RNA, 19 nt, Artificial Sequence
  Description of Artificial Sequence: Synthetic oligonucleotide
ugugugauagcauuccuga

SEQ ID NO: 2128935 - RNA, 19 nt, Artificial Sequence
  Description of Artificial Sequence: Synthetic oligonucleotide
uuuacuguuguuuccuuug

SEQ ID NO: 2128936 - RNA, 19 nt, Artificial Sequence
  Description of Artificial Sequence: Synthetic oligonucleotide
ucauucacaguuuugugga

SEQ ID NO: 2128937 - RNA, 19 nt, Artificial Sequence
  Description of Artificial Sequence: Synthetic oligonucleotide
acacuugaccucuaagccc

SEQ ID NO: 2128938 - RNA, 19 nt, Artificial Sequence
  Description of Artificial Sequence: Synthetic oligonucleotide
ugggcuaaccauaaggaca

SEQ ID NO: 2128939 - RNA, 19 nt, Artificial Sequence
  Description of Artificial Sequence: Synthetic oligonucleotide
uacauagaaaccuccaggu

SEQ ID NO: 2128940 - RNA, 19 nt, Artificial Sequence
  Description of Artificial Sequence: Synthetic oligonucleotide
aaaacuaggcacaacuucu

SEQ ID NO: 2128941 - RNA, 19 nt, Artificial Sequence
  Description of Artificial Sequence: Synthetic oligonucleotide
uucauacauagaaaccucc

SEQ ID NO: 2128942 - RNA, 19 nt, Artificial Sequence
  Description of Artificial Sequence: Synthetic oligonucleotide
aaccaaauacuuaggaauc

SEQ ID NO: 2128943 - RNA, 19 nt, Artificial Sequence
  Description of Artificial Sequence: Synthetic oligonucleotide
aaccauaaggacaaaguug

SEQ ID NO: 2128944 - RNA, 19 nt, Artificial Sequence
  Description of Artificial Sequence: Synthetic oligonucleotide
ugcucauucuucuuuuggg

SEQ ID NO: 2128945 - RNA, 19 nt, Artificial Sequence
  Description of Artificial Sequence: Synthetic oligonucleotide
cauagaaaccuccagguuc

SEQ ID NO: 2128946 - RNA, 19 nt, Artificial Sequence
  Description of Artificial Sequence: Synthetic oligonucleotide
ucauacgaaguacagcgca

SEQ ID NO: 2128947 - RNA, 19 nt, Artificial Sequence
  Description of Artificial Sequence: Synthetic oligonucleotide
auaaacaaugcauacucau

SEQ ID NO: 2128948 - RNA, 19 nt, Artificial Sequence
  Description of Artificial Sequence: Synthetic oligonucleotide
acagcaaugaaacacugaa

SEQ ID NO: 2128949 - RNA, 19 nt, Artificial Sequence
  Description of Artificial Sequence: Synthetic oligonucleotide
cuaggcacaacuucuuucc

SEQ ID NO: 2128950 - RNA, 19 nt, Artificial Sequence
  Description of Artificial Sequence: Synthetic oligonucleotide
aacacagaagaugggaaag

SEQ ID NO: 2128951 - RNA, 19 nt, Artificial Sequence
  Description of Artificial Sequence: Synthetic oligonucleotide
auucaguagagaugcaaag

SEQ ID NO: 2128952 - RNA, 19 nt, Artificial Sequence
  Description of Artificial Sequence: Synthetic oligonucleotide
aaagucuugcucauucuuc

SEQ ID NO: 2128953 - RNA, 19 nt, Artificial Sequence
  Description of Artificial Sequence: Synthetic oligonucleotide
uguggacaaagucuguccc

SEQ ID NO: 2128954 - RNA, 19 nt, Artificial Sequence
  Description of Artificial Sequence: Synthetic oligonucleotide
caaauacuuaggaaucuag

SEQ ID NO: 2128955 - RNA, 19 nt, Artificial Sequence
  Description of Artificial Sequence: Synthetic oligonucleotide
accuuuccaaacuaaagca

SEQ ID NO: 2128956 - RNA, 19 nt, Artificial Sequence
  Description of Artificial Sequence: Synthetic oligonucleotide
agagaguggggacuugggc

SEQ ID NO: 2128957 - RNA, 19 nt, Artificial Sequence
  Description of Artificial Sequence: Synthetic oligonucleotide
uuaggaaucuagaccuucc

SEQ ID NO: 2128958 - RNA, 19 nt, Artificial Sequence
  Description of Artificial Sequence: Synthetic oligonucleotide
acaaugcauacucauacga

SEQ ID NO: 2128959 - RNA, 19 nt, Artificial Sequence
  Description of Artificial Sequence: Synthetic oligonucleotide
acuaggcacaacuucuuuc

SEQ ID NO: 2128960 - RNA, 19 nt, Artificial Sequence
  Description of Artificial Sequence: Synthetic oligonucleotide
auauccgucaccucaccuc

SEQ ID NO: 2128961 - RNA, 19 nt, Artificial Sequence
  Description of Artificial Sequence: Synthetic oligonucleotide
caaaguaguagcucauagc

SEQ ID NO: 2128962 - RNA, 19 nt, Artificial Sequence
  Description of Artificial Sequence: Synthetic oligonucleotide
ucauuggacuggaaagggg

SEQ ID NO: 2128963 - RNA, 19 nt, Artificial Sequence
  Description of Artificial Sequence: Synthetic oligonucleotide
auucauuggacuggaaagg

SEQ ID NO: 2128964 - RNA, 19 nt, Artificial Sequence
  Description of Artificial Sequence: Synthetic oligonucleotide
aaauugcucauaaugcugu

SEQ ID NO: 2128965 - RNA, 19 nt, Artificial Sequence
  Description of Artificial Sequence: Synthetic oligonucleotide
aaacacagaagaugggaaa

SEQ ID NO: 2128966 - RNA, 19 nt, Artificial Sequence
  Description of Artificial Sequence: Synthetic oligonucleotide
auggggaccagcugaaagg

SEQ ID NO: 2128967 - RNA, 19 nt, Artificial Sequence
  Description of Artificial Sequence: Synthetic oligonucleotide
uucauuggacuggaaaggg

SEQ ID NO: 2128968 - RNA, 19 nt, Artificial Sequence
  Description of Artificial Sequence: Synthetic oligonucleotide
accccuaucacacauaguu

SEQ ID NO: 2128969 - RNA, 19 nt, Artificial Sequence
  Description of Artificial Sequence: Synthetic oligonucleotide
cugagauuggugauauccg

SEQ ID NO: 2128970 - RNA, 19 nt, Artificial Sequence
  Description of Artificial Sequence: Synthetic oligonucleotide
uacuacucccuccaaaggu

SEQ ID NO: 2128971 - RNA, 19 nt, Artificial Sequence
  Description of Artificial Sequence: Synthetic oligonucleotide
guuccaauauccaaauugc

SEQ ID NO: 2128972 - RNA, 19 nt, Artificial Sequence
  Description of Artificial Sequence: Synthetic oligonucleotide
gaaucuagaccuucccuug

SEQ ID NO: 2128973 - RNA, 19 nt, Artificial Sequence
  Description of Artificial Sequence: Synthetic oligonucleotide
aguaguagcucauagccua

SEQ ID NO: 2128974 - RNA, 19 nt, Artificial Sequence
  Description of Artificial Sequence: Synthetic oligonucleotide
gcuaugaugccacugcugg

SEQ ID NO: 2128975 - RNA, 19 nt, Artificial Sequence
  Description of Artificial Sequence: Synthetic oligonucleotide
uccgcuaugaugccacugc

SEQ ID NO: 2128976 - RNA, 19 nt, Artificial Sequence
  Description of Artificial Sequence: Synthetic oligonucleotide
agauuggugauauccguca

SEQ ID NO: 2128977 - RNA, 19 nt, Artificial Sequence
  Description of Artificial Sequence: Synthetic oligonucleotide
ucugucccuacuucaacag

SEQ ID NO: 2128978 - RNA, 19 nt, Artificial Sequence
  Description of Artificial Sequence: Synthetic oligonucleotide
uacuucaacaguccaggcu

SEQ ID NO: 2128979 - RNA, 19 nt, Artificial Sequence
  Description of Artificial Sequence: Synthetic oligonucleotide
ugucccuacuucaacaguc

SEQ ID NO: 2128980 - RNA, 19 nt, Artificial Sequence
  Description of Artificial Sequence: Synthetic oligonucleotide
ucuccaaccuuuccaaacu

SEQ ID NO: 2128981 - RNA, 19 nt, Artificial Sequence
  Description of Artificial Sequence: Synthetic oligonucleotide
uagccuaugugugauagca

SEQ ID NO: 2128982 - RNA, 19 nt, Artificial Sequence
  Description of Artificial Sequence: Synthetic oligonucleotide
aaguuuuggccaugucuag

SEQ ID NO: 2128983 - RNA, 19 nt, Artificial Sequence
  Description of Artificial Sequence: Synthetic oligonucleotide
uuguggacaaagucugucc

SEQ ID NO: 2128984 - RNA, 19 nt, Artificial Sequence
  Description of Artificial Sequence: Synthetic oligonucleotide
cuccggagcauaaacaaug

SEQ ID NO: 2128985 - RNA, 19 nt, Artificial Sequence
  Description of Artificial Sequence: Synthetic oligonucleotide
ugcaguuuacuguuguuuc

SEQ ID NO: 2128986 - RNA, 19 nt, Artificial Sequence
  Description of Artificial Sequence: Synthetic oligonucleotide
agcugaaaggagcucagug

SEQ ID NO: 2128987 - RNA, 19 nt, Artificial Sequence
  Description of Artificial Sequence: Synthetic oligonucleotide
uggaaacacagaagauggg

SEQ ID NO: 2128988 - RNA, 19 nt, Artificial Sequence
  Description of Artificial Sequence: Synthetic oligonucleotide
acacugaacaguaacuguc

SEQ ID NO: 2128989 - RNA, 19 nt, Artificial Sequence
  Description of Artificial Sequence: Synthetic oligonucleotide
ugagauuggugauauccgu

SEQ ID NO: 2128990 - RNA, 19 nt, Artificial Sequence
  Description of Artificial Sequence: Synthetic oligonucleotide
gagcauaaacaaugcauac

SEQ ID NO: 2128991 - RNA, 19 nt, Artificial Sequence
  Description of Artificial Sequence: Synthetic oligonucleotide
aguuguucucuggaaacac

SEQ ID NO: 2128992 - RNA, 19 nt, Artificial Sequence
  Description of Artificial Sequence: Synthetic oligonucleotide
ugaaguucaugacacuuuu

SEQ ID NO: 2128993 - RNA, 19 nt, Artificial Sequence
  Description of Artificial Sequence: Synthetic oligonucleotide
aacccuacuacucccucca

SEQ ID NO: 2128994 - RNA, 19 nt, Artificial Sequence
  Description of Artificial Sequence: Synthetic oligonucleotide
gcauaaacaaugcauacuc

SEQ ID NO: 2128995 - RNA, 19 nt, Artificial Sequence
  Description of Artificial Sequence: Synthetic oligonucleotide
gagggcaaugggaagagag

SEQ ID NO: 2128996 - RNA, 19 nt, Artificial Sequence
  Description of Artificial Sequence: Synthetic oligonucleotide
uacgaaguacagcgcaucc

SEQ ID NO: 2128997 - RNA, 19 nt, Artificial Sequence
  Description of Artificial Sequence: Synthetic oligonucleotide
augaaugcaguuuacuguu

SEQ ID NO: 2128998 - RNA, 19 nt, Artificial Sequence
  Description of Artificial Sequence: Synthetic oligonucleotide
ugagcuccggagcauaaac

SEQ ID NO: 2128999 - RNA, 19 nt, Artificial Sequence
  Description of Artificial Sequence: Synthetic oligonucleotide
auagccuaugugugauagc

SEQ ID NO: 2129000 - RNA, 19 nt, Artificial Sequence
  Description of Artificial Sequence: Synthetic oligonucleotide
auaguuccaauauccaaau

SEQ ID NO: 2129001 - RNA, 19 nt, Artificial Sequence
  Description of Artificial Sequence: Synthetic oligonucleotide
guaugcaaagcugaugggc

SEQ ID NO: 2129002 - RNA, 19 nt, Artificial Sequence
  Description of Artificial Sequence: Synthetic oligonucleotide
cauaaggacaaaguuguuc

SEQ ID NO: 2129003 - RNA, 19 nt, Artificial Sequence
  Description of Artificial Sequence: Synthetic oligonucleotide
aguuuuggccaugucuagc

SEQ ID NO: 2129004 - RNA, 19 nt, Artificial Sequence
  Description of Artificial Sequence: Synthetic oligonucleotide
uaggaaucuagaccuuccc

SEQ ID NO: 2129005 - RNA, 19 nt, Artificial Sequence
  Description of Artificial Sequence: Synthetic oligonucleotide
uucgugccgucaucgaugg

SEQ ID NO: 2129006 - RNA, 19 nt, Artificial Sequence
  Description of Artificial Sequence: Synthetic oligonucleotide
uccagguucuauacaguug

SEQ ID NO: 2129007 - RNA, 19 nt, Artificial Sequence
  Description of Artificial Sequence: Synthetic oligonucleotide
cauacucauacgaaguaca

SEQ ID NO: 2129008 - RNA, 19 nt, Artificial Sequence
  Description of Artificial Sequence: Synthetic oligonucleotide
cacaguuuuguggacaaag

SEQ ID NO: 2129009 - RNA, 19 nt, Artificial Sequence
  Description of Artificial Sequence: Synthetic oligonucleotide
cuagaccuucccuugggcc

SEQ ID NO: 2129010 - RNA, 19 nt, Artificial Sequence
  Description of Artificial Sequence: Synthetic oligonucleotide
uuauucaguagagaugcaa

SEQ ID NO: 2129011 - RNA, 19 nt, Artificial Sequence
  Description of Artificial Sequence: Synthetic oligonucleotide
uauccgucaccucaccucu

SEQ ID NO: 2129012 - RNA, 19 nt, Artificial Sequence
  Description of Artificial Sequence: Synthetic oligonucleotide
uuggugauauccgucaccu

SEQ ID NO: 2129013 - RNA, 19 nt, Artificial Sequence
  Description of Artificial Sequence: Synthetic oligonucleotide
augggaagagaguggggac

SEQ ID NO: 2129014 - RNA, 19 nt, Artificial Sequence
  Description of Artificial Sequence: Synthetic oligonucleotide
cuaugugugauagcauucc

SEQ ID NO: 2129015 - RNA, 19 nt, Artificial Sequence
  Description of Artificial Sequence: Synthetic oligonucleotide
ucccuuugaagucacgguc

SEQ ID NO: 2129016 - RNA, 19 nt, Artificial Sequence
  Description of Artificial Sequence: Synthetic oligonucleotide
cuugggcuaaccauaagga

SEQ ID NO: 2129017 - RNA, 19 nt, Artificial Sequence
  Description of Artificial Sequence: Synthetic oligonucleotide
guucccuuugaagucacgg

SEQ ID NO: 2129018 - RNA, 19 nt, Artificial Sequence
  Description of Artificial Sequence: Synthetic oligonucleotide
gaagagaguggggacuugg

SEQ ID NO: 2129019 - RNA, 19 nt, Artificial Sequence
  Description of Artificial Sequence: Synthetic oligonucleotide
uccggagcauaaacaaugc

SEQ ID NO: 2129020 - RNA, 19 nt, Artificial Sequence
  Description of Artificial Sequence: Synthetic oligonucleotide
cugguaacccuacuacucc

SEQ ID NO: 2129021 - RNA, 19 nt, Artificial Sequence
  Description of Artificial Sequence: Synthetic oligonucleotide
uaugugugauagcauuccu

SEQ ID NO: 2129022 - RNA, 19 nt, Artificial Sequence
  Description of Artificial Sequence: Synthetic oligonucleotide
ucucuucgugccgucaucg

SEQ ID NO: 2129023 - RNA, 19 nt, Artificial Sequence
  Description of Artificial Sequence: Synthetic oligonucleotide
ucccugguaacccuacuac

SEQ ID NO: 2129024 - RNA, 19 nt, Artificial Sequence
  Description of Artificial Sequence: Synthetic oligonucleotide
ucuagaccuucccuugggc

SEQ ID NO: 2129025 - RNA, 19 nt, Artificial Sequence
  Description of Artificial Sequence: Synthetic oligonucleotide
agucugucccuacuucaac

SEQ ID NO: 2129026 - RNA, 19 nt, Artificial Sequence
  Description of Artificial Sequence: Synthetic oligonucleotide
aucuagaccuucccuuggg

SEQ ID NO: 2129027 - RNA, 19 nt, Artificial Sequence
  Description of Artificial Sequence: Synthetic oligonucleotide
ggugauauccgucaccuca

SEQ ID NO: 2129028 - RNA, 19 nt, Artificial Sequence
  Description of Artificial Sequence: Synthetic oligonucleotide
gaagccucggggcuagaag

SEQ ID NO: 2129029 - RNA, 19 nt, Artificial Sequence
  Description of Artificial Sequence: Synthetic oligonucleotide
uugggcuaaccauaaggac

SEQ ID NO: 2129030 - RNA, 19 nt, Artificial Sequence
  Description of Artificial Sequence: Synthetic oligonucleotide
ugcauacucauacgaagua

SEQ ID NO: 2129031 - RNA, 19 nt, Artificial Sequence
  Description of Artificial Sequence: Synthetic oligonucleotide
cauuggacuggaaagggga

SEQ ID NO: 2129032 - RNA, 19 nt, Artificial Sequence
  Description of Artificial Sequence: Synthetic oligonucleotide
ugaaaggagcucagugaca

SEQ ID NO: 2129033 - RNA, 19 nt, Artificial Sequence
  Description of Artificial Sequence: Synthetic oligonucleotide
ccugagauuggugauaucc

SEQ ID NO: 2129034 - RNA, 19 nt, Artificial Sequence
  Description of Artificial Sequence: Synthetic oligonucleotide
aagcccuggguucaggaaa

SEQ ID NO: 2129035 - RNA, 19 nt, Artificial Sequence
  Description of Artificial Sequence: Synthetic oligonucleotide
agaccccugggauucauug

SEQ ID NO: 2129036 - RNA, 19 nt, Artificial Sequence
  Description of Artificial Sequence: Synthetic oligonucleotide
uacucauacgaaguacagc

SEQ ID NO: 2129037 - RNA, 19 nt, Artificial Sequence
  Description of Artificial Sequence: Synthetic oligonucleotide
cccuaucacacauaguucc

SEQ ID NO: 2129038 - RNA, 19 nt, Artificial Sequence
  Description of Artificial Sequence: Synthetic oligonucleotide
augucuagcacuuccuuua

SEQ ID NO: 2129039 - RNA, 19 nt, Artificial Sequence
  Description of Artificial Sequence: Synthetic oligonucleotide
aggaaucuagaccuucccu

SEQ ID NO: 2129040 - RNA, 19 nt, Artificial Sequence
  Description of Artificial Sequence: Synthetic oligonucleotide
uccuuugggaaaccaaaua

SEQ ID NO: 2129041 - RNA, 19 nt, Artificial Sequence
  Description of Artificial Sequence: Synthetic oligonucleotide
cuucgugccgucaucgaug

SEQ ID NO: 2129042 - RNA, 19 nt, Artificial Sequence
  Description of Artificial Sequence: Synthetic oligonucleotide
uaacugucucuucgugccg

SEQ ID NO: 2129043 - RNA, 19 nt, Artificial Sequence
  Description of Artificial Sequence: Synthetic oligonucleotide
cuacuacucccuccaaagg

SEQ ID NO: 2129044 - RNA, 19 nt, Artificial Sequence
  Description of Artificial Sequence: Synthetic oligonucleotide
cugguauccaagaugggga

SEQ ID NO: 2129045 - RNA, 19 nt, Artificial Sequence
  Description of Artificial Sequence: Synthetic oligonucleotide
acaguaacugucucuucgu

SEQ ID NO: 2129046 - RNA, 19 nt, Artificial Sequence
  Description of Artificial Sequence: Synthetic oligonucleotide
cuaaccauaaggacaaagu

SEQ ID NO: 2129047 - RNA, 19 nt, Artificial Sequence
  Description of Artificial Sequence: Synthetic oligonucleotide
gguucuauacaguugaagu

SEQ ID NO: 2129048 - RNA, 19 nt, Artificial Sequence
  Description of Artificial Sequence: Synthetic oligonucleotide
uguccuacucaucccuuga

SEQ ID NO: 2129049 - RNA, 19 nt, Artificial Sequence
  Description of Artificial Sequence: Synthetic oligonucleotide
caagauggggaccagcuga

SEQ ID NO: 2129050 - RNA, 19 nt, Artificial Sequence
  Description of Artificial Sequence: Synthetic oligonucleotide
gacuggaaaggggaaacug

SEQ ID NO: 2129051 - RNA, 19 nt, Artificial Sequence
  Description of Artificial Sequence: Synthetic oligonucleotide
gaagucacggucauucaca

SEQ ID NO: 2129052 - RNA, 19 nt, Artificial Sequence
  Description of Artificial Sequence: Synthetic oligonucleotide
auagaaaccuccagguucu

SEQ ID NO: 2129053 - RNA, 19 nt, Artificial Sequence
  Description of Artificial Sequence: Synthetic oligonucleotide
uacucaucccuugauaaau

SEQ ID NO: 2129054 - RNA, 19 nt, Artificial Sequence
  Description of Artificial Sequence: Synthetic oligonucleotide
gaaaccuccagguucuaua

SEQ ID NO: 2129055 - RNA, 19 nt, Artificial Sequence
  Description of Artificial Sequence: Synthetic oligonucleotide
cuaaagcaaaauuuucaaa

SEQ ID NO: 2129056 - RNA, 19 nt, Artificial Sequence
  Description of Artificial Sequence: Synthetic oligonucleotide
aggggaaacugcugguauc

SEQ ID NO: 2129057 - RNA, 19 nt, Artificial Sequence
  Description of Artificial Sequence: Synthetic oligonucleotide
ugccuccuuccccagaccc

SEQ ID NO: 2129058 - RNA, 19 nt, Artificial Sequence
  Description of Artificial Sequence: Synthetic oligonucleotide
ggacuguccgcuaugaugc

SEQ ID NO: 2129059 - RNA, 19 nt, Artificial Sequence
  Description of Artificial Sequence: Synthetic oligonucleotide
uaacccuacuacucccucc

SEQ ID NO: 2129060 - RNA, 19 nt, Artificial Sequence
  Description of Artificial Sequence: Synthetic oligonucleotide
aagagaguggggacuuggg

SEQ ID NO: 2129061 - RNA, 19 nt, Artificial Sequence
  Description of Artificial Sequence: Synthetic oligonucleotide
cuucuuucccugguaaccc

SEQ ID NO: 2129062 - RNA, 19 nt, Artificial Sequence
  Description of Artificial Sequence: Synthetic oligonucleotide
ugguaacccuacuacuccc

SEQ ID NO: 2129063 - RNA, 19 nt, Artificial Sequence
  Description of Artificial Sequence: Synthetic oligonucleotide
guagcucauagccuaugug

SEQ ID NO: 2129064 - RNA, 19 nt, Artificial Sequence
  Description of Artificial Sequence: Synthetic oligonucleotide
cacacauaguuccaauauc

SEQ ID NO: 2129065 - RNA, 19 nt, Artificial Sequence
  Description of Artificial Sequence: Synthetic oligonucleotide
cucauacgaaguacagcgc

SEQ ID NO: 2129066 - RNA, 19 nt, Artificial Sequence
  Description of Artificial Sequence: Synthetic oligonucleotide
aggcucugaaguucaugac

SEQ ID NO: 2129067 - RNA, 19 nt, Artificial Sequence
  Description of Artificial Sequence: Synthetic oligonucleotide
uuuuguggacaaagucugu

SEQ ID NO: 2129068 - RNA, 19 nt, Artificial Sequence
  Description of Artificial Sequence: Synthetic oligonucleotide
auacgaaguacagcgcauc

SEQ ID NO: 2129069 - RNA, 19 nt, Artificial Sequence
  Description of Artificial Sequence: Synthetic oligonucleotide
agguucuauacaguugaag

SEQ ID NO: 2129070 - RNA, 19 nt, Artificial Sequence
  Description of Artificial Sequence: Synthetic oligonucleotide
agaagaugggaaaggagga

SEQ ID NO: 2129071 - RNA, 19 nt, Artificial Sequence
  Description of Artificial Sequence: Synthetic oligonucleotide
aucaguuugcuaagagggg

SEQ ID NO: 2129072 - RNA, 19 nt, Artificial Sequence
  Description of Artificial Sequence: Synthetic oligonucleotide
cuaugaugccacugcuggg

SEQ ID NO: 2129073 - RNA, 19 nt, Artificial Sequence
  Description of Artificial Sequence: Synthetic oligonucleotide
cauaaacaaugcauacuca

SEQ ID NO: 2129074 - RNA, 19 nt, Artificial Sequence
  Description of Artificial Sequence: Synthetic oligonucleotide
agcucagugacagcaauga

SEQ ID NO: 2129075 - RNA, 19 nt, Artificial Sequence
  Description of Artificial Sequence: Synthetic oligonucleotide
ugauauccgucaccucacc

SEQ ID NO: 2129076 - RNA, 19 nt, Artificial Sequence
  Description of Artificial Sequence: Synthetic oligonucleotide
gaccccugggauucauugg

SEQ ID NO: 2129077 - RNA, 19 nt, Artificial Sequence
  Description of Artificial Sequence: Synthetic oligonucleotide
auacucauacgaaguacag

SEQ ID NO: 2129078 - RNA, 19 nt, Artificial Sequence
  Description of Artificial Sequence: Synthetic oligonucleotide
gaaguacagcgcauccagg

SEQ ID NO: 2129079 - RNA, 19 nt, Artificial Sequence
  Description of Artificial Sequence: Synthetic oligonucleotide
ugaccucuaagcccugggu

SEQ ID NO: 2129080 - RNA, 19 nt, Artificial Sequence
  Description of Artificial Sequence: Synthetic oligonucleotide
uaggcacaacuucuuuccc

SEQ ID NO: 2129081 - RNA, 19 nt, Artificial Sequence
  Description of Artificial Sequence: Synthetic oligonucleotide
aacuaggcacaacuucuuu

SEQ ID NO: 2129082 - RNA, 19 nt, Artificial Sequence
  Description of Artificial Sequence: Synthetic oligonucleotide
uuguccuacucaucccuug

SEQ ID NO: 2129083 - RNA, 19 nt, Artificial Sequence
  Description of Artificial Sequence: Synthetic oligonucleotide
cagcaaugaaacacugaac

SEQ ID NO: 2129084 - RNA, 19 nt, Artificial Sequence
  Description of Artificial Sequence: Synthetic oligonucleotide
guacagcgcauccagggac

SEQ ID NO: 2129085 - RNA, 19 nt, Artificial Sequence
  Description of Artificial Sequence: Synthetic oligonucleotide
gggacuguccgcuaugaug

SEQ ID NO: 2129086 - RNA, 19 nt, Artificial Sequence
  Description of Artificial Sequence: Synthetic oligonucleotide
ugucuagcacuuccuuuac

SEQ ID NO: 2129087 - RNA, 19 nt, Artificial Sequence
  Description of Artificial Sequence: Synthetic oligonucleotide
ugggcucucuaccucuccc

SEQ ID NO: 2129088 - RNA, 19 nt, Artificial Sequence
  Description of Artificial Sequence: Synthetic oligonucleotide
cuugccuccuuccccagac

SEQ ID NO: 2129089 - RNA, 19 nt, Artificial Sequence
  Description of Artificial Sequence: Synthetic oligonucleotide
aucacacauaguuccaaua

SEQ ID NO: 2129090 - RNA, 19 nt, Artificial Sequence
  Description of Artificial Sequence: Synthetic oligonucleotide
cuuaggaaucuagaccuuc

SEQ ID NO: 2129091 - RNA, 19 nt, Artificial Sequence
  Description of Artificial Sequence: Synthetic oligonucleotide
ucuucgugccgucaucgau

SEQ ID NO: 2129092 - RNA, 19 nt, Artificial Sequence
  Description of Artificial Sequence: Synthetic oligonucleotide
accccugggauucauugga

SEQ ID NO: 2129093 - RNA, 19 nt, Artificial Sequence
  Description of Artificial Sequence: Synthetic oligonucleotide
uugaagucacggucauuca

SEQ ID NO: 2129094 - RNA, 19 nt, Artificial Sequence
  Description of Artificial Sequence: Synthetic oligonucleotide
accaaauacuuaggaaucu

SEQ ID NO: 2129095 - RNA, 19 nt, Artificial Sequence
  Description of Artificial Sequence: Synthetic oligonucleotide
gagaguggggacuugggcu

SEQ ID NO: 2129096 - RNA, 19 nt, Artificial Sequence
  Description of Artificial Sequence: Synthetic oligonucleotide
uccuacucaucccuugaua

SEQ ID NO: 2129097 - RNA, 19 nt, Artificial Sequence
  Description of Artificial Sequence: Synthetic oligonucleotide
guauccaagauggggacca

SEQ ID NO: 2129098 - RNA, 19 nt, Artificial Sequence
  Description of Artificial Sequence: Synthetic oligonucleotide
gucacggucauucacaguu

SEQ ID NO: 2129099 - RNA, 19 nt, Artificial Sequence
  Description of Artificial Sequence: Synthetic oligonucleotide
uacagcgcauccagggacu

SEQ ID NO: 2129100 - RNA, 19 nt, Artificial Sequence
  Description of Artificial Sequence: Synthetic oligonucleotide
cuacuucaacaguccaggc

SEQ ID NO: 2129101 - RNA, 19 nt, Artificial Sequence
  Description of Artificial Sequence: Synthetic oligonucleotide
agcgcauccagggacuguc

SEQ ID NO: 2129102 - RNA, 19 nt, Artificial Sequence
  Description of Artificial Sequence: Synthetic oligonucleotide
ucccuacuucaacagucca

SEQ ID NO: 2129103 - RNA, 19 nt, Artificial Sequence
  Description of Artificial Sequence: Synthetic oligonucleotide
ggcacaacuucuuucccug

SEQ ID NO: 2129104 - RNA, 19 nt, Artificial Sequence
  Description of Artificial Sequence: Synthetic oligonucleotide
augcauacucauacgaagu

SEQ ID NO: 2129105 - RNA, 19 nt, Artificial Sequence
  Description of Artificial Sequence: Synthetic oligonucleotide
aauauccaaauugcucaua

SEQ ID NO: 2129106 - RNA, 19 nt, Artificial Sequence
  Description of Artificial Sequence: Synthetic oligonucleotide
gugugauagcauuccugag

SEQ ID NO: 2129107 - RNA, 19 nt, Artificial Sequence
  Description of Artificial Sequence: Synthetic oligonucleotide
cuguccgcuaugaugccac

SEQ ID NO: 2129108 - RNA, 19 nt, Artificial Sequence
  Description of Artificial Sequence: Synthetic oligonucleotide
uucccugguaacccuacua

SEQ ID NO: 2129109 - RNA, 19 nt, Artificial Sequence
  Description of Artificial Sequence: Synthetic oligonucleotide
auccaagauggggaccagc

SEQ ID NO: 2129110 - RNA, 19 nt, Artificial Sequence
  Description of Artificial Sequence: Synthetic oligonucleotide
acucaucccuugauaaauc

SEQ ID NO: 2129111 - RNA, 19 nt, Artificial Sequence
  Description of Artificial Sequence: Synthetic oligonucleotide
gagauuggugauauccguc

SEQ ID NO: 2129112 - RNA, 19 nt, Artificial Sequence
  Description of Artificial Sequence: Synthetic oligonucleotide
aacugucucuucgugccgu

SEQ ID NO: 2129113 - RNA, 19 nt, Artificial Sequence
  Description of Artificial Sequence: Synthetic oligonucleotide
aaaggggaaacugcuggua

SEQ ID NO: 2129114 - RNA, 19 nt, Artificial Sequence
  Description of Artificial Sequence: Synthetic oligonucleotide
ggaaacacagaagauggga

SEQ ID NO: 2129115 - RNA, 19 nt, Artificial Sequence
  Description of Artificial Sequence: Synthetic oligonucleotide
acauagaaaccuccagguu

SEQ ID NO: 2129116 - RNA, 19 nt, Artificial Sequence
  Description of Artificial Sequence: Synthetic oligonucleotide
gagagggcaaugggaagag

SEQ ID NO: 2129117 - RNA, 19 nt, Artificial Sequence
  Description of Artificial Sequence: Synthetic oligonucleotide
gaaugcaguuuacuguugu

SEQ ID NO: 2129118 - RNA, 19 nt, Artificial Sequence
  Description of Artificial Sequence: Synthetic oligonucleotide
ggauucauuggacuggaaa

SEQ ID NO: 2129119 - RNA, 19 nt, Artificial Sequence
  Description of Artificial Sequence: Synthetic oligonucleotide
uggggaccagcugaaagga

SEQ ID NO: 2129120 - RNA, 19 nt, Artificial Sequence
  Description of Artificial Sequence: Synthetic oligonucleotide
augcaaagcugaugggccu

SEQ ID NO: 2129121 - RNA, 19 nt, Artificial Sequence
  Description of Artificial Sequence: Synthetic oligonucleotide
caucccuugauaaaucagu

SEQ ID NO: 2129122 - RNA, 19 nt, Artificial Sequence
  Description of Artificial Sequence: Synthetic oligonucleotide
cuuucccugguaacccuac

SEQ ID NO: 2129123 - RNA, 19 nt, Artificial Sequence
  Description of Artificial Sequence: Synthetic oligonucleotide
ugucucuucgugccgucau

SEQ ID NO: 2129124 - RNA, 19 nt, Artificial Sequence
  Description of Artificial Sequence: Synthetic oligonucleotide
gcuaaccauaaggacaaag

SEQ ID NO: 2129125 - RNA, 19 nt, Artificial Sequence
  Description of Artificial Sequence: Synthetic oligonucleotide
ggucauucacaguuuugug

SEQ ID NO: 2129126 - RNA, 19 nt, Artificial Sequence
  Description of Artificial Sequence: Synthetic oligonucleotide
gucaccucaccucuccaac

SEQ ID NO: 2129127 - RNA, 19 nt, Artificial Sequence
  Description of Artificial Sequence: Synthetic oligonucleotide
gcauuccugagauugguga

SEQ ID NO: 2129128 - RNA, 19 nt, Artificial Sequence
  Description of Artificial Sequence: Synthetic oligonucleotide
gugauagcauuccugagau

SEQ ID NO: 2129129 - RNA, 19 nt, Artificial Sequence
  Description of Artificial Sequence: Synthetic oligonucleotide
cuuuugggcucucuaccuc

SEQ ID NO: 2129130 - RNA, 19 nt, Artificial Sequence
  Description of Artificial Sequence: Synthetic oligonucleotide
ggcucugaaguucaugaca

SEQ ID NO: 2129131 - RNA, 19 nt, Artificial Sequence
  Description of Artificial Sequence: Synthetic oligonucleotide
caguaacugucucuucgug

SEQ ID NO: 2129132 - RNA, 19 nt, Artificial Sequence
  Description of Artificial Sequence: Synthetic oligonucleotide
uugggucaauuccuugaau

SEQ ID NO: 2129133 - RNA, 19 nt, Artificial Sequence
  Description of Artificial Sequence: Synthetic oligonucleotide
uggacaaagucugucccua

SEQ ID NO: 2129134 - RNA, 19 nt, Artificial Sequence
  Description of Artificial Sequence: Synthetic oligonucleotide
guucuauacaguugaaguu

SEQ ID NO: 2129135 - RNA, 19 nt, Artificial Sequence
  Description of Artificial Sequence: Synthetic oligonucleotide
agaccuucccuugggccac

SEQ ID NO: 2129136 - RNA, 19 nt, Artificial Sequence
  Description of Artificial Sequence: Synthetic oligonucleotide
gcucugaaguucaugacac

SEQ ID NO: 2129137 - RNA, 19 nt, Artificial Sequence
  Description of Artificial Sequence: Synthetic oligonucleotide
augcaguuuacuguuguuu

SEQ ID NO: 2129138 - RNA, 19 nt, Artificial Sequence
  Description of Artificial Sequence: Synthetic oligonucleotide
uuucccugguaacccuacu

SEQ ID NO: 2129139 - RNA, 19 nt, Artificial Sequence
  Description of Artificial Sequence: Synthetic oligonucleotide
aaacuaggcacaacuucuu

SEQ ID NO: 2129140 - RNA, 19 nt, Artificial Sequence
  Description of Artificial Sequence: Synthetic oligonucleotide
ccugguaacccuacuacuc

SEQ ID NO: 2129141 - RNA, 19 nt, Artificial Sequence
  Description of Artificial Sequence: Synthetic oligonucleotide
gacuugggcuaaccauaag

SEQ ID NO: 2129142 - RNA, 19 nt, Artificial Sequence
  Description of Artificial Sequence: Synthetic oligonucleotide
ccugggauucauuggacug

SEQ ID NO: 2129143 - RNA, 19 nt, Artificial Sequence
  Description of Artificial Sequence: Synthetic oligonucleotide
ggagcauaaacaaugcaua

SEQ ID NO: 2129144 - RNA, 19 nt, Artificial Sequence
  Description of Artificial Sequence: Synthetic oligonucleotide
uuugggcucucuaccucuc

SEQ ID NO: 2129145 - RNA, 19 nt, Artificial Sequence
  Description of Artificial Sequence: Synthetic oligonucleotide
gggcaaugggaagagagug

SEQ ID NO: 2129146 - RNA, 19 nt, Artificial Sequence
  Description of Artificial Sequence: Synthetic oligonucleotide
cacuugaccucuaagcccu

SEQ ID NO: 2129147 - RNA, 19 nt, Artificial Sequence
  Description of Artificial Sequence: Synthetic oligonucleotide
guagagaugcaaaguagua

SEQ ID NO: 2129148 - RNA, 19 nt, Artificial Sequence
  Description of Artificial Sequence: Synthetic oligonucleotide
ugcaaaguaguagcucaua

SEQ ID NO: 2129149 - RNA, 19 nt, Artificial Sequence
  Description of Artificial Sequence: Synthetic oligonucleotide
gugauauccgucaccucac

SEQ ID NO: 2129150 - RNA, 19 nt, Artificial Sequence
  Description of Artificial Sequence: Synthetic oligonucleotide
guaacccuacuacucccuc

SEQ ID NO: 2129151 - RNA, 19 nt, Artificial Sequence
  Description of Artificial Sequence: Synthetic oligonucleotide
cuugaccucuaagcccugg

SEQ ID NO: 2129152 - RNA, 19 nt, Artificial Sequence
  Description of Artificial Sequence: Synthetic oligonucleotide
cuugggucaauuccuugaa

SEQ ID NO: 2129153 - RNA, 19 nt, Artificial Sequence
  Description of Artificial Sequence: Synthetic oligonucleotide
ccuaugugugauagcauuc

SEQ ID NO: 2129154 - RNA, 19 nt, Artificial Sequence
  Description of Artificial Sequence: Synthetic oligonucleotide
uacucccuccaaagguuuc

SEQ ID NO: 2129155 - RNA, 19 nt, Artificial Sequence
  Description of Artificial Sequence: Synthetic oligonucleotide
gacuguccgcuaugaugcc

SEQ ID NO: 2129156 - RNA, 19 nt, Artificial Sequence
  Description of Artificial Sequence: Synthetic oligonucleotide
gcauacucauacgaaguac

SEQ ID NO: 2129157 - RNA, 19 nt, Artificial Sequence
  Description of Artificial Sequence: Synthetic oligonucleotide
cuacucaucccuugauaaa

SEQ ID NO: 2129158 - RNA, 19 nt, Artificial Sequence
  Description of Artificial Sequence: Synthetic oligonucleotide
uucaacaguccaggcucug

SEQ ID NO: 2129159 - RNA, 19 nt, Artificial Sequence
  Description of Artificial Sequence: Synthetic oligonucleotide
ccuacucaucccuugauaa

SEQ ID NO: 2129160 - RNA, 19 nt, Artificial Sequence
  Description of Artificial Sequence: Synthetic oligonucleotide
cgugccgucaucgaugggg

SEQ ID NO: 2129161 - RNA, 19 nt, Artificial Sequence
  Description of Artificial Sequence: Synthetic oligonucleotide
agggcaaugggaagagagu

SEQ ID NO: 2129162 - RNA, 19 nt, Artificial Sequence
  Description of Artificial Sequence: Synthetic oligonucleotide
aucccuugauaaaucaguu

SEQ ID NO: 2129163 - RNA, 19 nt, Artificial Sequence
  Description of Artificial Sequence: Synthetic oligonucleotide
gggcuagaaggucaaguuc

SEQ ID NO: 2129164 - RNA, 19 nt, Artificial Sequence
  Description of Artificial Sequence: Synthetic oligonucleotide
ucauagccuaugugugaua

SEQ ID NO: 2129165 - RNA, 19 nt, Artificial Sequence
  Description of Artificial Sequence: Synthetic oligonucleotide
cuuuacacuugaccucuaa

SEQ ID NO: 2129166 - RNA, 19 nt, Artificial Sequence
  Description of Artificial Sequence: Synthetic oligonucleotide
ccaccccuaucacacauag

SEQ ID NO: 2129167 - RNA, 19 nt, Artificial Sequence
  Description of Artificial Sequence: Synthetic oligonucleotide
uucccuugggccaccccua

SEQ ID NO: 2129168 - RNA, 19 nt, Artificial Sequence
  Description of Artificial Sequence: Synthetic oligonucleotide
ggaaucuagaccuucccuu

SEQ ID NO: 2129169 - RNA, 19 nt, Artificial Sequence
  Description of Artificial Sequence: Synthetic oligonucleotide
auuggacuggaaaggggaa

SEQ ID NO: 2129170 - RNA, 19 nt, Artificial Sequence
  Description of Artificial Sequence: Synthetic oligonucleotide
ggagagggcaaugggaaga

SEQ ID NO: 2129171 - RNA, 19 nt, Artificial Sequence
  Description of Artificial Sequence: Synthetic oligonucleotide
gcacaacuucuuucccugg

SEQ ID NO: 2129172 - RNA, 19 nt, Artificial Sequence
  Description of Artificial Sequence: Synthetic oligonucleotide
caacaguccaggcucugaa

SEQ ID NO: 2129173 - RNA, 19 nt, Artificial Sequence
  Description of Artificial Sequence: Synthetic oligonucleotide
cuaucacacauaguuccaa

SEQ ID NO: 2129174 - RNA, 19 nt, Artificial Sequence
  Description of Artificial Sequence: Synthetic oligonucleotide
gguauccaagauggggacc

SEQ ID NO: 2129175 - RNA, 19 nt, Artificial Sequence
  Description of Artificial Sequence: Synthetic oligonucleotide
gaccucuaagcccuggguu

SEQ ID NO: 2129176 - RNA, 19 nt, Artificial Sequence
  Description of Artificial Sequence: Synthetic oligonucleotide
ugccgucaucgauggggag

SEQ ID NO: 2129177 - RNA, 19 nt, Artificial Sequence
  Description of Artificial Sequence: Synthetic oligonucleotide
gucuagcacuuccuuuaca

SEQ ID NO: 2129178 - RNA, 19 nt, Artificial Sequence
  Description of Artificial Sequence: Synthetic oligonucleotide
acuguccgcuaugaugcca

SEQ ID NO: 2129179 - RNA, 19 nt, Artificial Sequence
  Description of Artificial Sequence: Synthetic oligonucleotide
aguucccuuugaagucacg

SEQ ID NO: 2129180 - RNA, 19 nt, Artificial Sequence
  Description of Artificial Sequence: Synthetic oligonucleotide
gucaucgauggggagugga

SEQ ID NO: 2129181 - RNA, 19 nt, Artificial Sequence
  Description of Artificial Sequence: Synthetic oligonucleotide
gggcuaaccauaaggacaa

SEQ ID NO: 2129182 - RNA, 19 nt, Artificial Sequence
  Description of Artificial Sequence: Synthetic oligonucleotide
ccuugggucaauuccuuga

SEQ ID NO: 2129183 - RNA, 19 nt, Artificial Sequence
  Description of Artificial Sequence: Synthetic oligonucleotide
ccagcugaaaggagcucag

SEQ ID NO: 2129184 - RNA, 19 nt, Artificial Sequence
  Description of Artificial Sequence: Synthetic oligonucleotide
uggugauauccgucaccuc

SEQ ID NO: 2129185 - RNA, 19 nt, Artificial Sequence
  Description of Artificial Sequence: Synthetic oligonucleotide
uguccgcuaugaugccacu

SEQ ID NO: 2129186 - RNA, 19 nt, Artificial Sequence
  Description of Artificial Sequence: Synthetic oligonucleotide
guggacaaagucugucccu

SEQ ID NO: 2129187 - RNA, 19 nt, Artificial Sequence
  Description of Artificial Sequence: Synthetic oligonucleotide
aguggggacuugggcuaac

SEQ ID NO: 2129188 - RNA, 19 nt, Artificial Sequence
  Description of Artificial Sequence: Synthetic oligonucleotide
cccuuugaagucacgguca

SEQ ID NO: 2129189 - RNA, 19 nt, Artificial Sequence
  Description of Artificial Sequence: Synthetic oligonucleotide
gucucuucgugccgucauc

SEQ ID NO: 2129190 - RNA, 19 nt, Artificial Sequence
  Description of Artificial Sequence: Synthetic oligonucleotide
cauacgaaguacagcgcau

SEQ ID NO: 2129191 - RNA, 19 nt, Artificial Sequence
  Description of Artificial Sequence: Synthetic oligonucleotide
augcaaaguaguagcucau

SEQ ID NO: 2129192 - RNA, 19 nt, Artificial Sequence
  Description of Artificial Sequence: Synthetic oligonucleotide
ccuugggccaccccuauca

SEQ ID NO: 2129193 - RNA, 19 nt, Artificial Sequence
  Description of Artificial Sequence: Synthetic oligonucleotide
uccccagaccccugggauu

SEQ ID NO: 2129194 - RNA, 19 nt, Artificial Sequence
  Description of Artificial Sequence: Synthetic oligonucleotide
guccgcuaugaugccacug

SEQ ID NO: 2129195 - RNA, 19 nt, Artificial Sequence
  Description of Artificial Sequence: Synthetic oligonucleotide
caugucuagcacuuccuuu

SEQ ID NO: 2129196 - RNA, 19 nt, Artificial Sequence
  Description of Artificial Sequence: Synthetic oligonucleotide
ggacaaagucugucccuac

SEQ ID NO: 2129197 - RNA, 19 nt, Artificial Sequence
  Description of Artificial Sequence: Synthetic oligonucleotide
ucgugccgucaucgauggg

SEQ ID NO: 2129198 - RNA, 19 nt, Artificial Sequence
  Description of Artificial Sequence: Synthetic oligonucleotide
gaugggccugcuggcugag

SEQ ID NO: 2129199 - RNA, 19 nt, Artificial Sequence
  Description of Artificial Sequence: Synthetic oligonucleotide
agggacuguccgcuaugau

SEQ ID NO: 2129200 - RNA, 19 nt, Artificial Sequence
  Description of Artificial Sequence: Synthetic oligonucleotide
ccuaucacacauaguucca

SEQ ID NO: 2129201 - RNA, 19 nt, Artificial Sequence
  Description of Artificial Sequence: Synthetic oligonucleotide
cacaacuucuuucccuggu

SEQ ID NO: 2129202 - RNA, 19 nt, Artificial Sequence
  Description of Artificial Sequence: Synthetic oligonucleotide
guggggacuugggcuaacc

SEQ ID NO: 2129203 - RNA, 19 nt, Artificial Sequence
  Description of Artificial Sequence: Synthetic oligonucleotide
uccaggcucugaaguucau

SEQ ID NO: 2129204 - RNA, 19 nt, Artificial Sequence
  Description of Artificial Sequence: Synthetic oligonucleotide
acagcgcauccagggacug

SEQ ID NO: 2129205 - RNA, 19 nt, Artificial Sequence
  Description of Artificial Sequence: Synthetic oligonucleotide
accuucccuugggccaccc

SEQ ID NO: 2129206 - RNA, 19 nt, Artificial Sequence
  Description of Artificial Sequence: Synthetic oligonucleotide
cucuucgugccgucaucga

SEQ ID NO: 2129207 - RNA, 19 nt, Artificial Sequence
  Description of Artificial Sequence: Synthetic oligonucleotide
acuuaggaaucuagaccuu

SEQ ID NO: 2129208 - RNA, 19 nt, Artificial Sequence
  Description of Artificial Sequence: Synthetic oligonucleotide
gugccgucaucgaugggga

SEQ ID NO: 2129209 - RNA, 19 nt, Artificial Sequence
  Description of Artificial Sequence: Synthetic oligonucleotide
cuucaacaguccaggcucu

SEQ ID NO: 2129210 - RNA, 19 nt, Artificial Sequence
  Description of Artificial Sequence: Synthetic oligonucleotide
ucggggcuagaaggucaag

SEQ ID NO: 2129211 - RNA, 19 nt, Artificial Sequence
  Description of Artificial Sequence: Synthetic oligonucleotide
agcccuggguucaggaaaa

SEQ ID NO: 2129212 - RNA, 19 nt, Artificial Sequence
  Description of Artificial Sequence: Synthetic oligonucleotide
uaccucucccuugggucaa

SEQ ID NO: 2129213 - RNA, 19 nt, Artificial Sequence
  Description of Artificial Sequence: Synthetic oligonucleotide
agccucggggcuagaaggu

SEQ ID NO: 2129214 - RNA, 19 nt, Artificial Sequence
  Description of Artificial Sequence: Synthetic oligonucleotide
gccuaugugugauagcauu

SEQ ID NO: 2129215 - RNA, 19 nt, Artificial Sequence
  Description of Artificial Sequence: Synthetic oligonucleotide
cucggggcuagaaggucaa

SEQ ID NO: 2129216 - RNA, 19 nt, Artificial Sequence
  Description of Artificial Sequence: Synthetic oligonucleotide
agccuaugugugauagcau

SEQ ID NO: 2129217 - RNA, 19 nt, Artificial Sequence
  Description of Artificial Sequence: Synthetic oligonucleotide
ccgucaucgauggggagug

SEQ ID NO: 2129218 - RNA, 19 nt, Artificial Sequence
  Description of Artificial Sequence: Synthetic oligonucleotide
ggggacuugggcuaaccau

SEQ ID NO: 2129219 - RNA, 19 nt, Artificial Sequence
  Description of Artificial Sequence: Synthetic oligonucleotide
cauccagggacuguccgcu

SEQ ID NO: 2129220 - RNA, 19 nt, Artificial Sequence
  Description of Artificial Sequence: Synthetic oligonucleotide
cggagcauaaacaaugcau

SEQ ID NO: 2129221 - RNA, 19 nt, Artificial Sequence
  Description of Artificial Sequence: Synthetic oligonucleotide
cgcuaugaugccacugcug

SEQ ID NO: 2129222 - RNA, 19 nt, Artificial Sequence
  Description of Artificial Sequence: Synthetic oligonucleotide
auccgucaccucaccucuc

SEQ ID NO: 2129223 - RNA, 19 nt, Artificial Sequence
  Description of Artificial Sequence: Synthetic oligonucleotide
cucugaaguucaugacacu

SEQ ID NO: 2129224 - RNA, 19 nt, Artificial Sequence
  Description of Artificial Sequence: Synthetic oligonucleotide
cagggacuguccgcuauga

SEQ ID NO: 2129225 - RNA, 19 nt, Artificial Sequence
  Description of Artificial Sequence: Synthetic oligonucleotide
ggacuugggcuaaccauaa

SEQ ID NO: 2129226 - RNA, 19 nt, Artificial Sequence
  Description of Artificial Sequence: Synthetic oligonucleotide
ggaagagaguggggacuug

SEQ ID NO: 2129227 - RNA, 19 nt, Artificial Sequence
  Description of Artificial Sequence: Synthetic oligonucleotide
agauggggaccagcugaaa

SEQ ID NO: 2129228 - RNA, 19 nt, Artificial Sequence
  Description of Artificial Sequence: Synthetic oligonucleotide
cugucccuacuucaacagu

SEQ ID NO: 2129229 - RNA, 19 nt, Artificial Sequence
  Description of Artificial Sequence: Synthetic oligonucleotide
cccuugggucaauuccuug

SEQ ID NO: 2129230 - RNA, 19 nt, Artificial Sequence
  Description of Artificial Sequence: Synthetic oligonucleotide
uagaaaccuccagguucua

SEQ ID NO: 2129231 - RNA, 19 nt, Artificial Sequence
  Description of Artificial Sequence: Synthetic oligonucleotide
ccaaauacuuaggaaucua

SEQ ID NO: 2129232 - RNA, 19 nt, Artificial Sequence
  Description of Artificial Sequence: Synthetic oligonucleotide
ggagcucagugacagcaau

SEQ ID NO: 2129233 - RNA, 19 nt, Artificial Sequence
  Description of Artificial Sequence: Synthetic oligonucleotide
acuugaccucuaagcccug

SEQ ID NO: 2129234 - RNA, 19 nt, Artificial Sequence
  Description of Artificial Sequence: Synthetic oligonucleotide
guccuacucaucccuugau

SEQ ID NO: 2129235 - RNA, 19 nt, Artificial Sequence
  Description of Artificial Sequence: Synthetic oligonucleotide
uggccaugucuagcacuuc

SEQ ID NO: 2129236 - RNA, 19 nt, Artificial Sequence
  Description of Artificial Sequence: Synthetic oligonucleotide
ccccugggauucauuggac

SEQ ID NO: 2129237 - RNA, 19 nt, Artificial Sequence
  Description of Artificial Sequence: Synthetic oligonucleotide
gguaacccuacuacucccu

SEQ ID NO: 2129238 - RNA, 19 nt, Artificial Sequence
  Description of Artificial Sequence: Synthetic oligonucleotide
ccggagcauaaacaaugca

SEQ ID NO: 2129239 - RNA, 19 nt, Artificial Sequence
  Description of Artificial Sequence: Synthetic oligonucleotide
gaguggggacuugggcuaa

SEQ ID NO: 2129240 - RNA, 19 nt, Artificial Sequence
  Description of Artificial Sequence: Synthetic oligonucleotide
guaguagcucauagccuau

SEQ ID NO: 2129241 - RNA, 19 nt, Artificial Sequence
  Description of Artificial Sequence: Synthetic oligonucleotide
cacggucauucacaguuuu

SEQ ID NO: 2129242 - RNA, 19 nt, Artificial Sequence
  Description of Artificial Sequence: Synthetic oligonucleotide
cugagcuccggagcauaaa

SEQ ID NO: 2129243 - RNA, 19 nt, Artificial Sequence
  Description of Artificial Sequence: Synthetic oligonucleotide
ccccagaccccugggauuc

SEQ ID NO: 2129244 - RNA, 19 nt, Artificial Sequence
  Description of Artificial Sequence: Synthetic oligonucleotide
gcuagaaggucaaguuccu

SEQ ID NO: 2129245 - RNA, 19 nt, Artificial Sequence
  Description of Artificial Sequence: Synthetic oligonucleotide
cccuacuacucccuccaaa

SEQ ID NO: 2129246 - RNA, 19 nt, Artificial Sequence
  Description of Artificial Sequence: Synthetic oligonucleotide
ggaagccucggggcuagaa

SEQ ID NO: 2129247 - RNA, 19 nt, Artificial Sequence
  Description of Artificial Sequence: Synthetic oligonucleotide
gccgucaucgauggggagu

SEQ ID NO: 2129248 - RNA, 19 nt, Artificial Sequence
  Description of Artificial Sequence: Synthetic oligonucleotide
ggacuggaaaggggaaacu

SEQ ID NO: 2129249 - RNA, 19 nt, Artificial Sequence
  Description of Artificial Sequence: Synthetic oligonucleotide
cccugguaacccuacuacu

SEQ ID NO: 2129250 - RNA, 19 nt, Artificial Sequence
  Description of Artificial Sequence: Synthetic oligonucleotide
cuagaaggucaaguuccuu

SEQ ID NO: 2129251 - RNA, 19 nt, Artificial Sequence
  Description of Artificial Sequence: Synthetic oligonucleotide
ggccaccccuaucacacau

SEQ ID NO: 2129252 - RNA, 19 nt, Artificial Sequence
  Description of Artificial Sequence: Synthetic oligonucleotide
caccccuaucacacauagu

SEQ ID NO: 2129253 - RNA, 19 nt, Artificial Sequence
  Description of Artificial Sequence: Synthetic oligonucleotide
gcgcauccagggacugucc

SEQ ID NO: 2129254 - RNA, 19 nt, Artificial Sequence
  Description of Artificial Sequence: Synthetic oligonucleotide
gccucggggcuagaagguc

SEQ ID NO: 2129255 - RNA, 19 nt, Artificial Sequence
  Description of Artificial Sequence: Synthetic oligonucleotide
cgucaccucaccucuccaa

SEQ ID NO: 2129256 - RNA, 19 nt, Artificial Sequence
  Description of Artificial Sequence: Synthetic oligonucleotide
cagcugaaaggagcucagu

SEQ ID NO: 2129257 - RNA, 19 nt, Artificial Sequence
  Description of Artificial Sequence: Synthetic oligonucleotide
caaagcugaugggccugcu

SEQ ID NO: 2129258 - RNA, 19 nt, Artificial Sequence
  Description of Artificial Sequence: Synthetic oligonucleotide
gcuccggagcauaaacaau

SEQ ID NO: 2129259 - RNA, 19 nt, Artificial Sequence
  Description of Artificial Sequence: Synthetic oligonucleotide
accucucccuugggucaau

SEQ ID NO: 2129260 - RNA, 19 nt, Artificial Sequence
  Description of Artificial Sequence: Synthetic oligonucleotide
ccaugucuagcacuuccuu

SEQ ID NO: 2129261 - RNA, 19 nt, Artificial Sequence
  Description of Artificial Sequence: Synthetic oligonucleotide
ccucaccucuccaaccuuu

SEQ ID NO: 2129262 - RNA, 19 nt, Artificial Sequence
  Description of Artificial Sequence: Synthetic oligonucleotide
cagaccccugggauucauu

SEQ ID NO: 2129263 - RNA, 19 nt, Artificial Sequence
  Description of Artificial Sequence: Synthetic oligonucleotide
ccuuuacacuugaccucua

SEQ ID NO: 2129264 - RNA, 19 nt, Artificial Sequence
  Description of Artificial Sequence: Synthetic oligonucleotide
ccgcuaugaugccacugcu

SEQ ID NO: 2129265 - RNA, 19 nt, Artificial Sequence
  Description of Artificial Sequence: Synthetic oligonucleotide
ggcuaaccauaaggacaaa

SEQ ID NO: 2129266 - RNA, 19 nt, Artificial Sequence
  Description of Artificial Sequence: Synthetic oligonucleotide
cgucaucgauggggagugg

SEQ ID NO: 2129267 - RNA, 19 nt, Artificial Sequence
  Description of Artificial Sequence: Synthetic oligonucleotide
gccaccccuaucacacaua

SEQ ID NO: 2129268 - RNA, 19 nt, Artificial Sequence
  Description of Artificial Sequence: Synthetic oligonucleotide
cagcgcauccagggacugu

SEQ ID NO: 2129269 - RNA, 19 nt, Artificial Sequence
  Description of Artificial Sequence: Synthetic oligonucleotide
cccagaccccugggauuca

SEQ ID NO: 2129270 - RNA, 19 nt, Artificial Sequence
  Description of Artificial Sequence: Synthetic oligonucleotide
ggcccaggcuugccuccuu

SEQ ID NO: 2129271 - RNA, 19 nt, Artificial Sequence
  Description of Artificial Sequence: Synthetic oligonucleotide
ccagaccccugggauucau

SEQ ID NO: 2129272 - RNA, 19 nt, Artificial Sequence
  Description of Artificial Sequence: Synthetic oligonucleotide
agauugaugauguagauac

SEQ ID NO: 2129273 - RNA, 19 nt, Artificial Sequence
  Description of Artificial Sequence: Synthetic oligonucleotide
uucaguaggaaacugcugg

SEQ ID NO: 2129274 - RNA, 19 nt, Artificial Sequence
  Description of Artificial Sequence: Synthetic oligonucleotide
gauagugccacgcauacgg

SEQ ID NO: 2129275 - RNA, 19 nt, Artificial Sequence
  Description of Artificial Sequence: Synthetic oligonucleotide
ucccuuauaaguuacgacg

SEQ ID NO: 2129276 - RNA, 19 nt, Artificial Sequence
  Description of Artificial Sequence: Synthetic oligonucleotide
aacaacgccguauggaccc

SEQ ID NO: 2129277 - RNA, 19 nt, Artificial Sequence
  Description of Artificial Sequence: Synthetic oligonucleotide
agaacuuuauuuuccuucc

SEQ ID NO: 2129278 - RNA, 19 nt, Artificial Sequence
  Description of Artificial Sequence: Synthetic oligonucleotide
uguaagaacuuuauuuucc

SEQ ID NO: 2129279 - RNA, 19 nt, Artificial Sequence
  Description of Artificial Sequence: Synthetic oligonucleotide
caaacuucagcacagcucg

SEQ ID NO: 2129280 - RNA, 19 nt, Artificial Sequence
  Description of Artificial Sequence: Synthetic oligonucleotide
aaggucaggcauuaccucc

SEQ ID NO: 2129281 - RNA, 19 nt, Artificial Sequence
  Description of Artificial Sequence: Synthetic oligonucleotide
acuuuauuuuccuuccacc

SEQ ID NO: 2129282 - RNA, 19 nt, Artificial Sequence
  Description of Artificial Sequence: Synthetic oligonucleotide
gauaccaucacuuuuccuc

SEQ ID NO: 2129283 - RNA, 19 nt, Artificial Sequence
  Description of Artificial Sequence: Synthetic oligonucleotide
agaacaacgccguauggac

SEQ ID NO: 2129284 - RNA, 19 nt, Artificial Sequence
  Description of Artificial Sequence: Synthetic oligonucleotide
uucagauugaugauguaga

SEQ ID NO: 2129285 - RNA, 19 nt, Artificial Sequence
  Description of Artificial Sequence: Synthetic oligonucleotide
uguaaguuucccuuauaag

SEQ ID NO: 2129286 - RNA, 19 nt, Artificial Sequence
  Description of Artificial Sequence: Synthetic oligonucleotide
agaaguaaaggucaggcau

SEQ ID NO: 2129287 - RNA, 19 nt, Artificial Sequence
  Description of Artificial Sequence: Synthetic oligonucleotide
gagucuguguuacacagag

SEQ ID NO: 2129288 - RNA, 19 nt, Artificial Sequence
  Description of Artificial Sequence: Synthetic oligonucleotide
cauaagacgccucagugag

SEQ ID NO: 2129289 - RNA, 19 nt, Artificial Sequence
  Description of Artificial Sequence: Synthetic oligonucleotide
uggaagucaagguuggugc

SEQ ID NO: 2129290 - RNA, 19 nt, Artificial Sequence
  Description of Artificial Sequence: Synthetic oligonucleotide
acgcauacggaguacuucc

SEQ ID NO: 2129291 - RNA, 19 nt, Artificial Sequence
  Description of Artificial Sequence: Synthetic oligonucleotide
acgggaaucaagaacaacg

SEQ ID NO: 2129292 - RNA, 19 nt, Artificial Sequence
  Description of Artificial Sequence: Synthetic oligonucleotide
ucucuguagaaguaaaggu

SEQ ID NO: 2129293 - RNA, 19 nt, Artificial Sequence
  Description of Artificial Sequence: Synthetic oligonucleotide
uuucccuuugcucagcugu

SEQ ID NO: 2129294 - RNA, 19 nt, Artificial Sequence
  Description of Artificial Sequence: Synthetic oligonucleotide
gaugacgcugacaucagcg

SEQ ID NO: 2129295 - RNA, 19 nt, Artificial Sequence
  Description of Artificial Sequence: Synthetic oligonucleotide
uaagacgccucagugaggg

SEQ ID NO: 2129296 - RNA, 19 nt, Artificial Sequence
  Description of Artificial Sequence: Synthetic oligonucleotide
uuauaaguuacgacgggaa

SEQ ID NO: 2129297 - RNA, 19 nt, Artificial Sequence
  Description of Artificial Sequence: Synthetic oligonucleotide
ggaaucaagaacaacgccg

SEQ ID NO: 2129298 - RNA, 19 nt, Artificial Sequence
  Description of Artificial Sequence: Synthetic oligonucleotide
auaaguuacgacgggaauc

SEQ ID NO: 2129299 - RNA, 19 nt, Artificial Sequence
  Description of Artificial Sequence: Synthetic oligonucleotide
gucuguguuacacagagca

SEQ ID NO: 2129300 - RNA, 19 nt, Artificial Sequence
  Description of Artificial Sequence: Synthetic oligonucleotide
gauguacugcuccaucugg

SEQ ID NO: 2129301 - RNA, 19 nt, Artificial Sequence
  Description of Artificial Sequence: Synthetic oligonucleotide
uaaguuucccuuauaaguu

SEQ ID NO: 2129302 - RNA, 19 nt, Artificial Sequence
  Description of Artificial Sequence: Synthetic oligonucleotide
uuggucacagccuucucgg

SEQ ID NO: 2129303 - RNA, 19 nt, Artificial Sequence
  Description of Artificial Sequence: Synthetic oligonucleotide
ucggugaccacuagaagcc

SEQ ID NO: 2129304 - RNA, 19 nt, Artificial Sequence
  Description of Artificial Sequence: Synthetic oligonucleotide
cuuguagauguacugcucc

SEQ ID NO: 2129305 - RNA, 19 nt, Artificial Sequence
  Description of Artificial Sequence: Synthetic oligonucleotide
ugaaacggccagcaauugg

SEQ ID NO: 2129306 - RNA, 19 nt, Artificial Sequence
  Description of Artificial Sequence: Synthetic oligonucleotide
guaaguuucccuuauaagu

SEQ ID NO: 2129307 - RNA, 19 nt, Artificial Sequence
  Description of Artificial Sequence: Synthetic oligonucleotide
ugauguagauaccaucacu

SEQ ID NO: 2129308 - RNA, 19 nt, Artificial Sequence
  Description of Artificial Sequence: Synthetic oligonucleotide
uaaguuacgacgggaauca

SEQ ID NO: 2129309 - RNA, 19 nt, Artificial Sequence
  Description of Artificial Sequence: Synthetic oligonucleotide
uucacccugaaauuccucc

SEQ ID NO: 2129310 - RNA, 19 nt, Artificial Sequence
  Description of Artificial Sequence: Synthetic oligonucleotide
gucggugaccacuagaagc

SEQ ID NO: 2129311 - RNA, 19 nt, Artificial Sequence
  Description of Artificial Sequence: Synthetic oligonucleotide
uguguuacacagagcaaug

SEQ ID NO: 2129312 - RNA, 19 nt, Artificial Sequence
  Description of Artificial Sequence: Synthetic oligonucleotide
cuucagauugaugauguag

SEQ ID NO: 2129313 - RNA, 19 nt, Artificial Sequence
  Description of Artificial Sequence: Synthetic oligonucleotide
uguagauaccaucacuuuu

SEQ ID NO: 2129314 - RNA, 19 nt, Artificial Sequence
  Description of Artificial Sequence: Synthetic oligonucleotide
aguaggaaacugcuggaug

SEQ ID NO: 2129315 - RNA, 19 nt, Artificial Sequence
  Description of Artificial Sequence: Synthetic oligonucleotide
uacgacgggaaucaagaac

SEQ ID NO: 2129316 - RNA, 19 nt, Artificial Sequence
  Description of Artificial Sequence: Synthetic oligonucleotide
acacccucagaccagucgg

SEQ ID NO: 2129317 - RNA, 19 nt, Artificial Sequence
  Description of Artificial Sequence: Synthetic oligonucleotide
ugacgcugacaucagcggg

SEQ ID NO: 2129318 - RNA, 19 nt, Artificial Sequence
  Description of Artificial Sequence: Synthetic oligonucleotide
ucaggcauuaccucccaug

SEQ ID NO: 2129319 - RNA, 19 nt, Artificial Sequence
  Description of Artificial Sequence: Synthetic oligonucleotide
gcuggauggguacagaggg

SEQ ID NO: 2129320 - RNA, 19 nt, Artificial Sequence
  Description of Artificial Sequence: Synthetic oligonucleotide
aauuggaguggcuccggug

SEQ ID NO: 2129321 - RNA, 19 nt, Artificial Sequence
  Description of Artificial Sequence: Synthetic oligonucleotide
aagaacaacgccguaugga

SEQ ID NO: 2129322 - RNA, 19 nt, Artificial Sequence
  Description of Artificial Sequence: Synthetic oligonucleotide
cauacggaguacuucccgg

SEQ ID NO: 2129323 - RNA, 19 nt, Artificial Sequence
  Description of Artificial Sequence: Synthetic oligonucleotide
gcugcaaggaacuugagga

SEQ ID NO: 2129324 - RNA, 19 nt, Artificial Sequence
  Description of Artificial Sequence: Synthetic oligonucleotide
ucagcgggguucucaaugg

SEQ ID NO: 2129325 - RNA, 19 nt, Artificial Sequence
  Description of Artificial Sequence: Synthetic oligonucleotide
uauaaguuacgacgggaau

SEQ ID NO: 2129326 - RNA, 19 nt, Artificial Sequence
  Description of Artificial Sequence: Synthetic oligonucleotide
ugagcagcagugaacucug

SEQ ID NO: 2129327 - RNA, 19 nt, Artificial Sequence
  Description of Artificial Sequence: Synthetic oligonucleotide
caggcauuaccucccaugg

SEQ ID NO: 2129328 - RNA, 19 nt, Artificial Sequence
  Description of Artificial Sequence: Synthetic oligonucleotide
auggcaauguccacguagc

SEQ ID NO: 2129329 - RNA, 19 nt, Artificial Sequence
  Description of Artificial Sequence: Synthetic oligonucleotide
uagauaccaucacuuuucc

SEQ ID NO: 2129330 - RNA, 19 nt, Artificial Sequence
  Description of Artificial Sequence: Synthetic oligonucleotide
uagauguacugcuccaucu

SEQ ID NO: 2129331 - RNA, 19 nt, Artificial Sequence
  Description of Artificial Sequence: Synthetic oligonucleotide
guuacacagagcaauggug

SEQ ID NO: 2129332 - RNA, 19 nt, Artificial Sequence
  Description of Artificial Sequence: Synthetic oligonucleotide
auacggaguacuucccggg

SEQ ID NO: 2129333 - RNA, 19 nt, Artificial Sequence
  Description of Artificial Sequence: Synthetic oligonucleotide
aagucaagguuggugccac

SEQ ID NO: 2129334 - RNA, 19 nt, Artificial Sequence
  Description of Artificial Sequence: Synthetic oligonucleotide
acauaagacgccucaguga

SEQ ID NO: 2129335 - RNA, 19 nt, Artificial Sequence
  Description of Artificial Sequence: Synthetic oligonucleotide
agcaauggugggcagguug

SEQ ID NO: 2129336 - RNA, 19 nt, Artificial Sequence
  Description of Artificial Sequence: Synthetic oligonucleotide
uuucccuuauaaguuacga

SEQ ID NO: 2129337 - RNA, 19 nt, Artificial Sequence
  Description of Artificial Sequence: Synthetic oligonucleotide
acaucagacccaccgagug

SEQ ID NO: 2129338 - RNA, 19 nt, Artificial Sequence
  Description of Artificial Sequence: Synthetic oligonucleotide
aauggcaacgauggcccgg

SEQ ID NO: 2129339 - RNA, 19 nt, Artificial Sequence
  Description of Artificial Sequence: Synthetic oligonucleotide
auaccaucacuuuuccucu

SEQ ID NO: 2129340 - RNA, 19 nt, Artificial Sequence
  Description of Artificial Sequence: Synthetic oligonucleotide
acggaguacuucccgggcc

SEQ ID NO: 2129341 - RNA, 19 nt, Artificial Sequence
  Description of Artificial Sequence: Synthetic oligonucleotide
gagauagugccacgcauac

SEQ ID NO: 2129342 - RNA, 19 nt, Artificial Sequence
  Description of Artificial Sequence: Synthetic oligonucleotide
agacgccucagugaggggc

SEQ ID NO: 2129343 - RNA, 19 nt, Artificial Sequence
  Description of Artificial Sequence: Synthetic oligonucleotide
guagauaccaucacuuuuc

SEQ ID NO: 2129344 - RNA, 19 nt, Artificial Sequence
  Description of Artificial Sequence: Synthetic oligonucleotide
gacauuguguaaguuuccc

SEQ ID NO: 2129345 - RNA, 19 nt, Artificial Sequence
  Description of Artificial Sequence: Synthetic oligonucleotide
uuguuguugcacggaaugg

SEQ ID NO: 2129346 - RNA, 19 nt, Artificial Sequence
  Description of Artificial Sequence: Synthetic oligonucleotide
uucagcacagcucgcugcc

SEQ ID NO: 2129347 - RNA, 19 nt, Artificial Sequence
  Description of Artificial Sequence: Synthetic oligonucleotide
aucagcgggguucucaaug

SEQ ID NO: 2129348 - RNA, 19 nt, Artificial Sequence
  Description of Artificial Sequence: Synthetic oligonucleotide
guuacgacgggaaucaaga

SEQ ID NO: 2129349 - RNA, 19 nt, Artificial Sequence
  Description of Artificial Sequence: Synthetic oligonucleotide
uucccuuauaaguuacgac

SEQ ID NO: 2129350 - RNA, 19 nt, Artificial Sequence
  Description of Artificial Sequence: Synthetic oligonucleotide
gaaacggccagcaauugga

SEQ ID NO: 2129351 - RNA, 19 nt, Artificial Sequence
  Description of Artificial Sequence: Synthetic oligonucleotide
acgacgggaaucaagaaca

SEQ ID NO: 2129352 - RNA, 19 nt, Artificial Sequence
  Description of Artificial Sequence: Synthetic oligonucleotide
cugaccaguccucaguggc

SEQ ID NO: 2129353 - RNA, 19 nt, Artificial Sequence
  Description of Artificial Sequence: Synthetic oligonucleotide
ucaguaggaaacugcugga

SEQ ID NO: 2129354 - RNA, 19 nt, Artificial Sequence
  Description of Artificial Sequence: Synthetic oligonucleotide
gaggagaugacgcugacau

SEQ ID NO: 2129355 - RNA, 19 nt, Artificial Sequence
  Description of Artificial Sequence: Synthetic oligonucleotide
gacgcugacaucagcgggg

SEQ ID NO: 2129356 - RNA, 19 nt, Artificial Sequence
  Description of Artificial Sequence: Synthetic oligonucleotide
acacagagcaauggugggc

SEQ ID NO: 2129357 - RNA, 19 nt, Artificial Sequence
  Description of Artificial Sequence: Synthetic oligonucleotide
agaccagucggccaccucu

SEQ ID NO: 2129358 - RNA, 19 nt, Artificial Sequence
  Description of Artificial Sequence: Synthetic oligonucleotide
ugcugaccaguccucagug

SEQ ID NO: 2129359 - RNA, 19 nt, Artificial Sequence
  Description of Artificial Sequence: Synthetic oligonucleotide
ugcucagcugucugcagag

SEQ ID NO: 2129360 - RNA, 19 nt, Artificial Sequence
  Description of Artificial Sequence: Synthetic oligonucleotide
cucagugguggcuccaacc

SEQ ID NO: 2129361 - RNA, 19 nt, Artificial Sequence
  Description of Artificial Sequence: Synthetic oligonucleotide
uggauggguacagagggca

SEQ ID NO: 2129362 - RNA, 19 nt, Artificial Sequence
  Description of Artificial Sequence: Synthetic oligonucleotide
cagguugacauaagacgcc

SEQ ID NO: 2129363 - RNA, 19 nt, Artificial Sequence
  Description of Artificial Sequence: Synthetic oligonucleotide
caagguuggugccaccuag

SEQ ID NO: 2129364 - RNA, 19 nt, Artificial Sequence
  Description of Artificial Sequence: Synthetic oligonucleotide
ggucccaggagugaaacgg

SEQ ID NO: 2129365 - RNA, 19 nt, Artificial Sequence
  Description of Artificial Sequence: Synthetic oligonucleotide
cccuuauaaguuacgacgg

SEQ ID NO: 2129366 - RNA, 19 nt, Artificial Sequence
  Description of Artificial Sequence: Synthetic oligonucleotide
cauuaccucccaugggugc

SEQ ID NO: 2129367 - RNA, 19 nt, Artificial Sequence
  Description of Artificial Sequence: Synthetic oligonucleotide
caagaacaacgccguaugg

SEQ ID NO: 2129368 - RNA, 19 nt, Artificial Sequence
  Description of Artificial Sequence: Synthetic oligonucleotide
guguaaguuucccuuauaa

SEQ ID NO: 2129369 - RNA, 19 nt, Artificial Sequence
  Description of Artificial Sequence: Synthetic oligonucleotide
acaucgagggcuccggaca

SEQ ID NO: 2129370 - RNA, 19 nt, Artificial Sequence
  Description of Artificial Sequence: Synthetic oligonucleotide
uuguguaaguuucccuuau

SEQ ID NO: 2129371 - RNA, 19 nt, Artificial Sequence
  Description of Artificial Sequence: Synthetic oligonucleotide
agcaauuggaguggcuccg

SEQ ID NO: 2129372 - RNA, 19 nt, Artificial Sequence
  Description of Artificial Sequence: Synthetic oligonucleotide
uacggaguacuucccgggc

SEQ ID NO: 2129373 - RNA, 19 nt, Artificial Sequence
  Description of Artificial Sequence: Synthetic oligonucleotide
caucugcaggacaucgagg

SEQ ID NO: 2129374 - RNA, 19 nt, Artificial Sequence
  Description of Artificial Sequence: Synthetic oligonucleotide
acgggagauagugccacgc

SEQ ID NO: 2129375 - RNA, 19 nt, Artificial Sequence
  Description of Artificial Sequence: Synthetic oligonucleotide
gcagguugacauaagacgc

SEQ ID NO: 2129376 - RNA, 19 nt, Artificial Sequence
  Description of Artificial Sequence: Synthetic oligonucleotide
aacggccagcaauuggagu

SEQ ID NO: 2129377 - RNA, 19 nt, Artificial Sequence
  Description of Artificial Sequence: Synthetic oligonucleotide
ucucccacguccucuucag

SEQ ID NO: 2129378 - RNA, 19 nt, Artificial Sequence
  Description of Artificial Sequence: Synthetic oligonucleotide
cacacccucagaccagucg

SEQ ID NO: 2129379 - RNA, 19 nt, Artificial Sequence
  Description of Artificial Sequence: Synthetic oligonucleotide
cuucaguaggaaacugcug

SEQ ID NO: 2129380 - RNA, 19 nt, Artificial Sequence
  Description of Artificial Sequence: Synthetic oligonucleotide
aacuucagcacagcucgcu

SEQ ID NO: 2129381 - RNA, 19 nt, Artificial Sequence
  Description of Artificial Sequence: Synthetic oligonucleotide
cacguagcggagaggagag

SEQ ID NO: 2129382 - RNA, 19 nt, Artificial Sequence
  Description of Artificial Sequence: Synthetic oligonucleotide
uguugcacggaauggcaau

SEQ ID NO: 2129383 - RNA, 19 nt, Artificial Sequence
  Description of Artificial Sequence: Synthetic oligonucleotide
aucaagaacaacgccguau

SEQ ID NO: 2129384 - RNA, 19 nt, Artificial Sequence
  Description of Artificial Sequence: Synthetic oligonucleotide
guauggacccgucccgggg

SEQ ID NO: 2129385 - RNA, 19 nt, Artificial Sequence
  Description of Artificial Sequence: Synthetic oligonucleotide
aacugcuggauggguacag

SEQ ID NO: 2129386 - RNA, 19 nt, Artificial Sequence
  Description of Artificial Sequence: Synthetic oligonucleotide
cucccaugggugcucacgg

SEQ ID NO: 2129387 - RNA, 19 nt, Artificial Sequence
  Description of Artificial Sequence: Synthetic oligonucleotide
aguuacgacgggaaucaag

SEQ ID NO: 2129388 - RNA, 19 nt, Artificial Sequence
  Description of Artificial Sequence: Synthetic oligonucleotide
agcauccaccacaucagac

SEQ ID NO: 2129389 - RNA, 19 nt, Artificial Sequence
  Description of Artificial Sequence: Synthetic oligonucleotide
gagggcuccggacauugug

SEQ ID NO: 2129390 - RNA, 19 nt, Artificial Sequence
  Description of Artificial Sequence: Synthetic oligonucleotide
gauguagauaccaucacuu

SEQ ID NO: 2129391 - RNA, 19 nt, Artificial Sequence
  Description of Artificial Sequence: Synthetic oligonucleotide
cacuagaagccguggcucc

SEQ ID NO: 2129392 - RNA, 19 nt, Artificial Sequence
  Description of Artificial Sequence: Synthetic oligonucleotide
uggcgcaguccauucaccc

SEQ ID NO: 2129393 - RNA, 19 nt, Artificial Sequence
  Description of Artificial Sequence: Synthetic oligonucleotide
ggcugcuuggaucugguug

SEQ ID NO: 2129394 - RNA, 19 nt, Artificial Sequence
  Description of Artificial Sequence: Synthetic oligonucleotide
aggcauuaccucccauggg

SEQ ID NO: 2129395 - RNA, 19 nt, Artificial Sequence
  Description of Artificial Sequence: Synthetic oligonucleotide
uauggacccgucccggggu

SEQ ID NO: 2129396 - RNA, 19 nt, Artificial Sequence
  Description of Artificial Sequence: Synthetic oligonucleotide
gaaucaagaacaacgccgu

SEQ ID NO: 2129397 - RNA, 19 nt, Artificial Sequence
  Description of Artificial Sequence: Synthetic oligonucleotide
guagauguacugcuccauc

SEQ ID NO: 2129398 - RNA, 19 nt, Artificial Sequence
  Description of Artificial Sequence: Synthetic oligonucleotide
acaacuuguaagaacuuua

SEQ ID NO: 2129399 - RNA, 19 nt, Artificial Sequence
  Description of Artificial Sequence: Synthetic oligonucleotide
gccagcaacagcuucuccc

SEQ ID NO: 2129400 - RNA, 19 nt, Artificial Sequence
  Description of Artificial Sequence: Synthetic oligonucleotide
guuucccuuauaaguuacg

SEQ ID NO: 2129401 - RNA, 19 nt, Artificial Sequence
  Description of Artificial Sequence: Synthetic oligonucleotide
gaacaacgccguauggacc

SEQ ID NO: 2129402 - RNA, 19 nt, Artificial Sequence
  Description of Artificial Sequence: Synthetic oligonucleotide
aaacggccagcaauuggag

SEQ ID NO: 2129403 - RNA, 19 nt, Artificial Sequence
  Description of Artificial Sequence: Synthetic oligonucleotide
gcucacgggagauagugcc

SEQ ID NO: 2129404 - RNA, 19 nt, Artificial Sequence
  Description of Artificial Sequence: Synthetic oligonucleotide
aaguaaaggucaggcauua

SEQ ID NO: 2129405 - RNA, 19 nt, Artificial Sequence
  Description of Artificial Sequence: Synthetic oligonucleotide
ugcucacgggagauagugc

SEQ ID NO: 2129406 - RNA, 19 nt, Artificial Sequence
  Description of Artificial Sequence: Synthetic oligonucleotide
gacaucgagggcuccggac

SEQ ID NO: 2129407 - RNA, 19 nt, Artificial Sequence
  Description of Artificial Sequence: Synthetic oligonucleotide
gggaaucaagaacaacgcc

SEQ ID NO: 2129408 - RNA, 19 nt, Artificial Sequence
  Description of Artificial Sequence: Synthetic oligonucleotide
cugcaaggaacuugaggac

SEQ ID NO: 2129409 - RNA, 19 nt, Artificial Sequence
  Description of Artificial Sequence: Synthetic oligonucleotide
aauggugggcagguugaca

SEQ ID NO: 2129410 - RNA, 19 nt, Artificial Sequence
  Description of Artificial Sequence: Synthetic oligonucleotide
uguguaaguuucccuuaua

SEQ ID NO: 2129411 - RNA, 19 nt, Artificial Sequence
  Description of Artificial Sequence: Synthetic oligonucleotide
ugaccaguccucaguggcu

SEQ ID NO: 2129412 - RNA, 19 nt, Artificial Sequence
  Description of Artificial Sequence: Synthetic oligonucleotide
ugaccacuagaagccgugg

SEQ ID NO: 2129413 - RNA, 19 nt, Artificial Sequence
  Description of Artificial Sequence: Synthetic oligonucleotide
acggaauggcaauguccac

SEQ ID NO: 2129414 - RNA, 19 nt, Artificial Sequence
  Description of Artificial Sequence: Synthetic oligonucleotide
agccguggcucccggaagg

SEQ ID NO: 2129415 - RNA, 19 nt, Artificial Sequence
  Description of Artificial Sequence: Synthetic oligonucleotide
agagcaauggugggcaggu

SEQ ID NO: 2129416 - RNA, 19 nt, Artificial Sequence
  Description of Artificial Sequence: Synthetic oligonucleotide
ggcaauguccacguagcgg

SEQ ID NO: 2129417 - RNA, 19 nt, Artificial Sequence
  Description of Artificial Sequence: Synthetic oligonucleotide
aagccguggcucccggaag

SEQ ID NO: 2129418 - RNA, 19 nt, Artificial Sequence
  Description of Artificial Sequence: Synthetic oligonucleotide
agcagugaacucuggcgcu

SEQ ID NO: 2129419 - RNA, 19 nt, Artificial Sequence
  Description of Artificial Sequence: Synthetic oligonucleotide
acucagugguggcuccaac

SEQ ID NO: 2129420 - RNA, 19 nt, Artificial Sequence
  Description of Artificial Sequence: Synthetic oligonucleotide
agucaagguuggugccacc

SEQ ID NO: 2129421 - RNA, 19 nt, Artificial Sequence
  Description of Artificial Sequence: Synthetic oligonucleotide
agugaaacggccagcaauu

SEQ ID NO: 2129422 - RNA, 19 nt, Artificial Sequence
  Description of Artificial Sequence: Synthetic oligonucleotide
aauguccacguagcggaga

SEQ ID NO: 2129423 - RNA, 19 nt, Artificial Sequence
  Description of Artificial Sequence: Synthetic oligonucleotide
aguaaaggucaggcauuac

SEQ ID NO: 2129424 - RNA, 19 nt, Artificial Sequence
  Description of Artificial Sequence: Synthetic oligonucleotide
aacgauggcccgggcugcc

SEQ ID NO: 2129425 - RNA, 19 nt, Artificial Sequence
  Description of Artificial Sequence: Synthetic oligonucleotide
aaucaagaacaacgccgua

SEQ ID NO: 2129426 - RNA, 19 nt, Artificial Sequence
  Description of Artificial Sequence: Synthetic oligonucleotide
gagugaaacggccagcaau

SEQ ID NO: 2129427 - RNA, 19 nt, Artificial Sequence
  Description of Artificial Sequence: Synthetic oligonucleotide
acgccguauggacccgucc

SEQ ID NO: 2129428 - RNA, 19 nt, Artificial Sequence
  Description of Artificial Sequence: Synthetic oligonucleotide
ccauucacccugaaauucc

SEQ ID NO: 2129429 - RNA, 19 nt, Artificial Sequence
  Description of Artificial Sequence: Synthetic oligonucleotide
gcuccaacccacucagugg

SEQ ID NO: 2129430 - RNA, 19 nt, Artificial Sequence
  Description of Artificial Sequence: Synthetic oligonucleotide
agauaccaucacuuuuccu

SEQ ID NO: 2129431 - RNA, 19 nt, Artificial Sequence
  Description of Artificial Sequence: Synthetic oligonucleotide
aggagaugacgcugacauc

SEQ ID NO: 2129432 - RNA, 19 nt, Artificial Sequence
  Description of Artificial Sequence: Synthetic oligonucleotide
aggagugaaacggccagca

SEQ ID NO: 2129433 - RNA, 19 nt, Artificial Sequence
  Description of Artificial Sequence: Synthetic oligonucleotide
gugcucacgggagauagug

SEQ ID NO: 2129434 - RNA, 19 nt, Artificial Sequence
  Description of Artificial Sequence: Synthetic oligonucleotide
uuggaguggcuccgguggc

SEQ ID NO: 2129435 - RNA, 19 nt, Artificial Sequence
  Description of Artificial Sequence: Synthetic oligonucleotide
ucacgggagauagugccac

SEQ ID NO: 2129436 - RNA, 19 nt, Artificial Sequence
  Description of Artificial Sequence: Synthetic oligonucleotide
ggaagucaagguuggugcc

SEQ ID NO: 2129437 - RNA, 19 nt, Artificial Sequence
  Description of Artificial Sequence: Synthetic oligonucleotide
gcauacggaguacuucccg

SEQ ID NO: 2129438 - RNA, 19 nt, Artificial Sequence
  Description of Artificial Sequence: Synthetic oligonucleotide
gcaacgauggcccgggcug

SEQ ID NO: 2129439 - RNA, 19 nt, Artificial Sequence
  Description of Artificial Sequence: Synthetic oligonucleotide
uuacgacgggaaucaagaa

SEQ ID NO: 2129440 - RNA, 19 nt, Artificial Sequence
  Description of Artificial Sequence: Synthetic oligonucleotide
gaagucaagguuggugcca

SEQ ID NO: 2129441 - RNA, 19 nt, Artificial Sequence
  Description of Artificial Sequence: Synthetic oligonucleotide
ugcacggaauggcaauguc

SEQ ID NO: 2129442 - RNA, 19 nt, Artificial Sequence
  Description of Artificial Sequence: Synthetic oligonucleotide
uacuucccgggccagcauc

SEQ ID NO: 2129443 - RNA, 19 nt, Artificial Sequence
  Description of Artificial Sequence: Synthetic oligonucleotide
ucaagguuggugccaccua

SEQ ID NO: 2129444 - RNA, 19 nt, Artificial Sequence
  Description of Artificial Sequence: Synthetic oligonucleotide
ucccaugggugcucacggg

SEQ ID NO: 2129445 - RNA, 19 nt, Artificial Sequence
  Description of Artificial Sequence: Synthetic oligonucleotide
agucuguguuacacagagc

SEQ ID NO: 2129446 - RNA, 19 nt, Artificial Sequence
  Description of Artificial Sequence: Synthetic oligonucleotide
agauagugccacgcauacg

SEQ ID NO: 2129447 - RNA, 19 nt, Artificial Sequence
  Description of Artificial Sequence: Synthetic oligonucleotide
uuuuccucuuguagaugua

SEQ ID NO: 2129448 - RNA, 19 nt, Artificial Sequence
  Description of Artificial Sequence: Synthetic oligonucleotide
accuagguggguuccugcu

SEQ ID NO: 2129449 - RNA, 19 nt, Artificial Sequence
  Description of Artificial Sequence: Synthetic oligonucleotide
guuguugcacggaauggca

SEQ ID NO: 2129450 - RNA, 19 nt, Artificial Sequence
  Description of Artificial Sequence: Synthetic oligonucleotide
auuaccucccaugggugcu

SEQ ID NO: 2129451 - RNA, 19 nt, Artificial Sequence
  Description of Artificial Sequence: Synthetic oligonucleotide
caccgagugagcucccuug

SEQ ID NO: 2129452 - RNA, 19 nt, Artificial Sequence
  Description of Artificial Sequence: Synthetic oligonucleotide
acaucagcgggguucucaa

SEQ ID NO: 2129453 - RNA, 19 nt, Artificial Sequence
  Description of Artificial Sequence: Synthetic oligonucleotide
agguugacauaagacgccu

SEQ ID NO: 2129454 - RNA, 19 nt, Artificial Sequence
  Description of Artificial Sequence: Synthetic oligonucleotide
cauuguguaaguuucccuu

SEQ ID NO: 2129455 - RNA, 19 nt, Artificial Sequence
  Description of Artificial Sequence: Synthetic oligonucleotide
gaccaguccucaguggcug

SEQ ID NO: 2129456 - RNA, 19 nt, Artificial Sequence
  Description of Artificial Sequence: Synthetic oligonucleotide
ucgagggcuccggacauug

SEQ ID NO: 2129457 - RNA, 19 nt, Artificial Sequence
  Description of Artificial Sequence: Synthetic oligonucleotide
guugcacggaauggcaaug

SEQ ID NO: 2129458 - RNA, 19 nt, Artificial Sequence
  Description of Artificial Sequence: Synthetic oligonucleotide
aggacaucgagggcuccgg

SEQ ID NO: 2129459 - RNA, 19 nt, Artificial Sequence
  Description of Artificial Sequence: Synthetic oligonucleotide
uccaacccacucaguggcc

SEQ ID NO: 2129460 - RNA, 19 nt, Artificial Sequence
  Description of Artificial Sequence: Synthetic oligonucleotide
guacagagggcaccugcac

SEQ ID NO: 2129461 - RNA, 19 nt, Artificial Sequence
  Description of Artificial Sequence: Synthetic oligonucleotide
guccacguagcggagagga

SEQ ID NO: 2129462 - RNA, 19 nt, Artificial Sequence
  Description of Artificial Sequence: Synthetic oligonucleotide
gagaggagagucuguguua

SEQ ID NO: 2129463 - RNA, 19 nt, Artificial Sequence
  Description of Artificial Sequence: Synthetic oligonucleotide
gugagcucccuuguuguug

SEQ ID NO: 2129464 - RNA, 19 nt, Artificial Sequence
  Description of Artificial Sequence: Synthetic oligonucleotide
guggucagcccuggggucg

SEQ ID NO: 2129465 - RNA, 19 nt, Artificial Sequence
  Description of Artificial Sequence: Synthetic oligonucleotide
gacgggaaucaagaacaac

SEQ ID NO: 2129466 - RNA, 19 nt, Artificial Sequence
  Description of Artificial Sequence: Synthetic oligonucleotide
gacaucagcgggguucuca

SEQ ID NO: 2129467 - RNA, 19 nt, Artificial Sequence
  Description of Artificial Sequence: Synthetic oligonucleotide
caauggcaacgauggcccg

SEQ ID NO: 2129468 - RNA, 19 nt, Artificial Sequence
  Description of Artificial Sequence: Synthetic oligonucleotide
accaguccucaguggcugg

SEQ ID NO: 2129469 - RNA, 19 nt, Artificial Sequence
  Description of Artificial Sequence: Synthetic oligonucleotide
accgagugagcucccuugu

SEQ ID NO: 2129470 - RNA, 19 nt, Artificial Sequence
  Description of Artificial Sequence: Synthetic oligonucleotide
gagugagcucccuuguugu

SEQ ID NO: 2129471 - RNA, 19 nt, Artificial Sequence
  Description of Artificial Sequence: Synthetic oligonucleotide
cgggaaucaagaacaacgc

SEQ ID NO: 2129472 - RNA, 19 nt, Artificial Sequence
  Description of Artificial Sequence: Synthetic oligonucleotide
cuggcugggcacuccaguc

SEQ ID NO: 2129473 - RNA, 19 nt, Artificial Sequence
  Description of Artificial Sequence: Synthetic oligonucleotide
auaagacgccucagugagg

SEQ ID NO: 2129474 - RNA, 19 nt, Artificial Sequence
  Description of Artificial Sequence: Synthetic oligonucleotide
uugcacggaauggcaaugu

SEQ ID NO: 2129475 - RNA, 19 nt, Artificial Sequence
  Description of Artificial Sequence: Synthetic oligonucleotide
ggcauuaccucccaugggu

SEQ ID NO: 2129476 - RNA, 19 nt, Artificial Sequence
  Description of Artificial Sequence: Synthetic oligonucleotide
caccuagguggguuccugc

SEQ ID NO: 2129477 - RNA, 19 nt, Artificial Sequence
  Description of Artificial Sequence: Synthetic oligonucleotide
aacgccguauggacccguc

SEQ ID NO: 2129478 - RNA, 19 nt, Artificial Sequence
  Description of Artificial Sequence: Synthetic oligonucleotide
uggucacagccuucucggc

SEQ ID NO: 2129479 - RNA, 19 nt, Artificial Sequence
  Description of Artificial Sequence: Synthetic oligonucleotide
gcuccggacauuguguaag

SEQ ID NO: 2129480 - RNA, 19 nt, Artificial Sequence
  Description of Artificial Sequence: Synthetic oligonucleotide
cacccucagaccagucggc

SEQ ID NO: 2129481 - RNA, 19 nt, Artificial Sequence
  Description of Artificial Sequence: Synthetic oligonucleotide
gcacggaauggcaaugucc

SEQ ID NO: 2129482 - RNA, 19 nt, Artificial Sequence
  Description of Artificial Sequence: Synthetic oligonucleotide
gguuggugccaccuaggug

SEQ ID NO: 2129483 - RNA, 19 nt, Artificial Sequence
  Description of Artificial Sequence: Synthetic oligonucleotide
caacuuguaagaacuuuau

SEQ ID NO: 2129484 - RNA, 19 nt, Artificial Sequence
  Description of Artificial Sequence: Synthetic oligonucleotide
ggugaaggucccaggagug

SEQ ID NO: 2129485 - RNA, 19 nt, Artificial Sequence
  Description of Artificial Sequence: Synthetic oligonucleotide
ggagagucuguguuacaca

SEQ ID NO: 2129486 - RNA, 19 nt, Artificial Sequence
  Description of Artificial Sequence: Synthetic oligonucleotide
ugcacacccucagaccagu

SEQ ID NO: 2129487 - RNA, 19 nt, Artificial Sequence
  Description of Artificial Sequence: Synthetic oligonucleotide
gccguauggacccgucccg

SEQ ID NO: 2129488 - RNA, 19 nt, Artificial Sequence
  Description of Artificial Sequence: Synthetic oligonucleotide
ggucggugaccacuagaag

SEQ ID NO: 2129489 - RNA, 19 nt, Artificial Sequence
  Description of Artificial Sequence: Synthetic oligonucleotide
gguggcuccaacccacuca

SEQ ID NO: 2129490 - RNA, 19 nt, Artificial Sequence
  Description of Artificial Sequence: Synthetic oligonucleotide
gcgcaguccauucacccug

SEQ ID NO: 2129491 - RNA, 19 nt, Artificial Sequence
  Description of Artificial Sequence: Synthetic oligonucleotide
gacaacuuguaagaacuuu

SEQ ID NO: 2129492 - RNA, 19 nt, Artificial Sequence
  Description of Artificial Sequence: Synthetic oligonucleotide
cagugaacucuggcgcugg

SEQ ID NO: 2129493 - RNA, 19 nt, Artificial Sequence
  Description of Artificial Sequence: Synthetic oligonucleotide
gggugcucacgggagauag

SEQ ID NO: 2129494 - RNA, 19 nt, Artificial Sequence
  Description of Artificial Sequence: Synthetic oligonucleotide
ucccuuguuguugcacgga

SEQ ID NO: 2129495 - RNA, 19 nt, Artificial Sequence
  Description of Artificial Sequence: Synthetic oligonucleotide
gugaaacggccagcaauug

SEQ ID NO: 2129496 - RNA, 19 nt, Artificial Sequence
  Description of Artificial Sequence: Synthetic oligonucleotide
cuguguuacacagagcaau

SEQ ID NO: 2129497 - RNA, 19 nt, Artificial Sequence
  Description of Artificial Sequence: Synthetic oligonucleotide
ggcacuccagucuucagua

SEQ ID NO: 2129498 - RNA, 19 nt, Artificial Sequence
  Description of Artificial Sequence: Synthetic oligonucleotide
caucagacccaccgaguga

SEQ ID NO: 2129499 - RNA, 19 nt, Artificial Sequence
  Description of Artificial Sequence: Synthetic oligonucleotide
caacccacucaguggccug

SEQ ID NO: 2129500 - RNA, 19 nt, Artificial Sequence
  Description of Artificial Sequence: Synthetic oligonucleotide
gucccaggagugaaacggc

SEQ ID NO: 2129501 - RNA, 19 nt, Artificial Sequence
  Description of Artificial Sequence: Synthetic oligonucleotide
agcgggguucucaauggca

SEQ ID NO: 2129502 - RNA, 19 nt, Artificial Sequence
  Description of Artificial Sequence: Synthetic oligonucleotide
ugggagcugcugaccaguc

SEQ ID NO: 2129503 - RNA, 19 nt, Artificial Sequence
  Description of Artificial Sequence: Synthetic oligonucleotide
uggggucggugaccacuag

SEQ ID NO: 2129504 - RNA, 19 nt, Artificial Sequence
  Description of Artificial Sequence: Synthetic oligonucleotide
cacuuuuccucuuguagau

SEQ ID NO: 2129505 - RNA, 19 nt, Artificial Sequence
  Description of Artificial Sequence: Synthetic oligonucleotide
gggcagguugacauaagac

SEQ ID NO: 2129506 - RNA, 19 nt, Artificial Sequence
  Description of Artificial Sequence: Synthetic oligonucleotide
agggcuccggacauugugu

SEQ ID NO: 2129507 - RNA, 19 nt, Artificial Sequence
  Description of Artificial Sequence: Synthetic oligonucleotide
agagucuguguuacacaga

SEQ ID NO: 2129508 - RNA, 19 nt, Artificial Sequence
  Description of Artificial Sequence: Synthetic oligonucleotide
ugguggcuccaacccacuc

SEQ ID NO: 2129509 - RNA, 19 nt, Artificial Sequence
  Description of Artificial Sequence: Synthetic oligonucleotide
uucccgggccagcauccac

SEQ ID NO: 2129510 - RNA, 19 nt, Artificial Sequence
  Description of Artificial Sequence: Synthetic oligonucleotide
uggucagcccuggggucgg

SEQ ID NO: 2129511 - RNA, 19 nt, Artificial Sequence
  Description of Artificial Sequence: Synthetic oligonucleotide
cagauugaugauguagaua

SEQ ID NO: 2129512 - RNA, 19 nt, Artificial Sequence
  Description of Artificial Sequence: Synthetic oligonucleotide
cagcgggguucucaauggc

SEQ ID NO: 2129513 - RNA, 19 nt, Artificial Sequence
  Description of Artificial Sequence: Synthetic oligonucleotide
ccucagaccagucggccac

SEQ ID NO: 2129514 - RNA, 19 nt, Artificial Sequence
  Description of Artificial Sequence: Synthetic oligonucleotide
acaacgccguauggacccg

SEQ ID NO: 2129515 - RNA, 19 nt, Artificial Sequence
  Description of Artificial Sequence: Synthetic oligonucleotide
ccaugggugcucacgggag

SEQ ID NO: 2129516 - RNA, 19 nt, Artificial Sequence
  Description of Artificial Sequence: Synthetic oligonucleotide
gaguacuucccgggccagc

SEQ ID NO: 2129517 - RNA, 19 nt, Artificial Sequence
  Description of Artificial Sequence: Synthetic oligonucleotide
gcugcugaccaguccucag

SEQ ID NO: 2129518 - RNA, 19 nt, Artificial Sequence
  Description of Artificial Sequence: Synthetic oligonucleotide
cauucacccugaaauuccu

SEQ ID NO: 2129519 - RNA, 19 nt, Artificial Sequence
  Description of Artificial Sequence: Synthetic oligonucleotide
caacgauggcccgggcugc

SEQ ID NO: 2129520 - RNA, 19 nt, Artificial Sequence
  Description of Artificial Sequence: Synthetic oligonucleotide
ucccggaaggcugcuugga

SEQ ID NO: 2129521 - RNA, 19 nt, Artificial Sequence
  Description of Artificial Sequence: Synthetic oligonucleotide
gacccgucccgggguagcg

SEQ ID NO: 2129522 - RNA, 19 nt, Artificial Sequence
  Description of Artificial Sequence: Synthetic oligonucleotide
ucagaccagucggccaccu

SEQ ID NO: 2129523 - RNA, 19 nt, Artificial Sequence
  Description of Artificial Sequence: Synthetic oligonucleotide
caugggugcucacgggaga

SEQ ID NO: 2129524 - RNA, 19 nt, Artificial Sequence
  Description of Artificial Sequence: Synthetic oligonucleotide
gcaauuggaguggcuccgg

SEQ ID NO: 2129525 - RNA, 19 nt, Artificial Sequence
  Description of Artificial Sequence: Synthetic oligonucleotide
auagugccacgcauacgga

SEQ ID NO: 2129526 - RNA, 19 nt, Artificial Sequence
  Description of Artificial Sequence: Synthetic oligonucleotide
gcauuaccucccaugggug

SEQ ID NO: 2129527 - RNA, 19 nt, Artificial Sequence
  Description of Artificial Sequence: Synthetic oligonucleotide
gguacagagggcaccugca

SEQ ID NO: 2129528 - RNA, 19 nt, Artificial Sequence
  Description of Artificial Sequence: Synthetic oligonucleotide
ucgcugcccaguguuccug

SEQ ID NO: 2129529 - RNA, 19 nt, Artificial Sequence
  Description of Artificial Sequence: Synthetic oligonucleotide
aaguuacgacgggaaucaa

SEQ ID NO: 2129530 - RNA, 19 nt, Artificial Sequence
  Description of Artificial Sequence: Synthetic oligonucleotide
uuaccucccaugggugcuc

SEQ ID NO: 2129531 - RNA, 19 nt, Artificial Sequence
  Description of Artificial Sequence: Synthetic oligonucleotide
gugaaggucccaggaguga

SEQ ID NO: 2129532 - RNA, 19 nt, Artificial Sequence
  Description of Artificial Sequence: Synthetic oligonucleotide
agacaacuuguaagaacuu

SEQ ID NO: 2129533 - RNA, 19 nt, Artificial Sequence
  Description of Artificial Sequence: Synthetic oligonucleotide
ggagauagugccacgcaua

SEQ ID NO: 2129534 - RNA, 19 nt, Artificial Sequence
  Description of Artificial Sequence: Synthetic oligonucleotide
acccgucccgggguagcgc

SEQ ID NO: 2129535 - RNA, 19 nt, Artificial Sequence
  Description of Artificial Sequence: Synthetic oligonucleotide
gucaagguuggugccaccu

SEQ ID NO: 2129536 - RNA, 19 nt, Artificial Sequence
  Description of Artificial Sequence: Synthetic oligonucleotide
cucagaccagucggccacc

SEQ ID NO: 2129537 - RNA, 19 nt, Artificial Sequence
  Description of Artificial Sequence: Synthetic oligonucleotide
ccggaaggcugcuuggauc

SEQ ID NO: 2129538 - RNA, 19 nt, Artificial Sequence
  Description of Artificial Sequence: Synthetic oligonucleotide
agcucgcugcccaguguuc

SEQ ID NO: 2129539 - RNA, 19 nt, Artificial Sequence
  Description of Artificial Sequence: Synthetic oligonucleotide
ccuagguggguuccugcug

SEQ ID NO: 2129540 - RNA, 19 nt, Artificial Sequence
  Description of Artificial Sequence: Synthetic oligonucleotide
gcggagaggagagucugug

SEQ ID NO: 2129541 - RNA, 19 nt, Artificial Sequence
  Description of Artificial Sequence: Synthetic oligonucleotide
acgcugacaucagcggggu

SEQ ID NO: 2129542 - RNA, 19 nt, Artificial Sequence
  Description of Artificial Sequence: Synthetic oligonucleotide
ggaguggcuccgguggcag

SEQ ID NO: 2129543 - RNA, 19 nt, Artificial Sequence
  Description of Artificial Sequence: Synthetic oligonucleotide
ccacuagaagccguggcuc

SEQ ID NO: 2129544 - RNA, 19 nt, Artificial Sequence
  Description of Artificial Sequence: Synthetic oligonucleotide
uggacccgucccgggguag

SEQ ID NO: 2129545 - RNA, 19 nt, Artificial Sequence
  Description of Artificial Sequence: Synthetic oligonucleotide
ugccacgcauacggaguac

SEQ ID NO: 2129546 - RNA, 19 nt, Artificial Sequence
  Description of Artificial Sequence: Synthetic oligonucleotide
gugccaccuagguggguuc

SEQ ID NO: 2129547 - RNA, 19 nt, Artificial Sequence
  Description of Artificial Sequence: Synthetic oligonucleotide
uggcuccaacccacucagu

SEQ ID NO: 2129548 - RNA, 19 nt, Artificial Sequence
  Description of Artificial Sequence: Synthetic oligonucleotide
cgccguauggacccguccc

SEQ ID NO: 2129549 - RNA, 19 nt, Artificial Sequence
  Description of Artificial Sequence: Synthetic oligonucleotide
ggguucucaauggcaacga

SEQ ID NO: 2129550 - RNA, 19 nt, Artificial Sequence
  Description of Artificial Sequence: Synthetic oligonucleotide
gcaacagcuucucccacgu

SEQ ID NO: 2129551 - RNA, 19 nt, Artificial Sequence
  Description of Artificial Sequence: Synthetic oligonucleotide
cguagcggagaggagaguc

SEQ ID NO: 2129552 - RNA, 19 nt, Artificial Sequence
  Description of Artificial Sequence: Synthetic oligonucleotide
gcucgcugcccaguguucc

SEQ ID NO: 2129553 - RNA, 19 nt, Artificial Sequence
  Description of Artificial Sequence: Synthetic oligonucleotide
cagagcagcucaggaccac

SEQ ID NO: 2129554 - RNA, 19 nt, Artificial Sequence
  Description of Artificial Sequence: Synthetic oligonucleotide
cguauggacccgucccggg

SEQ ID NO: 2129555 - RNA, 19 nt, Artificial Sequence
  Description of Artificial Sequence: Synthetic oligonucleotide
guagcggagaggagagucu

SEQ ID NO: 2129556 - RNA, 19 nt, Artificial Sequence
  Description of Artificial Sequence: Synthetic oligonucleotide
cccgucccgggguagcgcg

SEQ ID NO: 2129557 - RNA, 19 nt, Artificial Sequence
  Description of Artificial Sequence: Synthetic oligonucleotide
caacagcuucucccacguc

SEQ ID NO: 2129558 - RNA, 19 nt, Artificial Sequence
  Description of Artificial Sequence: Synthetic oligonucleotide
gcugguggucagcccuggg

SEQ ID NO: 2129559 - RNA, 19 nt, Artificial Sequence
  Description of Artificial Sequence: Synthetic oligonucleotide
cgcauacggaguacuuccc

SEQ ID NO: 2129560 - RNA, 19 nt, Artificial Sequence
  Description of Artificial Sequence: Synthetic oligonucleotide
cuggggucggugaccacua

SEQ ID NO: 2129561 - RNA, 19 nt, Artificial Sequence
  Description of Artificial Sequence: Synthetic oligonucleotide
gacgccucagugaggggcu

SEQ ID NO: 2129562 - RNA, 19 nt, Artificial Sequence
  Description of Artificial Sequence: Synthetic oligonucleotide
auggacccgucccggggua

SEQ ID NO: 2129563 - RNA, 19 nt, Artificial Sequence
  Description of Artificial Sequence: Synthetic oligonucleotide
gggagauagugccacgcau

SEQ ID NO: 2129564 - RNA, 19 nt, Artificial Sequence
  Description of Artificial Sequence: Synthetic oligonucleotide
cugcugaccaguccucagu

SEQ ID NO: 2129565 - RNA, 19 nt, Artificial Sequence
  Description of Artificial Sequence: Synthetic oligonucleotide
ggauggguacagagggcac

SEQ ID NO: 2129566 - RNA, 19 nt, Artificial Sequence
  Description of Artificial Sequence: Synthetic oligonucleotide
gucggccaccucuggcuga

SEQ ID NO: 2129567 - RNA, 19 nt, Artificial Sequence
  Description of Artificial Sequence: Synthetic oligonucleotide
cagaccagucggccaccuc

SEQ ID NO: 2129568 - RNA, 19 nt, Artificial Sequence
  Description of Artificial Sequence: Synthetic oligonucleotide
ccguauggacccgucccgg

SEQ ID NO: 2129569 - RNA, 19 nt, Artificial Sequence
  Description of Artificial Sequence: Synthetic oligonucleotide
ggucaggcauuaccuccca

SEQ ID NO: 2129570 - RNA, 19 nt, Artificial Sequence
  Description of Artificial Sequence: Synthetic oligonucleotide
caauuggaguggcuccggu

SEQ ID NO: 2129571 - RNA, 19 nt, Artificial Sequence
  Description of Artificial Sequence: Synthetic oligonucleotide
cuccggacauuguguaagu

SEQ ID NO: 2129572 - RNA, 19 nt, Artificial Sequence
  Description of Artificial Sequence: Synthetic oligonucleotide
gugggagcugcugaccagu

SEQ ID NO: 2129573 - RNA, 19 nt, Artificial Sequence
  Description of Artificial Sequence: Synthetic oligonucleotide
cccaugggugcucacggga

SEQ ID NO: 2129574 - RNA, 19 nt, Artificial Sequence
  Description of Artificial Sequence: Synthetic oligonucleotide
gcgggguucucaauggcaa

SEQ ID NO: 2129575 - RNA, 19 nt, Artificial Sequence
  Description of Artificial Sequence: Synthetic oligonucleotide
ggcaacgauggcccgggcu

SEQ ID NO: 2129576 - RNA, 19 nt, Artificial Sequence
  Description of Artificial Sequence: Synthetic oligonucleotide
acccaccgagugagcuccc

SEQ ID NO: 2129577 - RNA, 19 nt, Artificial Sequence
  Description of Artificial Sequence: Synthetic oligonucleotide
ggacaucgagggcuccgga

SEQ ID NO: 2129578 - RNA, 19 nt, Artificial Sequence
  Description of Artificial Sequence: Synthetic oligonucleotide
ggcugguggucagcccugg

SEQ ID NO: 2129579 - RNA, 19 nt, Artificial Sequence
  Description of Artificial Sequence: Synthetic oligonucleotide
acguagcggagaggagagu

SEQ ID NO: 2129580 - RNA, 19 nt, Artificial Sequence
  Description of Artificial Sequence: Synthetic oligonucleotide
caguaggaaacugcuggau

SEQ ID NO: 2129581 - RNA, 19 nt, Artificial Sequence
  Description of Artificial Sequence: Synthetic oligonucleotide
agguggguuccugcugcaa

SEQ ID NO: 2129582 - RNA, 19 nt, Artificial Sequence
  Description of Artificial Sequence: Synthetic oligonucleotide
ccaguccucaguggcuggc

SEQ ID NO: 2129583 - RNA, 19 nt, Artificial Sequence
  Description of Artificial Sequence: Synthetic oligonucleotide
ggcgcaguccauucacccu

SEQ ID NO: 2129584 - RNA, 19 nt, Artificial Sequence
  Description of Artificial Sequence: Synthetic oligonucleotide
cucccacguccucuucaga

SEQ ID NO: 2129585 - RNA, 19 nt, Artificial Sequence
  Description of Artificial Sequence: Synthetic oligonucleotide
ggcuccggacauuguguaa

SEQ ID NO: 2129586 - RNA, 19 nt, Artificial Sequence
  Description of Artificial Sequence: Synthetic oligonucleotide
caucgagggcuccggacau

SEQ ID NO: 2129587 - RNA, 19 nt, Artificial Sequence
  Description of Artificial Sequence: Synthetic oligonucleotide
uggcgcuggcgcaguccau

SEQ ID NO: 2129588 - RNA, 19 nt, Artificial Sequence
  Description of Artificial Sequence: Synthetic oligonucleotide
ggguuccugcugcaaggaa

SEQ ID NO: 2129589 - RNA, 19 nt, Artificial Sequence
  Description of Artificial Sequence: Synthetic oligonucleotide
ugacaucagcgggguucuc

SEQ ID NO: 2129590 - RNA, 19 nt, Artificial Sequence
  Description of Artificial Sequence: Synthetic oligonucleotide
ccggacauuguguaaguuu

SEQ ID NO: 2129591 - RNA, 19 nt, Artificial Sequence
  Description of Artificial Sequence: Synthetic oligonucleotide
cggccagcaauuggagugg

SEQ ID NO: 2129592 - RNA, 19 nt, Artificial Sequence
  Description of Artificial Sequence: Synthetic oligonucleotide
ccaccuagguggguuccug

SEQ ID NO: 2129593 - RNA, 19 nt, Artificial Sequence
  Description of Artificial Sequence: Synthetic oligonucleotide
cucuggcgcuggcgcaguc

SEQ ID NO: 2129594 - RNA, 19 nt, Artificial Sequence
  Description of Artificial Sequence: Synthetic oligonucleotide
cccucagaccagucggcca

SEQ ID NO: 2129595 - RNA, 19 nt, Artificial Sequence
  Description of Artificial Sequence: Synthetic oligonucleotide
ggacccgucccgggguagc

SEQ ID NO: 2129596 - RNA, 19 nt, Artificial Sequence
  Description of Artificial Sequence: Synthetic oligonucleotide
cagcucgcugcccaguguu

SEQ ID NO: 2129597 - RNA, 19 nt, Artificial Sequence
  Description of Artificial Sequence: Synthetic oligonucleotide
gucaggcauuaccucccau

SEQ ID NO: 2129598 - RNA, 19 nt, Artificial Sequence
  Description of Artificial Sequence: Synthetic oligonucleotide
ggugccaccuagguggguu

SEQ ID NO: 2129599 - RNA, 19 nt, Artificial Sequence
  Description of Artificial Sequence: Synthetic oligonucleotide
ggcuccgguggcagcagca

SEQ ID NO: 2129600 - RNA, 19 nt, Artificial Sequence
  Description of Artificial Sequence: Synthetic oligonucleotide
cggugaccacuagaagccg

SEQ ID NO: 2129601 - RNA, 19 nt, Artificial Sequence
  Description of Artificial Sequence: Synthetic oligonucleotide
cuucccgggccagcaucca

SEQ ID NO: 2129602 - RNA, 19 nt, Artificial Sequence
  Description of Artificial Sequence: Synthetic oligonucleotide
gccguggcucccggaaggc

SEQ ID NO: 2129603 - RNA, 19 nt, Artificial Sequence
  Description of Artificial Sequence: Synthetic oligonucleotide
guacuucccgggccagcau

SEQ ID NO: 2129604 - RNA, 19 nt, Artificial Sequence
  Description of Artificial Sequence: Synthetic oligonucleotide
gccacgcauacggaguacu

SEQ ID NO: 2129605 - RNA, 19 nt, Artificial Sequence
  Description of Artificial Sequence: Synthetic oligonucleotide
ggaccacucagugguggcu

SEQ ID NO: 2129606 - RNA, 19 nt, Artificial Sequence
  Description of Artificial Sequence: Synthetic oligonucleotide
caucagcgggguucucaau

SEQ ID NO: 2129607 - RNA, 19 nt, Artificial Sequence
  Description of Artificial Sequence: Synthetic oligonucleotide
cgggagauagugccacgca

SEQ ID NO: 2129608 - RNA, 19 nt, Artificial Sequence
  Description of Artificial Sequence: Synthetic oligonucleotide
cccgggccagcauccacca

SEQ ID NO: 2129609 - RNA, 19 nt, Artificial Sequence
  Description of Artificial Sequence: Synthetic oligonucleotide
gccugugcugugggagcug

SEQ ID NO: 2129610 - RNA, 19 nt, Artificial Sequence
  Description of Artificial Sequence: Synthetic oligonucleotide
gcaguccauucacccugaa

SEQ ID NO: 2129611 - RNA, 19 nt, Artificial Sequence
  Description of Artificial Sequence: Synthetic oligonucleotide
gugguggcuccaacccacu

SEQ ID NO: 2129612 - RNA, 19 nt, Artificial Sequence
  Description of Artificial Sequence: Synthetic oligonucleotide
cgacgggaaucaagaacaa

SEQ ID NO: 2129613 - RNA, 19 nt, Artificial Sequence
  Description of Artificial Sequence: Synthetic oligonucleotide
cugcuuggaucugguuggu

SEQ ID NO: 2129614 - RNA, 19 nt, Artificial Sequence
  Description of Artificial Sequence: Synthetic oligonucleotide
ccaacccacucaguggccu

SEQ ID NO: 2129615 - RNA, 19 nt, Artificial Sequence
  Description of Artificial Sequence: Synthetic oligonucleotide
cgcaguccauucacccuga

SEQ ID NO: 2129616 - RNA, 19 nt, Artificial Sequence
  Description of Artificial Sequence: Synthetic oligonucleotide
ggugcucacgggagauagu

SEQ ID NO: 2129617 - RNA, 19 nt, Artificial Sequence
  Description of Artificial Sequence: Synthetic oligonucleotide
cgccucagugaggggcugg

SEQ ID NO: 2129618 - RNA, 19 nt, Artificial Sequence
  Description of Artificial Sequence: Synthetic oligonucleotide
caacgccguauggacccgu

SEQ ID NO: 2129619 - RNA, 19 nt, Artificial Sequence
  Description of Artificial Sequence: Synthetic oligonucleotide
cccacguccucuucagauu

SEQ ID NO: 2129620 - RNA, 19 nt, Artificial Sequence
  Description of Artificial Sequence: Synthetic oligonucleotide
ggcgcuggcgcaguccauu

SEQ ID NO: 2129621 - RNA, 19 nt, Artificial Sequence
  Description of Artificial Sequence: Synthetic oligonucleotide
ccacgcauacggaguacuu

SEQ ID NO: 2129622 - RNA, 19 nt, Artificial Sequence
  Description of Artificial Sequence: Synthetic oligonucleotide
ccgggccagcauccaccac

SEQ ID NO: 2129623 - RNA, 19 nt, Artificial Sequence
  Description of Artificial Sequence: Synthetic oligonucleotide
gccaccuagguggguuccu

SEQ ID NO: 2129624 - RNA, 19 nt, Artificial Sequence
  Description of Artificial Sequence: Synthetic oligonucleotide
cccggaaggcugcuuggau

SEQ ID NO: 2129625 - RNA, 19 nt, Artificial Sequence
  Description of Artificial Sequence: Synthetic oligonucleotide
ccgagugagcucccuuguu

SEQ ID NO: 2129626 - RNA, 19 nt, Artificial Sequence
  Description of Artificial Sequence: Synthetic oligonucleotide
ccguggcucccggaaggcu

SEQ ID NO: 2129627 - RNA, 19 nt, Artificial Sequence
  Description of Artificial Sequence: Synthetic oligonucleotide
aauguaaucguuuucaagg

SEQ ID NO: 2129628 - RNA, 19 nt, Artificial Sequence
  Description of Artificial Sequence: Synthetic oligonucleotide
uuuggauuuaaacuuuugg

SEQ ID NO: 2129629 - RNA, 19 nt, Artificial Sequence
  Description of Artificial Sequence: Synthetic oligonucleotide
agaauaaucuuuaauuucc

SEQ ID NO: 2129630 - RNA, 19 nt, Artificial Sequence
  Description of Artificial Sequence: Synthetic oligonucleotide
aaucuccagugucugaagc

SEQ ID NO: 2129631 - RNA, 19 nt, Artificial Sequence
  Description of Artificial Sequence: Synthetic oligonucleotide
uuugcuggggaacugcucg

SEQ ID NO: 2129632 - RNA, 19 nt, Artificial Sequence
  Description of Artificial Sequence: Synthetic oligonucleotide
auccagagcgguuuaaugc

SEQ ID NO: 2129633 - RNA, 19 nt, Artificial Sequence
  Description of Artificial Sequence: Synthetic oligonucleotide
uaaaugaucugacugugca

SEQ ID NO: 2129634 - RNA, 19 nt, Artificial Sequence
  Description of Artificial Sequence: Synthetic oligonucleotide
auucaaauguccucuuagc

SEQ ID NO: 2129635 - RNA, 19 nt, Artificial Sequence
  Description of Artificial Sequence: Synthetic oligonucleotide
ucaaguauucuccccaugc

SEQ ID NO: 2129636 - RNA, 19 nt, Artificial Sequence
  Description of Artificial Sequence: Synthetic oligonucleotide
ucuuccucaaguauucucc

SEQ ID NO: 2129637 - RNA, 19 nt, Artificial Sequence
  Description of Artificial Sequence: Synthetic oligonucleotide
aaaugaucugacugugcac

SEQ ID NO: 2129638 - RNA, 19 nt, Artificial Sequence
  Description of Artificial Sequence: Synthetic oligonucleotide
uggauuuaaacuuuuggaa

SEQ ID NO: 2129639 - RNA, 19 nt, Artificial Sequence
  Description of Artificial Sequence: Synthetic oligonucleotide
caaauguccucuuagcacc

SEQ ID NO: 2129640 - RNA, 19 nt, Artificial Sequence
  Description of Artificial Sequence: Synthetic oligonucleotide
uuuaauuuccacagccuca

SEQ ID NO: 2129641 - RNA, 19 nt, Artificial Sequence
  Description of Artificial Sequence: Synthetic oligonucleotide
uagguaguucaacagcugg

SEQ ID NO: 2129642 - RNA, 19 nt, Artificial Sequence
  Description of Artificial Sequence: Synthetic oligonucleotide
uagagcacgucuuagggcc

SEQ ID NO: 2129643 - RNA, 19 nt, Artificial Sequence
  Description of Artificial Sequence: Synthetic oligonucleotide
aaugaucugacugugcaca

SEQ ID NO: 2129644 - RNA, 19 nt, Artificial Sequence
  Description of Artificial Sequence: Synthetic oligonucleotide
aaugugaucuuccuuggau

SEQ ID NO: 2129645 - RNA, 19 nt, Artificial Sequence
  Description of Artificial Sequence: Synthetic oligonucleotide
acaauuucaaauucuggga

SEQ ID NO: 2129646 - RNA, 19 nt, Artificial Sequence
  Description of Artificial Sequence: Synthetic oligonucleotide
ucaaauguccucuuagcac

SEQ ID NO: 2129647 - RNA, 19 nt, Artificial Sequence
  Description of Artificial Sequence: Synthetic oligonucleotide
aaaacucgcaggccggcac

SEQ ID NO: 2129648 - RNA, 19 nt, Artificial Sequence
  Description of Artificial Sequence: Synthetic oligonucleotide
aauuccucuguguagccca

SEQ ID NO: 2129649 - RNA, 19 nt, Artificial Sequence
  Description of Artificial Sequence: Synthetic oligonucleotide
gauuuaaacuuuuggaaaa

SEQ ID NO: 2129650 - RNA, 19 nt, Artificial Sequence
  Description of Artificial Sequence: Synthetic oligonucleotide
auaccugagaaucugcucu

SEQ ID NO: 2129651 - RNA, 19 nt, Artificial Sequence
  Description of Artificial Sequence: Synthetic oligonucleotide
cuuuagguaguucaacagc

SEQ ID NO: 2129652 - RNA, 19 nt, Artificial Sequence
  Description of Artificial Sequence: Synthetic oligonucleotide
cuuggauucaugcuuugcc

SEQ ID NO: 2129653 - RNA, 19 nt, Artificial Sequence
  Description of Artificial Sequence: Synthetic oligonucleotide
augcuugugucccagccgc

SEQ ID NO: 2129654 - RNA, 19 nt, Artificial Sequence
  Description of Artificial Sequence: Synthetic oligonucleotide
aauccagagcgguuuaaug

SEQ ID NO: 2129655 - RNA, 19 nt, Artificial Sequence
  Description of Artificial Sequence: Synthetic oligonucleotide
cucaucagguguaaucucg

SEQ ID NO: 2129656 - RNA, 19 nt, Artificial Sequence
  Description of Artificial Sequence: Synthetic oligonucleotide
uacgcagccuccaagccgg

SEQ ID NO: 2129657 - RNA, 19 nt, Artificial Sequence
  Description of Artificial Sequence: Synthetic oligonucleotide
aagcucccgucucagaagg

SEQ ID NO: 2129658 - RNA, 19 nt, Artificial Sequence
  Description of Artificial Sequence: Synthetic oligonucleotide
ucagcacaggugaagacug

SEQ ID NO: 2129659 - RNA, 19 nt, Artificial Sequence
  Description of Artificial Sequence: Synthetic oligonucleotide
ugccauggaaucuaguucu

SEQ ID NO: 2129660 - RNA, 19 nt, Artificial Sequence
  Description of Artificial Sequence: Synthetic oligonucleotide
uccuugguaacugauuccg

SEQ ID NO: 2129661 - RNA, 19 nt, Artificial Sequence
  Description of Artificial Sequence: Synthetic oligonucleotide
uaaugugccugcuugcacc

SEQ ID NO: 2129662 - RNA, 19 nt, Artificial Sequence
  Description of Artificial Sequence: Synthetic oligonucleotide
gaucugacugugcacaagc

SEQ ID NO: 2129663 - RNA, 19 nt, Artificial Sequence
  Description of Artificial Sequence: Synthetic oligonucleotide
ucugucacaauuucaaauu

SEQ ID NO: 2129664 - RNA, 19 nt, Artificial Sequence
  Description of Artificial Sequence: Synthetic oligonucleotide
ucuuuaauuuccacagccu

SEQ ID NO: 2129665 - RNA, 19 nt, Artificial Sequence
  Description of Artificial Sequence: Synthetic oligonucleotide
gauagccccagccacgcgg

SEQ ID NO: 2129666 - RNA, 19 nt, Artificial Sequence
  Description of Artificial Sequence: Synthetic oligonucleotide
uguaaucguuuucaaggug

SEQ ID NO: 2129667 - RNA, 19 nt, Artificial Sequence
  Description of Artificial Sequence: Synthetic oligonucleotide
ugucacaauuucaaauucu

SEQ ID NO: 2129668 - RNA, 19 nt, Artificial Sequence
  Description of Artificial Sequence: Synthetic oligonucleotide
ugguucaagggcuauuuug

SEQ ID NO: 2129669 - RNA, 19 nt, Artificial Sequence
  Description of Artificial Sequence: Synthetic oligonucleotide
uccagagcgguuuaaugcc

SEQ ID NO: 2129670 - RNA, 19 nt, Artificial Sequence
  Description of Artificial Sequence: Synthetic oligonucleotide
ucuaaaugaucugacugug

SEQ ID NO: 2129671 - RNA, 19 nt, Artificial Sequence
  Description of Artificial Sequence: Synthetic oligonucleotide
uggaauucaaauguccucu

SEQ ID NO: 2129672 - RNA, 19 nt, Artificial Sequence
  Description of Artificial Sequence: Synthetic oligonucleotide
cuuuaauuuccacagccuc

SEQ ID NO: 2129673 - RNA, 19 nt, Artificial Sequence
  Description of Artificial Sequence: Synthetic oligonucleotide
gauucaugcuuugccaugg

SEQ ID NO: 2129674 - RNA, 19 nt, Artificial Sequence
  Description of Artificial Sequence: Synthetic oligonucleotide
uucuugagggauauuuucu

SEQ ID NO: 2129675 - RNA, 19 nt, Artificial Sequence
  Description of Artificial Sequence: Synthetic oligonucleotide
ugacugugcacaagcaugc

SEQ ID NO: 2129676 - RNA, 19 nt, Artificial Sequence
  Description of Artificial Sequence: Synthetic oligonucleotide
uguuuccacacaaauuccu

SEQ ID NO: 2129677 - RNA, 19 nt, Artificial Sequence
  Description of Artificial Sequence: Synthetic oligonucleotide
uccugacuuaagcuggagg

SEQ ID NO: 2129678 - RNA, 19 nt, Artificial Sequence
  Description of Artificial Sequence: Synthetic oligonucleotide
uaguucaacagcuggggca

SEQ ID NO: 2129679 - RNA, 19 nt, Artificial Sequence
  Description of Artificial Sequence: Synthetic oligonucleotide
caugcuuugccauggaauc

SEQ ID NO: 2129680 - RNA, 19 nt, Artificial Sequence
  Description of Artificial Sequence: Synthetic oligonucleotide
cuugagggauauuuucucc

SEQ ID NO: 2129681 - RNA, 19 nt, Artificial Sequence
  Description of Artificial Sequence: Synthetic oligonucleotide
cugacugugcacaagcaug

SEQ ID NO: 2129682 - RNA, 19 nt, Artificial Sequence
  Description of Artificial Sequence: Synthetic oligonucleotide
uuggauucaugcuuugcca

SEQ ID NO: 2129683 - RNA, 19 nt, Artificial Sequence
  Description of Artificial Sequence: Synthetic oligonucleotide
uccucaaguauucucccca

SEQ ID NO: 2129684 - RNA, 19 nt, Artificial Sequence
  Description of Artificial Sequence: Synthetic oligonucleotide
uaaugccucuuccauaccu

SEQ ID NO: 2129685 - RNA, 19 nt, Artificial Sequence
  Description of Artificial Sequence: Synthetic oligonucleotide
ugguaacugauuccgaaaa

SEQ ID NO: 2129686 - RNA, 19 nt, Artificial Sequence
  Description of Artificial Sequence: Synthetic oligonucleotide
uguuacauccuguuuccac

SEQ ID NO: 2129687 - RNA, 19 nt, Artificial Sequence
  Description of Artificial Sequence: Synthetic oligonucleotide
uugagggauauuuucucca

SEQ ID NO: 2129688 - RNA, 19 nt, Artificial Sequence
  Description of Artificial Sequence: Synthetic oligonucleotide
uuuccacacaaauuccucu

SEQ ID NO: 2129689 - RNA, 19 nt, Artificial Sequence
  Description of Artificial Sequence: Synthetic oligonucleotide
ucuggucuaaaugaucuga

SEQ ID NO: 2129690 - RNA, 19 nt, Artificial Sequence
  Description of Artificial Sequence: Synthetic oligonucleotide
ugagggauauuuucuccag

SEQ ID NO: 2129691 - RNA, 19 nt, Artificial Sequence
  Description of Artificial Sequence: Synthetic oligonucleotide
gucuguuacauccuguuuc

SEQ ID NO: 2129692 - RNA, 19 nt, Artificial Sequence
  Description of Artificial Sequence: Synthetic oligonucleotide
cacaaauuccucuguguag

SEQ ID NO: 2129693 - RNA, 19 nt, Artificial Sequence
  Description of Artificial Sequence: Synthetic oligonucleotide
uaaucguuuucaaggugug

SEQ ID NO: 2129694 - RNA, 19 nt, Artificial Sequence
  Description of Artificial Sequence: Synthetic oligonucleotide
ugugaucuuccuuggauuc

SEQ ID NO: 2129695 - RNA, 19 nt, Artificial Sequence
  Description of Artificial Sequence: Synthetic oligonucleotide
uuagguaguucaacagcug

SEQ ID NO: 2129696 - RNA, 19 nt, Artificial Sequence
  Description of Artificial Sequence: Synthetic oligonucleotide
cuaaaugaucugacugugc

SEQ ID NO: 2129697 - RNA, 19 nt, Artificial Sequence
  Description of Artificial Sequence: Synthetic oligonucleotide
aguucuuccucaaguauuc

SEQ ID NO: 2129698 - RNA, 19 nt, Artificial Sequence
  Description of Artificial Sequence: Synthetic oligonucleotide
agcgguuuaaugccucuuc

SEQ ID NO: 2129699 - RNA, 19 nt, Artificial Sequence
  Description of Artificial Sequence: Synthetic oligonucleotide
ucuugagggauauuuucuc

SEQ ID NO: 2129700 - RNA, 19 nt, Artificial Sequence
  Description of Artificial Sequence: Synthetic oligonucleotide
cucuuagcaccacaggagc

SEQ ID NO: 2129701 - RNA, 19 nt, Artificial Sequence
  Description of Artificial Sequence: Synthetic oligonucleotide
aaguauucuccccaugcuu

SEQ ID NO: 2129702 - RNA, 19 nt, Artificial Sequence
  Description of Artificial Sequence: Synthetic oligonucleotide
ucuaguucuuccucaagua

SEQ ID NO: 2129703 - RNA, 19 nt, Artificial Sequence
  Description of Artificial Sequence: Synthetic oligonucleotide
acaaacccggcagaggugg

SEQ ID NO: 2129704 - RNA, 19 nt, Artificial Sequence
  Description of Artificial Sequence: Synthetic oligonucleotide
ggcuauuuuggauuuaaac

SEQ ID NO: 2129705 - RNA, 19 nt, Artificial Sequence
  Description of Artificial Sequence: Synthetic oligonucleotide
gguucaagggcuauuuugg

SEQ ID NO: 2129706 - RNA, 19 nt, Artificial Sequence
  Description of Artificial Sequence: Synthetic oligonucleotide
gcuauuuuggauuuaaacu

SEQ ID NO: 2129707 - RNA, 19 nt, Artificial Sequence
  Description of Artificial Sequence: Synthetic oligonucleotide
ugagcggauggccgcagcg

SEQ ID NO: 2129708 - RNA, 19 nt, Artificial Sequence
  Description of Artificial Sequence: Synthetic oligonucleotide
ugacuucagaauaaucuuu

SEQ ID NO: 2129709 - RNA, 19 nt, Artificial Sequence
  Description of Artificial Sequence: Synthetic oligonucleotide
aaugugccugcuugcaccu

SEQ ID NO: 2129710 - RNA, 19 nt, Artificial Sequence
  Description of Artificial Sequence: Synthetic oligonucleotide
ggcucguaggaguaaaacg

SEQ ID NO: 2129711 - RNA, 19 nt, Artificial Sequence
  Description of Artificial Sequence: Synthetic oligonucleotide
aaaugugaucuuccuugga

SEQ ID NO: 2129712 - RNA, 19 nt, Artificial Sequence
  Description of Artificial Sequence: Synthetic oligonucleotide
accuagagcacgucuuagg

SEQ ID NO: 2129713 - RNA, 19 nt, Artificial Sequence
  Description of Artificial Sequence: Synthetic oligonucleotide
ugacuuaagcuggaggcgc

SEQ ID NO: 2129714 - RNA, 19 nt, Artificial Sequence
  Description of Artificial Sequence: Synthetic oligonucleotide
uguggucuggagcugucug

SEQ ID NO: 2129715 - RNA, 19 nt, Artificial Sequence
  Description of Artificial Sequence: Synthetic oligonucleotide
cuagagcacgucuuagggc

SEQ ID NO: 2129716 - RNA, 19 nt, Artificial Sequence
  Description of Artificial Sequence: Synthetic oligonucleotide
uuucaaauucugggaacag

SEQ ID NO: 2129717 - RNA, 19 nt, Artificial Sequence
  Description of Artificial Sequence: Synthetic oligonucleotide
ccugcuugcaccuagagca

SEQ ID NO: 2129718 - RNA, 19 nt, Artificial Sequence
  Description of Artificial Sequence: Synthetic oligonucleotide
ucagguguaaucucgccuu

SEQ ID NO: 2129719 - RNA, 19 nt, Artificial Sequence
  Description of Artificial Sequence: Synthetic oligonucleotide
uuaauuuccacagccucau

SEQ ID NO: 2129720 - RNA, 19 nt, Artificial Sequence
  Description of Artificial Sequence: Synthetic oligonucleotide
uaguucuuccucaaguauu

SEQ ID NO: 2129721 - RNA, 19 nt, Artificial Sequence
  Description of Artificial Sequence: Synthetic oligonucleotide
gaaggcgucgucgcggucg

SEQ ID NO: 2129722 - RNA, 19 nt, Artificial Sequence
  Description of Artificial Sequence: Synthetic oligonucleotide
aucagguguaaucucgccu

SEQ ID NO: 2129723 - RNA, 19 nt, Artificial Sequence
  Description of Artificial Sequence: Synthetic oligonucleotide
ucuuagcaccacaggagca

SEQ ID NO: 2129724 - RNA, 19 nt, Artificial Sequence
  Description of Artificial Sequence: Synthetic oligonucleotide
acaggagcaaucuggaaua

SEQ ID NO: 2129725 - RNA, 19 nt, Artificial Sequence
  Description of Artificial Sequence: Synthetic oligonucleotide
uuuuccuugguaacugauu

SEQ ID NO: 2129726 - RNA, 19 nt, Artificial Sequence
  Description of Artificial Sequence: Synthetic oligonucleotide
cuguuuccacacaaauucc

SEQ ID NO: 2129727 - RNA, 19 nt, Artificial Sequence
  Description of Artificial Sequence: Synthetic oligonucleotide
cuuccucaaguauucuccc

SEQ ID NO: 2129728 - RNA, 19 nt, Artificial Sequence
  Description of Artificial Sequence: Synthetic oligonucleotide
uccauaccugagaaucugc

SEQ ID NO: 2129729 - RNA, 19 nt, Artificial Sequence
  Description of Artificial Sequence: Synthetic oligonucleotide
ucccgucucagaaggaggc

SEQ ID NO: 2129730 - RNA, 19 nt, Artificial Sequence
  Description of Artificial Sequence: Synthetic oligonucleotide
uggggaacugcucgcuacg

SEQ ID NO: 2129731 - RNA, 19 nt, Artificial Sequence
  Description of Artificial Sequence: Synthetic oligonucleotide
gaagcucccgucucagaag

SEQ ID NO: 2129732 - RNA, 19 nt, Artificial Sequence
  Description of Artificial Sequence: Synthetic oligonucleotide
acacaaauuccucugugua

SEQ ID NO: 2129733 - RNA, 19 nt, Artificial Sequence
  Description of Artificial Sequence: Synthetic oligonucleotide
ucguuuucaaggugugucu

SEQ ID NO: 2129734 - RNA, 19 nt, Artificial Sequence
  Description of Artificial Sequence: Synthetic oligonucleotide
cucggcgaagcccagcucc

SEQ ID NO: 2129735 - RNA, 19 nt, Artificial Sequence
  Description of Artificial Sequence: Synthetic oligonucleotide
cuggucuaaaugaucugac

SEQ ID NO: 2129736 - RNA, 19 nt, Artificial Sequence
  Description of Artificial Sequence: Synthetic oligonucleotide
uaaucucgccuucugcuuc

SEQ ID NO: 2129737 - RNA, 19 nt, Artificial Sequence
  Description of Artificial Sequence: Synthetic oligonucleotide
gcucguaggaguaaaacgc

SEQ ID NO: 2129738 - RNA, 19 nt, Artificial Sequence
  Description of Artificial Sequence: Synthetic oligonucleotide
agcgcgugcacgucagcgc

SEQ ID NO: 2129739 - RNA, 19 nt, Artificial Sequence
  Description of Artificial Sequence: Synthetic oligonucleotide
aaacccggcagaggugggc

SEQ ID NO: 2129740 - RNA, 19 nt, Artificial Sequence
  Description of Artificial Sequence: Synthetic oligonucleotide
uucaagggcuauuuuggau

SEQ ID NO: 2129741 - RNA, 19 nt, Artificial Sequence
  Description of Artificial Sequence: Synthetic oligonucleotide
agaauguaaucguuuucaa

SEQ ID NO: 2129742 - RNA, 19 nt, Artificial Sequence
  Description of Artificial Sequence: Synthetic oligonucleotide
cuacgcagccuccaagccg

SEQ ID NO: 2129743 - RNA, 19 nt, Artificial Sequence
  Description of Artificial Sequence: Synthetic oligonucleotide
cugucacaauuucaaauuc

SEQ ID NO: 2129744 - RNA, 19 nt, Artificial Sequence
  Description of Artificial Sequence: Synthetic oligonucleotide
uccagaaauccagagcggu

SEQ ID NO: 2129745 - RNA, 19 nt, Artificial Sequence
  Description of Artificial Sequence: Synthetic oligonucleotide
aaucucgccuucugcuucu

SEQ ID NO: 2129746 - RNA, 19 nt, Artificial Sequence
  Description of Artificial Sequence: Synthetic oligonucleotide
uggauucaugcuuugccau

SEQ ID NO: 2129747 - RNA, 19 nt, Artificial Sequence
  Description of Artificial Sequence: Synthetic oligonucleotide
uccuguuuccacacaaauu

SEQ ID NO: 2129748 - RNA, 19 nt, Artificial Sequence
  Description of Artificial Sequence: Synthetic oligonucleotide
guaguucaacagcuggggc

SEQ ID NO: 2129749 - RNA, 19 nt, Artificial Sequence
  Description of Artificial Sequence: Synthetic oligonucleotide
gaagaggcugcgguggaag

SEQ ID NO: 2129750 - RNA, 19 nt, Artificial Sequence
  Description of Artificial Sequence: Synthetic oligonucleotide
uuagggcccaggcagccac

SEQ ID NO: 2129751 - RNA, 19 nt, Artificial Sequence
  Description of Artificial Sequence: Synthetic oligonucleotide
uuccucaaguauucucccc

SEQ ID NO: 2129752 - RNA, 19 nt, Artificial Sequence
  Description of Artificial Sequence: Synthetic oligonucleotide
uccagugucugaagcuccc

SEQ ID NO: 2129753 - RNA, 19 nt, Artificial Sequence
  Description of Artificial Sequence: Synthetic oligonucleotide
agguaguucaacagcuggg

SEQ ID NO: 2129754 - RNA, 19 nt, Artificial Sequence
  Description of Artificial Sequence: Synthetic oligonucleotide
aggcucguaggaguaaaac

SEQ ID NO: 2129755 - RNA, 19 nt, Artificial Sequence
  Description of Artificial Sequence: Synthetic oligonucleotide
agcggauggccgcagcgcg

SEQ ID NO: 2129756 - RNA, 19 nt, Artificial Sequence
  Description of Artificial Sequence: Synthetic oligonucleotide
gaggcugcgguggaaggcg

SEQ ID NO: 2129757 - RNA, 19 nt, Artificial Sequence
  Description of Artificial Sequence: Synthetic oligonucleotide
gucuaaaugaucugacugu

SEQ ID NO: 2129758 - RNA, 19 nt, Artificial Sequence
  Description of Artificial Sequence: Synthetic oligonucleotide
aaacucgcaggccggcaca

SEQ ID NO: 2129759 - RNA, 19 nt, Artificial Sequence
  Description of Artificial Sequence: Synthetic oligonucleotide
uucaugcuuugccauggaa

SEQ ID NO: 2129760 - RNA, 19 nt, Artificial Sequence
  Description of Artificial Sequence: Synthetic oligonucleotide
agaggcugcgguggaaggc

SEQ ID NO: 2129761 - RNA, 19 nt, Artificial Sequence
  Description of Artificial Sequence: Synthetic oligonucleotide
aaauccagagcgguuuaau

SEQ ID NO: 2129762 - RNA, 19 nt, Artificial Sequence
  Description of Artificial Sequence: Synthetic oligonucleotide
cuugguaacugauuccgaa

SEQ ID NO: 2129763 - RNA, 19 nt, Artificial Sequence
  Description of Artificial Sequence: Synthetic oligonucleotide
aaggcgucgucgcggucgg

SEQ ID NO: 2129764 - RNA, 19 nt, Artificial Sequence
  Description of Artificial Sequence: Synthetic oligonucleotide
caucagguguaaucucgcc

SEQ ID NO: 2129765 - RNA, 19 nt, Artificial Sequence
  Description of Artificial Sequence: Synthetic oligonucleotide
aguaaugugccugcuugca

SEQ ID NO: 2129766 - RNA, 19 nt, Artificial Sequence
  Description of Artificial Sequence: Synthetic oligonucleotide
caggaaggugagcggaugg

SEQ ID NO: 2129767 - RNA, 19 nt, Artificial Sequence
  Description of Artificial Sequence: Synthetic oligonucleotide
guguaaucucgccuucugc

SEQ ID NO: 2129768 - RNA, 19 nt, Artificial Sequence
  Description of Artificial Sequence: Synthetic oligonucleotide
ugcaccuagagcacgucuu

SEQ ID NO: 2129769 - RNA, 19 nt, Artificial Sequence
  Description of Artificial Sequence: Synthetic oligonucleotide
ucaaggugugucuguuaca

SEQ ID NO: 2129770 - RNA, 19 nt, Artificial Sequence
  Description of Artificial Sequence: Synthetic oligonucleotide
ucgccuucugcuucuguca

SEQ ID NO: 2129771 - RNA, 19 nt, Artificial Sequence
  Description of Artificial Sequence: Synthetic oligonucleotide
ucguaggaguaaaacgcau

SEQ ID NO: 2129772 - RNA, 19 nt, Artificial Sequence
  Description of Artificial Sequence: Synthetic oligonucleotide
aaucguuuucaaggugugu

SEQ ID NO: 2129773 - RNA, 19 nt, Artificial Sequence
  Description of Artificial Sequence: Synthetic oligonucleotide
augugaucuuccuuggauu

SEQ ID NO: 2129774 - RNA, 19 nt, Artificial Sequence
  Description of Artificial Sequence: Synthetic oligonucleotide
uugcaccuagagcacgucu

SEQ ID NO: 2129775 - RNA, 19 nt, Artificial Sequence
  Description of Artificial Sequence: Synthetic oligonucleotide
uuccuuggauucaugcuuu

SEQ ID NO: 2129776 - RNA, 19 nt, Artificial Sequence
  Description of Artificial Sequence: Synthetic oligonucleotide
cucccgucucagaaggagg

SEQ ID NO: 2129777 - RNA, 19 nt, Artificial Sequence
  Description of Artificial Sequence: Synthetic oligonucleotide
gaagaggaagaggcugcgg

SEQ ID NO: 2129778 - RNA, 19 nt, Artificial Sequence
  Description of Artificial Sequence: Synthetic oligonucleotide
guaaucguuuucaaggugu

SEQ ID NO: 2129779 - RNA, 19 nt, Artificial Sequence
  Description of Artificial Sequence: Synthetic oligonucleotide
ucugguucaagggcuauuu

SEQ ID NO: 2129780 - RNA, 19 nt, Artificial Sequence
  Description of Artificial Sequence: Synthetic oligonucleotide
guacaccugcagcaggaag

SEQ ID NO: 2129781 - RNA, 19 nt, Artificial Sequence
  Description of Artificial Sequence: Synthetic oligonucleotide
ugaucugacugugcacaag

SEQ ID NO: 2129782 - RNA, 19 nt, Artificial Sequence
  Description of Artificial Sequence: Synthetic oligonucleotide
ugugcacaagcaugcuugu

SEQ ID NO: 2129783 - RNA, 19 nt, Artificial Sequence
  Description of Artificial Sequence: Synthetic oligonucleotide
ugucuguuacauccuguuu

SEQ ID NO: 2129784 - RNA, 19 nt, Artificial Sequence
  Description of Artificial Sequence: Synthetic oligonucleotide
gaagacugccaggacgccc

SEQ ID NO: 2129785 - RNA, 19 nt, Artificial Sequence
  Description of Artificial Sequence: Synthetic oligonucleotide
cacgucuuagggcccaggc

SEQ ID NO: 2129786 - RNA, 19 nt, Artificial Sequence
  Description of Artificial Sequence: Synthetic oligonucleotide
ugucagcacaggugaagac

SEQ ID NO: 2129787 - RNA, 19 nt, Artificial Sequence
  Description of Artificial Sequence: Synthetic oligonucleotide
ugcuugcaccuagagcacg

SEQ ID NO: 2129788 - RNA, 19 nt, Artificial Sequence
  Description of Artificial Sequence: Synthetic oligonucleotide
agcaccacaggagcaaucu

SEQ ID NO: 2129789 - RNA, 19 nt, Artificial Sequence
  Description of Artificial Sequence: Synthetic oligonucleotide
gucccggcagccccgauag

SEQ ID NO: 2129790 - RNA, 19 nt, Artificial Sequence
  Description of Artificial Sequence: Synthetic oligonucleotide
uuuucaaggugugucuguu

SEQ ID NO: 2129791 - RNA, 19 nt, Artificial Sequence
  Description of Artificial Sequence: Synthetic oligonucleotide
cugucuggucuaaaugauc

SEQ ID NO: 2129792 - RNA, 19 nt, Artificial Sequence
  Description of Artificial Sequence: Synthetic oligonucleotide
gaaggaggcucguaggagu

SEQ ID NO: 2129793 - RNA, 19 nt, Artificial Sequence
  Description of Artificial Sequence: Synthetic oligonucleotide
cucgcggcagcagaagagg

SEQ ID NO: 2129794 - RNA, 19 nt, Artificial Sequence
  Description of Artificial Sequence: Synthetic oligonucleotide
cucgccuucugcuucuguc

SEQ ID NO: 2129795 - RNA, 19 nt, Artificial Sequence
  Description of Artificial Sequence: Synthetic oligonucleotide
ucgcuacgcagccuccaag

SEQ ID NO: 2129796 - RNA, 19 nt, Artificial Sequence
  Description of Artificial Sequence: Synthetic oligonucleotide
cuggggaacugcucgcuac

SEQ ID NO: 2129797 - RNA, 19 nt, Artificial Sequence
  Description of Artificial Sequence: Synthetic oligonucleotide
gacgccccaguccacacuc

SEQ ID NO: 2129798 - RNA, 19 nt, Artificial Sequence
  Description of Artificial Sequence: Synthetic oligonucleotide
guucaagggcuauuuugga

SEQ ID NO: 2129799 - RNA, 19 nt, Artificial Sequence
  Description of Artificial Sequence: Synthetic oligonucleotide
ucccgcaguaaugugccug

SEQ ID NO: 2129800 - RNA, 19 nt, Artificial Sequence
  Description of Artificial Sequence: Synthetic oligonucleotide
gucgcggucgggcagcggc

SEQ ID NO: 2129801 - RNA, 19 nt, Artificial Sequence
  Description of Artificial Sequence: Synthetic oligonucleotide
acgucuuagggcccaggca

SEQ ID NO: 2129802 - RNA, 19 nt, Artificial Sequence
  Description of Artificial Sequence: Synthetic oligonucleotide
ggcuccugacuuaagcugg

SEQ ID NO: 2129803 - RNA, 19 nt, Artificial Sequence
  Description of Artificial Sequence: Synthetic oligonucleotide
ucuuagggcccaggcagcc

SEQ ID NO: 2129804 - RNA, 19 nt, Artificial Sequence
  Description of Artificial Sequence: Synthetic oligonucleotide
agagcgguuuaaugccucu

SEQ ID NO: 2129805 - RNA, 19 nt, Artificial Sequence
  Description of Artificial Sequence: Synthetic oligonucleotide
gguguaaucucgccuucug

SEQ ID NO: 2129806 - RNA, 19 nt, Artificial Sequence
  Description of Artificial Sequence: Synthetic oligonucleotide
aggagcaaucuggaauauc

SEQ ID NO: 2129807 - RNA, 19 nt, Artificial Sequence
  Description of Artificial Sequence: Synthetic oligonucleotide
ugcuuugccauggaaucua

SEQ ID NO: 2129808 - RNA, 19 nt, Artificial Sequence
  Description of Artificial Sequence: Synthetic oligonucleotide
acugugcacaagcaugcuu

SEQ ID NO: 2129809 - RNA, 19 nt, Artificial Sequence
  Description of Artificial Sequence: Synthetic oligonucleotide
agaaauccagagcgguuua

SEQ ID NO: 2129810 - RNA, 19 nt, Artificial Sequence
  Description of Artificial Sequence: Synthetic oligonucleotide
cuugugucccagccgccag

SEQ ID NO: 2129811 - RNA, 19 nt, Artificial Sequence
  Description of Artificial Sequence: Synthetic oligonucleotide
guauucuccccaugcuuuc

SEQ ID NO: 2129812 - RNA, 19 nt, Artificial Sequence
  Description of Artificial Sequence: Synthetic oligonucleotide
aggcgcacagaaucuccag

SEQ ID NO: 2129813 - RNA, 19 nt, Artificial Sequence
  Description of Artificial Sequence: Synthetic oligonucleotide
aggacgccccaguccacac

SEQ ID NO: 2129814 - RNA, 19 nt, Artificial Sequence
  Description of Artificial Sequence: Synthetic oligonucleotide
cacuuugcuggggaacugc

SEQ ID NO: 2129815 - RNA, 19 nt, Artificial Sequence
  Description of Artificial Sequence: Synthetic oligonucleotide
aacucgcaggccggcacag

SEQ ID NO: 2129816 - RNA, 19 nt, Artificial Sequence
  Description of Artificial Sequence: Synthetic oligonucleotide
cgucuuagggcccaggcag

SEQ ID NO: 2129817 - RNA, 19 nt, Artificial Sequence
  Description of Artificial Sequence: Synthetic oligonucleotide
ucgcggcagcagaagagga

SEQ ID NO: 2129818 - RNA, 19 nt, Artificial Sequence
  Description of Artificial Sequence: Synthetic oligonucleotide
gcgguuuaaugccucuucc

SEQ ID NO: 2129819 - RNA, 19 nt, Artificial Sequence
  Description of Artificial Sequence: Synthetic oligonucleotide
agggcuauuuuggauuuaa

SEQ ID NO: 2129820 - RNA, 19 nt, Artificial Sequence
  Description of Artificial Sequence: Synthetic oligonucleotide
ccaggcagccacaaacccg

SEQ ID NO: 2129821 - RNA, 19 nt, Artificial Sequence
  Description of Artificial Sequence: Synthetic oligonucleotide
accugagaaucugcucugg

SEQ ID NO: 2129822 - RNA, 19 nt, Artificial Sequence
  Description of Artificial Sequence: Synthetic oligonucleotide
agagcacgucuuagggccc

SEQ ID NO: 2129823 - RNA, 19 nt, Artificial Sequence
  Description of Artificial Sequence: Synthetic oligonucleotide
uauucuccccaugcuuucu

SEQ ID NO: 2129824 - RNA, 19 nt, Artificial Sequence
  Description of Artificial Sequence: Synthetic oligonucleotide
auucaugcuuugccaugga

SEQ ID NO: 2129825 - RNA, 19 nt, Artificial Sequence
  Description of Artificial Sequence: Synthetic oligonucleotide
augaucugacugugcacaa

SEQ ID NO: 2129826 - RNA, 19 nt, Artificial Sequence
  Description of Artificial Sequence: Synthetic oligonucleotide
aguuguggucuggagcugu

SEQ ID NO: 2129827 - RNA, 19 nt, Artificial Sequence
  Description of Artificial Sequence: Synthetic oligonucleotide
auggccgcagcgcgugcac

SEQ ID NO: 2129828 - RNA, 19 nt, Artificial Sequence
  Description of Artificial Sequence: Synthetic oligonucleotide
auagccccagccacgcggg

SEQ ID NO: 2129829 - RNA, 19 nt, Artificial Sequence
  Description of Artificial Sequence: Synthetic oligonucleotide
ucggcgaagcccagcucca

SEQ ID NO: 2129830 - RNA, 19 nt, Artificial Sequence
  Description of Artificial Sequence: Synthetic oligonucleotide
aggccggcacagcacggcg

SEQ ID NO: 2129831 - RNA, 19 nt, Artificial Sequence
  Description of Artificial Sequence: Synthetic oligonucleotide
uggaaggcgucgucgcggu

SEQ ID NO: 2129832 - RNA, 19 nt, Artificial Sequence
  Description of Artificial Sequence: Synthetic oligonucleotide
ucgcggucgggcagcggcg

SEQ ID NO: 2129833 - RNA, 19 nt, Artificial Sequence
  Description of Artificial Sequence: Synthetic oligonucleotide
accacaggagcaaucugga

SEQ ID NO: 2129834 - RNA, 19 nt, Artificial Sequence
  Description of Artificial Sequence: Synthetic oligonucleotide
ggcgcguacaccugcagca

SEQ ID NO: 2129835 - RNA, 19 nt, Artificial Sequence
  Description of Artificial Sequence: Synthetic oligonucleotide
cagcgcgugcacgucagcg

SEQ ID NO: 2129836 - RNA, 19 nt, Artificial Sequence
  Description of Artificial Sequence: Synthetic oligonucleotide
ugaagacugccaggacgcc

SEQ ID NO: 2129837 - RNA, 19 nt, Artificial Sequence
  Description of Artificial Sequence: Synthetic oligonucleotide
cacgucagcgccccggguc

SEQ ID NO: 2129838 - RNA, 19 nt, Artificial Sequence
  Description of Artificial Sequence: Synthetic oligonucleotide
cagagcgguuuaaugccuc

SEQ ID NO: 2129839 - RNA, 19 nt, Artificial Sequence
  Description of Artificial Sequence: Synthetic oligonucleotide
ggaaggugagcggauggcc

SEQ ID NO: 2129840 - RNA, 19 nt, Artificial Sequence
  Description of Artificial Sequence: Synthetic oligonucleotide
acagcacggcggcucgcgg

SEQ ID NO: 2129841 - RNA, 19 nt, Artificial Sequence
  Description of Artificial Sequence: Synthetic oligonucleotide
guuuucaaggugugucugu

SEQ ID NO: 2129842 - RNA, 19 nt, Artificial Sequence
  Description of Artificial Sequence: Synthetic oligonucleotide
cuuagcaccacaggagcaa

SEQ ID NO: 2129843 - RNA, 19 nt, Artificial Sequence
  Description of Artificial Sequence: Synthetic oligonucleotide
augcuuugccauggaaucu

SEQ ID NO: 2129844 - RNA, 19 nt, Artificial Sequence
  Description of Artificial Sequence: Synthetic oligonucleotide
uuagcaccacaggagcaau

SEQ ID NO: 2129845 - RNA, 19 nt, Artificial Sequence
  Description of Artificial Sequence: Synthetic oligonucleotide
cugcuugcaccuagagcac

SEQ ID NO: 2129846 - RNA, 19 nt, Artificial Sequence
  Description of Artificial Sequence: Synthetic oligonucleotide
caaacccggcagagguggg

SEQ ID NO: 2129847 - RNA, 19 nt, Artificial Sequence
  Description of Artificial Sequence: Synthetic oligonucleotide
ugcucgcuacgcagccucc

SEQ ID NO: 2129848 - RNA, 19 nt, Artificial Sequence
  Description of Artificial Sequence: Synthetic oligonucleotide
gaucuuccuuggauucaug

SEQ ID NO: 2129849 - RNA, 19 nt, Artificial Sequence
  Description of Artificial Sequence: Synthetic oligonucleotide
gcacaagcaugcuuguguc

SEQ ID NO: 2129850 - RNA, 19 nt, Artificial Sequence
  Description of Artificial Sequence: Synthetic oligonucleotide
caccuagagcacgucuuag

SEQ ID NO: 2129851 - RNA, 19 nt, Artificial Sequence
  Description of Artificial Sequence: Synthetic oligonucleotide
gagcggauggccgcagcgc

SEQ ID NO: 2129852 - RNA, 19 nt, Artificial Sequence
  Description of Artificial Sequence: Synthetic oligonucleotide
aaggaggcucguaggagua

SEQ ID NO: 2129853 - RNA, 19 nt, Artificial Sequence
  Description of Artificial Sequence: Synthetic oligonucleotide
cuaguucuuccucaaguau

SEQ ID NO: 2129854 - RNA, 19 nt, Artificial Sequence
  Description of Artificial Sequence: Synthetic oligonucleotide
gcugucagcacaggugaag

SEQ ID NO: 2129855 - RNA, 19 nt, Artificial Sequence
  Description of Artificial Sequence: Synthetic oligonucleotide
gcggcagcagaagaggaag

SEQ ID NO: 2129856 - RNA, 19 nt, Artificial Sequence
  Description of Artificial Sequence: Synthetic oligonucleotide
cagccuccaagccggugcc

SEQ ID NO: 2129857 - RNA, 19 nt, Artificial Sequence
  Description of Artificial Sequence: Synthetic oligonucleotide
gcuacgcagccuccaagcc

SEQ ID NO: 2129858 - RNA, 19 nt, Artificial Sequence
  Description of Artificial Sequence: Synthetic oligonucleotide
ugugucccagccgccaguc

SEQ ID NO: 2129859 - RNA, 19 nt, Artificial Sequence
  Description of Artificial Sequence: Synthetic oligonucleotide
gaaauccagagcgguuuaa

SEQ ID NO: 2129860 - RNA, 19 nt, Artificial Sequence
  Description of Artificial Sequence: Synthetic oligonucleotide
gaugcuccuucccgcagua

SEQ ID NO: 2129861 - RNA, 19 nt, Artificial Sequence
  Description of Artificial Sequence: Synthetic oligonucleotide
gacuuaagcuggaggcgca

SEQ ID NO: 2129862 - RNA, 19 nt, Artificial Sequence
  Description of Artificial Sequence: Synthetic oligonucleotide
caaguauucuccccaugcu

SEQ ID NO: 2129863 - RNA, 19 nt, Artificial Sequence
  Description of Artificial Sequence: Synthetic oligonucleotide
gugucugaagcucccgucu

SEQ ID NO: 2129864 - RNA, 19 nt, Artificial Sequence
  Description of Artificial Sequence: Synthetic oligonucleotide
ucgcaggccggcacagcac

SEQ ID NO: 2129865 - RNA, 19 nt, Artificial Sequence
  Description of Artificial Sequence: Synthetic oligonucleotide
uggaggcgcacagaaucuc

SEQ ID NO: 2129866 - RNA, 19 nt, Artificial Sequence
  Description of Artificial Sequence: Synthetic oligonucleotide
gaggcgcacagaaucucca

SEQ ID NO: 2129867 - RNA, 19 nt, Artificial Sequence
  Description of Artificial Sequence: Synthetic oligonucleotide
cucgcaggccggcacagca

SEQ ID NO: 2129868 - RNA, 19 nt, Artificial Sequence
  Description of Artificial Sequence: Synthetic oligonucleotide
agguguaaucucgccuucu

SEQ ID NO: 2129869 - RNA, 19 nt, Artificial Sequence
  Description of Artificial Sequence: Synthetic oligonucleotide
ccacacaaauuccucugug

SEQ ID NO: 2129870 - RNA, 19 nt, Artificial Sequence
  Description of Artificial Sequence: Synthetic oligonucleotide
cagguguaaucucgccuuc

SEQ ID NO: 2129871 - RNA, 19 nt, Artificial Sequence
  Description of Artificial Sequence: Synthetic oligonucleotide
cagcacggcggcucgcggc

SEQ ID NO: 2129872 - RNA, 19 nt, Artificial Sequence
  Description of Artificial Sequence: Synthetic oligonucleotide
gccucuuccauaccugaga

SEQ ID NO: 2129873 - RNA, 19 nt, Artificial Sequence
  Description of Artificial Sequence: Synthetic oligonucleotide
cgucucagaaggaggcucg

SEQ ID NO: 2129874 - RNA, 19 nt, Artificial Sequence
  Description of Artificial Sequence: Synthetic oligonucleotide
gcucccgucucagaaggag

SEQ ID NO: 2129875 - RNA, 19 nt, Artificial Sequence
  Description of Artificial Sequence: Synthetic oligonucleotide
ggaggcgcacagaaucucc

SEQ ID NO: 2129876 - RNA, 19 nt, Artificial Sequence
  Description of Artificial Sequence: Synthetic oligonucleotide
cccgauagccccagccacg

SEQ ID NO: 2129877 - RNA, 19 nt, Artificial Sequence
  Description of Artificial Sequence: Synthetic oligonucleotide
guaaucucgccuucugcuu

SEQ ID NO: 2129878 - RNA, 19 nt, Artificial Sequence
  Description of Artificial Sequence: Synthetic oligonucleotide
agaaucugcucugguucaa

SEQ ID NO: 2129879 - RNA, 19 nt, Artificial Sequence
  Description of Artificial Sequence: Synthetic oligonucleotide
uccaagccggugccgccuc

SEQ ID NO: 2129880 - RNA, 19 nt, Artificial Sequence
  Description of Artificial Sequence: Synthetic oligonucleotide
acccggcagaggugggcuc

SEQ ID NO: 2129881 - RNA, 19 nt, Artificial Sequence
  Description of Artificial Sequence: Synthetic oligonucleotide
cuccugacuuaagcuggag

SEQ ID NO: 2129882 - RNA, 19 nt, Artificial Sequence
  Description of Artificial Sequence: Synthetic oligonucleotide
cugagaaucugcucugguu

SEQ ID NO: 2129883 - RNA, 19 nt, Artificial Sequence
  Description of Artificial Sequence: Synthetic oligonucleotide
gccacaaacccggcagagg

SEQ ID NO: 2129884 - RNA, 19 nt, Artificial Sequence
  Description of Artificial Sequence: Synthetic oligonucleotide
caagccggugccgccucgg

SEQ ID NO: 2129885 - RNA, 19 nt, Artificial Sequence
  Description of Artificial Sequence: Synthetic oligonucleotide
gugcacaagcaugcuugug

SEQ ID NO: 2129886 - RNA, 19 nt, Artificial Sequence
  Description of Artificial Sequence: Synthetic oligonucleotide
gauggccgcagcgcgugca

SEQ ID NO: 2129887 - RNA, 19 nt, Artificial Sequence
  Description of Artificial Sequence: Synthetic oligonucleotide
acagccucaucagguguaa

SEQ ID NO: 2129888 - RNA, 19 nt, Artificial Sequence
  Description of Artificial Sequence: Synthetic oligonucleotide
aagggcuauuuuggauuua

SEQ ID NO: 2129889 - RNA, 19 nt, Artificial Sequence
  Description of Artificial Sequence: Synthetic oligonucleotide
uggccgcagcgcgugcacg

SEQ ID NO: 2129890 - RNA, 19 nt, Artificial Sequence
  Description of Artificial Sequence: Synthetic oligonucleotide
gcgcgugcacgucagcgcc

SEQ ID NO: 2129891 - RNA, 19 nt, Artificial Sequence
  Description of Artificial Sequence: Synthetic oligonucleotide
gugagcggauggccgcagc

SEQ ID NO: 2129892 - RNA, 19 nt, Artificial Sequence
  Description of Artificial Sequence: Synthetic oligonucleotide
uucccgcaguaaugugccu

SEQ ID NO: 2129893 - RNA, 19 nt, Artificial Sequence
  Description of Artificial Sequence: Synthetic oligonucleotide
gccccagccacgcgggccg

SEQ ID NO: 2129894 - RNA, 19 nt, Artificial Sequence
  Description of Artificial Sequence: Synthetic oligonucleotide
ggugccgccucggcgaagc

SEQ ID NO: 2129895 - RNA, 19 nt, Artificial Sequence
  Description of Artificial Sequence: Synthetic oligonucleotide
cccggcagccccgauagcc

SEQ ID NO: 2129896 - RNA, 19 nt, Artificial Sequence
  Description of Artificial Sequence: Synthetic oligonucleotide
gcucgcggcagcagaagag

SEQ ID NO: 2129897 - RNA, 19 nt, Artificial Sequence
  Description of Artificial Sequence: Synthetic oligonucleotide
gcuuugccauggaaucuag

SEQ ID NO: 2129898 - RNA, 19 nt, Artificial Sequence
  Description of Artificial Sequence: Synthetic oligonucleotide
cuggaggcgcacagaaucu

SEQ ID NO: 2129899 - RNA, 19 nt, Artificial Sequence
  Description of Artificial Sequence: Synthetic oligonucleotide
gccucaucagguguaaucu

SEQ ID NO: 2129900 - RNA, 19 nt, Artificial Sequence
  Description of Artificial Sequence: Synthetic oligonucleotide
gucgucgcggucgggcagc

SEQ ID NO: 2129901 - RNA, 19 nt, Artificial Sequence
  Description of Artificial Sequence: Synthetic oligonucleotide
ggagcugucuggucuaaau

SEQ ID NO: 2129902 - RNA, 19 nt, Artificial Sequence
  Description of Artificial Sequence: Synthetic oligonucleotide
cugaagcucccgucucaga

SEQ ID NO: 2129903 - RNA, 19 nt, Artificial Sequence
  Description of Artificial Sequence: Synthetic oligonucleotide
guuguggucuggagcuguc

SEQ ID NO: 2129904 - RNA, 19 nt, Artificial Sequence
  Description of Artificial Sequence: Synthetic oligonucleotide
gaggcucguaggaguaaaa

SEQ ID NO: 2129905 - RNA, 19 nt, Artificial Sequence
  Description of Artificial Sequence: Synthetic oligonucleotide
acgccccaguccacacucc

SEQ ID NO: 2129906 - RNA, 19 nt, Artificial Sequence
  Description of Artificial Sequence: Synthetic oligonucleotide
gcaggaaggugagcggaug

SEQ ID NO: 2129907 - RNA, 19 nt, Artificial Sequence
  Description of Artificial Sequence: Synthetic oligonucleotide
gaggugggcuccugacuua

SEQ ID NO: 2129908 - RNA, 19 nt, Artificial Sequence
  Description of Artificial Sequence: Synthetic oligonucleotide
gagcacgucuuagggccca

SEQ ID NO: 2129909 - RNA, 19 nt, Artificial Sequence
  Description of Artificial Sequence: Synthetic oligonucleotide
gugucccagccgccagucc

SEQ ID NO: 2129910 - RNA, 19 nt, Artificial Sequence
  Description of Artificial Sequence: Synthetic oligonucleotide
uggagcugucuggucuaaa

SEQ ID NO: 2129911 - RNA, 19 nt, Artificial Sequence
  Description of Artificial Sequence: Synthetic oligonucleotide
cagccacaaacccggcaga

SEQ ID NO: 2129912 - RNA, 19 nt, Artificial Sequence
  Description of Artificial Sequence: Synthetic oligonucleotide
ccucuuccauaccugagaa

SEQ ID NO: 2129913 - RNA, 19 nt, Artificial Sequence
  Description of Artificial Sequence: Synthetic oligonucleotide
ccacaaacccggcagaggu

SEQ ID NO: 2129914 - RNA, 19 nt, Artificial Sequence
  Description of Artificial Sequence: Synthetic oligonucleotide
ucgucgcggucgggcagcg

SEQ ID NO: 2129915 - RNA, 19 nt, Artificial Sequence
  Description of Artificial Sequence: Synthetic oligonucleotide
ggcgucgucgcggucgggc

SEQ ID NO: 2129916 - RNA, 19 nt, Artificial Sequence
  Description of Artificial Sequence: Synthetic oligonucleotide
ccccgauagccccagccac

SEQ ID NO: 2129917 - RNA, 19 nt, Artificial Sequence
  Description of Artificial Sequence: Synthetic oligonucleotide
agacugccaggacgcccca

SEQ ID NO: 2129918 - RNA, 19 nt, Artificial Sequence
  Description of Artificial Sequence: Synthetic oligonucleotide
ggggaacugcucgcuacgc

SEQ ID NO: 2129919 - RNA, 19 nt, Artificial Sequence
  Description of Artificial Sequence: Synthetic oligonucleotide
cuguuacauccuguuucca

SEQ ID NO: 2129920 - RNA, 19 nt, Artificial Sequence
  Description of Artificial Sequence: Synthetic oligonucleotide
agcacgucuuagggcccag

SEQ ID NO: 2129921 - RNA, 19 nt, Artificial Sequence
  Description of Artificial Sequence: Synthetic oligonucleotide
cgcaggccggcacagcacg

SEQ ID NO: 2129922 - RNA, 19 nt, Artificial Sequence
  Description of Artificial Sequence: Synthetic oligonucleotide
cucgcuacgcagccuccaa

SEQ ID NO: 2129923 - RNA, 19 nt, Artificial Sequence
  Description of Artificial Sequence: Synthetic oligonucleotide
ccgauagccccagccacgc

SEQ ID NO: 2129924 - RNA, 19 nt, Artificial Sequence
  Description of Artificial Sequence: Synthetic oligonucleotide
ccauggaaucuaguucuuc

SEQ ID NO: 2129925 - RNA, 19 nt, Artificial Sequence
  Description of Artificial Sequence: Synthetic oligonucleotide
ggcucgcggcagcagaaga

SEQ ID NO: 2129926 - RNA, 19 nt, Artificial Sequence
  Description of Artificial Sequence: Synthetic oligonucleotide
ggggcaugaccuggaauuc

SEQ ID NO: 2129927 - RNA, 19 nt, Artificial Sequence
  Description of Artificial Sequence: Synthetic oligonucleotide
cacggcggcucgcggcagc

SEQ ID NO: 2129928 - RNA, 19 nt, Artificial Sequence
  Description of Artificial Sequence: Synthetic oligonucleotide
gccccgauagccccagcca

SEQ ID NO: 2129929 - RNA, 19 nt, Artificial Sequence
  Description of Artificial Sequence: Synthetic oligonucleotide
ggcgcacagaaucuccagu

SEQ ID NO: 2129930 - RNA, 19 nt, Artificial Sequence
  Description of Artificial Sequence: Synthetic oligonucleotide
gucagcgccccgggucccg

SEQ ID NO: 2129931 - RNA, 19 nt, Artificial Sequence
  Description of Artificial Sequence: Synthetic oligonucleotide
ccuugguaacugauuccga

SEQ ID NO: 2129932 - RNA, 19 nt, Artificial Sequence
  Description of Artificial Sequence: Synthetic oligonucleotide
ucccggcagccccgauagc

SEQ ID NO: 2129933 - RNA, 19 nt, Artificial Sequence
  Description of Artificial Sequence: Synthetic oligonucleotide
ccauaccugagaaucugcu

SEQ ID NO: 2129934 - RNA, 19 nt, Artificial Sequence
  Description of Artificial Sequence: Synthetic oligonucleotide
cuuagggcccaggcagcca

SEQ ID NO: 2129935 - RNA, 19 nt, Artificial Sequence
  Description of Artificial Sequence: Synthetic oligonucleotide
gggccgcccgcccacuuug

SEQ ID NO: 2129936 - RNA, 19 nt, Artificial Sequence
  Description of Artificial Sequence: Synthetic oligonucleotide
ggaggcucguaggaguaaa

SEQ ID NO: 2129937 - RNA, 19 nt, Artificial Sequence
  Description of Artificial Sequence: Synthetic oligonucleotide
gcaccuagagcacgucuua

SEQ ID NO: 2129938 - RNA, 19 nt, Artificial Sequence
  Description of Artificial Sequence: Synthetic oligonucleotide
gggcaugaccuggaauuca

SEQ ID NO: 2129939 - RNA, 19 nt, Artificial Sequence
  Description of Artificial Sequence: Synthetic oligonucleotide
cagccacgcgggccgcccg

SEQ ID NO: 2129940 - RNA, 19 nt, Artificial Sequence
  Description of Artificial Sequence: Synthetic oligonucleotide
ggccggcacagcacggcgg

SEQ ID NO: 2129941 - RNA, 19 nt, Artificial Sequence
  Description of Artificial Sequence: Synthetic oligonucleotide
caggacgccccaguccaca

SEQ ID NO: 2129942 - RNA, 19 nt, Artificial Sequence
  Description of Artificial Sequence: Synthetic oligonucleotide
ggugagcggauggccgcag

SEQ ID NO: 2129943 - RNA, 19 nt, Artificial Sequence
  Description of Artificial Sequence: Synthetic oligonucleotide
acacuccugcccagucugu

SEQ ID NO: 2129944 - RNA, 19 nt, Artificial Sequence
  Description of Artificial Sequence: Synthetic oligonucleotide
aucucgccuucugcuucug

SEQ ID NO: 2129945 - RNA, 19 nt, Artificial Sequence
  Description of Artificial Sequence: Synthetic oligonucleotide
cucuuccauaccugagaau

SEQ ID NO: 2129946 - RNA, 19 nt, Artificial Sequence
  Description of Artificial Sequence: Synthetic oligonucleotide
gcccacuuugcuggggaac

SEQ ID NO: 2129947 - RNA, 19 nt, Artificial Sequence
  Description of Artificial Sequence: Synthetic oligonucleotide
agcggcgcguacaccugca

SEQ ID NO: 2129948 - RNA, 19 nt, Artificial Sequence
  Description of Artificial Sequence: Synthetic oligonucleotide
cccgggucccggcagcccc

SEQ ID NO: 2129949 - RNA, 19 nt, Artificial Sequence
  Description of Artificial Sequence: Synthetic oligonucleotide
ucccagccgccaguccagu

SEQ ID NO: 2129950 - RNA, 19 nt, Artificial Sequence
  Description of Artificial Sequence: Synthetic oligonucleotide
agggcccaggcagccacaa

SEQ ID NO: 2129951 - RNA, 19 nt, Artificial Sequence
  Description of Artificial Sequence: Synthetic oligonucleotide
gcacgucuuagggcccagg

SEQ ID NO: 2129952 - RNA, 19 nt, Artificial Sequence
  Description of Artificial Sequence: Synthetic oligonucleotide
gcgugcacgucagcgcccc

SEQ ID NO: 2129953 - RNA, 19 nt, Artificial Sequence
  Description of Artificial Sequence: Synthetic oligonucleotide
agcucccgucucagaagga

SEQ ID NO: 2129954 - RNA, 19 nt, Artificial Sequence
  Description of Artificial Sequence: Synthetic oligonucleotide
gcggcgcguacaccugcag

SEQ ID NO: 2129955 - RNA, 19 nt, Artificial Sequence
  Description of Artificial Sequence: Synthetic oligonucleotide
gcaggccggcacagcacgg

SEQ ID NO: 2129956 - RNA, 19 nt, Artificial Sequence
  Description of Artificial Sequence: Synthetic oligonucleotide
acggcggcucgcggcagca

SEQ ID NO: 2129957 - RNA, 19 nt, Artificial Sequence
  Description of Artificial Sequence: Synthetic oligonucleotide
cccggcagaggugggcucc

SEQ ID NO: 2129958 - RNA, 19 nt, Artificial Sequence
  Description of Artificial Sequence: Synthetic oligonucleotide
ccgcccgcccacuuugcug

SEQ ID NO: 2129959 - RNA, 19 nt, Artificial Sequence
  Description of Artificial Sequence: Synthetic oligonucleotide
gcuccugacuuaagcugga

SEQ ID NO: 2129960 - RNA, 19 nt, Artificial Sequence
  Description of Artificial Sequence: Synthetic oligonucleotide
cugguucaagggcuauuuu

SEQ ID NO: 2129961 - RNA, 19 nt, Artificial Sequence
  Description of Artificial Sequence: Synthetic oligonucleotide
aggcugcgguggaaggcgu

SEQ ID NO: 2129962 - RNA, 19 nt, Artificial Sequence
  Description of Artificial Sequence: Synthetic oligonucleotide
cggcgcguacaccugcagc

SEQ ID NO: 2129963 - RNA, 19 nt, Artificial Sequence
  Description of Artificial Sequence: Synthetic oligonucleotide
ggauggccgcagcgcgugc

SEQ ID NO: 2129964 - RNA, 19 nt, Artificial Sequence
  Description of Artificial Sequence: Synthetic oligonucleotide
gugccgccucggcgaagcc

SEQ ID NO: 2129965 - RNA, 19 nt, Artificial Sequence
  Description of Artificial Sequence: Synthetic oligonucleotide
gagcgguuuaaugccucuu

SEQ ID NO: 2129966 - RNA, 19 nt, Artificial Sequence
  Description of Artificial Sequence: Synthetic oligonucleotide
ggucccggcagccccgaua

SEQ ID NO: 2129967 - RNA, 19 nt, Artificial Sequence
  Description of Artificial Sequence: Synthetic oligonucleotide
cuggggcaugaccuggaau

SEQ ID NO: 2129968 - RNA, 19 nt, Artificial Sequence
  Description of Artificial Sequence: Synthetic oligonucleotide
ccaagccggugccgccucg

SEQ ID NO: 2129969 - RNA, 19 nt, Artificial Sequence
  Description of Artificial Sequence: Synthetic oligonucleotide
ccacuuugcuggggaacug

SEQ ID NO: 2129970 - RNA, 19 nt, Artificial Sequence
  Description of Artificial Sequence: Synthetic oligonucleotide
gcggucgggcagcggcgcg

SEQ ID NO: 2129971 - RNA, 19 nt, Artificial Sequence
  Description of Artificial Sequence: Synthetic oligonucleotide
gcgucgucgcggucgggca

SEQ ID NO: 2129972 - RNA, 19 nt, Artificial Sequence
  Description of Artificial Sequence: Synthetic oligonucleotide
gucucagaaggaggcucgu

SEQ ID NO: 2129973 - RNA, 19 nt, Artificial Sequence
  Description of Artificial Sequence: Synthetic oligonucleotide
gcuggggaacugcucgcua

SEQ ID NO: 2129974 - RNA, 19 nt, Artificial Sequence
  Description of Artificial Sequence: Synthetic oligonucleotide
cacgcgggccgcccgccca

SEQ ID NO: 2129975 - RNA, 19 nt, Artificial Sequence
  Description of Artificial Sequence: Synthetic oligonucleotide
gcuugcaccuagagcacgu

SEQ ID NO: 2129976 - RNA, 19 nt, Artificial Sequence
  Description of Artificial Sequence: Synthetic oligonucleotide
gcagcgcgugcacgucagc

SEQ ID NO: 2129977 - RNA, 19 nt, Artificial Sequence
  Description of Artificial Sequence: Synthetic oligonucleotide
agccgccaguccagugucu

SEQ ID NO: 2129978 - RNA, 19 nt, Artificial Sequence
  Description of Artificial Sequence: Synthetic oligonucleotide
ccugagaaucugcucuggu

SEQ ID NO: 2129979 - RNA, 19 nt, Artificial Sequence
  Description of Artificial Sequence: Synthetic oligonucleotide
gucgggcagcggcgcguac

SEQ ID NO: 2129980 - RNA, 19 nt, Artificial Sequence
  Description of Artificial Sequence: Synthetic oligonucleotide
ccagccgccaguccagugu

SEQ ID NO: 2129981 - RNA, 19 nt, Artificial Sequence
  Description of Artificial Sequence: Synthetic oligonucleotide
cguaggaguaaaacgcauu

SEQ ID NO: 2129982 - RNA, 19 nt, Artificial Sequence
  Description of Artificial Sequence: Synthetic oligonucleotide
cagccccgauagccccagc

SEQ ID NO: 2129983 - RNA, 19 nt, Artificial Sequence
  Description of Artificial Sequence: Synthetic oligonucleotide
gcccgcccacuuugcuggg

SEQ ID NO: 2129984 - RNA, 19 nt, Artificial Sequence
  Description of Artificial Sequence: Synthetic oligonucleotide
gcucgcuacgcagccucca

SEQ ID NO: 2129985 - RNA, 19 nt, Artificial Sequence
  Description of Artificial Sequence: Synthetic oligonucleotide
augugccugcuugcaccua

SEQ ID NO: 2129986 - RNA, 19 nt, Artificial Sequence
  Description of Artificial Sequence: Synthetic oligonucleotide
cccagccgccaguccagug

SEQ ID NO: 2129987 - RNA, 19 nt, Artificial Sequence
  Description of Artificial Sequence: Synthetic oligonucleotide
cccacuuugcuggggaacu

SEQ ID NO: 2129988 - RNA, 19 nt, Artificial Sequence
  Description of Artificial Sequence: Synthetic oligonucleotide
cuccaagccggugccgccu

SEQ ID NO: 2129989 - RNA, 19 nt, Artificial Sequence
  Description of Artificial Sequence: Synthetic oligonucleotide
cgauagccccagccacgcg

SEQ ID NO: 2129990 - RNA, 19 nt, Artificial Sequence
  Description of Artificial Sequence: Synthetic oligonucleotide
cgucgucgcggucgggcag

SEQ ID NO: 2129991 - RNA, 19 nt, Artificial Sequence
  Description of Artificial Sequence: Synthetic oligonucleotide
ccgcccacuuugcugggga

SEQ ID NO: 2129992 - RNA, 19 nt, Artificial Sequence
  Description of Artificial Sequence: Synthetic oligonucleotide
ccucaaguauucuccccau

SEQ ID NO: 2129993 - RNA, 19 nt, Artificial Sequence
  Description of Artificial Sequence: Synthetic oligonucleotide
cgcgugcacgucagcgccc

SEQ ID NO: 2129994 - RNA, 19 nt, Artificial Sequence
  Description of Artificial Sequence: Synthetic oligonucleotide
aggcgucgucgcggucggg

SEQ ID NO: 2129995 - RNA, 19 nt, Artificial Sequence
  Description of Artificial Sequence: Synthetic oligonucleotide
caggagcaaucuggaauau

SEQ ID NO: 2129996 - RNA, 19 nt, Artificial Sequence
  Description of Artificial Sequence: Synthetic oligonucleotide
ggacgccccaguccacacu

SEQ ID NO: 2129997 - RNA, 19 nt, Artificial Sequence
  Description of Artificial Sequence: Synthetic oligonucleotide
cccgcccacuuugcugggg

SEQ ID NO: 2129998 - RNA, 19 nt, Artificial Sequence
  Description of Artificial Sequence: Synthetic oligonucleotide
cggauggccgcagcgcgug

SEQ ID NO: 2129999 - RNA, 19 nt, Artificial Sequence
  Description of Artificial Sequence: Synthetic oligonucleotide
cgcggcagcagaagaggaa

SEQ ID NO: 2130000 - RNA, 19 nt, Artificial Sequence
  Description of Artificial Sequence: Synthetic oligonucleotide
ccgccaguccagugucuga

SEQ ID NO: 2130001 - RNA, 19 nt, Artificial Sequence
  Description of Artificial Sequence: Synthetic oligonucleotide
cugcgguggaaggcgucgu

SEQ ID NO: 2130002 - RNA, 19 nt, Artificial Sequence
  Description of Artificial Sequence: Synthetic oligonucleotide
ggccgcccgcccacuuugc

SEQ ID NO: 2130003 - RNA, 19 nt, Artificial Sequence
  Description of Artificial Sequence: Synthetic oligonucleotide
ccacgcgggccgcccgccc

SEQ ID NO: 2130004 - RNA, 19 nt, Artificial Sequence
  Description of Artificial Sequence: Synthetic oligonucleotide
gcacggcggcucgcggcag

SEQ ID NO: 2130005 - RNA, 19 nt, Artificial Sequence
  Description of Artificial Sequence: Synthetic oligonucleotide
gccgcagcgcgugcacguc

SEQ ID NO: 2130006 - RNA, 19 nt, Artificial Sequence
  Description of Artificial Sequence: Synthetic oligonucleotide
gccauggaaucuaguucuu

SEQ ID NO: 2130007 - RNA, 19 nt, Artificial Sequence
  Description of Artificial Sequence: Synthetic oligonucleotide
gcccagucugucugccuuu

SEQ ID NO: 2130008 - RNA, 19 nt, Artificial Sequence
  Description of Artificial Sequence: Synthetic oligonucleotide
cggcucgcggcagcagaag

SEQ ID NO: 2130009 - RNA, 19 nt, Artificial Sequence
  Description of Artificial Sequence: Synthetic oligonucleotide
ccgccucggcgaagcccag

SEQ ID NO: 2130010 - RNA, 19 nt, Artificial Sequence
  Description of Artificial Sequence: Synthetic oligonucleotide
gccgcccgcccacuuugcu

SEQ ID NO: 2130011 - RNA, 19 nt, Artificial Sequence
  Description of Artificial Sequence: Synthetic oligonucleotide
gcacgucagcgccccgggu

SEQ ID NO: 2130012 - RNA, 19 nt, Artificial Sequence
  Description of Artificial Sequence: Synthetic oligonucleotide
gcggauggccgcagcgcgu

SEQ ID NO: 2130013 - RNA, 19 nt, Artificial Sequence
  Description of Artificial Sequence: Synthetic oligonucleotide
cgccaguccagugucugau

SEQ ID NO: 2130014 - RNA, 19 nt, Artificial Sequence
  Description of Artificial Sequence: Synthetic oligonucleotide
ccccagccacgcgggccgc

SEQ ID NO: 2130015 - RNA, 19 nt, Artificial Sequence
  Description of Artificial Sequence: Synthetic oligonucleotide
cgucgcggucgggcagcgg

SEQ ID NO: 2130016 - RNA, 19 nt, Artificial Sequence
  Description of Artificial Sequence: Synthetic oligonucleotide
ccggugccgccucggcgaa

SEQ ID NO: 2130017 - RNA, 19 nt, Artificial Sequence
  Description of Artificial Sequence: Synthetic oligonucleotide
ccgcaguaaugugccugcu

SEQ ID NO: 2130018 - RNA, 19 nt, Artificial Sequence
  Description of Artificial Sequence: Synthetic oligonucleotide
cggugccgccucggcgaag

SEQ ID NO: 2130019 - RNA, 19 nt, Artificial Sequence
  Description of Artificial Sequence: Synthetic oligonucleotide
ccggcagaggugggcuccu

SEQ ID NO: 2130020 - RNA, 19 nt, Artificial Sequence
  Description of Artificial Sequence: Synthetic oligonucleotide
gcgggccgcccgcccacuu

SEQ ID NO: 2130021 - RNA, 19 nt, Artificial Sequence
  Description of Artificial Sequence: Synthetic oligonucleotide
cgggucccggcagccccga

SEQ ID NO: 2130022 - RNA, 19 nt, Artificial Sequence
  Description of Artificial Sequence: Synthetic oligonucleotide
cgcgggccgcccgcccacu

SEQ ID NO: 2130023 - RNA, 19 nt, Artificial Sequence
  Description of Artificial Sequence: Synthetic oligonucleotide
aaaguuucaaaauucagcc

SEQ ID NO: 2130024 - RNA, 19 nt, Artificial Sequence
  Description of Artificial Sequence: Synthetic oligonucleotide
uaaaacuucaggaagacag

SEQ ID NO: 2130025 - RNA, 19 nt, Artificial Sequence
  Description of Artificial Sequence: Synthetic oligonucleotide
ucaaaauucagccuuagcu

SEQ ID NO: 2130026 - RNA, 19 nt, Artificial Sequence
  Description of Artificial Sequence: Synthetic oligonucleotide
agaagcuucaccuucauag

SEQ ID NO: 2130027 - RNA, 19 nt, Artificial Sequence
  Description of Artificial Sequence: Synthetic oligonucleotide
aacagcauuuaucuguucg

SEQ ID NO: 2130028 - RNA, 19 nt, Artificial Sequence
  Description of Artificial Sequence: Synthetic oligonucleotide
aaacaaaguauguaaaagu

SEQ ID NO: 2130029 - RNA, 19 nt, Artificial Sequence
  Description of Artificial Sequence: Synthetic oligonucleotide
uaaaagaucaugcacgcac

SEQ ID NO: 2130030 - RNA, 19 nt, Artificial Sequence
  Description of Artificial Sequence: Synthetic oligonucleotide
auuuucacagucgaggucc

SEQ ID NO: 2130031 - RNA, 19 nt, Artificial Sequence
  Description of Artificial Sequence: Synthetic oligonucleotide
uucaggagaccacagaggg

SEQ ID NO: 2130032 - RNA, 19 nt, Artificial Sequence
  Description of Artificial Sequence: Synthetic oligonucleotide
aaaauucagccuuagcuga

SEQ ID NO: 2130033 - RNA, 19 nt, Artificial Sequence
  Description of Artificial Sequence: Synthetic oligonucleotide
gaaaguuucaaaauucagc

SEQ ID NO: 2130034 - RNA, 19 nt, Artificial Sequence
  Description of Artificial Sequence: Synthetic oligonucleotide
aagacagaggcccagccuc

SEQ ID NO: 2130035 - RNA, 19 nt, Artificial Sequence
  Description of Artificial Sequence: Synthetic oligonucleotide
aacagguccaucuucauaa

SEQ ID NO: 2130036 - RNA, 19 nt, Artificial Sequence
  Description of Artificial Sequence: Synthetic oligonucleotide
gaaguggucguccacagag

SEQ ID NO: 2130037 - RNA, 19 nt, Artificial Sequence
  Description of Artificial Sequence: Synthetic oligonucleotide
cugaauuuccucuugcuag

SEQ ID NO: 2130038 - RNA, 19 nt, Artificial Sequence
  Description of Artificial Sequence: Synthetic oligonucleotide
caaaauucagccuuagcug

SEQ ID NO: 2130039 - RNA, 19 nt, Artificial Sequence
  Description of Artificial Sequence: Synthetic oligonucleotide
cuuagucagugcaagaggc

SEQ ID NO: 2130040 - RNA, 19 nt, Artificial Sequence
  Description of Artificial Sequence: Synthetic oligonucleotide
ucaaagcucaggcaaacca

SEQ ID NO: 2130041 - RNA, 19 nt, Artificial Sequence
  Description of Artificial Sequence: Synthetic oligonucleotide
uccgguaacuggcagaugc

SEQ ID NO: 2130042 - RNA, 19 nt, Artificial Sequence
  Description of Artificial Sequence: Synthetic oligonucleotide
acaagaucaaaacaaagua

SEQ ID NO: 2130043 - RNA, 19 nt, Artificial Sequence
  Description of Artificial Sequence: Synthetic oligonucleotide
agaacagccacugugugcg

SEQ ID NO: 2130044 - RNA, 19 nt, Artificial Sequence
  Description of Artificial Sequence: Synthetic oligonucleotide
ugaucauuuucacagucga

SEQ ID NO: 2130045 - RNA, 19 nt, Artificial Sequence
  Description of Artificial Sequence: Synthetic oligonucleotide
ugugcgauggggcagugag

SEQ ID NO: 2130046 - RNA, 19 nt, Artificial Sequence
  Description of Artificial Sequence: Synthetic oligonucleotide
ugaauuuccucuugcuagg

SEQ ID NO: 2130047 - RNA, 19 nt, Artificial Sequence
  Description of Artificial Sequence: Synthetic oligonucleotide
acagucgagguccuugucc

SEQ ID NO: 2130048 - RNA, 19 nt, Artificial Sequence
  Description of Artificial Sequence: Synthetic oligonucleotide
aguggucguccacagagcc

SEQ ID NO: 2130049 - RNA, 19 nt, Artificial Sequence
  Description of Artificial Sequence: Synthetic oligonucleotide
uuuaaguucacugacuguu

SEQ ID NO: 2130050 - RNA, 19 nt, Artificial Sequence
  Description of Artificial Sequence: Synthetic oligonucleotide
cuauggcugaccauguggg

SEQ ID NO: 2130051 - RNA, 19 nt, Artificial Sequence
  Description of Artificial Sequence: Synthetic oligonucleotide
uucacugacuguucaaagc

SEQ ID NO: 2130052 - RNA, 19 nt, Artificial Sequence
  Description of Artificial Sequence: Synthetic oligonucleotide
agccucacaagaucaaaac

SEQ ID NO: 2130053 - RNA, 19 nt, Artificial Sequence
  Description of Artificial Sequence: Synthetic oligonucleotide
uucuuagucagugcaagag

SEQ ID NO: 2130054 - RNA, 19 nt, Artificial Sequence
  Description of Artificial Sequence: Synthetic oligonucleotide
cuugcuagggcugaugggg

SEQ ID NO: 2130055 - RNA, 19 nt, Artificial Sequence
  Description of Artificial Sequence: Synthetic oligonucleotide
agaugcgcagguuaucacg

SEQ ID NO: 2130056 - RNA, 19 nt, Artificial Sequence
  Description of Artificial Sequence: Synthetic oligonucleotide
uccacagccgaucugccag

SEQ ID NO: 2130057 - RNA, 19 nt, Artificial Sequence
  Description of Artificial Sequence: Synthetic oligonucleotide
ucaccuagugcuuuggcga

SEQ ID NO: 2130058 - RNA, 19 nt, Artificial Sequence
  Description of Artificial Sequence: Synthetic oligonucleotide
uagcacagaacaccgaugu

SEQ ID NO: 2130059 - RNA, 19 nt, Artificial Sequence
  Description of Artificial Sequence: Synthetic oligonucleotide
gaagcgcuguccuuggccg

SEQ ID NO: 2130060 - RNA, 19 nt, Artificial Sequence
  Description of Artificial Sequence: Synthetic oligonucleotide
ucagccuuagcugaguagc

SEQ ID NO: 2130061 - RNA, 19 nt, Artificial Sequence
  Description of Artificial Sequence: Synthetic oligonucleotide
uaucuguucggcuagcaaa

SEQ ID NO: 2130062 - RNA, 19 nt, Artificial Sequence
  Description of Artificial Sequence: Synthetic oligonucleotide
uguucuuagucagugcaag

SEQ ID NO: 2130063 - RNA, 19 nt, Artificial Sequence
  Description of Artificial Sequence: Synthetic oligonucleotide
uaguucaacagguccaucu

SEQ ID NO: 2130064 - RNA, 19 nt, Artificial Sequence
  Description of Artificial Sequence: Synthetic oligonucleotide
gaugccucaucuuggagac

SEQ ID NO: 2130065 - RNA, 19 nt, Artificial Sequence
  Description of Artificial Sequence: Synthetic oligonucleotide
ucauuuucacagucgaggu

SEQ ID NO: 2130066 - RNA, 19 nt, Artificial Sequence
  Description of Artificial Sequence: Synthetic oligonucleotide
guacugguaguucaacagg

SEQ ID NO: 2130067 - RNA, 19 nt, Artificial Sequence
  Description of Artificial Sequence: Synthetic oligonucleotide
aacaccgauguuguuguuc

SEQ ID NO: 2130068 - RNA, 19 nt, Artificial Sequence
  Description of Artificial Sequence: Synthetic oligonucleotide
uaaguucacugacuguuca

SEQ ID NO: 2130069 - RNA, 19 nt, Artificial Sequence
  Description of Artificial Sequence: Synthetic oligonucleotide
uacugguaguucaacaggu

SEQ ID NO: 2130070 - RNA, 19 nt, Artificial Sequence
  Description of Artificial Sequence: Synthetic oligonucleotide
aaaccaugcagaucccugu

SEQ ID NO: 2130071 - RNA, 19 nt, Artificial Sequence
  Description of Artificial Sequence: Synthetic oligonucleotide
uuugaucugaagccaugug

SEQ ID NO: 2130072 - RNA, 19 nt, Artificial Sequence
  Description of Artificial Sequence: Synthetic oligonucleotide
ugcuuuggcgaaguggucg

SEQ ID NO: 2130073 - RNA, 19 nt, Artificial Sequence
  Description of Artificial Sequence: Synthetic oligonucleotide
cugguaguucaacaggucc

SEQ ID NO: 2130074 - RNA, 19 nt, Artificial Sequence
  Description of Artificial Sequence: Synthetic oligonucleotide
caucuuggagacaugauca

SEQ ID NO: 2130075 - RNA, 19 nt, Artificial Sequence
  Description of Artificial Sequence: Synthetic oligonucleotide
gacugcugagagcagaggc

SEQ ID NO: 2130076 - RNA, 19 nt, Artificial Sequence
  Description of Artificial Sequence: Synthetic oligonucleotide
agaacaccgauguuguugu

SEQ ID NO: 2130077 - RNA, 19 nt, Artificial Sequence
  Description of Artificial Sequence: Synthetic oligonucleotide
aagcuucaccuucauagca

SEQ ID NO: 2130078 - RNA, 19 nt, Artificial Sequence
  Description of Artificial Sequence: Synthetic oligonucleotide
uguucggcuagcaaagaaa

SEQ ID NO: 2130079 - RNA, 19 nt, Artificial Sequence
  Description of Artificial Sequence: Synthetic oligonucleotide
acugggagggucugcauuc

SEQ ID NO: 2130080 - RNA, 19 nt, Artificial Sequence
  Description of Artificial Sequence: Synthetic oligonucleotide
guggucggaggguagagcg

SEQ ID NO: 2130081 - RNA, 19 nt, Artificial Sequence
  Description of Artificial Sequence: Synthetic oligonucleotide
gucaccuagugcuuuggcg

SEQ ID NO: 2130082 - RNA, 19 nt, Artificial Sequence
  Description of Artificial Sequence: Synthetic oligonucleotide
cuucaggagaccacagagg

SEQ ID NO: 2130083 - RNA, 19 nt, Artificial Sequence
  Description of Artificial Sequence: Synthetic oligonucleotide
gagagguugcaguugcgag

SEQ ID NO: 2130084 - RNA, 19 nt, Artificial Sequence
  Description of Artificial Sequence: Synthetic oligonucleotide
ugcacgcacacacacacaa

SEQ ID NO: 2130085 - RNA, 19 nt, Artificial Sequence
  Description of Artificial Sequence: Synthetic oligonucleotide
gugacuauggcugaccaug

SEQ ID NO: 2130086 - RNA, 19 nt, Artificial Sequence
  Description of Artificial Sequence: Synthetic oligonucleotide
uuuuaaguucacugacugu

SEQ ID NO: 2130087 - RNA, 19 nt, Artificial Sequence
  Description of Artificial Sequence: Synthetic oligonucleotide
cuuguccaaguacugguag

SEQ ID NO: 2130088 - RNA, 19 nt, Artificial Sequence
  Description of Artificial Sequence: Synthetic oligonucleotide
uuaaguucacugacuguuc

SEQ ID NO: 2130089 - RNA, 19 nt, Artificial Sequence
  Description of Artificial Sequence: Synthetic oligonucleotide
cucuugcuagggcugaugg

SEQ ID NO: 2130090 - RNA, 19 nt, Artificial Sequence
  Description of Artificial Sequence: Synthetic oligonucleotide
aaagcucaggcaaaccaug

SEQ ID NO: 2130091 - RNA, 19 nt, Artificial Sequence
  Description of Artificial Sequence: Synthetic oligonucleotide
gagaaaguuucaaaauuca

SEQ ID NO: 2130092 - RNA, 19 nt, Artificial Sequence
  Description of Artificial Sequence: Synthetic oligonucleotide
ucuugcuagggcugauggg

SEQ ID NO: 2130093 - RNA, 19 nt, Artificial Sequence
  Description of Artificial Sequence: Synthetic oligonucleotide
augaucauuuucacagucg

SEQ ID NO: 2130094 - RNA, 19 nt, Artificial Sequence
  Description of Artificial Sequence: Synthetic oligonucleotide
aaaagaucaugcacgcaca

SEQ ID NO: 2130095 - RNA, 19 nt, Artificial Sequence
  Description of Artificial Sequence: Synthetic oligonucleotide
cuggguucuccccugagag

SEQ ID NO: 2130096 - RNA, 19 nt, Artificial Sequence
  Description of Artificial Sequence: Synthetic oligonucleotide
uguucaaagcucaggcaaa

SEQ ID NO: 2130097 - RNA, 19 nt, Artificial Sequence
  Description of Artificial Sequence: Synthetic oligonucleotide
guucacugacuguucaaag

SEQ ID NO: 2130098 - RNA, 19 nt, Artificial Sequence
  Description of Artificial Sequence: Synthetic oligonucleotide
uggucguccacagagccag

SEQ ID NO: 2130099 - RNA, 19 nt, Artificial Sequence
  Description of Artificial Sequence: Synthetic oligonucleotide
acaccgauguuguuguuca

SEQ ID NO: 2130100 - RNA, 19 nt, Artificial Sequence
  Description of Artificial Sequence: Synthetic oligonucleotide
caaaccaugcagaucccug

SEQ ID NO: 2130101 - RNA, 19 nt, Artificial Sequence
  Description of Artificial Sequence: Synthetic oligonucleotide
agcaguucuuugcuuucac

SEQ ID NO: 2130102 - RNA, 19 nt, Artificial Sequence
  Description of Artificial Sequence: Synthetic oligonucleotide
aaccaugcagaucccugug

SEQ ID NO: 2130103 - RNA, 19 nt, Artificial Sequence
  Description of Artificial Sequence: Synthetic oligonucleotide
cagugcaagaggcugcucc

SEQ ID NO: 2130104 - RNA, 19 nt, Artificial Sequence
  Description of Artificial Sequence: Synthetic oligonucleotide
uuagucagugcaagaggcu

SEQ ID NO: 2130105 - RNA, 19 nt, Artificial Sequence
  Description of Artificial Sequence: Synthetic oligonucleotide
uggcaguugcacugggugg

SEQ ID NO: 2130106 - RNA, 19 nt, Artificial Sequence
  Description of Artificial Sequence: Synthetic oligonucleotide
uggacaccgaguugggugc

SEQ ID NO: 2130107 - RNA, 19 nt, Artificial Sequence
  Description of Artificial Sequence: Synthetic oligonucleotide
augcaggugcagaacagcc

SEQ ID NO: 2130108 - RNA, 19 nt, Artificial Sequence
  Description of Artificial Sequence: Synthetic oligonucleotide
uucagccuuagcugaguag

SEQ ID NO: 2130109 - RNA, 19 nt, Artificial Sequence
  Description of Artificial Sequence: Synthetic oligonucleotide
agcauuuaucuguucggcu

SEQ ID NO: 2130110 - RNA, 19 nt, Artificial Sequence
  Description of Artificial Sequence: Synthetic oligonucleotide
gugcagaacagccacugug

SEQ ID NO: 2130111 - RNA, 19 nt, Artificial Sequence
  Description of Artificial Sequence: Synthetic oligonucleotide
uuaucuguucggcuagcaa

SEQ ID NO: 2130112 - RNA, 19 nt, Artificial Sequence
  Description of Artificial Sequence: Synthetic oligonucleotide
cacaagaucaaaacaaagu

SEQ ID NO: 2130113 - RNA, 19 nt, Artificial Sequence
  Description of Artificial Sequence: Synthetic oligonucleotide
cuugcccaggcuccgacgg

SEQ ID NO: 2130114 - RNA, 19 nt, Artificial Sequence
  Description of Artificial Sequence: Synthetic oligonucleotide
ugauggacaccgaguuggg

SEQ ID NO: 2130115 - RNA, 19 nt, Artificial Sequence
  Description of Artificial Sequence: Synthetic oligonucleotide
accaugugggcagugggac

SEQ ID NO: 2130116 - RNA, 19 nt, Artificial Sequence
  Description of Artificial Sequence: Synthetic oligonucleotide
aaguggucguccacagagc

SEQ ID NO: 2130117 - RNA, 19 nt, Artificial Sequence
  Description of Artificial Sequence: Synthetic oligonucleotide
cagaacaccgauguuguug

SEQ ID NO: 2130118 - RNA, 19 nt, Artificial Sequence
  Description of Artificial Sequence: Synthetic oligonucleotide
gaauuuccucuugcuaggg

SEQ ID NO: 2130119 - RNA, 19 nt, Artificial Sequence
  Description of Artificial Sequence: Synthetic oligonucleotide
gccgcuuugaucugaagcc

SEQ ID NO: 2130120 - RNA, 19 nt, Artificial Sequence
  Description of Artificial Sequence: Synthetic oligonucleotide
ugcauucuggguucucccc

SEQ ID NO: 2130121 - RNA, 19 nt, Artificial Sequence
  Description of Artificial Sequence: Synthetic oligonucleotide
ucccuguguggucggaggg

SEQ ID NO: 2130122 - RNA, 19 nt, Artificial Sequence
  Description of Artificial Sequence: Synthetic oligonucleotide
aagcgcuguccuuggccgc

SEQ ID NO: 2130123 - RNA, 19 nt, Artificial Sequence
  Description of Artificial Sequence: Synthetic oligonucleotide
agcuucaccuucauagcac

SEQ ID NO: 2130124 - RNA, 19 nt, Artificial Sequence
  Description of Artificial Sequence: Synthetic oligonucleotide
gaucauuuucacagucgag

SEQ ID NO: 2130125 - RNA, 19 nt, Artificial Sequence
  Description of Artificial Sequence: Synthetic oligonucleotide
cacugcuguucuuagucag

SEQ ID NO: 2130126 - RNA, 19 nt, Artificial Sequence
  Description of Artificial Sequence: Synthetic oligonucleotide
ugcugaauuuccucuugcu

SEQ ID NO: 2130127 - RNA, 19 nt, Artificial Sequence
  Description of Artificial Sequence: Synthetic oligonucleotide
agccaugugucaccuagug

SEQ ID NO: 2130128 - RNA, 19 nt, Artificial Sequence
  Description of Artificial Sequence: Synthetic oligonucleotide
uuaaaagaucaugcacgca

SEQ ID NO: 2130129 - RNA, 19 nt, Artificial Sequence
  Description of Artificial Sequence: Synthetic oligonucleotide
gacggaagugcucuuccac

SEQ ID NO: 2130130 - RNA, 19 nt, Artificial Sequence
  Description of Artificial Sequence: Synthetic oligonucleotide
cagaacagccacugugugc

SEQ ID NO: 2130131 - RNA, 19 nt, Artificial Sequence
  Description of Artificial Sequence: Synthetic oligonucleotide
uggagacaugaucauuuuc

SEQ ID NO: 2130132 - RNA, 19 nt, Artificial Sequence
  Description of Artificial Sequence: Synthetic oligonucleotide
gaugcugacucugggcugc

SEQ ID NO: 2130133 - RNA, 19 nt, Artificial Sequence
  Description of Artificial Sequence: Synthetic oligonucleotide
accgauguuguuguucauc

SEQ ID NO: 2130134 - RNA, 19 nt, Artificial Sequence
  Description of Artificial Sequence: Synthetic oligonucleotide
gagggaugccucaucuugg

SEQ ID NO: 2130135 - RNA, 19 nt, Artificial Sequence
  Description of Artificial Sequence: Synthetic oligonucleotide
aucuguucggcuagcaaag

SEQ ID NO: 2130136 - RNA, 19 nt, Artificial Sequence
  Description of Artificial Sequence: Synthetic oligonucleotide
ugucaccuagugcuuuggc

SEQ ID NO: 2130137 - RNA, 19 nt, Artificial Sequence
  Description of Artificial Sequence: Synthetic oligonucleotide
aaguucacugacuguucaa

SEQ ID NO: 2130138 - RNA, 19 nt, Artificial Sequence
  Description of Artificial Sequence: Synthetic oligonucleotide
ggagggaugccucaucuug

SEQ ID NO: 2130139 - RNA, 19 nt, Artificial Sequence
  Description of Artificial Sequence: Synthetic oligonucleotide
uuguccaaguacugguagu

SEQ ID NO: 2130140 - RNA, 19 nt, Artificial Sequence
  Description of Artificial Sequence: Synthetic oligonucleotide
ugugcggugacugcugaga

SEQ ID NO: 2130141 - RNA, 19 nt, Artificial Sequence
  Description of Artificial Sequence: Synthetic oligonucleotide
acaaaguauguaaaaguuu

SEQ ID NO: 2130142 - RNA, 19 nt, Artificial Sequence
  Description of Artificial Sequence: Synthetic oligonucleotide
ugacuauggcugaccaugu

SEQ ID NO: 2130143 - RNA, 19 nt, Artificial Sequence
  Description of Artificial Sequence: Synthetic oligonucleotide
uuuaucuguucggcuagca

SEQ ID NO: 2130144 - RNA, 19 nt, Artificial Sequence
  Description of Artificial Sequence: Synthetic oligonucleotide
aauucagccuuagcugagu

SEQ ID NO: 2130145 - RNA, 19 nt, Artificial Sequence
  Description of Artificial Sequence: Synthetic oligonucleotide
cacgcacacacacacaaca

SEQ ID NO: 2130146 - RNA, 19 nt, Artificial Sequence
  Description of Artificial Sequence: Synthetic oligonucleotide
guaacuggcagaugcaggu

SEQ ID NO: 2130147 - RNA, 19 nt, Artificial Sequence
  Description of Artificial Sequence: Synthetic oligonucleotide
ucaggaagacagaggccca

SEQ ID NO: 2130148 - RNA, 19 nt, Artificial Sequence
  Description of Artificial Sequence: Synthetic oligonucleotide
uucaaagcucaggcaaacc

SEQ ID NO: 2130149 - RNA, 19 nt, Artificial Sequence
  Description of Artificial Sequence: Synthetic oligonucleotide
agucgagguccuugucccc

SEQ ID NO: 2130150 - RNA, 19 nt, Artificial Sequence
  Description of Artificial Sequence: Synthetic oligonucleotide
gaagugcucuuccaccaca

SEQ ID NO: 2130151 - RNA, 19 nt, Artificial Sequence
  Description of Artificial Sequence: Synthetic oligonucleotide
gguuccaugcugaauuucc

SEQ ID NO: 2130152 - RNA, 19 nt, Artificial Sequence
  Description of Artificial Sequence: Synthetic oligonucleotide
agggagggaugccucaucu

SEQ ID NO: 2130153 - RNA, 19 nt, Artificial Sequence
  Description of Artificial Sequence: Synthetic oligonucleotide
gcuguucuuagucagugca

SEQ ID NO: 2130154 - RNA, 19 nt, Artificial Sequence
  Description of Artificial Sequence: Synthetic oligonucleotide
gagugacuauggcugacca

SEQ ID NO: 2130155 - RNA, 19 nt, Artificial Sequence
  Description of Artificial Sequence: Synthetic oligonucleotide
cauuuucacagucgagguc

SEQ ID NO: 2130156 - RNA, 19 nt, Artificial Sequence
  Description of Artificial Sequence: Synthetic oligonucleotide
ugccucaucuuggagacau

SEQ ID NO: 2130157 - RNA, 19 nt, Artificial Sequence
  Description of Artificial Sequence: Synthetic oligonucleotide
ugcaguugcgagcgccugc

SEQ ID NO: 2130158 - RNA, 19 nt, Artificial Sequence
  Description of Artificial Sequence: Synthetic oligonucleotide
uuuucacagucgagguccu

SEQ ID NO: 2130159 - RNA, 19 nt, Artificial Sequence
  Description of Artificial Sequence: Synthetic oligonucleotide
acugguaguucaacagguc

SEQ ID NO: 2130160 - RNA, 19 nt, Artificial Sequence
  Description of Artificial Sequence: Synthetic oligonucleotide
aguugcgagcgccugcaga

SEQ ID NO: 2130161 - RNA, 19 nt, Artificial Sequence
  Description of Artificial Sequence: Synthetic oligonucleotide
ggaugccucaucuuggaga

SEQ ID NO: 2130162 - RNA, 19 nt, Artificial Sequence
  Description of Artificial Sequence: Synthetic oligonucleotide
ugcacuggguggucuccgg

SEQ ID NO: 2130163 - RNA, 19 nt, Artificial Sequence
  Description of Artificial Sequence: Synthetic oligonucleotide
ucuccgguaacuggcagau

SEQ ID NO: 2130164 - RNA, 19 nt, Artificial Sequence
  Description of Artificial Sequence: Synthetic oligonucleotide
agagagguugcaguugcga

SEQ ID NO: 2130165 - RNA, 19 nt, Artificial Sequence
  Description of Artificial Sequence: Synthetic oligonucleotide
caagaggcugcuccaugag

SEQ ID NO: 2130166 - RNA, 19 nt, Artificial Sequence
  Description of Artificial Sequence: Synthetic oligonucleotide
aucacggagggccgguucu

SEQ ID NO: 2130167 - RNA, 19 nt, Artificial Sequence
  Description of Artificial Sequence: Synthetic oligonucleotide
ugacugcugagagcagagg

SEQ ID NO: 2130168 - RNA, 19 nt, Artificial Sequence
  Description of Artificial Sequence: Synthetic oligonucleotide
agcgccugcagaugcgcag

SEQ ID NO: 2130169 - RNA, 19 nt, Artificial Sequence
  Description of Artificial Sequence: Synthetic oligonucleotide
gacuauggcugaccaugug

SEQ ID NO: 2130170 - RNA, 19 nt, Artificial Sequence
  Description of Artificial Sequence: Synthetic oligonucleotide
guggucuccgguaacuggc

SEQ ID NO: 2130171 - RNA, 19 nt, Artificial Sequence
  Description of Artificial Sequence: Synthetic oligonucleotide
augcagaucccuguguggu

SEQ ID NO: 2130172 - RNA, 19 nt, Artificial Sequence
  Description of Artificial Sequence: Synthetic oligonucleotide
cuggaagcgcuguccuugg

SEQ ID NO: 2130173 - RNA, 19 nt, Artificial Sequence
  Description of Artificial Sequence: Synthetic oligonucleotide
ucgagguccuuguccccgg

SEQ ID NO: 2130174 - RNA, 19 nt, Artificial Sequence
  Description of Artificial Sequence: Synthetic oligonucleotide
ggaagcgcuguccuuggcc

SEQ ID NO: 2130175 - RNA, 19 nt, Artificial Sequence
  Description of Artificial Sequence: Synthetic oligonucleotide
cagccgaucugccaguguc

SEQ ID NO: 2130176 - RNA, 19 nt, Artificial Sequence
  Description of Artificial Sequence: Synthetic oligonucleotide
guucuuagucagugcaaga

SEQ ID NO: 2130177 - RNA, 19 nt, Artificial Sequence
  Description of Artificial Sequence: Synthetic oligonucleotide
uaucacggagggccgguuc

SEQ ID NO: 2130178 - RNA, 19 nt, Artificial Sequence
  Description of Artificial Sequence: Synthetic oligonucleotide
guucuccccugagagaagc

SEQ ID NO: 2130179 - RNA, 19 nt, Artificial Sequence
  Description of Artificial Sequence: Synthetic oligonucleotide
gucgagguccuuguccccg

SEQ ID NO: 2130180 - RNA, 19 nt, Artificial Sequence
  Description of Artificial Sequence: Synthetic oligonucleotide
agggaugccucaucuugga

SEQ ID NO: 2130181 - RNA, 19 nt, Artificial Sequence
  Description of Artificial Sequence: Synthetic oligonucleotide
uggucggaggguagagcgc

SEQ ID NO: 2130182 - RNA, 19 nt, Artificial Sequence
  Description of Artificial Sequence: Synthetic oligonucleotide
uguggucggaggguagagc

SEQ ID NO: 2130183 - RNA, 19 nt, Artificial Sequence
  Description of Artificial Sequence: Synthetic oligonucleotide
uggucuccgguaacuggca

SEQ ID NO: 2130184 - RNA, 19 nt, Artificial Sequence
  Description of Artificial Sequence: Synthetic oligonucleotide
uguguggucggaggguaga

SEQ ID NO: 2130185 - RNA, 19 nt, Artificial Sequence
  Description of Artificial Sequence: Synthetic oligonucleotide
uucuugcccaggcuccgac

SEQ ID NO: 2130186 - RNA, 19 nt, Artificial Sequence
  Description of Artificial Sequence: Synthetic oligonucleotide
gcaggugcagaacagccac

SEQ ID NO: 2130187 - RNA, 19 nt, Artificial Sequence
  Description of Artificial Sequence: Synthetic oligonucleotide
ucaacagguccaucuucau

SEQ ID NO: 2130188 - RNA, 19 nt, Artificial Sequence
  Description of Artificial Sequence: Synthetic oligonucleotide
uaacuggcagaugcaggug

SEQ ID NO: 2130189 - RNA, 19 nt, Artificial Sequence
  Description of Artificial Sequence: Synthetic oligonucleotide
agugacuauggcugaccau

SEQ ID NO: 2130190 - RNA, 19 nt, Artificial Sequence
  Description of Artificial Sequence: Synthetic oligonucleotide
acuggguggucuccgguaa

SEQ ID NO: 2130191 - RNA, 19 nt, Artificial Sequence
  Description of Artificial Sequence: Synthetic oligonucleotide
ccaugugucaccuagugcu

SEQ ID NO: 2130192 - RNA, 19 nt, Artificial Sequence
  Description of Artificial Sequence: Synthetic oligonucleotide
cgaagagaaaguuucaaaa

SEQ ID NO: 2130193 - RNA, 19 nt, Artificial Sequence
  Description of Artificial Sequence: Synthetic oligonucleotide
uggguucuccccugagaga

SEQ ID NO: 2130194 - RNA, 19 nt, Artificial Sequence
  Description of Artificial Sequence: Synthetic oligonucleotide
cagaugcgcagguuaucac

SEQ ID NO: 2130195 - RNA, 19 nt, Artificial Sequence
  Description of Artificial Sequence: Synthetic oligonucleotide
cuaaaacuucaggaagaca

SEQ ID NO: 2130196 - RNA, 19 nt, Artificial Sequence
  Description of Artificial Sequence: Synthetic oligonucleotide
auucagccuuagcugagua

SEQ ID NO: 2130197 - RNA, 19 nt, Artificial Sequence
  Description of Artificial Sequence: Synthetic oligonucleotide
acaccgaguugggugcugg

SEQ ID NO: 2130198 - RNA, 19 nt, Artificial Sequence
  Description of Artificial Sequence: Synthetic oligonucleotide
ugcagaucccugugugguc

SEQ ID NO: 2130199 - RNA, 19 nt, Artificial Sequence
  Description of Artificial Sequence: Synthetic oligonucleotide
cagagccagugauggacac

SEQ ID NO: 2130200 - RNA, 19 nt, Artificial Sequence
  Description of Artificial Sequence: Synthetic oligonucleotide
uggguggucuccgguaacu

SEQ ID NO: 2130201 - RNA, 19 nt, Artificial Sequence
  Description of Artificial Sequence: Synthetic oligonucleotide
ccugagagaagcuucaccu

SEQ ID NO: 2130202 - RNA, 19 nt, Artificial Sequence
  Description of Artificial Sequence: Synthetic oligonucleotide
aguugggugcuggcucugg

SEQ ID NO: 2130203 - RNA, 19 nt, Artificial Sequence
  Description of Artificial Sequence: Synthetic oligonucleotide
uuggccgcuuugaucugaa

SEQ ID NO: 2130204 - RNA, 19 nt, Artificial Sequence
  Description of Artificial Sequence: Synthetic oligonucleotide
cagccucacaagaucaaaa

SEQ ID NO: 2130205 - RNA, 19 nt, Artificial Sequence
  Description of Artificial Sequence: Synthetic oligonucleotide
cagaucccuguguggucgg

SEQ ID NO: 2130206 - RNA, 19 nt, Artificial Sequence
  Description of Artificial Sequence: Synthetic oligonucleotide
cuguucuuagucagugcaa

SEQ ID NO: 2130207 - RNA, 19 nt, Artificial Sequence
  Description of Artificial Sequence: Synthetic oligonucleotide
gguugcaguugcgagcgcc

SEQ ID NO: 2130208 - RNA, 19 nt, Artificial Sequence
  Description of Artificial Sequence: Synthetic oligonucleotide
guugcgagcgccugcagau

SEQ ID NO: 2130209 - RNA, 19 nt, Artificial Sequence
  Description of Artificial Sequence: Synthetic oligonucleotide
guccuuggccgcuuugauc

SEQ ID NO: 2130210 - RNA, 19 nt, Artificial Sequence
  Description of Artificial Sequence: Synthetic oligonucleotide
agguugcaguugcgagcgc

SEQ ID NO: 2130211 - RNA, 19 nt, Artificial Sequence
  Description of Artificial Sequence: Synthetic oligonucleotide
ggucggaggguagagcgcc

SEQ ID NO: 2130212 - RNA, 19 nt, Artificial Sequence
  Description of Artificial Sequence: Synthetic oligonucleotide
gucuccgguaacuggcaga

SEQ ID NO: 2130213 - RNA, 19 nt, Artificial Sequence
  Description of Artificial Sequence: Synthetic oligonucleotide
gccaugugucaccuagugc

SEQ ID NO: 2130214 - RNA, 19 nt, Artificial Sequence
  Description of Artificial Sequence: Synthetic oligonucleotide
acugcuguucuuagucagu

SEQ ID NO: 2130215 - RNA, 19 nt, Artificial Sequence
  Description of Artificial Sequence: Synthetic oligonucleotide
ggagugacuauggcugacc

SEQ ID NO: 2130216 - RNA, 19 nt, Artificial Sequence
  Description of Artificial Sequence: Synthetic oligonucleotide
cgcagguuaucacggaggg

SEQ ID NO: 2130217 - RNA, 19 nt, Artificial Sequence
  Description of Artificial Sequence: Synthetic oligonucleotide
aagccaugugucaccuagu

SEQ ID NO: 2130218 - RNA, 19 nt, Artificial Sequence
  Description of Artificial Sequence: Synthetic oligonucleotide
ucggaggguagagcgcccc

SEQ ID NO: 2130219 - RNA, 19 nt, Artificial Sequence
  Description of Artificial Sequence: Synthetic oligonucleotide
uugcaguugcgagcgccug

SEQ ID NO: 2130220 - RNA, 19 nt, Artificial Sequence
  Description of Artificial Sequence: Synthetic oligonucleotide
accgaguugggugcuggcu

SEQ ID NO: 2130221 - RNA, 19 nt, Artificial Sequence
  Description of Artificial Sequence: Synthetic oligonucleotide
gcgaaguggucguccacag

SEQ ID NO: 2130222 - RNA, 19 nt, Artificial Sequence
  Description of Artificial Sequence: Synthetic oligonucleotide
gguuaucacggagggccgg

SEQ ID NO: 2130223 - RNA, 19 nt, Artificial Sequence
  Description of Artificial Sequence: Synthetic oligonucleotide
gcgcagguuaucacggagg

SEQ ID NO: 2130224 - RNA, 19 nt, Artificial Sequence
  Description of Artificial Sequence: Synthetic oligonucleotide
gcacacacacacaacaaaa

SEQ ID NO: 2130225 - RNA, 19 nt, Artificial Sequence
  Description of Artificial Sequence: Synthetic oligonucleotide
cagugagagagguugcagu

SEQ ID NO: 2130226 - RNA, 19 nt, Artificial Sequence
  Description of Artificial Sequence: Synthetic oligonucleotide
uggcgaaguggucguccac

SEQ ID NO: 2130227 - RNA, 19 nt, Artificial Sequence
  Description of Artificial Sequence: Synthetic oligonucleotide
acagccgaucugccagugu

SEQ ID NO: 2130228 - RNA, 19 nt, Artificial Sequence
  Description of Artificial Sequence: Synthetic oligonucleotide
gucguccacagagccagug

SEQ ID NO: 2130229 - RNA, 19 nt, Artificial Sequence
  Description of Artificial Sequence: Synthetic oligonucleotide
agcacagaacaccgauguu

SEQ ID NO: 2130230 - RNA, 19 nt, Artificial Sequence
  Description of Artificial Sequence: Synthetic oligonucleotide
gcagugagagagguugcag

SEQ ID NO: 2130231 - RNA, 19 nt, Artificial Sequence
  Description of Artificial Sequence: Synthetic oligonucleotide
cugugcggugacugcugag

SEQ ID NO: 2130232 - RNA, 19 nt, Artificial Sequence
  Description of Artificial Sequence: Synthetic oligonucleotide
augcgcagguuaucacgga

SEQ ID NO: 2130233 - RNA, 19 nt, Artificial Sequence
  Description of Artificial Sequence: Synthetic oligonucleotide
ggaagugcucuuccaccac

SEQ ID NO: 2130234 - RNA, 19 nt, Artificial Sequence
  Description of Artificial Sequence: Synthetic oligonucleotide
gcagaugcgcagguuauca

SEQ ID NO: 2130235 - RNA, 19 nt, Artificial Sequence
  Description of Artificial Sequence: Synthetic oligonucleotide
guguggucggaggguagag

SEQ ID NO: 2130236 - RNA, 19 nt, Artificial Sequence
  Description of Artificial Sequence: Synthetic oligonucleotide
uggccgcuuugaucugaag

SEQ ID NO: 2130237 - RNA, 19 nt, Artificial Sequence
  Description of Artificial Sequence: Synthetic oligonucleotide
ggcgugaugcugacucugg

SEQ ID NO: 2130238 - RNA, 19 nt, Artificial Sequence
  Description of Artificial Sequence: Synthetic oligonucleotide
accuagugcuuuggcgaag

SEQ ID NO: 2130239 - RNA, 19 nt, Artificial Sequence
  Description of Artificial Sequence: Synthetic oligonucleotide
ggguucuccccugagagaa

SEQ ID NO: 2130240 - RNA, 19 nt, Artificial Sequence
  Description of Artificial Sequence: Synthetic oligonucleotide
ccgggcgugaugcugacuc

SEQ ID NO: 2130241 - RNA, 19 nt, Artificial Sequence
  Description of Artificial Sequence: Synthetic oligonucleotide
gggaugccucaucuuggag

SEQ ID NO: 2130242 - RNA, 19 nt, Artificial Sequence
  Description of Artificial Sequence: Synthetic oligonucleotide
caccgaguugggugcuggc

SEQ ID NO: 2130243 - RNA, 19 nt, Artificial Sequence
  Description of Artificial Sequence: Synthetic oligonucleotide
ggugacugcugagagcaga

SEQ ID NO: 2130244 - RNA, 19 nt, Artificial Sequence
  Description of Artificial Sequence: Synthetic oligonucleotide
acggagggccgguucugcu

SEQ ID NO: 2130245 - RNA, 19 nt, Artificial Sequence
  Description of Artificial Sequence: Synthetic oligonucleotide
ccgacggaagugcucuucc

SEQ ID NO: 2130246 - RNA, 19 nt, Artificial Sequence
  Description of Artificial Sequence: Synthetic oligonucleotide
uugcgagcgccugcagaug

SEQ ID NO: 2130247 - RNA, 19 nt, Artificial Sequence
  Description of Artificial Sequence: Synthetic oligonucleotide
cacagucgagguccuuguc

SEQ ID NO: 2130248 - RNA, 19 nt, Artificial Sequence
  Description of Artificial Sequence: Synthetic oligonucleotide
cagugauggacaccgaguu

SEQ ID NO: 2130249 - RNA, 19 nt, Artificial Sequence
  Description of Artificial Sequence: Synthetic oligonucleotide
gcuggcccgggcgugaugc

SEQ ID NO: 2130250 - RNA, 19 nt, Artificial Sequence
  Description of Artificial Sequence: Synthetic oligonucleotide
agacagaggcccagccuca

SEQ ID NO: 2130251 - RNA, 19 nt, Artificial Sequence
  Description of Artificial Sequence: Synthetic oligonucleotide
acgcacacacacacaacaa

SEQ ID NO: 2130252 - RNA, 19 nt, Artificial Sequence
  Description of Artificial Sequence: Synthetic oligonucleotide
guaguucaacagguccauc

SEQ ID NO: 2130253 - RNA, 19 nt, Artificial Sequence
  Description of Artificial Sequence: Synthetic oligonucleotide
caccuagugcuuuggcgaa

SEQ ID NO: 2130254 - RNA, 19 nt, Artificial Sequence
  Description of Artificial Sequence: Synthetic oligonucleotide
ugcuggaagcgcuguccuu

SEQ ID NO: 2130255 - RNA, 19 nt, Artificial Sequence
  Description of Artificial Sequence: Synthetic oligonucleotide
cuccacagccgaucugcca

SEQ ID NO: 2130256 - RNA, 19 nt, Artificial Sequence
  Description of Artificial Sequence: Synthetic oligonucleotide
ggcgaaguggucguccaca

SEQ ID NO: 2130257 - RNA, 19 nt, Artificial Sequence
  Description of Artificial Sequence: Synthetic oligonucleotide
agccgaucugccaguguca

SEQ ID NO: 2130258 - RNA, 19 nt, Artificial Sequence
  Description of Artificial Sequence: Synthetic oligonucleotide
ugugugcgauggggcagug

SEQ ID NO: 2130259 - RNA, 19 nt, Artificial Sequence
  Description of Artificial Sequence: Synthetic oligonucleotide
agcgcuguccuuggccgcu

SEQ ID NO: 2130260 - RNA, 19 nt, Artificial Sequence
  Description of Artificial Sequence: Synthetic oligonucleotide
cacggagggccgguucugc

SEQ ID NO: 2130261 - RNA, 19 nt, Artificial Sequence
  Description of Artificial Sequence: Synthetic oligonucleotide
gcuccaggcucuucuaaaa

SEQ ID NO: 2130262 - RNA, 19 nt, Artificial Sequence
  Description of Artificial Sequence: Synthetic oligonucleotide
ccgaguugggugcuggcuc

SEQ ID NO: 2130263 - RNA, 19 nt, Artificial Sequence
  Description of Artificial Sequence: Synthetic oligonucleotide
gaguugggugcuggcucug

SEQ ID NO: 2130264 - RNA, 19 nt, Artificial Sequence
  Description of Artificial Sequence: Synthetic oligonucleotide
ugggacuggcuggcuggcc

SEQ ID NO: 2130265 - RNA, 19 nt, Artificial Sequence
  Description of Artificial Sequence: Synthetic oligonucleotide
uuaucacggagggccgguu

SEQ ID NO: 2130266 - RNA, 19 nt, Artificial Sequence
  Description of Artificial Sequence: Synthetic oligonucleotide
gaacagccacugugugcga

SEQ ID NO: 2130267 - RNA, 19 nt, Artificial Sequence
  Description of Artificial Sequence: Synthetic oligonucleotide
ccgauguuguuguucaucu

SEQ ID NO: 2130268 - RNA, 19 nt, Artificial Sequence
  Description of Artificial Sequence: Synthetic oligonucleotide
ccucaucuuggagacauga

SEQ ID NO: 2130269 - RNA, 19 nt, Artificial Sequence
  Description of Artificial Sequence: Synthetic oligonucleotide
gucacagguggcaguugca

SEQ ID NO: 2130270 - RNA, 19 nt, Artificial Sequence
  Description of Artificial Sequence: Synthetic oligonucleotide
cuuggccgcuuugaucuga

SEQ ID NO: 2130271 - RNA, 19 nt, Artificial Sequence
  Description of Artificial Sequence: Synthetic oligonucleotide
gauggacaccgaguugggu

SEQ ID NO: 2130272 - RNA, 19 nt, Artificial Sequence
  Description of Artificial Sequence: Synthetic oligonucleotide
cacagccgaucugccagug

SEQ ID NO: 2130273 - RNA, 19 nt, Artificial Sequence
  Description of Artificial Sequence: Synthetic oligonucleotide
ccugcagaugcgcagguua

SEQ ID NO: 2130274 - RNA, 19 nt, Artificial Sequence
  Description of Artificial Sequence: Synthetic oligonucleotide
gggcgugaugcugacucug

SEQ ID NO: 2130275 - RNA, 19 nt, Artificial Sequence
  Description of Artificial Sequence: Synthetic oligonucleotide
guggucguccacagagcca

SEQ ID NO: 2130276 - RNA, 19 nt, Artificial Sequence
  Description of Artificial Sequence: Synthetic oligonucleotide
caguugcgagcgccugcag

SEQ ID NO: 2130277 - RNA, 19 nt, Artificial Sequence
  Description of Artificial Sequence: Synthetic oligonucleotide
cugagagaagcuucaccuu

SEQ ID NO: 2130278 - RNA, 19 nt, Artificial Sequence
  Description of Artificial Sequence: Synthetic oligonucleotide
ugcugacucugggcugcug

SEQ ID NO: 2130279 - RNA, 19 nt, Artificial Sequence
  Description of Artificial Sequence: Synthetic oligonucleotide
ggcagugagagagguugca

SEQ ID NO: 2130280 - RNA, 19 nt, Artificial Sequence
  Description of Artificial Sequence: Synthetic oligonucleotide
guuaucacggagggccggu

SEQ ID NO: 2130281 - RNA, 19 nt, Artificial Sequence
  Description of Artificial Sequence: Synthetic oligonucleotide
gcagguuaucacggagggc

SEQ ID NO: 2130282 - RNA, 19 nt, Artificial Sequence
  Description of Artificial Sequence: Synthetic oligonucleotide
guugggugcuggcucuggu

SEQ ID NO: 2130283 - RNA, 19 nt, Artificial Sequence
  Description of Artificial Sequence: Synthetic oligonucleotide
gcaguugcgagcgccugca

SEQ ID NO: 2130284 - RNA, 19 nt, Artificial Sequence
  Description of Artificial Sequence: Synthetic oligonucleotide
gguucuccccugagagaag

SEQ ID NO: 2130285 - RNA, 19 nt, Artificial Sequence
  Description of Artificial Sequence: Synthetic oligonucleotide
augcacgcacacacacaca

SEQ ID NO: 2130286 - RNA, 19 nt, Artificial Sequence
  Description of Artificial Sequence: Synthetic oligonucleotide
gguaguucaacagguccau

SEQ ID NO: 2130287 - RNA, 19 nt, Artificial Sequence
  Description of Artificial Sequence: Synthetic oligonucleotide
ggcaaaccaugcagauccc

SEQ ID NO: 2130288 - RNA, 19 nt, Artificial Sequence
  Description of Artificial Sequence: Synthetic oligonucleotide
ggguggucuccgguaacug

SEQ ID NO: 2130289 - RNA, 19 nt, Artificial Sequence
  Description of Artificial Sequence: Synthetic oligonucleotide
cgguaacuggcagaugcag

SEQ ID NO: 2130290 - RNA, 19 nt, Artificial Sequence
  Description of Artificial Sequence: Synthetic oligonucleotide
gucggaggguagagcgccc

SEQ ID NO: 2130291 - RNA, 19 nt, Artificial Sequence
  Description of Artificial Sequence: Synthetic oligonucleotide
gagguccuuguccccgggu

SEQ ID NO: 2130292 - RNA, 19 nt, Artificial Sequence
  Description of Artificial Sequence: Synthetic oligonucleotide
gcuuuggcgaaguggucgu

SEQ ID NO: 2130293 - RNA, 19 nt, Artificial Sequence
  Description of Artificial Sequence: Synthetic oligonucleotide
ccagugauggacaccgagu

SEQ ID NO: 2130294 - RNA, 19 nt, Artificial Sequence
  Description of Artificial Sequence: Synthetic oligonucleotide
ccccuucaggagaccacag

SEQ ID NO: 2130295 - RNA, 19 nt, Artificial Sequence
  Description of Artificial Sequence: Synthetic oligonucleotide
gagcgccugcagaugcgca

SEQ ID NO: 2130296 - RNA, 19 nt, Artificial Sequence
  Description of Artificial Sequence: Synthetic oligonucleotide
gcccagccucacaagauca

SEQ ID NO: 2130297 - RNA, 19 nt, Artificial Sequence
  Description of Artificial Sequence: Synthetic oligonucleotide
cugcuggaagcgcuguccu

SEQ ID NO: 2130298 - RNA, 19 nt, Artificial Sequence
  Description of Artificial Sequence: Synthetic oligonucleotide
gggcagugagagagguugc

SEQ ID NO: 2130299 - RNA, 19 nt, Artificial Sequence
  Description of Artificial Sequence: Synthetic oligonucleotide
gcuccgacggaagugcucu

SEQ ID NO: 2130300 - RNA, 19 nt, Artificial Sequence
  Description of Artificial Sequence: Synthetic oligonucleotide
cuccgguaacuggcagaug

SEQ ID NO: 2130301 - RNA, 19 nt, Artificial Sequence
  Description of Artificial Sequence: Synthetic oligonucleotide
ccgguaacuggcagaugca

SEQ ID NO: 2130302 - RNA, 19 nt, Artificial Sequence
  Description of Artificial Sequence: Synthetic oligonucleotide
cgcacacacacacaacaaa

SEQ ID NO: 2130303 - RNA, 19 nt, Artificial Sequence
  Description of Artificial Sequence: Synthetic oligonucleotide
ccggguuccaugcugaauu

SEQ ID NO: 2130304 - RNA, 19 nt, Artificial Sequence
  Description of Artificial Sequence: Synthetic oligonucleotide
ggugcagaacagccacugu

SEQ ID NO: 2130305 - RNA, 19 nt, Artificial Sequence
  Description of Artificial Sequence: Synthetic oligonucleotide
agggccgguucugcugccu

SEQ ID NO: 2130306 - RNA, 19 nt, Artificial Sequence
  Description of Artificial Sequence: Synthetic oligonucleotide
cacugggagggucugcauu

SEQ ID NO: 2130307 - RNA, 19 nt, Artificial Sequence
  Description of Artificial Sequence: Synthetic oligonucleotide
ccucuugcuagggcugaug

SEQ ID NO: 2130308 - RNA, 19 nt, Artificial Sequence
  Description of Artificial Sequence: Synthetic oligonucleotide
gcacgcacacacacacaac

SEQ ID NO: 2130309 - RNA, 19 nt, Artificial Sequence
  Description of Artificial Sequence: Synthetic oligonucleotide
ccccgaagagaaaguuuca

SEQ ID NO: 2130310 - RNA, 19 nt, Artificial Sequence
  Description of Artificial Sequence: Synthetic oligonucleotide
gccugugcggugacugcug

SEQ ID NO: 2130311 - RNA, 19 nt, Artificial Sequence
  Description of Artificial Sequence: Synthetic oligonucleotide
aggcuccgacggaagugcu

SEQ ID NO: 2130312 - RNA, 19 nt, Artificial Sequence
  Description of Artificial Sequence: Synthetic oligonucleotide
augcugacucugggcugcu

SEQ ID NO: 2130313 - RNA, 19 nt, Artificial Sequence
  Description of Artificial Sequence: Synthetic oligonucleotide
gcaaaccaugcagaucccu

SEQ ID NO: 2130314 - RNA, 19 nt, Artificial Sequence
  Description of Artificial Sequence: Synthetic oligonucleotide
ccgcuuugaucugaagcca

SEQ ID NO: 2130315 - RNA, 19 nt, Artificial Sequence
  Description of Artificial Sequence: Synthetic oligonucleotide
ggugggccugugcggugac

SEQ ID NO: 2130316 - RNA, 19 nt, Artificial Sequence
  Description of Artificial Sequence: Synthetic oligonucleotide
gggccgguucugcugccuc

SEQ ID NO: 2130317 - RNA, 19 nt, Artificial Sequence
  Description of Artificial Sequence: Synthetic oligonucleotide
cggagggccgguucugcug

SEQ ID NO: 2130318 - RNA, 19 nt, Artificial Sequence
  Description of Artificial Sequence: Synthetic oligonucleotide
gaacaccgauguuguuguu

SEQ ID NO: 2130319 - RNA, 19 nt, Artificial Sequence
  Description of Artificial Sequence: Synthetic oligonucleotide
ggcuccgacggaagugcuc

SEQ ID NO: 2130320 - RNA, 19 nt, Artificial Sequence
  Description of Artificial Sequence: Synthetic oligonucleotide
ccugugcggugacugcuga

SEQ ID NO: 2130321 - RNA, 19 nt, Artificial Sequence
  Description of Artificial Sequence: Synthetic oligonucleotide
cgagcgccugcagaugcgc

SEQ ID NO: 2130322 - RNA, 19 nt, Artificial Sequence
  Description of Artificial Sequence: Synthetic oligonucleotide
gccucaucuuggagacaug

SEQ ID NO: 2130323 - RNA, 19 nt, Artificial Sequence
  Description of Artificial Sequence: Synthetic oligonucleotide
gccgguucugcugccucuc

SEQ ID NO: 2130324 - RNA, 19 nt, Artificial Sequence
  Description of Artificial Sequence: Synthetic oligonucleotide
caguugcacuggguggucu

SEQ ID NO: 2130325 - RNA, 19 nt, Artificial Sequence
  Description of Artificial Sequence: Synthetic oligonucleotide
gcccaggcuccgacggaag

SEQ ID NO: 2130326 - RNA, 19 nt, Artificial Sequence
  Description of Artificial Sequence: Synthetic oligonucleotide
cugggagggucugcauucu

SEQ ID NO: 2130327 - RNA, 19 nt, Artificial Sequence
  Description of Artificial Sequence: Synthetic oligonucleotide
ggugcuggcucugguuccu

SEQ ID NO: 2130328 - RNA, 19 nt, Artificial Sequence
  Description of Artificial Sequence: Synthetic oligonucleotide
cgacggaagugcucuucca

SEQ ID NO: 2130329 - RNA, 19 nt, Artificial Sequence
  Description of Artificial Sequence: Synthetic oligonucleotide
ggcuggcccgggcgugaug

SEQ ID NO: 2130330 - RNA, 19 nt, Artificial Sequence
  Description of Artificial Sequence: Synthetic oligonucleotide
gggagggaugccucaucuu

SEQ ID NO: 2130331 - RNA, 19 nt, Artificial Sequence
  Description of Artificial Sequence: Synthetic oligonucleotide
caccgauguuguuguucau

SEQ ID NO: 2130332 - RNA, 19 nt, Artificial Sequence
  Description of Artificial Sequence: Synthetic oligonucleotide
cgaaguggucguccacaga

SEQ ID NO: 2130333 - RNA, 19 nt, Artificial Sequence
  Description of Artificial Sequence: Synthetic oligonucleotide
cugccucuccacagccgau

SEQ ID NO: 2130334 - RNA, 19 nt, Artificial Sequence
  Description of Artificial Sequence: Synthetic oligonucleotide
gcccgggcgugaugcugac

SEQ ID NO: 2130335 - RNA, 19 nt, Artificial Sequence
  Description of Artificial Sequence: Synthetic oligonucleotide
ggacaccgaguugggugcu

SEQ ID NO: 2130336 - RNA, 19 nt, Artificial Sequence
  Description of Artificial Sequence: Synthetic oligonucleotide
ccacagccgaucugccagu

SEQ ID NO: 2130337 - RNA, 19 nt, Artificial Sequence
  Description of Artificial Sequence: Synthetic oligonucleotide
cuccgacggaagugcucuu

SEQ ID NO: 2130338 - RNA, 19 nt, Artificial Sequence
  Description of Artificial Sequence: Synthetic oligonucleotide
cccuguguggucggagggu

SEQ ID NO: 2130339 - RNA, 19 nt, Artificial Sequence
  Description of Artificial Sequence: Synthetic oligonucleotide
ggcugaccaugugggcagu

SEQ ID NO: 2130340 - RNA, 19 nt, Artificial Sequence
  Description of Artificial Sequence: Synthetic oligonucleotide
ggucguccacagagccagu

SEQ ID NO: 2130341 - RNA, 19 nt, Artificial Sequence
  Description of Artificial Sequence: Synthetic oligonucleotide
cggguuccaugcugaauuu

SEQ ID NO: 2130342 - RNA, 19 nt, Artificial Sequence
  Description of Artificial Sequence: Synthetic oligonucleotide
cgggcgugaugcugacucu

SEQ ID NO: 2130343 - RNA, 19 nt, Artificial Sequence
  Description of Artificial Sequence: Synthetic oligonucleotide
gccugcagaugcgcagguu

SEQ ID NO: 2130344 - RNA, 19 nt, Artificial Sequence
  Description of Artificial Sequence: Synthetic oligonucleotide
cccggguuccaugcugaau

SEQ ID NO: 2130345 - RNA, 19 nt, Artificial Sequence
  Description of Artificial Sequence: Synthetic oligonucleotide
cgccugcagaugcgcaggu

SEQ ID NO: 2130346 - RNA, 19 nt, Artificial Sequence
  Description of Artificial Sequence: Synthetic oligonucleotide
gcgcuguccuuggccgcuu

SEQ ID NO: 2130347 - RNA, 19 nt, Artificial Sequence
  Description of Artificial Sequence: Synthetic oligonucleotide
cccgggcgugaugcugacu

SEQ ID NO: 2130348 - RNA, 19 nt, Artificial Sequence
  Description of Artificial Sequence: Synthetic oligonucleotide
uucaccaugauucagagcc

SEQ ID NO: 2130349 - RNA, 19 nt, Artificial Sequence
  Description of Artificial Sequence: Synthetic oligonucleotide
acuguuaaguuucuggucc

SEQ ID NO: 2130350 - RNA, 19 nt, Artificial Sequence
  Description of Artificial Sequence: Synthetic oligonucleotide
aauaaguuugugcuuggac

SEQ ID NO: 2130351 - RNA, 19 nt, Artificial Sequence
  Description of Artificial Sequence: Synthetic oligonucleotide
agaacugcaguauaucugc

SEQ ID NO: 2130352 - RNA, 19 nt, Artificial Sequence
  Description of Artificial Sequence: Synthetic oligonucleotide
gacuagaucaaacucaaag

SEQ ID NO: 2130353 - RNA, 19 nt, Artificial Sequence
  Description of Artificial Sequence: Synthetic oligonucleotide
agugauguugauaauaucg

SEQ ID NO: 2130354 - RNA, 19 nt, Artificial Sequence
  Description of Artificial Sequence: Synthetic oligonucleotide
gauguugauaauaucgucg

SEQ ID NO: 2130355 - RNA, 19 nt, Artificial Sequence
  Description of Artificial Sequence: Synthetic oligonucleotide
ugagauaccuucuaggugu

SEQ ID NO: 2130356 - RNA, 19 nt, Artificial Sequence
  Description of Artificial Sequence: Synthetic oligonucleotide
ucucaguauaauaaguuug

SEQ ID NO: 2130357 - RNA, 19 nt, Artificial Sequence
  Description of Artificial Sequence: Synthetic oligonucleotide
gauaauaucgucgucugag

SEQ ID NO: 2130358 - RNA, 19 nt, Artificial Sequence
  Description of Artificial Sequence: Synthetic oligonucleotide
aguauaucugcccggacac

SEQ ID NO: 2130359 - RNA, 19 nt, Artificial Sequence
  Description of Artificial Sequence: Synthetic oligonucleotide
aacugcaguauaucugccc

SEQ ID NO: 2130360 - RNA, 19 nt, Artificial Sequence
  Description of Artificial Sequence: Synthetic oligonucleotide
auuaccuaguuaucuacac

SEQ ID NO: 2130361 - RNA, 19 nt, Artificial Sequence
  Description of Artificial Sequence: Synthetic oligonucleotide
auaaguuugugcuuggaca

SEQ ID NO: 2130362 - RNA, 19 nt, Artificial Sequence
  Description of Artificial Sequence: Synthetic oligonucleotide
auaucgucgucugagauac

SEQ ID NO: 2130363 - RNA, 19 nt, Artificial Sequence
  Description of Artificial Sequence: Synthetic oligonucleotide
aacucuaccacacagccua

SEQ ID NO: 2130364 - RNA, 19 nt, Artificial Sequence
  Description of Artificial Sequence: Synthetic oligonucleotide
uccacuuucuuaauggcug

SEQ ID NO: 2130365 - RNA, 19 nt, Artificial Sequence
  Description of Artificial Sequence: Synthetic oligonucleotide
acuagaucaaacucaaagu

SEQ ID NO: 2130366 - RNA, 19 nt, Artificial Sequence
  Description of Artificial Sequence: Synthetic oligonucleotide
agggcuuugaguugcuucc

SEQ ID NO: 2130367 - RNA, 19 nt, Artificial Sequence
  Description of Artificial Sequence: Synthetic oligonucleotide
uuaaguuucugguccaccc

SEQ ID NO: 2130368 - RNA, 19 nt, Artificial Sequence
  Description of Artificial Sequence: Synthetic oligonucleotide
acugcaguauaucugcccg

SEQ ID NO: 2130369 - RNA, 19 nt, Artificial Sequence
  Description of Artificial Sequence: Synthetic oligonucleotide
auaucagaaugguuuugcc

SEQ ID NO: 2130370 - RNA, 19 nt, Artificial Sequence
  Description of Artificial Sequence: Synthetic oligonucleotide
aaguugagggcuuugaguu

SEQ ID NO: 2130371 - RNA, 19 nt, Artificial Sequence
  Description of Artificial Sequence: Synthetic oligonucleotide
ugaagacuagaucaaacuc

SEQ ID NO: 2130372 - RNA, 19 nt, Artificial Sequence
  Description of Artificial Sequence: Synthetic oligonucleotide
acaguuccgagcuuccugc

SEQ ID NO: 2130373 - RNA, 19 nt, Artificial Sequence
  Description of Artificial Sequence: Synthetic oligonucleotide
auaaauuaccuaguuaucu

SEQ ID NO: 2130374 - RNA, 19 nt, Artificial Sequence
  Description of Artificial Sequence: Synthetic oligonucleotide
augauucagagccauuuuc

SEQ ID NO: 2130375 - RNA, 19 nt, Artificial Sequence
  Description of Artificial Sequence: Synthetic oligonucleotide
caaacucuaccacacagcc

SEQ ID NO: 2130376 - RNA, 19 nt, Artificial Sequence
  Description of Artificial Sequence: Synthetic oligonucleotide
uaucagaaugguuuugccc

SEQ ID NO: 2130377 - RNA, 19 nt, Artificial Sequence
  Description of Artificial Sequence: Synthetic oligonucleotide
ucugagauaccuucuaggu

SEQ ID NO: 2130378 - RNA, 19 nt, Artificial Sequence
  Description of Artificial Sequence: Synthetic oligonucleotide
uccaacuccagcagaauug

SEQ ID NO: 2130379 - RNA, 19 nt, Artificial Sequence
  Description of Artificial Sequence: Synthetic oligonucleotide
acgucacacacuuuauacc

SEQ ID NO: 2130380 - RNA, 19 nt, Artificial Sequence
  Description of Artificial Sequence: Synthetic oligonucleotide
cuguuaaggccaaucaagg

SEQ ID NO: 2130381 - RNA, 19 nt, Artificial Sequence
  Description of Artificial Sequence: Synthetic oligonucleotide
aucaaggcuccauagugac

SEQ ID NO: 2130382 - RNA, 19 nt, Artificial Sequence
  Description of Artificial Sequence: Synthetic oligonucleotide
ugauacgucacacacuuua

SEQ ID NO: 2130383 - RNA, 19 nt, Artificial Sequence
  Description of Artificial Sequence: Synthetic oligonucleotide
ucuacugcuauucccguga

SEQ ID NO: 2130384 - RNA, 19 nt, Artificial Sequence
  Description of Artificial Sequence: Synthetic oligonucleotide
ucauugagacgccaggagc

SEQ ID NO: 2130385 - RNA, 19 nt, Artificial Sequence
  Description of Artificial Sequence: Synthetic oligonucleotide
uaccuaguuaucuacacaa

SEQ ID NO: 2130386 - RNA, 19 nt, Artificial Sequence
  Description of Artificial Sequence: Synthetic oligonucleotide
aauggaccgguugagaaug

SEQ ID NO: 2130387 - RNA, 19 nt, Artificial Sequence
  Description of Artificial Sequence: Synthetic oligonucleotide
gccaugauaaauuaccuag

SEQ ID NO: 2130388 - RNA, 19 nt, Artificial Sequence
  Description of Artificial Sequence: Synthetic oligonucleotide
uauaucugcccggacaccg

SEQ ID NO: 2130389 - RNA, 19 nt, Artificial Sequence
  Description of Artificial Sequence: Synthetic oligonucleotide
uacgucacacacuuuauac

SEQ ID NO: 2130390 - RNA, 19 nt, Artificial Sequence
  Description of Artificial Sequence: Synthetic oligonucleotide
gauaucagaaugguuuugc

SEQ ID NO: 2130391 - RNA, 19 nt, Artificial Sequence
  Description of Artificial Sequence: Synthetic oligonucleotide
aacacacugaaugccacuc

SEQ ID NO: 2130392 - RNA, 19 nt, Artificial Sequence
  Description of Artificial Sequence: Synthetic oligonucleotide
uucugcuuauuccagucgc

SEQ ID NO: 2130393 - RNA, 19 nt, Artificial Sequence
  Description of Artificial Sequence: Synthetic oligonucleotide
uugauaauaucgucgucug

SEQ ID NO: 2130394 - RNA, 19 nt, Artificial Sequence
  Description of Artificial Sequence: Synthetic oligonucleotide
agugauacgucacacacuu

SEQ ID NO: 2130395 - RNA, 19 nt, Artificial Sequence
  Description of Artificial Sequence: Synthetic oligonucleotide
caugucucaguauaauaag

SEQ ID NO: 2130396 - RNA, 19 nt, Artificial Sequence
  Description of Artificial Sequence: Synthetic oligonucleotide
gugagcagauaucagaaug

SEQ ID NO: 2130397 - RNA, 19 nt, Artificial Sequence
  Description of Artificial Sequence: Synthetic oligonucleotide
ggugagauccaacagcacg

SEQ ID NO: 2130398 - RNA, 19 nt, Artificial Sequence
  Description of Artificial Sequence: Synthetic oligonucleotide
uuaucuacacaaacucuac

SEQ ID NO: 2130399 - RNA, 19 nt, Artificial Sequence
  Description of Artificial Sequence: Synthetic oligonucleotide
ggaugugaagacuagauca

SEQ ID NO: 2130400 - RNA, 19 nt, Artificial Sequence
  Description of Artificial Sequence: Synthetic oligonucleotide
uaucuacacaaacucuacc

SEQ ID NO: 2130401 - RNA, 19 nt, Artificial Sequence
  Description of Artificial Sequence: Synthetic oligonucleotide
acacuuuauaccuccgguc

SEQ ID NO: 2130402 - RNA, 19 nt, Artificial Sequence
  Description of Artificial Sequence: Synthetic oligonucleotide
caaucaaggcuccauagug

SEQ ID NO: 2130403 - RNA, 19 nt, Artificial Sequence
  Description of Artificial Sequence: Synthetic oligonucleotide
aguuugugcuuggacaugc

SEQ ID NO: 2130404 - RNA, 19 nt, Artificial Sequence
  Description of Artificial Sequence: Synthetic oligonucleotide
uucaggagggcucuacugc

SEQ ID NO: 2130405 - RNA, 19 nt, Artificial Sequence
  Description of Artificial Sequence: Synthetic oligonucleotide
gagaaacacacuaaguaac

SEQ ID NO: 2130406 - RNA, 19 nt, Artificial Sequence
  Description of Artificial Sequence: Synthetic oligonucleotide
auaauaaguuugugcuugg

SEQ ID NO: 2130407 - RNA, 19 nt, Artificial Sequence
  Description of Artificial Sequence: Synthetic oligonucleotide
caagcuuucggaacguggc

SEQ ID NO: 2130408 - RNA, 19 nt, Artificial Sequence
  Description of Artificial Sequence: Synthetic oligonucleotide
ucacacacuuuauaccucc

SEQ ID NO: 2130409 - RNA, 19 nt, Artificial Sequence
  Description of Artificial Sequence: Synthetic oligonucleotide
uaaauuaccuaguuaucua

SEQ ID NO: 2130410 - RNA, 19 nt, Artificial Sequence
  Description of Artificial Sequence: Synthetic oligonucleotide
uaaguuugugcuuggacau

SEQ ID NO: 2130411 - RNA, 19 nt, Artificial Sequence
  Description of Artificial Sequence: Synthetic oligonucleotide
ugucucaguauaauaaguu

SEQ ID NO: 2130412 - RNA, 19 nt, Artificial Sequence
  Description of Artificial Sequence: Synthetic oligonucleotide
ucccaagugugcucaaugg

SEQ ID NO: 2130413 - RNA, 19 nt, Artificial Sequence
  Description of Artificial Sequence: Synthetic oligonucleotide
aauaucgucgucugagaua

SEQ ID NO: 2130414 - RNA, 19 nt, Artificial Sequence
  Description of Artificial Sequence: Synthetic oligonucleotide
caaggcuccauagugacgc

SEQ ID NO: 2130415 - RNA, 19 nt, Artificial Sequence
  Description of Artificial Sequence: Synthetic oligonucleotide
ggaagagugauguugauaa

SEQ ID NO: 2130416 - RNA, 19 nt, Artificial Sequence
  Description of Artificial Sequence: Synthetic oligonucleotide
uuaccuaguuaucuacaca

SEQ ID NO: 2130417 - RNA, 19 nt, Artificial Sequence
  Description of Artificial Sequence: Synthetic oligonucleotide
acguuguagcuucuccucc

SEQ ID NO: 2130418 - RNA, 19 nt, Artificial Sequence
  Description of Artificial Sequence: Synthetic oligonucleotide
aacaucuuucaagcuuucg

SEQ ID NO: 2130419 - RNA, 19 nt, Artificial Sequence
  Description of Artificial Sequence: Synthetic oligonucleotide
ugaguugcuucccacaguu

SEQ ID NO: 2130420 - RNA, 19 nt, Artificial Sequence
  Description of Artificial Sequence: Synthetic oligonucleotide
ugggguagugcucaagaac

SEQ ID NO: 2130421 - RNA, 19 nt, Artificial Sequence
  Description of Artificial Sequence: Synthetic oligonucleotide
ucaucguagaucucaugga

SEQ ID NO: 2130422 - RNA, 19 nt, Artificial Sequence
  Description of Artificial Sequence: Synthetic oligonucleotide
agggaagaagucuuuccag

SEQ ID NO: 2130423 - RNA, 19 nt, Artificial Sequence
  Description of Artificial Sequence: Synthetic oligonucleotide
ugggacuccucaauaggag

SEQ ID NO: 2130424 - RNA, 19 nt, Artificial Sequence
  Description of Artificial Sequence: Synthetic oligonucleotide
acacacugaaugccacucc

SEQ ID NO: 2130425 - RNA, 19 nt, Artificial Sequence
  Description of Artificial Sequence: Synthetic oligonucleotide
acacacuuuauaccuccgg

SEQ ID NO: 2130426 - RNA, 19 nt, Artificial Sequence
  Description of Artificial Sequence: Synthetic oligonucleotide
aucgguucugcuuauucca

SEQ ID NO: 2130427 - RNA, 19 nt, Artificial Sequence
  Description of Artificial Sequence: Synthetic oligonucleotide
uaauaucgucgucugagau

SEQ ID NO: 2130428 - RNA, 19 nt, Artificial Sequence
  Description of Artificial Sequence: Synthetic oligonucleotide
uucggaacguggcagcuga

SEQ ID NO: 2130429 - RNA, 19 nt, Artificial Sequence
  Description of Artificial Sequence: Synthetic oligonucleotide
uucccaagugugcucaaug

SEQ ID NO: 2130430 - RNA, 19 nt, Artificial Sequence
  Description of Artificial Sequence: Synthetic oligonucleotide
guugagaauggaugugaag

SEQ ID NO: 2130431 - RNA, 19 nt, Artificial Sequence
  Description of Artificial Sequence: Synthetic oligonucleotide
uagugcucaagaacugcag

SEQ ID NO: 2130432 - RNA, 19 nt, Artificial Sequence
  Description of Artificial Sequence: Synthetic oligonucleotide
aacagcacgcagguucucg

SEQ ID NO: 2130433 - RNA, 19 nt, Artificial Sequence
  Description of Artificial Sequence: Synthetic oligonucleotide
uuguuucacuuuuccuugg

SEQ ID NO: 2130434 - RNA, 19 nt, Artificial Sequence
  Description of Artificial Sequence: Synthetic oligonucleotide
gauucagagccauuuucuc

SEQ ID NO: 2130435 - RNA, 19 nt, Artificial Sequence
  Description of Artificial Sequence: Synthetic oligonucleotide
aauggaugugaagacuaga

SEQ ID NO: 2130436 - RNA, 19 nt, Artificial Sequence
  Description of Artificial Sequence: Synthetic oligonucleotide
ccuguuaaggccaaucaag

SEQ ID NO: 2130437 - RNA, 19 nt, Artificial Sequence
  Description of Artificial Sequence: Synthetic oligonucleotide
ucaaggcuccauagugacg

SEQ ID NO: 2130438 - RNA, 19 nt, Artificial Sequence
  Description of Artificial Sequence: Synthetic oligonucleotide
augauaaauuaccuaguua

SEQ ID NO: 2130439 - RNA, 19 nt, Artificial Sequence
  Description of Artificial Sequence: Synthetic oligonucleotide
auaauaucgucgucugaga

SEQ ID NO: 2130440 - RNA, 19 nt, Artificial Sequence
  Description of Artificial Sequence: Synthetic oligonucleotide
ucccuguuaaggccaauca

SEQ ID NO: 2130441 - RNA, 19 nt, Artificial Sequence
  Description of Artificial Sequence: Synthetic oligonucleotide
ugauccagugauacgucac

SEQ ID NO: 2130442 - RNA, 19 nt, Artificial Sequence
  Description of Artificial Sequence: Synthetic oligonucleotide
aaugccacuccugccauga

SEQ ID NO: 2130443 - RNA, 19 nt, Artificial Sequence
  Description of Artificial Sequence: Synthetic oligonucleotide
cuuucuuaauggcugccug

SEQ ID NO: 2130444 - RNA, 19 nt, Artificial Sequence
  Description of Artificial Sequence: Synthetic oligonucleotide
accuucuagguguuucagg

SEQ ID NO: 2130445 - RNA, 19 nt, Artificial Sequence
  Description of Artificial Sequence: Synthetic oligonucleotide
auuccagucgcccucucca

SEQ ID NO: 2130446 - RNA, 19 nt, Artificial Sequence
  Description of Artificial Sequence: Synthetic oligonucleotide
caucuuucaagcuuucgga

SEQ ID NO: 2130447 - RNA, 19 nt, Artificial Sequence
  Description of Artificial Sequence: Synthetic oligonucleotide
gaauuggcacuccgguagg

SEQ ID NO: 2130448 - RNA, 19 nt, Artificial Sequence
  Description of Artificial Sequence: Synthetic oligonucleotide
caaaguugagggcuuugag

SEQ ID NO: 2130449 - RNA, 19 nt, Artificial Sequence
  Description of Artificial Sequence: Synthetic oligonucleotide
aguagggaagaagucuuuc

SEQ ID NO: 2130450 - RNA, 19 nt, Artificial Sequence
  Description of Artificial Sequence: Synthetic oligonucleotide
ugugaauggaccgguugag

SEQ ID NO: 2130451 - RNA, 19 nt, Artificial Sequence
  Description of Artificial Sequence: Synthetic oligonucleotide
aacguggcagcugauccag

SEQ ID NO: 2130452 - RNA, 19 nt, Artificial Sequence
  Description of Artificial Sequence: Synthetic oligonucleotide
ucacguuguagcuucuccu

SEQ ID NO: 2130453 - RNA, 19 nt, Artificial Sequence
  Description of Artificial Sequence: Synthetic oligonucleotide
accgguugagaauggaugu

SEQ ID NO: 2130454 - RNA, 19 nt, Artificial Sequence
  Description of Artificial Sequence: Synthetic oligonucleotide
gaaacacacuaaguaacac

SEQ ID NO: 2130455 - RNA, 19 nt, Artificial Sequence
  Description of Artificial Sequence: Synthetic oligonucleotide
cacuccgguaggaagagug

SEQ ID NO: 2130456 - RNA, 19 nt, Artificial Sequence
  Description of Artificial Sequence: Synthetic oligonucleotide
ugauaauaucgucgucuga

SEQ ID NO: 2130457 - RNA, 19 nt, Artificial Sequence
  Description of Artificial Sequence: Synthetic oligonucleotide
aggggcaauccuuuccuuc

SEQ ID NO: 2130458 - RNA, 19 nt, Artificial Sequence
  Description of Artificial Sequence: Synthetic oligonucleotide
cuaguuaucuacacaaacu

SEQ ID NO: 2130459 - RNA, 19 nt, Artificial Sequence
  Description of Artificial Sequence: Synthetic oligonucleotide
uagugacgcucauugagac

SEQ ID NO: 2130460 - RNA, 19 nt, Artificial Sequence
  Description of Artificial Sequence: Synthetic oligonucleotide
guugauaauaucgucgucu

SEQ ID NO: 2130461 - RNA, 19 nt, Artificial Sequence
  Description of Artificial Sequence: Synthetic oligonucleotide
aguaacacacugaaugcca

SEQ ID NO: 2130462 - RNA, 19 nt, Artificial Sequence
  Description of Artificial Sequence: Synthetic oligonucleotide
cugagauaccuucuaggug

SEQ ID NO: 2130463 - RNA, 19 nt, Artificial Sequence
  Description of Artificial Sequence: Synthetic oligonucleotide
gugagauccaacagcacgc

SEQ ID NO: 2130464 - RNA, 19 nt, Artificial Sequence
  Description of Artificial Sequence: Synthetic oligonucleotide
uucuuaauggcugccugga

SEQ ID NO: 2130465 - RNA, 19 nt, Artificial Sequence
  Description of Artificial Sequence: Synthetic oligonucleotide
ccuucaguauuucaggggc

SEQ ID NO: 2130466 - RNA, 19 nt, Artificial Sequence
  Description of Artificial Sequence: Synthetic oligonucleotide
uccucaauaggaggcgggg

SEQ ID NO: 2130467 - RNA, 19 nt, Artificial Sequence
  Description of Artificial Sequence: Synthetic oligonucleotide
cacuuuauaccuccgguca

SEQ ID NO: 2130468 - RNA, 19 nt, Artificial Sequence
  Description of Artificial Sequence: Synthetic oligonucleotide
uccgguaggaagagugaug

SEQ ID NO: 2130469 - RNA, 19 nt, Artificial Sequence
  Description of Artificial Sequence: Synthetic oligonucleotide
uucccgugagcagauauca

SEQ ID NO: 2130470 - RNA, 19 nt, Artificial Sequence
  Description of Artificial Sequence: Synthetic oligonucleotide
aguuaucuacacaaacucu

SEQ ID NO: 2130471 - RNA, 19 nt, Artificial Sequence
  Description of Artificial Sequence: Synthetic oligonucleotide
ccacccagcuacaaaaucg

SEQ ID NO: 2130472 - RNA, 19 nt, Artificial Sequence
  Description of Artificial Sequence: Synthetic oligonucleotide
aagcuuucggaacguggca

SEQ ID NO: 2130473 - RNA, 19 nt, Artificial Sequence
  Description of Artificial Sequence: Synthetic oligonucleotide
ggaacguggcagcugaucc

SEQ ID NO: 2130474 - RNA, 19 nt, Artificial Sequence
  Description of Artificial Sequence: Synthetic oligonucleotide
gaauggaugugaagacuag

SEQ ID NO: 2130475 - RNA, 19 nt, Artificial Sequence
  Description of Artificial Sequence: Synthetic oligonucleotide
aggcugugugaauggaccg

SEQ ID NO: 2130476 - RNA, 19 nt, Artificial Sequence
  Description of Artificial Sequence: Synthetic oligonucleotide
agaaacacacuaaguaaca

SEQ ID NO: 2130477 - RNA, 19 nt, Artificial Sequence
  Description of Artificial Sequence: Synthetic oligonucleotide
agagugauguugauaauau

SEQ ID NO: 2130478 - RNA, 19 nt, Artificial Sequence
  Description of Artificial Sequence: Synthetic oligonucleotide
uccaugucucaguauaaua

SEQ ID NO: 2130479 - RNA, 19 nt, Artificial Sequence
  Description of Artificial Sequence: Synthetic oligonucleotide
uggcugaacuucccaagug

SEQ ID NO: 2130480 - RNA, 19 nt, Artificial Sequence
  Description of Artificial Sequence: Synthetic oligonucleotide
ccagcuacaaaaucgguuc

SEQ ID NO: 2130481 - RNA, 19 nt, Artificial Sequence
  Description of Artificial Sequence: Synthetic oligonucleotide
cacuaaguaacacacugaa

SEQ ID NO: 2130482 - RNA, 19 nt, Artificial Sequence
  Description of Artificial Sequence: Synthetic oligonucleotide
cucaauaggaggcgggguc

SEQ ID NO: 2130483 - RNA, 19 nt, Artificial Sequence
  Description of Artificial Sequence: Synthetic oligonucleotide
gacuccucaauaggaggcg

SEQ ID NO: 2130484 - RNA, 19 nt, Artificial Sequence
  Description of Artificial Sequence: Synthetic oligonucleotide
gaaugguuuugcccuucag

SEQ ID NO: 2130485 - RNA, 19 nt, Artificial Sequence
  Description of Artificial Sequence: Synthetic oligonucleotide
uguugauaauaucgucguc

SEQ ID NO: 2130486 - RNA, 19 nt, Artificial Sequence
  Description of Artificial Sequence: Synthetic oligonucleotide
ugcaguccaucacuguuaa

SEQ ID NO: 2130487 - RNA, 19 nt, Artificial Sequence
  Description of Artificial Sequence: Synthetic oligonucleotide
gggagaaacacacuaagua

SEQ ID NO: 2130488 - RNA, 19 nt, Artificial Sequence
  Description of Artificial Sequence: Synthetic oligonucleotide
ccuaguuaucuacacaaac

SEQ ID NO: 2130489 - RNA, 19 nt, Artificial Sequence
  Description of Artificial Sequence: Synthetic oligonucleotide
uaaggccaaucaaggcucc

SEQ ID NO: 2130490 - RNA, 19 nt, Artificial Sequence
  Description of Artificial Sequence: Synthetic oligonucleotide
uaucugcccggacaccgcc

SEQ ID NO: 2130491 - RNA, 19 nt, Artificial Sequence
  Description of Artificial Sequence: Synthetic oligonucleotide
aucguagaucucauggaag

SEQ ID NO: 2130492 - RNA, 19 nt, Artificial Sequence
  Description of Artificial Sequence: Synthetic oligonucleotide
uaacacacugaaugccacu

SEQ ID NO: 2130493 - RNA, 19 nt, Artificial Sequence
  Description of Artificial Sequence: Synthetic oligonucleotide
cucaguauaauaaguuugu

SEQ ID NO: 2130494 - RNA, 19 nt, Artificial Sequence
  Description of Artificial Sequence: Synthetic oligonucleotide
agcagaauuggcacuccgg

SEQ ID NO: 2130495 - RNA, 19 nt, Artificial Sequence
  Description of Artificial Sequence: Synthetic oligonucleotide
gaugugaagacuagaucaa

SEQ ID NO: 2130496 - RNA, 19 nt, Artificial Sequence
  Description of Artificial Sequence: Synthetic oligonucleotide
uuuccuuggucauccacuu

SEQ ID NO: 2130497 - RNA, 19 nt, Artificial Sequence
  Description of Artificial Sequence: Synthetic oligonucleotide
ugcaguauaucugcccgga

SEQ ID NO: 2130498 - RNA, 19 nt, Artificial Sequence
  Description of Artificial Sequence: Synthetic oligonucleotide
aguccaucacuguuaaguu

SEQ ID NO: 2130499 - RNA, 19 nt, Artificial Sequence
  Description of Artificial Sequence: Synthetic oligonucleotide
agaauggaugugaagacua

SEQ ID NO: 2130500 - RNA, 19 nt, Artificial Sequence
  Description of Artificial Sequence: Synthetic oligonucleotide
uucaguauuucaggggcaa

SEQ ID NO: 2130501 - RNA, 19 nt, Artificial Sequence
  Description of Artificial Sequence: Synthetic oligonucleotide
gggacuccucaauaggagg

SEQ ID NO: 2130502 - RNA, 19 nt, Artificial Sequence
  Description of Artificial Sequence: Synthetic oligonucleotide
guuaaguuucugguccacc

SEQ ID NO: 2130503 - RNA, 19 nt, Artificial Sequence
  Description of Artificial Sequence: Synthetic oligonucleotide
ggcucuacugcuauucccg

SEQ ID NO: 2130504 - RNA, 19 nt, Artificial Sequence
  Description of Artificial Sequence: Synthetic oligonucleotide
uuccaguagggaagaaguc

SEQ ID NO: 2130505 - RNA, 19 nt, Artificial Sequence
  Description of Artificial Sequence: Synthetic oligonucleotide
cuccucaauaggaggcggg

SEQ ID NO: 2130506 - RNA, 19 nt, Artificial Sequence
  Description of Artificial Sequence: Synthetic oligonucleotide
uugaguugcuucccacagu

SEQ ID NO: 2130507 - RNA, 19 nt, Artificial Sequence
  Description of Artificial Sequence: Synthetic oligonucleotide
cacguuguagcuucuccuc

SEQ ID NO: 2130508 - RNA, 19 nt, Artificial Sequence
  Description of Artificial Sequence: Synthetic oligonucleotide
ugcucaagaacugcaguau

SEQ ID NO: 2130509 - RNA, 19 nt, Artificial Sequence
  Description of Artificial Sequence: Synthetic oligonucleotide
agauaucagaaugguuuug

SEQ ID NO: 2130510 - RNA, 19 nt, Artificial Sequence
  Description of Artificial Sequence: Synthetic oligonucleotide
caguauaucugcccggaca

SEQ ID NO: 2130511 - RNA, 19 nt, Artificial Sequence
  Description of Artificial Sequence: Synthetic oligonucleotide
cugcaguauaucugcccgg

SEQ ID NO: 2130512 - RNA, 19 nt, Artificial Sequence
  Description of Artificial Sequence: Synthetic oligonucleotide
augucucaguauaauaagu

SEQ ID NO: 2130513 - RNA, 19 nt, Artificial Sequence
  Description of Artificial Sequence: Synthetic oligonucleotide
aggagcucuccacgggaac

SEQ ID NO: 2130514 - RNA, 19 nt, Artificial Sequence
  Description of Artificial Sequence: Synthetic oligonucleotide
aucgucgucugagauaccu

SEQ ID NO: 2130515 - RNA, 19 nt, Artificial Sequence
  Description of Artificial Sequence: Synthetic oligonucleotide
auggaugugaagacuagau

SEQ ID NO: 2130516 - RNA, 19 nt, Artificial Sequence
  Description of Artificial Sequence: Synthetic oligonucleotide
agcuuucggaacguggcag

SEQ ID NO: 2130517 - RNA, 19 nt, Artificial Sequence
  Description of Artificial Sequence: Synthetic oligonucleotide
ucaccaugauucagagcca

SEQ ID NO: 2130518 - RNA, 19 nt, Artificial Sequence
  Description of Artificial Sequence: Synthetic oligonucleotide
cugcuuauuccagucgccc

SEQ ID NO: 2130519 - RNA, 19 nt, Artificial Sequence
  Description of Artificial Sequence: Synthetic oligonucleotide
aaguuugugcuuggacaug

SEQ ID NO: 2130520 - RNA, 19 nt, Artificial Sequence
  Description of Artificial Sequence: Synthetic oligonucleotide
ugaaugccacuccugccau

SEQ ID NO: 2130521 - RNA, 19 nt, Artificial Sequence
  Description of Artificial Sequence: Synthetic oligonucleotide
cacaguuccgagcuuccug

SEQ ID NO: 2130522 - RNA, 19 nt, Artificial Sequence
  Description of Artificial Sequence: Synthetic oligonucleotide
acuuuauaccuccggucau

SEQ ID NO: 2130523 - RNA, 19 nt, Artificial Sequence
  Description of Artificial Sequence: Synthetic oligonucleotide
gacgccaggagcucuccac

SEQ ID NO: 2130524 - RNA, 19 nt, Artificial Sequence
  Description of Artificial Sequence: Synthetic oligonucleotide
ugagauccaacagcacgca

SEQ ID NO: 2130525 - RNA, 19 nt, Artificial Sequence
  Description of Artificial Sequence: Synthetic oligonucleotide
gccaaucaaggcuccauag

SEQ ID NO: 2130526 - RNA, 19 nt, Artificial Sequence
  Description of Artificial Sequence: Synthetic oligonucleotide
auaccuccggucaucguag

SEQ ID NO: 2130527 - RNA, 19 nt, Artificial Sequence
  Description of Artificial Sequence: Synthetic oligonucleotide
uacugcuauucccgugagc

SEQ ID NO: 2130528 - RNA, 19 nt, Artificial Sequence
  Description of Artificial Sequence: Synthetic oligonucleotide
ucgucugagauaccuucua

SEQ ID NO: 2130529 - RNA, 19 nt, Artificial Sequence
  Description of Artificial Sequence: Synthetic oligonucleotide
auacgucacacacuuuaua

SEQ ID NO: 2130530 - RNA, 19 nt, Artificial Sequence
  Description of Artificial Sequence: Synthetic oligonucleotide
caguauuucaggggcaauc

SEQ ID NO: 2130531 - RNA, 19 nt, Artificial Sequence
  Description of Artificial Sequence: Synthetic oligonucleotide
acuccucaauaggaggcgg

SEQ ID NO: 2130532 - RNA, 19 nt, Artificial Sequence
  Description of Artificial Sequence: Synthetic oligonucleotide
caucguagaucucauggaa

SEQ ID NO: 2130533 - RNA, 19 nt, Artificial Sequence
  Description of Artificial Sequence: Synthetic oligonucleotide
aaacucuaccacacagccu

SEQ ID NO: 2130534 - RNA, 19 nt, Artificial Sequence
  Description of Artificial Sequence: Synthetic oligonucleotide
aagugugcucaauggggua

SEQ ID NO: 2130535 - RNA, 19 nt, Artificial Sequence
  Description of Artificial Sequence: Synthetic oligonucleotide
guaacacacugaaugccac

SEQ ID NO: 2130536 - RNA, 19 nt, Artificial Sequence
  Description of Artificial Sequence: Synthetic oligonucleotide
agcuacaaaaucgguucug

SEQ ID NO: 2130537 - RNA, 19 nt, Artificial Sequence
  Description of Artificial Sequence: Synthetic oligonucleotide
uguuaaguuucugguccac

SEQ ID NO: 2130538 - RNA, 19 nt, Artificial Sequence
  Description of Artificial Sequence: Synthetic oligonucleotide
auaucugcccggacaccgc

SEQ ID NO: 2130539 - RNA, 19 nt, Artificial Sequence
  Description of Artificial Sequence: Synthetic oligonucleotide
ggcggggucacguuguagc

SEQ ID NO: 2130540 - RNA, 19 nt, Artificial Sequence
  Description of Artificial Sequence: Synthetic oligonucleotide
gaacguggcagcugaucca

SEQ ID NO: 2130541 - RNA, 19 nt, Artificial Sequence
  Description of Artificial Sequence: Synthetic oligonucleotide
cauugagacgccaggagcu

SEQ ID NO: 2130542 - RNA, 19 nt, Artificial Sequence
  Description of Artificial Sequence: Synthetic oligonucleotide
cagcagaauuggcacuccg

SEQ ID NO: 2130543 - RNA, 19 nt, Artificial Sequence
  Description of Artificial Sequence: Synthetic oligonucleotide
gcuacaaaaucgguucugc

SEQ ID NO: 2130544 - RNA, 19 nt, Artificial Sequence
  Description of Artificial Sequence: Synthetic oligonucleotide
cugggccaugauaaauuac

SEQ ID NO: 2130545 - RNA, 19 nt, Artificial Sequence
  Description of Artificial Sequence: Synthetic oligonucleotide
acacuaaguaacacacuga

SEQ ID NO: 2130546 - RNA, 19 nt, Artificial Sequence
  Description of Artificial Sequence: Synthetic oligonucleotide
uuucaagcuuucggaacgu

SEQ ID NO: 2130547 - RNA, 19 nt, Artificial Sequence
  Description of Artificial Sequence: Synthetic oligonucleotide
caguccaucacuguuaagu

SEQ ID NO: 2130548 - RNA, 19 nt, Artificial Sequence
  Description of Artificial Sequence: Synthetic oligonucleotide
augggacuccucaauagga

SEQ ID NO: 2130549 - RNA, 19 nt, Artificial Sequence
  Description of Artificial Sequence: Synthetic oligonucleotide
cagcugauccagugauacg

SEQ ID NO: 2130550 - RNA, 19 nt, Artificial Sequence
  Description of Artificial Sequence: Synthetic oligonucleotide
aauuggcacuccgguagga

SEQ ID NO: 2130551 - RNA, 19 nt, Artificial Sequence
  Description of Artificial Sequence: Synthetic oligonucleotide
gaacuucccaagugugcuc

SEQ ID NO: 2130552 - RNA, 19 nt, Artificial Sequence
  Description of Artificial Sequence: Synthetic oligonucleotide
ggaaguagggaugggacuc

SEQ ID NO: 2130553 - RNA, 19 nt, Artificial Sequence
  Description of Artificial Sequence: Synthetic oligonucleotide
ccaugucucaguauaauaa

SEQ ID NO: 2130554 - RNA, 19 nt, Artificial Sequence
  Description of Artificial Sequence: Synthetic oligonucleotide
ugagacgccaggagcucuc

SEQ ID NO: 2130555 - RNA, 19 nt, Artificial Sequence
  Description of Artificial Sequence: Synthetic oligonucleotide
cucuacugcuauucccgug

SEQ ID NO: 2130556 - RNA, 19 nt, Artificial Sequence
  Description of Artificial Sequence: Synthetic oligonucleotide
gugauguugauaauaucgu

SEQ ID NO: 2130557 - RNA, 19 nt, Artificial Sequence
  Description of Artificial Sequence: Synthetic oligonucleotide
gguagugcucaagaacugc

SEQ ID NO: 2130558 - RNA, 19 nt, Artificial Sequence
  Description of Artificial Sequence: Synthetic oligonucleotide
ggggccaacggggaaaggg

SEQ ID NO: 2130559 - RNA, 19 nt, Artificial Sequence
  Description of Artificial Sequence: Synthetic oligonucleotide
cuggugguggcugaacuuc

SEQ ID NO: 2130560 - RNA, 19 nt, Artificial Sequence
  Description of Artificial Sequence: Synthetic oligonucleotide
augggguagugcucaagaa

SEQ ID NO: 2130561 - RNA, 19 nt, Artificial Sequence
  Description of Artificial Sequence: Synthetic oligonucleotide
agagccucaccugcucuuc

SEQ ID NO: 2130562 - RNA, 19 nt, Artificial Sequence
  Description of Artificial Sequence: Synthetic oligonucleotide
aggaggcggggucacguug

SEQ ID NO: 2130563 - RNA, 19 nt, Artificial Sequence
  Description of Artificial Sequence: Synthetic oligonucleotide
cuucaguauuucaggggca

SEQ ID NO: 2130564 - RNA, 19 nt, Artificial Sequence
  Description of Artificial Sequence: Synthetic oligonucleotide
ggacuccucaauaggaggc

SEQ ID NO: 2130565 - RNA, 19 nt, Artificial Sequence
  Description of Artificial Sequence: Synthetic oligonucleotide
gguccacccagcuacaaaa

SEQ ID NO: 2130566 - RNA, 19 nt, Artificial Sequence
  Description of Artificial Sequence: Synthetic oligonucleotide
ugguccacccagcuacaaa

SEQ ID NO: 2130567 - RNA, 19 nt, Artificial Sequence
  Description of Artificial Sequence: Synthetic oligonucleotide
gugcucaagaacugcagua

SEQ ID NO: 2130568 - RNA, 19 nt, Artificial Sequence
  Description of Artificial Sequence: Synthetic oligonucleotide
uccagagccucaccugcuc

SEQ ID NO: 2130569 - RNA, 19 nt, Artificial Sequence
  Description of Artificial Sequence: Synthetic oligonucleotide
uuucggaacguggcagcug

SEQ ID NO: 2130570 - RNA, 19 nt, Artificial Sequence
  Description of Artificial Sequence: Synthetic oligonucleotide
acuaaguaacacacugaau

SEQ ID NO: 2130571 - RNA, 19 nt, Artificial Sequence
  Description of Artificial Sequence: Synthetic oligonucleotide
auaggaggcggggucacgu

SEQ ID NO: 2130572 - RNA, 19 nt, Artificial Sequence
  Description of Artificial Sequence: Synthetic oligonucleotide
caugauaaauuaccuaguu

SEQ ID NO: 2130573 - RNA, 19 nt, Artificial Sequence
  Description of Artificial Sequence: Synthetic oligonucleotide
uugcuucccacaguuccga

SEQ ID NO: 2130574 - RNA, 19 nt, Artificial Sequence
  Description of Artificial Sequence: Synthetic oligonucleotide
cacuuucuuaauggcugcc

SEQ ID NO: 2130575 - RNA, 19 nt, Artificial Sequence
  Description of Artificial Sequence: Synthetic oligonucleotide
gucucaguauaauaaguuu

SEQ ID NO: 2130576 - RNA, 19 nt, Artificial Sequence
  Description of Artificial Sequence: Synthetic oligonucleotide
cuacugcuauucccgugag

SEQ ID NO: 2130577 - RNA, 19 nt, Artificial Sequence
  Description of Artificial Sequence: Synthetic oligonucleotide
gagaauggaugugaagacu

SEQ ID NO: 2130578 - RNA, 19 nt, Artificial Sequence
  Description of Artificial Sequence: Synthetic oligonucleotide
uuauaccuccggucaucgu

SEQ ID NO: 2130579 - RNA, 19 nt, Artificial Sequence
  Description of Artificial Sequence: Synthetic oligonucleotide
cuguuaaguuucuggucca

SEQ ID NO: 2130580 - RNA, 19 nt, Artificial Sequence
  Description of Artificial Sequence: Synthetic oligonucleotide
gaaugccacuccugccaug

SEQ ID NO: 2130581 - RNA, 19 nt, Artificial Sequence
  Description of Artificial Sequence: Synthetic oligonucleotide
ucccacaguuccgagcuuc

SEQ ID NO: 2130582 - RNA, 19 nt, Artificial Sequence
  Description of Artificial Sequence: Synthetic oligonucleotide
aaguagggaugggacuccu

SEQ ID NO: 2130583 - RNA, 19 nt, Artificial Sequence
  Description of Artificial Sequence: Synthetic oligonucleotide
caagugugcucaauggggu

SEQ ID NO: 2130584 - RNA, 19 nt, Artificial Sequence
  Description of Artificial Sequence: Synthetic oligonucleotide
aggaagagugauguugaua

SEQ ID NO: 2130585 - RNA, 19 nt, Artificial Sequence
  Description of Artificial Sequence: Synthetic oligonucleotide
aucugggccaugauaaauu

SEQ ID NO: 2130586 - RNA, 19 nt, Artificial Sequence
  Description of Artificial Sequence: Synthetic oligonucleotide
aaaaucgguucugcuuauu

SEQ ID NO: 2130587 - RNA, 19 nt, Artificial Sequence
  Description of Artificial Sequence: Synthetic oligonucleotide
ggggucacguuguagcuuc

SEQ ID NO: 2130588 - RNA, 19 nt, Artificial Sequence
  Description of Artificial Sequence: Synthetic oligonucleotide
gcuuucggaacguggcagc

SEQ ID NO: 2130589 - RNA, 19 nt, Artificial Sequence
  Description of Artificial Sequence: Synthetic oligonucleotide
gggcucuacugcuauuccc

SEQ ID NO: 2130590 - RNA, 19 nt, Artificial Sequence
  Description of Artificial Sequence: Synthetic oligonucleotide
agucgcccucuccaugucu

SEQ ID NO: 2130591 - RNA, 19 nt, Artificial Sequence
  Description of Artificial Sequence: Synthetic oligonucleotide
ggcaauccuuuccuuccag

SEQ ID NO: 2130592 - RNA, 19 nt, Artificial Sequence
  Description of Artificial Sequence: Synthetic oligonucleotide
guauaucugcccggacacc

SEQ ID NO: 2130593 - RNA, 19 nt, Artificial Sequence
  Description of Artificial Sequence: Synthetic oligonucleotide
cucccuguuaaggccaauc

SEQ ID NO: 2130594 - RNA, 19 nt, Artificial Sequence
  Description of Artificial Sequence: Synthetic oligonucleotide
aggcuccauagugacgcuc

SEQ ID NO: 2130595 - RNA, 19 nt, Artificial Sequence
  Description of Artificial Sequence: Synthetic oligonucleotide
ccuagucuugaggaaaaug

SEQ ID NO: 2130596 - RNA, 19 nt, Artificial Sequence
  Description of Artificial Sequence: Synthetic oligonucleotide
gagcagauaucagaauggu

SEQ ID NO: 2130597 - RNA, 19 nt, Artificial Sequence
  Description of Artificial Sequence: Synthetic oligonucleotide
ucaguauuucaggggcaau

SEQ ID NO: 2130598 - RNA, 19 nt, Artificial Sequence
  Description of Artificial Sequence: Synthetic oligonucleotide
gcuucccacaguuccgagc

SEQ ID NO: 2130599 - RNA, 19 nt, Artificial Sequence
  Description of Artificial Sequence: Synthetic oligonucleotide
aguagggaugggacuccuc

SEQ ID NO: 2130600 - RNA, 19 nt, Artificial Sequence
  Description of Artificial Sequence: Synthetic oligonucleotide
ucgucgucugagauaccuu

SEQ ID NO: 2130601 - RNA, 19 nt, Artificial Sequence
  Description of Artificial Sequence: Synthetic oligonucleotide
caaugggguagugcucaag

SEQ ID NO: 2130602 - RNA, 19 nt, Artificial Sequence
  Description of Artificial Sequence: Synthetic oligonucleotide
uggaccgguugagaaugga

SEQ ID NO: 2130603 - RNA, 19 nt, Artificial Sequence
  Description of Artificial Sequence: Synthetic oligonucleotide
ggagcucuccacgggaacc

SEQ ID NO: 2130604 - RNA, 19 nt, Artificial Sequence
  Description of Artificial Sequence: Synthetic oligonucleotide
uuauuccagucgcccucuc

SEQ ID NO: 2130605 - RNA, 19 nt, Artificial Sequence
  Description of Artificial Sequence: Synthetic oligonucleotide
gggguagugcucaagaacu

SEQ ID NO: 2130606 - RNA, 19 nt, Artificial Sequence
  Description of Artificial Sequence: Synthetic oligonucleotide
cuaccacacagccuagucu

SEQ ID NO: 2130607 - RNA, 19 nt, Artificial Sequence
  Description of Artificial Sequence: Synthetic oligonucleotide
gcagaauuggcacuccggu

SEQ ID NO: 2130608 - RNA, 19 nt, Artificial Sequence
  Description of Artificial Sequence: Synthetic oligonucleotide
uaucgucgucugagauacc

SEQ ID NO: 2130609 - RNA, 19 nt, Artificial Sequence
  Description of Artificial Sequence: Synthetic oligonucleotide
ggaacuggugagauccaac

SEQ ID NO: 2130610 - RNA, 19 nt, Artificial Sequence
  Description of Artificial Sequence: Synthetic oligonucleotide
gauacgucacacacuuuau

SEQ ID NO: 2130611 - RNA, 19 nt, Artificial Sequence
  Description of Artificial Sequence: Synthetic oligonucleotide
uuccagucgcccucuccau

SEQ ID NO: 2130612 - RNA, 19 nt, Artificial Sequence
  Description of Artificial Sequence: Synthetic oligonucleotide
cagaauuggcacuccggua

SEQ ID NO: 2130613 - RNA, 19 nt, Artificial Sequence
  Description of Artificial Sequence: Synthetic oligonucleotide
uccgagcuuccugcagucc

SEQ ID NO: 2130614 - RNA, 19 nt, Artificial Sequence
  Description of Artificial Sequence: Synthetic oligonucleotide
accuaguuaucuacacaaa

SEQ ID NO: 2130615 - RNA, 19 nt, Artificial Sequence
  Description of Artificial Sequence: Synthetic oligonucleotide
guggcugaacuucccaagu

SEQ ID NO: 2130616 - RNA, 19 nt, Artificial Sequence
  Description of Artificial Sequence: Synthetic oligonucleotide
acuccgguaggaagaguga

SEQ ID NO: 2130617 - RNA, 19 nt, Artificial Sequence
  Description of Artificial Sequence: Synthetic oligonucleotide
ggccaugauaaauuaccua

SEQ ID NO: 2130618 - RNA, 19 nt, Artificial Sequence
  Description of Artificial Sequence: Synthetic oligonucleotide
cagauaucagaaugguuuu

SEQ ID NO: 2130619 - RNA, 19 nt, Artificial Sequence
  Description of Artificial Sequence: Synthetic oligonucleotide
auggaccgguugagaaugg

SEQ ID NO: 2130620 - RNA, 19 nt, Artificial Sequence
  Description of Artificial Sequence: Synthetic oligonucleotide
ucgcccucuccaugucuca

SEQ ID NO: 2130621 - RNA, 19 nt, Artificial Sequence
  Description of Artificial Sequence: Synthetic oligonucleotide
cccgugagcagauaucaga

SEQ ID NO: 2130622 - RNA, 19 nt, Artificial Sequence
  Description of Artificial Sequence: Synthetic oligonucleotide
ggcugaacuucccaagugu

SEQ ID NO: 2130623 - RNA, 19 nt, Artificial Sequence
  Description of Artificial Sequence: Synthetic oligonucleotide
cgucgucugagauaccuuc

SEQ ID NO: 2130624 - RNA, 19 nt, Artificial Sequence
  Description of Artificial Sequence: Synthetic oligonucleotide
cagcacgcagguucucguc

SEQ ID NO: 2130625 - RNA, 19 nt, Artificial Sequence
  Description of Artificial Sequence: Synthetic oligonucleotide
caccugcucuucaccauga

SEQ ID NO: 2130626 - RNA, 19 nt, Artificial Sequence
  Description of Artificial Sequence: Synthetic oligonucleotide
ggccaacggggaaagggag

SEQ ID NO: 2130627 - RNA, 19 nt, Artificial Sequence
  Description of Artificial Sequence: Synthetic oligonucleotide
gucgcccucuccaugucuc

SEQ ID NO: 2130628 - RNA, 19 nt, Artificial Sequence
  Description of Artificial Sequence: Synthetic oligonucleotide
cgucugagauaccuucuag

SEQ ID NO: 2130629 - RNA, 19 nt, Artificial Sequence
  Description of Artificial Sequence: Synthetic oligonucleotide
ggcacuccgguaggaagag

SEQ ID NO: 2130630 - RNA, 19 nt, Artificial Sequence
  Description of Artificial Sequence: Synthetic oligonucleotide
ccgugagcagauaucagaa

SEQ ID NO: 2130631 - RNA, 19 nt, Artificial Sequence
  Description of Artificial Sequence: Synthetic oligonucleotide
acucuaccacacagccuag

SEQ ID NO: 2130632 - RNA, 19 nt, Artificial Sequence
  Description of Artificial Sequence: Synthetic oligonucleotide
ggguagugcucaagaacug

SEQ ID NO: 2130633 - RNA, 19 nt, Artificial Sequence
  Description of Artificial Sequence: Synthetic oligonucleotide
cagugauacgucacacacu

SEQ ID NO: 2130634 - RNA, 19 nt, Artificial Sequence
  Description of Artificial Sequence: Synthetic oligonucleotide
gguugagaauggaugugaa

SEQ ID NO: 2130635 - RNA, 19 nt, Artificial Sequence
  Description of Artificial Sequence: Synthetic oligonucleotide
caugauucagagccauuuu

SEQ ID NO: 2130636 - RNA, 19 nt, Artificial Sequence
  Description of Artificial Sequence: Synthetic oligonucleotide
uaggaggcggggucacguu

SEQ ID NO: 2130637 - RNA, 19 nt, Artificial Sequence
  Description of Artificial Sequence: Synthetic oligonucleotide
gcucaagaacugcaguaua

SEQ ID NO: 2130638 - RNA, 19 nt, Artificial Sequence
  Description of Artificial Sequence: Synthetic oligonucleotide
cccacaguuccgagcuucc

SEQ ID NO: 2130639 - RNA, 19 nt, Artificial Sequence
  Description of Artificial Sequence: Synthetic oligonucleotide
gggaugggacuccucaaua

SEQ ID NO: 2130640 - RNA, 19 nt, Artificial Sequence
  Description of Artificial Sequence: Synthetic oligonucleotide
ccuccggucaucguagauc

SEQ ID NO: 2130641 - RNA, 19 nt, Artificial Sequence
  Description of Artificial Sequence: Synthetic oligonucleotide
caggagcucuccacgggaa

SEQ ID NO: 2130642 - RNA, 19 nt, Artificial Sequence
  Description of Artificial Sequence: Synthetic oligonucleotide
caugauuccuggccacacu

SEQ ID NO: 2130643 - RNA, 19 nt, Artificial Sequence
  Description of Artificial Sequence: Synthetic oligonucleotide
ucggaacguggcagcugau

SEQ ID NO: 2130644 - RNA, 19 nt, Artificial Sequence
  Description of Artificial Sequence: Synthetic oligonucleotide
agacuagaucaaacucaaa

SEQ ID NO: 2130645 - RNA, 19 nt, Artificial Sequence
  Description of Artificial Sequence: Synthetic oligonucleotide
caguuccgagcuuccugca

SEQ ID NO: 2130646 - RNA, 19 nt, Artificial Sequence
  Description of Artificial Sequence: Synthetic oligonucleotide
cagcuacaaaaucgguucu

SEQ ID NO: 2130647 - RNA, 19 nt, Artificial Sequence
  Description of Artificial Sequence: Synthetic oligonucleotide
caaaaucgguucugcuuau

SEQ ID NO: 2130648 - RNA, 19 nt, Artificial Sequence
  Description of Artificial Sequence: Synthetic oligonucleotide
uucccacaguuccgagcuu

SEQ ID NO: 2130649 - RNA, 19 nt, Artificial Sequence
  Description of Artificial Sequence: Synthetic oligonucleotide
gcugauccagugauacguc

SEQ ID NO: 2130650 - RNA, 19 nt, Artificial Sequence
  Description of Artificial Sequence: Synthetic oligonucleotide
gggccaacggggaaaggga

SEQ ID NO: 2130651 - RNA, 19 nt, Artificial Sequence
  Description of Artificial Sequence: Synthetic oligonucleotide
gucgucugagauaccuucu

SEQ ID NO: 2130652 - RNA, 19 nt, Artificial Sequence
  Description of Artificial Sequence: Synthetic oligonucleotide
agcucuccacgggaaccca

SEQ ID NO: 2130653 - RNA, 19 nt, Artificial Sequence
  Description of Artificial Sequence: Synthetic oligonucleotide
cccuguuaaggccaaucaa

SEQ ID NO: 2130654 - RNA, 19 nt, Artificial Sequence
  Description of Artificial Sequence: Synthetic oligonucleotide
ccacgggaacccauuccug

SEQ ID NO: 2130655 - RNA, 19 nt, Artificial Sequence
  Description of Artificial Sequence: Synthetic oligonucleotide
caucugggccaugauaaau

SEQ ID NO: 2130656 - RNA, 19 nt, Artificial Sequence
  Description of Artificial Sequence: Synthetic oligonucleotide
gcaauccuuuccuuccagu

SEQ ID NO: 2130657 - RNA, 19 nt, Artificial Sequence
  Description of Artificial Sequence: Synthetic oligonucleotide
ccgagcuuccugcagucca

SEQ ID NO: 2130658 - RNA, 19 nt, Artificial Sequence
  Description of Artificial Sequence: Synthetic oligonucleotide
cuuucggaacguggcagcu

SEQ ID NO: 2130659 - RNA, 19 nt, Artificial Sequence
  Description of Artificial Sequence: Synthetic oligonucleotide
accaugauucagagccauu

SEQ ID NO: 2130660 - RNA, 19 nt, Artificial Sequence
  Description of Artificial Sequence: Synthetic oligonucleotide
ccaaucaaggcuccauagu

SEQ ID NO: 2130661 - RNA, 19 nt, Artificial Sequence
  Description of Artificial Sequence: Synthetic oligonucleotide
gcuuggacaugcugguggu

SEQ ID NO: 2130662 - RNA, 19 nt, Artificial Sequence
  Description of Artificial Sequence: Synthetic oligonucleotide
cagucgcccucuccauguc

SEQ ID NO: 2130663 - RNA, 19 nt, Artificial Sequence
  Description of Artificial Sequence: Synthetic oligonucleotide
augccacuccugccaugau

SEQ ID NO: 2130664 - RNA, 19 nt, Artificial Sequence
  Description of Artificial Sequence: Synthetic oligonucleotide
caggagggcucuacugcua

SEQ ID NO: 2130665 - RNA, 19 nt, Artificial Sequence
  Description of Artificial Sequence: Synthetic oligonucleotide
ucucccuguuaaggccaau

SEQ ID NO: 2130666 - RNA, 19 nt, Artificial Sequence
  Description of Artificial Sequence: Synthetic oligonucleotide
ccgguaggaagagugaugu

SEQ ID NO: 2130667 - RNA, 19 nt, Artificial Sequence
  Description of Artificial Sequence: Synthetic oligonucleotide
ggucacguuguagcuucuc

SEQ ID NO: 2130668 - RNA, 19 nt, Artificial Sequence
  Description of Artificial Sequence: Synthetic oligonucleotide
caugcuggugguggcugaa

SEQ ID NO: 2130669 - RNA, 19 nt, Artificial Sequence
  Description of Artificial Sequence: Synthetic oligonucleotide
gccaacggggaaagggaga

SEQ ID NO: 2130670 - RNA, 19 nt, Artificial Sequence
  Description of Artificial Sequence: Synthetic oligonucleotide
cccagcuacaaaaucgguu

SEQ ID NO: 2130671 - RNA, 19 nt, Artificial Sequence
  Description of Artificial Sequence: Synthetic oligonucleotide
caguagggaagaagucuuu

SEQ ID NO: 2130672 - RNA, 19 nt, Artificial Sequence
  Description of Artificial Sequence: Synthetic oligonucleotide
cuccgguaggaagagugau

SEQ ID NO: 2130673 - RNA, 19 nt, Artificial Sequence
  Description of Artificial Sequence: Synthetic oligonucleotide
gagauaccuucuagguguu

SEQ ID NO: 2130674 - RNA, 19 nt, Artificial Sequence
  Description of Artificial Sequence: Synthetic oligonucleotide
gcucuacugcuauucccgu

SEQ ID NO: 2130675 - RNA, 19 nt, Artificial Sequence
  Description of Artificial Sequence: Synthetic oligonucleotide
cucuccacgggaacccauu

SEQ ID NO: 2130676 - RNA, 19 nt, Artificial Sequence
  Description of Artificial Sequence: Synthetic oligonucleotide
ccaugauucagagccauuu

SEQ ID NO: 2130677 - RNA, 19 nt, Artificial Sequence
  Description of Artificial Sequence: Synthetic oligonucleotide
ccagucgcccucuccaugu

SEQ ID NO: 2130678 - RNA, 19 nt, Artificial Sequence
  Description of Artificial Sequence: Synthetic oligonucleotide
cagagccucaccugcucuu

SEQ ID NO: 2130679 - RNA, 19 nt, Artificial Sequence
  Description of Artificial Sequence: Synthetic oligonucleotide
auccaacagcacgcagguu

SEQ ID NO: 2130680 - RNA, 19 nt, Artificial Sequence
  Description of Artificial Sequence: Synthetic oligonucleotide
ggaccgguugagaauggau

SEQ ID NO: 2130681 - RNA, 19 nt, Artificial Sequence
  Description of Artificial Sequence: Synthetic oligonucleotide
cucuaccacacagccuagu

SEQ ID NO: 2130682 - RNA, 19 nt, Artificial Sequence
  Description of Artificial Sequence: Synthetic oligonucleotide
gcggggucacguuguagcu

SEQ ID NO: 2130683 - RNA, 19 nt, Artificial Sequence
  Description of Artificial Sequence: Synthetic oligonucleotide
gcuauucccgugagcagau

SEQ ID NO: 2130684 - RNA, 19 nt, Artificial Sequence
  Description of Artificial Sequence: Synthetic oligonucleotide
cuauucccgugagcagaua

SEQ ID NO: 2130685 - RNA, 19 nt, Artificial Sequence
  Description of Artificial Sequence: Synthetic oligonucleotide
ccagagccucaccugcucu

SEQ ID NO: 2130686 - RNA, 19 nt, Artificial Sequence
  Description of Artificial Sequence: Synthetic oligonucleotide
cgcccucuccaugucucag

SEQ ID NO: 2130687 - RNA, 19 nt, Artificial Sequence
  Description of Artificial Sequence: Synthetic oligonucleotide
gcuccauagugacgcucau

SEQ ID NO: 2130688 - RNA, 19 nt, Artificial Sequence
  Description of Artificial Sequence: Synthetic oligonucleotide
gugauacgucacacacuuu

SEQ ID NO: 2130689 - RNA, 19 nt, Artificial Sequence
  Description of Artificial Sequence: Synthetic oligonucleotide
cggacaccgccagcagccg

SEQ ID NO: 2130690 - RNA, 19 nt, Artificial Sequence
  Description of Artificial Sequence: Synthetic oligonucleotide
gccuagucuugaggaaaau

SEQ ID NO: 2130691 - RNA, 19 nt, Artificial Sequence
  Description of Artificial Sequence: Synthetic oligonucleotide
ccacaguuccgagcuuccu

SEQ ID NO: 2130692 - RNA, 19 nt, Artificial Sequence
  Description of Artificial Sequence: Synthetic oligonucleotide
cguccaacuccagcagaau

SEQ ID NO: 2130693 - RNA, 19 nt, Artificial Sequence
  Description of Artificial Sequence: Synthetic oligonucleotide
cggggucacguuguagcuu

SEQ ID NO: 2130694 - RNA, 19 nt, Artificial Sequence
  Description of Artificial Sequence: Synthetic oligonucleotide
aguaguaacuuguaggacc

SEQ ID NO: 2130695 - RNA, 19 nt, Artificial Sequence
  Description of Artificial Sequence: Synthetic oligonucleotide
aaacacaucagggugcagc

SEQ ID NO: 2130696 - RNA, 19 nt, Artificial Sequence
  Description of Artificial Sequence: Synthetic oligonucleotide
aacugcagggaucagguug

SEQ ID NO: 2130697 - RNA, 19 nt, Artificial Sequence
  Description of Artificial Sequence: Synthetic oligonucleotide
augugucaagucuacaagg

SEQ ID NO: 2130698 - RNA, 19 nt, Artificial Sequence
  Description of Artificial Sequence: Synthetic oligonucleotide
ugguguuugagcaugcugu

SEQ ID NO: 2130699 - RNA, 19 nt, Artificial Sequence
  Description of Artificial Sequence: Synthetic oligonucleotide
uguuugagcaugcuguaca

SEQ ID NO: 2130700 - RNA, 19 nt, Artificial Sequence
  Description of Artificial Sequence: Synthetic oligonucleotide
uuuacaggaaggcugguau

SEQ ID NO: 2130701 - RNA, 19 nt, Artificial Sequence
  Description of Artificial Sequence: Synthetic oligonucleotide
gucaaggccgcuuugaggc

SEQ ID NO: 2130702 - RNA, 19 nt, Artificial Sequence
  Description of Artificial Sequence: Synthetic oligonucleotide
aagcggaagggguagagug

SEQ ID NO: 2130703 - RNA, 19 nt, Artificial Sequence
  Description of Artificial Sequence: Synthetic oligonucleotide
agugcccguacuuucaugg

SEQ ID NO: 2130704 - RNA, 19 nt, Artificial Sequence
  Description of Artificial Sequence: Synthetic oligonucleotide
uagaguggaguguaucucg

SEQ ID NO: 2130705 - RNA, 19 nt, Artificial Sequence
  Description of Artificial Sequence: Synthetic oligonucleotide
ucuacaaggagcacagaac

SEQ ID NO: 2130706 - RNA, 19 nt, Artificial Sequence
  Description of Artificial Sequence: Synthetic oligonucleotide
agugacucgacccaggcgu

SEQ ID NO: 2130707 - RNA, 19 nt, Artificial Sequence
  Description of Artificial Sequence: Synthetic oligonucleotide
ugacuuggccccaaguggg

SEQ ID NO: 2130708 - RNA, 19 nt, Artificial Sequence
  Description of Artificial Sequence: Synthetic oligonucleotide
uguaucucgaauccugcca

SEQ ID NO: 2130709 - RNA, 19 nt, Artificial Sequence
  Description of Artificial Sequence: Synthetic oligonucleotide
ugugucaagucuacaagga

SEQ ID NO: 2130710 - RNA, 19 nt, Artificial Sequence
  Description of Artificial Sequence: Synthetic oligonucleotide
uggaguguaucucgaaucc

SEQ ID NO: 2130711 - RNA, 19 nt, Artificial Sequence
  Description of Artificial Sequence: Synthetic oligonucleotide
uuuuagcauagcuaauucu

SEQ ID NO: 2130712 - RNA, 19 nt, Artificial Sequence
  Description of Artificial Sequence: Synthetic oligonucleotide
ucaggggaagucauuguag

SEQ ID NO: 2130713 - RNA, 19 nt, Artificial Sequence
  Description of Artificial Sequence: Synthetic oligonucleotide
ugcaguuauccccuccugg

SEQ ID NO: 2130714 - RNA, 19 nt, Artificial Sequence
  Description of Artificial Sequence: Synthetic oligonucleotide
uucaugggcaacauguagu

SEQ ID NO: 2130715 - RNA, 19 nt, Artificial Sequence
  Description of Artificial Sequence: Synthetic oligonucleotide
agucauuguagggaaagcg

SEQ ID NO: 2130716 - RNA, 19 nt, Artificial Sequence
  Description of Artificial Sequence: Synthetic oligonucleotide
uggcaaacacaucagggug

SEQ ID NO: 2130717 - RNA, 19 nt, Artificial Sequence
  Description of Artificial Sequence: Synthetic oligonucleotide
aguuauccccuccuggcac

SEQ ID NO: 2130718 - RNA, 19 nt, Artificial Sequence
  Description of Artificial Sequence: Synthetic oligonucleotide
ugagaagcggcccggaaca

SEQ ID NO: 2130719 - RNA, 19 nt, Artificial Sequence
  Description of Artificial Sequence: Synthetic oligonucleotide
ucaugugucaagucuacaa

SEQ ID NO: 2130720 - RNA, 19 nt, Artificial Sequence
  Description of Artificial Sequence: Synthetic oligonucleotide
aacacaucagggugcagcu

SEQ ID NO: 2130721 - RNA, 19 nt, Artificial Sequence
  Description of Artificial Sequence: Synthetic oligonucleotide
uaacuuguaggaccccggg

SEQ ID NO: 2130722 - RNA, 19 nt, Artificial Sequence
  Description of Artificial Sequence: Synthetic oligonucleotide
ugcagaauguccagccggg

SEQ ID NO: 2130723 - RNA, 19 nt, Artificial Sequence
  Description of Artificial Sequence: Synthetic oligonucleotide
aagucuacaaggagcacag

SEQ ID NO: 2130724 - RNA, 19 nt, Artificial Sequence
  Description of Artificial Sequence: Synthetic oligonucleotide
uuccucaugugucaagucu

SEQ ID NO: 2130725 - RNA, 19 nt, Artificial Sequence
  Description of Artificial Sequence: Synthetic oligonucleotide
caugugucaagucuacaag

SEQ ID NO: 2130726 - RNA, 19 nt, Artificial Sequence
  Description of Artificial Sequence: Synthetic oligonucleotide
agcuugacagucaaggccg

SEQ ID NO: 2130727 - RNA, 19 nt, Artificial Sequence
  Description of Artificial Sequence: Synthetic oligonucleotide
augggcaacauguaguagu

SEQ ID NO: 2130728 - RNA, 19 nt, Artificial Sequence
  Description of Artificial Sequence: Synthetic oligonucleotide
aguagcuuguccuccaaga

SEQ ID NO: 2130729 - RNA, 19 nt, Artificial Sequence
  Description of Artificial Sequence: Synthetic oligonucleotide
agggcuugcggccaccacc

SEQ ID NO: 2130730 - RNA, 19 nt, Artificial Sequence
  Description of Artificial Sequence: Synthetic oligonucleotide
auguaguaguaacuuguag

SEQ ID NO: 2130731 - RNA, 19 nt, Artificial Sequence
  Description of Artificial Sequence: Synthetic oligonucleotide
ugcuucuaggugaccaggg

SEQ ID NO: 2130732 - RNA, 19 nt, Artificial Sequence
  Description of Artificial Sequence: Synthetic oligonucleotide
aaccuggugcagaaugucc

SEQ ID NO: 2130733 - RNA, 19 nt, Artificial Sequence
  Description of Artificial Sequence: Synthetic oligonucleotide
gauguguaggucauccugc

SEQ ID NO: 2130734 - RNA, 19 nt, Artificial Sequence
  Description of Artificial Sequence: Synthetic oligonucleotide
aaggcugguaugcugacuu

SEQ ID NO: 2130735 - RNA, 19 nt, Artificial Sequence
  Description of Artificial Sequence: Synthetic oligonucleotide
aguaacuuguaggaccccg

SEQ ID NO: 2130736 - RNA, 19 nt, Artificial Sequence
  Description of Artificial Sequence: Synthetic oligonucleotide
gccacaacauucuugggcg

SEQ ID NO: 2130737 - RNA, 19 nt, Artificial Sequence
  Description of Artificial Sequence: Synthetic oligonucleotide
guaucucgaauccugccag

SEQ ID NO: 2130738 - RNA, 19 nt, Artificial Sequence
  Description of Artificial Sequence: Synthetic oligonucleotide
agcauagcuaauucucuug

SEQ ID NO: 2130739 - RNA, 19 nt, Artificial Sequence
  Description of Artificial Sequence: Synthetic oligonucleotide
agucaaggccgcuuugagg

SEQ ID NO: 2130740 - RNA, 19 nt, Artificial Sequence
  Description of Artificial Sequence: Synthetic oligonucleotide
aguguaucucgaauccugc

SEQ ID NO: 2130741 - RNA, 19 nt, Artificial Sequence
  Description of Artificial Sequence: Synthetic oligonucleotide
ugugcaguuauccccuccu

SEQ ID NO: 2130742 - RNA, 19 nt, Artificial Sequence
  Description of Artificial Sequence: Synthetic oligonucleotide
guuuuagcauagcuaauuc

SEQ ID NO: 2130743 - RNA, 19 nt, Artificial Sequence
  Description of Artificial Sequence: Synthetic oligonucleotide
aagaaggcgauggaaggca

SEQ ID NO: 2130744 - RNA, 19 nt, Artificial Sequence
  Description of Artificial Sequence: Synthetic oligonucleotide
guaguaacuuguaggaccc

SEQ ID NO: 2130745 - RNA, 19 nt, Artificial Sequence
  Description of Artificial Sequence: Synthetic oligonucleotide
uccgccagcgagcugagga

SEQ ID NO: 2130746 - RNA, 19 nt, Artificial Sequence
  Description of Artificial Sequence: Synthetic oligonucleotide
cauucaggccaacugcagg

SEQ ID NO: 2130747 - RNA, 19 nt, Artificial Sequence
  Description of Artificial Sequence: Synthetic oligonucleotide
ugugcuucuaggugaccag

SEQ ID NO: 2130748 - RNA, 19 nt, Artificial Sequence
  Description of Artificial Sequence: Synthetic oligonucleotide
agcuccgcuaggccgacgc

SEQ ID NO: 2130749 - RNA, 19 nt, Artificial Sequence
  Description of Artificial Sequence: Synthetic oligonucleotide
ucgguacugggccaguucu

SEQ ID NO: 2130750 - RNA, 19 nt, Artificial Sequence
  Description of Artificial Sequence: Synthetic oligonucleotide
gaguguaucucgaauccug

SEQ ID NO: 2130751 - RNA, 19 nt, Artificial Sequence
  Description of Artificial Sequence: Synthetic oligonucleotide
uggggugugcuucuaggug

SEQ ID NO: 2130752 - RNA, 19 nt, Artificial Sequence
  Description of Artificial Sequence: Synthetic oligonucleotide
ugccagaguagcuuguccu

SEQ ID NO: 2130753 - RNA, 19 nt, Artificial Sequence
  Description of Artificial Sequence: Synthetic oligonucleotide
ucgcacuugcgcaccacgg

SEQ ID NO: 2130754 - RNA, 19 nt, Artificial Sequence
  Description of Artificial Sequence: Synthetic oligonucleotide
gugucaagucuacaaggag

SEQ ID NO: 2130755 - RNA, 19 nt, Artificial Sequence
  Description of Artificial Sequence: Synthetic oligonucleotide
ucuaggagacccgcgguag

SEQ ID NO: 2130756 - RNA, 19 nt, Artificial Sequence
  Description of Artificial Sequence: Synthetic oligonucleotide
cacgggaucuaggagaccc

SEQ ID NO: 2130757 - RNA, 19 nt, Artificial Sequence
  Description of Artificial Sequence: Synthetic oligonucleotide
ugcccguacuuucaugggc

SEQ ID NO: 2130758 - RNA, 19 nt, Artificial Sequence
  Description of Artificial Sequence: Synthetic oligonucleotide
uuacaggaaggcugguaug

SEQ ID NO: 2130759 - RNA, 19 nt, Artificial Sequence
  Description of Artificial Sequence: Synthetic oligonucleotide
agcuaauucucuugaaguu

SEQ ID NO: 2130760 - RNA, 19 nt, Artificial Sequence
  Description of Artificial Sequence: Synthetic oligonucleotide
ucgaauccugccagaguag

SEQ ID NO: 2130761 - RNA, 19 nt, Artificial Sequence
  Description of Artificial Sequence: Synthetic oligonucleotide
ggcaacauguaguaguaac

SEQ ID NO: 2130762 - RNA, 19 nt, Artificial Sequence
  Description of Artificial Sequence: Synthetic oligonucleotide
ggaucuaggagacccgcgg

SEQ ID NO: 2130763 - RNA, 19 nt, Artificial Sequence
  Description of Artificial Sequence: Synthetic oligonucleotide
accggaugcugccaugccg

SEQ ID NO: 2130764 - RNA, 19 nt, Artificial Sequence
  Description of Artificial Sequence: Synthetic oligonucleotide
uccucaugugucaagucua

SEQ ID NO: 2130765 - RNA, 19 nt, Artificial Sequence
  Description of Artificial Sequence: Synthetic oligonucleotide
aguggaguguaucucgaau

SEQ ID NO: 2130766 - RNA, 19 nt, Artificial Sequence
  Description of Artificial Sequence: Synthetic oligonucleotide
acgcgcuccugcucgaagc

SEQ ID NO: 2130767 - RNA, 19 nt, Artificial Sequence
  Description of Artificial Sequence: Synthetic oligonucleotide
guggaguguaucucgaauc

SEQ ID NO: 2130768 - RNA, 19 nt, Artificial Sequence
  Description of Artificial Sequence: Synthetic oligonucleotide
gaauccacgauguguaggu

SEQ ID NO: 2130769 - RNA, 19 nt, Artificial Sequence
  Description of Artificial Sequence: Synthetic oligonucleotide
ucugccagguggcaaccug

SEQ ID NO: 2130770 - RNA, 19 nt, Artificial Sequence
  Description of Artificial Sequence: Synthetic oligonucleotide
guaacuuguaggaccccgg

SEQ ID NO: 2130771 - RNA, 19 nt, Artificial Sequence
  Description of Artificial Sequence: Synthetic oligonucleotide
gaagcggcccggaacaacc

SEQ ID NO: 2130772 - RNA, 19 nt, Artificial Sequence
  Description of Artificial Sequence: Synthetic oligonucleotide
aaguggggugugcuucuag

SEQ ID NO: 2130773 - RNA, 19 nt, Artificial Sequence
  Description of Artificial Sequence: Synthetic oligonucleotide
aauccugccagaguagcuu

SEQ ID NO: 2130774 - RNA, 19 nt, Artificial Sequence
  Description of Artificial Sequence: Synthetic oligonucleotide
cagaauguccagccggggc

SEQ ID NO: 2130775 - RNA, 19 nt, Artificial Sequence
  Description of Artificial Sequence: Synthetic oligonucleotide
guuugagcaugcuguacac

SEQ ID NO: 2130776 - RNA, 19 nt, Artificial Sequence
  Description of Artificial Sequence: Synthetic oligonucleotide
gguaugcugacuuggcccc

SEQ ID NO: 2130777 - RNA, 19 nt, Artificial Sequence
  Description of Artificial Sequence: Synthetic oligonucleotide
cugguaugcugacuuggcc

SEQ ID NO: 2130778 - RNA, 19 nt, Artificial Sequence
  Description of Artificial Sequence: Synthetic oligonucleotide
cucuugagccuggaggugg

SEQ ID NO: 2130779 - RNA, 19 nt, Artificial Sequence
  Description of Artificial Sequence: Synthetic oligonucleotide
gaagcucuugagccuggag

SEQ ID NO: 2130780 - RNA, 19 nt, Artificial Sequence
  Description of Artificial Sequence: Synthetic oligonucleotide
aauccacgauguguagguc

SEQ ID NO: 2130781 - RNA, 19 nt, Artificial Sequence
  Description of Artificial Sequence: Synthetic oligonucleotide
ucggagcucgcacuugcgc

SEQ ID NO: 2130782 - RNA, 19 nt, Artificial Sequence
  Description of Artificial Sequence: Synthetic oligonucleotide
acucaccucagcccugguc

SEQ ID NO: 2130783 - RNA, 19 nt, Artificial Sequence
  Description of Artificial Sequence: Synthetic oligonucleotide
uccacgauguguaggucau

SEQ ID NO: 2130784 - RNA, 19 nt, Artificial Sequence
  Description of Artificial Sequence: Synthetic oligonucleotide
gaguagcuuguccuccaag

SEQ ID NO: 2130785 - RNA, 19 nt, Artificial Sequence
  Description of Artificial Sequence: Synthetic oligonucleotide
ucugucagguacugagggu

SEQ ID NO: 2130786 - RNA, 19 nt, Artificial Sequence
  Description of Artificial Sequence: Synthetic oligonucleotide
cuacaaggagcacagaacu

SEQ ID NO: 2130787 - RNA, 19 nt, Artificial Sequence
  Description of Artificial Sequence: Synthetic oligonucleotide
agcuccagggaauccacga

SEQ ID NO: 2130788 - RNA, 19 nt, Artificial Sequence
  Description of Artificial Sequence: Synthetic oligonucleotide
ucucgaauccugccagagu

SEQ ID NO: 2130789 - RNA, 19 nt, Artificial Sequence
  Description of Artificial Sequence: Synthetic oligonucleotide
ugggcuacuccuccucccc

SEQ ID NO: 2130790 - RNA, 19 nt, Artificial Sequence
  Description of Artificial Sequence: Synthetic oligonucleotide
guguaucucgaauccugcc

SEQ ID NO: 2130791 - RNA, 19 nt, Artificial Sequence
  Description of Artificial Sequence: Synthetic oligonucleotide
cugagaagcggcccggaac

SEQ ID NO: 2130792 - RNA, 19 nt, Artificial Sequence
  Description of Artificial Sequence: Synthetic oligonucleotide
cucgaagccucgcagugac

SEQ ID NO: 2130793 - RNA, 19 nt, Artificial Sequence
  Description of Artificial Sequence: Synthetic oligonucleotide
acggccacugccuuucugu

SEQ ID NO: 2130794 - RNA, 19 nt, Artificial Sequence
  Description of Artificial Sequence: Synthetic oligonucleotide
ggcaaccuggugcagaaug

SEQ ID NO: 2130795 - RNA, 19 nt, Artificial Sequence
  Description of Artificial Sequence: Synthetic oligonucleotide
ucuugagccuggagguggc

SEQ ID NO: 2130796 - RNA, 19 nt, Artificial Sequence
  Description of Artificial Sequence: Synthetic oligonucleotide
agucugguguuugagcaug

SEQ ID NO: 2130797 - RNA, 19 nt, Artificial Sequence
  Description of Artificial Sequence: Synthetic oligonucleotide
aaagcggaagggguagagu

SEQ ID NO: 2130798 - RNA, 19 nt, Artificial Sequence
  Description of Artificial Sequence: Synthetic oligonucleotide
cuucuaggugaccagggca

SEQ ID NO: 2130799 - RNA, 19 nt, Artificial Sequence
  Description of Artificial Sequence: Synthetic oligonucleotide
cugguguuugagcaugcug

SEQ ID NO: 2130800 - RNA, 19 nt, Artificial Sequence
  Description of Artificial Sequence: Synthetic oligonucleotide
cucgaauccugccagagua

SEQ ID NO: 2130801 - RNA, 19 nt, Artificial Sequence
  Description of Artificial Sequence: Synthetic oligonucleotide
ucuaggugaccagggcagg

SEQ ID NO: 2130802 - RNA, 19 nt, Artificial Sequence
  Description of Artificial Sequence: Synthetic oligonucleotide
cugucagguacugaggguc

SEQ ID NO: 2130803 - RNA, 19 nt, Artificial Sequence
  Description of Artificial Sequence: Synthetic oligonucleotide
cugccagguggcaaccugg

SEQ ID NO: 2130804 - RNA, 19 nt, Artificial Sequence
  Description of Artificial Sequence: Synthetic oligonucleotide
gcugacuuggccccaagug

SEQ ID NO: 2130805 - RNA, 19 nt, Artificial Sequence
  Description of Artificial Sequence: Synthetic oligonucleotide
uggcucugugcaguuaucc

SEQ ID NO: 2130806 - RNA, 19 nt, Artificial Sequence
  Description of Artificial Sequence: Synthetic oligonucleotide
caagucuacaaggagcaca

SEQ ID NO: 2130807 - RNA, 19 nt, Artificial Sequence
  Description of Artificial Sequence: Synthetic oligonucleotide
gcagugggcagcuccaggg

SEQ ID NO: 2130808 - RNA, 19 nt, Artificial Sequence
  Description of Artificial Sequence: Synthetic oligonucleotide
cacauucaggccaacugca

SEQ ID NO: 2130809 - RNA, 19 nt, Artificial Sequence
  Description of Artificial Sequence: Synthetic oligonucleotide
ggcgauggaaggcagggug

SEQ ID NO: 2130810 - RNA, 19 nt, Artificial Sequence
  Description of Artificial Sequence: Synthetic oligonucleotide
gacccaggcgugcaccggg

SEQ ID NO: 2130811 - RNA, 19 nt, Artificial Sequence
  Description of Artificial Sequence: Synthetic oligonucleotide
ucgacccaggcgugcaccg

SEQ ID NO: 2130812 - RNA, 19 nt, Artificial Sequence
  Description of Artificial Sequence: Synthetic oligonucleotide
uuuuacaggaaggcuggua

SEQ ID NO: 2130813 - RNA, 19 nt, Artificial Sequence
  Description of Artificial Sequence: Synthetic oligonucleotide
guuauccccuccuggcacc

SEQ ID NO: 2130814 - RNA, 19 nt, Artificial Sequence
  Description of Artificial Sequence: Synthetic oligonucleotide
gaaggcgauggaaggcagg

SEQ ID NO: 2130815 - RNA, 19 nt, Artificial Sequence
  Description of Artificial Sequence: Synthetic oligonucleotide
cagggugcagcuccgcuag

SEQ ID NO: 2130816 - RNA, 19 nt, Artificial Sequence
  Description of Artificial Sequence: Synthetic oligonucleotide
ggaauccacgauguguagg

SEQ ID NO: 2130817 - RNA, 19 nt, Artificial Sequence
  Description of Artificial Sequence: Synthetic oligonucleotide
caugggcuacuccuccucc

SEQ ID NO: 2130818 - RNA, 19 nt, Artificial Sequence
  Description of Artificial Sequence: Synthetic oligonucleotide
cuuguaggaccccggggac

SEQ ID NO: 2130819 - RNA, 19 nt, Artificial Sequence
  Description of Artificial Sequence: Synthetic oligonucleotide
uaucucgaauccugccaga

SEQ ID NO: 2130820 - RNA, 19 nt, Artificial Sequence
  Description of Artificial Sequence: Synthetic oligonucleotide
ugggcgcuuccucaugugu

SEQ ID NO: 2130821 - RNA, 19 nt, Artificial Sequence
  Description of Artificial Sequence: Synthetic oligonucleotide
ucuugggcgcuuccucaug

SEQ ID NO: 2130822 - RNA, 19 nt, Artificial Sequence
  Description of Artificial Sequence: Synthetic oligonucleotide
uguccuccaagaaggcgau

SEQ ID NO: 2130823 - RNA, 19 nt, Artificial Sequence
  Description of Artificial Sequence: Synthetic oligonucleotide
gacagucaaggccgcuuug

SEQ ID NO: 2130824 - RNA, 19 nt, Artificial Sequence
  Description of Artificial Sequence: Synthetic oligonucleotide
gcuaauucucuugaaguuc

SEQ ID NO: 2130825 - RNA, 19 nt, Artificial Sequence
  Description of Artificial Sequence: Synthetic oligonucleotide
agaagcggcccggaacaac

SEQ ID NO: 2130826 - RNA, 19 nt, Artificial Sequence
  Description of Artificial Sequence: Synthetic oligonucleotide
ugcugacuuggccccaagu

SEQ ID NO: 2130827 - RNA, 19 nt, Artificial Sequence
  Description of Artificial Sequence: Synthetic oligonucleotide
guagcuuguccuccaagaa

SEQ ID NO: 2130828 - RNA, 19 nt, Artificial Sequence
  Description of Artificial Sequence: Synthetic oligonucleotide
aacccaggccugagaagcg

SEQ ID NO: 2130829 - RNA, 19 nt, Artificial Sequence
  Description of Artificial Sequence: Synthetic oligonucleotide
ccagugucgguacugggcc

SEQ ID NO: 2130830 - RNA, 19 nt, Artificial Sequence
  Description of Artificial Sequence: Synthetic oligonucleotide
uccgcuaggccgacgcgcu

SEQ ID NO: 2130831 - RNA, 19 nt, Artificial Sequence
  Description of Artificial Sequence: Synthetic oligonucleotide
gugcuucuaggugaccagg

SEQ ID NO: 2130832 - RNA, 19 nt, Artificial Sequence
  Description of Artificial Sequence: Synthetic oligonucleotide
aggagacccgcgguagccc

SEQ ID NO: 2130833 - RNA, 19 nt, Artificial Sequence
  Description of Artificial Sequence: Synthetic oligonucleotide
gugcccguacuuucauggg

SEQ ID NO: 2130834 - RNA, 19 nt, Artificial Sequence
  Description of Artificial Sequence: Synthetic oligonucleotide
agugucgguacugggccag

SEQ ID NO: 2130835 - RNA, 19 nt, Artificial Sequence
  Description of Artificial Sequence: Synthetic oligonucleotide
cugaggacccgggagccgg

SEQ ID NO: 2130836 - RNA, 19 nt, Artificial Sequence
  Description of Artificial Sequence: Synthetic oligonucleotide
gcauagcuaauucucuuga

SEQ ID NO: 2130837 - RNA, 19 nt, Artificial Sequence
  Description of Artificial Sequence: Synthetic oligonucleotide
acagucaaggccgcuuuga

SEQ ID NO: 2130838 - RNA, 19 nt, Artificial Sequence
  Description of Artificial Sequence: Synthetic oligonucleotide
cauguaguaguaacuugua

SEQ ID NO: 2130839 - RNA, 19 nt, Artificial Sequence
  Description of Artificial Sequence: Synthetic oligonucleotide
ggcaaacacaucagggugc

SEQ ID NO: 2130840 - RNA, 19 nt, Artificial Sequence
  Description of Artificial Sequence: Synthetic oligonucleotide
cuaggagacccgcgguagc

SEQ ID NO: 2130841 - RNA, 19 nt, Artificial Sequence
  Description of Artificial Sequence: Synthetic oligonucleotide
aagccucgcagugacucga

SEQ ID NO: 2130842 - RNA, 19 nt, Artificial Sequence
  Description of Artificial Sequence: Synthetic oligonucleotide
gagggucugcagugggcag

SEQ ID NO: 2130843 - RNA, 19 nt, Artificial Sequence
  Description of Artificial Sequence: Synthetic oligonucleotide
aggccaacugcagggauca

SEQ ID NO: 2130844 - RNA, 19 nt, Artificial Sequence
  Description of Artificial Sequence: Synthetic oligonucleotide
agggugagaaccagagucu

SEQ ID NO: 2130845 - RNA, 19 nt, Artificial Sequence
  Description of Artificial Sequence: Synthetic oligonucleotide
acgauguguaggucauccu

SEQ ID NO: 2130846 - RNA, 19 nt, Artificial Sequence
  Description of Artificial Sequence: Synthetic oligonucleotide
ccggaugcugccaugccgg

SEQ ID NO: 2130847 - RNA, 19 nt, Artificial Sequence
  Description of Artificial Sequence: Synthetic oligonucleotide
gguacugagggucugcagu

SEQ ID NO: 2130848 - RNA, 19 nt, Artificial Sequence
  Description of Artificial Sequence: Synthetic oligonucleotide
gccgcuuugaggcccagug

SEQ ID NO: 2130849 - RNA, 19 nt, Artificial Sequence
  Description of Artificial Sequence: Synthetic oligonucleotide
cugugcaguuauccccucc

SEQ ID NO: 2130850 - RNA, 19 nt, Artificial Sequence
  Description of Artificial Sequence: Synthetic oligonucleotide
aucuaggagacccgcggua

SEQ ID NO: 2130851 - RNA, 19 nt, Artificial Sequence
  Description of Artificial Sequence: Synthetic oligonucleotide
acucgacccaggcgugcac

SEQ ID NO: 2130852 - RNA, 19 nt, Artificial Sequence
  Description of Artificial Sequence: Synthetic oligonucleotide
gugugcuucuaggugacca

SEQ ID NO: 2130853 - RNA, 19 nt, Artificial Sequence
  Description of Artificial Sequence: Synthetic oligonucleotide
gucaggggaagucauugua

SEQ ID NO: 2130854 - RNA, 19 nt, Artificial Sequence
  Description of Artificial Sequence: Synthetic oligonucleotide
gguagaguggaguguaucu

SEQ ID NO: 2130855 - RNA, 19 nt, Artificial Sequence
  Description of Artificial Sequence: Synthetic oligonucleotide
gauucggagcucgcacuug

SEQ ID NO: 2130856 - RNA, 19 nt, Artificial Sequence
  Description of Artificial Sequence: Synthetic oligonucleotide
caugggcaacauguaguag

SEQ ID NO: 2130857 - RNA, 19 nt, Artificial Sequence
  Description of Artificial Sequence: Synthetic oligonucleotide
ucugguguuugagcaugcu

SEQ ID NO: 2130858 - RNA, 19 nt, Artificial Sequence
  Description of Artificial Sequence: Synthetic oligonucleotide
ccucgcagugacucgaccc

SEQ ID NO: 2130859 - RNA, 19 nt, Artificial Sequence
  Description of Artificial Sequence: Synthetic oligonucleotide
gggaagucauuguagggaa

SEQ ID NO: 2130860 - RNA, 19 nt, Artificial Sequence
  Description of Artificial Sequence: Synthetic oligonucleotide
ucaagucuacaaggagcac

SEQ ID NO: 2130861 - RNA, 19 nt, Artificial Sequence
  Description of Artificial Sequence: Synthetic oligonucleotide
ggggaagucauuguaggga

SEQ ID NO: 2130862 - RNA, 19 nt, Artificial Sequence
  Description of Artificial Sequence: Synthetic oligonucleotide
cucgcagugacucgaccca

SEQ ID NO: 2130863 - RNA, 19 nt, Artificial Sequence
  Description of Artificial Sequence: Synthetic oligonucleotide
aagcggcccggaacaaccg

SEQ ID NO: 2130864 - RNA, 19 nt, Artificial Sequence
  Description of Artificial Sequence: Synthetic oligonucleotide
ugcagggaucagguugaag

SEQ ID NO: 2130865 - RNA, 19 nt, Artificial Sequence
  Description of Artificial Sequence: Synthetic oligonucleotide
gguggcugccacaacauuc

SEQ ID NO: 2130866 - RNA, 19 nt, Artificial Sequence
  Description of Artificial Sequence: Synthetic oligonucleotide
uccugccagaguagcuugu

SEQ ID NO: 2130867 - RNA, 19 nt, Artificial Sequence
  Description of Artificial Sequence: Synthetic oligonucleotide
cccagugucgguacugggc

SEQ ID NO: 2130868 - RNA, 19 nt, Artificial Sequence
  Description of Artificial Sequence: Synthetic oligonucleotide
gaccggaugcugccaugcc

SEQ ID NO: 2130869 - RNA, 19 nt, Artificial Sequence
  Description of Artificial Sequence: Synthetic oligonucleotide
agaguggaguguaucucga

SEQ ID NO: 2130870 - RNA, 19 nt, Artificial Sequence
  Description of Artificial Sequence: Synthetic oligonucleotide
uaguaacuuguaggacccc

SEQ ID NO: 2130871 - RNA, 19 nt, Artificial Sequence
  Description of Artificial Sequence: Synthetic oligonucleotide
gugcaguuauccccuccug

SEQ ID NO: 2130872 - RNA, 19 nt, Artificial Sequence
  Description of Artificial Sequence: Synthetic oligonucleotide
ucgcagugacucgacccag

SEQ ID NO: 2130873 - RNA, 19 nt, Artificial Sequence
  Description of Artificial Sequence: Synthetic oligonucleotide
agaguagcuuguccuccaa

SEQ ID NO: 2130874 - RNA, 19 nt, Artificial Sequence
  Description of Artificial Sequence: Synthetic oligonucleotide
gcugcgagcucucggccgg

SEQ ID NO: 2130875 - RNA, 19 nt, Artificial Sequence
  Description of Artificial Sequence: Synthetic oligonucleotide
acacaucagggugcagcuc

SEQ ID NO: 2130876 - RNA, 19 nt, Artificial Sequence
  Description of Artificial Sequence: Synthetic oligonucleotide
gaucuaggagacccgcggu

SEQ ID NO: 2130877 - RNA, 19 nt, Artificial Sequence
  Description of Artificial Sequence: Synthetic oligonucleotide
aggcugguaugcugacuug

SEQ ID NO: 2130878 - RNA, 19 nt, Artificial Sequence
  Description of Artificial Sequence: Synthetic oligonucleotide
ggugcgccgggauucggag

SEQ ID NO: 2130879 - RNA, 19 nt, Artificial Sequence
  Description of Artificial Sequence: Synthetic oligonucleotide
acaggaaggcugguaugcu

SEQ ID NO: 2130880 - RNA, 19 nt, Artificial Sequence
  Description of Artificial Sequence: Synthetic oligonucleotide
cgauguguaggucauccug

SEQ ID NO: 2130881 - RNA, 19 nt, Artificial Sequence
  Description of Artificial Sequence: Synthetic oligonucleotide
guguuugagcaugcuguac

SEQ ID NO: 2130882 - RNA, 19 nt, Artificial Sequence
  Description of Artificial Sequence: Synthetic oligonucleotide
gggaccaugggcuacuccu

SEQ ID NO: 2130883 - RNA, 19 nt, Artificial Sequence
  Description of Artificial Sequence: Synthetic oligonucleotide
cuggucuugguuuuagcau

SEQ ID NO: 2130884 - RNA, 19 nt, Artificial Sequence
  Description of Artificial Sequence: Synthetic oligonucleotide
gggaauccacgauguguag

SEQ ID NO: 2130885 - RNA, 19 nt, Artificial Sequence
  Description of Artificial Sequence: Synthetic oligonucleotide
ccaccacucaccucagccc

SEQ ID NO: 2130886 - RNA, 19 nt, Artificial Sequence
  Description of Artificial Sequence: Synthetic oligonucleotide
agggguagaguggagugua

SEQ ID NO: 2130887 - RNA, 19 nt, Artificial Sequence
  Description of Artificial Sequence: Synthetic oligonucleotide
gucgguacugggccaguuc

SEQ ID NO: 2130888 - RNA, 19 nt, Artificial Sequence
  Description of Artificial Sequence: Synthetic oligonucleotide
cuguacacauucaggccaa

SEQ ID NO: 2130889 - RNA, 19 nt, Artificial Sequence
  Description of Artificial Sequence: Synthetic oligonucleotide
uuauccccuccuggcacca

SEQ ID NO: 2130890 - RNA, 19 nt, Artificial Sequence
  Description of Artificial Sequence: Synthetic oligonucleotide
gaguggaguguaucucgaa

SEQ ID NO: 2130891 - RNA, 19 nt, Artificial Sequence
  Description of Artificial Sequence: Synthetic oligonucleotide
cucgacccaggcgugcacc

SEQ ID NO: 2130892 - RNA, 19 nt, Artificial Sequence
  Description of Artificial Sequence: Synthetic oligonucleotide
ggcugcgagcucucggccg

SEQ ID NO: 2130893 - RNA, 19 nt, Artificial Sequence
  Description of Artificial Sequence: Synthetic oligonucleotide
guggcaaccuggugcagaa

SEQ ID NO: 2130894 - RNA, 19 nt, Artificial Sequence
  Description of Artificial Sequence: Synthetic oligonucleotide
cucugugcaguuauccccu

SEQ ID NO: 2130895 - RNA, 19 nt, Artificial Sequence
  Description of Artificial Sequence: Synthetic oligonucleotide
ggagcucgcacuugcgcac

SEQ ID NO: 2130896 - RNA, 19 nt, Artificial Sequence
  Description of Artificial Sequence: Synthetic oligonucleotide
ugacucgacccaggcgugc

SEQ ID NO: 2130897 - RNA, 19 nt, Artificial Sequence
  Description of Artificial Sequence: Synthetic oligonucleotide
accccggggaccaugggcu

SEQ ID NO: 2130898 - RNA, 19 nt, Artificial Sequence
  Description of Artificial Sequence: Synthetic oligonucleotide
acgggaucuaggagacccg

SEQ ID NO: 2130899 - RNA, 19 nt, Artificial Sequence
  Description of Artificial Sequence: Synthetic oligonucleotide
uguacacauucaggccaac

SEQ ID NO: 2130900 - RNA, 19 nt, Artificial Sequence
  Description of Artificial Sequence: Synthetic oligonucleotide
ugcgcaccacgggaucuag

SEQ ID NO: 2130901 - RNA, 19 nt, Artificial Sequence
  Description of Artificial Sequence: Synthetic oligonucleotide
caggcgugcaccgggcgcc

SEQ ID NO: 2130902 - RNA, 19 nt, Artificial Sequence
  Description of Artificial Sequence: Synthetic oligonucleotide
cagggaucagguugaagcu

SEQ ID NO: 2130903 - RNA, 19 nt, Artificial Sequence
  Description of Artificial Sequence: Synthetic oligonucleotide
caacauguaguaguaacuu

SEQ ID NO: 2130904 - RNA, 19 nt, Artificial Sequence
  Description of Artificial Sequence: Synthetic oligonucleotide
cagugcccguacuuucaug

SEQ ID NO: 2130905 - RNA, 19 nt, Artificial Sequence
  Description of Artificial Sequence: Synthetic oligonucleotide
ggagacccgcgguagcccc

SEQ ID NO: 2130906 - RNA, 19 nt, Artificial Sequence
  Description of Artificial Sequence: Synthetic oligonucleotide
augcugacuuggccccaag

SEQ ID NO: 2130907 - RNA, 19 nt, Artificial Sequence
  Description of Artificial Sequence: Synthetic oligonucleotide
ccagaguagcuuguccucc

SEQ ID NO: 2130908 - RNA, 19 nt, Artificial Sequence
  Description of Artificial Sequence: Synthetic oligonucleotide
ccguggcaaacacaucagg

SEQ ID NO: 2130909 - RNA, 19 nt, Artificial Sequence
  Description of Artificial Sequence: Synthetic oligonucleotide
gggaucuaggagacccgcg

SEQ ID NO: 2130910 - RNA, 19 nt, Artificial Sequence
  Description of Artificial Sequence: Synthetic oligonucleotide
ucgaagccucgcagugacu

SEQ ID NO: 2130911 - RNA, 19 nt, Artificial Sequence
  Description of Artificial Sequence: Synthetic oligonucleotide
gggugagaaccagagucug

SEQ ID NO: 2130912 - RNA, 19 nt, Artificial Sequence
  Description of Artificial Sequence: Synthetic oligonucleotide
cuuggcucugugcaguuau

SEQ ID NO: 2130913 - RNA, 19 nt, Artificial Sequence
  Description of Artificial Sequence: Synthetic oligonucleotide
guacugggccaguucuguc

SEQ ID NO: 2130914 - RNA, 19 nt, Artificial Sequence
  Description of Artificial Sequence: Synthetic oligonucleotide
cagggaauccacgaugugu

SEQ ID NO: 2130915 - RNA, 19 nt, Artificial Sequence
  Description of Artificial Sequence: Synthetic oligonucleotide
gcugccaugccgggcacgg

SEQ ID NO: 2130916 - RNA, 19 nt, Artificial Sequence
  Description of Artificial Sequence: Synthetic oligonucleotide
gguuuuagcauagcuaauu

SEQ ID NO: 2130917 - RNA, 19 nt, Artificial Sequence
  Description of Artificial Sequence: Synthetic oligonucleotide
agcgagcugaggacccggg

SEQ ID NO: 2130918 - RNA, 19 nt, Artificial Sequence
  Description of Artificial Sequence: Synthetic oligonucleotide
ugcugccaugccgggcacg

SEQ ID NO: 2130919 - RNA, 19 nt, Artificial Sequence
  Description of Artificial Sequence: Synthetic oligonucleotide
ggcuacuccuccuccccgc

SEQ ID NO: 2130920 - RNA, 19 nt, Artificial Sequence
  Description of Artificial Sequence: Synthetic oligonucleotide
acaacauucuugggcgcuu

SEQ ID NO: 2130921 - RNA, 19 nt, Artificial Sequence
  Description of Artificial Sequence: Synthetic oligonucleotide
agggaaagcggaaggggua

SEQ ID NO: 2130922 - RNA, 19 nt, Artificial Sequence
  Description of Artificial Sequence: Synthetic oligonucleotide
gguguuugagcaugcugua

SEQ ID NO: 2130923 - RNA, 19 nt, Artificial Sequence
  Description of Artificial Sequence: Synthetic oligonucleotide
gcaacauguaguaguaacu

SEQ ID NO: 2130924 - RNA, 19 nt, Artificial Sequence
  Description of Artificial Sequence: Synthetic oligonucleotide
caacauucuugggcgcuuc

SEQ ID NO: 2130925 - RNA, 19 nt, Artificial Sequence
  Description of Artificial Sequence: Synthetic oligonucleotide
guaggucauccugcaucag

SEQ ID NO: 2130926 - RNA, 19 nt, Artificial Sequence
  Description of Artificial Sequence: Synthetic oligonucleotide
gccagaguagcuuguccuc

SEQ ID NO: 2130927 - RNA, 19 nt, Artificial Sequence
  Description of Artificial Sequence: Synthetic oligonucleotide
agcaugcuguacacauuca

SEQ ID NO: 2130928 - RNA, 19 nt, Artificial Sequence
  Description of Artificial Sequence: Synthetic oligonucleotide
gagcucgcacuugcgcacc

SEQ ID NO: 2130929 - RNA, 19 nt, Artificial Sequence
  Description of Artificial Sequence: Synthetic oligonucleotide
gggcuacuccuccuccccg

SEQ ID NO: 2130930 - RNA, 19 nt, Artificial Sequence
  Description of Artificial Sequence: Synthetic oligonucleotide
agggugcagcuccgcuagg

SEQ ID NO: 2130931 - RNA, 19 nt, Artificial Sequence
  Description of Artificial Sequence: Synthetic oligonucleotide
uaggaccccggggaccaug

SEQ ID NO: 2130932 - RNA, 19 nt, Artificial Sequence
  Description of Artificial Sequence: Synthetic oligonucleotide
gucgaacccaggccugaga

SEQ ID NO: 2130933 - RNA, 19 nt, Artificial Sequence
  Description of Artificial Sequence: Synthetic oligonucleotide
ggaccggaugcugccaugc

SEQ ID NO: 2130934 - RNA, 19 nt, Artificial Sequence
  Description of Artificial Sequence: Synthetic oligonucleotide
guggggugugcuucuaggu

SEQ ID NO: 2130935 - RNA, 19 nt, Artificial Sequence
  Description of Artificial Sequence: Synthetic oligonucleotide
cuuccgccagcgagcugag

SEQ ID NO: 2130936 - RNA, 19 nt, Artificial Sequence
  Description of Artificial Sequence: Synthetic oligonucleotide
ccagagucugguguuugag

SEQ ID NO: 2130937 - RNA, 19 nt, Artificial Sequence
  Description of Artificial Sequence: Synthetic oligonucleotide
aggccgacgcgcuccugcu

SEQ ID NO: 2130938 - RNA, 19 nt, Artificial Sequence
  Description of Artificial Sequence: Synthetic oligonucleotide
gacucgacccaggcgugca

SEQ ID NO: 2130939 - RNA, 19 nt, Artificial Sequence
  Description of Artificial Sequence: Synthetic oligonucleotide
cagcgagcugaggacccgg

SEQ ID NO: 2130940 - RNA, 19 nt, Artificial Sequence
  Description of Artificial Sequence: Synthetic oligonucleotide
ccggcugcgagcucucggc

SEQ ID NO: 2130941 - RNA, 19 nt, Artificial Sequence
  Description of Artificial Sequence: Synthetic oligonucleotide
ucuuggcucugugcaguua

SEQ ID NO: 2130942 - RNA, 19 nt, Artificial Sequence
  Description of Artificial Sequence: Synthetic oligonucleotide
ccaacugcagggaucaggu

SEQ ID NO: 2130943 - RNA, 19 nt, Artificial Sequence
  Description of Artificial Sequence: Synthetic oligonucleotide
gcccggaacaaccgcagca

SEQ ID NO: 2130944 - RNA, 19 nt, Artificial Sequence
  Description of Artificial Sequence: Synthetic oligonucleotide
ccacaacauucuugggcgc

SEQ ID NO: 2130945 - RNA, 19 nt, Artificial Sequence
  Description of Artificial Sequence: Synthetic oligonucleotide
caucagggugcagcuccgc

SEQ ID NO: 2130946 - RNA, 19 nt, Artificial Sequence
  Description of Artificial Sequence: Synthetic oligonucleotide
uguccagccggggcgccgu

SEQ ID NO: 2130947 - RNA, 19 nt, Artificial Sequence
  Description of Artificial Sequence: Synthetic oligonucleotide
gugacucgacccaggcgug

SEQ ID NO: 2130948 - RNA, 19 nt, Artificial Sequence
  Description of Artificial Sequence: Synthetic oligonucleotide
agccucgcagugacucgac

SEQ ID NO: 2130949 - RNA, 19 nt, Artificial Sequence
  Description of Artificial Sequence: Synthetic oligonucleotide
gcuacuccuccuccccgcc

SEQ ID NO: 2130950 - RNA, 19 nt, Artificial Sequence
  Description of Artificial Sequence: Synthetic oligonucleotide
augccgggcacggccacug

SEQ ID NO: 2130951 - RNA, 19 nt, Artificial Sequence
  Description of Artificial Sequence: Synthetic oligonucleotide
caccacucaccucagcccu

SEQ ID NO: 2130952 - RNA, 19 nt, Artificial Sequence
  Description of Artificial Sequence: Synthetic oligonucleotide
agcucgcacuugcgcacca

SEQ ID NO: 2130953 - RNA, 19 nt, Artificial Sequence
  Description of Artificial Sequence: Synthetic oligonucleotide
aaggccgcuuugaggccca

SEQ ID NO: 2130954 - RNA, 19 nt, Artificial Sequence
  Description of Artificial Sequence: Synthetic oligonucleotide
cuugggcgcuuccucaugu

SEQ ID NO: 2130955 - RNA, 19 nt, Artificial Sequence
  Description of Artificial Sequence: Synthetic oligonucleotide
gccguggcaaacacaucag

SEQ ID NO: 2130956 - RNA, 19 nt, Artificial Sequence
  Description of Artificial Sequence: Synthetic oligonucleotide
guacacauucaggccaacu

SEQ ID NO: 2130957 - RNA, 19 nt, Artificial Sequence
  Description of Artificial Sequence: Synthetic oligonucleotide
cgaauccugccagaguagc

SEQ ID NO: 2130958 - RNA, 19 nt, Artificial Sequence
  Description of Artificial Sequence: Synthetic oligonucleotide
ggguagaguggaguguauc

SEQ ID NO: 2130959 - RNA, 19 nt, Artificial Sequence
  Description of Artificial Sequence: Synthetic oligonucleotide
cuuccagggaauagcuuuu

SEQ ID NO: 2130960 - RNA, 19 nt, Artificial Sequence
  Description of Artificial Sequence: Synthetic oligonucleotide
gcccguacuuucaugggca

SEQ ID NO: 2130961 - RNA, 19 nt, Artificial Sequence
  Description of Artificial Sequence: Synthetic oligonucleotide
gggugcagcuccgcuaggc

SEQ ID NO: 2130962 - RNA, 19 nt, Artificial Sequence
  Description of Artificial Sequence: Synthetic oligonucleotide
cgccguggcaaacacauca

SEQ ID NO: 2130963 - RNA, 19 nt, Artificial Sequence
  Description of Artificial Sequence: Synthetic oligonucleotide
ugucgguacugggccaguu

SEQ ID NO: 2130964 - RNA, 19 nt, Artificial Sequence
  Description of Artificial Sequence: Synthetic oligonucleotide
cugcagugggcagcuccag

SEQ ID NO: 2130965 - RNA, 19 nt, Artificial Sequence
  Description of Artificial Sequence: Synthetic oligonucleotide
gaaggcugguaugcugacu

SEQ ID NO: 2130966 - RNA, 19 nt, Artificial Sequence
  Description of Artificial Sequence: Synthetic oligonucleotide
ugccgggcacggccacugc

SEQ ID NO: 2130967 - RNA, 19 nt, Artificial Sequence
  Description of Artificial Sequence: Synthetic oligonucleotide
cccaaguggggugugcuuc

SEQ ID NO: 2130968 - RNA, 19 nt, Artificial Sequence
  Description of Artificial Sequence: Synthetic oligonucleotide
cagugucgguacugggcca

SEQ ID NO: 2130969 - RNA, 19 nt, Artificial Sequence
  Description of Artificial Sequence: Synthetic oligonucleotide
cacaacauucuugggcgcu

SEQ ID NO: 2130970 - RNA, 19 nt, Artificial Sequence
  Description of Artificial Sequence: Synthetic oligonucleotide
cgcgccuuccgccagcgag

SEQ ID NO: 2130971 - RNA, 19 nt, Artificial Sequence
  Description of Artificial Sequence: Synthetic oligonucleotide
ccgcuuugaggcccagugc

SEQ ID NO: 2130972 - RNA, 19 nt, Artificial Sequence
  Description of Artificial Sequence: Synthetic oligonucleotide
uugcgcaccacgggaucua

SEQ ID NO: 2130973 - RNA, 19 nt, Artificial Sequence
  Description of Artificial Sequence: Synthetic oligonucleotide
ggggaccaugggcuacucc

SEQ ID NO: 2130974 - RNA, 19 nt, Artificial Sequence
  Description of Artificial Sequence: Synthetic oligonucleotide
gugcaccgggcgccggugc

SEQ ID NO: 2130975 - RNA, 19 nt, Artificial Sequence
  Description of Artificial Sequence: Synthetic oligonucleotide
gcagggucaggggaaguca

SEQ ID NO: 2130976 - RNA, 19 nt, Artificial Sequence
  Description of Artificial Sequence: Synthetic oligonucleotide
ggcagggucaggggaaguc

SEQ ID NO: 2130977 - RNA, 19 nt, Artificial Sequence
  Description of Artificial Sequence: Synthetic oligonucleotide
cccuggucuugguuuuagc

SEQ ID NO: 2130978 - RNA, 19 nt, Artificial Sequence
  Description of Artificial Sequence: Synthetic oligonucleotide
gcgagcucucggccggccg

SEQ ID NO: 2130979 - RNA, 19 nt, Artificial Sequence
  Description of Artificial Sequence: Synthetic oligonucleotide
gcuccgcuaggccgacgcg

SEQ ID NO: 2130980 - RNA, 19 nt, Artificial Sequence
  Description of Artificial Sequence: Synthetic oligonucleotide
ggccugagaagcggcccgg

SEQ ID NO: 2130981 - RNA, 19 nt, Artificial Sequence
  Description of Artificial Sequence: Synthetic oligonucleotide
gguacugggccaguucugu

SEQ ID NO: 2130982 - RNA, 19 nt, Artificial Sequence
  Description of Artificial Sequence: Synthetic oligonucleotide
ggaugcugccaugccgggc

SEQ ID NO: 2130983 - RNA, 19 nt, Artificial Sequence
  Description of Artificial Sequence: Synthetic oligonucleotide
cgggauucggagcucgcac

SEQ ID NO: 2130984 - RNA, 19 nt, Artificial Sequence
  Description of Artificial Sequence: Synthetic oligonucleotide
guaugcugacuuggcccca

SEQ ID NO: 2130985 - RNA, 19 nt, Artificial Sequence
  Description of Artificial Sequence: Synthetic oligonucleotide
ggucgaacccaggccugag

SEQ ID NO: 2130986 - RNA, 19 nt, Artificial Sequence
  Description of Artificial Sequence: Synthetic oligonucleotide
ccacucaccucagcccugg

SEQ ID NO: 2130987 - RNA, 19 nt, Artificial Sequence
  Description of Artificial Sequence: Synthetic oligonucleotide
ggcgccguggcaaacacau

SEQ ID NO: 2130988 - RNA, 19 nt, Artificial Sequence
  Description of Artificial Sequence: Synthetic oligonucleotide
gggcuugcggccaccacca

SEQ ID NO: 2130989 - RNA, 19 nt, Artificial Sequence
  Description of Artificial Sequence: Synthetic oligonucleotide
gggcgcuuccucauguguc

SEQ ID NO: 2130990 - RNA, 19 nt, Artificial Sequence
  Description of Artificial Sequence: Synthetic oligonucleotide
ggaccaugggcuacuccuc

SEQ ID NO: 2130991 - RNA, 19 nt, Artificial Sequence
  Description of Artificial Sequence: Synthetic oligonucleotide
gcgauggaaggcaggguga

SEQ ID NO: 2130992 - RNA, 19 nt, Artificial Sequence
  Description of Artificial Sequence: Synthetic oligonucleotide
gggaccggaugcugccaug

SEQ ID NO: 2130993 - RNA, 19 nt, Artificial Sequence
  Description of Artificial Sequence: Synthetic oligonucleotide
ggcccggaacaaccgcagc

SEQ ID NO: 2130994 - RNA, 19 nt, Artificial Sequence
  Description of Artificial Sequence: Synthetic oligonucleotide
gccucgcagugacucgacc

SEQ ID NO: 2130995 - RNA, 19 nt, Artificial Sequence
  Description of Artificial Sequence: Synthetic oligonucleotide
gcccagugcccguacuuuc

SEQ ID NO: 2130996 - RNA, 19 nt, Artificial Sequence
  Description of Artificial Sequence: Synthetic oligonucleotide
ggucaggggaagucauugu

SEQ ID NO: 2130997 - RNA, 19 nt, Artificial Sequence
  Description of Artificial Sequence: Synthetic oligonucleotide
ggaagucauuguagggaaa

SEQ ID NO: 2130998 - RNA, 19 nt, Artificial Sequence
  Description of Artificial Sequence: Synthetic oligonucleotide
guacuuucaugggcaacau

SEQ ID NO: 2130999 - RNA, 19 nt, Artificial Sequence
  Description of Artificial Sequence: Synthetic oligonucleotide
gagaagcggcccggaacaa

SEQ ID NO: 2131000 - RNA, 19 nt, Artificial Sequence
  Description of Artificial Sequence: Synthetic oligonucleotide
cgauggaaggcagggugag

SEQ ID NO: 2131001 - RNA, 19 nt, Artificial Sequence
  Description of Artificial Sequence: Synthetic oligonucleotide
gccgggcacggccacugcc

SEQ ID NO: 2131002 - RNA, 19 nt, Artificial Sequence
  Description of Artificial Sequence: Synthetic oligonucleotide
agccggggcgccguggcaa

SEQ ID NO: 2131003 - RNA, 19 nt, Artificial Sequence
  Description of Artificial Sequence: Synthetic oligonucleotide
cccggcugcgagcucucgg

SEQ ID NO: 2131004 - RNA, 19 nt, Artificial Sequence
  Description of Artificial Sequence: Synthetic oligonucleotide
ggaguguaucucgaauccu

SEQ ID NO: 2131005 - RNA, 19 nt, Artificial Sequence
  Description of Artificial Sequence: Synthetic oligonucleotide
ccgccagcgagcugaggac

SEQ ID NO: 2131006 - RNA, 19 nt, Artificial Sequence
  Description of Artificial Sequence: Synthetic oligonucleotide
caccgggcgccggugcgcc

SEQ ID NO: 2131007 - RNA, 19 nt, Artificial Sequence
  Description of Artificial Sequence: Synthetic oligonucleotide
cuugcgcaccacgggaucu

SEQ ID NO: 2131008 - RNA, 19 nt, Artificial Sequence
  Description of Artificial Sequence: Synthetic oligonucleotide
ggugugcuucuaggugacc

SEQ ID NO: 2131009 - RNA, 19 nt, Artificial Sequence
  Description of Artificial Sequence: Synthetic oligonucleotide
cacuugcgcaccacgggau

SEQ ID NO: 2131010 - RNA, 19 nt, Artificial Sequence
  Description of Artificial Sequence: Synthetic oligonucleotide
cagggucaggggaagucau

SEQ ID NO: 2131011 - RNA, 19 nt, Artificial Sequence
  Description of Artificial Sequence: Synthetic oligonucleotide
ccuuucuguugccagggcu

SEQ ID NO: 2131012 - RNA, 19 nt, Artificial Sequence
  Description of Artificial Sequence: Synthetic oligonucleotide
caguucugucagguacuga

SEQ ID NO: 2131013 - RNA, 19 nt, Artificial Sequence
  Description of Artificial Sequence: Synthetic oligonucleotide
gcgccuuccgccagcgagc

SEQ ID NO: 2131014 - RNA, 19 nt, Artificial Sequence
  Description of Artificial Sequence: Synthetic oligonucleotide
ggggucgaacccaggccug

SEQ ID NO: 2131015 - RNA, 19 nt, Artificial Sequence
  Description of Artificial Sequence: Synthetic oligonucleotide
guccuccaagaaggcgaug

SEQ ID NO: 2131016 - RNA, 19 nt, Artificial Sequence
  Description of Artificial Sequence: Synthetic oligonucleotide
ggauucggagcucgcacuu

SEQ ID NO: 2131017 - RNA, 19 nt, Artificial Sequence
  Description of Artificial Sequence: Synthetic oligonucleotide
gaggcccagugcccguacu

SEQ ID NO: 2131018 - RNA, 19 nt, Artificial Sequence
  Description of Artificial Sequence: Synthetic oligonucleotide
ccugccagaguagcuuguc

SEQ ID NO: 2131019 - RNA, 19 nt, Artificial Sequence
  Description of Artificial Sequence: Synthetic oligonucleotide
ccuccaagaaggcgaugga

SEQ ID NO: 2131020 - RNA, 19 nt, Artificial Sequence
  Description of Artificial Sequence: Synthetic oligonucleotide
cccaggcgugcaccgggcg

SEQ ID NO: 2131021 - RNA, 19 nt, Artificial Sequence
  Description of Artificial Sequence: Synthetic oligonucleotide
cggagcucgcacuugcgca

SEQ ID NO: 2131022 - RNA, 19 nt, Artificial Sequence
  Description of Artificial Sequence: Synthetic oligonucleotide
ccagcgagcugaggacccg

SEQ ID NO: 2131023 - RNA, 19 nt, Artificial Sequence
  Description of Artificial Sequence: Synthetic oligonucleotide
ccguacuuucaugggcaac

SEQ ID NO: 2131024 - RNA, 19 nt, Artificial Sequence
  Description of Artificial Sequence: Synthetic oligonucleotide
cugcgagcucucggccggc

SEQ ID NO: 2131025 - RNA, 19 nt, Artificial Sequence
  Description of Artificial Sequence: Synthetic oligonucleotide
gcgcaccacgggaucuagg

SEQ ID NO: 2131026 - RNA, 19 nt, Artificial Sequence
  Description of Artificial Sequence: Synthetic oligonucleotide
cgguacugggccaguucug

SEQ ID NO: 2131027 - RNA, 19 nt, Artificial Sequence
  Description of Artificial Sequence: Synthetic oligonucleotide
cgcuaggccgacgcgcucc

SEQ ID NO: 2131028 - RNA, 19 nt, Artificial Sequence
  Description of Artificial Sequence: Synthetic oligonucleotide
cuaggccgacgcgcuccug

SEQ ID NO: 2131029 - RNA, 19 nt, Artificial Sequence
  Description of Artificial Sequence: Synthetic oligonucleotide
gccggugcgccgggauucg

SEQ ID NO: 2131030 - RNA, 19 nt, Artificial Sequence
  Description of Artificial Sequence: Synthetic oligonucleotide
gggucgaacccaggccuga

SEQ ID NO: 2131031 - RNA, 19 nt, Artificial Sequence
  Description of Artificial Sequence: Synthetic oligonucleotide
cucggccggccgcgccgcg

SEQ ID NO: 2131032 - RNA, 19 nt, Artificial Sequence
  Description of Artificial Sequence: Synthetic oligonucleotide
cgccagcgagcugaggacc

SEQ ID NO: 2131033 - RNA, 19 nt, Artificial Sequence
  Description of Artificial Sequence: Synthetic oligonucleotide
cucagcccuggucuugguu

SEQ ID NO: 2131034 - RNA, 19 nt, Artificial Sequence
  Description of Artificial Sequence: Synthetic oligonucleotide
cagcuccgcuaggccgacg

SEQ ID NO: 2131035 - RNA, 19 nt, Artificial Sequence
  Description of Artificial Sequence: Synthetic oligonucleotide
agcccuggucuugguuuua

SEQ ID NO: 2131036 - RNA, 19 nt, Artificial Sequence
  Description of Artificial Sequence: Synthetic oligonucleotide
ccaaguggggugugcuucu

SEQ ID NO: 2131037 - RNA, 19 nt, Artificial Sequence
  Description of Artificial Sequence: Synthetic oligonucleotide
caaguggggugugcuucua

SEQ ID NO: 2131038 - RNA, 19 nt, Artificial Sequence
  Description of Artificial Sequence: Synthetic oligonucleotide
cccguacuuucaugggcaa

SEQ ID NO: 2131039 - RNA, 19 nt, Artificial Sequence
  Description of Artificial Sequence: Synthetic oligonucleotide
gggucugcagugggcagcu

SEQ ID NO: 2131040 - RNA, 19 nt, Artificial Sequence
  Description of Artificial Sequence: Synthetic oligonucleotide
gccgcgccgcgccuuccgc

SEQ ID NO: 2131041 - RNA, 19 nt, Artificial Sequence
  Description of Artificial Sequence: Synthetic oligonucleotide
cgccgggauucggagcucg

SEQ ID NO: 2131042 - RNA, 19 nt, Artificial Sequence
  Description of Artificial Sequence: Synthetic oligonucleotide
gccgggauucggagcucgc

SEQ ID NO: 2131043 - RNA, 19 nt, Artificial Sequence
  Description of Artificial Sequence: Synthetic oligonucleotide
cggcugcgagcucucggcc

SEQ ID NO: 2131044 - RNA, 19 nt, Artificial Sequence
  Description of Artificial Sequence: Synthetic oligonucleotide
gcucgcacuugcgcaccac

SEQ ID NO: 2131045 - RNA, 19 nt, Artificial Sequence
  Description of Artificial Sequence: Synthetic oligonucleotide
ggccgacgcgcuccugcuc

SEQ ID NO: 2131046 - RNA, 19 nt, Artificial Sequence
  Description of Artificial Sequence: Synthetic oligonucleotide
ggcuugcggccaccaccac

SEQ ID NO: 2131047 - RNA, 19 nt, Artificial Sequence
  Description of Artificial Sequence: Synthetic oligonucleotide
ggccaacugcagggaucag

SEQ ID NO: 2131048 - RNA, 19 nt, Artificial Sequence
  Description of Artificial Sequence: Synthetic oligonucleotide
ccacgggaucuaggagacc

SEQ ID NO: 2131049 - RNA, 19 nt, Artificial Sequence
  Description of Artificial Sequence: Synthetic oligonucleotide
ccgggauucggagcucgca

SEQ ID NO: 2131050 - RNA, 19 nt, Artificial Sequence
  Description of Artificial Sequence: Synthetic oligonucleotide
gcuaggccgacgcgcuccu

SEQ ID NO: 2131051 - RNA, 19 nt, Artificial Sequence
  Description of Artificial Sequence: Synthetic oligonucleotide
cccggggaccaugggcuac

SEQ ID NO: 2131052 - RNA, 19 nt, Artificial Sequence
  Description of Artificial Sequence: Synthetic oligonucleotide
ccacgauguguaggucauc

SEQ ID NO: 2131053 - RNA, 19 nt, Artificial Sequence
  Description of Artificial Sequence: Synthetic oligonucleotide
cagccggggcgccguggca

SEQ ID NO: 2131054 - RNA, 19 nt, Artificial Sequence
  Description of Artificial Sequence: Synthetic oligonucleotide
cugcagggaucagguugaa

SEQ ID NO: 2131055 - RNA, 19 nt, Artificial Sequence
  Description of Artificial Sequence: Synthetic oligonucleotide
gugucgguacugggccagu

SEQ ID NO: 2131056 - RNA, 19 nt, Artificial Sequence
  Description of Artificial Sequence: Synthetic oligonucleotide
gcgcuuccucaugugucaa

SEQ ID NO: 2131057 - RNA, 19 nt, Artificial Sequence
  Description of Artificial Sequence: Synthetic oligonucleotide
caugccgggcacggccacu

SEQ ID NO: 2131058 - RNA, 19 nt, Artificial Sequence
  Description of Artificial Sequence: Synthetic oligonucleotide
gggcgccguggcaaacaca

SEQ ID NO: 2131059 - RNA, 19 nt, Artificial Sequence
  Description of Artificial Sequence: Synthetic oligonucleotide
cccggaacaaccgcagcau

SEQ ID NO: 2131060 - RNA, 19 nt, Artificial Sequence
  Description of Artificial Sequence: Synthetic oligonucleotide
cgccggugcgccgggauuc

SEQ ID NO: 2131061 - RNA, 19 nt, Artificial Sequence
  Description of Artificial Sequence: Synthetic oligonucleotide
ggcccagugcccguacuuu

SEQ ID NO: 2131062 - RNA, 19 nt, Artificial Sequence
  Description of Artificial Sequence: Synthetic oligonucleotide
ccggugcgccgggauucgg

SEQ ID NO: 2131063 - RNA, 19 nt, Artificial Sequence
  Description of Artificial Sequence: Synthetic oligonucleotide
cggugcgccgggauucgga

SEQ ID NO: 2131064 - RNA, 19 nt, Artificial Sequence
  Description of Artificial Sequence: Synthetic oligonucleotide
cgugcaccgggcgccggug

SEQ ID NO: 2131065 - RNA, 19 nt, Artificial Sequence
  Description of Artificial Sequence: Synthetic oligonucleotide
cacucaccucagcccuggu

SEQ ID NO: 2131066 - RNA, 19 nt, Artificial Sequence
  Description of Artificial Sequence: Synthetic oligonucleotide
ccagugcccguacuuucau

SEQ ID NO: 2131067 - RNA, 19 nt, Artificial Sequence
  Description of Artificial Sequence: Synthetic oligonucleotide
gccggggcgccguggcaaa

SEQ ID NO: 2131068 - RNA, 19 nt, Artificial Sequence
  Description of Artificial Sequence: Synthetic oligonucleotide
gcgccguggcaaacacauc

SEQ ID NO: 2131069 - RNA, 19 nt, Artificial Sequence
  Description of Artificial Sequence: Synthetic oligonucleotide
ccgcuaggccgacgcgcuc

SEQ ID NO: 2131070 - RNA, 19 nt, Artificial Sequence
  Description of Artificial Sequence: Synthetic oligonucleotide
gcgugcaccgggcgccggu

SEQ ID NO: 2131071 - RNA, 19 nt, Artificial Sequence
  Description of Artificial Sequence: Synthetic oligonucleotide
gggcacggccacugccuuu

SEQ ID NO: 2131072 - RNA, 19 nt, Artificial Sequence
  Description of Artificial Sequence: Synthetic oligonucleotide
ccggggcgccguggcaaac

SEQ ID NO: 2131073 - RNA, 19 nt, Artificial Sequence
  Description of Artificial Sequence: Synthetic oligonucleotide
gcgccgggauucggagcuc

SEQ ID NO: 2131074 - RNA, 19 nt, Artificial Sequence
  Description of Artificial Sequence: Synthetic oligonucleotide
cgggcgccggugcgccggg

SEQ ID NO: 2131075 - RNA, 19 nt, Artificial Sequence
  Description of Artificial Sequence: Synthetic oligonucleotide
ccccggggaccaugggcua

SEQ ID NO: 2131076 - RNA, 19 nt, Artificial Sequence
  Description of Artificial Sequence: Synthetic oligonucleotide
gcgccggugcgccgggauu

SEQ ID NO: 2131077 - RNA, 19 nt, Artificial Sequence
  Description of Artificial Sequence: Synthetic oligonucleotide
ccgcgccuuccgccagcga

SEQ ID NO: 2131078 - RNA, 19 nt, Artificial Sequence
  Description of Artificial Sequence: Synthetic oligonucleotide
gggcgccggugcgccggga

SEQ ID NO: 2131079 - RNA, 19 nt, Artificial Sequence
  Description of Artificial Sequence: Synthetic oligonucleotide
cgggcacggccacugccuu

SEQ ID NO: 2131080 - RNA, 19 nt, Artificial Sequence
  Description of Artificial Sequence: Synthetic oligonucleotide
aaaguaaggucccacaggg

SEQ ID NO: 2131081 - RNA, 19 nt, Artificial Sequence
  Description of Artificial Sequence: Synthetic oligonucleotide
acauauuucggauuggccc

SEQ ID NO: 2131082 - RNA, 19 nt, Artificial Sequence
  Description of Artificial Sequence: Synthetic oligonucleotide
uagaggaacagauucaucg

SEQ ID NO: 2131083 - RNA, 19 nt, Artificial Sequence
  Description of Artificial Sequence: Synthetic oligonucleotide
aaugcauucuagaagcucc

SEQ ID NO: 2131084 - RNA, 19 nt, Artificial Sequence
  Description of Artificial Sequence: Synthetic oligonucleotide
aaaaguaaggucccacagg

SEQ ID NO: 2131085 - RNA, 19 nt, Artificial Sequence
  Description of Artificial Sequence: Synthetic oligonucleotide
ucaguuccaauaaacgugg

SEQ ID NO: 2131086 - RNA, 19 nt, Artificial Sequence
  Description of Artificial Sequence: Synthetic oligonucleotide
agaaugaugccaucuagcg

SEQ ID NO: 2131087 - RNA, 19 nt, Artificial Sequence
  Description of Artificial Sequence: Synthetic oligonucleotide
agugacacuggcuuaaagg

SEQ ID NO: 2131088 - RNA, 19 nt, Artificial Sequence
  Description of Artificial Sequence: Synthetic oligonucleotide
acuauugacgggcagucgc

SEQ ID NO: 2131089 - RNA, 19 nt, Artificial Sequence
  Description of Artificial Sequence: Synthetic oligonucleotide
ucugacauauuucggauug

SEQ ID NO: 2131090 - RNA, 19 nt, Artificial Sequence
  Description of Artificial Sequence: Synthetic oligonucleotide
ucuuauuaucaacuccucg

SEQ ID NO: 2131091 - RNA, 19 nt, Artificial Sequence
  Description of Artificial Sequence: Synthetic oligonucleotide
aacaccggcaaaguggucc

SEQ ID NO: 2131092 - RNA, 19 nt, Artificial Sequence
  Description of Artificial Sequence: Synthetic oligonucleotide
uguucguuuauccaguaga

SEQ ID NO: 2131093 - RNA, 19 nt, Artificial Sequence
  Description of Artificial Sequence: Synthetic oligonucleotide
ucguuuauccaguagagga

SEQ ID NO: 2131094 - RNA, 19 nt, Artificial Sequence
  Description of Artificial Sequence: Synthetic oligonucleotide
uaaagguuccgcuagaaaa

SEQ ID NO: 2131095 - RNA, 19 nt, Artificial Sequence
  Description of Artificial Sequence: Synthetic oligonucleotide
caucacgauaacaagauug

SEQ ID NO: 2131096 - RNA, 19 nt, Artificial Sequence
  Description of Artificial Sequence: Synthetic oligonucleotide
auaucagucaguuugccca

SEQ ID NO: 2131097 - RNA, 19 nt, Artificial Sequence
  Description of Artificial Sequence: Synthetic oligonucleotide
cacgauaacaagauugucc

SEQ ID NO: 2131098 - RNA, 19 nt, Artificial Sequence
  Description of Artificial Sequence: Synthetic oligonucleotide
uauacagacuggcagaggu

SEQ ID NO: 2131099 - RNA, 19 nt, Artificial Sequence
  Description of Artificial Sequence: Synthetic oligonucleotide
ugagguaccucucacacac

SEQ ID NO: 2131100 - RNA, 19 nt, Artificial Sequence
  Description of Artificial Sequence: Synthetic oligonucleotide
aaacaaucggaucuuauua

SEQ ID NO: 2131101 - RNA, 19 nt, Artificial Sequence
  Description of Artificial Sequence: Synthetic oligonucleotide
auaauugccgcccaucuug

SEQ ID NO: 2131102 - RNA, 19 nt, Artificial Sequence
  Description of Artificial Sequence: Synthetic oligonucleotide
gaaaaguaaggucccacag

SEQ ID NO: 2131103 - RNA, 19 nt, Artificial Sequence
  Description of Artificial Sequence: Synthetic oligonucleotide
aagggaaaaccucaacuug

SEQ ID NO: 2131104 - RNA, 19 nt, Artificial Sequence
  Description of Artificial Sequence: Synthetic oligonucleotide
uuaucaacuccucgaaaag

SEQ ID NO: 2131105 - RNA, 19 nt, Artificial Sequence
  Description of Artificial Sequence: Synthetic oligonucleotide
aauuuccuguggcucaagg

SEQ ID NO: 2131106 - RNA, 19 nt, Artificial Sequence
  Description of Artificial Sequence: Synthetic oligonucleotide
gaauaucugaaacuggaca

SEQ ID NO: 2131107 - RNA, 19 nt, Artificial Sequence
  Description of Artificial Sequence: Synthetic oligonucleotide
acacaccuuaaacucaccc

SEQ ID NO: 2131108 - RNA, 19 nt, Artificial Sequence
  Description of Artificial Sequence: Synthetic oligonucleotide
acgauaacaagauugucca

SEQ ID NO: 2131109 - RNA, 19 nt, Artificial Sequence
  Description of Artificial Sequence: Synthetic oligonucleotide
ugcaaaacuauugacgggc

SEQ ID NO: 2131110 - RNA, 19 nt, Artificial Sequence
  Description of Artificial Sequence: Synthetic oligonucleotide
gaaaaccucaacuugguaa

SEQ ID NO: 2131111 - RNA, 19 nt, Artificial Sequence
  Description of Artificial Sequence: Synthetic oligonucleotide
uguugugccagcucuauga

SEQ ID NO: 2131112 - RNA, 19 nt, Artificial Sequence
  Description of Artificial Sequence: Synthetic oligonucleotide
cuuauuaucaacuccucga

SEQ ID NO: 2131113 - RNA, 19 nt, Artificial Sequence
  Description of Artificial Sequence: Synthetic oligonucleotide
uuccaauaaacguggggcg

SEQ ID NO: 2131114 - RNA, 19 nt, Artificial Sequence
  Description of Artificial Sequence: Synthetic oligonucleotide
uggcacaccaucaacacac

SEQ ID NO: 2131115 - RNA, 19 nt, Artificial Sequence
  Description of Artificial Sequence: Synthetic oligonucleotide
uuugccucgucacuccugg

SEQ ID NO: 2131116 - RNA, 19 nt, Artificial Sequence
  Description of Artificial Sequence: Synthetic oligonucleotide
aaacguggggcggauauac

SEQ ID NO: 2131117 - RNA, 19 nt, Artificial Sequence
  Description of Artificial Sequence: Synthetic oligonucleotide
aaacuauugacgggcaguc

SEQ ID NO: 2131118 - RNA, 19 nt, Artificial Sequence
  Description of Artificial Sequence: Synthetic oligonucleotide
aaagguuccgcuagaaaag

SEQ ID NO: 2131119 - RNA, 19 nt, Artificial Sequence
  Description of Artificial Sequence: Synthetic oligonucleotide
aguaaggucccacagggcu

SEQ ID NO: 2131120 - RNA, 19 nt, Artificial Sequence
  Description of Artificial Sequence: Synthetic oligonucleotide
caggcucugacauauuucg

SEQ ID NO: 2131121 - RNA, 19 nt, Artificial Sequence
  Description of Artificial Sequence: Synthetic oligonucleotide
aaacucaccccacuguugu

SEQ ID NO: 2131122 - RNA, 19 nt, Artificial Sequence
  Description of Artificial Sequence: Synthetic oligonucleotide
aacaaucggaucuuauuau

SEQ ID NO: 2131123 - RNA, 19 nt, Artificial Sequence
  Description of Artificial Sequence: Synthetic oligonucleotide
uccucgaaaagccuucaag

SEQ ID NO: 2131124 - RNA, 19 nt, Artificial Sequence
  Description of Artificial Sequence: Synthetic oligonucleotide
cauacuggauaucagucag

SEQ ID NO: 2131125 - RNA, 19 nt, Artificial Sequence
  Description of Artificial Sequence: Synthetic oligonucleotide
cucgaaaagccuucaagcc

SEQ ID NO: 2131126 - RNA, 19 nt, Artificial Sequence
  Description of Artificial Sequence: Synthetic oligonucleotide
acaaucggaucuuauuauc

SEQ ID NO: 2131127 - RNA, 19 nt, Artificial Sequence
  Description of Artificial Sequence: Synthetic oligonucleotide
aaaacuauugacgggcagu

SEQ ID NO: 2131128 - RNA, 19 nt, Artificial Sequence
  Description of Artificial Sequence: Synthetic oligonucleotide
uuccgcuagaaaaguaagg

SEQ ID NO: 2131129 - RNA, 19 nt, Artificial Sequence
  Description of Artificial Sequence: Synthetic oligonucleotide
aacacugcaacuacaauau

SEQ ID NO: 2131130 - RNA, 19 nt, Artificial Sequence
  Description of Artificial Sequence: Synthetic oligonucleotide
ucgaaaagccuucaagccu

SEQ ID NO: 2131131 - RNA, 19 nt, Artificial Sequence
  Description of Artificial Sequence: Synthetic oligonucleotide
gauaucagucaguuugccc

SEQ ID NO: 2131132 - RNA, 19 nt, Artificial Sequence
  Description of Artificial Sequence: Synthetic oligonucleotide
uccauugccucgcacugcg

SEQ ID NO: 2131133 - RNA, 19 nt, Artificial Sequence
  Description of Artificial Sequence: Synthetic oligonucleotide
uccaucacgauaacaagau

SEQ ID NO: 2131134 - RNA, 19 nt, Artificial Sequence
  Description of Artificial Sequence: Synthetic oligonucleotide
aaagggacgcgccauaauu

SEQ ID NO: 2131135 - RNA, 19 nt, Artificial Sequence
  Description of Artificial Sequence: Synthetic oligonucleotide
aaucggaucuuauuaucaa

SEQ ID NO: 2131136 - RNA, 19 nt, Artificial Sequence
  Description of Artificial Sequence: Synthetic oligonucleotide
agccuucaagccuucaaac

SEQ ID NO: 2131137 - RNA, 19 nt, Artificial Sequence
  Description of Artificial Sequence: Synthetic oligonucleotide
uguggcucaagggaaaacc

SEQ ID NO: 2131138 - RNA, 19 nt, Artificial Sequence
  Description of Artificial Sequence: Synthetic oligonucleotide
agggacgcgccauaauugc

SEQ ID NO: 2131139 - RNA, 19 nt, Artificial Sequence
  Description of Artificial Sequence: Synthetic oligonucleotide
uaucuguauaagcugccga

SEQ ID NO: 2131140 - RNA, 19 nt, Artificial Sequence
  Description of Artificial Sequence: Synthetic oligonucleotide
agcagaucggcacauccuc

SEQ ID NO: 2131141 - RNA, 19 nt, Artificial Sequence
  Description of Artificial Sequence: Synthetic oligonucleotide
uuggucuaucuguauaagc

SEQ ID NO: 2131142 - RNA, 19 nt, Artificial Sequence
  Description of Artificial Sequence: Synthetic oligonucleotide
uccgcuagaaaaguaaggu

SEQ ID NO: 2131143 - RNA, 19 nt, Artificial Sequence
  Description of Artificial Sequence: Synthetic oligonucleotide
ggacagacaacgcaggccg

SEQ ID NO: 2131144 - RNA, 19 nt, Artificial Sequence
  Description of Artificial Sequence: Synthetic oligonucleotide
uucaucgugcccacuuccg

SEQ ID NO: 2131145 - RNA, 19 nt, Artificial Sequence
  Description of Artificial Sequence: Synthetic oligonucleotide
uggauaucagucaguuugc

SEQ ID NO: 2131146 - RNA, 19 nt, Artificial Sequence
  Description of Artificial Sequence: Synthetic oligonucleotide
ucaggucgaaacaaucgga

SEQ ID NO: 2131147 - RNA, 19 nt, Artificial Sequence
  Description of Artificial Sequence: Synthetic oligonucleotide
acuggcuuaaagguuccgc

SEQ ID NO: 2131148 - RNA, 19 nt, Artificial Sequence
  Description of Artificial Sequence: Synthetic oligonucleotide
uccaauaaacguggggcgg

SEQ ID NO: 2131149 - RNA, 19 nt, Artificial Sequence
  Description of Artificial Sequence: Synthetic oligonucleotide
ucuuggucuaucuguauaa

SEQ ID NO: 2131150 - RNA, 19 nt, Artificial Sequence
  Description of Artificial Sequence: Synthetic oligonucleotide
uccguuaucugguuguccu

SEQ ID NO: 2131151 - RNA, 19 nt, Artificial Sequence
  Description of Artificial Sequence: Synthetic oligonucleotide
uuaaacucaccccacuguu

SEQ ID NO: 2131152 - RNA, 19 nt, Artificial Sequence
  Description of Artificial Sequence: Synthetic oligonucleotide
gaggaacagauucaucgug

SEQ ID NO: 2131153 - RNA, 19 nt, Artificial Sequence
  Description of Artificial Sequence: Synthetic oligonucleotide
aagugguccucacagcaga

SEQ ID NO: 2131154 - RNA, 19 nt, Artificial Sequence
  Description of Artificial Sequence: Synthetic oligonucleotide
agaauaucugaaacuggac

SEQ ID NO: 2131155 - RNA, 19 nt, Artificial Sequence
  Description of Artificial Sequence: Synthetic oligonucleotide
uucguuuauccaguagagg

SEQ ID NO: 2131156 - RNA, 19 nt, Artificial Sequence
  Description of Artificial Sequence: Synthetic oligonucleotide
uguuggaaugugcagcauc

SEQ ID NO: 2131157 - RNA, 19 nt, Artificial Sequence
  Description of Artificial Sequence: Synthetic oligonucleotide
uuauccaguagaggaacag

SEQ ID NO: 2131158 - RNA, 19 nt, Artificial Sequence
  Description of Artificial Sequence: Synthetic oligonucleotide
gagaaugaugccaucuagc

SEQ ID NO: 2131159 - RNA, 19 nt, Artificial Sequence
  Description of Artificial Sequence: Synthetic oligonucleotide
ccgaaugcauucuagaagc

SEQ ID NO: 2131160 - RNA, 19 nt, Artificial Sequence
  Description of Artificial Sequence: Synthetic oligonucleotide
uuuauccaguagaggaaca

SEQ ID NO: 2131161 - RNA, 19 nt, Artificial Sequence
  Description of Artificial Sequence: Synthetic oligonucleotide
gaucuuauuaucaacuccu

SEQ ID NO: 2131162 - RNA, 19 nt, Artificial Sequence
  Description of Artificial Sequence: Synthetic oligonucleotide
uuaaagguuccgcuagaaa

SEQ ID NO: 2131163 - RNA, 19 nt, Artificial Sequence
  Description of Artificial Sequence: Synthetic oligonucleotide
auaaacguggggcggauau

SEQ ID NO: 2131164 - RNA, 19 nt, Artificial Sequence
  Description of Artificial Sequence: Synthetic oligonucleotide
augcaaaacuauugacggg

SEQ ID NO: 2131165 - RNA, 19 nt, Artificial Sequence
  Description of Artificial Sequence: Synthetic oligonucleotide
ugacauauuucggauuggc

SEQ ID NO: 2131166 - RNA, 19 nt, Artificial Sequence
  Description of Artificial Sequence: Synthetic oligonucleotide
acuuccguuaucugguugu

SEQ ID NO: 2131167 - RNA, 19 nt, Artificial Sequence
  Description of Artificial Sequence: Synthetic oligonucleotide
uuguacagaauaucugaaa

SEQ ID NO: 2131168 - RNA, 19 nt, Artificial Sequence
  Description of Artificial Sequence: Synthetic oligonucleotide
uggaguacggaacccacuc

SEQ ID NO: 2131169 - RNA, 19 nt, Artificial Sequence
  Description of Artificial Sequence: Synthetic oligonucleotide
acggaacccacucuugguc

SEQ ID NO: 2131170 - RNA, 19 nt, Artificial Sequence
  Description of Artificial Sequence: Synthetic oligonucleotide
ggaucuuauuaucaacucc

SEQ ID NO: 2131171 - RNA, 19 nt, Artificial Sequence
  Description of Artificial Sequence: Synthetic oligonucleotide
ucuugacuccaagggaugg

SEQ ID NO: 2131172 - RNA, 19 nt, Artificial Sequence
  Description of Artificial Sequence: Synthetic oligonucleotide
aggucgaaacaaucggauc

SEQ ID NO: 2131173 - RNA, 19 nt, Artificial Sequence
  Description of Artificial Sequence: Synthetic oligonucleotide
cauauuucggauuggccca

SEQ ID NO: 2131174 - RNA, 19 nt, Artificial Sequence
  Description of Artificial Sequence: Synthetic oligonucleotide
agaggaacagauucaucgu

SEQ ID NO: 2131175 - RNA, 19 nt, Artificial Sequence
  Description of Artificial Sequence: Synthetic oligonucleotide
acucaccccacuguugugc

SEQ ID NO: 2131176 - RNA, 19 nt, Artificial Sequence
  Description of Artificial Sequence: Synthetic oligonucleotide
gauaacaagauuguccagu

SEQ ID NO: 2131177 - RNA, 19 nt, Artificial Sequence
  Description of Artificial Sequence: Synthetic oligonucleotide
auggugagguaccucucac

SEQ ID NO: 2131178 - RNA, 19 nt, Artificial Sequence
  Description of Artificial Sequence: Synthetic oligonucleotide
cuguauaagcugccgaaug

SEQ ID NO: 2131179 - RNA, 19 nt, Artificial Sequence
  Description of Artificial Sequence: Synthetic oligonucleotide
guacggaacccacucuugg

SEQ ID NO: 2131180 - RNA, 19 nt, Artificial Sequence
  Description of Artificial Sequence: Synthetic oligonucleotide
aucuguauaagcugccgaa

SEQ ID NO: 2131181 - RNA, 19 nt, Artificial Sequence
  Description of Artificial Sequence: Synthetic oligonucleotide
ugaugcuuugccucgucac

SEQ ID NO: 2131182 - RNA, 19 nt, Artificial Sequence
  Description of Artificial Sequence: Synthetic oligonucleotide
uauaagcugccgaaugcau

SEQ ID NO: 2131183 - RNA, 19 nt, Artificial Sequence
  Description of Artificial Sequence: Synthetic oligonucleotide
gauuggcccacagugacac

SEQ ID NO: 2131184 - RNA, 19 nt, Artificial Sequence
  Description of Artificial Sequence: Synthetic oligonucleotide
gaacagauucaucgugccc

SEQ ID NO: 2131185 - RNA, 19 nt, Artificial Sequence
  Description of Artificial Sequence: Synthetic oligonucleotide
guucguuuauccaguagag

SEQ ID NO: 2131186 - RNA, 19 nt, Artificial Sequence
  Description of Artificial Sequence: Synthetic oligonucleotide
cucgcacugcgccaaaagg

SEQ ID NO: 2131187 - RNA, 19 nt, Artificial Sequence
  Description of Artificial Sequence: Synthetic oligonucleotide
uaauugccgcccaucuugc

SEQ ID NO: 2131188 - RNA, 19 nt, Artificial Sequence
  Description of Artificial Sequence: Synthetic oligonucleotide
acguggggcggauauacag

SEQ ID NO: 2131189 - RNA, 19 nt, Artificial Sequence
  Description of Artificial Sequence: Synthetic oligonucleotide
cuauugacgggcagucgcc

SEQ ID NO: 2131190 - RNA, 19 nt, Artificial Sequence
  Description of Artificial Sequence: Synthetic oligonucleotide
aacuauugacgggcagucg

SEQ ID NO: 2131191 - RNA, 19 nt, Artificial Sequence
  Description of Artificial Sequence: Synthetic oligonucleotide
aaagugguccucacagcag

SEQ ID NO: 2131192 - RNA, 19 nt, Artificial Sequence
  Description of Artificial Sequence: Synthetic oligonucleotide
cuaucuguauaagcugccg

SEQ ID NO: 2131193 - RNA, 19 nt, Artificial Sequence
  Description of Artificial Sequence: Synthetic oligonucleotide
guuuauccaguagaggaac

SEQ ID NO: 2131194 - RNA, 19 nt, Artificial Sequence
  Description of Artificial Sequence: Synthetic oligonucleotide
caaucggaucuuauuauca

SEQ ID NO: 2131195 - RNA, 19 nt, Artificial Sequence
  Description of Artificial Sequence: Synthetic oligonucleotide
cacugcgccaaaagggacg

SEQ ID NO: 2131196 - RNA, 19 nt, Artificial Sequence
  Description of Artificial Sequence: Synthetic oligonucleotide
acacaugaacacugcaacu

SEQ ID NO: 2131197 - RNA, 19 nt, Artificial Sequence
  Description of Artificial Sequence: Synthetic oligonucleotide
aucacgauaacaagauugu

SEQ ID NO: 2131198 - RNA, 19 nt, Artificial Sequence
  Description of Artificial Sequence: Synthetic oligonucleotide
ugccgaaugcauucuagaa

SEQ ID NO: 2131199 - RNA, 19 nt, Artificial Sequence
  Description of Artificial Sequence: Synthetic oligonucleotide
cauugccucgcacugcgcc

SEQ ID NO: 2131200 - RNA, 19 nt, Artificial Sequence
  Description of Artificial Sequence: Synthetic oligonucleotide
caaaacuauugacgggcag

SEQ ID NO: 2131201 - RNA, 19 nt, Artificial Sequence
  Description of Artificial Sequence: Synthetic oligonucleotide
cuuccauacuggauaucag

SEQ ID NO: 2131202 - RNA, 19 nt, Artificial Sequence
  Description of Artificial Sequence: Synthetic oligonucleotide
aagggacgcgccauaauug

SEQ ID NO: 2131203 - RNA, 19 nt, Artificial Sequence
  Description of Artificial Sequence: Synthetic oligonucleotide
ccaguagaggaacagauuc

SEQ ID NO: 2131204 - RNA, 19 nt, Artificial Sequence
  Description of Artificial Sequence: Synthetic oligonucleotide
uauugacgggcagucgccg

SEQ ID NO: 2131205 - RNA, 19 nt, Artificial Sequence
  Description of Artificial Sequence: Synthetic oligonucleotide
agacaacgcaggccguccc

SEQ ID NO: 2131206 - RNA, 19 nt, Artificial Sequence
  Description of Artificial Sequence: Synthetic oligonucleotide
auguucguuuauccaguag

SEQ ID NO: 2131207 - RNA, 19 nt, Artificial Sequence
  Description of Artificial Sequence: Synthetic oligonucleotide
cuccauuguuggaaugugc

SEQ ID NO: 2131208 - RNA, 19 nt, Artificial Sequence
  Description of Artificial Sequence: Synthetic oligonucleotide
uauccaguagaggaacaga

SEQ ID NO: 2131209 - RNA, 19 nt, Artificial Sequence
  Description of Artificial Sequence: Synthetic oligonucleotide
ggggcggauauacagacug

SEQ ID NO: 2131210 - RNA, 19 nt, Artificial Sequence
  Description of Artificial Sequence: Synthetic oligonucleotide
ggucaggucgaaacaaucg

SEQ ID NO: 2131211 - RNA, 19 nt, Artificial Sequence
  Description of Artificial Sequence: Synthetic oligonucleotide
aagguuccgcuagaaaagu

SEQ ID NO: 2131212 - RNA, 19 nt, Artificial Sequence
  Description of Artificial Sequence: Synthetic oligonucleotide
ugcgccaaaagggacgcgc

SEQ ID NO: 2131213 - RNA, 19 nt, Artificial Sequence
  Description of Artificial Sequence: Synthetic oligonucleotide
gugacacuggcuuaaaggu

SEQ ID NO: 2131214 - RNA, 19 nt, Artificial Sequence
  Description of Artificial Sequence: Synthetic oligonucleotide
aaaagggacgcgccauaau

SEQ ID NO: 2131215 - RNA, 19 nt, Artificial Sequence
  Description of Artificial Sequence: Synthetic oligonucleotide
gccgaaugcauucuagaag

SEQ ID NO: 2131216 - RNA, 19 nt, Artificial Sequence
  Description of Artificial Sequence: Synthetic oligonucleotide
guuccgcuagaaaaguaag

SEQ ID NO: 2131217 - RNA, 19 nt, Artificial Sequence
  Description of Artificial Sequence: Synthetic oligonucleotide
uuccuguggcucaagggaa

SEQ ID NO: 2131218 - RNA, 19 nt, Artificial Sequence
  Description of Artificial Sequence: Synthetic oligonucleotide
ucggauuggcccacaguga

SEQ ID NO: 2131219 - RNA, 19 nt, Artificial Sequence
  Description of Artificial Sequence: Synthetic oligonucleotide
guaacacaugaacacugca

SEQ ID NO: 2131220 - RNA, 19 nt, Artificial Sequence
  Description of Artificial Sequence: Synthetic oligonucleotide
aucuuauuaucaacuccuc

SEQ ID NO: 2131221 - RNA, 19 nt, Artificial Sequence
  Description of Artificial Sequence: Synthetic oligonucleotide
uuucggauuggcccacagu

SEQ ID NO: 2131222 - RNA, 19 nt, Artificial Sequence
  Description of Artificial Sequence: Synthetic oligonucleotide
ggcucaguuccaauaaacg

SEQ ID NO: 2131223 - RNA, 19 nt, Artificial Sequence
  Description of Artificial Sequence: Synthetic oligonucleotide
ggauauacagacuggcaga

SEQ ID NO: 2131224 - RNA, 19 nt, Artificial Sequence
  Description of Artificial Sequence: Synthetic oligonucleotide
gaaacaaucggaucuuauu

SEQ ID NO: 2131225 - RNA, 19 nt, Artificial Sequence
  Description of Artificial Sequence: Synthetic oligonucleotide
guacagaauaucugaaacu

SEQ ID NO: 2131226 - RNA, 19 nt, Artificial Sequence
  Description of Artificial Sequence: Synthetic oligonucleotide
auuucggauuggcccacag

SEQ ID NO: 2131227 - RNA, 19 nt, Artificial Sequence
  Description of Artificial Sequence: Synthetic oligonucleotide
gauucaucgugcccacuuc

SEQ ID NO: 2131228 - RNA, 19 nt, Artificial Sequence
  Description of Artificial Sequence: Synthetic oligonucleotide
ugacagccauucuccauug

SEQ ID NO: 2131229 - RNA, 19 nt, Artificial Sequence
  Description of Artificial Sequence: Synthetic oligonucleotide
accucaacuugguaacaca

SEQ ID NO: 2131230 - RNA, 19 nt, Artificial Sequence
  Description of Artificial Sequence: Synthetic oligonucleotide
uugacuccaagggauggcu

SEQ ID NO: 2131231 - RNA, 19 nt, Artificial Sequence
  Description of Artificial Sequence: Synthetic oligonucleotide
gcauucuagaagcuccucc

SEQ ID NO: 2131232 - RNA, 19 nt, Artificial Sequence
  Description of Artificial Sequence: Synthetic oligonucleotide
gaugccaucuagcggaggu

SEQ ID NO: 2131233 - RNA, 19 nt, Artificial Sequence
  Description of Artificial Sequence: Synthetic oligonucleotide
uccaguagaggaacagauu

SEQ ID NO: 2131234 - RNA, 19 nt, Artificial Sequence
  Description of Artificial Sequence: Synthetic oligonucleotide
aacgcaggccgucccugag

SEQ ID NO: 2131235 - RNA, 19 nt, Artificial Sequence
  Description of Artificial Sequence: Synthetic oligonucleotide
auauuucggauuggcccac

SEQ ID NO: 2131236 - RNA, 19 nt, Artificial Sequence
  Description of Artificial Sequence: Synthetic oligonucleotide
ucuguauaagcugccgaau

SEQ ID NO: 2131237 - RNA, 19 nt, Artificial Sequence
  Description of Artificial Sequence: Synthetic oligonucleotide
uacggaacccacucuuggu

SEQ ID NO: 2131238 - RNA, 19 nt, Artificial Sequence
  Description of Artificial Sequence: Synthetic oligonucleotide
cucaagggaaaaccucaac

SEQ ID NO: 2131239 - RNA, 19 nt, Artificial Sequence
  Description of Artificial Sequence: Synthetic oligonucleotide
cuccuccuggucaaacacc

SEQ ID NO: 2131240 - RNA, 19 nt, Artificial Sequence
  Description of Artificial Sequence: Synthetic oligonucleotide
ggucgaaacaaucggaucu

SEQ ID NO: 2131241 - RNA, 19 nt, Artificial Sequence
  Description of Artificial Sequence: Synthetic oligonucleotide
accuuaaacucaccccacu

SEQ ID NO: 2131242 - RNA, 19 nt, Artificial Sequence
  Description of Artificial Sequence: Synthetic oligonucleotide
aucuagcggaggugucgcc

SEQ ID NO: 2131243 - RNA, 19 nt, Artificial Sequence
  Description of Artificial Sequence: Synthetic oligonucleotide
ucuagcggaggugucgcca

SEQ ID NO: 2131244 - RNA, 19 nt, Artificial Sequence
  Description of Artificial Sequence: Synthetic oligonucleotide
agaucggcacauccuccuc

SEQ ID NO: 2131245 - RNA, 19 nt, Artificial Sequence
  Description of Artificial Sequence: Synthetic oligonucleotide
aguuugcccaagaggcggc

SEQ ID NO: 2131246 - RNA, 19 nt, Artificial Sequence
  Description of Artificial Sequence: Synthetic oligonucleotide
aggucaggucgaaacaauc

SEQ ID NO: 2131247 - RNA, 19 nt, Artificial Sequence
  Description of Artificial Sequence: Synthetic oligonucleotide
ggccguucuccauuguugg

SEQ ID NO: 2131248 - RNA, 19 nt, Artificial Sequence
  Description of Artificial Sequence: Synthetic oligonucleotide
cuguggcacaccaucaaca

SEQ ID NO: 2131249 - RNA, 19 nt, Artificial Sequence
  Description of Artificial Sequence: Synthetic oligonucleotide
cuagcggaggugucgccag

SEQ ID NO: 2131250 - RNA, 19 nt, Artificial Sequence
  Description of Artificial Sequence: Synthetic oligonucleotide
cucacacaccuuaaacuca

SEQ ID NO: 2131251 - RNA, 19 nt, Artificial Sequence
  Description of Artificial Sequence: Synthetic oligonucleotide
gacgcgccauaauugccgc

SEQ ID NO: 2131252 - RNA, 19 nt, Artificial Sequence
  Description of Artificial Sequence: Synthetic oligonucleotide
uaugaugcuuugccucguc

SEQ ID NO: 2131253 - RNA, 19 nt, Artificial Sequence
  Description of Artificial Sequence: Synthetic oligonucleotide
aacucaccccacuguugug

SEQ ID NO: 2131254 - RNA, 19 nt, Artificial Sequence
  Description of Artificial Sequence: Synthetic oligonucleotide
aaaccucaacuugguaaca

SEQ ID NO: 2131255 - RNA, 19 nt, Artificial Sequence
  Description of Artificial Sequence: Synthetic oligonucleotide
augaugcuuugccucguca

SEQ ID NO: 2131256 - RNA, 19 nt, Artificial Sequence
  Description of Artificial Sequence: Synthetic oligonucleotide
aggugucgccagcucuucc

SEQ ID NO: 2131257 - RNA, 19 nt, Artificial Sequence
  Description of Artificial Sequence: Synthetic oligonucleotide
guaccucucacacaccuua

SEQ ID NO: 2131258 - RNA, 19 nt, Artificial Sequence
  Description of Artificial Sequence: Synthetic oligonucleotide
auccaguagaggaacagau

SEQ ID NO: 2131259 - RNA, 19 nt, Artificial Sequence
  Description of Artificial Sequence: Synthetic oligonucleotide
aauugccgcccaucuugca

SEQ ID NO: 2131260 - RNA, 19 nt, Artificial Sequence
  Description of Artificial Sequence: Synthetic oligonucleotide
acgcaggccgucccugagc

SEQ ID NO: 2131261 - RNA, 19 nt, Artificial Sequence
  Description of Artificial Sequence: Synthetic oligonucleotide
uucccaggcucugacauau

SEQ ID NO: 2131262 - RNA, 19 nt, Artificial Sequence
  Description of Artificial Sequence: Synthetic oligonucleotide
auugccucgcacugcgcca

SEQ ID NO: 2131263 - RNA, 19 nt, Artificial Sequence
  Description of Artificial Sequence: Synthetic oligonucleotide
cggauauacagacuggcag

SEQ ID NO: 2131264 - RNA, 19 nt, Artificial Sequence
  Description of Artificial Sequence: Synthetic oligonucleotide
uggcccuuguacagaauau

SEQ ID NO: 2131265 - RNA, 19 nt, Artificial Sequence
  Description of Artificial Sequence: Synthetic oligonucleotide
cugacauauuucggauugg

SEQ ID NO: 2131266 - RNA, 19 nt, Artificial Sequence
  Description of Artificial Sequence: Synthetic oligonucleotide
caguuccaauaaacguggg

SEQ ID NO: 2131267 - RNA, 19 nt, Artificial Sequence
  Description of Artificial Sequence: Synthetic oligonucleotide
caucuagcggaggugucgc

SEQ ID NO: 2131268 - RNA, 19 nt, Artificial Sequence
  Description of Artificial Sequence: Synthetic oligonucleotide
uucgggccguucuccauug

SEQ ID NO: 2131269 - RNA, 19 nt, Artificial Sequence
  Description of Artificial Sequence: Synthetic oligonucleotide
acaagauuguccagucgcu

SEQ ID NO: 2131270 - RNA, 19 nt, Artificial Sequence
  Description of Artificial Sequence: Synthetic oligonucleotide
ggacgcgccauaauugccg

SEQ ID NO: 2131271 - RNA, 19 nt, Artificial Sequence
  Description of Artificial Sequence: Synthetic oligonucleotide
caaacaccggcaaaguggu

SEQ ID NO: 2131272 - RNA, 19 nt, Artificial Sequence
  Description of Artificial Sequence: Synthetic oligonucleotide
ccaagaggcggcuugccag

SEQ ID NO: 2131273 - RNA, 19 nt, Artificial Sequence
  Description of Artificial Sequence: Synthetic oligonucleotide
acacugcaacuacaauaug

SEQ ID NO: 2131274 - RNA, 19 nt, Artificial Sequence
  Description of Artificial Sequence: Synthetic oligonucleotide
cuuugccucgucacuccug

SEQ ID NO: 2131275 - RNA, 19 nt, Artificial Sequence
  Description of Artificial Sequence: Synthetic oligonucleotide
aguacggaacccacucuug

SEQ ID NO: 2131276 - RNA, 19 nt, Artificial Sequence
  Description of Artificial Sequence: Synthetic oligonucleotide
acaccggcaaagugguccu

SEQ ID NO: 2131277 - RNA, 19 nt, Artificial Sequence
  Description of Artificial Sequence: Synthetic oligonucleotide
cagugacacuggcuuaaag

SEQ ID NO: 2131278 - RNA, 19 nt, Artificial Sequence
  Description of Artificial Sequence: Synthetic oligonucleotide
acgcgccauaauugccgcc

SEQ ID NO: 2131279 - RNA, 19 nt, Artificial Sequence
  Description of Artificial Sequence: Synthetic oligonucleotide
auugacgggcagucgccgu

SEQ ID NO: 2131280 - RNA, 19 nt, Artificial Sequence
  Description of Artificial Sequence: Synthetic oligonucleotide
gggcagucgccguucaggg

SEQ ID NO: 2131281 - RNA, 19 nt, Artificial Sequence
  Description of Artificial Sequence: Synthetic oligonucleotide
ucgccguucagggcagagg

SEQ ID NO: 2131282 - RNA, 19 nt, Artificial Sequence
  Description of Artificial Sequence: Synthetic oligonucleotide
ggcggauauacagacuggc

SEQ ID NO: 2131283 - RNA, 19 nt, Artificial Sequence
  Description of Artificial Sequence: Synthetic oligonucleotide
cacacaccuuaaacucacc

SEQ ID NO: 2131284 - RNA, 19 nt, Artificial Sequence
  Description of Artificial Sequence: Synthetic oligonucleotide
uaccucucacacaccuuaa

SEQ ID NO: 2131285 - RNA, 19 nt, Artificial Sequence
  Description of Artificial Sequence: Synthetic oligonucleotide
auacagacuggcagaggug

SEQ ID NO: 2131286 - RNA, 19 nt, Artificial Sequence
  Description of Artificial Sequence: Synthetic oligonucleotide
ugaugccaucuagcggagg

SEQ ID NO: 2131287 - RNA, 19 nt, Artificial Sequence
  Description of Artificial Sequence: Synthetic oligonucleotide
cagacaacgcaggccgucc

SEQ ID NO: 2131288 - RNA, 19 nt, Artificial Sequence
  Description of Artificial Sequence: Synthetic oligonucleotide
cuggcuuaaagguuccgcu

SEQ ID NO: 2131289 - RNA, 19 nt, Artificial Sequence
  Description of Artificial Sequence: Synthetic oligonucleotide
cugccgaaugcauucuaga

SEQ ID NO: 2131290 - RNA, 19 nt, Artificial Sequence
  Description of Artificial Sequence: Synthetic oligonucleotide
aucgugcccacuuccguua

SEQ ID NO: 2131291 - RNA, 19 nt, Artificial Sequence
  Description of Artificial Sequence: Synthetic oligonucleotide
gcaaagugguccucacagc

SEQ ID NO: 2131292 - RNA, 19 nt, Artificial Sequence
  Description of Artificial Sequence: Synthetic oligonucleotide
aggcucugacauauuucgg

SEQ ID NO: 2131293 - RNA, 19 nt, Artificial Sequence
  Description of Artificial Sequence: Synthetic oligonucleotide
aauaaacguggggcggaua

SEQ ID NO: 2131294 - RNA, 19 nt, Artificial Sequence
  Description of Artificial Sequence: Synthetic oligonucleotide
accucucacacaccuuaaa

SEQ ID NO: 2131295 - RNA, 19 nt, Artificial Sequence
  Description of Artificial Sequence: Synthetic oligonucleotide
cuuaaagguuccgcuagaa

SEQ ID NO: 2131296 - RNA, 19 nt, Artificial Sequence
  Description of Artificial Sequence: Synthetic oligonucleotide
uggggcggauauacagacu

SEQ ID NO: 2131297 - RNA, 19 nt, Artificial Sequence
  Description of Artificial Sequence: Synthetic oligonucleotide
ggcucaagggaaaaccuca

SEQ ID NO: 2131298 - RNA, 19 nt, Artificial Sequence
  Description of Artificial Sequence: Synthetic oligonucleotide
uugacgggcagucgccguu

SEQ ID NO: 2131299 - RNA, 19 nt, Artificial Sequence
  Description of Artificial Sequence: Synthetic oligonucleotide
cuagaaaaguaagguccca

SEQ ID NO: 2131300 - RNA, 19 nt, Artificial Sequence
  Description of Artificial Sequence: Synthetic oligonucleotide
aaacaccggcaaagugguc

SEQ ID NO: 2131301 - RNA, 19 nt, Artificial Sequence
  Description of Artificial Sequence: Synthetic oligonucleotide
ggauaucagucaguuugcc

SEQ ID NO: 2131302 - RNA, 19 nt, Artificial Sequence
  Description of Artificial Sequence: Synthetic oligonucleotide
gguuccgcuagaaaaguaa

SEQ ID NO: 2131303 - RNA, 19 nt, Artificial Sequence
  Description of Artificial Sequence: Synthetic oligonucleotide
auccauggugagguaccuc

SEQ ID NO: 2131304 - RNA, 19 nt, Artificial Sequence
  Description of Artificial Sequence: Synthetic oligonucleotide
ugcauucuagaagcuccuc

SEQ ID NO: 2131305 - RNA, 19 nt, Artificial Sequence
  Description of Artificial Sequence: Synthetic oligonucleotide
agguggaguacggaaccca

SEQ ID NO: 2131306 - RNA, 19 nt, Artificial Sequence
  Description of Artificial Sequence: Synthetic oligonucleotide
guaaggucccacagggcuc

SEQ ID NO: 2131307 - RNA, 19 nt, Artificial Sequence
  Description of Artificial Sequence: Synthetic oligonucleotide
guagaggaacagauucauc

SEQ ID NO: 2131308 - RNA, 19 nt, Artificial Sequence
  Description of Artificial Sequence: Synthetic oligonucleotide
gugagguaccucucacaca

SEQ ID NO: 2131309 - RNA, 19 nt, Artificial Sequence
  Description of Artificial Sequence: Synthetic oligonucleotide
gaguacggaacccacucuu

SEQ ID NO: 2131310 - RNA, 19 nt, Artificial Sequence
  Description of Artificial Sequence: Synthetic oligonucleotide
uccucauguugaggucagg

SEQ ID NO: 2131311 - RNA, 19 nt, Artificial Sequence
  Description of Artificial Sequence: Synthetic oligonucleotide
ucgaaacaaucggaucuua

SEQ ID NO: 2131312 - RNA, 19 nt, Artificial Sequence
  Description of Artificial Sequence: Synthetic oligonucleotide
guggcacaccaucaacaca

SEQ ID NO: 2131313 - RNA, 19 nt, Artificial Sequence
  Description of Artificial Sequence: Synthetic oligonucleotide
auacuggauaucagucagu

SEQ ID NO: 2131314 - RNA, 19 nt, Artificial Sequence
  Description of Artificial Sequence: Synthetic oligonucleotide
ccauacuggauaucaguca

SEQ ID NO: 2131315 - RNA, 19 nt, Artificial Sequence
  Description of Artificial Sequence: Synthetic oligonucleotide
ccgcuagaaaaguaagguc

SEQ ID NO: 2131316 - RNA, 19 nt, Artificial Sequence
  Description of Artificial Sequence: Synthetic oligonucleotide
gcugccgaaugcauucuag

SEQ ID NO: 2131317 - RNA, 19 nt, Artificial Sequence
  Description of Artificial Sequence: Synthetic oligonucleotide
ccaucuagcggaggugucg

SEQ ID NO: 2131318 - RNA, 19 nt, Artificial Sequence
  Description of Artificial Sequence: Synthetic oligonucleotide
uauuucggauuggcccaca

SEQ ID NO: 2131319 - RNA, 19 nt, Artificial Sequence
  Description of Artificial Sequence: Synthetic oligonucleotide
aacguggggcggauauaca

SEQ ID NO: 2131320 - RNA, 19 nt, Artificial Sequence
  Description of Artificial Sequence: Synthetic oligonucleotide
uaaacguggggcggauaua

SEQ ID NO: 2131321 - RNA, 19 nt, Artificial Sequence
  Description of Artificial Sequence: Synthetic oligonucleotide
ucaccccacuguugugcca

SEQ ID NO: 2131322 - RNA, 19 nt, Artificial Sequence
  Description of Artificial Sequence: Synthetic oligonucleotide
cuccauugccucgcacugc

SEQ ID NO: 2131323 - RNA, 19 nt, Artificial Sequence
  Description of Artificial Sequence: Synthetic oligonucleotide
cagcucuaugaugcuuugc

SEQ ID NO: 2131324 - RNA, 19 nt, Artificial Sequence
  Description of Artificial Sequence: Synthetic oligonucleotide
cuuccguuaucugguuguc

SEQ ID NO: 2131325 - RNA, 19 nt, Artificial Sequence
  Description of Artificial Sequence: Synthetic oligonucleotide
gguccucacagcagaucgg

SEQ ID NO: 2131326 - RNA, 19 nt, Artificial Sequence
  Description of Artificial Sequence: Synthetic oligonucleotide
cacagugacacuggcuuaa

SEQ ID NO: 2131327 - RNA, 19 nt, Artificial Sequence
  Description of Artificial Sequence: Synthetic oligonucleotide
cacuggcuuaaagguuccg

SEQ ID NO: 2131328 - RNA, 19 nt, Artificial Sequence
  Description of Artificial Sequence: Synthetic oligonucleotide
cauguucguuuauccagua

SEQ ID NO: 2131329 - RNA, 19 nt, Artificial Sequence
  Description of Artificial Sequence: Synthetic oligonucleotide
gguggaguacggaacccac

SEQ ID NO: 2131330 - RNA, 19 nt, Artificial Sequence
  Description of Artificial Sequence: Synthetic oligonucleotide
gcuuaaagguuccgcuaga

SEQ ID NO: 2131331 - RNA, 19 nt, Artificial Sequence
  Description of Artificial Sequence: Synthetic oligonucleotide
gcggcuugccagcuucggg

SEQ ID NO: 2131332 - RNA, 19 nt, Artificial Sequence
  Description of Artificial Sequence: Synthetic oligonucleotide
caauuuccuguggcucaag

SEQ ID NO: 2131333 - RNA, 19 nt, Artificial Sequence
  Description of Artificial Sequence: Synthetic oligonucleotide
ucgugcccacuuccguuau

SEQ ID NO: 2131334 - RNA, 19 nt, Artificial Sequence
  Description of Artificial Sequence: Synthetic oligonucleotide
cagucgcucuccucccuuc

SEQ ID NO: 2131335 - RNA, 19 nt, Artificial Sequence
  Description of Artificial Sequence: Synthetic oligonucleotide
agcggaggugucgccagcu

SEQ ID NO: 2131336 - RNA, 19 nt, Artificial Sequence
  Description of Artificial Sequence: Synthetic oligonucleotide
agcugccgaaugcauucua

SEQ ID NO: 2131337 - RNA, 19 nt, Artificial Sequence
  Description of Artificial Sequence: Synthetic oligonucleotide
gacaacgcaggccgucccu

SEQ ID NO: 2131338 - RNA, 19 nt, Artificial Sequence
  Description of Artificial Sequence: Synthetic oligonucleotide
guugugccagcucuaugau

SEQ ID NO: 2131339 - RNA, 19 nt, Artificial Sequence
  Description of Artificial Sequence: Synthetic oligonucleotide
gcagaucggcacauccucc

SEQ ID NO: 2131340 - RNA, 19 nt, Artificial Sequence
  Description of Artificial Sequence: Synthetic oligonucleotide
gcuugccagcuucgggccg

SEQ ID NO: 2131341 - RNA, 19 nt, Artificial Sequence
  Description of Artificial Sequence: Synthetic oligonucleotide
cggauuggcccacagugac

SEQ ID NO: 2131342 - RNA, 19 nt, Artificial Sequence
  Description of Artificial Sequence: Synthetic oligonucleotide
ggcccuuguacagaauauc

SEQ ID NO: 2131343 - RNA, 19 nt, Artificial Sequence
  Description of Artificial Sequence: Synthetic oligonucleotide
cagaucggcacauccuccu

SEQ ID NO: 2131344 - RNA, 19 nt, Artificial Sequence
  Description of Artificial Sequence: Synthetic oligonucleotide
ugacgggcagucgccguuc

SEQ ID NO: 2131345 - RNA, 19 nt, Artificial Sequence
  Description of Artificial Sequence: Synthetic oligonucleotide
cucgucacuccugggagaa

SEQ ID NO: 2131346 - RNA, 19 nt, Artificial Sequence
  Description of Artificial Sequence: Synthetic oligonucleotide
acgggcagucgccguucag

SEQ ID NO: 2131347 - RNA, 19 nt, Artificial Sequence
  Description of Artificial Sequence: Synthetic oligonucleotide
gucgccguucagggcagag

SEQ ID NO: 2131348 - RNA, 19 nt, Artificial Sequence
  Description of Artificial Sequence: Synthetic oligonucleotide
ugccgcccaucuugcaguc

SEQ ID NO: 2131349 - RNA, 19 nt, Artificial Sequence
  Description of Artificial Sequence: Synthetic oligonucleotide
gaggugucgccagcucuuc

SEQ ID NO: 2131350 - RNA, 19 nt, Artificial Sequence
  Description of Artificial Sequence: Synthetic oligonucleotide
ggcagucgccguucagggc

SEQ ID NO: 2131351 - RNA, 19 nt, Artificial Sequence
  Description of Artificial Sequence: Synthetic oligonucleotide
gcggauauacagacuggca

SEQ ID NO: 2131352 - RNA, 19 nt, Artificial Sequence
  Description of Artificial Sequence: Synthetic oligonucleotide
gacgggcagucgccguuca

SEQ ID NO: 2131353 - RNA, 19 nt, Artificial Sequence
  Description of Artificial Sequence: Synthetic oligonucleotide
gggacgcgccauaauugcc

SEQ ID NO: 2131354 - RNA, 19 nt, Artificial Sequence
  Description of Artificial Sequence: Synthetic oligonucleotide
cgcgccauaauugccgccc

SEQ ID NO: 2131355 - RNA, 19 nt, Artificial Sequence
  Description of Artificial Sequence: Synthetic oligonucleotide
cucugacauauuucggauu

SEQ ID NO: 2131356 - RNA, 19 nt, Artificial Sequence
  Description of Artificial Sequence: Synthetic oligonucleotide
ucgggccguucuccauugu

SEQ ID NO: 2131357 - RNA, 19 nt, Artificial Sequence
  Description of Artificial Sequence: Synthetic oligonucleotide
cccacuuccguuaucuggu

SEQ ID NO: 2131358 - RNA, 19 nt, Artificial Sequence
  Description of Artificial Sequence: Synthetic oligonucleotide
ccguuaucugguuguccug

SEQ ID NO: 2131359 - RNA, 19 nt, Artificial Sequence
  Description of Artificial Sequence: Synthetic oligonucleotide
caacgcaggccgucccuga

SEQ ID NO: 2131360 - RNA, 19 nt, Artificial Sequence
  Description of Artificial Sequence: Synthetic oligonucleotide
gucgaaacaaucggaucuu

SEQ ID NO: 2131361 - RNA, 19 nt, Artificial Sequence
  Description of Artificial Sequence: Synthetic oligonucleotide
ccauaauugccgcccaucu

SEQ ID NO: 2131362 - RNA, 19 nt, Artificial Sequence
  Description of Artificial Sequence: Synthetic oligonucleotide
agguuccgcuagaaaagua

SEQ ID NO: 2131363 - RNA, 19 nt, Artificial Sequence
  Description of Artificial Sequence: Synthetic oligonucleotide
cgcacugcgccaaaaggga

SEQ ID NO: 2131364 - RNA, 19 nt, Artificial Sequence
  Description of Artificial Sequence: Synthetic oligonucleotide
ccaauaaacguggggcgga

SEQ ID NO: 2131365 - RNA, 19 nt, Artificial Sequence
  Description of Artificial Sequence: Synthetic oligonucleotide
gggaaaaccucaacuuggu

SEQ ID NO: 2131366 - RNA, 19 nt, Artificial Sequence
  Description of Artificial Sequence: Synthetic oligonucleotide
ggcggcuugccagcuucgg

SEQ ID NO: 2131367 - RNA, 19 nt, Artificial Sequence
  Description of Artificial Sequence: Synthetic oligonucleotide
ccauguucguuuauccagu

SEQ ID NO: 2131368 - RNA, 19 nt, Artificial Sequence
  Description of Artificial Sequence: Synthetic oligonucleotide
gcgccaaaagggacgcgcc

SEQ ID NO: 2131369 - RNA, 19 nt, Artificial Sequence
  Description of Artificial Sequence: Synthetic oligonucleotide
ggaacccacucuuggucua

SEQ ID NO: 2131370 - RNA, 19 nt, Artificial Sequence
  Description of Artificial Sequence: Synthetic oligonucleotide
agaggcggcuugccagcuu

SEQ ID NO: 2131371 - RNA, 19 nt, Artificial Sequence
  Description of Artificial Sequence: Synthetic oligonucleotide
cgggcagucgccguucagg

SEQ ID NO: 2131372 - RNA, 19 nt, Artificial Sequence
  Description of Artificial Sequence: Synthetic oligonucleotide
ccuggucaaacaccggcaa

SEQ ID NO: 2131373 - RNA, 19 nt, Artificial Sequence
  Description of Artificial Sequence: Synthetic oligonucleotide
ccucaacuugguaacacau

SEQ ID NO: 2131374 - RNA, 19 nt, Artificial Sequence
  Description of Artificial Sequence: Synthetic oligonucleotide
caucgugcccacuuccguu

SEQ ID NO: 2131375 - RNA, 19 nt, Artificial Sequence
  Description of Artificial Sequence: Synthetic oligonucleotide
ccacuguugugccagcucu

SEQ ID NO: 2131376 - RNA, 19 nt, Artificial Sequence
  Description of Artificial Sequence: Synthetic oligonucleotide
guggaguacggaacccacu

SEQ ID NO: 2131377 - RNA, 19 nt, Artificial Sequence
  Description of Artificial Sequence: Synthetic oligonucleotide
ccugggagaaugaugccau

SEQ ID NO: 2131378 - RNA, 19 nt, Artificial Sequence
  Description of Artificial Sequence: Synthetic oligonucleotide
gcacugcgccaaaagggac

SEQ ID NO: 2131379 - RNA, 19 nt, Artificial Sequence
  Description of Artificial Sequence: Synthetic oligonucleotide
gccguucuccauuguugga

SEQ ID NO: 2131380 - RNA, 19 nt, Artificial Sequence
  Description of Artificial Sequence: Synthetic oligonucleotide
gcucaagggaaaaccucaa

SEQ ID NO: 2131381 - RNA, 19 nt, Artificial Sequence
  Description of Artificial Sequence: Synthetic oligonucleotide
ccauacagccagaggaccu

SEQ ID NO: 2131382 - RNA, 19 nt, Artificial Sequence
  Description of Artificial Sequence: Synthetic oligonucleotide
cuaugaugcuuugccucgu

SEQ ID NO: 2131383 - RNA, 19 nt, Artificial Sequence
  Description of Artificial Sequence: Synthetic oligonucleotide
gacagacaacgcaggccgu

SEQ ID NO: 2131384 - RNA, 19 nt, Artificial Sequence
  Description of Artificial Sequence: Synthetic oligonucleotide
cguggggcggauauacaga

SEQ ID NO: 2131385 - RNA, 19 nt, Artificial Sequence
  Description of Artificial Sequence: Synthetic oligonucleotide
ccguucuccauuguuggaa

SEQ ID NO: 2131386 - RNA, 19 nt, Artificial Sequence
  Description of Artificial Sequence: Synthetic oligonucleotide
ucgucacuccugggagaau

SEQ ID NO: 2131387 - RNA, 19 nt, Artificial Sequence
  Description of Artificial Sequence: Synthetic oligonucleotide
cuucgggccguucuccauu

SEQ ID NO: 2131388 - RNA, 19 nt, Artificial Sequence
  Description of Artificial Sequence: Synthetic oligonucleotide
ccucauguugaggucaggu

SEQ ID NO: 2131389 - RNA, 19 nt, Artificial Sequence
  Description of Artificial Sequence: Synthetic oligonucleotide
caauaaacguggggcggau

SEQ ID NO: 2131390 - RNA, 19 nt, Artificial Sequence
  Description of Artificial Sequence: Synthetic oligonucleotide
gcgccauaauugccgccca

SEQ ID NO: 2131391 - RNA, 19 nt, Artificial Sequence
  Description of Artificial Sequence: Synthetic oligonucleotide
ccaaaagggacgcgccaua

SEQ ID NO: 2131392 - RNA, 19 nt, Artificial Sequence
  Description of Artificial Sequence: Synthetic oligonucleotide
ccucgucacuccugggaga

SEQ ID NO: 2131393 - RNA, 19 nt, Artificial Sequence
  Description of Artificial Sequence: Synthetic oligonucleotide
gcggaggugucgccagcuc

SEQ ID NO: 2131394 - RNA, 19 nt, Artificial Sequence
  Description of Artificial Sequence: Synthetic oligonucleotide
caccggcaaagugguccuc

SEQ ID NO: 2131395 - RNA, 19 nt, Artificial Sequence
  Description of Artificial Sequence: Synthetic oligonucleotide
cgaaacaaucggaucuuau

SEQ ID NO: 2131396 - RNA, 19 nt, Artificial Sequence
  Description of Artificial Sequence: Synthetic oligonucleotide
gccgucccugagccaaaca

SEQ ID NO: 2131397 - RNA, 19 nt, Artificial Sequence
  Description of Artificial Sequence: Synthetic oligonucleotide
ugccagcuucgggccguuc

SEQ ID NO: 2131398 - RNA, 19 nt, Artificial Sequence
  Description of Artificial Sequence: Synthetic oligonucleotide
cgccguucagggcagaggu

SEQ ID NO: 2131399 - RNA, 19 nt, Artificial Sequence
  Description of Artificial Sequence: Synthetic oligonucleotide
uugccagcuucgggccguu

SEQ ID NO: 2131400 - RNA, 19 nt, Artificial Sequence
  Description of Artificial Sequence: Synthetic oligonucleotide
cggaacccacucuuggucu

SEQ ID NO: 2131401 - RNA, 19 nt, Artificial Sequence
  Description of Artificial Sequence: Synthetic oligonucleotide
gccgcccaucuugcagucc

SEQ ID NO: 2131402 - RNA, 19 nt, Artificial Sequence
  Description of Artificial Sequence: Synthetic oligonucleotide
cguucuccauuguuggaau

SEQ ID NO: 2131403 - RNA, 19 nt, Artificial Sequence
  Description of Artificial Sequence: Synthetic oligonucleotide
cccuuccauacuggauauc

SEQ ID NO: 2131404 - RNA, 19 nt, Artificial Sequence
  Description of Artificial Sequence: Synthetic oligonucleotide
gcaggccgucccugagcca

SEQ ID NO: 2131405 - RNA, 19 nt, Artificial Sequence
  Description of Artificial Sequence: Synthetic oligonucleotide
aggccgucccugagccaaa

SEQ ID NO: 2131406 - RNA, 19 nt, Artificial Sequence
  Description of Artificial Sequence: Synthetic oligonucleotide
ccaucacgauaacaagauu

SEQ ID NO: 2131407 - RNA, 19 nt, Artificial Sequence
  Description of Artificial Sequence: Synthetic oligonucleotide
cggaggugucgccagcucu

SEQ ID NO: 2131408 - RNA, 19 nt, Artificial Sequence
  Description of Artificial Sequence: Synthetic oligonucleotide
ccacaaagagcagggcuuu

SEQ ID NO: 2131409 - RNA, 19 nt, Artificial Sequence
  Description of Artificial Sequence: Synthetic oligonucleotide
ccagucgcucuccucccuu

SEQ ID NO: 2131410 - RNA, 19 nt, Artificial Sequence
  Description of Artificial Sequence: Synthetic oligonucleotide
cgggccguucuccauuguu

SEQ ID NO: 2131411 - RNA, 19 nt, Artificial Sequence
  Description of Artificial Sequence: Synthetic oligonucleotide
cgccauaauugccgcccau

SEQ ID NO: 2131412 - RNA, 19 nt, Artificial Sequence
  Description of Artificial Sequence: Synthetic oligonucleotide
aguacagccaauuacaucc

SEQ ID NO: 2131413 - RNA, 19 nt, Artificial Sequence
  Description of Artificial Sequence: Synthetic oligonucleotide
uuuacucuggcauauaagg

SEQ ID NO: 2131414 - RNA, 19 nt, Artificial Sequence
  Description of Artificial Sequence: Synthetic oligonucleotide
ugguaagaaaacaagaaag

SEQ ID NO: 2131415 - RNA, 19 nt, Artificial Sequence
  Description of Artificial Sequence: Synthetic oligonucleotide
aauaugauugaauagcuaa

SEQ ID NO: 2131416 - RNA, 19 nt, Artificial Sequence
  Description of Artificial Sequence: Synthetic oligonucleotide
uaauuauuugucaugacug

SEQ ID NO: 2131417 - RNA, 19 nt, Artificial Sequence
  Description of Artificial Sequence: Synthetic oligonucleotide
uuuucuuuaagacucaagu

SEQ ID NO: 2131418 - RNA, 19 nt, Artificial Sequence
  Description of Artificial Sequence: Synthetic oligonucleotide
cauaacuugaagauggugg

SEQ ID NO: 2131419 - RNA, 19 nt, Artificial Sequence
  Description of Artificial Sequence: Synthetic oligonucleotide
ugaagagaaacacugacug

SEQ ID NO: 2131420 - RNA, 19 nt, Artificial Sequence
  Description of Artificial Sequence: Synthetic oligonucleotide
cucaauaucauuccgaggc

SEQ ID NO: 2131421 - RNA, 19 nt, Artificial Sequence
  Description of Artificial Sequence: Synthetic oligonucleotide
aauuauuugucaugacugg

SEQ ID NO: 2131422 - RNA, 19 nt, Artificial Sequence
  Description of Artificial Sequence: Synthetic oligonucleotide
aaugcauaguguucugugc

SEQ ID NO: 2131423 - RNA, 19 nt, Artificial Sequence
  Description of Artificial Sequence: Synthetic oligonucleotide
aauauuagcagacugucau

SEQ ID NO: 2131424 - RNA, 19 nt, Artificial Sequence
  Description of Artificial Sequence: Synthetic oligonucleotide
auaacuugaagaugguggc

SEQ ID NO: 2131425 - RNA, 19 nt, Artificial Sequence
  Description of Artificial Sequence: Synthetic oligonucleotide
aaauccaucuccugaguac

SEQ ID NO: 2131426 - RNA, 19 nt, Artificial Sequence
  Description of Artificial Sequence: Synthetic oligonucleotide
aaacaagaaagaaaaucgc

SEQ ID NO: 2131427 - RNA, 19 nt, Artificial Sequence
  Description of Artificial Sequence: Synthetic oligonucleotide
cuuuccaaggaauagcugg

SEQ ID NO: 2131428 - RNA, 19 nt, Artificial Sequence
  Description of Artificial Sequence: Synthetic oligonucleotide
acucaaguacaacagaaac

SEQ ID NO: 2131429 - RNA, 19 nt, Artificial Sequence
  Description of Artificial Sequence: Synthetic oligonucleotide
aaagaaugaaauccaucuc

SEQ ID NO: 2131430 - RNA, 19 nt, Artificial Sequence
  Description of Artificial Sequence: Synthetic oligonucleotide
uuaagacucaaguacaaca

SEQ ID NO: 2131431 - RNA, 19 nt, Artificial Sequence
  Description of Artificial Sequence: Synthetic oligonucleotide
uaagacucaaguacaacag

SEQ ID NO: 2131432 - RNA, 19 nt, Artificial Sequence
  Description of Artificial Sequence: Synthetic oligonucleotide
auaauuauuugucaugacu

SEQ ID NO: 2131433 - RNA, 19 nt, Artificial Sequence
  Description of Artificial Sequence: Synthetic oligonucleotide
auaaggacggaggugaucc

SEQ ID NO: 2131434 - RNA, 19 nt, Artificial Sequence
  Description of Artificial Sequence: Synthetic oligonucleotide
ucuauagaacuuuccaagg

SEQ ID NO: 2131435 - RNA, 19 nt, Artificial Sequence
  Description of Artificial Sequence: Synthetic oligonucleotide
aggccaaagaaugaaaucc

SEQ ID NO: 2131436 - RNA, 19 nt, Artificial Sequence
  Description of Artificial Sequence: Synthetic oligonucleotide
acaucuugaagucaaacug

SEQ ID NO: 2131437 - RNA, 19 nt, Artificial Sequence
  Description of Artificial Sequence: Synthetic oligonucleotide
ugucacuaaacuaugggca

SEQ ID NO: 2131438 - RNA, 19 nt, Artificial Sequence
  Description of Artificial Sequence: Synthetic oligonucleotide
cugcauaacuugaagaugg

SEQ ID NO: 2131439 - RNA, 19 nt, Artificial Sequence
  Description of Artificial Sequence: Synthetic oligonucleotide
ucaaguacaacagaaacaa

SEQ ID NO: 2131440 - RNA, 19 nt, Artificial Sequence
  Description of Artificial Sequence: Synthetic oligonucleotide
ucauagacugguaucgagg

SEQ ID NO: 2131441 - RNA, 19 nt, Artificial Sequence
  Description of Artificial Sequence: Synthetic oligonucleotide
caaguuucaaaaugcauag

SEQ ID NO: 2131442 - RNA, 19 nt, Artificial Sequence
  Description of Artificial Sequence: Synthetic oligonucleotide
aaaugcauaguguucugug

SEQ ID NO: 2131443 - RNA, 19 nt, Artificial Sequence
  Description of Artificial Sequence: Synthetic oligonucleotide
uggaaauugucacuaaacu

SEQ ID NO: 2131444 - RNA, 19 nt, Artificial Sequence
  Description of Artificial Sequence: Synthetic oligonucleotide
uucauaauuauuugucaug

SEQ ID NO: 2131445 - RNA, 19 nt, Artificial Sequence
  Description of Artificial Sequence: Synthetic oligonucleotide
aaagugguaagaaaacaag

SEQ ID NO: 2131446 - RNA, 19 nt, Artificial Sequence
  Description of Artificial Sequence: Synthetic oligonucleotide
ucuuucuaagcugagcacg

SEQ ID NO: 2131447 - RNA, 19 nt, Artificial Sequence
  Description of Artificial Sequence: Synthetic oligonucleotide
uggcauauaaggacggagg

SEQ ID NO: 2131448 - RNA, 19 nt, Artificial Sequence
  Description of Artificial Sequence: Synthetic oligonucleotide
uugacaacaauuccugucu

SEQ ID NO: 2131449 - RNA, 19 nt, Artificial Sequence
  Description of Artificial Sequence: Synthetic oligonucleotide
ugucugucaaugaagagaa

SEQ ID NO: 2131450 - RNA, 19 nt, Artificial Sequence
  Description of Artificial Sequence: Synthetic oligonucleotide
uucucauagacugguaucg

SEQ ID NO: 2131451 - RNA, 19 nt, Artificial Sequence
  Description of Artificial Sequence: Synthetic oligonucleotide
uccuugaacacaaaggcaa

SEQ ID NO: 2131452 - RNA, 19 nt, Artificial Sequence
  Description of Artificial Sequence: Synthetic oligonucleotide
ucuucauaauuauuuguca

SEQ ID NO: 2131453 - RNA, 19 nt, Artificial Sequence
  Description of Artificial Sequence: Synthetic oligonucleotide
uaaacuaugggcacuuuuc

SEQ ID NO: 2131454 - RNA, 19 nt, Artificial Sequence
  Description of Artificial Sequence: Synthetic oligonucleotide
aggagcauggagcuguacc

SEQ ID NO: 2131455 - RNA, 19 nt, Artificial Sequence
  Description of Artificial Sequence: Synthetic oligonucleotide
uuggaaauugucacuaaac

SEQ ID NO: 2131456 - RNA, 19 nt, Artificial Sequence
  Description of Artificial Sequence: Synthetic oligonucleotide
ucaaaaugcauaguguucu

SEQ ID NO: 2131457 - RNA, 19 nt, Artificial Sequence
  Description of Artificial Sequence: Synthetic oligonucleotide
uaccacauccuucugaaga

SEQ ID NO: 2131458 - RNA, 19 nt, Artificial Sequence
  Description of Artificial Sequence: Synthetic oligonucleotide
uauagaacuuuccaaggaa

SEQ ID NO: 2131459 - RNA, 19 nt, Artificial Sequence
  Description of Artificial Sequence: Synthetic oligonucleotide
uuguugacaacaauuccug

SEQ ID NO: 2131460 - RNA, 19 nt, Artificial Sequence
  Description of Artificial Sequence: Synthetic oligonucleotide
ugaagaagcucuauagaac

SEQ ID NO: 2131461 - RNA, 19 nt, Artificial Sequence
  Description of Artificial Sequence: Synthetic oligonucleotide
ugcuaauaugauugaauag

SEQ ID NO: 2131462 - RNA, 19 nt, Artificial Sequence
  Description of Artificial Sequence: Synthetic oligonucleotide
uuuuggagucugcaaaugc

SEQ ID NO: 2131463 - RNA, 19 nt, Artificial Sequence
  Description of Artificial Sequence: Synthetic oligonucleotide
ugucaugacugguauaacc

SEQ ID NO: 2131464 - RNA, 19 nt, Artificial Sequence
  Description of Artificial Sequence: Synthetic oligonucleotide
gauuguugacaacaauucc

SEQ ID NO: 2131465 - RNA, 19 nt, Artificial Sequence
  Description of Artificial Sequence: Synthetic oligonucleotide
ucugaaagaaaagugguaa

SEQ ID NO: 2131466 - RNA, 19 nt, Artificial Sequence
  Description of Artificial Sequence: Synthetic oligonucleotide
agggucaagaaacaaaagu

SEQ ID NO: 2131467 - RNA, 19 nt, Artificial Sequence
  Description of Artificial Sequence: Synthetic oligonucleotide
aguacaacagaaacaaguc

SEQ ID NO: 2131468 - RNA, 19 nt, Artificial Sequence
  Description of Artificial Sequence: Synthetic oligonucleotide
uuucaaaaugcauaguguu

SEQ ID NO: 2131469 - RNA, 19 nt, Artificial Sequence
  Description of Artificial Sequence: Synthetic oligonucleotide
aagcugagcacguagucug

SEQ ID NO: 2131470 - RNA, 19 nt, Artificial Sequence
  Description of Artificial Sequence: Synthetic oligonucleotide
uuugaaauacaggugguac

SEQ ID NO: 2131471 - RNA, 19 nt, Artificial Sequence
  Description of Artificial Sequence: Synthetic oligonucleotide
caucccuucucauagacug

SEQ ID NO: 2131472 - RNA, 19 nt, Artificial Sequence
  Description of Artificial Sequence: Synthetic oligonucleotide
agacugucauaccacaggg

SEQ ID NO: 2131473 - RNA, 19 nt, Artificial Sequence
  Description of Artificial Sequence: Synthetic oligonucleotide
aguccauuuucuuuaaacu

SEQ ID NO: 2131474 - RNA, 19 nt, Artificial Sequence
  Description of Artificial Sequence: Synthetic oligonucleotide
uuucuucauaauuauuugu

SEQ ID NO: 2131475 - RNA, 19 nt, Artificial Sequence
  Description of Artificial Sequence: Synthetic oligonucleotide
gaagagaaacacugacugg

SEQ ID NO: 2131476 - RNA, 19 nt, Artificial Sequence
  Description of Artificial Sequence: Synthetic oligonucleotide
aaacuaugggcacuuuucu

SEQ ID NO: 2131477 - RNA, 19 nt, Artificial Sequence
  Description of Artificial Sequence: Synthetic oligonucleotide
gcuaauaugauugaauagc

SEQ ID NO: 2131478 - RNA, 19 nt, Artificial Sequence
  Description of Artificial Sequence: Synthetic oligonucleotide
cuaaaaucacaacuguaac

SEQ ID NO: 2131479 - RNA, 19 nt, Artificial Sequence
  Description of Artificial Sequence: Synthetic oligonucleotide
accgugaugaaauucaaau

SEQ ID NO: 2131480 - RNA, 19 nt, Artificial Sequence
  Description of Artificial Sequence: Synthetic oligonucleotide
gaugcugcauaacuugaag

SEQ ID NO: 2131481 - RNA, 19 nt, Artificial Sequence
  Description of Artificial Sequence: Synthetic oligonucleotide
uacucuggcauauaaggac

SEQ ID NO: 2131482 - RNA, 19 nt, Artificial Sequence
  Description of Artificial Sequence: Synthetic oligonucleotide
caauauacaucuugaaguc

SEQ ID NO: 2131483 - RNA, 19 nt, Artificial Sequence
  Description of Artificial Sequence: Synthetic oligonucleotide
aauugucacuaaacuaugg

SEQ ID NO: 2131484 - RNA, 19 nt, Artificial Sequence
  Description of Artificial Sequence: Synthetic oligonucleotide
gaguccauuuucuuuaaac

SEQ ID NO: 2131485 - RNA, 19 nt, Artificial Sequence
  Description of Artificial Sequence: Synthetic oligonucleotide
uucaaaaugcauaguguuc

SEQ ID NO: 2131486 - RNA, 19 nt, Artificial Sequence
  Description of Artificial Sequence: Synthetic oligonucleotide
uucuaagcugagcacguag

SEQ ID NO: 2131487 - RNA, 19 nt, Artificial Sequence
  Description of Artificial Sequence: Synthetic oligonucleotide
aggccuaaaagguucauca

SEQ ID NO: 2131488 - RNA, 19 nt, Artificial Sequence
  Description of Artificial Sequence: Synthetic oligonucleotide
uccaccuagaaaacaggag

SEQ ID NO: 2131489 - RNA, 19 nt, Artificial Sequence
  Description of Artificial Sequence: Synthetic oligonucleotide
aauuacaucccuucucaua

SEQ ID NO: 2131490 - RNA, 19 nt, Artificial Sequence
  Description of Artificial Sequence: Synthetic oligonucleotide
ucuguucagagcuuguuuc

SEQ ID NO: 2131491 - RNA, 19 nt, Artificial Sequence
  Description of Artificial Sequence: Synthetic oligonucleotide
uauuagcagacugucauac

SEQ ID NO: 2131492 - RNA, 19 nt, Artificial Sequence
  Description of Artificial Sequence: Synthetic oligonucleotide
ucaauaucauuccgaggcc

SEQ ID NO: 2131493 - RNA, 19 nt, Artificial Sequence
  Description of Artificial Sequence: Synthetic oligonucleotide
uuacucuggcauauaagga

SEQ ID NO: 2131494 - RNA, 19 nt, Artificial Sequence
  Description of Artificial Sequence: Synthetic oligonucleotide
caggagacaaacaauuuuc

SEQ ID NO: 2131495 - RNA, 19 nt, Artificial Sequence
  Description of Artificial Sequence: Synthetic oligonucleotide
ggcaauauacaucuugaag

SEQ ID NO: 2131496 - RNA, 19 nt, Artificial Sequence
  Description of Artificial Sequence: Synthetic oligonucleotide
acguagucuguucagagcu

SEQ ID NO: 2131497 - RNA, 19 nt, Artificial Sequence
  Description of Artificial Sequence: Synthetic oligonucleotide
gaaauugucacuaaacuau

SEQ ID NO: 2131498 - RNA, 19 nt, Artificial Sequence
  Description of Artificial Sequence: Synthetic oligonucleotide
uugaaauacaggugguacu

SEQ ID NO: 2131499 - RNA, 19 nt, Artificial Sequence
  Description of Artificial Sequence: Synthetic oligonucleotide
uuauuugucaugacuggua

SEQ ID NO: 2131500 - RNA, 19 nt, Artificial Sequence
  Description of Artificial Sequence: Synthetic oligonucleotide
ucucaauaucauuccgagg

SEQ ID NO: 2131501 - RNA, 19 nt, Artificial Sequence
  Description of Artificial Sequence: Synthetic oligonucleotide
guuaggauuguugacaaca

SEQ ID NO: 2131502 - RNA, 19 nt, Artificial Sequence
  Description of Artificial Sequence: Synthetic oligonucleotide
aauauacaucuugaaguca

SEQ ID NO: 2131503 - RNA, 19 nt, Artificial Sequence
  Description of Artificial Sequence: Synthetic oligonucleotide
agagcuuguuucuuccggg

SEQ ID NO: 2131504 - RNA, 19 nt, Artificial Sequence
  Description of Artificial Sequence: Synthetic oligonucleotide
gaagaagcucuauagaacu

SEQ ID NO: 2131505 - RNA, 19 nt, Artificial Sequence
  Description of Artificial Sequence: Synthetic oligonucleotide
agaacuuuccaaggaauag

SEQ ID NO: 2131506 - RNA, 19 nt, Artificial Sequence
  Description of Artificial Sequence: Synthetic oligonucleotide
aaauacaggugguacuaaa

SEQ ID NO: 2131507 - RNA, 19 nt, Artificial Sequence
  Description of Artificial Sequence: Synthetic oligonucleotide
acaaacaauuuucucaaua

SEQ ID NO: 2131508 - RNA, 19 nt, Artificial Sequence
  Description of Artificial Sequence: Synthetic oligonucleotide
aagugguaagaaaacaaga

SEQ ID NO: 2131509 - RNA, 19 nt, Artificial Sequence
  Description of Artificial Sequence: Synthetic oligonucleotide
auagcuggaaucucgcaca

SEQ ID NO: 2131510 - RNA, 19 nt, Artificial Sequence
  Description of Artificial Sequence: Synthetic oligonucleotide
uguucugugcaugagucca

SEQ ID NO: 2131511 - RNA, 19 nt, Artificial Sequence
  Description of Artificial Sequence: Synthetic oligonucleotide
auacaucuugaagucaaac

SEQ ID NO: 2131512 - RNA, 19 nt, Artificial Sequence
  Description of Artificial Sequence: Synthetic oligonucleotide
aaucucgcacaccuuucag

SEQ ID NO: 2131513 - RNA, 19 nt, Artificial Sequence
  Description of Artificial Sequence: Synthetic oligonucleotide
aaggcaauauacaucuuga

SEQ ID NO: 2131514 - RNA, 19 nt, Artificial Sequence
  Description of Artificial Sequence: Synthetic oligonucleotide
cauauaaggacggagguga

SEQ ID NO: 2131515 - RNA, 19 nt, Artificial Sequence
  Description of Artificial Sequence: Synthetic oligonucleotide
ucuaagcugagcacguagu

SEQ ID NO: 2131516 - RNA, 19 nt, Artificial Sequence
  Description of Artificial Sequence: Synthetic oligonucleotide
aaagguucaucagauuccu

SEQ ID NO: 2131517 - RNA, 19 nt, Artificial Sequence
  Description of Artificial Sequence: Synthetic oligonucleotide
ucuauggugccaacugccc

SEQ ID NO: 2131518 - RNA, 19 nt, Artificial Sequence
  Description of Artificial Sequence: Synthetic oligonucleotide
cugguaucgaggagcaugg

SEQ ID NO: 2131519 - RNA, 19 nt, Artificial Sequence
  Description of Artificial Sequence: Synthetic oligonucleotide
caaauuuggccugaacagg

SEQ ID NO: 2131520 - RNA, 19 nt, Artificial Sequence
  Description of Artificial Sequence: Synthetic oligonucleotide
ucaucagauuccuuccacc

SEQ ID NO: 2131521 - RNA, 19 nt, Artificial Sequence
  Description of Artificial Sequence: Synthetic oligonucleotide
guugacaacaauuccuguc

SEQ ID NO: 2131522 - RNA, 19 nt, Artificial Sequence
  Description of Artificial Sequence: Synthetic oligonucleotide
ugagcacguagucuguuca

SEQ ID NO: 2131523 - RNA, 19 nt, Artificial Sequence
  Description of Artificial Sequence: Synthetic oligonucleotide
cagacugucauaccacagg

SEQ ID NO: 2131524 - RNA, 19 nt, Artificial Sequence
  Description of Artificial Sequence: Synthetic oligonucleotide
cuugcggcucaguacaugc

SEQ ID NO: 2131525 - RNA, 19 nt, Artificial Sequence
  Description of Artificial Sequence: Synthetic oligonucleotide
aagaaaaucgcugcugcau

SEQ ID NO: 2131526 - RNA, 19 nt, Artificial Sequence
  Description of Artificial Sequence: Synthetic oligonucleotide
uacaugcagaaacuguuuc

SEQ ID NO: 2131527 - RNA, 19 nt, Artificial Sequence
  Description of Artificial Sequence: Synthetic oligonucleotide
gcaauauacaucuugaagu

SEQ ID NO: 2131528 - RNA, 19 nt, Artificial Sequence
  Description of Artificial Sequence: Synthetic oligonucleotide
uacuaaagccuuuggaaau

SEQ ID NO: 2131529 - RNA, 19 nt, Artificial Sequence
  Description of Artificial Sequence: Synthetic oligonucleotide
cucuauggugccaacugcc

SEQ ID NO: 2131530 - RNA, 19 nt, Artificial Sequence
  Description of Artificial Sequence: Synthetic oligonucleotide
cugaguacagccaauuaca

SEQ ID NO: 2131531 - RNA, 19 nt, Artificial Sequence
  Description of Artificial Sequence: Synthetic oligonucleotide
agcuguaccacauccuucu

SEQ ID NO: 2131532 - RNA, 19 nt, Artificial Sequence
  Description of Artificial Sequence: Synthetic oligonucleotide
acugguaucgaggagcaug

SEQ ID NO: 2131533 - RNA, 19 nt, Artificial Sequence
  Description of Artificial Sequence: Synthetic oligonucleotide
aauccaucuccugaguaca

SEQ ID NO: 2131534 - RNA, 19 nt, Artificial Sequence
  Description of Artificial Sequence: Synthetic oligonucleotide
uaauaugauugaauagcua

SEQ ID NO: 2131535 - RNA, 19 nt, Artificial Sequence
  Description of Artificial Sequence: Synthetic oligonucleotide
uccauuuugcuggucaaug

SEQ ID NO: 2131536 - RNA, 19 nt, Artificial Sequence
  Description of Artificial Sequence: Synthetic oligonucleotide
ucgcacaccuuucagaaua

SEQ ID NO: 2131537 - RNA, 19 nt, Artificial Sequence
  Description of Artificial Sequence: Synthetic oligonucleotide
ucuggucuucuccauuuug

SEQ ID NO: 2131538 - RNA, 19 nt, Artificial Sequence
  Description of Artificial Sequence: Synthetic oligonucleotide
uucaucagauuccuuccac

SEQ ID NO: 2131539 - RNA, 19 nt, Artificial Sequence
  Description of Artificial Sequence: Synthetic oligonucleotide
acuaugggcacuuuucuuu

SEQ ID NO: 2131540 - RNA, 19 nt, Artificial Sequence
  Description of Artificial Sequence: Synthetic oligonucleotide
uccugucuuguccuugcgg

SEQ ID NO: 2131541 - RNA, 19 nt, Artificial Sequence
  Description of Artificial Sequence: Synthetic oligonucleotide
cuuccaccuagaaaacagg

SEQ ID NO: 2131542 - RNA, 19 nt, Artificial Sequence
  Description of Artificial Sequence: Synthetic oligonucleotide
ucuuauuuacucuggcaua

SEQ ID NO: 2131543 - RNA, 19 nt, Artificial Sequence
  Description of Artificial Sequence: Synthetic oligonucleotide
acuggucagcuagagauuc

SEQ ID NO: 2131544 - RNA, 19 nt, Artificial Sequence
  Description of Artificial Sequence: Synthetic oligonucleotide
aaaaugcauaguguucugu

SEQ ID NO: 2131545 - RNA, 19 nt, Artificial Sequence
  Description of Artificial Sequence: Synthetic oligonucleotide
caccuagaaaacaggagac

SEQ ID NO: 2131546 - RNA, 19 nt, Artificial Sequence
  Description of Artificial Sequence: Synthetic oligonucleotide
ugaaauacaggugguacua

SEQ ID NO: 2131547 - RNA, 19 nt, Artificial Sequence
  Description of Artificial Sequence: Synthetic oligonucleotide
uucagaauauuuucuucau

SEQ ID NO: 2131548 - RNA, 19 nt, Artificial Sequence
  Description of Artificial Sequence: Synthetic oligonucleotide
uaucgaggagcauggagcu

SEQ ID NO: 2131549 - RNA, 19 nt, Artificial Sequence
  Description of Artificial Sequence: Synthetic oligonucleotide
cacauccuucugaagaagc

SEQ ID NO: 2131550 - RNA, 19 nt, Artificial Sequence
  Description of Artificial Sequence: Synthetic oligonucleotide
agugguaagaaaacaagaa

SEQ ID NO: 2131551 - RNA, 19 nt, Artificial Sequence
  Description of Artificial Sequence: Synthetic oligonucleotide
uagaacuuuccaaggaaua

SEQ ID NO: 2131552 - RNA, 19 nt, Artificial Sequence
  Description of Artificial Sequence: Synthetic oligonucleotide
gacaacaauuccugucuug

SEQ ID NO: 2131553 - RNA, 19 nt, Artificial Sequence
  Description of Artificial Sequence: Synthetic oligonucleotide
uaucauuccgaggccaaag

SEQ ID NO: 2131554 - RNA, 19 nt, Artificial Sequence
  Description of Artificial Sequence: Synthetic oligonucleotide
auuccgaggccaaagaaug

SEQ ID NO: 2131555 - RNA, 19 nt, Artificial Sequence
  Description of Artificial Sequence: Synthetic oligonucleotide
uuuaagacucaaguacaac

SEQ ID NO: 2131556 - RNA, 19 nt, Artificial Sequence
  Description of Artificial Sequence: Synthetic oligonucleotide
acaggagacaaacaauuuu

SEQ ID NO: 2131557 - RNA, 19 nt, Artificial Sequence
  Description of Artificial Sequence: Synthetic oligonucleotide
cauaauuauuugucaugac

SEQ ID NO: 2131558 - RNA, 19 nt, Artificial Sequence
  Description of Artificial Sequence: Synthetic oligonucleotide
ccugaacaggccuaaaagg

SEQ ID NO: 2131559 - RNA, 19 nt, Artificial Sequence
  Description of Artificial Sequence: Synthetic oligonucleotide
cucauagacugguaucgag

SEQ ID NO: 2131560 - RNA, 19 nt, Artificial Sequence
  Description of Artificial Sequence: Synthetic oligonucleotide
guacuaaagccuuuggaaa

SEQ ID NO: 2131561 - RNA, 19 nt, Artificial Sequence
  Description of Artificial Sequence: Synthetic oligonucleotide
auuuugcuggucaaugcuc

SEQ ID NO: 2131562 - RNA, 19 nt, Artificial Sequence
  Description of Artificial Sequence: Synthetic oligonucleotide
acucuggcauauaaggacg

SEQ ID NO: 2131563 - RNA, 19 nt, Artificial Sequence
  Description of Artificial Sequence: Synthetic oligonucleotide
ggucaagaaacaaaaguug

SEQ ID NO: 2131564 - RNA, 19 nt, Artificial Sequence
  Description of Artificial Sequence: Synthetic oligonucleotide
gucacuaaacuaugggcac

SEQ ID NO: 2131565 - RNA, 19 nt, Artificial Sequence
  Description of Artificial Sequence: Synthetic oligonucleotide
uggucaaugcucuuauuua

SEQ ID NO: 2131566 - RNA, 19 nt, Artificial Sequence
  Description of Artificial Sequence: Synthetic oligonucleotide
ugaacaggccuaaaagguu

SEQ ID NO: 2131567 - RNA, 19 nt, Artificial Sequence
  Description of Artificial Sequence: Synthetic oligonucleotide
ugaguacagccaauuacau

SEQ ID NO: 2131568 - RNA, 19 nt, Artificial Sequence
  Description of Artificial Sequence: Synthetic oligonucleotide
cauagacugguaucgagga

SEQ ID NO: 2131569 - RNA, 19 nt, Artificial Sequence
  Description of Artificial Sequence: Synthetic oligonucleotide
uggagucugcaaaugcugu

SEQ ID NO: 2131570 - RNA, 19 nt, Artificial Sequence
  Description of Artificial Sequence: Synthetic oligonucleotide
gaggccaaagaaugaaauc

SEQ ID NO: 2131571 - RNA, 19 nt, Artificial Sequence
  Description of Artificial Sequence: Synthetic oligonucleotide
uucuuucuaagcugagcac

SEQ ID NO: 2131572 - RNA, 19 nt, Artificial Sequence
  Description of Artificial Sequence: Synthetic oligonucleotide
gaaaaucgcugcugcauuc

SEQ ID NO: 2131573 - RNA, 19 nt, Artificial Sequence
  Description of Artificial Sequence: Synthetic oligonucleotide
auuuacucuggcauauaag

SEQ ID NO: 2131574 - RNA, 19 nt, Artificial Sequence
  Description of Artificial Sequence: Synthetic oligonucleotide
uaaccucagacacuucaaa

SEQ ID NO: 2131575 - RNA, 19 nt, Artificial Sequence
  Description of Artificial Sequence: Synthetic oligonucleotide
ucauuccgaggccaaagaa

SEQ ID NO: 2131576 - RNA, 19 nt, Artificial Sequence
  Description of Artificial Sequence: Synthetic oligonucleotide
cuaauaugauugaauagcu

SEQ ID NO: 2131577 - RNA, 19 nt, Artificial Sequence
  Description of Artificial Sequence: Synthetic oligonucleotide
aaauucaaauuuggccuga

SEQ ID NO: 2131578 - RNA, 19 nt, Artificial Sequence
  Description of Artificial Sequence: Synthetic oligonucleotide
gguaagaaaacaagaaaga

SEQ ID NO: 2131579 - RNA, 19 nt, Artificial Sequence
  Description of Artificial Sequence: Synthetic oligonucleotide
aaaaucgcugcugcauucu

SEQ ID NO: 2131580 - RNA, 19 nt, Artificial Sequence
  Description of Artificial Sequence: Synthetic oligonucleotide
uaagcugagcacguagucu

SEQ ID NO: 2131581 - RNA, 19 nt, Artificial Sequence
  Description of Artificial Sequence: Synthetic oligonucleotide
caugaguccauuuucuuua

SEQ ID NO: 2131582 - RNA, 19 nt, Artificial Sequence
  Description of Artificial Sequence: Synthetic oligonucleotide
aacuaugggcacuuuucuu

SEQ ID NO: 2131583 - RNA, 19 nt, Artificial Sequence
  Description of Artificial Sequence: Synthetic oligonucleotide
ugguauaaccucagacacu

SEQ ID NO: 2131584 - RNA, 19 nt, Artificial Sequence
  Description of Artificial Sequence: Synthetic oligonucleotide
aaggacggaggugauccuc

SEQ ID NO: 2131585 - RNA, 19 nt, Artificial Sequence
  Description of Artificial Sequence: Synthetic oligonucleotide
acacugacugguuaggauu

SEQ ID NO: 2131586 - RNA, 19 nt, Artificial Sequence
  Description of Artificial Sequence: Synthetic oligonucleotide
cucuggcauauaaggacgg

SEQ ID NO: 2131587 - RNA, 19 nt, Artificial Sequence
  Description of Artificial Sequence: Synthetic oligonucleotide
auagacugguaucgaggag

SEQ ID NO: 2131588 - RNA, 19 nt, Artificial Sequence
  Description of Artificial Sequence: Synthetic oligonucleotide
uaaagccuuuggaaauugu

SEQ ID NO: 2131589 - RNA, 19 nt, Artificial Sequence
  Description of Artificial Sequence: Synthetic oligonucleotide
ucucauagucaccgugaug

SEQ ID NO: 2131590 - RNA, 19 nt, Artificial Sequence
  Description of Artificial Sequence: Synthetic oligonucleotide
uauacaucuugaagucaaa

SEQ ID NO: 2131591 - RNA, 19 nt, Artificial Sequence
  Description of Artificial Sequence: Synthetic oligonucleotide
augggcacuuuucuuuaag

SEQ ID NO: 2131592 - RNA, 19 nt, Artificial Sequence
  Description of Artificial Sequence: Synthetic oligonucleotide
aggauuguugacaacaauu

SEQ ID NO: 2131593 - RNA, 19 nt, Artificial Sequence
  Description of Artificial Sequence: Synthetic oligonucleotide
gguaucgaggagcauggag

SEQ ID NO: 2131594 - RNA, 19 nt, Artificial Sequence
  Description of Artificial Sequence: Synthetic oligonucleotide
gaacaggccuaaaagguuc

SEQ ID NO: 2131595 - RNA, 19 nt, Artificial Sequence
  Description of Artificial Sequence: Synthetic oligonucleotide
uuuugaaauacagguggua

SEQ ID NO: 2131596 - RNA, 19 nt, Artificial Sequence
  Description of Artificial Sequence: Synthetic oligonucleotide
uguugacaacaauuccugu

SEQ ID NO: 2131597 - RNA, 19 nt, Artificial Sequence
  Description of Artificial Sequence: Synthetic oligonucleotide
agaaaaucgcugcugcauu

SEQ ID NO: 2131598 - RNA, 19 nt, Artificial Sequence
  Description of Artificial Sequence: Synthetic oligonucleotide
ucgaggagcauggagcugu

SEQ ID NO: 2131599 - RNA, 19 nt, Artificial Sequence
  Description of Artificial Sequence: Synthetic oligonucleotide
aguacaugcagaaacuguu

SEQ ID NO: 2131600 - RNA, 19 nt, Artificial Sequence
  Description of Artificial Sequence: Synthetic oligonucleotide
cacguagucuguucagagc

SEQ ID NO: 2131601 - RNA, 19 nt, Artificial Sequence
  Description of Artificial Sequence: Synthetic oligonucleotide
aaacacugacugguuagga

SEQ ID NO: 2131602 - RNA, 19 nt, Artificial Sequence
  Description of Artificial Sequence: Synthetic oligonucleotide
ggaaauugucacuaaacua

SEQ ID NO: 2131603 - RNA, 19 nt, Artificial Sequence
  Description of Artificial Sequence: Synthetic oligonucleotide
gugguacuaaagccuuugg

SEQ ID NO: 2131604 - RNA, 19 nt, Artificial Sequence
  Description of Artificial Sequence: Synthetic oligonucleotide
ugaagucaaacuggucagc

SEQ ID NO: 2131605 - RNA, 19 nt, Artificial Sequence
  Description of Artificial Sequence: Synthetic oligonucleotide
aaacugcaccuucuggcaa

SEQ ID NO: 2131606 - RNA, 19 nt, Artificial Sequence
  Description of Artificial Sequence: Synthetic oligonucleotide
gaguacagccaauuacauc

SEQ ID NO: 2131607 - RNA, 19 nt, Artificial Sequence
  Description of Artificial Sequence: Synthetic oligonucleotide
aucauuccgaggccaaaga

SEQ ID NO: 2131608 - RNA, 19 nt, Artificial Sequence
  Description of Artificial Sequence: Synthetic oligonucleotide
cugucugucaaugaagaga

SEQ ID NO: 2131609 - RNA, 19 nt, Artificial Sequence
  Description of Artificial Sequence: Synthetic oligonucleotide
agucaccgugaugaaauuc

SEQ ID NO: 2131610 - RNA, 19 nt, Artificial Sequence
  Description of Artificial Sequence: Synthetic oligonucleotide
aauaucauuccgaggccaa

SEQ ID NO: 2131611 - RNA, 19 nt, Artificial Sequence
  Description of Artificial Sequence: Synthetic oligonucleotide
ggauuguugacaacaauuc

SEQ ID NO: 2131612 - RNA, 19 nt, Artificial Sequence
  Description of Artificial Sequence: Synthetic oligonucleotide
cuaagcugagcacguaguc

SEQ ID NO: 2131613 - RNA, 19 nt, Artificial Sequence
  Description of Artificial Sequence: Synthetic oligonucleotide
uucucauagucaccgugau

SEQ ID NO: 2131614 - RNA, 19 nt, Artificial Sequence
  Description of Artificial Sequence: Synthetic oligonucleotide
gaaucucgcacaccuuuca

SEQ ID NO: 2131615 - RNA, 19 nt, Artificial Sequence
  Description of Artificial Sequence: Synthetic oligonucleotide
ccuucuggcaauauuagca

SEQ ID NO: 2131616 - RNA, 19 nt, Artificial Sequence
  Description of Artificial Sequence: Synthetic oligonucleotide
aucucgcacaccuuucaga

SEQ ID NO: 2131617 - RNA, 19 nt, Artificial Sequence
  Description of Artificial Sequence: Synthetic oligonucleotide
cuuuaagacucaaguacaa

SEQ ID NO: 2131618 - RNA, 19 nt, Artificial Sequence
  Description of Artificial Sequence: Synthetic oligonucleotide
gucaccgugaugaaauuca

SEQ ID NO: 2131619 - RNA, 19 nt, Artificial Sequence
  Description of Artificial Sequence: Synthetic oligonucleotide
auagaacuuuccaaggaau

SEQ ID NO: 2131620 - RNA, 19 nt, Artificial Sequence
  Description of Artificial Sequence: Synthetic oligonucleotide
cugaacaggccuaaaaggu

SEQ ID NO: 2131621 - RNA, 19 nt, Artificial Sequence
  Description of Artificial Sequence: Synthetic oligonucleotide
ccugaguacagccaauuac

SEQ ID NO: 2131622 - RNA, 19 nt, Artificial Sequence
  Description of Artificial Sequence: Synthetic oligonucleotide
caauauuagcagacuguca

SEQ ID NO: 2131623 - RNA, 19 nt, Artificial Sequence
  Description of Artificial Sequence: Synthetic oligonucleotide
uuguccuugcggcucagua

SEQ ID NO: 2131624 - RNA, 19 nt, Artificial Sequence
  Description of Artificial Sequence: Synthetic oligonucleotide
cauaccacagggucaagaa

SEQ ID NO: 2131625 - RNA, 19 nt, Artificial Sequence
  Description of Artificial Sequence: Synthetic oligonucleotide
gaagcucuauagaacuuuc

SEQ ID NO: 2131626 - RNA, 19 nt, Artificial Sequence
  Description of Artificial Sequence: Synthetic oligonucleotide
guccuugcggcucaguaca

SEQ ID NO: 2131627 - RNA, 19 nt, Artificial Sequence
  Description of Artificial Sequence: Synthetic oligonucleotide
cccauuuugaaauacaggu

SEQ ID NO: 2131628 - RNA, 19 nt, Artificial Sequence
  Description of Artificial Sequence: Synthetic oligonucleotide
cugguuaggauuguugaca

SEQ ID NO: 2131629 - RNA, 19 nt, Artificial Sequence
  Description of Artificial Sequence: Synthetic oligonucleotide
gaauagcuggaaucucgca

SEQ ID NO: 2131630 - RNA, 19 nt, Artificial Sequence
  Description of Artificial Sequence: Synthetic oligonucleotide
acaccuuucagaauauuuu

SEQ ID NO: 2131631 - RNA, 19 nt, Artificial Sequence
  Description of Artificial Sequence: Synthetic oligonucleotide
uacagccaauuacaucccu

SEQ ID NO: 2131632 - RNA, 19 nt, Artificial Sequence
  Description of Artificial Sequence: Synthetic oligonucleotide
guagucuguucagagcuug

SEQ ID NO: 2131633 - RNA, 19 nt, Artificial Sequence
  Description of Artificial Sequence: Synthetic oligonucleotide
uuuggccugaacaggccua

SEQ ID NO: 2131634 - RNA, 19 nt, Artificial Sequence
  Description of Artificial Sequence: Synthetic oligonucleotide
cuaaagccuuuggaaauug

SEQ ID NO: 2131635 - RNA, 19 nt, Artificial Sequence
  Description of Artificial Sequence: Synthetic oligonucleotide
ugcauaguguucugugcau

SEQ ID NO: 2131636 - RNA, 19 nt, Artificial Sequence
  Description of Artificial Sequence: Synthetic oligonucleotide
agaagcucuauagaacuuu

SEQ ID NO: 2131637 - RNA, 19 nt, Artificial Sequence
  Description of Artificial Sequence: Synthetic oligonucleotide
agccaauuacaucccuucu

SEQ ID NO: 2131638 - RNA, 19 nt, Artificial Sequence
  Description of Artificial Sequence: Synthetic oligonucleotide
ggugccaacugcccagugg

SEQ ID NO: 2131639 - RNA, 19 nt, Artificial Sequence
  Description of Artificial Sequence: Synthetic oligonucleotide
auauuagcagacugucaua

SEQ ID NO: 2131640 - RNA, 19 nt, Artificial Sequence
  Description of Artificial Sequence: Synthetic oligonucleotide
ucaccgugaugaaauucaa

SEQ ID NO: 2131641 - RNA, 19 nt, Artificial Sequence
  Description of Artificial Sequence: Synthetic oligonucleotide
ucacuaaacuaugggcacu

SEQ ID NO: 2131642 - RNA, 19 nt, Artificial Sequence
  Description of Artificial Sequence: Synthetic oligonucleotide
uuacaucccuucucauaga

SEQ ID NO: 2131643 - RNA, 19 nt, Artificial Sequence
  Description of Artificial Sequence: Synthetic oligonucleotide
cuucauaauuauuugucau

SEQ ID NO: 2131644 - RNA, 19 nt, Artificial Sequence
  Description of Artificial Sequence: Synthetic oligonucleotide
aggagacaaacaauuuucu

SEQ ID NO: 2131645 - RNA, 19 nt, Artificial Sequence
  Description of Artificial Sequence: Synthetic oligonucleotide
ugcccagugggugagcugu

SEQ ID NO: 2131646 - RNA, 19 nt, Artificial Sequence
  Description of Artificial Sequence: Synthetic oligonucleotide
ggagacaaacaauuuucuc

SEQ ID NO: 2131647 - RNA, 19 nt, Artificial Sequence
  Description of Artificial Sequence: Synthetic oligonucleotide
uuccgaggccaaagaauga

SEQ ID NO: 2131648 - RNA, 19 nt, Artificial Sequence
  Description of Artificial Sequence: Synthetic oligonucleotide
uuccuuccaccuagaaaac

SEQ ID NO: 2131649 - RNA, 19 nt, Artificial Sequence
  Description of Artificial Sequence: Synthetic oligonucleotide
ucucauagacugguaucga

SEQ ID NO: 2131650 - RNA, 19 nt, Artificial Sequence
  Description of Artificial Sequence: Synthetic oligonucleotide
aggcaauauacaucuugaa

SEQ ID NO: 2131651 - RNA, 19 nt, Artificial Sequence
  Description of Artificial Sequence: Synthetic oligonucleotide
agaaaacaggagacaaaca

SEQ ID NO: 2131652 - RNA, 19 nt, Artificial Sequence
  Description of Artificial Sequence: Synthetic oligonucleotide
cuccuugaacacaaaggca

SEQ ID NO: 2131653 - RNA, 19 nt, Artificial Sequence
  Description of Artificial Sequence: Synthetic oligonucleotide
uccgaggccaaagaaugaa

SEQ ID NO: 2131654 - RNA, 19 nt, Artificial Sequence
  Description of Artificial Sequence: Synthetic oligonucleotide
uccugaguacagccaauua

SEQ ID NO: 2131655 - RNA, 19 nt, Artificial Sequence
  Description of Artificial Sequence: Synthetic oligonucleotide
ggagcauggagcuguacca

SEQ ID NO: 2131656 - RNA, 19 nt, Artificial Sequence
  Description of Artificial Sequence: Synthetic oligonucleotide
ucccuucucauagacuggu

SEQ ID NO: 2131657 - RNA, 19 nt, Artificial Sequence
  Description of Artificial Sequence: Synthetic oligonucleotide
caacaauuccugucuuguc

SEQ ID NO: 2131658 - RNA, 19 nt, Artificial Sequence
  Description of Artificial Sequence: Synthetic oligonucleotide
uauaaggacggaggugauc

SEQ ID NO: 2131659 - RNA, 19 nt, Artificial Sequence
  Description of Artificial Sequence: Synthetic oligonucleotide
ugcaugaguccauuuucuu

SEQ ID NO: 2131660 - RNA, 19 nt, Artificial Sequence
  Description of Artificial Sequence: Synthetic oligonucleotide
gaagaugguggcuuuguuu

SEQ ID NO: 2131661 - RNA, 19 nt, Artificial Sequence
  Description of Artificial Sequence: Synthetic oligonucleotide
ugaguccauuuucuuuaaa

SEQ ID NO: 2131662 - RNA, 19 nt, Artificial Sequence
  Description of Artificial Sequence: Synthetic oligonucleotide
aacaggccuaaaagguuca

SEQ ID NO: 2131663 - RNA, 19 nt, Artificial Sequence
  Description of Artificial Sequence: Synthetic oligonucleotide
uccuuccaccuagaaaaca

SEQ ID NO: 2131664 - RNA, 19 nt, Artificial Sequence
  Description of Artificial Sequence: Synthetic oligonucleotide
ccaccuagaaaacaggaga

SEQ ID NO: 2131665 - RNA, 19 nt, Artificial Sequence
  Description of Artificial Sequence: Synthetic oligonucleotide
uagucuguucagagcuugu

SEQ ID NO: 2131666 - RNA, 19 nt, Artificial Sequence
  Description of Artificial Sequence: Synthetic oligonucleotide
ucuggcauauaaggacgga

SEQ ID NO: 2131667 - RNA, 19 nt, Artificial Sequence
  Description of Artificial Sequence: Synthetic oligonucleotide
ggaauagcuggaaucucgc

SEQ ID NO: 2131668 - RNA, 19 nt, Artificial Sequence
  Description of Artificial Sequence: Synthetic oligonucleotide
aucagauuccuuccaccua

SEQ ID NO: 2131669 - RNA, 19 nt, Artificial Sequence
  Description of Artificial Sequence: Synthetic oligonucleotide
ggccuaaaagguucaucag

SEQ ID NO: 2131670 - RNA, 19 nt, Artificial Sequence
  Description of Artificial Sequence: Synthetic oligonucleotide
agugggugagcuguuccug

SEQ ID NO: 2131671 - RNA, 19 nt, Artificial Sequence
  Description of Artificial Sequence: Synthetic oligonucleotide
cucugaaagaaaaguggua

SEQ ID NO: 2131672 - RNA, 19 nt, Artificial Sequence
  Description of Artificial Sequence: Synthetic oligonucleotide
acuaaagccuuuggaaauu

SEQ ID NO: 2131673 - RNA, 19 nt, Artificial Sequence
  Description of Artificial Sequence: Synthetic oligonucleotide
ggugguacuaaagccuuug

SEQ ID NO: 2131674 - RNA, 19 nt, Artificial Sequence
  Description of Artificial Sequence: Synthetic oligonucleotide
uugcggcucaguacaugca

SEQ ID NO: 2131675 - RNA, 19 nt, Artificial Sequence
  Description of Artificial Sequence: Synthetic oligonucleotide
cugagcacguagucuguuc

SEQ ID NO: 2131676 - RNA, 19 nt, Artificial Sequence
  Description of Artificial Sequence: Synthetic oligonucleotide
uaugggcacuuuucuuuaa

SEQ ID NO: 2131677 - RNA, 19 nt, Artificial Sequence
  Description of Artificial Sequence: Synthetic oligonucleotide
cagaugcugcauaacuuga

SEQ ID NO: 2131678 - RNA, 19 nt, Artificial Sequence
  Description of Artificial Sequence: Synthetic oligonucleotide
caauaucauuccgaggcca

SEQ ID NO: 2131679 - RNA, 19 nt, Artificial Sequence
  Description of Artificial Sequence: Synthetic oligonucleotide
uccugcuaauaugauugaa

SEQ ID NO: 2131680 - RNA, 19 nt, Artificial Sequence
  Description of Artificial Sequence: Synthetic oligonucleotide
gcugcauaacuugaagaug

SEQ ID NO: 2131681 - RNA, 19 nt, Artificial Sequence
  Description of Artificial Sequence: Synthetic oligonucleotide
caucagauuccuuccaccu

SEQ ID NO: 2131682 - RNA, 19 nt, Artificial Sequence
  Description of Artificial Sequence: Synthetic oligonucleotide
guaccacauccuucugaag

SEQ ID NO: 2131683 - RNA, 19 nt, Artificial Sequence
  Description of Artificial Sequence: Synthetic oligonucleotide
agcuggaaucucgcacacc

SEQ ID NO: 2131684 - RNA, 19 nt, Artificial Sequence
  Description of Artificial Sequence: Synthetic oligonucleotide
gccaauuacaucccuucuc

SEQ ID NO: 2131685 - RNA, 19 nt, Artificial Sequence
  Description of Artificial Sequence: Synthetic oligonucleotide
cugcaaaugcugucuguca

SEQ ID NO: 2131686 - RNA, 19 nt, Artificial Sequence
  Description of Artificial Sequence: Synthetic oligonucleotide
agcuaaaaucacaacugua

SEQ ID NO: 2131687 - RNA, 19 nt, Artificial Sequence
  Description of Artificial Sequence: Synthetic oligonucleotide
auaaccucagacacuucaa

SEQ ID NO: 2131688 - RNA, 19 nt, Artificial Sequence
  Description of Artificial Sequence: Synthetic oligonucleotide
augaguccauuuucuuuaa

SEQ ID NO: 2131689 - RNA, 19 nt, Artificial Sequence
  Description of Artificial Sequence: Synthetic oligonucleotide
uucuuccgggaguuugggu

SEQ ID NO: 2131690 - RNA, 19 nt, Artificial Sequence
  Description of Artificial Sequence: Synthetic oligonucleotide
gaaauacaggugguacuaa

SEQ ID NO: 2131691 - RNA, 19 nt, Artificial Sequence
  Description of Artificial Sequence: Synthetic oligonucleotide
gcucuuauuuacucuggca

SEQ ID NO: 2131692 - RNA, 19 nt, Artificial Sequence
  Description of Artificial Sequence: Synthetic oligonucleotide
cuguaccacauccuucuga

SEQ ID NO: 2131693 - RNA, 19 nt, Artificial Sequence
  Description of Artificial Sequence: Synthetic oligonucleotide
gagcauggagcuguaccac

SEQ ID NO: 2131694 - RNA, 19 nt, Artificial Sequence
  Description of Artificial Sequence: Synthetic oligonucleotide
cuauggugccaacugccca

SEQ ID NO: 2131695 - RNA, 19 nt, Artificial Sequence
  Description of Artificial Sequence: Synthetic oligonucleotide
gcuggaaucucgcacaccu

SEQ ID NO: 2131696 - RNA, 19 nt, Artificial Sequence
  Description of Artificial Sequence: Synthetic oligonucleotide
uuccaaggaauagcuggaa

SEQ ID NO: 2131697 - RNA, 19 nt, Artificial Sequence
  Description of Artificial Sequence: Synthetic oligonucleotide
caaacuggucagcuagaga

SEQ ID NO: 2131698 - RNA, 19 nt, Artificial Sequence
  Description of Artificial Sequence: Synthetic oligonucleotide
uuauuuacucuggcauaua

SEQ ID NO: 2131699 - RNA, 19 nt, Artificial Sequence
  Description of Artificial Sequence: Synthetic oligonucleotide
cuuauuuacucuggcauau

SEQ ID NO: 2131700 - RNA, 19 nt, Artificial Sequence
  Description of Artificial Sequence: Synthetic oligonucleotide
uaaggacggaggugauccu

SEQ ID NO: 2131701 - RNA, 19 nt, Artificial Sequence
  Description of Artificial Sequence: Synthetic oligonucleotide
cuuuggaaauugucacuaa

SEQ ID NO: 2131702 - RNA, 19 nt, Artificial Sequence
  Description of Artificial Sequence: Synthetic oligonucleotide
uugucaugacugguauaac

SEQ ID NO: 2131703 - RNA, 19 nt, Artificial Sequence
  Description of Artificial Sequence: Synthetic oligonucleotide
aucccuucucauagacugg

SEQ ID NO: 2131704 - RNA, 19 nt, Artificial Sequence
  Description of Artificial Sequence: Synthetic oligonucleotide
gcauauaaggacggaggug

SEQ ID NO: 2131705 - RNA, 19 nt, Artificial Sequence
  Description of Artificial Sequence: Synthetic oligonucleotide
agacugguaucgaggagca

SEQ ID NO: 2131706 - RNA, 19 nt, Artificial Sequence
  Description of Artificial Sequence: Synthetic oligonucleotide
cauuccgaggccaaagaau

SEQ ID NO: 2131707 - RNA, 19 nt, Artificial Sequence
  Description of Artificial Sequence: Synthetic oligonucleotide
uggucagcuagagauucuu

SEQ ID NO: 2131708 - RNA, 19 nt, Artificial Sequence
  Description of Artificial Sequence: Synthetic oligonucleotide
gcauaacuugaagauggug

SEQ ID NO: 2131709 - RNA, 19 nt, Artificial Sequence
  Description of Artificial Sequence: Synthetic oligonucleotide
cuaugggcacuuuucuuua

SEQ ID NO: 2131710 - RNA, 19 nt, Artificial Sequence
  Description of Artificial Sequence: Synthetic oligonucleotide
cuguggcagguagaggcag

SEQ ID NO: 2131711 - RNA, 19 nt, Artificial Sequence
  Description of Artificial Sequence: Synthetic oligonucleotide
ggugauccucuauggugcc

SEQ ID NO: 2131712 - RNA, 19 nt, Artificial Sequence
  Description of Artificial Sequence: Synthetic oligonucleotide
uugcuggucaaugcucuua

SEQ ID NO: 2131713 - RNA, 19 nt, Artificial Sequence
  Description of Artificial Sequence: Synthetic oligonucleotide
gguauaaccucagacacuu

SEQ ID NO: 2131714 - RNA, 19 nt, Artificial Sequence
  Description of Artificial Sequence: Synthetic oligonucleotide
ccucuauggugccaacugc

SEQ ID NO: 2131715 - RNA, 19 nt, Artificial Sequence
  Description of Artificial Sequence: Synthetic oligonucleotide
ggcauauaaggacggaggu

SEQ ID NO: 2131716 - RNA, 19 nt, Artificial Sequence
  Description of Artificial Sequence: Synthetic oligonucleotide
agaugcugcauaacuugaa

SEQ ID NO: 2131717 - RNA, 19 nt, Artificial Sequence
  Description of Artificial Sequence: Synthetic oligonucleotide
uuggccugaacaggccuaa

SEQ ID NO: 2131718 - RNA, 19 nt, Artificial Sequence
  Description of Artificial Sequence: Synthetic oligonucleotide
acugcccagugggugagcu

SEQ ID NO: 2131719 - RNA, 19 nt, Artificial Sequence
  Description of Artificial Sequence: Synthetic oligonucleotide
aggacggaggugauccucu

SEQ ID NO: 2131720 - RNA, 19 nt, Artificial Sequence
  Description of Artificial Sequence: Synthetic oligonucleotide
uagucaccgugaugaaauu

SEQ ID NO: 2131721 - RNA, 19 nt, Artificial Sequence
  Description of Artificial Sequence: Synthetic oligonucleotide
cuaaacuaugggcacuuuu

SEQ ID NO: 2131722 - RNA, 19 nt, Artificial Sequence
  Description of Artificial Sequence: Synthetic oligonucleotide
cggaggugauccucuaugg

SEQ ID NO: 2131723 - RNA, 19 nt, Artificial Sequence
  Description of Artificial Sequence: Synthetic oligonucleotide
cgugaugaaauucaaauuu

SEQ ID NO: 2131724 - RNA, 19 nt, Artificial Sequence
  Description of Artificial Sequence: Synthetic oligonucleotide
gguuaggauuguugacaac

SEQ ID NO: 2131725 - RNA, 19 nt, Artificial Sequence
  Description of Artificial Sequence: Synthetic oligonucleotide
cuguucagagcuuguuucu

SEQ ID NO: 2131726 - RNA, 19 nt, Artificial Sequence
  Description of Artificial Sequence: Synthetic oligonucleotide
gcaccuucuggcaauauua

SEQ ID NO: 2131727 - RNA, 19 nt, Artificial Sequence
  Description of Artificial Sequence: Synthetic oligonucleotide
gcagaaacuguuucucaua

SEQ ID NO: 2131728 - RNA, 19 nt, Artificial Sequence
  Description of Artificial Sequence: Synthetic oligonucleotide
gucuguucagagcuuguuu

SEQ ID NO: 2131729 - RNA, 19 nt, Artificial Sequence
  Description of Artificial Sequence: Synthetic oligonucleotide
auauaaggacggaggugau

SEQ ID NO: 2131730 - RNA, 19 nt, Artificial Sequence
  Description of Artificial Sequence: Synthetic oligonucleotide
uuccgggaguuuggguccc

SEQ ID NO: 2131731 - RNA, 19 nt, Artificial Sequence
  Description of Artificial Sequence: Synthetic oligonucleotide
aucgaggagcauggagcug

SEQ ID NO: 2131732 - RNA, 19 nt, Artificial Sequence
  Description of Artificial Sequence: Synthetic oligonucleotide
uccuugcggcucaguacau

SEQ ID NO: 2131733 - RNA, 19 nt, Artificial Sequence
  Description of Artificial Sequence: Synthetic oligonucleotide
gccaacugcccagugggug

SEQ ID NO: 2131734 - RNA, 19 nt, Artificial Sequence
  Description of Artificial Sequence: Synthetic oligonucleotide
ccugcuaauaugauugaau

SEQ ID NO: 2131735 - RNA, 19 nt, Artificial Sequence
  Description of Artificial Sequence: Synthetic oligonucleotide
ugguaucgaggagcaugga

SEQ ID NO: 2131736 - RNA, 19 nt, Artificial Sequence
  Description of Artificial Sequence: Synthetic oligonucleotide
ggaaucucgcacaccuuuc

SEQ ID NO: 2131737 - RNA, 19 nt, Artificial Sequence
  Description of Artificial Sequence: Synthetic oligonucleotide
gcuuguuucuuccgggagu

SEQ ID NO: 2131738 - RNA, 19 nt, Artificial Sequence
  Description of Artificial Sequence: Synthetic oligonucleotide
ggccugaacaggccuaaaa

SEQ ID NO: 2131739 - RNA, 19 nt, Artificial Sequence
  Description of Artificial Sequence: Synthetic oligonucleotide
acuaaacuaugggcacuuu

SEQ ID NO: 2131740 - RNA, 19 nt, Artificial Sequence
  Description of Artificial Sequence: Synthetic oligonucleotide
gaggagcauggagcuguac

SEQ ID NO: 2131741 - RNA, 19 nt, Artificial Sequence
  Description of Artificial Sequence: Synthetic oligonucleotide
cugcccagugggugagcug

SEQ ID NO: 2131742 - RNA, 19 nt, Artificial Sequence
  Description of Artificial Sequence: Synthetic oligonucleotide
ggaggugauccucuauggu

SEQ ID NO: 2131743 - RNA, 19 nt, Artificial Sequence
  Description of Artificial Sequence: Synthetic oligonucleotide
ccaacugcccaguggguga

SEQ ID NO: 2131744 - RNA, 19 nt, Artificial Sequence
  Description of Artificial Sequence: Synthetic oligonucleotide
acaggccuaaaagguucau

SEQ ID NO: 2131745 - RNA, 19 nt, Artificial Sequence
  Description of Artificial Sequence: Synthetic oligonucleotide
guauaaccucagacacuuc

SEQ ID NO: 2131746 - RNA, 19 nt, Artificial Sequence
  Description of Artificial Sequence: Synthetic oligonucleotide
caauuacaucccuucucau

SEQ ID NO: 2131747 - RNA, 19 nt, Artificial Sequence
  Description of Artificial Sequence: Synthetic oligonucleotide
ccuuucagaauauuuucuu

SEQ ID NO: 2131748 - RNA, 19 nt, Artificial Sequence
  Description of Artificial Sequence: Synthetic oligonucleotide
gacggaggugauccucuau

SEQ ID NO: 2131749 - RNA, 19 nt, Artificial Sequence
  Description of Artificial Sequence: Synthetic oligonucleotide
uccgggaguuugggucccc

SEQ ID NO: 2131750 - RNA, 19 nt, Artificial Sequence
  Description of Artificial Sequence: Synthetic oligonucleotide
cacuaaacuaugggcacuu

SEQ ID NO: 2131751 - RNA, 19 nt, Artificial Sequence
  Description of Artificial Sequence: Synthetic oligonucleotide
cuggucagcuagagauucu

SEQ ID NO: 2131752 - RNA, 19 nt, Artificial Sequence
  Description of Artificial Sequence: Synthetic oligonucleotide
cugcugcauucucuggucu

SEQ ID NO: 2131753 - RNA, 19 nt, Artificial Sequence
  Description of Artificial Sequence: Synthetic oligonucleotide
aggugguacuaaagccuuu

SEQ ID NO: 2131754 - RNA, 19 nt, Artificial Sequence
  Description of Artificial Sequence: Synthetic oligonucleotide
ccgugaugaaauucaaauu

SEQ ID NO: 2131755 - RNA, 19 nt, Artificial Sequence
  Description of Artificial Sequence: Synthetic oligonucleotide
ccuugcggcucaguacaug

SEQ ID NO: 2131756 - RNA, 19 nt, Artificial Sequence
  Description of Artificial Sequence: Synthetic oligonucleotide
caauuccugucuuguccuu

SEQ ID NO: 2131757 - RNA, 19 nt, Artificial Sequence
  Description of Artificial Sequence: Synthetic oligonucleotide
cuccauuuugcuggucaau

SEQ ID NO: 2131758 - RNA, 19 nt, Artificial Sequence
  Description of Artificial Sequence: Synthetic oligonucleotide
cuccugaguacagccaauu

SEQ ID NO: 2131759 - RNA, 19 nt, Artificial Sequence
  Description of Artificial Sequence: Synthetic oligonucleotide
ggacggaggugauccucua

SEQ ID NO: 2131760 - RNA, 19 nt, Artificial Sequence
  Description of Artificial Sequence: Synthetic oligonucleotide
cugacugguuaggauuguu

SEQ ID NO: 2131761 - RNA, 19 nt, Artificial Sequence
  Description of Artificial Sequence: Synthetic oligonucleotide
cccagugggugagcuguuc

SEQ ID NO: 2131762 - RNA, 19 nt, Artificial Sequence
  Description of Artificial Sequence: Synthetic oligonucleotide
cuuguccuugcggcucagu

SEQ ID NO: 2131763 - RNA, 19 nt, Artificial Sequence
  Description of Artificial Sequence: Synthetic oligonucleotide
cccuucucauagacuggua

SEQ ID NO: 2131764 - RNA, 19 nt, Artificial Sequence
  Description of Artificial Sequence: Synthetic oligonucleotide
gcugagcacguagucuguu

SEQ ID NO: 2131765 - RNA, 19 nt, Artificial Sequence
  Description of Artificial Sequence: Synthetic oligonucleotide
uguuuaauuagucagcagg

SEQ ID NO: 2131766 - RNA, 19 nt, Artificial Sequence
  Description of Artificial Sequence: Synthetic oligonucleotide
aaaaguagaggccaucgcc

SEQ ID NO: 2131767 - RNA, 19 nt, Artificial Sequence
  Description of Artificial Sequence: Synthetic oligonucleotide
aucaauuucacuuaucauc

SEQ ID NO: 2131768 - RNA, 19 nt, Artificial Sequence
  Description of Artificial Sequence: Synthetic oligonucleotide
acuagaacaauuuuagaac

SEQ ID NO: 2131769 - RNA, 19 nt, Artificial Sequence
  Description of Artificial Sequence: Synthetic oligonucleotide
uguacaaagaacuuaauau

SEQ ID NO: 2131770 - RNA, 19 nt, Artificial Sequence
  Description of Artificial Sequence: Synthetic oligonucleotide
uuuugaaugauauuuuccc

SEQ ID NO: 2131771 - RNA, 19 nt, Artificial Sequence
  Description of Artificial Sequence: Synthetic oligonucleotide
uuaacacauaucuaaaugc

SEQ ID NO: 2131772 - RNA, 19 nt, Artificial Sequence
  Description of Artificial Sequence: Synthetic oligonucleotide
uuaucaauuucacuuauca

SEQ ID NO: 2131773 - RNA, 19 nt, Artificial Sequence
  Description of Artificial Sequence: Synthetic oligonucleotide
aacuagaacaauuuuagaa

SEQ ID NO: 2131774 - RNA, 19 nt, Artificial Sequence
  Description of Artificial Sequence: Synthetic oligonucleotide
ugugugaaaaugcauaagc

SEQ ID NO: 2131775 - RNA, 19 nt, Artificial Sequence
  Description of Artificial Sequence: Synthetic oligonucleotide
ucuaaaugccauaacaagc

SEQ ID NO: 2131776 - RNA, 19 nt, Artificial Sequence
  Description of Artificial Sequence: Synthetic oligonucleotide
aaugugaacuaauggaaag

SEQ ID NO: 2131777 - RNA, 19 nt, Artificial Sequence
  Description of Artificial Sequence: Synthetic oligonucleotide
aaagagaucaaaagcuucc

SEQ ID NO: 2131778 - RNA, 19 nt, Artificial Sequence
  Description of Artificial Sequence: Synthetic oligonucleotide
acuaaaucuagucacaugu

SEQ ID NO: 2131779 - RNA, 19 nt, Artificial Sequence
  Description of Artificial Sequence: Synthetic oligonucleotide
aagaacuuaauaucaaaga

SEQ ID NO: 2131780 - RNA, 19 nt, Artificial Sequence
  Description of Artificial Sequence: Synthetic oligonucleotide
aaugccauaacaagcauuc

SEQ ID NO: 2131781 - RNA, 19 nt, Artificial Sequence
  Description of Artificial Sequence: Synthetic oligonucleotide
ucuuaauagagacuggucu

SEQ ID NO: 2131782 - RNA, 19 nt, Artificial Sequence
  Description of Artificial Sequence: Synthetic oligonucleotide
ugaacuaauggaaagugga

SEQ ID NO: 2131783 - RNA, 19 nt, Artificial Sequence
  Description of Artificial Sequence: Synthetic oligonucleotide
aauagauucaggggcaugg

SEQ ID NO: 2131784 - RNA, 19 nt, Artificial Sequence
  Description of Artificial Sequence: Synthetic oligonucleotide
uaauaucaaagaaacuucc

SEQ ID NO: 2131785 - RNA, 19 nt, Artificial Sequence
  Description of Artificial Sequence: Synthetic oligonucleotide
uuuauugugacauggcuac

SEQ ID NO: 2131786 - RNA, 19 nt, Artificial Sequence
  Description of Artificial Sequence: Synthetic oligonucleotide
aaagaacuuaauaucaaag

SEQ ID NO: 2131787 - RNA, 19 nt, Artificial Sequence
  Description of Artificial Sequence: Synthetic oligonucleotide
acuaaaacaaaauagcauu

SEQ ID NO: 2131788 - RNA, 19 nt, Artificial Sequence
  Description of Artificial Sequence: Synthetic oligonucleotide
aauuuuagaacaaccacug

SEQ ID NO: 2131789 - RNA, 19 nt, Artificial Sequence
  Description of Artificial Sequence: Synthetic oligonucleotide
ugaaaaugcauaagcaaug

SEQ ID NO: 2131790 - RNA, 19 nt, Artificial Sequence
  Description of Artificial Sequence: Synthetic oligonucleotide
auaucuaaaugccauaaca

SEQ ID NO: 2131791 - RNA, 19 nt, Artificial Sequence
  Description of Artificial Sequence: Synthetic oligonucleotide
uaaaucuagucacaugugc

SEQ ID NO: 2131792 - RNA, 19 nt, Artificial Sequence
  Description of Artificial Sequence: Synthetic oligonucleotide
aaaugcauaagcaauguga

SEQ ID NO: 2131793 - RNA, 19 nt, Artificial Sequence
  Description of Artificial Sequence: Synthetic oligonucleotide
uugaaugauauuuucccag

SEQ ID NO: 2131794 - RNA, 19 nt, Artificial Sequence
  Description of Artificial Sequence: Synthetic oligonucleotide
acauggacaucuaagaagc

SEQ ID NO: 2131795 - RNA, 19 nt, Artificial Sequence
  Description of Artificial Sequence: Synthetic oligonucleotide
uuaaaaguagaggccaucg

SEQ ID NO: 2131796 - RNA, 19 nt, Artificial Sequence
  Description of Artificial Sequence: Synthetic oligonucleotide
ucuaagaagccauugugug

SEQ ID NO: 2131797 - RNA, 19 nt, Artificial Sequence
  Description of Artificial Sequence: Synthetic oligonucleotide
agucaguucaggcuuaggg

SEQ ID NO: 2131798 - RNA, 19 nt, Artificial Sequence
  Description of Artificial Sequence: Synthetic oligonucleotide
cauugcaaccuuuaguucc

SEQ ID NO: 2131799 - RNA, 19 nt, Artificial Sequence
  Description of Artificial Sequence: Synthetic oligonucleotide
ugcauaagcaaugugaacu

SEQ ID NO: 2131800 - RNA, 19 nt, Artificial Sequence
  Description of Artificial Sequence: Synthetic oligonucleotide
aucuaaaugccauaacaag

SEQ ID NO: 2131801 - RNA, 19 nt, Artificial Sequence
  Description of Artificial Sequence: Synthetic oligonucleotide
cauaacaagcauucguugg

SEQ ID NO: 2131802 - RNA, 19 nt, Artificial Sequence
  Description of Artificial Sequence: Synthetic oligonucleotide
uaagcaaugugaacuaaug

SEQ ID NO: 2131803 - RNA, 19 nt, Artificial Sequence
  Description of Artificial Sequence: Synthetic oligonucleotide
aguuccuugaugucuauag

SEQ ID NO: 2131804 - RNA, 19 nt, Artificial Sequence
  Description of Artificial Sequence: Synthetic oligonucleotide
uaucuaaaugccauaacaa

SEQ ID NO: 2131805 - RNA, 19 nt, Artificial Sequence
  Description of Artificial Sequence: Synthetic oligonucleotide
ugucuauaguuccaguucc

SEQ ID NO: 2131806 - RNA, 19 nt, Artificial Sequence
  Description of Artificial Sequence: Synthetic oligonucleotide
cuaguuaacccacagguug

SEQ ID NO: 2131807 - RNA, 19 nt, Artificial Sequence
  Description of Artificial Sequence: Synthetic oligonucleotide
uuuuagaacaaccacuguu

SEQ ID NO: 2131808 - RNA, 19 nt, Artificial Sequence
  Description of Artificial Sequence: Synthetic oligonucleotide
uuuagaacaaccacuguuu

SEQ ID NO: 2131809 - RNA, 19 nt, Artificial Sequence
  Description of Artificial Sequence: Synthetic oligonucleotide
aaaguagaggccaucgccg

SEQ ID NO: 2131810 - RNA, 19 nt, Artificial Sequence
  Description of Artificial Sequence: Synthetic oligonucleotide
uguuuauugugacauggcu

SEQ ID NO: 2131811 - RNA, 19 nt, Artificial Sequence
  Description of Artificial Sequence: Synthetic oligonucleotide
aagagaucaaaagcuuccc

SEQ ID NO: 2131812 - RNA, 19 nt, Artificial Sequence
  Description of Artificial Sequence: Synthetic oligonucleotide
guuuaauuagucagcaggg

SEQ ID NO: 2131813 - RNA, 19 nt, Artificial Sequence
  Description of Artificial Sequence: Synthetic oligonucleotide
uuaauuagucagcagggaa

SEQ ID NO: 2131814 - RNA, 19 nt, Artificial Sequence
  Description of Artificial Sequence: Synthetic oligonucleotide
gugaucuuaauagagacug

SEQ ID NO: 2131815 - RNA, 19 nt, Artificial Sequence
  Description of Artificial Sequence: Synthetic oligonucleotide
gguucaaagucccagagcc

SEQ ID NO: 2131816 - RNA, 19 nt, Artificial Sequence
  Description of Artificial Sequence: Synthetic oligonucleotide
acuguuuauugugacaugg

SEQ ID NO: 2131817 - RNA, 19 nt, Artificial Sequence
  Description of Artificial Sequence: Synthetic oligonucleotide
uguuugucuucuuaaaagu

SEQ ID NO: 2131818 - RNA, 19 nt, Artificial Sequence
  Description of Artificial Sequence: Synthetic oligonucleotide
agcagggaaauguacaaag

SEQ ID NO: 2131819 - RNA, 19 nt, Artificial Sequence
  Description of Artificial Sequence: Synthetic oligonucleotide
ucuuuggugucuuucucgg

SEQ ID NO: 2131820 - RNA, 19 nt, Artificial Sequence
  Description of Artificial Sequence: Synthetic oligonucleotide
auagagacuggucuucuuc

SEQ ID NO: 2131821 - RNA, 19 nt, Artificial Sequence
  Description of Artificial Sequence: Synthetic oligonucleotide
ucaucagucaaguucucgc

SEQ ID NO: 2131822 - RNA, 19 nt, Artificial Sequence
  Description of Artificial Sequence: Synthetic oligonucleotide
ucaaaagccguauuucaca

SEQ ID NO: 2131823 - RNA, 19 nt, Artificial Sequence
  Description of Artificial Sequence: Synthetic oligonucleotide
uaucaaagaaacuuccaaa

SEQ ID NO: 2131824 - RNA, 19 nt, Artificial Sequence
  Description of Artificial Sequence: Synthetic oligonucleotide
acaaccacuguuuauugug

SEQ ID NO: 2131825 - RNA, 19 nt, Artificial Sequence
  Description of Artificial Sequence: Synthetic oligonucleotide
caaguucucgccuaacucc

SEQ ID NO: 2131826 - RNA, 19 nt, Artificial Sequence
  Description of Artificial Sequence: Synthetic oligonucleotide
uaguuaacccacagguugg

SEQ ID NO: 2131827 - RNA, 19 nt, Artificial Sequence
  Description of Artificial Sequence: Synthetic oligonucleotide
uucuuaaaaguagaggcca

SEQ ID NO: 2131828 - RNA, 19 nt, Artificial Sequence
  Description of Artificial Sequence: Synthetic oligonucleotide
uuuggugucuuucucggac

SEQ ID NO: 2131829 - RNA, 19 nt, Artificial Sequence
  Description of Artificial Sequence: Synthetic oligonucleotide
ugugaacuaauggaaagug

SEQ ID NO: 2131830 - RNA, 19 nt, Artificial Sequence
  Description of Artificial Sequence: Synthetic oligonucleotide
aauuucacuuaucaucuuu

SEQ ID NO: 2131831 - RNA, 19 nt, Artificial Sequence
  Description of Artificial Sequence: Synthetic oligonucleotide
uucucggacauuuucugag

SEQ ID NO: 2131832 - RNA, 19 nt, Artificial Sequence
  Description of Artificial Sequence: Synthetic oligonucleotide
aacuaauggaaaguggagu

SEQ ID NO: 2131833 - RNA, 19 nt, Artificial Sequence
  Description of Artificial Sequence: Synthetic oligonucleotide
ugugacauggcuacaugga

SEQ ID NO: 2131834 - RNA, 19 nt, Artificial Sequence
  Description of Artificial Sequence: Synthetic oligonucleotide
ucuucagucaguucaggcu

SEQ ID NO: 2131835 - RNA, 19 nt, Artificial Sequence
  Description of Artificial Sequence: Synthetic oligonucleotide
uuagucagcagggaaaugu

SEQ ID NO: 2131836 - RNA, 19 nt, Artificial Sequence
  Description of Artificial Sequence: Synthetic oligonucleotide
agagaucaaaagcuucccg

SEQ ID NO: 2131837 - RNA, 19 nt, Artificial Sequence
  Description of Artificial Sequence: Synthetic oligonucleotide
agggaaauguacaaagaac

SEQ ID NO: 2131838 - RNA, 19 nt, Artificial Sequence
  Description of Artificial Sequence: Synthetic oligonucleotide
ucuuucucggacauuuucu

SEQ ID NO: 2131839 - RNA, 19 nt, Artificial Sequence
  Description of Artificial Sequence: Synthetic oligonucleotide
aaacuagaacaauuuuaga

SEQ ID NO: 2131840 - RNA, 19 nt, Artificial Sequence
  Description of Artificial Sequence: Synthetic oligonucleotide
aaugcauaagcaaugugaa

SEQ ID NO: 2131841 - RNA, 19 nt, Artificial Sequence
  Description of Artificial Sequence: Synthetic oligonucleotide
uuccaucagcaucaaagag

SEQ ID NO: 2131842 - RNA, 19 nt, Artificial Sequence
  Description of Artificial Sequence: Synthetic oligonucleotide
ugaucuuaauagagacugg

SEQ ID NO: 2131843 - RNA, 19 nt, Artificial Sequence
  Description of Artificial Sequence: Synthetic oligonucleotide
uaaaaguagaggccaucgc

SEQ ID NO: 2131844 - RNA, 19 nt, Artificial Sequence
  Description of Artificial Sequence: Synthetic oligonucleotide
agagcuugaaagcuuucag

SEQ ID NO: 2131845 - RNA, 19 nt, Artificial Sequence
  Description of Artificial Sequence: Synthetic oligonucleotide
guauuucacaaaauggcag

SEQ ID NO: 2131846 - RNA, 19 nt, Artificial Sequence
  Description of Artificial Sequence: Synthetic oligonucleotide
uagguucaaagucccagag

SEQ ID NO: 2131847 - RNA, 19 nt, Artificial Sequence
  Description of Artificial Sequence: Synthetic oligonucleotide
aaaucuagucacaugugcu

SEQ ID NO: 2131848 - RNA, 19 nt, Artificial Sequence
  Description of Artificial Sequence: Synthetic oligonucleotide
ugauauuuucccaguuuca

SEQ ID NO: 2131849 - RNA, 19 nt, Artificial Sequence
  Description of Artificial Sequence: Synthetic oligonucleotide
ugccauaacaagcauucgu

SEQ ID NO: 2131850 - RNA, 19 nt, Artificial Sequence
  Description of Artificial Sequence: Synthetic oligonucleotide
aauaucaaagaaacuucca

SEQ ID NO: 2131851 - RNA, 19 nt, Artificial Sequence
  Description of Artificial Sequence: Synthetic oligonucleotide
agccguauuucacaaaaug

SEQ ID NO: 2131852 - RNA, 19 nt, Artificial Sequence
  Description of Artificial Sequence: Synthetic oligonucleotide
cagugaucuuaauagagac

SEQ ID NO: 2131853 - RNA, 19 nt, Artificial Sequence
  Description of Artificial Sequence: Synthetic oligonucleotide
uuaacccacagguugggga

SEQ ID NO: 2131854 - RNA, 19 nt, Artificial Sequence
  Description of Artificial Sequence: Synthetic oligonucleotide
caucuaagaagccauugug

SEQ ID NO: 2131855 - RNA, 19 nt, Artificial Sequence
  Description of Artificial Sequence: Synthetic oligonucleotide
agucccagagcccucauug

SEQ ID NO: 2131856 - RNA, 19 nt, Artificial Sequence
  Description of Artificial Sequence: Synthetic oligonucleotide
uuuaguuccuugaugucua

SEQ ID NO: 2131857 - RNA, 19 nt, Artificial Sequence
  Description of Artificial Sequence: Synthetic oligonucleotide
ucaaguucucgccuaacuc

SEQ ID NO: 2131858 - RNA, 19 nt, Artificial Sequence
  Description of Artificial Sequence: Synthetic oligonucleotide
ucacaugugcuugaaguag

SEQ ID NO: 2131859 - RNA, 19 nt, Artificial Sequence
  Description of Artificial Sequence: Synthetic oligonucleotide
uccuugaugucuauaguuc

SEQ ID NO: 2131860 - RNA, 19 nt, Artificial Sequence
  Description of Artificial Sequence: Synthetic oligonucleotide
aaucuagucacaugugcuu

SEQ ID NO: 2131861 - RNA, 19 nt, Artificial Sequence
  Description of Artificial Sequence: Synthetic oligonucleotide
gucaguucaggcuuagggc

SEQ ID NO: 2131862 - RNA, 19 nt, Artificial Sequence
  Description of Artificial Sequence: Synthetic oligonucleotide
auucguuggguuuuaugug

SEQ ID NO: 2131863 - RNA, 19 nt, Artificial Sequence
  Description of Artificial Sequence: Synthetic oligonucleotide
uuuaauuagucagcaggga

SEQ ID NO: 2131864 - RNA, 19 nt, Artificial Sequence
  Description of Artificial Sequence: Synthetic oligonucleotide
gaaggaggguucucaaaag

SEQ ID NO: 2131865 - RNA, 19 nt, Artificial Sequence
  Description of Artificial Sequence: Synthetic oligonucleotide
agaucaaaagcuucccgga

SEQ ID NO: 2131866 - RNA, 19 nt, Artificial Sequence
  Description of Artificial Sequence: Synthetic oligonucleotide
uuagguucaaagucccaga

SEQ ID NO: 2131867 - RNA, 19 nt, Artificial Sequence
  Description of Artificial Sequence: Synthetic oligonucleotide
ucaggcuuagggcucauuc

SEQ ID NO: 2131868 - RNA, 19 nt, Artificial Sequence
  Description of Artificial Sequence: Synthetic oligonucleotide
gaacuaauggaaaguggag

SEQ ID NO: 2131869 - RNA, 19 nt, Artificial Sequence
  Description of Artificial Sequence: Synthetic oligonucleotide
acaucuaagaagccauugu

SEQ ID NO: 2131870 - RNA, 19 nt, Artificial Sequence
  Description of Artificial Sequence: Synthetic oligonucleotide
ugugcucuuguucugcccu

SEQ ID NO: 2131871 - RNA, 19 nt, Artificial Sequence
  Description of Artificial Sequence: Synthetic oligonucleotide
aacacauaucuaaaugcca

SEQ ID NO: 2131872 - RNA, 19 nt, Artificial Sequence
  Description of Artificial Sequence: Synthetic oligonucleotide
augcauaagcaaugugaac

SEQ ID NO: 2131873 - RNA, 19 nt, Artificial Sequence
  Description of Artificial Sequence: Synthetic oligonucleotide
ucgccuaacuccuuggcca

SEQ ID NO: 2131874 - RNA, 19 nt, Artificial Sequence
  Description of Artificial Sequence: Synthetic oligonucleotide
uuucucuggccacuggaug

SEQ ID NO: 2131875 - RNA, 19 nt, Artificial Sequence
  Description of Artificial Sequence: Synthetic oligonucleotide
cuaaaucuagucacaugug

SEQ ID NO: 2131876 - RNA, 19 nt, Artificial Sequence
  Description of Artificial Sequence: Synthetic oligonucleotide
auuuucugagucaucacug

SEQ ID NO: 2131877 - RNA, 19 nt, Artificial Sequence
  Description of Artificial Sequence: Synthetic oligonucleotide
ccguauuucacaaaauggc

SEQ ID NO: 2131878 - RNA, 19 nt, Artificial Sequence
  Description of Artificial Sequence: Synthetic oligonucleotide
ucugagucaucacugucaa

SEQ ID NO: 2131879 - RNA, 19 nt, Artificial Sequence
  Description of Artificial Sequence: Synthetic oligonucleotide
cucaaaagccguauuucac

SEQ ID NO: 2131880 - RNA, 19 nt, Artificial Sequence
  Description of Artificial Sequence: Synthetic oligonucleotide
ucaaaagcuucccggauuu

SEQ ID NO: 2131881 - RNA, 19 nt, Artificial Sequence
  Description of Artificial Sequence: Synthetic oligonucleotide
uuuucugagucaucacugu

SEQ ID NO: 2131882 - RNA, 19 nt, Artificial Sequence
  Description of Artificial Sequence: Synthetic oligonucleotide
uggaaaguggaguggcugc

SEQ ID NO: 2131883 - RNA, 19 nt, Artificial Sequence
  Description of Artificial Sequence: Synthetic oligonucleotide
aaagcuuucaggauuucuu

SEQ ID NO: 2131884 - RNA, 19 nt, Artificial Sequence
  Description of Artificial Sequence: Synthetic oligonucleotide
gaagccauuguguguuugc

SEQ ID NO: 2131885 - RNA, 19 nt, Artificial Sequence
  Description of Artificial Sequence: Synthetic oligonucleotide
ucaaucauuuccugcaguu

SEQ ID NO: 2131886 - RNA, 19 nt, Artificial Sequence
  Description of Artificial Sequence: Synthetic oligonucleotide
cuaauggaaaguggagugg

SEQ ID NO: 2131887 - RNA, 19 nt, Artificial Sequence
  Description of Artificial Sequence: Synthetic oligonucleotide
caucagucaaguucucgcc

SEQ ID NO: 2131888 - RNA, 19 nt, Artificial Sequence
  Description of Artificial Sequence: Synthetic oligonucleotide
cuuucucggacauuuucug

SEQ ID NO: 2131889 - RNA, 19 nt, Artificial Sequence
  Description of Artificial Sequence: Synthetic oligonucleotide
uaucaauuucacuuaucau

SEQ ID NO: 2131890 - RNA, 19 nt, Artificial Sequence
  Description of Artificial Sequence: Synthetic oligonucleotide
uggcuaguuaacccacagg

SEQ ID NO: 2131891 - RNA, 19 nt, Artificial Sequence
  Description of Artificial Sequence: Synthetic oligonucleotide
uugcucauugaccucgcca

SEQ ID NO: 2131892 - RNA, 19 nt, Artificial Sequence
  Description of Artificial Sequence: Synthetic oligonucleotide
gugaacuaauggaaagugg

SEQ ID NO: 2131893 - RNA, 19 nt, Artificial Sequence
  Description of Artificial Sequence: Synthetic oligonucleotide
cacacuuucacacccuuuc

SEQ ID NO: 2131894 - RNA, 19 nt, Artificial Sequence
  Description of Artificial Sequence: Synthetic oligonucleotide
uuagaacaaccacuguuua

SEQ ID NO: 2131895 - RNA, 19 nt, Artificial Sequence
  Description of Artificial Sequence: Synthetic oligonucleotide
uuaauagagacuggucuuc

SEQ ID NO: 2131896 - RNA, 19 nt, Artificial Sequence
  Description of Artificial Sequence: Synthetic oligonucleotide
aaaguggaguggcugcagu

SEQ ID NO: 2131897 - RNA, 19 nt, Artificial Sequence
  Description of Artificial Sequence: Synthetic oligonucleotide
aguucuucaucagucaagu

SEQ ID NO: 2131898 - RNA, 19 nt, Artificial Sequence
  Description of Artificial Sequence: Synthetic oligonucleotide
ugcucauugaccucgccau

SEQ ID NO: 2131899 - RNA, 19 nt, Artificial Sequence
  Description of Artificial Sequence: Synthetic oligonucleotide
cuguuuauugugacauggc

SEQ ID NO: 2131900 - RNA, 19 nt, Artificial Sequence
  Description of Artificial Sequence: Synthetic oligonucleotide
agaacaaccacuguuuauu

SEQ ID NO: 2131901 - RNA, 19 nt, Artificial Sequence
  Description of Artificial Sequence: Synthetic oligonucleotide
gacaucuaagaagccauug

SEQ ID NO: 2131902 - RNA, 19 nt, Artificial Sequence
  Description of Artificial Sequence: Synthetic oligonucleotide
gaacucuugcucauugacc

SEQ ID NO: 2131903 - RNA, 19 nt, Artificial Sequence
  Description of Artificial Sequence: Synthetic oligonucleotide
uggguuuuaugugaggaaa

SEQ ID NO: 2131904 - RNA, 19 nt, Artificial Sequence
  Description of Artificial Sequence: Synthetic oligonucleotide
uccugucccuuccuuauca

SEQ ID NO: 2131905 - RNA, 19 nt, Artificial Sequence
  Description of Artificial Sequence: Synthetic oligonucleotide
ugcccuguuuaauuaguca

SEQ ID NO: 2131906 - RNA, 19 nt, Artificial Sequence
  Description of Artificial Sequence: Synthetic oligonucleotide
cacuuucacacccuuuccc

SEQ ID NO: 2131907 - RNA, 19 nt, Artificial Sequence
  Description of Artificial Sequence: Synthetic oligonucleotide
uuggccacacgcuuuagau

SEQ ID NO: 2131908 - RNA, 19 nt, Artificial Sequence
  Description of Artificial Sequence: Synthetic oligonucleotide
aucuuaauagagacugguc

SEQ ID NO: 2131909 - RNA, 19 nt, Artificial Sequence
  Description of Artificial Sequence: Synthetic oligonucleotide
aaguagaggccaucgccga

SEQ ID NO: 2131910 - RNA, 19 nt, Artificial Sequence
  Description of Artificial Sequence: Synthetic oligonucleotide
uucugcccuguuuaauuag

SEQ ID NO: 2131911 - RNA, 19 nt, Artificial Sequence
  Description of Artificial Sequence: Synthetic oligonucleotide
cauucguuggguuuuaugu

SEQ ID NO: 2131912 - RNA, 19 nt, Artificial Sequence
  Description of Artificial Sequence: Synthetic oligonucleotide
uuucucggacauuuucuga

SEQ ID NO: 2131913 - RNA, 19 nt, Artificial Sequence
  Description of Artificial Sequence: Synthetic oligonucleotide
aaagaagcagugaucuuaa

SEQ ID NO: 2131914 - RNA, 19 nt, Artificial Sequence
  Description of Artificial Sequence: Synthetic oligonucleotide
ucguuggguuuuaugugag

SEQ ID NO: 2131915 - RNA, 19 nt, Artificial Sequence
  Description of Artificial Sequence: Synthetic oligonucleotide
ucugcccuguuuaauuagu

SEQ ID NO: 2131916 - RNA, 19 nt, Artificial Sequence
  Description of Artificial Sequence: Synthetic oligonucleotide
uagauucaggggcauggcu

SEQ ID NO: 2131917 - RNA, 19 nt, Artificial Sequence
  Description of Artificial Sequence: Synthetic oligonucleotide
ucuagucacaugugcuuga

SEQ ID NO: 2131918 - RNA, 19 nt, Artificial Sequence
  Description of Artificial Sequence: Synthetic oligonucleotide
gccguauuucacaaaaugg

SEQ ID NO: 2131919 - RNA, 19 nt, Artificial Sequence
  Description of Artificial Sequence: Synthetic oligonucleotide
cagucacacuuucacaccc

SEQ ID NO: 2131920 - RNA, 19 nt, Artificial Sequence
  Description of Artificial Sequence: Synthetic oligonucleotide
acauaucuaaaugccauaa

SEQ ID NO: 2131921 - RNA, 19 nt, Artificial Sequence
  Description of Artificial Sequence: Synthetic oligonucleotide
cuauaguuccaguuccauc

SEQ ID NO: 2131922 - RNA, 19 nt, Artificial Sequence
  Description of Artificial Sequence: Synthetic oligonucleotide
aaauagauucaggggcaug

SEQ ID NO: 2131923 - RNA, 19 nt, Artificial Sequence
  Description of Artificial Sequence: Synthetic oligonucleotide
uucucgccuaacuccuugg

SEQ ID NO: 2131924 - RNA, 19 nt, Artificial Sequence
  Description of Artificial Sequence: Synthetic oligonucleotide
aucuaagaagccauugugu

SEQ ID NO: 2131925 - RNA, 19 nt, Artificial Sequence
  Description of Artificial Sequence: Synthetic oligonucleotide
aucagucaaguucucgccu

SEQ ID NO: 2131926 - RNA, 19 nt, Artificial Sequence
  Description of Artificial Sequence: Synthetic oligonucleotide
gcccuguuuaauuagucag

SEQ ID NO: 2131927 - RNA, 19 nt, Artificial Sequence
  Description of Artificial Sequence: Synthetic oligonucleotide
cuguuuaauuagucagcag

SEQ ID NO: 2131928 - RNA, 19 nt, Artificial Sequence
  Description of Artificial Sequence: Synthetic oligonucleotide
uauugugacauggcuacau

SEQ ID NO: 2131929 - RNA, 19 nt, Artificial Sequence
  Description of Artificial Sequence: Synthetic oligonucleotide
uaacccacagguuggggaa

SEQ ID NO: 2131930 - RNA, 19 nt, Artificial Sequence
  Description of Artificial Sequence: Synthetic oligonucleotide
aagcuucccggauuuccug

SEQ ID NO: 2131931 - RNA, 19 nt, Artificial Sequence
  Description of Artificial Sequence: Synthetic oligonucleotide
uuggguuuuaugugaggaa

SEQ ID NO: 2131932 - RNA, 19 nt, Artificial Sequence
  Description of Artificial Sequence: Synthetic oligonucleotide
guuggguuuuaugugagga

SEQ ID NO: 2131933 - RNA, 19 nt, Artificial Sequence
  Description of Artificial Sequence: Synthetic oligonucleotide
ucauugcaaccuuuaguuc

SEQ ID NO: 2131934 - RNA, 19 nt, Artificial Sequence
  Description of Artificial Sequence: Synthetic oligonucleotide
acuaugugcucuuguucug

SEQ ID NO: 2131935 - RNA, 19 nt, Artificial Sequence
  Description of Artificial Sequence: Synthetic oligonucleotide
caucaaucauuuccugcag

SEQ ID NO: 2131936 - RNA, 19 nt, Artificial Sequence
  Description of Artificial Sequence: Synthetic oligonucleotide
cacuaaaucuagucacaug

SEQ ID NO: 2131937 - RNA, 19 nt, Artificial Sequence
  Description of Artificial Sequence: Synthetic oligonucleotide
aaaauagauucaggggcau

SEQ ID NO: 2131938 - RNA, 19 nt, Artificial Sequence
  Description of Artificial Sequence: Synthetic oligonucleotide
uuucacacccuuuccccac

SEQ ID NO: 2131939 - RNA, 19 nt, Artificial Sequence
  Description of Artificial Sequence: Synthetic oligonucleotide
aaagcuucccggauuuccu

SEQ ID NO: 2131940 - RNA, 19 nt, Artificial Sequence
  Description of Artificial Sequence: Synthetic oligonucleotide
acacauaucuaaaugccau

SEQ ID NO: 2131941 - RNA, 19 nt, Artificial Sequence
  Description of Artificial Sequence: Synthetic oligonucleotide
uagaacaaccacuguuuau

SEQ ID NO: 2131942 - RNA, 19 nt, Artificial Sequence
  Description of Artificial Sequence: Synthetic oligonucleotide
aauagagacuggucuucuu

SEQ ID NO: 2131943 - RNA, 19 nt, Artificial Sequence
  Description of Artificial Sequence: Synthetic oligonucleotide
ggaggguucucaaaagccg

SEQ ID NO: 2131944 - RNA, 19 nt, Artificial Sequence
  Description of Artificial Sequence: Synthetic oligonucleotide
aucaaaagcuucccggauu

SEQ ID NO: 2131945 - RNA, 19 nt, Artificial Sequence
  Description of Artificial Sequence: Synthetic oligonucleotide
gccauuguguguuugcagc

SEQ ID NO: 2131946 - RNA, 19 nt, Artificial Sequence
  Description of Artificial Sequence: Synthetic oligonucleotide
gugugaaaaugcauaagca

SEQ ID NO: 2131947 - RNA, 19 nt, Artificial Sequence
  Description of Artificial Sequence: Synthetic oligonucleotide
aaaugccauaacaagcauu

SEQ ID NO: 2131948 - RNA, 19 nt, Artificial Sequence
  Description of Artificial Sequence: Synthetic oligonucleotide
ucuuagguucaaaguccca

SEQ ID NO: 2131949 - RNA, 19 nt, Artificial Sequence
  Description of Artificial Sequence: Synthetic oligonucleotide
gugacauggcuacauggac

SEQ ID NO: 2131950 - RNA, 19 nt, Artificial Sequence
  Description of Artificial Sequence: Synthetic oligonucleotide
augugaacuaauggaaagu

SEQ ID NO: 2131951 - RNA, 19 nt, Artificial Sequence
  Description of Artificial Sequence: Synthetic oligonucleotide
ucucgccuaacuccuuggc

SEQ ID NO: 2131952 - RNA, 19 nt, Artificial Sequence
  Description of Artificial Sequence: Synthetic oligonucleotide
cuugaugucuauaguucca

SEQ ID NO: 2131953 - RNA, 19 nt, Artificial Sequence
  Description of Artificial Sequence: Synthetic oligonucleotide
ugaugucuauaguuccagu

SEQ ID NO: 2131954 - RNA, 19 nt, Artificial Sequence
  Description of Artificial Sequence: Synthetic oligonucleotide
aacaagcauucguuggguu

SEQ ID NO: 2131955 - RNA, 19 nt, Artificial Sequence
  Description of Artificial Sequence: Synthetic oligonucleotide
aucuagucacaugugcuug

SEQ ID NO: 2131956 - RNA, 19 nt, Artificial Sequence
  Description of Artificial Sequence: Synthetic oligonucleotide
ccuugaugucuauaguucc

SEQ ID NO: 2131957 - RNA, 19 nt, Artificial Sequence
  Description of Artificial Sequence: Synthetic oligonucleotide
caaugugaacuaauggaaa

SEQ ID NO: 2131958 - RNA, 19 nt, Artificial Sequence
  Description of Artificial Sequence: Synthetic oligonucleotide
uaguuccaguuccaucagc

SEQ ID NO: 2131959 - RNA, 19 nt, Artificial Sequence
  Description of Artificial Sequence: Synthetic oligonucleotide
cucgccuaacuccuuggcc

SEQ ID NO: 2131960 - RNA, 19 nt, Artificial Sequence
  Description of Artificial Sequence: Synthetic oligonucleotide
ucagucaaguucucgccua

SEQ ID NO: 2131961 - RNA, 19 nt, Artificial Sequence
  Description of Artificial Sequence: Synthetic oligonucleotide
cauguuugucuucuuaaaa

SEQ ID NO: 2131962 - RNA, 19 nt, Artificial Sequence
  Description of Artificial Sequence: Synthetic oligonucleotide
aguuaacccacagguuggg

SEQ ID NO: 2131963 - RNA, 19 nt, Artificial Sequence
  Description of Artificial Sequence: Synthetic oligonucleotide
gcugcagucacacuuucac

SEQ ID NO: 2131964 - RNA, 19 nt, Artificial Sequence
  Description of Artificial Sequence: Synthetic oligonucleotide
gaugucuauaguuccaguu

SEQ ID NO: 2131965 - RNA, 19 nt, Artificial Sequence
  Description of Artificial Sequence: Synthetic oligonucleotide
aagccauuguguguuugca

SEQ ID NO: 2131966 - RNA, 19 nt, Artificial Sequence
  Description of Artificial Sequence: Synthetic oligonucleotide
ucucggacauuuucugagu

SEQ ID NO: 2131967 - RNA, 19 nt, Artificial Sequence
  Description of Artificial Sequence: Synthetic oligonucleotide
ucuauaguuccaguuccau

SEQ ID NO: 2131968 - RNA, 19 nt, Artificial Sequence
  Description of Artificial Sequence: Synthetic oligonucleotide
uaacaagcauucguugggu

SEQ ID NO: 2131969 - RNA, 19 nt, Artificial Sequence
  Description of Artificial Sequence: Synthetic oligonucleotide
cuuaaaaguagaggccauc

SEQ ID NO: 2131970 - RNA, 19 nt, Artificial Sequence
  Description of Artificial Sequence: Synthetic oligonucleotide
cuaugugcucuuguucugc

SEQ ID NO: 2131971 - RNA, 19 nt, Artificial Sequence
  Description of Artificial Sequence: Synthetic oligonucleotide
ggcuaguuaacccacaggu

SEQ ID NO: 2131972 - RNA, 19 nt, Artificial Sequence
  Description of Artificial Sequence: Synthetic oligonucleotide
ugcaaccuuuaguuccuug

SEQ ID NO: 2131973 - RNA, 19 nt, Artificial Sequence
  Description of Artificial Sequence: Synthetic oligonucleotide
guuuauugugacauggcua

SEQ ID NO: 2131974 - RNA, 19 nt, Artificial Sequence
  Description of Artificial Sequence: Synthetic oligonucleotide
gggaaauguacaaagaacu

SEQ ID NO: 2131975 - RNA, 19 nt, Artificial Sequence
  Description of Artificial Sequence: Synthetic oligonucleotide
caggcacuaaaucuaguca

SEQ ID NO: 2131976 - RNA, 19 nt, Artificial Sequence
  Description of Artificial Sequence: Synthetic oligonucleotide
caggaacucuugcucauug

SEQ ID NO: 2131977 - RNA, 19 nt, Artificial Sequence
  Description of Artificial Sequence: Synthetic oligonucleotide
ucuugcucauugaccucgc

SEQ ID NO: 2131978 - RNA, 19 nt, Artificial Sequence
  Description of Artificial Sequence: Synthetic oligonucleotide
auaagcaaugugaacuaau

SEQ ID NO: 2131979 - RNA, 19 nt, Artificial Sequence
  Description of Artificial Sequence: Synthetic oligonucleotide
gaggccaucgccgaaugga

SEQ ID NO: 2131980 - RNA, 19 nt, Artificial Sequence
  Description of Artificial Sequence: Synthetic oligonucleotide
gaaaguggaguggcugcag

SEQ ID NO: 2131981 - RNA, 19 nt, Artificial Sequence
  Description of Artificial Sequence: Synthetic oligonucleotide
ggcuacauggacaucuaag

SEQ ID NO: 2131982 - RNA, 19 nt, Artificial Sequence
  Description of Artificial Sequence: Synthetic oligonucleotide
gugaaaaugcauaagcaau

SEQ ID NO: 2131983 - RNA, 19 nt, Artificial Sequence
  Description of Artificial Sequence: Synthetic oligonucleotide
caaaagccguauuucacaa

SEQ ID NO: 2131984 - RNA, 19 nt, Artificial Sequence
  Description of Artificial Sequence: Synthetic oligonucleotide
gauauuuucccaguuucau

SEQ ID NO: 2131985 - RNA, 19 nt, Artificial Sequence
  Description of Artificial Sequence: Synthetic oligonucleotide
cuacauggacaucuaagaa

SEQ ID NO: 2131986 - RNA, 19 nt, Artificial Sequence
  Description of Artificial Sequence: Synthetic oligonucleotide
cugugugaaaaugcauaag

SEQ ID NO: 2131987 - RNA, 19 nt, Artificial Sequence
  Description of Artificial Sequence: Synthetic oligonucleotide
agcugugugaaaaugcaua

SEQ ID NO: 2131988 - RNA, 19 nt, Artificial Sequence
  Description of Artificial Sequence: Synthetic oligonucleotide
guucucgccuaacuccuug

SEQ ID NO: 2131989 - RNA, 19 nt, Artificial Sequence
  Description of Artificial Sequence: Synthetic oligonucleotide
uagaggccaucgccgaaug

SEQ ID NO: 2131990 - RNA, 19 nt, Artificial Sequence
  Description of Artificial Sequence: Synthetic oligonucleotide
ugcacucuggugucaacua

SEQ ID NO: 2131991 - RNA, 19 nt, Artificial Sequence
  Description of Artificial Sequence: Synthetic oligonucleotide
cuugaaagcuuucaggauu

SEQ ID NO: 2131992 - RNA, 19 nt, Artificial Sequence
  Description of Artificial Sequence: Synthetic oligonucleotide
aggcuuagggcucauucuu

SEQ ID NO: 2131993 - RNA, 19 nt, Artificial Sequence
  Description of Artificial Sequence: Synthetic oligonucleotide
guuaacccacagguugggg

SEQ ID NO: 2131994 - RNA, 19 nt, Artificial Sequence
  Description of Artificial Sequence: Synthetic oligonucleotide
auugaccucgccaucucca

SEQ ID NO: 2131995 - RNA, 19 nt, Artificial Sequence
  Description of Artificial Sequence: Synthetic oligonucleotide
agucaaguucucgccuaac

SEQ ID NO: 2131996 - RNA, 19 nt, Artificial Sequence
  Description of Artificial Sequence: Synthetic oligonucleotide
gcaaccuuuaguuccuuga

SEQ ID NO: 2131997 - RNA, 19 nt, Artificial Sequence
  Description of Artificial Sequence: Synthetic oligonucleotide
gcaggcacuaaaucuaguc

SEQ ID NO: 2131998 - RNA, 19 nt, Artificial Sequence
  Description of Artificial Sequence: Synthetic oligonucleotide
cuuaauagagacuggucuu

SEQ ID NO: 2131999 - RNA, 19 nt, Artificial Sequence
  Description of Artificial Sequence: Synthetic oligonucleotide
cccuguuuaauuagucagc

SEQ ID NO: 2132000 - RNA, 19 nt, Artificial Sequence
  Description of Artificial Sequence: Synthetic oligonucleotide
uggugucuuucucggacau

SEQ ID NO: 2132001 - RNA, 19 nt, Artificial Sequence
  Description of Artificial Sequence: Synthetic oligonucleotide
cuuucacacccuuucccca

SEQ ID NO: 2132002 - RNA, 19 nt, Artificial Sequence
  Description of Artificial Sequence: Synthetic oligonucleotide
caaucauuuccugcaguuc

SEQ ID NO: 2132003 - RNA, 19 nt, Artificial Sequence
  Description of Artificial Sequence: Synthetic oligonucleotide
caaccacuguuuauuguga

SEQ ID NO: 2132004 - RNA, 19 nt, Artificial Sequence
  Description of Artificial Sequence: Synthetic oligonucleotide
gcaaugugaacuaauggaa

SEQ ID NO: 2132005 - RNA, 19 nt, Artificial Sequence
  Description of Artificial Sequence: Synthetic oligonucleotide
cacuguuuauugugacaug

SEQ ID NO: 2132006 - RNA, 19 nt, Artificial Sequence
  Description of Artificial Sequence: Synthetic oligonucleotide
ucagucaguucaggcuuag

SEQ ID NO: 2132007 - RNA, 19 nt, Artificial Sequence
  Description of Artificial Sequence: Synthetic oligonucleotide
ggcauggcuaguuaaccca

SEQ ID NO: 2132008 - RNA, 19 nt, Artificial Sequence
  Description of Artificial Sequence: Synthetic oligonucleotide
gaccucgccaucuccaucu

SEQ ID NO: 2132009 - RNA, 19 nt, Artificial Sequence
  Description of Artificial Sequence: Synthetic oligonucleotide
agagacuggucuucuucau

SEQ ID NO: 2132010 - RNA, 19 nt, Artificial Sequence
  Description of Artificial Sequence: Synthetic oligonucleotide
agauucaggggcauggcua

SEQ ID NO: 2132011 - RNA, 19 nt, Artificial Sequence
  Description of Artificial Sequence: Synthetic oligonucleotide
augccauaacaagcauucg

SEQ ID NO: 2132012 - RNA, 19 nt, Artificial Sequence
  Description of Artificial Sequence: Synthetic oligonucleotide
cugcccuguuuaauuaguc

SEQ ID NO: 2132013 - RNA, 19 nt, Artificial Sequence
  Description of Artificial Sequence: Synthetic oligonucleotide
uuauugugacauggcuaca

SEQ ID NO: 2132014 - RNA, 19 nt, Artificial Sequence
  Description of Artificial Sequence: Synthetic oligonucleotide
cuaagaagccauugugugu

SEQ ID NO: 2132015 - RNA, 19 nt, Artificial Sequence
  Description of Artificial Sequence: Synthetic oligonucleotide
aggccaucgccgaauggac

SEQ ID NO: 2132016 - RNA, 19 nt, Artificial Sequence
  Description of Artificial Sequence: Synthetic oligonucleotide
cuaacuccuuggccacacg

SEQ ID NO: 2132017 - RNA, 19 nt, Artificial Sequence
  Description of Artificial Sequence: Synthetic oligonucleotide
gcugugugaaaaugcauaa

SEQ ID NO: 2132018 - RNA, 19 nt, Artificial Sequence
  Description of Artificial Sequence: Synthetic oligonucleotide
cguauuucacaaaauggca

SEQ ID NO: 2132019 - RNA, 19 nt, Artificial Sequence
  Description of Artificial Sequence: Synthetic oligonucleotide
ucccggauuuccuguuucu

SEQ ID NO: 2132020 - RNA, 19 nt, Artificial Sequence
  Description of Artificial Sequence: Synthetic oligonucleotide
gggcauggcuaguuaaccc

SEQ ID NO: 2132021 - RNA, 19 nt, Artificial Sequence
  Description of Artificial Sequence: Synthetic oligonucleotide
gaaugauauuuucccaguu

SEQ ID NO: 2132022 - RNA, 19 nt, Artificial Sequence
  Description of Artificial Sequence: Synthetic oligonucleotide
cuugcucauugaccucgcc

SEQ ID NO: 2132023 - RNA, 19 nt, Artificial Sequence
  Description of Artificial Sequence: Synthetic oligonucleotide
ucaggggcauggcuaguua

SEQ ID NO: 2132024 - RNA, 19 nt, Artificial Sequence
  Description of Artificial Sequence: Synthetic oligonucleotide
gcagucacacuuucacacc

SEQ ID NO: 2132025 - RNA, 19 nt, Artificial Sequence
  Description of Artificial Sequence: Synthetic oligonucleotide
gaucaaaagcuucccggau

SEQ ID NO: 2132026 - RNA, 19 nt, Artificial Sequence
  Description of Artificial Sequence: Synthetic oligonucleotide
gucaaguucucgccuaacu

SEQ ID NO: 2132027 - RNA, 19 nt, Artificial Sequence
  Description of Artificial Sequence: Synthetic oligonucleotide
guguuugcagcugugugaa

SEQ ID NO: 2132028 - RNA, 19 nt, Artificial Sequence
  Description of Artificial Sequence: Synthetic oligonucleotide
guggaguggcugcagucac

SEQ ID NO: 2132029 - RNA, 19 nt, Artificial Sequence
  Description of Artificial Sequence: Synthetic oligonucleotide
cagagcccucauugcaacc

SEQ ID NO: 2132030 - RNA, 19 nt, Artificial Sequence
  Description of Artificial Sequence: Synthetic oligonucleotide
aaagucccagagcccucau

SEQ ID NO: 2132031 - RNA, 19 nt, Artificial Sequence
  Description of Artificial Sequence: Synthetic oligonucleotide
aaaagucacugaaguucau

SEQ ID NO: 2132032 - RNA, 19 nt, Artificial Sequence
  Description of Artificial Sequence: Synthetic oligonucleotide
gcauucguuggguuuuaug

SEQ ID NO: 2132033 - RNA, 19 nt, Artificial Sequence
  Description of Artificial Sequence: Synthetic oligonucleotide
cacauaucuaaaugccaua

SEQ ID NO: 2132034 - RNA, 19 nt, Artificial Sequence
  Description of Artificial Sequence: Synthetic oligonucleotide
ugaccucgccaucuccauc

SEQ ID NO: 2132035 - RNA, 19 nt, Artificial Sequence
  Description of Artificial Sequence: Synthetic oligonucleotide
cacucuggugucaacuaaa

SEQ ID NO: 2132036 - RNA, 19 nt, Artificial Sequence
  Description of Artificial Sequence: Synthetic oligonucleotide
ugucuuucucggacauuuu

SEQ ID NO: 2132037 - RNA, 19 nt, Artificial Sequence
  Description of Artificial Sequence: Synthetic oligonucleotide
acccacagguuggggaagg

SEQ ID NO: 2132038 - RNA, 19 nt, Artificial Sequence
  Description of Artificial Sequence: Synthetic oligonucleotide
cccuuuccccacuaugugc

SEQ ID NO: 2132039 - RNA, 19 nt, Artificial Sequence
  Description of Artificial Sequence: Synthetic oligonucleotide
uggccacacgcuuuagauu

SEQ ID NO: 2132040 - RNA, 19 nt, Artificial Sequence
  Description of Artificial Sequence: Synthetic oligonucleotide
cuuguucugcccuguuuaa

SEQ ID NO: 2132041 - RNA, 19 nt, Artificial Sequence
  Description of Artificial Sequence: Synthetic oligonucleotide
cugcagucacacuuucaca

SEQ ID NO: 2132042 - RNA, 19 nt, Artificial Sequence
  Description of Artificial Sequence: Synthetic oligonucleotide
cauggcuaguuaacccaca

SEQ ID NO: 2132043 - RNA, 19 nt, Artificial Sequence
  Description of Artificial Sequence: Synthetic oligonucleotide
cuuggccacacgcuuuaga

SEQ ID NO: 2132044 - RNA, 19 nt, Artificial Sequence
  Description of Artificial Sequence: Synthetic oligonucleotide
ccuguuuaauuagucagca

SEQ ID NO: 2132045 - RNA, 19 nt, Artificial Sequence
  Description of Artificial Sequence: Synthetic oligonucleotide
gaggguucucaaaagccgu

SEQ ID NO: 2132046 - RNA, 19 nt, Artificial Sequence
  Description of Artificial Sequence: Synthetic oligonucleotide
ugaaagcuuucaggauuuc

SEQ ID NO: 2132047 - RNA, 19 nt, Artificial Sequence
  Description of Artificial Sequence: Synthetic oligonucleotide
cauaagcaaugugaacuaa

SEQ ID NO: 2132048 - RNA, 19 nt, Artificial Sequence
  Description of Artificial Sequence: Synthetic oligonucleotide
gccaucgccgaauggacuc

SEQ ID NO: 2132049 - RNA, 19 nt, Artificial Sequence
  Description of Artificial Sequence: Synthetic oligonucleotide
gucuauaguuccaguucca

SEQ ID NO: 2132050 - RNA, 19 nt, Artificial Sequence
  Description of Artificial Sequence: Synthetic oligonucleotide
ggccacacgcuuuagauuu

SEQ ID NO: 2132051 - RNA, 19 nt, Artificial Sequence
  Description of Artificial Sequence: Synthetic oligonucleotide
ggcacuaaaucuagucaca

SEQ ID NO: 2132052 - RNA, 19 nt, Artificial Sequence
  Description of Artificial Sequence: Synthetic oligonucleotide
agucacacuuucacacccu

SEQ ID NO: 2132053 - RNA, 19 nt, Artificial Sequence
  Description of Artificial Sequence: Synthetic oligonucleotide
acaaaauggcaggcacuaa

SEQ ID NO: 2132054 - RNA, 19 nt, Artificial Sequence
  Description of Artificial Sequence: Synthetic oligonucleotide
caucucgaucagcuucauc

SEQ ID NO: 2132055 - RNA, 19 nt, Artificial Sequence
  Description of Artificial Sequence: Synthetic oligonucleotide
ucacacccuuuccccacua

SEQ ID NO: 2132056 - RNA, 19 nt, Artificial Sequence
  Description of Artificial Sequence: Synthetic oligonucleotide
uaguuccuugaugucuaua

SEQ ID NO: 2132057 - RNA, 19 nt, Artificial Sequence
  Description of Artificial Sequence: Synthetic oligonucleotide
cagucaguucaggcuuagg

SEQ ID NO: 2132058 - RNA, 19 nt, Artificial Sequence
  Description of Artificial Sequence: Synthetic oligonucleotide
acauggcuacauggacauc

SEQ ID NO: 2132059 - RNA, 19 nt, Artificial Sequence
  Description of Artificial Sequence: Synthetic oligonucleotide
caggcuuagggcucauucu

SEQ ID NO: 2132060 - RNA, 19 nt, Artificial Sequence
  Description of Artificial Sequence: Synthetic oligonucleotide
caaccuuuaguuccuugau

SEQ ID NO: 2132061 - RNA, 19 nt, Artificial Sequence
  Description of Artificial Sequence: Synthetic oligonucleotide
caggggcauggcuaguuaa

SEQ ID NO: 2132062 - RNA, 19 nt, Artificial Sequence
  Description of Artificial Sequence: Synthetic oligonucleotide
ggaaaguggaguggcugca

SEQ ID NO: 2132063 - RNA, 19 nt, Artificial Sequence
  Description of Artificial Sequence: Synthetic oligonucleotide
caugaugcgcaggaacucu

SEQ ID NO: 2132064 - RNA, 19 nt, Artificial Sequence
  Description of Artificial Sequence: Synthetic oligonucleotide
ggguuuuaugugaggaaaa

SEQ ID NO: 2132065 - RNA, 19 nt, Artificial Sequence
  Description of Artificial Sequence: Synthetic oligonucleotide
cguuggguuuuaugugagg

SEQ ID NO: 2132066 - RNA, 19 nt, Artificial Sequence
  Description of Artificial Sequence: Synthetic oligonucleotide
cuagucacaugugcuugaa

SEQ ID NO: 2132067 - RNA, 19 nt, Artificial Sequence
  Description of Artificial Sequence: Synthetic oligonucleotide
uccccacuaugugcucuug

SEQ ID NO: 2132068 - RNA, 19 nt, Artificial Sequence
  Description of Artificial Sequence: Synthetic oligonucleotide
ccuaacuccuuggccacac

SEQ ID NO: 2132069 - RNA, 19 nt, Artificial Sequence
  Description of Artificial Sequence: Synthetic oligonucleotide
cgaucagcuucaucaauca

SEQ ID NO: 2132070 - RNA, 19 nt, Artificial Sequence
  Description of Artificial Sequence: Synthetic oligonucleotide
augaugcgcaggaacucuu

SEQ ID NO: 2132071 - RNA, 19 nt, Artificial Sequence
  Description of Artificial Sequence: Synthetic oligonucleotide
gggaaggaggguucucaaa

SEQ ID NO: 2132072 - RNA, 19 nt, Artificial Sequence
  Description of Artificial Sequence: Synthetic oligonucleotide
aggguucucaaaagccgua

SEQ ID NO: 2132073 - RNA, 19 nt, Artificial Sequence
  Description of Artificial Sequence: Synthetic oligonucleotide
gacuggucuucuucaugau

SEQ ID NO: 2132074 - RNA, 19 nt, Artificial Sequence
  Description of Artificial Sequence: Synthetic oligonucleotide
gccauaacaagcauucguu

SEQ ID NO: 2132075 - RNA, 19 nt, Artificial Sequence
  Description of Artificial Sequence: Synthetic oligonucleotide
auggcuacauggacaucua

SEQ ID NO: 2132076 - RNA, 19 nt, Artificial Sequence
  Description of Artificial Sequence: Synthetic oligonucleotide
guagaggccaucgccgaau

SEQ ID NO: 2132077 - RNA, 19 nt, Artificial Sequence
  Description of Artificial Sequence: Synthetic oligonucleotide
agcauucguuggguuuuau

SEQ ID NO: 2132078 - RNA, 19 nt, Artificial Sequence
  Description of Artificial Sequence: Synthetic oligonucleotide
ccacuguuuauugugacau

SEQ ID NO: 2132079 - RNA, 19 nt, Artificial Sequence
  Description of Artificial Sequence: Synthetic oligonucleotide
uucaggcuuagggcucauu

SEQ ID NO: 2132080 - RNA, 19 nt, Artificial Sequence
  Description of Artificial Sequence: Synthetic oligonucleotide
ggacauuuucugagucauc

SEQ ID NO: 2132081 - RNA, 19 nt, Artificial Sequence
  Description of Artificial Sequence: Synthetic oligonucleotide
uugcaaccuuuaguuccuu

SEQ ID NO: 2132082 - RNA, 19 nt, Artificial Sequence
  Description of Artificial Sequence: Synthetic oligonucleotide
cccggauuuccuguuucug

SEQ ID NO: 2132083 - RNA, 19 nt, Artificial Sequence
  Description of Artificial Sequence: Synthetic oligonucleotide
gguucucaaaagccguauu

SEQ ID NO: 2132084 - RNA, 19 nt, Artificial Sequence
  Description of Artificial Sequence: Synthetic oligonucleotide
gcacuaaaucuagucacau

SEQ ID NO: 2132085 - RNA, 19 nt, Artificial Sequence
  Description of Artificial Sequence: Synthetic oligonucleotide
agcccucauugcaaccuuu

SEQ ID NO: 2132086 - RNA, 19 nt, Artificial Sequence
  Description of Artificial Sequence: Synthetic oligonucleotide
aguucucgccuaacuccuu

SEQ ID NO: 2132087 - RNA, 19 nt, Artificial Sequence
  Description of Artificial Sequence: Synthetic oligonucleotide
cgccuaacuccuuggccac

SEQ ID NO: 2132088 - RNA, 19 nt, Artificial Sequence
  Description of Artificial Sequence: Synthetic oligonucleotide
gcuaguuaacccacagguu

SEQ ID NO: 2132089 - RNA, 19 nt, Artificial Sequence
  Description of Artificial Sequence: Synthetic oligonucleotide
ggguucucaaaagccguau

SEQ ID NO: 2132090 - RNA, 19 nt, Artificial Sequence
  Description of Artificial Sequence: Synthetic oligonucleotide
cccacuaugugcucuuguu

SEQ ID NO: 2132091 - RNA, 19 nt, Artificial Sequence
  Description of Artificial Sequence: Synthetic oligonucleotide
ccugucccuuccuuaucaa

SEQ ID NO: 2132092 - RNA, 19 nt, Artificial Sequence
  Description of Artificial Sequence: Synthetic oligonucleotide
cacacccuuuccccacuau

SEQ ID NO: 2132093 - RNA, 19 nt, Artificial Sequence
  Description of Artificial Sequence: Synthetic oligonucleotide
cagguuggggaaggagggu

SEQ ID NO: 2132094 - RNA, 19 nt, Artificial Sequence
  Description of Artificial Sequence: Synthetic oligonucleotide
ccuuggccacacgcuuuag

SEQ ID NO: 2132095 - RNA, 19 nt, Artificial Sequence
  Description of Artificial Sequence: Synthetic oligonucleotide
ggacaucuaagaagccauu

SEQ ID NO: 2132096 - RNA, 19 nt, Artificial Sequence
  Description of Artificial Sequence: Synthetic oligonucleotide
ggcaggcacuaaaucuagu

SEQ ID NO: 2132097 - RNA, 19 nt, Artificial Sequence
  Description of Artificial Sequence: Synthetic oligonucleotide
ggcuuagggcucauucuuu

SEQ ID NO: 2132098 - RNA, 19 nt, Artificial Sequence
  Description of Artificial Sequence: Synthetic oligonucleotide
gccuaacuccuuggccaca

SEQ ID NO: 2132099 - RNA, 19 nt, Artificial Sequence
  Description of Artificial Sequence: Synthetic oligonucleotide
cggacauuuucugagucau

SEQ ID NO: 2132100 - RNA, 19 nt, Artificial Sequence
  Description of Artificial Sequence: Synthetic oligonucleotide
ggugucuuucucggacauu

SEQ ID NO: 2132101 - RNA, 19 nt, Artificial Sequence
  Description of Artificial Sequence: Synthetic oligonucleotide
ccccacuaugugcucuugu

SEQ ID NO: 2132102 - RNA, 19 nt, Artificial Sequence
  Description of Artificial Sequence: Synthetic oligonucleotide
gcucuuguucugcccuguu

SEQ ID NO: 2132103 - RNA, 19 nt, Artificial Sequence
  Description of Artificial Sequence: Synthetic oligonucleotide
gccacacgcuuuagauuuu

SEQ ID NO: 2132104 - RNA, 19 nt, Artificial Sequence
  Description of Artificial Sequence: Synthetic oligonucleotide
aaggauaagaggcugacag

SEQ ID NO: 2132105 - RNA, 19 nt, Artificial Sequence
  Description of Artificial Sequence: Synthetic oligonucleotide
guaacuaaggauaagaggc

SEQ ID NO: 2132106 - RNA, 19 nt, Artificial Sequence
  Description of Artificial Sequence: Synthetic oligonucleotide
auuggauuuaggcauuucc

SEQ ID NO: 2132107 - RNA, 19 nt, Artificial Sequence
  Description of Artificial Sequence: Synthetic oligonucleotide
aaagggugaggucugaccg

SEQ ID NO: 2132108 - RNA, 19 nt, Artificial Sequence
  Description of Artificial Sequence: Synthetic oligonucleotide
aacagagaguaagagagcc

SEQ ID NO: 2132109 - RNA, 19 nt, Artificial Sequence
  Description of Artificial Sequence: Synthetic oligonucleotide
aguaucagagucuuccucc

SEQ ID NO: 2132110 - RNA, 19 nt, Artificial Sequence
  Description of Artificial Sequence: Synthetic oligonucleotide
ucuuccuccaauaaggccc

SEQ ID NO: 2132111 - RNA, 19 nt, Artificial Sequence
  Description of Artificial Sequence: Synthetic oligonucleotide
guaacagagaguaagagag

SEQ ID NO: 2132112 - RNA, 19 nt, Artificial Sequence
  Description of Artificial Sequence: Synthetic oligonucleotide
uauagaacucccuggaggg

SEQ ID NO: 2132113 - RNA, 19 nt, Artificial Sequence
  Description of Artificial Sequence: Synthetic oligonucleotide
gaagucauuggauuuaggc

SEQ ID NO: 2132114 - RNA, 19 nt, Artificial Sequence
  Description of Artificial Sequence: Synthetic oligonucleotide
agugugugcagacacaagg

SEQ ID NO: 2132115 - RNA, 19 nt, Artificial Sequence
  Description of Artificial Sequence: Synthetic oligonucleotide
uuagcugacaugaaaguga

SEQ ID NO: 2132116 - RNA, 19 nt, Artificial Sequence
  Description of Artificial Sequence: Synthetic oligonucleotide
cacaauaagguaaagggug

SEQ ID NO: 2132117 - RNA, 19 nt, Artificial Sequence
  Description of Artificial Sequence: Synthetic oligonucleotide
aagucauuggauuuaggca

SEQ ID NO: 2132118 - RNA, 19 nt, Artificial Sequence
  Description of Artificial Sequence: Synthetic oligonucleotide
ugugguaacagagaguaag

SEQ ID NO: 2132119 - RNA, 19 nt, Artificial Sequence
  Description of Artificial Sequence: Synthetic oligonucleotide
acaaggaacaguccagggc

SEQ ID NO: 2132120 - RNA, 19 nt, Artificial Sequence
  Description of Artificial Sequence: Synthetic oligonucleotide
aaagugaagguaacuaagg

SEQ ID NO: 2132121 - RNA, 19 nt, Artificial Sequence
  Description of Artificial Sequence: Synthetic oligonucleotide
auaagaggcugacagcagc

SEQ ID NO: 2132122 - RNA, 19 nt, Artificial Sequence
  Description of Artificial Sequence: Synthetic oligonucleotide
ugugcagacacaaggaaca

SEQ ID NO: 2132123 - RNA, 19 nt, Artificial Sequence
  Description of Artificial Sequence: Synthetic oligonucleotide
gccacaauaagguaaaggg

SEQ ID NO: 2132124 - RNA, 19 nt, Artificial Sequence
  Description of Artificial Sequence: Synthetic oligonucleotide
ugucccuucagacacuuag

SEQ ID NO: 2132125 - RNA, 19 nt, Artificial Sequence
  Description of Artificial Sequence: Synthetic oligonucleotide
uaaagccacaauaagguaa

SEQ ID NO: 2132126 - RNA, 19 nt, Artificial Sequence
  Description of Artificial Sequence: Synthetic oligonucleotide
uucaugucccuucagacac

SEQ ID NO: 2132127 - RNA, 19 nt, Artificial Sequence
  Description of Artificial Sequence: Synthetic oligonucleotide
cuauagaacucccuggagg

SEQ ID NO: 2132128 - RNA, 19 nt, Artificial Sequence
  Description of Artificial Sequence: Synthetic oligonucleotide
uugaguaucagagucuucc

SEQ ID NO: 2132129 - RNA, 19 nt, Artificial Sequence
  Description of Artificial Sequence: Synthetic oligonucleotide
gaaccaacaguacuguugc

SEQ ID NO: 2132130 - RNA, 19 nt, Artificial Sequence
  Description of Artificial Sequence: Synthetic oligonucleotide
aguacuguugcuguggagg

SEQ ID NO: 2132131 - RNA, 19 nt, Artificial Sequence
  Description of Artificial Sequence: Synthetic oligonucleotide
gagucuuccuccaauaagg

SEQ ID NO: 2132132 - RNA, 19 nt, Artificial Sequence
  Description of Artificial Sequence: Synthetic oligonucleotide
aauaagguaaagggugagg

SEQ ID NO: 2132133 - RNA, 19 nt, Artificial Sequence
  Description of Artificial Sequence: Synthetic oligonucleotide
uuuaggcauuuccucagcg

SEQ ID NO: 2132134 - RNA, 19 nt, Artificial Sequence
  Description of Artificial Sequence: Synthetic oligonucleotide
gagcccuaaauucugaggc

SEQ ID NO: 2132135 - RNA, 19 nt, Artificial Sequence
  Description of Artificial Sequence: Synthetic oligonucleotide
uccaauaaggcccgggcag

SEQ ID NO: 2132136 - RNA, 19 nt, Artificial Sequence
  Description of Artificial Sequence: Synthetic oligonucleotide
agucauuggauuuaggcau

SEQ ID NO: 2132137 - RNA, 19 nt, Artificial Sequence
  Description of Artificial Sequence: Synthetic oligonucleotide
gguaacuaaggauaagagg

SEQ ID NO: 2132138 - RNA, 19 nt, Artificial Sequence
  Description of Artificial Sequence: Synthetic oligonucleotide
aagguaaagggugaggucu

SEQ ID NO: 2132139 - RNA, 19 nt, Artificial Sequence
  Description of Artificial Sequence: Synthetic oligonucleotide
aagagagccaugcauugug

SEQ ID NO: 2132140 - RNA, 19 nt, Artificial Sequence
  Description of Artificial Sequence: Synthetic oligonucleotide
gaaagugaagguaacuaag

SEQ ID NO: 2132141 - RNA, 19 nt, Artificial Sequence
  Description of Artificial Sequence: Synthetic oligonucleotide
aagguaacuaaggauaaga

SEQ ID NO: 2132142 - RNA, 19 nt, Artificial Sequence
  Description of Artificial Sequence: Synthetic oligonucleotide
aagugaagguaacuaagga

SEQ ID NO: 2132143 - RNA, 19 nt, Artificial Sequence
  Description of Artificial Sequence: Synthetic oligonucleotide
agagccaugcauuguggcc

SEQ ID NO: 2132144 - RNA, 19 nt, Artificial Sequence
  Description of Artificial Sequence: Synthetic oligonucleotide
gcugacaugaaagugaagg

SEQ ID NO: 2132145 - RNA, 19 nt, Artificial Sequence
  Description of Artificial Sequence: Synthetic oligonucleotide
gauuuaggcauuuccucag

SEQ ID NO: 2132146 - RNA, 19 nt, Artificial Sequence
  Description of Artificial Sequence: Synthetic oligonucleotide
ugugugaggaagucauugg

SEQ ID NO: 2132147 - RNA, 19 nt, Artificial Sequence
  Description of Artificial Sequence: Synthetic oligonucleotide
uuggauuuaggcauuuccu

SEQ ID NO: 2132148 - RNA, 19 nt, Artificial Sequence
  Description of Artificial Sequence: Synthetic oligonucleotide
aacaguacuguugcugugg

SEQ ID NO: 2132149 - RNA, 19 nt, Artificial Sequence
  Description of Artificial Sequence: Synthetic oligonucleotide
ucaccauugucccucacca

SEQ ID NO: 2132150 - RNA, 19 nt, Artificial Sequence
  Description of Artificial Sequence: Synthetic oligonucleotide
ugaaagugaagguaacuaa

SEQ ID NO: 2132151 - RNA, 19 nt, Artificial Sequence
  Description of Artificial Sequence: Synthetic oligonucleotide
gcugacagcagcuaaagcc

SEQ ID NO: 2132152 - RNA, 19 nt, Artificial Sequence
  Description of Artificial Sequence: Synthetic oligonucleotide
uccuccagaaccaacagua

SEQ ID NO: 2132153 - RNA, 19 nt, Artificial Sequence
  Description of Artificial Sequence: Synthetic oligonucleotide
agcuaaagccacaauaagg

SEQ ID NO: 2132154 - RNA, 19 nt, Artificial Sequence
  Description of Artificial Sequence: Synthetic oligonucleotide
gagaguaagagagccaugc

SEQ ID NO: 2132155 - RNA, 19 nt, Artificial Sequence
  Description of Artificial Sequence: Synthetic oligonucleotide
auugucccucaccaggacc

SEQ ID NO: 2132156 - RNA, 19 nt, Artificial Sequence
  Description of Artificial Sequence: Synthetic oligonucleotide
caccuguugaguaucagag

SEQ ID NO: 2132157 - RNA, 19 nt, Artificial Sequence
  Description of Artificial Sequence: Synthetic oligonucleotide
ugagcccuaaauucugagg

SEQ ID NO: 2132158 - RNA, 19 nt, Artificial Sequence
  Description of Artificial Sequence: Synthetic oligonucleotide
guccucauccuccagaacc

SEQ ID NO: 2132159 - RNA, 19 nt, Artificial Sequence
  Description of Artificial Sequence: Synthetic oligonucleotide
aggauaagaggcugacagc

SEQ ID NO: 2132160 - RNA, 19 nt, Artificial Sequence
  Description of Artificial Sequence: Synthetic oligonucleotide
auuuaggcauuuccucagc

SEQ ID NO: 2132161 - RNA, 19 nt, Artificial Sequence
  Description of Artificial Sequence: Synthetic oligonucleotide
agagucuuccuccaauaag

SEQ ID NO: 2132162 - RNA, 19 nt, Artificial Sequence
  Description of Artificial Sequence: Synthetic oligonucleotide
ucuucaugucccuucagac

SEQ ID NO: 2132163 - RNA, 19 nt, Artificial Sequence
  Description of Artificial Sequence: Synthetic oligonucleotide
agugaagguaacuaaggau

SEQ ID NO: 2132164 - RNA, 19 nt, Artificial Sequence
  Description of Artificial Sequence: Synthetic oligonucleotide
ugaagguaacuaaggauaa

SEQ ID NO: 2132165 - RNA, 19 nt, Artificial Sequence
  Description of Artificial Sequence: Synthetic oligonucleotide
auaagguaaagggugaggu

SEQ ID NO: 2132166 - RNA, 19 nt, Artificial Sequence
  Description of Artificial Sequence: Synthetic oligonucleotide
uaacuaaggauaagaggcu

SEQ ID NO: 2132167 - RNA, 19 nt, Artificial Sequence
  Description of Artificial Sequence: Synthetic oligonucleotide
agacacaaggaacagucca

SEQ ID NO: 2132168 - RNA, 19 nt, Artificial Sequence
  Description of Artificial Sequence: Synthetic oligonucleotide
gaagggucaccauuguccc

SEQ ID NO: 2132169 - RNA, 19 nt, Artificial Sequence
  Description of Artificial Sequence: Synthetic oligonucleotide
ugguaguuugucuauggcu

SEQ ID NO: 2132170 - RNA, 19 nt, Artificial Sequence
  Description of Artificial Sequence: Synthetic oligonucleotide
agcccuaaauucugaggcc

SEQ ID NO: 2132171 - RNA, 19 nt, Artificial Sequence
  Description of Artificial Sequence: Synthetic oligonucleotide
accaucuucaugucccuuc

SEQ ID NO: 2132172 - RNA, 19 nt, Artificial Sequence
  Description of Artificial Sequence: Synthetic oligonucleotide
ucagcagcuauagaacucc

SEQ ID NO: 2132173 - RNA, 19 nt, Artificial Sequence
  Description of Artificial Sequence: Synthetic oligonucleotide
agacacuuagcugacauga

SEQ ID NO: 2132174 - RNA, 19 nt, Artificial Sequence
  Description of Artificial Sequence: Synthetic oligonucleotide
ucagacacuuagcugacau

SEQ ID NO: 2132175 - RNA, 19 nt, Artificial Sequence
  Description of Artificial Sequence: Synthetic oligonucleotide
ggucugaccgcucaggagg

SEQ ID NO: 2132176 - RNA, 19 nt, Artificial Sequence
  Description of Artificial Sequence: Synthetic oligonucleotide
aacuaaggauaagaggcug

SEQ ID NO: 2132177 - RNA, 19 nt, Artificial Sequence
  Description of Artificial Sequence: Synthetic oligonucleotide
uggauuuaggcauuuccuc

SEQ ID NO: 2132178 - RNA, 19 nt, Artificial Sequence
  Description of Artificial Sequence: Synthetic oligonucleotide
aauaaggcccgggcagugc

SEQ ID NO: 2132179 - RNA, 19 nt, Artificial Sequence
  Description of Artificial Sequence: Synthetic oligonucleotide
agaaccaacaguacuguug

SEQ ID NO: 2132180 - RNA, 19 nt, Artificial Sequence
  Description of Artificial Sequence: Synthetic oligonucleotide
uugucccucaccaggacca

SEQ ID NO: 2132181 - RNA, 19 nt, Artificial Sequence
  Description of Artificial Sequence: Synthetic oligonucleotide
ugugaggaagucauuggau

SEQ ID NO: 2132182 - RNA, 19 nt, Artificial Sequence
  Description of Artificial Sequence: Synthetic oligonucleotide
guaagagagccaugcauug

SEQ ID NO: 2132183 - RNA, 19 nt, Artificial Sequence
  Description of Artificial Sequence: Synthetic oligonucleotide
uccacagcugucaccuugg

SEQ ID NO: 2132184 - RNA, 19 nt, Artificial Sequence
  Description of Artificial Sequence: Synthetic oligonucleotide
agcagcuaaagccacaaua

SEQ ID NO: 2132185 - RNA, 19 nt, Artificial Sequence
  Description of Artificial Sequence: Synthetic oligonucleotide
uggaggacagugaaggguc

SEQ ID NO: 2132186 - RNA, 19 nt, Artificial Sequence
  Description of Artificial Sequence: Synthetic oligonucleotide
ucccuucagacacuuagcu

SEQ ID NO: 2132187 - RNA, 19 nt, Artificial Sequence
  Description of Artificial Sequence: Synthetic oligonucleotide
ugugugcagacacaaggaa

SEQ ID NO: 2132188 - RNA, 19 nt, Artificial Sequence
  Description of Artificial Sequence: Synthetic oligonucleotide
uggggugagcccuaaauuc

SEQ ID NO: 2132189 - RNA, 19 nt, Artificial Sequence
  Description of Artificial Sequence: Synthetic oligonucleotide
aggaccaccaccuguugag

SEQ ID NO: 2132190 - RNA, 19 nt, Artificial Sequence
  Description of Artificial Sequence: Synthetic oligonucleotide
uaacagagaguaagagagc

SEQ ID NO: 2132191 - RNA, 19 nt, Artificial Sequence
  Description of Artificial Sequence: Synthetic oligonucleotide
aguccuggccccuacagca

SEQ ID NO: 2132192 - RNA, 19 nt, Artificial Sequence
  Description of Artificial Sequence: Synthetic oligonucleotide
uggacugugguaacagaga

SEQ ID NO: 2132193 - RNA, 19 nt, Artificial Sequence
  Description of Artificial Sequence: Synthetic oligonucleotide
ugguaacagagaguaagag

SEQ ID NO: 2132194 - RNA, 19 nt, Artificial Sequence
  Description of Artificial Sequence: Synthetic oligonucleotide
guugcuguggaggacagug

SEQ ID NO: 2132195 - RNA, 19 nt, Artificial Sequence
  Description of Artificial Sequence: Synthetic oligonucleotide
agcuauagaacucccugga

SEQ ID NO: 2132196 - RNA, 19 nt, Artificial Sequence
  Description of Artificial Sequence: Synthetic oligonucleotide
auaaggcccgggcagugcg

SEQ ID NO: 2132197 - RNA, 19 nt, Artificial Sequence
  Description of Artificial Sequence: Synthetic oligonucleotide
uuuguccaggcuccuacca

SEQ ID NO: 2132198 - RNA, 19 nt, Artificial Sequence
  Description of Artificial Sequence: Synthetic oligonucleotide
ugaguccuggccccuacag

SEQ ID NO: 2132199 - RNA, 19 nt, Artificial Sequence
  Description of Artificial Sequence: Synthetic oligonucleotide
gucaccaucuucauguccc

SEQ ID NO: 2132200 - RNA, 19 nt, Artificial Sequence
  Description of Artificial Sequence: Synthetic oligonucleotide
agccacaauaagguaaagg

SEQ ID NO: 2132201 - RNA, 19 nt, Artificial Sequence
  Description of Artificial Sequence: Synthetic oligonucleotide
uaagaggcugacagcagcu

SEQ ID NO: 2132202 - RNA, 19 nt, Artificial Sequence
  Description of Artificial Sequence: Synthetic oligonucleotide
cagcuauagaacucccugg

SEQ ID NO: 2132203 - RNA, 19 nt, Artificial Sequence
  Description of Artificial Sequence: Synthetic oligonucleotide
aaagccacaauaagguaaa

SEQ ID NO: 2132204 - RNA, 19 nt, Artificial Sequence
  Description of Artificial Sequence: Synthetic oligonucleotide
uguggaggacagugaaggg

SEQ ID NO: 2132205 - RNA, 19 nt, Artificial Sequence
  Description of Artificial Sequence: Synthetic oligonucleotide
uggagggugaguccuggcc

SEQ ID NO: 2132206 - RNA, 19 nt, Artificial Sequence
  Description of Artificial Sequence: Synthetic oligonucleotide
gacacaaggaacaguccag

SEQ ID NO: 2132207 - RNA, 19 nt, Artificial Sequence
  Description of Artificial Sequence: Synthetic oligonucleotide
augcauuguggccugcauc

SEQ ID NO: 2132208 - RNA, 19 nt, Artificial Sequence
  Description of Artificial Sequence: Synthetic oligonucleotide
agcauccacagcugucacc

SEQ ID NO: 2132209 - RNA, 19 nt, Artificial Sequence
  Description of Artificial Sequence: Synthetic oligonucleotide
aucuucaugucccuucaga

SEQ ID NO: 2132210 - RNA, 19 nt, Artificial Sequence
  Description of Artificial Sequence: Synthetic oligonucleotide
uuaggcauuuccucagcgu

SEQ ID NO: 2132211 - RNA, 19 nt, Artificial Sequence
  Description of Artificial Sequence: Synthetic oligonucleotide
ucagcauccacagcuguca

SEQ ID NO: 2132212 - RNA, 19 nt, Artificial Sequence
  Description of Artificial Sequence: Synthetic oligonucleotide
cuuccuccaauaaggcccg

SEQ ID NO: 2132213 - RNA, 19 nt, Artificial Sequence
  Description of Artificial Sequence: Synthetic oligonucleotide
ugacaugaaagugaaggua

SEQ ID NO: 2132214 - RNA, 19 nt, Artificial Sequence
  Description of Artificial Sequence: Synthetic oligonucleotide
agguaacuaaggauaagag

SEQ ID NO: 2132215 - RNA, 19 nt, Artificial Sequence
  Description of Artificial Sequence: Synthetic oligonucleotide
agucuuccuccaauaaggc

SEQ ID NO: 2132216 - RNA, 19 nt, Artificial Sequence
  Description of Artificial Sequence: Synthetic oligonucleotide
uccucauccuccagaacca

SEQ ID NO: 2132217 - RNA, 19 nt, Artificial Sequence
  Description of Artificial Sequence: Synthetic oligonucleotide
ugaggaagucauuggauuu

SEQ ID NO: 2132218 - RNA, 19 nt, Artificial Sequence
  Description of Artificial Sequence: Synthetic oligonucleotide
guuuuguccaggcuccuac

SEQ ID NO: 2132219 - RNA, 19 nt, Artificial Sequence
  Description of Artificial Sequence: Synthetic oligonucleotide
gugaagguaacuaaggaua

SEQ ID NO: 2132220 - RNA, 19 nt, Artificial Sequence
  Description of Artificial Sequence: Synthetic oligonucleotide
cugacagcagcuaaagcca

SEQ ID NO: 2132221 - RNA, 19 nt, Artificial Sequence
  Description of Artificial Sequence: Synthetic oligonucleotide
cacaaggaacaguccaggg

SEQ ID NO: 2132222 - RNA, 19 nt, Artificial Sequence
  Description of Artificial Sequence: Synthetic oligonucleotide
cagugaagggucaccauug

SEQ ID NO: 2132223 - RNA, 19 nt, Artificial Sequence
  Description of Artificial Sequence: Synthetic oligonucleotide
uaagguaaagggugagguc

SEQ ID NO: 2132224 - RNA, 19 nt, Artificial Sequence
  Description of Artificial Sequence: Synthetic oligonucleotide
acacaaggaacaguccagg

SEQ ID NO: 2132225 - RNA, 19 nt, Artificial Sequence
  Description of Artificial Sequence: Synthetic oligonucleotide
augaaagugaagguaacua

SEQ ID NO: 2132226 - RNA, 19 nt, Artificial Sequence
  Description of Artificial Sequence: Synthetic oligonucleotide
uuuuguccaggcuccuacc

SEQ ID NO: 2132227 - RNA, 19 nt, Artificial Sequence
  Description of Artificial Sequence: Synthetic oligonucleotide
accaacaguacuguugcug

SEQ ID NO: 2132228 - RNA, 19 nt, Artificial Sequence
  Description of Artificial Sequence: Synthetic oligonucleotide
gguaacagagaguaagaga

SEQ ID NO: 2132229 - RNA, 19 nt, Artificial Sequence
  Description of Artificial Sequence: Synthetic oligonucleotide
ugaguaucagagucuuccu

SEQ ID NO: 2132230 - RNA, 19 nt, Artificial Sequence
  Description of Artificial Sequence: Synthetic oligonucleotide
guggacugugguaacagag

SEQ ID NO: 2132231 - RNA, 19 nt, Artificial Sequence
  Description of Artificial Sequence: Synthetic oligonucleotide
ggacugugguaacagagag

SEQ ID NO: 2132232 - RNA, 19 nt, Artificial Sequence
  Description of Artificial Sequence: Synthetic oligonucleotide
ugcuguggaggacagugaa

SEQ ID NO: 2132233 - RNA, 19 nt, Artificial Sequence
  Description of Artificial Sequence: Synthetic oligonucleotide
gaagguaacuaaggauaag

SEQ ID NO: 2132234 - RNA, 19 nt, Artificial Sequence
  Description of Artificial Sequence: Synthetic oligonucleotide
ucaccuuggugaccaaaga

SEQ ID NO: 2132235 - RNA, 19 nt, Artificial Sequence
  Description of Artificial Sequence: Synthetic oligonucleotide
gauaagaggcugacagcag

SEQ ID NO: 2132236 - RNA, 19 nt, Artificial Sequence
  Description of Artificial Sequence: Synthetic oligonucleotide
ucaggagggugugugagga

SEQ ID NO: 2132237 - RNA, 19 nt, Artificial Sequence
  Description of Artificial Sequence: Synthetic oligonucleotide
acucccuggagggugaguc

SEQ ID NO: 2132238 - RNA, 19 nt, Artificial Sequence
  Description of Artificial Sequence: Synthetic oligonucleotide
ugaggucugaccgcucagg

SEQ ID NO: 2132239 - RNA, 19 nt, Artificial Sequence
  Description of Artificial Sequence: Synthetic oligonucleotide
gcagcuauagaacucccug

SEQ ID NO: 2132240 - RNA, 19 nt, Artificial Sequence
  Description of Artificial Sequence: Synthetic oligonucleotide
aggacagugaagggucacc

SEQ ID NO: 2132241 - RNA, 19 nt, Artificial Sequence
  Description of Artificial Sequence: Synthetic oligonucleotide
agggucaccauugucccuc

SEQ ID NO: 2132242 - RNA, 19 nt, Artificial Sequence
  Description of Artificial Sequence: Synthetic oligonucleotide
acacuuagcugacaugaaa

SEQ ID NO: 2132243 - RNA, 19 nt, Artificial Sequence
  Description of Artificial Sequence: Synthetic oligonucleotide
ccuucagacacuuagcuga

SEQ ID NO: 2132244 - RNA, 19 nt, Artificial Sequence
  Description of Artificial Sequence: Synthetic oligonucleotide
ucccucaccaggaccacca

SEQ ID NO: 2132245 - RNA, 19 nt, Artificial Sequence
  Description of Artificial Sequence: Synthetic oligonucleotide
cuaaggauaagaggcugac

SEQ ID NO: 2132246 - RNA, 19 nt, Artificial Sequence
  Description of Artificial Sequence: Synthetic oligonucleotide
gucaccauugucccucacc

SEQ ID NO: 2132247 - RNA, 19 nt, Artificial Sequence
  Description of Artificial Sequence: Synthetic oligonucleotide
aguaagagagccaugcauu

SEQ ID NO: 2132248 - RNA, 19 nt, Artificial Sequence
  Description of Artificial Sequence: Synthetic oligonucleotide
ccuguugaguaucagaguc

SEQ ID NO: 2132249 - RNA, 19 nt, Artificial Sequence
  Description of Artificial Sequence: Synthetic oligonucleotide
cugguaguuugucuauggc

SEQ ID NO: 2132250 - RNA, 19 nt, Artificial Sequence
  Description of Artificial Sequence: Synthetic oligonucleotide
auccacagcugucaccuug

SEQ ID NO: 2132251 - RNA, 19 nt, Artificial Sequence
  Description of Artificial Sequence: Synthetic oligonucleotide
acagugaagggucaccauu

SEQ ID NO: 2132252 - RNA, 19 nt, Artificial Sequence
  Description of Artificial Sequence: Synthetic oligonucleotide
gugugugaggaagucauug

SEQ ID NO: 2132253 - RNA, 19 nt, Artificial Sequence
  Description of Artificial Sequence: Synthetic oligonucleotide
acaauaagguaaaggguga

SEQ ID NO: 2132254 - RNA, 19 nt, Artificial Sequence
  Description of Artificial Sequence: Synthetic oligonucleotide
gucuuccuccaauaaggcc

SEQ ID NO: 2132255 - RNA, 19 nt, Artificial Sequence
  Description of Artificial Sequence: Synthetic oligonucleotide
gccccuacagcacugaccc

SEQ ID NO: 2132256 - RNA, 19 nt, Artificial Sequence
  Description of Artificial Sequence: Synthetic oligonucleotide
uguugaguaucagagucuu

SEQ ID NO: 2132257 - RNA, 19 nt, Artificial Sequence
  Description of Artificial Sequence: Synthetic oligonucleotide
ggauuuaggcauuuccuca

SEQ ID NO: 2132258 - RNA, 19 nt, Artificial Sequence
  Description of Artificial Sequence: Synthetic oligonucleotide
uguccaggcuccuaccagu

SEQ ID NO: 2132259 - RNA, 19 nt, Artificial Sequence
  Description of Artificial Sequence: Synthetic oligonucleotide
aggcauuuccucagcgucc

SEQ ID NO: 2132260 - RNA, 19 nt, Artificial Sequence
  Description of Artificial Sequence: Synthetic oligonucleotide
agaguaagagagccaugca

SEQ ID NO: 2132261 - RNA, 19 nt, Artificial Sequence
  Description of Artificial Sequence: Synthetic oligonucleotide
ucagagucuuccuccaaua

SEQ ID NO: 2132262 - RNA, 19 nt, Artificial Sequence
  Description of Artificial Sequence: Synthetic oligonucleotide
aucagcagcuauagaacuc

SEQ ID NO: 2132263 - RNA, 19 nt, Artificial Sequence
  Description of Artificial Sequence: Synthetic oligonucleotide
uguggacugugguaacaga

SEQ ID NO: 2132264 - RNA, 19 nt, Artificial Sequence
  Description of Artificial Sequence: Synthetic oligonucleotide
gucaccuuggugaccaaag

SEQ ID NO: 2132265 - RNA, 19 nt, Artificial Sequence
  Description of Artificial Sequence: Synthetic oligonucleotide
aggagggugugugaggaag

SEQ ID NO: 2132266 - RNA, 19 nt, Artificial Sequence
  Description of Artificial Sequence: Synthetic oligonucleotide
ggauaagaggcugacagca

SEQ ID NO: 2132267 - RNA, 19 nt, Artificial Sequence
  Description of Artificial Sequence: Synthetic oligonucleotide
caaggaacaguccagggcu

SEQ ID NO: 2132268 - RNA, 19 nt, Artificial Sequence
  Description of Artificial Sequence: Synthetic oligonucleotide
cuucaugucccuucagaca

SEQ ID NO: 2132269 - RNA, 19 nt, Artificial Sequence
  Description of Artificial Sequence: Synthetic oligonucleotide
auuguggccugcaucagca

SEQ ID NO: 2132270 - RNA, 19 nt, Artificial Sequence
  Description of Artificial Sequence: Synthetic oligonucleotide
acuguugcuguggaggaca

SEQ ID NO: 2132271 - RNA, 19 nt, Artificial Sequence
  Description of Artificial Sequence: Synthetic oligonucleotide
caauaagguaaagggugag

SEQ ID NO: 2132272 - RNA, 19 nt, Artificial Sequence
  Description of Artificial Sequence: Synthetic oligonucleotide
gugagcccuaaauucugag

SEQ ID NO: 2132273 - RNA, 19 nt, Artificial Sequence
  Description of Artificial Sequence: Synthetic oligonucleotide
aggaagucauuggauuuag

SEQ ID NO: 2132274 - RNA, 19 nt, Artificial Sequence
  Description of Artificial Sequence: Synthetic oligonucleotide
cucaggagggugugugagg

SEQ ID NO: 2132275 - RNA, 19 nt, Artificial Sequence
  Description of Artificial Sequence: Synthetic oligonucleotide
uaaggauaagaggcugaca

SEQ ID NO: 2132276 - RNA, 19 nt, Artificial Sequence
  Description of Artificial Sequence: Synthetic oligonucleotide
gaguaagagagccaugcau

SEQ ID NO: 2132277 - RNA, 19 nt, Artificial Sequence
  Description of Artificial Sequence: Synthetic oligonucleotide
gugugaggaagucauugga

SEQ ID NO: 2132278 - RNA, 19 nt, Artificial Sequence
  Description of Artificial Sequence: Synthetic oligonucleotide
gagggugaguccuggcccc

SEQ ID NO: 2132279 - RNA, 19 nt, Artificial Sequence
  Description of Artificial Sequence: Synthetic oligonucleotide
cuucagacacuuagcugac

SEQ ID NO: 2132280 - RNA, 19 nt, Artificial Sequence
  Description of Artificial Sequence: Synthetic oligonucleotide
acaguacuguugcugugga

SEQ ID NO: 2132281 - RNA, 19 nt, Artificial Sequence
  Description of Artificial Sequence: Synthetic oligonucleotide
agugaagggucaccauugu

SEQ ID NO: 2132282 - RNA, 19 nt, Artificial Sequence
  Description of Artificial Sequence: Synthetic oligonucleotide
caccagugugugcagacac

SEQ ID NO: 2132283 - RNA, 19 nt, Artificial Sequence
  Description of Artificial Sequence: Synthetic oligonucleotide
aggucugaccgcucaggag

SEQ ID NO: 2132284 - RNA, 19 nt, Artificial Sequence
  Description of Artificial Sequence: Synthetic oligonucleotide
ucagcguccucauccucca

SEQ ID NO: 2132285 - RNA, 19 nt, Artificial Sequence
  Description of Artificial Sequence: Synthetic oligonucleotide
gcagacacaaggaacaguc

SEQ ID NO: 2132286 - RNA, 19 nt, Artificial Sequence
  Description of Artificial Sequence: Synthetic oligonucleotide
guggccugcaucagcaucc

SEQ ID NO: 2132287 - RNA, 19 nt, Artificial Sequence
  Description of Artificial Sequence: Synthetic oligonucleotide
accuguugaguaucagagu

SEQ ID NO: 2132288 - RNA, 19 nt, Artificial Sequence
  Description of Artificial Sequence: Synthetic oligonucleotide
ccugguaguuugucuaugg

SEQ ID NO: 2132289 - RNA, 19 nt, Artificial Sequence
  Description of Artificial Sequence: Synthetic oligonucleotide
uaagagagccaugcauugu

SEQ ID NO: 2132290 - RNA, 19 nt, Artificial Sequence
  Description of Artificial Sequence: Synthetic oligonucleotide
uccuccaauaaggcccggg

SEQ ID NO: 2132291 - RNA, 19 nt, Artificial Sequence
  Description of Artificial Sequence: Synthetic oligonucleotide
acuaaggauaagaggcuga

SEQ ID NO: 2132292 - RNA, 19 nt, Artificial Sequence
  Description of Artificial Sequence: Synthetic oligonucleotide
uggccugguaguuugucua

SEQ ID NO: 2132293 - RNA, 19 nt, Artificial Sequence
  Description of Artificial Sequence: Synthetic oligonucleotide
gcuaaagccacaauaaggu

SEQ ID NO: 2132294 - RNA, 19 nt, Artificial Sequence
  Description of Artificial Sequence: Synthetic oligonucleotide
guaucagagucuuccucca

SEQ ID NO: 2132295 - RNA, 19 nt, Artificial Sequence
  Description of Artificial Sequence: Synthetic oligonucleotide
cucccaucagcagcuauag

SEQ ID NO: 2132296 - RNA, 19 nt, Artificial Sequence
  Description of Artificial Sequence: Synthetic oligonucleotide
uugcuguggaggacaguga

SEQ ID NO: 2132297 - RNA, 19 nt, Artificial Sequence
  Description of Artificial Sequence: Synthetic oligonucleotide
gaguccuggccccuacagc

SEQ ID NO: 2132298 - RNA, 19 nt, Artificial Sequence
  Description of Artificial Sequence: Synthetic oligonucleotide
guacuguugcuguggagga

SEQ ID NO: 2132299 - RNA, 19 nt, Artificial Sequence
  Description of Artificial Sequence: Synthetic oligonucleotide
ggagggugaguccuggccc

SEQ ID NO: 2132300 - RNA, 19 nt, Artificial Sequence
  Description of Artificial Sequence: Synthetic oligonucleotide
aucagcauccacagcuguc

SEQ ID NO: 2132301 - RNA, 19 nt, Artificial Sequence
  Description of Artificial Sequence: Synthetic oligonucleotide
ccaucagcagcuauagaac

SEQ ID NO: 2132302 - RNA, 19 nt, Artificial Sequence
  Description of Artificial Sequence: Synthetic oligonucleotide
gugugcagacacaaggaac

SEQ ID NO: 2132303 - RNA, 19 nt, Artificial Sequence
  Description of Artificial Sequence: Synthetic oligonucleotide
agaggcugacagcagcuaa

SEQ ID NO: 2132304 - RNA, 19 nt, Artificial Sequence
  Description of Artificial Sequence: Synthetic oligonucleotide
auccuccagaaccaacagu

SEQ ID NO: 2132305 - RNA, 19 nt, Artificial Sequence
  Description of Artificial Sequence: Synthetic oligonucleotide
gguaguuugucuauggcua

SEQ ID NO: 2132306 - RNA, 19 nt, Artificial Sequence
  Description of Artificial Sequence: Synthetic oligonucleotide
gcuauagaacucccuggag

SEQ ID NO: 2132307 - RNA, 19 nt, Artificial Sequence
  Description of Artificial Sequence: Synthetic oligonucleotide
aaccaacaguacuguugcu

SEQ ID NO: 2132308 - RNA, 19 nt, Artificial Sequence
  Description of Artificial Sequence: Synthetic oligonucleotide
cuguggacugugguaacag

SEQ ID NO: 2132309 - RNA, 19 nt, Artificial Sequence
  Description of Artificial Sequence: Synthetic oligonucleotide
auuuccucagcguccucau

SEQ ID NO: 2132310 - RNA, 19 nt, Artificial Sequence
  Description of Artificial Sequence: Synthetic oligonucleotide
ugaccgcucaggagggugu

SEQ ID NO: 2132311 - RNA, 19 nt, Artificial Sequence
  Description of Artificial Sequence: Synthetic oligonucleotide
cucauccuccagaaccaac

SEQ ID NO: 2132312 - RNA, 19 nt, Artificial Sequence
  Description of Artificial Sequence: Synthetic oligonucleotide
cagacacuuagcugacaug

SEQ ID NO: 2132313 - RNA, 19 nt, Artificial Sequence
  Description of Artificial Sequence: Synthetic oligonucleotide
uaucagagucuuccuccaa

SEQ ID NO: 2132314 - RNA, 19 nt, Artificial Sequence
  Description of Artificial Sequence: Synthetic oligonucleotide
gaggucugaccgcucagga

SEQ ID NO: 2132315 - RNA, 19 nt, Artificial Sequence
  Description of Artificial Sequence: Synthetic oligonucleotide
aagggucaccauugucccu

SEQ ID NO: 2132316 - RNA, 19 nt, Artificial Sequence
  Description of Artificial Sequence: Synthetic oligonucleotide
ugcagacacaaggaacagu

SEQ ID NO: 2132317 - RNA, 19 nt, Artificial Sequence
  Description of Artificial Sequence: Synthetic oligonucleotide
accaccaccuguugaguau

SEQ ID NO: 2132318 - RNA, 19 nt, Artificial Sequence
  Description of Artificial Sequence: Synthetic oligonucleotide
aggcugacagcagcuaaag

SEQ ID NO: 2132319 - RNA, 19 nt, Artificial Sequence
  Description of Artificial Sequence: Synthetic oligonucleotide
caacaguacuguugcugug

SEQ ID NO: 2132320 - RNA, 19 nt, Artificial Sequence
  Description of Artificial Sequence: Synthetic oligonucleotide
aagccacaauaagguaaag

SEQ ID NO: 2132321 - RNA, 19 nt, Artificial Sequence
  Description of Artificial Sequence: Synthetic oligonucleotide
auggugccagcgccccucc

SEQ ID NO: 2132322 - RNA, 19 nt, Artificial Sequence
  Description of Artificial Sequence: Synthetic oligonucleotide
aaggaacaguccagggcug

SEQ ID NO: 2132323 - RNA, 19 nt, Artificial Sequence
  Description of Artificial Sequence: Synthetic oligonucleotide
guaguuugucuauggcuaa

SEQ ID NO: 2132324 - RNA, 19 nt, Artificial Sequence
  Description of Artificial Sequence: Synthetic oligonucleotide
cuaaagccacaauaaggua

SEQ ID NO: 2132325 - RNA, 19 nt, Artificial Sequence
  Description of Artificial Sequence: Synthetic oligonucleotide
ucaugucccuucagacacu

SEQ ID NO: 2132326 - RNA, 19 nt, Artificial Sequence
  Description of Artificial Sequence: Synthetic oligonucleotide
uccucagcguccucauccu

SEQ ID NO: 2132327 - RNA, 19 nt, Artificial Sequence
  Description of Artificial Sequence: Synthetic oligonucleotide
cugacaugaaagugaaggu

SEQ ID NO: 2132328 - RNA, 19 nt, Artificial Sequence
  Description of Artificial Sequence: Synthetic oligonucleotide
gcagcuaaagccacaauaa

SEQ ID NO: 2132329 - RNA, 19 nt, Artificial Sequence
  Description of Artificial Sequence: Synthetic oligonucleotide
gugguaacagagaguaaga

SEQ ID NO: 2132330 - RNA, 19 nt, Artificial Sequence
  Description of Artificial Sequence: Synthetic oligonucleotide
ucaccaggaccaccaccug

SEQ ID NO: 2132331 - RNA, 19 nt, Artificial Sequence
  Description of Artificial Sequence: Synthetic oligonucleotide
caucagcagcuauagaacu

SEQ ID NO: 2132332 - RNA, 19 nt, Artificial Sequence
  Description of Artificial Sequence: Synthetic oligonucleotide
cacagcugucaccuuggug

SEQ ID NO: 2132333 - RNA, 19 nt, Artificial Sequence
  Description of Artificial Sequence: Synthetic oligonucleotide
cagcagcuauagaacuccc

SEQ ID NO: 2132334 - RNA, 19 nt, Artificial Sequence
  Description of Artificial Sequence: Synthetic oligonucleotide
uccuggccccuacagcacu

SEQ ID NO: 2132335 - RNA, 19 nt, Artificial Sequence
  Description of Artificial Sequence: Synthetic oligonucleotide
ucaccagugugugcagaca

SEQ ID NO: 2132336 - RNA, 19 nt, Artificial Sequence
  Description of Artificial Sequence: Synthetic oligonucleotide
uaaggcccgggcagugcgc

SEQ ID NO: 2132337 - RNA, 19 nt, Artificial Sequence
  Description of Artificial Sequence: Synthetic oligonucleotide
gaggaagucauuggauuua

SEQ ID NO: 2132338 - RNA, 19 nt, Artificial Sequence
  Description of Artificial Sequence: Synthetic oligonucleotide
gugugugcagacacaagga

SEQ ID NO: 2132339 - RNA, 19 nt, Artificial Sequence
  Description of Artificial Sequence: Synthetic oligonucleotide
cuccaauaaggcccgggca

SEQ ID NO: 2132340 - RNA, 19 nt, Artificial Sequence
  Description of Artificial Sequence: Synthetic oligonucleotide
ggucaccaucuucaugucc

SEQ ID NO: 2132341 - RNA, 19 nt, Artificial Sequence
  Description of Artificial Sequence: Synthetic oligonucleotide
cauuuccucagcguccuca

SEQ ID NO: 2132342 - RNA, 19 nt, Artificial Sequence
  Description of Artificial Sequence: Synthetic oligonucleotide
gucugaccgcucaggaggg

SEQ ID NO: 2132343 - RNA, 19 nt, Artificial Sequence
  Description of Artificial Sequence: Synthetic oligonucleotide
agggcuguggacuguggua

SEQ ID NO: 2132344 - RNA, 19 nt, Artificial Sequence
  Description of Artificial Sequence: Synthetic oligonucleotide
cauugucccucaccaggac

SEQ ID NO: 2132345 - RNA, 19 nt, Artificial Sequence
  Description of Artificial Sequence: Synthetic oligonucleotide
caccuuggugaccaaagaa

SEQ ID NO: 2132346 - RNA, 19 nt, Artificial Sequence
  Description of Artificial Sequence: Synthetic oligonucleotide
ccuccaauaaggcccgggc

SEQ ID NO: 2132347 - RNA, 19 nt, Artificial Sequence
  Description of Artificial Sequence: Synthetic oligonucleotide
ucccuggagggugaguccu

SEQ ID NO: 2132348 - RNA, 19 nt, Artificial Sequence
  Description of Artificial Sequence: Synthetic oligonucleotide
caccauugucccucaccag

SEQ ID NO: 2132349 - RNA, 19 nt, Artificial Sequence
  Description of Artificial Sequence: Synthetic oligonucleotide
caguacuguugcuguggag

SEQ ID NO: 2132350 - RNA, 19 nt, Artificial Sequence
  Description of Artificial Sequence: Synthetic oligonucleotide
ccuaaauucugaggccugg

SEQ ID NO: 2132351 - RNA, 19 nt, Artificial Sequence
  Description of Artificial Sequence: Synthetic oligonucleotide
gucccuucagacacuuagc

SEQ ID NO: 2132352 - RNA, 19 nt, Artificial Sequence
  Description of Artificial Sequence: Synthetic oligonucleotide
gugaggaagucauuggauu

SEQ ID NO: 2132353 - RNA, 19 nt, Artificial Sequence
  Description of Artificial Sequence: Synthetic oligonucleotide
agccaugcauuguggccug

SEQ ID NO: 2132354 - RNA, 19 nt, Artificial Sequence
  Description of Artificial Sequence: Synthetic oligonucleotide
gagccaugcauuguggccu

SEQ ID NO: 2132355 - RNA, 19 nt, Artificial Sequence
  Description of Artificial Sequence: Synthetic oligonucleotide
agcugucaccuuggugacc

SEQ ID NO: 2132356 - RNA, 19 nt, Artificial Sequence
  Description of Artificial Sequence: Synthetic oligonucleotide
ucccaucagcagcuauaga

SEQ ID NO: 2132357 - RNA, 19 nt, Artificial Sequence
  Description of Artificial Sequence: Synthetic oligonucleotide
guaaagggugaggucugac

SEQ ID NO: 2132358 - RNA, 19 nt, Artificial Sequence
  Description of Artificial Sequence: Synthetic oligonucleotide
agagaguaagagagccaug

SEQ ID NO: 2132359 - RNA, 19 nt, Artificial Sequence
  Description of Artificial Sequence: Synthetic oligonucleotide
uucagacacuuagcugaca

SEQ ID NO: 2132360 - RNA, 19 nt, Artificial Sequence
  Description of Artificial Sequence: Synthetic oligonucleotide
auagaacucccuggagggu

SEQ ID NO: 2132361 - RNA, 19 nt, Artificial Sequence
  Description of Artificial Sequence: Synthetic oligonucleotide
cagcugucaccuuggugac

SEQ ID NO: 2132362 - RNA, 19 nt, Artificial Sequence
  Description of Artificial Sequence: Synthetic oligonucleotide
ugucaccuuggugaccaaa

SEQ ID NO: 2132363 - RNA, 19 nt, Artificial Sequence
  Description of Artificial Sequence: Synthetic oligonucleotide
ggaagucauuggauuuagg

SEQ ID NO: 2132364 - RNA, 19 nt, Artificial Sequence
  Description of Artificial Sequence: Synthetic oligonucleotide
cagcgccccucccagagug

SEQ ID NO: 2132365 - RNA, 19 nt, Artificial Sequence
  Description of Artificial Sequence: Synthetic oligonucleotide
aagaggcugacagcagcua

SEQ ID NO: 2132366 - RNA, 19 nt, Artificial Sequence
  Description of Artificial Sequence: Synthetic oligonucleotide
accucaccagugugugcag

SEQ ID NO: 2132367 - RNA, 19 nt, Artificial Sequence
  Description of Artificial Sequence: Synthetic oligonucleotide
gagggugugugaggaaguc

SEQ ID NO: 2132368 - RNA, 19 nt, Artificial Sequence
  Description of Artificial Sequence: Synthetic oligonucleotide
gaggacagugaagggucac

SEQ ID NO: 2132369 - RNA, 19 nt, Artificial Sequence
  Description of Artificial Sequence: Synthetic oligonucleotide
ucauuggauuuaggcauuu

SEQ ID NO: 2132370 - RNA, 19 nt, Artificial Sequence
  Description of Artificial Sequence: Synthetic oligonucleotide
gggguggccugguaguuug

SEQ ID NO: 2132371 - RNA, 19 nt, Artificial Sequence
  Description of Artificial Sequence: Synthetic oligonucleotide
caauaaggcccgggcagug

SEQ ID NO: 2132372 - RNA, 19 nt, Artificial Sequence
  Description of Artificial Sequence: Synthetic oligonucleotide
uacuguugcuguggaggac

SEQ ID NO: 2132373 - RNA, 19 nt, Artificial Sequence
  Description of Artificial Sequence: Synthetic oligonucleotide
cauuggauuuaggcauuuc

SEQ ID NO: 2132374 - RNA, 19 nt, Artificial Sequence
  Description of Artificial Sequence: Synthetic oligonucleotide
gaccaccaccuguugagua

SEQ ID NO: 2132375 - RNA, 19 nt, Artificial Sequence
  Description of Artificial Sequence: Synthetic oligonucleotide
cuccagaaccaacaguacu

SEQ ID NO: 2132376 - RNA, 19 nt, Artificial Sequence
  Description of Artificial Sequence: Synthetic oligonucleotide
agggugugugaggaaguca

SEQ ID NO: 2132377 - RNA, 19 nt, Artificial Sequence
  Description of Artificial Sequence: Synthetic oligonucleotide
aaggcccgggcagugcgca

SEQ ID NO: 2132378 - RNA, 19 nt, Artificial Sequence
  Description of Artificial Sequence: Synthetic oligonucleotide
uccaggcuccuaccaguau

SEQ ID NO: 2132379 - RNA, 19 nt, Artificial Sequence
  Description of Artificial Sequence: Synthetic oligonucleotide
uguuuuguccaggcuccua

SEQ ID NO: 2132380 - RNA, 19 nt, Artificial Sequence
  Description of Artificial Sequence: Synthetic oligonucleotide
cuguugaguaucagagucu

SEQ ID NO: 2132381 - RNA, 19 nt, Artificial Sequence
  Description of Artificial Sequence: Synthetic oligonucleotide
cugaccgcucaggagggug

SEQ ID NO: 2132382 - RNA, 19 nt, Artificial Sequence
  Description of Artificial Sequence: Synthetic oligonucleotide
gugccagcgccccucccag

SEQ ID NO: 2132383 - RNA, 19 nt, Artificial Sequence
  Description of Artificial Sequence: Synthetic oligonucleotide
gaggcugacagcagcuaaa

SEQ ID NO: 2132384 - RNA, 19 nt, Artificial Sequence
  Description of Artificial Sequence: Synthetic oligonucleotide
cuggagggugaguccuggc

SEQ ID NO: 2132385 - RNA, 19 nt, Artificial Sequence
  Description of Artificial Sequence: Synthetic oligonucleotide
caugaaagugaagguaacu

SEQ ID NO: 2132386 - RNA, 19 nt, Artificial Sequence
  Description of Artificial Sequence: Synthetic oligonucleotide
gacacuuagcugacaugaa

SEQ ID NO: 2132387 - RNA, 19 nt, Artificial Sequence
  Description of Artificial Sequence: Synthetic oligonucleotide
cagagucuuccuccaauaa

SEQ ID NO: 2132388 - RNA, 19 nt, Artificial Sequence
  Description of Artificial Sequence: Synthetic oligonucleotide
cagagaguaagagagccau

SEQ ID NO: 2132389 - RNA, 19 nt, Artificial Sequence
  Description of Artificial Sequence: Synthetic oligonucleotide
ccggucaccaucuucaugu

SEQ ID NO: 2132390 - RNA, 19 nt, Artificial Sequence
  Description of Artificial Sequence: Synthetic oligonucleotide
gcucaggagggugugugag

SEQ ID NO: 2132391 - RNA, 19 nt, Artificial Sequence
  Description of Artificial Sequence: Synthetic oligonucleotide
cccuucagacacuuagcug

SEQ ID NO: 2132392 - RNA, 19 nt, Artificial Sequence
  Description of Artificial Sequence: Synthetic oligonucleotide
guggaggacagugaagggu

SEQ ID NO: 2132393 - RNA, 19 nt, Artificial Sequence
  Description of Artificial Sequence: Synthetic oligonucleotide
aggaacaguccagggcugu

SEQ ID NO: 2132394 - RNA, 19 nt, Artificial Sequence
  Description of Artificial Sequence: Synthetic oligonucleotide
agaacucccuggaggguga

SEQ ID NO: 2132395 - RNA, 19 nt, Artificial Sequence
  Description of Artificial Sequence: Synthetic oligonucleotide
ggcugacagcagcuaaagc

SEQ ID NO: 2132396 - RNA, 19 nt, Artificial Sequence
  Description of Artificial Sequence: Synthetic oligonucleotide
accaggaccaccaccuguu

SEQ ID NO: 2132397 - RNA, 19 nt, Artificial Sequence
  Description of Artificial Sequence: Synthetic oligonucleotide
uggccccuacagcacugac

SEQ ID NO: 2132398 - RNA, 19 nt, Artificial Sequence
  Description of Artificial Sequence: Synthetic oligonucleotide
ccaggcuccuaccaguauc

SEQ ID NO: 2132399 - RNA, 19 nt, Artificial Sequence
  Description of Artificial Sequence: Synthetic oligonucleotide
guugaguaucagagucuuc

SEQ ID NO: 2132400 - RNA, 19 nt, Artificial Sequence
  Description of Artificial Sequence: Synthetic oligonucleotide
caggaccaccaccuguuga

SEQ ID NO: 2132401 - RNA, 19 nt, Artificial Sequence
  Description of Artificial Sequence: Synthetic oligonucleotide
ccacaauaagguaaagggu

SEQ ID NO: 2132402 - RNA, 19 nt, Artificial Sequence
  Description of Artificial Sequence: Synthetic oligonucleotide
gcauccacagcugucaccu

SEQ ID NO: 2132403 - RNA, 19 nt, Artificial Sequence
  Description of Artificial Sequence: Synthetic oligonucleotide
ccuccagaaccaacaguac

SEQ ID NO: 2132404 - RNA, 19 nt, Artificial Sequence
  Description of Artificial Sequence: Synthetic oligonucleotide
gccagcgccccucccagag

SEQ ID NO: 2132405 - RNA, 19 nt, Artificial Sequence
  Description of Artificial Sequence: Synthetic oligonucleotide
uguugcuguggaggacagu

SEQ ID NO: 2132406 - RNA, 19 nt, Artificial Sequence
  Description of Artificial Sequence: Synthetic oligonucleotide
gacagugaagggucaccau

SEQ ID NO: 2132407 - RNA, 19 nt, Artificial Sequence
  Description of Artificial Sequence: Synthetic oligonucleotide
aacucccuggagggugagu

SEQ ID NO: 2132408 - RNA, 19 nt, Artificial Sequence
  Description of Artificial Sequence: Synthetic oligonucleotide
gggugagcccuaaauucug

SEQ ID NO: 2132409 - RNA, 19 nt, Artificial Sequence
  Description of Artificial Sequence: Synthetic oligonucleotide
agcugacaugaaagugaag

SEQ ID NO: 2132410 - RNA, 19 nt, Artificial Sequence
  Description of Artificial Sequence: Synthetic oligonucleotide
cccuaaauucugaggccug

SEQ ID NO: 2132411 - RNA, 19 nt, Artificial Sequence
  Description of Artificial Sequence: Synthetic oligonucleotide
gacugugguaacagagagu

SEQ ID NO: 2132412 - RNA, 19 nt, Artificial Sequence
  Description of Artificial Sequence: Synthetic oligonucleotide
gaacucccuggagggugag

SEQ ID NO: 2132413 - RNA, 19 nt, Artificial Sequence
  Description of Artificial Sequence: Synthetic oligonucleotide
ccucaccaggaccaccacc

SEQ ID NO: 2132414 - RNA, 19 nt, Artificial Sequence
  Description of Artificial Sequence: Synthetic oligonucleotide
ccaacaguacuguugcugu

SEQ ID NO: 2132415 - RNA, 19 nt, Artificial Sequence
  Description of Artificial Sequence: Synthetic oligonucleotide
gaccgcucaggagggugug

SEQ ID NO: 2132416 - RNA, 19 nt, Artificial Sequence
  Description of Artificial Sequence: Synthetic oligonucleotide
guggccugguaguuugucu

SEQ ID NO: 2132417 - RNA, 19 nt, Artificial Sequence
  Description of Artificial Sequence: Synthetic oligonucleotide
ggccccuacagcacugacc

SEQ ID NO: 2132418 - RNA, 19 nt, Artificial Sequence
  Description of Artificial Sequence: Synthetic oligonucleotide
ugucccucaccaggaccac

SEQ ID NO: 2132419 - RNA, 19 nt, Artificial Sequence
  Description of Artificial Sequence: Synthetic oligonucleotide
uuccuccaauaaggcccgg

SEQ ID NO: 2132420 - RNA, 19 nt, Artificial Sequence
  Description of Artificial Sequence: Synthetic oligonucleotide
ccauugucccucaccagga

SEQ ID NO: 2132421 - RNA, 19 nt, Artificial Sequence
  Description of Artificial Sequence: Synthetic oligonucleotide
caccccggucaccaucuuc

SEQ ID NO: 2132422 - RNA, 19 nt, Artificial Sequence
  Description of Artificial Sequence: Synthetic oligonucleotide
ggugaguccuggccccuac

SEQ ID NO: 2132423 - RNA, 19 nt, Artificial Sequence
  Description of Artificial Sequence: Synthetic oligonucleotide
caguccagggcuguggacu

SEQ ID NO: 2132424 - RNA, 19 nt, Artificial Sequence
  Description of Artificial Sequence: Synthetic oligonucleotide
uggugccagcgccccuccc

SEQ ID NO: 2132425 - RNA, 19 nt, Artificial Sequence
  Description of Artificial Sequence: Synthetic oligonucleotide
aggcccgggcagugcgcac

SEQ ID NO: 2132426 - RNA, 19 nt, Artificial Sequence
  Description of Artificial Sequence: Synthetic oligonucleotide
ucugaccgcucaggagggu

SEQ ID NO: 2132427 - RNA, 19 nt, Artificial Sequence
  Description of Artificial Sequence: Synthetic oligonucleotide
gggcuguggacugugguaa

SEQ ID NO: 2132428 - RNA, 19 nt, Artificial Sequence
  Description of Artificial Sequence: Synthetic oligonucleotide
ggugagcccuaaauucuga

SEQ ID NO: 2132429 - RNA, 19 nt, Artificial Sequence
  Description of Artificial Sequence: Synthetic oligonucleotide
ccaucuucaugucccuuca

SEQ ID NO: 2132430 - RNA, 19 nt, Artificial Sequence
  Description of Artificial Sequence: Synthetic oligonucleotide
cugugguaacagagaguaa

SEQ ID NO: 2132431 - RNA, 19 nt, Artificial Sequence
  Description of Artificial Sequence: Synthetic oligonucleotide
ccuggagggugaguccugg

SEQ ID NO: 2132432 - RNA, 19 nt, Artificial Sequence
  Description of Artificial Sequence: Synthetic oligonucleotide
gucccucaccaggaccacc

SEQ ID NO: 2132433 - RNA, 19 nt, Artificial Sequence
  Description of Artificial Sequence: Synthetic oligonucleotide
gggcagugcgcaccucacc

SEQ ID NO: 2132434 - RNA, 19 nt, Artificial Sequence
  Description of Artificial Sequence: Synthetic oligonucleotide
gcguccucauccuccagaa

SEQ ID NO: 2132435 - RNA, 19 nt, Artificial Sequence
  Description of Artificial Sequence: Synthetic oligonucleotide
gggugugugaggaagucau

SEQ ID NO: 2132436 - RNA, 19 nt, Artificial Sequence
  Description of Artificial Sequence: Synthetic oligonucleotide
gguaaagggugaggucuga

SEQ ID NO: 2132437 - RNA, 19 nt, Artificial Sequence
  Description of Artificial Sequence: Synthetic oligonucleotide
ggcuguggacugugguaac

SEQ ID NO: 2132438 - RNA, 19 nt, Artificial Sequence
  Description of Artificial Sequence: Synthetic oligonucleotide
ggggugagcccuaaauucu

SEQ ID NO: 2132439 - RNA, 19 nt, Artificial Sequence
  Description of Artificial Sequence: Synthetic oligonucleotide
gccugguaguuugucuaug

SEQ ID NO: 2132440 - RNA, 19 nt, Artificial Sequence
  Description of Artificial Sequence: Synthetic oligonucleotide
agcgccccucccagagugg

SEQ ID NO: 2132441 - RNA, 19 nt, Artificial Sequence
  Description of Artificial Sequence: Synthetic oligonucleotide
gcaccucaccagugugugc

SEQ ID NO: 2132442 - RNA, 19 nt, Artificial Sequence
  Description of Artificial Sequence: Synthetic oligonucleotide
guccuggccccuacagcac

SEQ ID NO: 2132443 - RNA, 19 nt, Artificial Sequence
  Description of Artificial Sequence: Synthetic oligonucleotide
ugccagcgccccucccaga

SEQ ID NO: 2132444 - RNA, 19 nt, Artificial Sequence
  Description of Artificial Sequence: Synthetic oligonucleotide
gcuguggacugugguaaca

SEQ ID NO: 2132445 - RNA, 19 nt, Artificial Sequence
  Description of Artificial Sequence: Synthetic oligonucleotide
gguggccugguaguuuguc

SEQ ID NO: 2132446 - RNA, 19 nt, Artificial Sequence
  Description of Artificial Sequence: Synthetic oligonucleotide
caccaggaccaccaccugu

SEQ ID NO: 2132447 - RNA, 19 nt, Artificial Sequence
  Description of Artificial Sequence: Synthetic oligonucleotide
gcccuaaauucugaggccu

SEQ ID NO: 2132448 - RNA, 19 nt, Artificial Sequence
  Description of Artificial Sequence: Synthetic oligonucleotide
cagcguccucauccuccag

SEQ ID NO: 2132449 - RNA, 19 nt, Artificial Sequence
  Description of Artificial Sequence: Synthetic oligonucleotide
gucauuggauuuaggcauu

SEQ ID NO: 2132450 - RNA, 19 nt, Artificial Sequence
  Description of Artificial Sequence: Synthetic oligonucleotide
cagugcgcaccucaccagu

SEQ ID NO: 2132451 - RNA, 19 nt, Artificial Sequence
  Description of Artificial Sequence: Synthetic oligonucleotide
accgcucaggagggugugu

SEQ ID NO: 2132452 - RNA, 19 nt, Artificial Sequence
  Description of Artificial Sequence: Synthetic oligonucleotide
agggugaguccuggccccu

SEQ ID NO: 2132453 - RNA, 19 nt, Artificial Sequence
  Description of Artificial Sequence: Synthetic oligonucleotide
ggcauuuccucagcguccu

SEQ ID NO: 2132454 - RNA, 19 nt, Artificial Sequence
  Description of Artificial Sequence: Synthetic oligonucleotide
cagggcuguggacuguggu

SEQ ID NO: 2132455 - RNA, 19 nt, Artificial Sequence
  Description of Artificial Sequence: Synthetic oligonucleotide
gcucccaucagcagcuaua

SEQ ID NO: 2132456 - RNA, 19 nt, Artificial Sequence
  Description of Artificial Sequence: Synthetic oligonucleotide
cccggucaccaucuucaug

SEQ ID NO: 2132457 - RNA, 19 nt, Artificial Sequence
  Description of Artificial Sequence: Synthetic oligonucleotide
ccaggaccaccaccuguug

SEQ ID NO: 2132458 - RNA, 19 nt, Artificial Sequence
  Description of Artificial Sequence: Synthetic oligonucleotide
ccaccaccuguugaguauc

SEQ ID NO: 2132459 - RNA, 19 nt, Artificial Sequence
  Description of Artificial Sequence: Synthetic oligonucleotide
guccaggcuccuaccagua

SEQ ID NO: 2132460 - RNA, 19 nt, Artificial Sequence
  Description of Artificial Sequence: Synthetic oligonucleotide
caggagggugugugaggaa

SEQ ID NO: 2132461 - RNA, 19 nt, Artificial Sequence
  Description of Artificial Sequence: Synthetic oligonucleotide
cagaaccaacaguacuguu

SEQ ID NO: 2132462 - RNA, 19 nt, Artificial Sequence
  Description of Artificial Sequence: Synthetic oligonucleotide
ggucaccauugucccucac

SEQ ID NO: 2132463 - RNA, 19 nt, Artificial Sequence
  Description of Artificial Sequence: Synthetic oligonucleotide
ccgcucaggagggugugug

SEQ ID NO: 2132464 - RNA, 19 nt, Artificial Sequence
  Description of Artificial Sequence: Synthetic oligonucleotide
ggcccgggcagugcgcacc

SEQ ID NO: 2132465 - RNA, 19 nt, Artificial Sequence
  Description of Artificial Sequence: Synthetic oligonucleotide
caugucccuucagacacuu

SEQ ID NO: 2132466 - RNA, 19 nt, Artificial Sequence
  Description of Artificial Sequence: Synthetic oligonucleotide
cuggccccuacagcacuga

SEQ ID NO: 2132467 - RNA, 19 nt, Artificial Sequence
  Description of Artificial Sequence: Synthetic oligonucleotide
ggagggugugugaggaagu

SEQ ID NO: 2132468 - RNA, 19 nt, Artificial Sequence
  Description of Artificial Sequence: Synthetic oligonucleotide
ggccugguaguuugucuau

SEQ ID NO: 2132469 - RNA, 19 nt, Artificial Sequence
  Description of Artificial Sequence: Synthetic oligonucleotide
cccuggagggugaguccug

SEQ ID NO: 2132470 - RNA, 19 nt, Artificial Sequence
  Description of Artificial Sequence: Synthetic oligonucleotide
ccgggcagugcgcaccuca

SEQ ID NO: 2132471 - RNA, 19 nt, Artificial Sequence
  Description of Artificial Sequence: Synthetic oligonucleotide
ccccuacagcacugacccc

SEQ ID NO: 2132472 - RNA, 19 nt, Artificial Sequence
  Description of Artificial Sequence: Synthetic oligonucleotide
ggccugcaucagcauccac

SEQ ID NO: 2132473 - RNA, 19 nt, Artificial Sequence
  Description of Artificial Sequence: Synthetic oligonucleotide
cgggcagugcgcaccucac

SEQ ID NO: 2132474 - RNA, 19 nt, Artificial Sequence
  Description of Artificial Sequence: Synthetic oligonucleotide
augucccuucagacacuua

SEQ ID NO: 2132475 - RNA, 19 nt, Artificial Sequence
  Description of Artificial Sequence: Synthetic oligonucleotide
cguccucauccuccagaac

SEQ ID NO: 2132476 - RNA, 19 nt, Artificial Sequence
  Description of Artificial Sequence: Synthetic oligonucleotide
cccucaccaggaccaccac

SEQ ID NO: 2132477 - RNA, 19 nt, Artificial Sequence
  Description of Artificial Sequence: Synthetic oligonucleotide
gcauuuccucagcguccuc

SEQ ID NO: 2132478 - RNA, 19 nt, Artificial Sequence
  Description of Artificial Sequence: Synthetic oligonucleotide
ccccaccccggucaccauc

SEQ ID NO: 2132479 - RNA, 19 nt, Artificial Sequence
  Description of Artificial Sequence: Synthetic oligonucleotide
cggucaccaucuucauguc

SEQ ID NO: 2132480 - RNA, 19 nt, Artificial Sequence
  Description of Artificial Sequence: Synthetic oligonucleotide
ggaccaccaccuguugagu

SEQ ID NO: 2132481 - RNA, 19 nt, Artificial Sequence
  Description of Artificial Sequence: Synthetic oligonucleotide
ccaauaaggcccgggcagu

SEQ ID NO: 2132482 - RNA, 19 nt, Artificial Sequence
  Description of Artificial Sequence: Synthetic oligonucleotide
cccaccccggucaccaucu

SEQ ID NO: 2132483 - RNA, 19 nt, Artificial Sequence
  Description of Artificial Sequence: Synthetic oligonucleotide
cagcagcuaaagccacaau

SEQ ID NO: 2132484 - RNA, 19 nt, Artificial Sequence
  Description of Artificial Sequence: Synthetic oligonucleotide
ccucaccagugugugcaga

SEQ ID NO: 2132485 - RNA, 19 nt, Artificial Sequence
  Description of Artificial Sequence: Synthetic oligonucleotide
gcgccccucccagagugga

SEQ ID NO: 2132486 - RNA, 19 nt, Artificial Sequence
  Description of Artificial Sequence: Synthetic oligonucleotide
ggugugugaggaagucauu

SEQ ID NO: 2132487 - RNA, 19 nt, Artificial Sequence
  Description of Artificial Sequence: Synthetic oligonucleotide
cgcucaggaggguguguga

SEQ ID NO: 2132488 - RNA, 19 nt, Artificial Sequence
  Description of Artificial Sequence: Synthetic oligonucleotide
gcgcaccucaccagugugu

SEQ ID NO: 2132489 - RNA, 19 nt, Artificial Sequence
  Description of Artificial Sequence: Synthetic oligonucleotide
ccucauccuccagaaccaa

SEQ ID NO: 2132490 - RNA, 19 nt, Artificial Sequence
  Description of Artificial Sequence: Synthetic oligonucleotide
gggugaguccuggccccua

SEQ ID NO: 2132491 - RNA, 19 nt, Artificial Sequence
  Description of Artificial Sequence: Synthetic oligonucleotide
gcccgggcagugcgcaccu

SEQ ID NO: 2132492 - RNA, 19 nt, Artificial Sequence
  Description of Artificial Sequence: Synthetic oligonucleotide
ggguggccugguaguuugu

SEQ ID NO: 2132493 - RNA, 19 nt, Artificial Sequence
  Description of Artificial Sequence: Synthetic oligonucleotide
ccagcgccccucccagagu

SEQ ID NO: 2132494 - RNA, 19 nt, Artificial Sequence
  Description of Artificial Sequence: Synthetic oligonucleotide
ccccggucaccaucuucau

SEQ ID NO: 2132495 - RNA, 19 nt, Artificial Sequence
  Description of Artificial Sequence: Synthetic oligonucleotide
ccaccccggucaccaucuu

SEQ ID NO: 2132496 - RNA, 19 nt, Artificial Sequence
  Description of Artificial Sequence: Synthetic oligonucleotide
agguuuuaagccuucaagc

SEQ ID NO: 2132497 - RNA, 19 nt, Artificial Sequence
  Description of Artificial Sequence: Synthetic oligonucleotide
aacucguuucuuuacgucg

SEQ ID NO: 2132498 - RNA, 19 nt, Artificial Sequence
  Description of Artificial Sequence: Synthetic oligonucleotide
uauaacucguuucuuuacg

SEQ ID NO: 2132499 - RNA, 19 nt, Artificial Sequence
  Description of Artificial Sequence: Synthetic oligonucleotide
agaaccuuuucuuggagcg

SEQ ID NO: 2132500 - RNA, 19 nt, Artificial Sequence
  Description of Artificial Sequence: Synthetic oligonucleotide
uuuuaagccuucaagccgc

SEQ ID NO: 2132501 - RNA, 19 nt, Artificial Sequence
  Description of Artificial Sequence: Synthetic oligonucleotide
gagacuuugguuuucguug

SEQ ID NO: 2132502 - RNA, 19 nt, Artificial Sequence
  Description of Artificial Sequence: Synthetic oligonucleotide
auuuggaugacgucucucg

SEQ ID NO: 2132503 - RNA, 19 nt, Artificial Sequence
  Description of Artificial Sequence: Synthetic oligonucleotide
guuuuaagccuucaagccg

SEQ ID NO: 2132504 - RNA, 19 nt, Artificial Sequence
  Description of Artificial Sequence: Synthetic oligonucleotide
ucguucauucucuaggcgg

SEQ ID NO: 2132505 - RNA, 19 nt, Artificial Sequence
  Description of Artificial Sequence: Synthetic oligonucleotide
agaagguauaacucguuuc

SEQ ID NO: 2132506 - RNA, 19 nt, Artificial Sequence
  Description of Artificial Sequence: Synthetic oligonucleotide
uuucggaucacuuggacaa

SEQ ID NO: 2132507 - RNA, 19 nt, Artificial Sequence
  Description of Artificial Sequence: Synthetic oligonucleotide
gauuacaggaagcuccucc

SEQ ID NO: 2132508 - RNA, 19 nt, Artificial Sequence
  Description of Artificial Sequence: Synthetic oligonucleotide
uuucguugguuucuucugg

SEQ ID NO: 2132509 - RNA, 19 nt, Artificial Sequence
  Description of Artificial Sequence: Synthetic oligonucleotide
guuucagacacggugaucc

SEQ ID NO: 2132510 - RNA, 19 nt, Artificial Sequence
  Description of Artificial Sequence: Synthetic oligonucleotide
auuucuugggugccggggc

SEQ ID NO: 2132511 - RNA, 19 nt, Artificial Sequence
  Description of Artificial Sequence: Synthetic oligonucleotide
ucagacacggugauccggg

SEQ ID NO: 2132512 - RNA, 19 nt, Artificial Sequence
  Description of Artificial Sequence: Synthetic oligonucleotide
uguaggugaccccaggccc

SEQ ID NO: 2132513 - RNA, 19 nt, Artificial Sequence
  Description of Artificial Sequence: Synthetic oligonucleotide
aagagauuuggaugacguc

SEQ ID NO: 2132514 - RNA, 19 nt, Artificial Sequence
  Description of Artificial Sequence: Synthetic oligonucleotide
uucgacucaaacucgagaa

SEQ ID NO: 2132515 - RNA, 19 nt, Artificial Sequence
  Description of Artificial Sequence: Synthetic oligonucleotide
uuucuuuacgucgaggcca

SEQ ID NO: 2132516 - RNA, 19 nt, Artificial Sequence
  Description of Artificial Sequence: Synthetic oligonucleotide
ugggaucaacuccuuagcg

SEQ ID NO: 2132517 - RNA, 19 nt, Artificial Sequence
  Description of Artificial Sequence: Synthetic oligonucleotide
ucugcugccaggagguacg

SEQ ID NO: 2132518 - RNA, 19 nt, Artificial Sequence
  Description of Artificial Sequence: Synthetic oligonucleotide
cacuuggacaaucucagcc

SEQ ID NO: 2132519 - RNA, 19 nt, Artificial Sequence
  Description of Artificial Sequence: Synthetic oligonucleotide
aaggguucucuagagacag

SEQ ID NO: 2132520 - RNA, 19 nt, Artificial Sequence
  Description of Artificial Sequence: Synthetic oligonucleotide
aacgguguauccauggcuc

SEQ ID NO: 2132521 - RNA, 19 nt, Artificial Sequence
  Description of Artificial Sequence: Synthetic oligonucleotide
uuucguucauucucuaggc

SEQ ID NO: 2132522 - RNA, 19 nt, Artificial Sequence
  Description of Artificial Sequence: Synthetic oligonucleotide
agagauuuggaugacgucu

SEQ ID NO: 2132523 - RNA, 19 nt, Artificial Sequence
  Description of Artificial Sequence: Synthetic oligonucleotide
ugugugggaagagauuugg

SEQ ID NO: 2132524 - RNA, 19 nt, Artificial Sequence
  Description of Artificial Sequence: Synthetic oligonucleotide
uggaugacgucucucguug

SEQ ID NO: 2132525 - RNA, 19 nt, Artificial Sequence
  Description of Artificial Sequence: Synthetic oligonucleotide
cuggguucgacucaaacuc

SEQ ID NO: 2132526 - RNA, 19 nt, Artificial Sequence
  Description of Artificial Sequence: Synthetic oligonucleotide
gguuuuaagccuucaagcc

SEQ ID NO: 2132527 - RNA, 19 nt, Artificial Sequence
  Description of Artificial Sequence: Synthetic oligonucleotide
ugagauugcagggacccgg

SEQ ID NO: 2132528 - RNA, 19 nt, Artificial Sequence
  Description of Artificial Sequence: Synthetic oligonucleotide
uucguucauucucuaggcg

SEQ ID NO: 2132529 - RNA, 19 nt, Artificial Sequence
  Description of Artificial Sequence: Synthetic oligonucleotide
aacuccuuagcguguacca

SEQ ID NO: 2132530 - RNA, 19 nt, Artificial Sequence
  Description of Artificial Sequence: Synthetic oligonucleotide
uccuucaauuucuugggug

SEQ ID NO: 2132531 - RNA, 19 nt, Artificial Sequence
  Description of Artificial Sequence: Synthetic oligonucleotide
ucucgcucgggaaacugcg

SEQ ID NO: 2132532 - RNA, 19 nt, Artificial Sequence
  Description of Artificial Sequence: Synthetic oligonucleotide
gaugucagcuccuguacug

SEQ ID NO: 2132533 - RNA, 19 nt, Artificial Sequence
  Description of Artificial Sequence: Synthetic oligonucleotide
aaacugcggggucaggaag

SEQ ID NO: 2132534 - RNA, 19 nt, Artificial Sequence
  Description of Artificial Sequence: Synthetic oligonucleotide
ucuucuucgccuucuugag

SEQ ID NO: 2132535 - RNA, 19 nt, Artificial Sequence
  Description of Artificial Sequence: Synthetic oligonucleotide
cugaauggagcgcagcugc

SEQ ID NO: 2132536 - RNA, 19 nt, Artificial Sequence
  Description of Artificial Sequence: Synthetic oligonucleotide
gaugacgucucucguuggg

SEQ ID NO: 2132537 - RNA, 19 nt, Artificial Sequence
  Description of Artificial Sequence: Synthetic oligonucleotide
uucguugguuucuucuggg

SEQ ID NO: 2132538 - RNA, 19 nt, Artificial Sequence
  Description of Artificial Sequence: Synthetic oligonucleotide
cuuccuguuucagacacgg

SEQ ID NO: 2132539 - RNA, 19 nt, Artificial Sequence
  Description of Artificial Sequence: Synthetic oligonucleotide
uaggugccgggcaaaaucc

SEQ ID NO: 2132540 - RNA, 19 nt, Artificial Sequence
  Description of Artificial Sequence: Synthetic oligonucleotide
uguuugguuccuguuggcg

SEQ ID NO: 2132541 - RNA, 19 nt, Artificial Sequence
  Description of Artificial Sequence: Synthetic oligonucleotide
ucaauuucuugggugccgg

SEQ ID NO: 2132542 - RNA, 19 nt, Artificial Sequence
  Description of Artificial Sequence: Synthetic oligonucleotide
cucaacgguguauccaugg

SEQ ID NO: 2132543 - RNA, 19 nt, Artificial Sequence
  Description of Artificial Sequence: Synthetic oligonucleotide
gaagguauaacucguuucu

SEQ ID NO: 2132544 - RNA, 19 nt, Artificial Sequence
  Description of Artificial Sequence: Synthetic oligonucleotide
auaacucguuucuuuacgu

SEQ ID NO: 2132545 - RNA, 19 nt, Artificial Sequence
  Description of Artificial Sequence: Synthetic oligonucleotide
ucgagaagggcccgucucg

SEQ ID NO: 2132546 - RNA, 19 nt, Artificial Sequence
  Description of Artificial Sequence: Synthetic oligonucleotide
uguucuguaggugacccca

SEQ ID NO: 2132547 - RNA, 19 nt, Artificial Sequence
  Description of Artificial Sequence: Synthetic oligonucleotide
ggggagaagguauaacucg

SEQ ID NO: 2132548 - RNA, 19 nt, Artificial Sequence
  Description of Artificial Sequence: Synthetic oligonucleotide
acuuggacaaucucagccu

SEQ ID NO: 2132549 - RNA, 19 nt, Artificial Sequence
  Description of Artificial Sequence: Synthetic oligonucleotide
ucuuggagcggucuuucca

SEQ ID NO: 2132550 - RNA, 19 nt, Artificial Sequence
  Description of Artificial Sequence: Synthetic oligonucleotide
ucgacucaaacucgagaag

SEQ ID NO: 2132551 - RNA, 19 nt, Artificial Sequence
  Description of Artificial Sequence: Synthetic oligonucleotide
acucgauucugucuguucu

SEQ ID NO: 2132552 - RNA, 19 nt, Artificial Sequence
  Description of Artificial Sequence: Synthetic oligonucleotide
guuugguuccuguuggcgc

SEQ ID NO: 2132553 - RNA, 19 nt, Artificial Sequence
  Description of Artificial Sequence: Synthetic oligonucleotide
agguagcuuguuugguucc

SEQ ID NO: 2132554 - RNA, 19 nt, Artificial Sequence
  Description of Artificial Sequence: Synthetic oligonucleotide
uuuacgucgaggccaccug

SEQ ID NO: 2132555 - RNA, 19 nt, Artificial Sequence
  Description of Artificial Sequence: Synthetic oligonucleotide
uggguucgacucaaacucg

SEQ ID NO: 2132556 - RNA, 19 nt, Artificial Sequence
  Description of Artificial Sequence: Synthetic oligonucleotide
uucaauuucuugggugccg

SEQ ID NO: 2132557 - RNA, 19 nt, Artificial Sequence
  Description of Artificial Sequence: Synthetic oligonucleotide
ugaggggacccaaagccug

SEQ ID NO: 2132558 - RNA, 19 nt, Artificial Sequence
  Description of Artificial Sequence: Synthetic oligonucleotide
agacagagguuuuaagccu

SEQ ID NO: 2132559 - RNA, 19 nt, Artificial Sequence
  Description of Artificial Sequence: Synthetic oligonucleotide
uccccuucgggauuacagg

SEQ ID NO: 2132560 - RNA, 19 nt, Artificial Sequence
  Description of Artificial Sequence: Synthetic oligonucleotide
ggaucaacuccuuagcgug

SEQ ID NO: 2132561 - RNA, 19 nt, Artificial Sequence
  Description of Artificial Sequence: Synthetic oligonucleotide
ggaaggguucucuagagac

SEQ ID NO: 2132562 - RNA, 19 nt, Artificial Sequence
  Description of Artificial Sequence: Synthetic oligonucleotide
ucaacgguguauccauggc

SEQ ID NO: 2132563 - RNA, 19 nt, Artificial Sequence
  Description of Artificial Sequence: Synthetic oligonucleotide
uagagacagagguuuuaag

SEQ ID NO: 2132564 - RNA, 19 nt, Artificial Sequence
  Description of Artificial Sequence: Synthetic oligonucleotide
uccuguacuggcugagagg

SEQ ID NO: 2132565 - RNA, 19 nt, Artificial Sequence
  Description of Artificial Sequence: Synthetic oligonucleotide
uggggagaagguauaacuc

SEQ ID NO: 2132566 - RNA, 19 nt, Artificial Sequence
  Description of Artificial Sequence: Synthetic oligonucleotide
uuagcguguaccaccucug

SEQ ID NO: 2132567 - RNA, 19 nt, Artificial Sequence
  Description of Artificial Sequence: Synthetic oligonucleotide
aaggcuagggugucucucu

SEQ ID NO: 2132568 - RNA, 19 nt, Artificial Sequence
  Description of Artificial Sequence: Synthetic oligonucleotide
uucuggagcaaggcuaggg

SEQ ID NO: 2132569 - RNA, 19 nt, Artificial Sequence
  Description of Artificial Sequence: Synthetic oligonucleotide
cuccuuagcguguaccacc

SEQ ID NO: 2132570 - RNA, 19 nt, Artificial Sequence
  Description of Artificial Sequence: Synthetic oligonucleotide
gauuugggcuuccccuucg

SEQ ID NO: 2132571 - RNA, 19 nt, Artificial Sequence
  Description of Artificial Sequence: Synthetic oligonucleotide
uugguuucuucuggguucg

SEQ ID NO: 2132572 - RNA, 19 nt, Artificial Sequence
  Description of Artificial Sequence: Synthetic oligonucleotide
cuuggagcggucuuuccac

SEQ ID NO: 2132573 - RNA, 19 nt, Artificial Sequence
  Description of Artificial Sequence: Synthetic oligonucleotide
gagguagcuuguuugguuc

SEQ ID NO: 2132574 - RNA, 19 nt, Artificial Sequence
  Description of Artificial Sequence: Synthetic oligonucleotide
cuaggugccgggcaaaauc

SEQ ID NO: 2132575 - RNA, 19 nt, Artificial Sequence
  Description of Artificial Sequence: Synthetic oligonucleotide
uucgccuucuugagcuugg

SEQ ID NO: 2132576 - RNA, 19 nt, Artificial Sequence
  Description of Artificial Sequence: Synthetic oligonucleotide
aaccuuuucuuggagcggu

SEQ ID NO: 2132577 - RNA, 19 nt, Artificial Sequence
  Description of Artificial Sequence: Synthetic oligonucleotide
uccuugugugggaagagau

SEQ ID NO: 2132578 - RNA, 19 nt, Artificial Sequence
  Description of Artificial Sequence: Synthetic oligonucleotide
aacugcggggucaggaagg

SEQ ID NO: 2132579 - RNA, 19 nt, Artificial Sequence
  Description of Artificial Sequence: Synthetic oligonucleotide
gaagggcccgucucgcucg

SEQ ID NO: 2132580 - RNA, 19 nt, Artificial Sequence
  Description of Artificial Sequence: Synthetic oligonucleotide
uucagacacggugauccgg

SEQ ID NO: 2132581 - RNA, 19 nt, Artificial Sequence
  Description of Artificial Sequence: Synthetic oligonucleotide
cuguaggugaccccaggcc

SEQ ID NO: 2132582 - RNA, 19 nt, Artificial Sequence
  Description of Artificial Sequence: Synthetic oligonucleotide
agaagggcccgucucgcuc

SEQ ID NO: 2132583 - RNA, 19 nt, Artificial Sequence
  Description of Artificial Sequence: Synthetic oligonucleotide
uucuuuacgucgaggccac

SEQ ID NO: 2132584 - RNA, 19 nt, Artificial Sequence
  Description of Artificial Sequence: Synthetic oligonucleotide
uaggcggcguuucagguuc

SEQ ID NO: 2132585 - RNA, 19 nt, Artificial Sequence
  Description of Artificial Sequence: Synthetic oligonucleotide
cuuggcaggguuucggauc

SEQ ID NO: 2132586 - RNA, 19 nt, Artificial Sequence
  Description of Artificial Sequence: Synthetic oligonucleotide
uugaggggacccaaagccu

SEQ ID NO: 2132587 - RNA, 19 nt, Artificial Sequence
  Description of Artificial Sequence: Synthetic oligonucleotide
ugucuguucuguaggugac

SEQ ID NO: 2132588 - RNA, 19 nt, Artificial Sequence
  Description of Artificial Sequence: Synthetic oligonucleotide
ucugaauggagcgcagcug

SEQ ID NO: 2132589 - RNA, 19 nt, Artificial Sequence
  Description of Artificial Sequence: Synthetic oligonucleotide
agguauaacucguuucuuu

SEQ ID NO: 2132590 - RNA, 19 nt, Artificial Sequence
  Description of Artificial Sequence: Synthetic oligonucleotide
uccuuagcguguaccaccu

SEQ ID NO: 2132591 - RNA, 19 nt, Artificial Sequence
  Description of Artificial Sequence: Synthetic oligonucleotide
ugccgggcaaaauccuugg

SEQ ID NO: 2132592 - RNA, 19 nt, Artificial Sequence
  Description of Artificial Sequence: Synthetic oligonucleotide
cuucgggauuacaggaagc

SEQ ID NO: 2132593 - RNA, 19 nt, Artificial Sequence
  Description of Artificial Sequence: Synthetic oligonucleotide
gaagagauuuggaugacgu

SEQ ID NO: 2132594 - RNA, 19 nt, Artificial Sequence
  Description of Artificial Sequence: Synthetic oligonucleotide
ugcacucucggagacuuug

SEQ ID NO: 2132595 - RNA, 19 nt, Artificial Sequence
  Description of Artificial Sequence: Synthetic oligonucleotide
uuuaagccuucaagccgcc

SEQ ID NO: 2132596 - RNA, 19 nt, Artificial Sequence
  Description of Artificial Sequence: Synthetic oligonucleotide
ucagccuuucguucauucu

SEQ ID NO: 2132597 - RNA, 19 nt, Artificial Sequence
  Description of Artificial Sequence: Synthetic oligonucleotide
cuggagcaaggcuagggug

SEQ ID NO: 2132598 - RNA, 19 nt, Artificial Sequence
  Description of Artificial Sequence: Synthetic oligonucleotide
ccuguacuggcugagaggg

SEQ ID NO: 2132599 - RNA, 19 nt, Artificial Sequence
  Description of Artificial Sequence: Synthetic oligonucleotide
gagcggucuuuccacacgc

SEQ ID NO: 2132600 - RNA, 19 nt, Artificial Sequence
  Description of Artificial Sequence: Synthetic oligonucleotide
ucuaggcggcguuucaggu

SEQ ID NO: 2132601 - RNA, 19 nt, Artificial Sequence
  Description of Artificial Sequence: Synthetic oligonucleotide
ugggaugucagcuccugua

SEQ ID NO: 2132602 - RNA, 19 nt, Artificial Sequence
  Description of Artificial Sequence: Synthetic oligonucleotide
agcguguaccaccucugag

SEQ ID NO: 2132603 - RNA, 19 nt, Artificial Sequence
  Description of Artificial Sequence: Synthetic oligonucleotide
ucggagacuuugguuuucg

SEQ ID NO: 2132604 - RNA, 19 nt, Artificial Sequence
  Description of Artificial Sequence: Synthetic oligonucleotide
cguuucuuuacgucgaggc

SEQ ID NO: 2132605 - RNA, 19 nt, Artificial Sequence
  Description of Artificial Sequence: Synthetic oligonucleotide
uuacgucgaggccaccugu

SEQ ID NO: 2132606 - RNA, 19 nt, Artificial Sequence
  Description of Artificial Sequence: Synthetic oligonucleotide
auuugggcuuccccuucgg

SEQ ID NO: 2132607 - RNA, 19 nt, Artificial Sequence
  Description of Artificial Sequence: Synthetic oligonucleotide
cuucaauuucuugggugcc

SEQ ID NO: 2132608 - RNA, 19 nt, Artificial Sequence
  Description of Artificial Sequence: Synthetic oligonucleotide
ugcugagauugcagggacc

SEQ ID NO: 2132609 - RNA, 19 nt, Artificial Sequence
  Description of Artificial Sequence: Synthetic oligonucleotide
ugucagcuccuguacuggc

SEQ ID NO: 2132610 - RNA, 19 nt, Artificial Sequence
  Description of Artificial Sequence: Synthetic oligonucleotide
cagguucucagcccggcgc

SEQ ID NO: 2132611 - RNA, 19 nt, Artificial Sequence
  Description of Artificial Sequence: Synthetic oligonucleotide
gcugccaggagguacgcag

SEQ ID NO: 2132612 - RNA, 19 nt, Artificial Sequence
  Description of Artificial Sequence: Synthetic oligonucleotide
aacucgagaagggcccguc

SEQ ID NO: 2132613 - RNA, 19 nt, Artificial Sequence
  Description of Artificial Sequence: Synthetic oligonucleotide
guucgacucaaacucgaga

SEQ ID NO: 2132614 - RNA, 19 nt, Artificial Sequence
  Description of Artificial Sequence: Synthetic oligonucleotide
uguauccauggcucacgug

SEQ ID NO: 2132615 - RNA, 19 nt, Artificial Sequence
  Description of Artificial Sequence: Synthetic oligonucleotide
cucgauucugucuguucug

SEQ ID NO: 2132616 - RNA, 19 nt, Artificial Sequence
  Description of Artificial Sequence: Synthetic oligonucleotide
cgggauuacaggaagcucc

SEQ ID NO: 2132617 - RNA, 19 nt, Artificial Sequence
  Description of Artificial Sequence: Synthetic oligonucleotide
augacgucucucguugggg

SEQ ID NO: 2132618 - RNA, 19 nt, Artificial Sequence
  Description of Artificial Sequence: Synthetic oligonucleotide
uuguuugguuccuguuggc

SEQ ID NO: 2132619 - RNA, 19 nt, Artificial Sequence
  Description of Artificial Sequence: Synthetic oligonucleotide
cuucuucgccuucuugagc

SEQ ID NO: 2132620 - RNA, 19 nt, Artificial Sequence
  Description of Artificial Sequence: Synthetic oligonucleotide
uccggacucgauucugucu

SEQ ID NO: 2132621 - RNA, 19 nt, Artificial Sequence
  Description of Artificial Sequence: Synthetic oligonucleotide
ugaauggagcgcagcugcu

SEQ ID NO: 2132622 - RNA, 19 nt, Artificial Sequence
  Description of Artificial Sequence: Synthetic oligonucleotide
cuugccagcuggagguagc

SEQ ID NO: 2132623 - RNA, 19 nt, Artificial Sequence
  Description of Artificial Sequence: Synthetic oligonucleotide
cagaucuugcugagauugc

SEQ ID NO: 2132624 - RNA, 19 nt, Artificial Sequence
  Description of Artificial Sequence: Synthetic oligonucleotide
ucgaggccaccugucaccg

SEQ ID NO: 2132625 - RNA, 19 nt, Artificial Sequence
  Description of Artificial Sequence: Synthetic oligonucleotide
gucgaggccaccugucacc

SEQ ID NO: 2132626 - RNA, 19 nt, Artificial Sequence
  Description of Artificial Sequence: Synthetic oligonucleotide
caauuucuugggugccggg

SEQ ID NO: 2132627 - RNA, 19 nt, Artificial Sequence
  Description of Artificial Sequence: Synthetic oligonucleotide
auucucuaggcggcguuuc

SEQ ID NO: 2132628 - RNA, 19 nt, Artificial Sequence
  Description of Artificial Sequence: Synthetic oligonucleotide
gacgcuccuucauuuucug

SEQ ID NO: 2132629 - RNA, 19 nt, Artificial Sequence
  Description of Artificial Sequence: Synthetic oligonucleotide
ucgauucugucuguucugu

SEQ ID NO: 2132630 - RNA, 19 nt, Artificial Sequence
  Description of Artificial Sequence: Synthetic oligonucleotide
ugggcuuccccuucgggau

SEQ ID NO: 2132631 - RNA, 19 nt, Artificial Sequence
  Description of Artificial Sequence: Synthetic oligonucleotide
ggguucucuagagacagag

SEQ ID NO: 2132632 - RNA, 19 nt, Artificial Sequence
  Description of Artificial Sequence: Synthetic oligonucleotide
uagcuuguuugguuccugu

SEQ ID NO: 2132633 - RNA, 19 nt, Artificial Sequence
  Description of Artificial Sequence: Synthetic oligonucleotide
aggaaggguucucuagaga

SEQ ID NO: 2132634 - RNA, 19 nt, Artificial Sequence
  Description of Artificial Sequence: Synthetic oligonucleotide
gaggccaccugucaccguc

SEQ ID NO: 2132635 - RNA, 19 nt, Artificial Sequence
  Description of Artificial Sequence: Synthetic oligonucleotide
uacuggcugagagggcucg

SEQ ID NO: 2132636 - RNA, 19 nt, Artificial Sequence
  Description of Artificial Sequence: Synthetic oligonucleotide
uggcuacaggccucugggg

SEQ ID NO: 2132637 - RNA, 19 nt, Artificial Sequence
  Description of Artificial Sequence: Synthetic oligonucleotide
gacucgauucugucuguuc

SEQ ID NO: 2132638 - RNA, 19 nt, Artificial Sequence
  Description of Artificial Sequence: Synthetic oligonucleotide
uccugagcucagaccuugg

SEQ ID NO: 2132639 - RNA, 19 nt, Artificial Sequence
  Description of Artificial Sequence: Synthetic oligonucleotide
uuaagccuucaagccgccg

SEQ ID NO: 2132640 - RNA, 19 nt, Artificial Sequence
  Description of Artificial Sequence: Synthetic oligonucleotide
ucuagagacagagguuuua

SEQ ID NO: 2132641 - RNA, 19 nt, Artificial Sequence
  Description of Artificial Sequence: Synthetic oligonucleotide
uuggaugacgucucucguu

SEQ ID NO: 2132642 - RNA, 19 nt, Artificial Sequence
  Description of Artificial Sequence: Synthetic oligonucleotide
uauccauggcucacgugua

SEQ ID NO: 2132643 - RNA, 19 nt, Artificial Sequence
  Description of Artificial Sequence: Synthetic oligonucleotide
caacuccuuagcguguacc

SEQ ID NO: 2132644 - RNA, 19 nt, Artificial Sequence
  Description of Artificial Sequence: Synthetic oligonucleotide
uagcguguaccaccucuga

SEQ ID NO: 2132645 - RNA, 19 nt, Artificial Sequence
  Description of Artificial Sequence: Synthetic oligonucleotide
gcugagauugcagggaccc

SEQ ID NO: 2132646 - RNA, 19 nt, Artificial Sequence
  Description of Artificial Sequence: Synthetic oligonucleotide
ucguugguuucuucugggu

SEQ ID NO: 2132647 - RNA, 19 nt, Artificial Sequence
  Description of Artificial Sequence: Synthetic oligonucleotide
uuuucuuggagcggucuuu

SEQ ID NO: 2132648 - RNA, 19 nt, Artificial Sequence
  Description of Artificial Sequence: Synthetic oligonucleotide
uacgcaggggcuuguccug

SEQ ID NO: 2132649 - RNA, 19 nt, Artificial Sequence
  Description of Artificial Sequence: Synthetic oligonucleotide
aagguauaacucguuucuu

SEQ ID NO: 2132650 - RNA, 19 nt, Artificial Sequence
  Description of Artificial Sequence: Synthetic oligonucleotide
uccauggcucacguguagc

SEQ ID NO: 2132651 - RNA, 19 nt, Artificial Sequence
  Description of Artificial Sequence: Synthetic oligonucleotide
gaaggguucucuagagaca

SEQ ID NO: 2132652 - RNA, 19 nt, Artificial Sequence
  Description of Artificial Sequence: Synthetic oligonucleotide
cauuuucugcugccaggag

SEQ ID NO: 2132653 - RNA, 19 nt, Artificial Sequence
  Description of Artificial Sequence: Synthetic oligonucleotide
ucaacuccuuagcguguac

SEQ ID NO: 2132654 - RNA, 19 nt, Artificial Sequence
  Description of Artificial Sequence: Synthetic oligonucleotide
gguguauccauggcucacg

SEQ ID NO: 2132655 - RNA, 19 nt, Artificial Sequence
  Description of Artificial Sequence: Synthetic oligonucleotide
agcccggcgcucuuucuuc

SEQ ID NO: 2132656 - RNA, 19 nt, Artificial Sequence
  Description of Artificial Sequence: Synthetic oligonucleotide
gcguuucagguucucagcc

SEQ ID NO: 2132657 - RNA, 19 nt, Artificial Sequence
  Description of Artificial Sequence: Synthetic oligonucleotide
caaacucgagaagggcccg

SEQ ID NO: 2132658 - RNA, 19 nt, Artificial Sequence
  Description of Artificial Sequence: Synthetic oligonucleotide
ggagaaccuuuucuuggag

SEQ ID NO: 2132659 - RNA, 19 nt, Artificial Sequence
  Description of Artificial Sequence: Synthetic oligonucleotide
ucauucucuaggcggcguu

SEQ ID NO: 2132660 - RNA, 19 nt, Artificial Sequence
  Description of Artificial Sequence: Synthetic oligonucleotide
uuggagcggucuuuccaca

SEQ ID NO: 2132661 - RNA, 19 nt, Artificial Sequence
  Description of Artificial Sequence: Synthetic oligonucleotide
acucguuucuuuacgucga

SEQ ID NO: 2132662 - RNA, 19 nt, Artificial Sequence
  Description of Artificial Sequence: Synthetic oligonucleotide
cucgagaagggcccgucuc

SEQ ID NO: 2132663 - RNA, 19 nt, Artificial Sequence
  Description of Artificial Sequence: Synthetic oligonucleotide
cuuagcguguaccaccucu

SEQ ID NO: 2132664 - RNA, 19 nt, Artificial Sequence
  Description of Artificial Sequence: Synthetic oligonucleotide
ucaagccgccggcugcgcc

SEQ ID NO: 2132665 - RNA, 19 nt, Artificial Sequence
  Description of Artificial Sequence: Synthetic oligonucleotide
uacgucgaggccaccuguc

SEQ ID NO: 2132666 - RNA, 19 nt, Artificial Sequence
  Description of Artificial Sequence: Synthetic oligonucleotide
ucgggaaacugcgggguca

SEQ ID NO: 2132667 - RNA, 19 nt, Artificial Sequence
  Description of Artificial Sequence: Synthetic oligonucleotide
uggagcggucuuuccacac

SEQ ID NO: 2132668 - RNA, 19 nt, Artificial Sequence
  Description of Artificial Sequence: Synthetic oligonucleotide
cucgcucgggaaacugcgg

SEQ ID NO: 2132669 - RNA, 19 nt, Artificial Sequence
  Description of Artificial Sequence: Synthetic oligonucleotide
cuucaagccgccggcugcg

SEQ ID NO: 2132670 - RNA, 19 nt, Artificial Sequence
  Description of Artificial Sequence: Synthetic oligonucleotide
agguucucagcccggcgcu

SEQ ID NO: 2132671 - RNA, 19 nt, Artificial Sequence
  Description of Artificial Sequence: Synthetic oligonucleotide
ggcguuucagguucucagc

SEQ ID NO: 2132672 - RNA, 19 nt, Artificial Sequence
  Description of Artificial Sequence: Synthetic oligonucleotide
gagaagguauaacucguuu

SEQ ID NO: 2132673 - RNA, 19 nt, Artificial Sequence
  Description of Artificial Sequence: Synthetic oligonucleotide
uuggacaaucucagccuuu

SEQ ID NO: 2132674 - RNA, 19 nt, Artificial Sequence
  Description of Artificial Sequence: Synthetic oligonucleotide
uucauucucuaggcggcgu

SEQ ID NO: 2132675 - RNA, 19 nt, Artificial Sequence
  Description of Artificial Sequence: Synthetic oligonucleotide
acgguguauccauggcuca

SEQ ID NO: 2132676 - RNA, 19 nt, Artificial Sequence
  Description of Artificial Sequence: Synthetic oligonucleotide
acugcggggucaggaaggg

SEQ ID NO: 2132677 - RNA, 19 nt, Artificial Sequence
  Description of Artificial Sequence: Synthetic oligonucleotide
ucggaucacuuggacaauc

SEQ ID NO: 2132678 - RNA, 19 nt, Artificial Sequence
  Description of Artificial Sequence: Synthetic oligonucleotide
gguucucuagagacagagg

SEQ ID NO: 2132679 - RNA, 19 nt, Artificial Sequence
  Description of Artificial Sequence: Synthetic oligonucleotide
aagggcccgucucgcucgg

SEQ ID NO: 2132680 - RNA, 19 nt, Artificial Sequence
  Description of Artificial Sequence: Synthetic oligonucleotide
cucucggagacuuugguuu

SEQ ID NO: 2132681 - RNA, 19 nt, Artificial Sequence
  Description of Artificial Sequence: Synthetic oligonucleotide
cacgcgcccggauuugggc

SEQ ID NO: 2132682 - RNA, 19 nt, Artificial Sequence
  Description of Artificial Sequence: Synthetic oligonucleotide
ucgggauuacaggaagcuc

SEQ ID NO: 2132683 - RNA, 19 nt, Artificial Sequence
  Description of Artificial Sequence: Synthetic oligonucleotide
ccuguuucagacacgguga

SEQ ID NO: 2132684 - RNA, 19 nt, Artificial Sequence
  Description of Artificial Sequence: Synthetic oligonucleotide
cugagagggcucgggaccc

SEQ ID NO: 2132685 - RNA, 19 nt, Artificial Sequence
  Description of Artificial Sequence: Synthetic oligonucleotide
agccuuucguucauucucu

SEQ ID NO: 2132686 - RNA, 19 nt, Artificial Sequence
  Description of Artificial Sequence: Synthetic oligonucleotide
ccuucgggauuacaggaag

SEQ ID NO: 2132687 - RNA, 19 nt, Artificial Sequence
  Description of Artificial Sequence: Synthetic oligonucleotide
gggaugucagcuccuguac

SEQ ID NO: 2132688 - RNA, 19 nt, Artificial Sequence
  Description of Artificial Sequence: Synthetic oligonucleotide
gguacgcaggggcuugucc

SEQ ID NO: 2132689 - RNA, 19 nt, Artificial Sequence
  Description of Artificial Sequence: Synthetic oligonucleotide
guggcugcacucucggaga

SEQ ID NO: 2132690 - RNA, 19 nt, Artificial Sequence
  Description of Artificial Sequence: Synthetic oligonucleotide
uuccggacucgauucuguc

SEQ ID NO: 2132691 - RNA, 19 nt, Artificial Sequence
  Description of Artificial Sequence: Synthetic oligonucleotide
cuagagacagagguuuuaa

SEQ ID NO: 2132692 - RNA, 19 nt, Artificial Sequence
  Description of Artificial Sequence: Synthetic oligonucleotide
acucgagaagggcccgucu

SEQ ID NO: 2132693 - RNA, 19 nt, Artificial Sequence
  Description of Artificial Sequence: Synthetic oligonucleotide
uguuucagacacggugauc

SEQ ID NO: 2132694 - RNA, 19 nt, Artificial Sequence
  Description of Artificial Sequence: Synthetic oligonucleotide
agcuuguuugguuccuguu

SEQ ID NO: 2132695 - RNA, 19 nt, Artificial Sequence
  Description of Artificial Sequence: Synthetic oligonucleotide
accaccucugaguccaguu

SEQ ID NO: 2132696 - RNA, 19 nt, Artificial Sequence
  Description of Artificial Sequence: Synthetic oligonucleotide
aaacucgagaagggcccgu

SEQ ID NO: 2132697 - RNA, 19 nt, Artificial Sequence
  Description of Artificial Sequence: Synthetic oligonucleotide
ccggacucgauucugucug

SEQ ID NO: 2132698 - RNA, 19 nt, Artificial Sequence
  Description of Artificial Sequence: Synthetic oligonucleotide
gucaccgucuugccagcug

SEQ ID NO: 2132699 - RNA, 19 nt, Artificial Sequence
  Description of Artificial Sequence: Synthetic oligonucleotide
cuguuggcgcugugggaag

SEQ ID NO: 2132700 - RNA, 19 nt, Artificial Sequence
  Description of Artificial Sequence: Synthetic oligonucleotide
ggaugacgucucucguugg

SEQ ID NO: 2132701 - RNA, 19 nt, Artificial Sequence
  Description of Artificial Sequence: Synthetic oligonucleotide
acgucgaggccaccuguca

SEQ ID NO: 2132702 - RNA, 19 nt, Artificial Sequence
  Description of Artificial Sequence: Synthetic oligonucleotide
cuugugugggaagagauuu

SEQ ID NO: 2132703 - RNA, 19 nt, Artificial Sequence
  Description of Artificial Sequence: Synthetic oligonucleotide
gagggcucgggacccggug

SEQ ID NO: 2132704 - RNA, 19 nt, Artificial Sequence
  Description of Artificial Sequence: Synthetic oligonucleotide
cugagauugcagggacccg

SEQ ID NO: 2132705 - RNA, 19 nt, Artificial Sequence
  Description of Artificial Sequence: Synthetic oligonucleotide
cuucgccuucuugagcuug

SEQ ID NO: 2132706 - RNA, 19 nt, Artificial Sequence
  Description of Artificial Sequence: Synthetic oligonucleotide
caaggcuagggugucucuc

SEQ ID NO: 2132707 - RNA, 19 nt, Artificial Sequence
  Description of Artificial Sequence: Synthetic oligonucleotide
cuguacuggcugagagggc

SEQ ID NO: 2132708 - RNA, 19 nt, Artificial Sequence
  Description of Artificial Sequence: Synthetic oligonucleotide
ccauggcucacguguagcc

SEQ ID NO: 2132709 - RNA, 19 nt, Artificial Sequence
  Description of Artificial Sequence: Synthetic oligonucleotide
ccuuucguucauucucuag

SEQ ID NO: 2132710 - RNA, 19 nt, Artificial Sequence
  Description of Artificial Sequence: Synthetic oligonucleotide
ggugccggggccuggggag

SEQ ID NO: 2132711 - RNA, 19 nt, Artificial Sequence
  Description of Artificial Sequence: Synthetic oligonucleotide
gucuguucuguaggugacc

SEQ ID NO: 2132712 - RNA, 19 nt, Artificial Sequence
  Description of Artificial Sequence: Synthetic oligonucleotide
guccugagcucagaccuug

SEQ ID NO: 2132713 - RNA, 19 nt, Artificial Sequence
  Description of Artificial Sequence: Synthetic oligonucleotide
guacgcaggggcuuguccu

SEQ ID NO: 2132714 - RNA, 19 nt, Artificial Sequence
  Description of Artificial Sequence: Synthetic oligonucleotide
gugccgggcaaaauccuug

SEQ ID NO: 2132715 - RNA, 19 nt, Artificial Sequence
  Description of Artificial Sequence: Synthetic oligonucleotide
gggagaaccuuuucuugga

SEQ ID NO: 2132716 - RNA, 19 nt, Artificial Sequence
  Description of Artificial Sequence: Synthetic oligonucleotide
ugugggaagcugggugucu

SEQ ID NO: 2132717 - RNA, 19 nt, Artificial Sequence
  Description of Artificial Sequence: Synthetic oligonucleotide
gggacccggugcuugcugg

SEQ ID NO: 2132718 - RNA, 19 nt, Artificial Sequence
  Description of Artificial Sequence: Synthetic oligonucleotide
gucucgcucgggaaacugc

SEQ ID NO: 2132719 - RNA, 19 nt, Artificial Sequence
  Description of Artificial Sequence: Synthetic oligonucleotide
caucugggagaaccuuuuc

SEQ ID NO: 2132720 - RNA, 19 nt, Artificial Sequence
  Description of Artificial Sequence: Synthetic oligonucleotide
ugcuggcccgggcaaggcu

SEQ ID NO: 2132721 - RNA, 19 nt, Artificial Sequence
  Description of Artificial Sequence: Synthetic oligonucleotide
gggacccaaagccugcuuc

SEQ ID NO: 2132722 - RNA, 19 nt, Artificial Sequence
  Description of Artificial Sequence: Synthetic oligonucleotide
agcuccuguacuggcugag

SEQ ID NO: 2132723 - RNA, 19 nt, Artificial Sequence
  Description of Artificial Sequence: Synthetic oligonucleotide
cucgggacccggugcuugc

SEQ ID NO: 2132724 - RNA, 19 nt, Artificial Sequence
  Description of Artificial Sequence: Synthetic oligonucleotide
gcggucuuuccacacgcgc

SEQ ID NO: 2132725 - RNA, 19 nt, Artificial Sequence
  Description of Artificial Sequence: Synthetic oligonucleotide
ugagagggcucgggacccg

SEQ ID NO: 2132726 - RNA, 19 nt, Artificial Sequence
  Description of Artificial Sequence: Synthetic oligonucleotide
gggaucaacuccuuagcgu

SEQ ID NO: 2132727 - RNA, 19 nt, Artificial Sequence
  Description of Artificial Sequence: Synthetic oligonucleotide
cucuggggauccugggauc

SEQ ID NO: 2132728 - RNA, 19 nt, Artificial Sequence
  Description of Artificial Sequence: Synthetic oligonucleotide
cugccggcgccucuguuuc

SEQ ID NO: 2132729 - RNA, 19 nt, Artificial Sequence
  Description of Artificial Sequence: Synthetic oligonucleotide
ccgggcaaaauccuugguc

SEQ ID NO: 2132730 - RNA, 19 nt, Artificial Sequence
  Description of Artificial Sequence: Synthetic oligonucleotide
ucuaggugccgggcaaaau

SEQ ID NO: 2132731 - RNA, 19 nt, Artificial Sequence
  Description of Artificial Sequence: Synthetic oligonucleotide
ggcugagagggcucgggac

SEQ ID NO: 2132732 - RNA, 19 nt, Artificial Sequence
  Description of Artificial Sequence: Synthetic oligonucleotide
gguucgacucaaacucgag

SEQ ID NO: 2132733 - RNA, 19 nt, Artificial Sequence
  Description of Artificial Sequence: Synthetic oligonucleotide
caacgguguauccauggcu

SEQ ID NO: 2132734 - RNA, 19 nt, Artificial Sequence
  Description of Artificial Sequence: Synthetic oligonucleotide
ccuucaagccgccggcugc

SEQ ID NO: 2132735 - RNA, 19 nt, Artificial Sequence
  Description of Artificial Sequence: Synthetic oligonucleotide
agcggucuuuccacacgcg

SEQ ID NO: 2132736 - RNA, 19 nt, Artificial Sequence
  Description of Artificial Sequence: Synthetic oligonucleotide
gcugccuuugaggggaccc

SEQ ID NO: 2132737 - RNA, 19 nt, Artificial Sequence
  Description of Artificial Sequence: Synthetic oligonucleotide
accuuuucuuggagcgguc

SEQ ID NO: 2132738 - RNA, 19 nt, Artificial Sequence
  Description of Artificial Sequence: Synthetic oligonucleotide
uuggcgcugugggaagcug

SEQ ID NO: 2132739 - RNA, 19 nt, Artificial Sequence
  Description of Artificial Sequence: Synthetic oligonucleotide
ucuugggugccggggccug

SEQ ID NO: 2132740 - RNA, 19 nt, Artificial Sequence
  Description of Artificial Sequence: Synthetic oligonucleotide
cucgggaaacugcgggguc

SEQ ID NO: 2132741 - RNA, 19 nt, Artificial Sequence
  Description of Artificial Sequence: Synthetic oligonucleotide
ugguuuucguugguuucuu

SEQ ID NO: 2132742 - RNA, 19 nt, Artificial Sequence
  Description of Artificial Sequence: Synthetic oligonucleotide
gggcuuccggacucgauuc

SEQ ID NO: 2132743 - RNA, 19 nt, Artificial Sequence
  Description of Artificial Sequence: Synthetic oligonucleotide
gggauccugggaucaacuc

SEQ ID NO: 2132744 - RNA, 19 nt, Artificial Sequence
  Description of Artificial Sequence: Synthetic oligonucleotide
acuggcugagagggcucgg

SEQ ID NO: 2132745 - RNA, 19 nt, Artificial Sequence
  Description of Artificial Sequence: Synthetic oligonucleotide
gugcuugcuggcccgggca

SEQ ID NO: 2132746 - RNA, 19 nt, Artificial Sequence
  Description of Artificial Sequence: Synthetic oligonucleotide
cguguaccaccucugaguc

SEQ ID NO: 2132747 - RNA, 19 nt, Artificial Sequence
  Description of Artificial Sequence: Synthetic oligonucleotide
gacccggugcuugcuggcc

SEQ ID NO: 2132748 - RNA, 19 nt, Artificial Sequence
  Description of Artificial Sequence: Synthetic oligonucleotide
cacacgcgcccggauuugg

SEQ ID NO: 2132749 - RNA, 19 nt, Artificial Sequence
  Description of Artificial Sequence: Synthetic oligonucleotide
gcuagggugucucucuucu

SEQ ID NO: 2132750 - RNA, 19 nt, Artificial Sequence
  Description of Artificial Sequence: Synthetic oligonucleotide
cucagcccggcgcucuuuc

SEQ ID NO: 2132751 - RNA, 19 nt, Artificial Sequence
  Description of Artificial Sequence: Synthetic oligonucleotide
cagggacccggggucaggc

SEQ ID NO: 2132752 - RNA, 19 nt, Artificial Sequence
  Description of Artificial Sequence: Synthetic oligonucleotide
gacagagguuuuaagccuu

SEQ ID NO: 2132753 - RNA, 19 nt, Artificial Sequence
  Description of Artificial Sequence: Synthetic oligonucleotide
uucggaucacuuggacaau

SEQ ID NO: 2132754 - RNA, 19 nt, Artificial Sequence
  Description of Artificial Sequence: Synthetic oligonucleotide
acacgcgcccggauuuggg

SEQ ID NO: 2132755 - RNA, 19 nt, Artificial Sequence
  Description of Artificial Sequence: Synthetic oligonucleotide
gaaccaucugggagaaccu

SEQ ID NO: 2132756 - RNA, 19 nt, Artificial Sequence
  Description of Artificial Sequence: Synthetic oligonucleotide
ggagacuuugguuuucguu

SEQ ID NO: 2132757 - RNA, 19 nt, Artificial Sequence
  Description of Artificial Sequence: Synthetic oligonucleotide
gguuuucguugguuucuuc

SEQ ID NO: 2132758 - RNA, 19 nt, Artificial Sequence
  Description of Artificial Sequence: Synthetic oligonucleotide
gcguguaccaccucugagu

SEQ ID NO: 2132759 - RNA, 19 nt, Artificial Sequence
  Description of Artificial Sequence: Synthetic oligonucleotide
cuuuacgucgaggccaccu

SEQ ID NO: 2132760 - RNA, 19 nt, Artificial Sequence
  Description of Artificial Sequence: Synthetic oligonucleotide
ucuuuacgucgaggccacc

SEQ ID NO: 2132761 - RNA, 19 nt, Artificial Sequence
  Description of Artificial Sequence: Synthetic oligonucleotide
cugugggaagcuggguguc

SEQ ID NO: 2132762 - RNA, 19 nt, Artificial Sequence
  Description of Artificial Sequence: Synthetic oligonucleotide
ggagguacgcaggggcuug

SEQ ID NO: 2132763 - RNA, 19 nt, Artificial Sequence
  Description of Artificial Sequence: Synthetic oligonucleotide
gcuuccuguuucagacacg

SEQ ID NO: 2132764 - RNA, 19 nt, Artificial Sequence
  Description of Artificial Sequence: Synthetic oligonucleotide
uucaagccgccggcugcgc

SEQ ID NO: 2132765 - RNA, 19 nt, Artificial Sequence
  Description of Artificial Sequence: Synthetic oligonucleotide
caguucuccuuguguggga

SEQ ID NO: 2132766 - RNA, 19 nt, Artificial Sequence
  Description of Artificial Sequence: Synthetic oligonucleotide
cccggauuugggcuucccc

SEQ ID NO: 2132767 - RNA, 19 nt, Artificial Sequence
  Description of Artificial Sequence: Synthetic oligonucleotide
cuuccggacucgauucugu

SEQ ID NO: 2132768 - RNA, 19 nt, Artificial Sequence
  Description of Artificial Sequence: Synthetic oligonucleotide
aggcuagggugucucucuu

SEQ ID NO: 2132769 - RNA, 19 nt, Artificial Sequence
  Description of Artificial Sequence: Synthetic oligonucleotide
auccgggcaguggcugcac

SEQ ID NO: 2132770 - RNA, 19 nt, Artificial Sequence
  Description of Artificial Sequence: Synthetic oligonucleotide
ccaccucugaguccaguuc

SEQ ID NO: 2132771 - RNA, 19 nt, Artificial Sequence
  Description of Artificial Sequence: Synthetic oligonucleotide
aggagguacgcaggggcuu

SEQ ID NO: 2132772 - RNA, 19 nt, Artificial Sequence
  Description of Artificial Sequence: Synthetic oligonucleotide
ugcugccaggagguacgca

SEQ ID NO: 2132773 - RNA, 19 nt, Artificial Sequence
  Description of Artificial Sequence: Synthetic oligonucleotide
cagagguuuuaagccuuca

SEQ ID NO: 2132774 - RNA, 19 nt, Artificial Sequence
  Description of Artificial Sequence: Synthetic oligonucleotide
agggacccggggucaggcu

SEQ ID NO: 2132775 - RNA, 19 nt, Artificial Sequence
  Description of Artificial Sequence: Synthetic oligonucleotide
gcccgggcaaggcucuggg

SEQ ID NO: 2132776 - RNA, 19 nt, Artificial Sequence
  Description of Artificial Sequence: Synthetic oligonucleotide
ggaugucagcuccuguacu

SEQ ID NO: 2132777 - RNA, 19 nt, Artificial Sequence
  Description of Artificial Sequence: Synthetic oligonucleotide
gcuuccggacucgauucug

SEQ ID NO: 2132778 - RNA, 19 nt, Artificial Sequence
  Description of Artificial Sequence: Synthetic oligonucleotide
cccggggucaggcucuggc

SEQ ID NO: 2132779 - RNA, 19 nt, Artificial Sequence
  Description of Artificial Sequence: Synthetic oligonucleotide
ccgggcaaggcucugggga

SEQ ID NO: 2132780 - RNA, 19 nt, Artificial Sequence
  Description of Artificial Sequence: Synthetic oligonucleotide
uucucagcccggcgcucuu

SEQ ID NO: 2132781 - RNA, 19 nt, Artificial Sequence
  Description of Artificial Sequence: Synthetic oligonucleotide
ggguucgacucaaacucga

SEQ ID NO: 2132782 - RNA, 19 nt, Artificial Sequence
  Description of Artificial Sequence: Synthetic oligonucleotide
cacggugauccgggcagug

SEQ ID NO: 2132783 - RNA, 19 nt, Artificial Sequence
  Description of Artificial Sequence: Synthetic oligonucleotide
ggagguagcuuguuugguu

SEQ ID NO: 2132784 - RNA, 19 nt, Artificial Sequence
  Description of Artificial Sequence: Synthetic oligonucleotide
ccccuucgggauuacagga

SEQ ID NO: 2132785 - RNA, 19 nt, Artificial Sequence
  Description of Artificial Sequence: Synthetic oligonucleotide
ggcuagggugucucucuuc

SEQ ID NO: 2132786 - RNA, 19 nt, Artificial Sequence
  Description of Artificial Sequence: Synthetic oligonucleotide
guacuggcugagagggcuc

SEQ ID NO: 2132787 - RNA, 19 nt, Artificial Sequence
  Description of Artificial Sequence: Synthetic oligonucleotide
cacucucggagacuuuggu

SEQ ID NO: 2132788 - RNA, 19 nt, Artificial Sequence
  Description of Artificial Sequence: Synthetic oligonucleotide
agccuucaagccgccggcu

SEQ ID NO: 2132789 - RNA, 19 nt, Artificial Sequence
  Description of Artificial Sequence: Synthetic oligonucleotide
cuguuucagacacggugau

SEQ ID NO: 2132790 - RNA, 19 nt, Artificial Sequence
  Description of Artificial Sequence: Synthetic oligonucleotide
ccucaacgguguauccaug

SEQ ID NO: 2132791 - RNA, 19 nt, Artificial Sequence
  Description of Artificial Sequence: Synthetic oligonucleotide
gacccaaagccugcuuccu

SEQ ID NO: 2132792 - RNA, 19 nt, Artificial Sequence
  Description of Artificial Sequence: Synthetic oligonucleotide
ccuguuggcgcugugggaa

SEQ ID NO: 2132793 - RNA, 19 nt, Artificial Sequence
  Description of Artificial Sequence: Synthetic oligonucleotide
cugcugccaggagguacgc

SEQ ID NO: 2132794 - RNA, 19 nt, Artificial Sequence
  Description of Artificial Sequence: Synthetic oligonucleotide
uggcugccuuugaggggac

SEQ ID NO: 2132795 - RNA, 19 nt, Artificial Sequence
  Description of Artificial Sequence: Synthetic oligonucleotide
cugccuuugaggggaccca

SEQ ID NO: 2132796 - RNA, 19 nt, Artificial Sequence
  Description of Artificial Sequence: Synthetic oligonucleotide
gaauggagcgcagcugcuu

SEQ ID NO: 2132797 - RNA, 19 nt, Artificial Sequence
  Description of Artificial Sequence: Synthetic oligonucleotide
acacggugauccgggcagu

SEQ ID NO: 2132798 - RNA, 19 nt, Artificial Sequence
  Description of Artificial Sequence: Synthetic oligonucleotide
gccucaacgguguauccau

SEQ ID NO: 2132799 - RNA, 19 nt, Artificial Sequence
  Description of Artificial Sequence: Synthetic oligonucleotide
cauggcucacguguagccu

SEQ ID NO: 2132800 - RNA, 19 nt, Artificial Sequence
  Description of Artificial Sequence: Synthetic oligonucleotide
ucgggacccggugcuugcu

SEQ ID NO: 2132801 - RNA, 19 nt, Artificial Sequence
  Description of Artificial Sequence: Synthetic oligonucleotide
acgcaggggcuuguccuga

SEQ ID NO: 2132802 - RNA, 19 nt, Artificial Sequence
  Description of Artificial Sequence: Synthetic oligonucleotide
ccggauuugggcuuccccu

SEQ ID NO: 2132803 - RNA, 19 nt, Artificial Sequence
  Description of Artificial Sequence: Synthetic oligonucleotide
gggauuacaggaagcuccu

SEQ ID NO: 2132804 - RNA, 19 nt, Artificial Sequence
  Description of Artificial Sequence: Synthetic oligonucleotide
aggguucucuagagacaga

SEQ ID NO: 2132805 - RNA, 19 nt, Artificial Sequence
  Description of Artificial Sequence: Synthetic oligonucleotide
caccgucuugccagcugga

SEQ ID NO: 2132806 - RNA, 19 nt, Artificial Sequence
  Description of Artificial Sequence: Synthetic oligonucleotide
caagccgccggcugcgccu

SEQ ID NO: 2132807 - RNA, 19 nt, Artificial Sequence
  Description of Artificial Sequence: Synthetic oligonucleotide
gcuggcccgggcaaggcuc

SEQ ID NO: 2132808 - RNA, 19 nt, Artificial Sequence
  Description of Artificial Sequence: Synthetic oligonucleotide
caguggcugcacucucgga

SEQ ID NO: 2132809 - RNA, 19 nt, Artificial Sequence
  Description of Artificial Sequence: Synthetic oligonucleotide
cucuagagacagagguuuu

SEQ ID NO: 2132810 - RNA, 19 nt, Artificial Sequence
  Description of Artificial Sequence: Synthetic oligonucleotide
ggauuacaggaagcuccuc

SEQ ID NO: 2132811 - RNA, 19 nt, Artificial Sequence
  Description of Artificial Sequence: Synthetic oligonucleotide
ugccggcgccucuguuucu

SEQ ID NO: 2132812 - RNA, 19 nt, Artificial Sequence
  Description of Artificial Sequence: Synthetic oligonucleotide
aggccaccugucaccgucu

SEQ ID NO: 2132813 - RNA, 19 nt, Artificial Sequence
  Description of Artificial Sequence: Synthetic oligonucleotide
cugaaccaucugggagaac

SEQ ID NO: 2132814 - RNA, 19 nt, Artificial Sequence
  Description of Artificial Sequence: Synthetic oligonucleotide
cgucgaggccaccugucac

SEQ ID NO: 2132815 - RNA, 19 nt, Artificial Sequence
  Description of Artificial Sequence: Synthetic oligonucleotide
cuuccccuucgggauuaca

SEQ ID NO: 2132816 - RNA, 19 nt, Artificial Sequence
  Description of Artificial Sequence: Synthetic oligonucleotide
cccgggcaaggcucugggg

SEQ ID NO: 2132817 - RNA, 19 nt, Artificial Sequence
  Description of Artificial Sequence: Synthetic oligonucleotide
gcucgggacccggugcuug

SEQ ID NO: 2132818 - RNA, 19 nt, Artificial Sequence
  Description of Artificial Sequence: Synthetic oligonucleotide
guuggcgcugugggaagcu

SEQ ID NO: 2132819 - RNA, 19 nt, Artificial Sequence
  Description of Artificial Sequence: Synthetic oligonucleotide
caaaauccuuggucagcuu

SEQ ID NO: 2132820 - RNA, 19 nt, Artificial Sequence
  Description of Artificial Sequence: Synthetic oligonucleotide
cugggaugucagcuccugu

SEQ ID NO: 2132821 - RNA, 19 nt, Artificial Sequence
  Description of Artificial Sequence: Synthetic oligonucleotide
cccgucucgcucgggaaac

SEQ ID NO: 2132822 - RNA, 19 nt, Artificial Sequence
  Description of Artificial Sequence: Synthetic oligonucleotide
cccuucgggauuacaggaa

SEQ ID NO: 2132823 - RNA, 19 nt, Artificial Sequence
  Description of Artificial Sequence: Synthetic oligonucleotide
gggcccgucucgcucggga

SEQ ID NO: 2132824 - RNA, 19 nt, Artificial Sequence
  Description of Artificial Sequence: Synthetic oligonucleotide
ccggggccuggggagaagg

SEQ ID NO: 2132825 - RNA, 19 nt, Artificial Sequence
  Description of Artificial Sequence: Synthetic oligonucleotide
ggagaagguauaacucguu

SEQ ID NO: 2132826 - RNA, 19 nt, Artificial Sequence
  Description of Artificial Sequence: Synthetic oligonucleotide
cuccugacgcuccuucauu

SEQ ID NO: 2132827 - RNA, 19 nt, Artificial Sequence
  Description of Artificial Sequence: Synthetic oligonucleotide
gggugucucucuucugaau

SEQ ID NO: 2132828 - RNA, 19 nt, Artificial Sequence
  Description of Artificial Sequence: Synthetic oligonucleotide
gcuccuguacuggcugaga

SEQ ID NO: 2132829 - RNA, 19 nt, Artificial Sequence
  Description of Artificial Sequence: Synthetic oligonucleotide
agggcccgucucgcucggg

SEQ ID NO: 2132830 - RNA, 19 nt, Artificial Sequence
  Description of Artificial Sequence: Synthetic oligonucleotide
ccggcgccucuguuucucc

SEQ ID NO: 2132831 - RNA, 19 nt, Artificial Sequence
  Description of Artificial Sequence: Synthetic oligonucleotide
gcucgggaaacugcggggu

SEQ ID NO: 2132832 - RNA, 19 nt, Artificial Sequence
  Description of Artificial Sequence: Synthetic oligonucleotide
gagcaaggcuagggugucu

SEQ ID NO: 2132833 - RNA, 19 nt, Artificial Sequence
  Description of Artificial Sequence: Synthetic oligonucleotide
gccuuucguucauucucua

SEQ ID NO: 2132834 - RNA, 19 nt, Artificial Sequence
  Description of Artificial Sequence: Synthetic oligonucleotide
acccggggucaggcucugg

SEQ ID NO: 2132835 - RNA, 19 nt, Artificial Sequence
  Description of Artificial Sequence: Synthetic oligonucleotide
gcccgucucgcucgggaaa

SEQ ID NO: 2132836 - RNA, 19 nt, Artificial Sequence
  Description of Artificial Sequence: Synthetic oligonucleotide
gggcaaggcucuggggauc

SEQ ID NO: 2132837 - RNA, 19 nt, Artificial Sequence
  Description of Artificial Sequence: Synthetic oligonucleotide
ggcuuccggacucgauucu

SEQ ID NO: 2132838 - RNA, 19 nt, Artificial Sequence
  Description of Artificial Sequence: Synthetic oligonucleotide
gcaaggcuagggugucucu

SEQ ID NO: 2132839 - RNA, 19 nt, Artificial Sequence
  Description of Artificial Sequence: Synthetic oligonucleotide
cgggaaacugcggggucag

SEQ ID NO: 2132840 - RNA, 19 nt, Artificial Sequence
  Description of Artificial Sequence: Synthetic oligonucleotide
gagguacgcaggggcuugu

SEQ ID NO: 2132841 - RNA, 19 nt, Artificial Sequence
  Description of Artificial Sequence: Synthetic oligonucleotide
ccaucugggagaaccuuuu

SEQ ID NO: 2132842 - RNA, 19 nt, Artificial Sequence
  Description of Artificial Sequence: Synthetic oligonucleotide
ccuuagcguguaccaccuc

SEQ ID NO: 2132843 - RNA, 19 nt, Artificial Sequence
  Description of Artificial Sequence: Synthetic oligonucleotide
ggcaggguuucggaucacu

SEQ ID NO: 2132844 - RNA, 19 nt, Artificial Sequence
  Description of Artificial Sequence: Synthetic oligonucleotide
cgucucgcucgggaaacug

SEQ ID NO: 2132845 - RNA, 19 nt, Artificial Sequence
  Description of Artificial Sequence: Synthetic oligonucleotide
ccuuuucuuggagcggucu

SEQ ID NO: 2132846 - RNA, 19 nt, Artificial Sequence
  Description of Artificial Sequence: Synthetic oligonucleotide
gccggcgccucuguuucuc

SEQ ID NO: 2132847 - RNA, 19 nt, Artificial Sequence
  Description of Artificial Sequence: Synthetic oligonucleotide
gggcucgggacccggugcu

SEQ ID NO: 2132848 - RNA, 19 nt, Artificial Sequence
  Description of Artificial Sequence: Synthetic oligonucleotide
ggcugcgccucaacggugu

SEQ ID NO: 2132849 - RNA, 19 nt, Artificial Sequence
  Description of Artificial Sequence: Synthetic oligonucleotide
ggcuuccccuucgggauua

SEQ ID NO: 2132850 - RNA, 19 nt, Artificial Sequence
  Description of Artificial Sequence: Synthetic oligonucleotide
gccuuugaggggacccaaa

SEQ ID NO: 2132851 - RNA, 19 nt, Artificial Sequence
  Description of Artificial Sequence: Synthetic oligonucleotide
ggugccgggcaaaauccuu

SEQ ID NO: 2132852 - RNA, 19 nt, Artificial Sequence
  Description of Artificial Sequence: Synthetic oligonucleotide
gccgggcaaaauccuuggu

SEQ ID NO: 2132853 - RNA, 19 nt, Artificial Sequence
  Description of Artificial Sequence: Synthetic oligonucleotide
ccacacgcgcccggauuug

SEQ ID NO: 2132854 - RNA, 19 nt, Artificial Sequence
  Description of Artificial Sequence: Synthetic oligonucleotide
ccggcugcgccucaacggu

SEQ ID NO: 2132855 - RNA, 19 nt, Artificial Sequence
  Description of Artificial Sequence: Synthetic oligonucleotide
cagcccggcgcucuuucuu

SEQ ID NO: 2132856 - RNA, 19 nt, Artificial Sequence
  Description of Artificial Sequence: Synthetic oligonucleotide
cgauucugucuguucugua

SEQ ID NO: 2132857 - RNA, 19 nt, Artificial Sequence
  Description of Artificial Sequence: Synthetic oligonucleotide
cgggacccggugcuugcug

SEQ ID NO: 2132858 - RNA, 19 nt, Artificial Sequence
  Description of Artificial Sequence: Synthetic oligonucleotide
cggcugcgccucaacggug

SEQ ID NO: 2132859 - RNA, 19 nt, Artificial Sequence
  Description of Artificial Sequence: Synthetic oligonucleotide
ggacucgauucugucuguu

SEQ ID NO: 2132860 - RNA, 19 nt, Artificial Sequence
  Description of Artificial Sequence: Synthetic oligonucleotide
ccugccggcgccucuguuu

SEQ ID NO: 2132861 - RNA, 19 nt, Artificial Sequence
  Description of Artificial Sequence: Synthetic oligonucleotide
gcugcgccucaacggugua

SEQ ID NO: 2132862 - RNA, 19 nt, Artificial Sequence
  Description of Artificial Sequence: Synthetic oligonucleotide
gcccggcgcucuuucuucu

SEQ ID NO: 2132863 - RNA, 19 nt, Artificial Sequence
  Description of Artificial Sequence: Synthetic oligonucleotide
ccucuaggugccgggcaaa

SEQ ID NO: 2132864 - RNA, 19 nt, Artificial Sequence
  Description of Artificial Sequence: Synthetic oligonucleotide
cugcacucucggagacuuu

SEQ ID NO: 2132865 - RNA, 19 nt, Artificial Sequence
  Description of Artificial Sequence: Synthetic oligonucleotide
gcgcccggauuugggcuuc

SEQ ID NO: 2132866 - RNA, 19 nt, Artificial Sequence
  Description of Artificial Sequence: Synthetic oligonucleotide
ccgccggcugcgccucaac

SEQ ID NO: 2132867 - RNA, 19 nt, Artificial Sequence
  Description of Artificial Sequence: Synthetic oligonucleotide
cugcggggucaggaagggu

SEQ ID NO: 2132868 - RNA, 19 nt, Artificial Sequence
  Description of Artificial Sequence: Synthetic oligonucleotide
gggcuuccccuucgggauu

SEQ ID NO: 2132869 - RNA, 19 nt, Artificial Sequence
  Description of Artificial Sequence: Synthetic oligonucleotide
cgggcaaggcucuggggau

SEQ ID NO: 2132870 - RNA, 19 nt, Artificial Sequence
  Description of Artificial Sequence: Synthetic oligonucleotide
ggucaggcucuggcugccu

SEQ ID NO: 2132871 - RNA, 19 nt, Artificial Sequence
  Description of Artificial Sequence: Synthetic oligonucleotide
cggagacuuugguuuucgu

SEQ ID NO: 2132872 - RNA, 19 nt, Artificial Sequence
  Description of Artificial Sequence: Synthetic oligonucleotide
gcgcugugggaagcugggu

SEQ ID NO: 2132873 - RNA, 19 nt, Artificial Sequence
  Description of Artificial Sequence: Synthetic oligonucleotide
cgcccggauuugggcuucc

SEQ ID NO: 2132874 - RNA, 19 nt, Artificial Sequence
  Description of Artificial Sequence: Synthetic oligonucleotide
cgcgcccggauuugggcuu

SEQ ID NO: 2132875 - RNA, 19 nt, Artificial Sequence
  Description of Artificial Sequence: Synthetic oligonucleotide
ccgucucgcucgggaaacu

SEQ ID NO: 2132876 - RNA, 19 nt, Artificial Sequence
  Description of Artificial Sequence: Synthetic oligonucleotide
cgaggccaccugucaccgu

SEQ ID NO: 2132877 - RNA, 19 nt, Artificial Sequence
  Description of Artificial Sequence: Synthetic oligonucleotide
acaacaucaacacagacac

SEQ ID NO: 2132878 - RNA, 19 nt, Artificial Sequence
  Description of Artificial Sequence: Synthetic oligonucleotide
uuuaaaacccuccucaucc

SEQ ID NO: 2132879 - RNA, 19 nt, Artificial Sequence
  Description of Artificial Sequence: Synthetic oligonucleotide
ugugagaacacaaaaucgg

SEQ ID NO: 2132880 - RNA, 19 nt, Artificial Sequence
  Description of Artificial Sequence: Synthetic oligonucleotide
cuugcaggaacucagaugg

SEQ ID NO: 2132881 - RNA, 19 nt, Artificial Sequence
  Description of Artificial Sequence: Synthetic oligonucleotide
agugugagaacacaaaauc

SEQ ID NO: 2132882 - RNA, 19 nt, Artificial Sequence
  Description of Artificial Sequence: Synthetic oligonucleotide
agaugauacguucaucacc

SEQ ID NO: 2132883 - RNA, 19 nt, Artificial Sequence
  Description of Artificial Sequence: Synthetic oligonucleotide
ucaaugacacugcugaucc

SEQ ID NO: 2132884 - RNA, 19 nt, Artificial Sequence
  Description of Artificial Sequence: Synthetic oligonucleotide
aaugcugggauccuggugu

SEQ ID NO: 2132885 - RNA, 19 nt, Artificial Sequence
  Description of Artificial Sequence: Synthetic oligonucleotide
uucaucgaaacccaggggc

SEQ ID NO: 2132886 - RNA, 19 nt, Artificial Sequence
  Description of Artificial Sequence: Synthetic oligonucleotide
gaucacuacagacaggucc

SEQ ID NO: 2132887 - RNA, 19 nt, Artificial Sequence
  Description of Artificial Sequence: Synthetic oligonucleotide
cacaaucccacauucaucg

SEQ ID NO: 2132888 - RNA, 19 nt, Artificial Sequence
  Description of Artificial Sequence: Synthetic oligonucleotide
ugagaugauacguucauca

SEQ ID NO: 2132889 - RNA, 19 nt, Artificial Sequence
  Description of Artificial Sequence: Synthetic oligonucleotide
aacaucaacacagacacgu

SEQ ID NO: 2132890 - RNA, 19 nt, Artificial Sequence
  Description of Artificial Sequence: Synthetic oligonucleotide
aagaacuugcaccggcugc

SEQ ID NO: 2132891 - RNA, 19 nt, Artificial Sequence
  Description of Artificial Sequence: Synthetic oligonucleotide
auaacaauggagauguaac

SEQ ID NO: 2132892 - RNA, 19 nt, Artificial Sequence
  Description of Artificial Sequence: Synthetic oligonucleotide
aaguugaaggugcugaugu

SEQ ID NO: 2132893 - RNA, 19 nt, Artificial Sequence
  Description of Artificial Sequence: Synthetic oligonucleotide
aaugacacugcugaucccg

SEQ ID NO: 2132894 - RNA, 19 nt, Artificial Sequence
  Description of Artificial Sequence: Synthetic oligonucleotide
uggaguacaucaaugacac

SEQ ID NO: 2132895 - RNA, 19 nt, Artificial Sequence
  Description of Artificial Sequence: Synthetic oligonucleotide
uggguguagagccagaggc

SEQ ID NO: 2132896 - RNA, 19 nt, Artificial Sequence
  Description of Artificial Sequence: Synthetic oligonucleotide
gauacguucaucaccagcc

SEQ ID NO: 2132897 - RNA, 19 nt, Artificial Sequence
  Description of Artificial Sequence: Synthetic oligonucleotide
aacacaaaaucgguucugc

SEQ ID NO: 2132898 - RNA, 19 nt, Artificial Sequence
  Description of Artificial Sequence: Synthetic oligonucleotide
gauguaacccucaaugagg

SEQ ID NO: 2132899 - RNA, 19 nt, Artificial Sequence
  Description of Artificial Sequence: Synthetic oligonucleotide
aauguuucgggguccagug

SEQ ID NO: 2132900 - RNA, 19 nt, Artificial Sequence
  Description of Artificial Sequence: Synthetic oligonucleotide
uagauuuggaacuccuggg

SEQ ID NO: 2132901 - RNA, 19 nt, Artificial Sequence
  Description of Artificial Sequence: Synthetic oligonucleotide
agauguaacccucaaugag

SEQ ID NO: 2132902 - RNA, 19 nt, Artificial Sequence
  Description of Artificial Sequence: Synthetic oligonucleotide
ugaguguguaaucuuccgg

SEQ ID NO: 2132903 - RNA, 19 nt, Artificial Sequence
  Description of Artificial Sequence: Synthetic oligonucleotide
cauucaucgaaacccaggg

SEQ ID NO: 2132904 - RNA, 19 nt, Artificial Sequence
  Description of Artificial Sequence: Synthetic oligonucleotide
gagaacacaaaaucgguuc

SEQ ID NO: 2132905 - RNA, 19 nt, Artificial Sequence
  Description of Artificial Sequence: Synthetic oligonucleotide
aaugggaugcaccgugggg

SEQ ID NO: 2132906 - RNA, 19 nt, Artificial Sequence
  Description of Artificial Sequence: Synthetic oligonucleotide
guggacaacaucaacacag

SEQ ID NO: 2132907 - RNA, 19 nt, Artificial Sequence
  Description of Artificial Sequence: Synthetic oligonucleotide
acacucaggacccgcaacc

SEQ ID NO: 2132908 - RNA, 19 nt, Artificial Sequence
  Description of Artificial Sequence: Synthetic oligonucleotide
cuugguaacuccagcagcc

SEQ ID NO: 2132909 - RNA, 19 nt, Artificial Sequence
  Description of Artificial Sequence: Synthetic oligonucleotide
agggagaaagcgaagaacg

SEQ ID NO: 2132910 - RNA, 19 nt, Artificial Sequence
  Description of Artificial Sequence: Synthetic oligonucleotide
gaugauacguucaucacca

SEQ ID NO: 2132911 - RNA, 19 nt, Artificial Sequence
  Description of Artificial Sequence: Synthetic oligonucleotide
auguaauaggcagagaugu

SEQ ID NO: 2132912 - RNA, 19 nt, Artificial Sequence
  Description of Artificial Sequence: Synthetic oligonucleotide
aacacagacacguggugcu

SEQ ID NO: 2132913 - RNA, 19 nt, Artificial Sequence
  Description of Artificial Sequence: Synthetic oligonucleotide
ugcauccauaacaauggag

SEQ ID NO: 2132914 - RNA, 19 nt, Artificial Sequence
  Description of Artificial Sequence: Synthetic oligonucleotide
aaaacccuccucauccacc

SEQ ID NO: 2132915 - RNA, 19 nt, Artificial Sequence
  Description of Artificial Sequence: Synthetic oligonucleotide
ucccguaccaggaugaagu

SEQ ID NO: 2132916 - RNA, 19 nt, Artificial Sequence
  Description of Artificial Sequence: Synthetic oligonucleotide
ucuccagaggaacugguca

SEQ ID NO: 2132917 - RNA, 19 nt, Artificial Sequence
  Description of Artificial Sequence: Synthetic oligonucleotide
aacccgguguucuaggaug

SEQ ID NO: 2132918 - RNA, 19 nt, Artificial Sequence
  Description of Artificial Sequence: Synthetic oligonucleotide
ugauacguucaucaccagc

SEQ ID NO: 2132919 - RNA, 19 nt, Artificial Sequence
  Description of Artificial Sequence: Synthetic oligonucleotide
uucccuauggaccuuugga

SEQ ID NO: 2132920 - RNA, 19 nt, Artificial Sequence
  Description of Artificial Sequence: Synthetic oligonucleotide
guaacccucaaugagggag

SEQ ID NO: 2132921 - RNA, 19 nt, Artificial Sequence
  Description of Artificial Sequence: Synthetic oligonucleotide
gugugagaacacaaaaucg

SEQ ID NO: 2132922 - RNA, 19 nt, Artificial Sequence
  Description of Artificial Sequence: Synthetic oligonucleotide
aacaggcacagguuccccg

SEQ ID NO: 2132923 - RNA, 19 nt, Artificial Sequence
  Description of Artificial Sequence: Synthetic oligonucleotide
uguguaaucuuccgggguc

SEQ ID NO: 2132924 - RNA, 19 nt, Artificial Sequence
  Description of Artificial Sequence: Synthetic oligonucleotide
acaauggagauguaacccu

SEQ ID NO: 2132925 - RNA, 19 nt, Artificial Sequence
  Description of Artificial Sequence: Synthetic oligonucleotide
cacugugugaguagaagag

SEQ ID NO: 2132926 - RNA, 19 nt, Artificial Sequence
  Description of Artificial Sequence: Synthetic oligonucleotide
gugcugauguaauaggcag

SEQ ID NO: 2132927 - RNA, 19 nt, Artificial Sequence
  Description of Artificial Sequence: Synthetic oligonucleotide
aacgggauggagcuugacu

SEQ ID NO: 2132928 - RNA, 19 nt, Artificial Sequence
  Description of Artificial Sequence: Synthetic oligonucleotide
uacaucaaugacacugcug

SEQ ID NO: 2132929 - RNA, 19 nt, Artificial Sequence
  Description of Artificial Sequence: Synthetic oligonucleotide
augaguguguaaucuuccg

SEQ ID NO: 2132930 - RNA, 19 nt, Artificial Sequence
  Description of Artificial Sequence: Synthetic oligonucleotide
caugaguguguaaucuucc

SEQ ID NO: 2132931 - RNA, 19 nt, Artificial Sequence
  Description of Artificial Sequence: Synthetic oligonucleotide
ucuaggaugugcaguuacc

SEQ ID NO: 2132932 - RNA, 19 nt, Artificial Sequence
  Description of Artificial Sequence: Synthetic oligonucleotide
aagaacgggauggagcuug

SEQ ID NO: 2132933 - RNA, 19 nt, Artificial Sequence
  Description of Artificial Sequence: Synthetic oligonucleotide
ugaaugggaugcaccgugg

SEQ ID NO: 2132934 - RNA, 19 nt, Artificial Sequence
  Description of Artificial Sequence: Synthetic oligonucleotide
aucuugguaacuccagcag

SEQ ID NO: 2132935 - RNA, 19 nt, Artificial Sequence
  Description of Artificial Sequence: Synthetic oligonucleotide
ugcaggaacucagaugggg

SEQ ID NO: 2132936 - RNA, 19 nt, Artificial Sequence
  Description of Artificial Sequence: Synthetic oligonucleotide
acacaaaaucgguucugcg

SEQ ID NO: 2132937 - RNA, 19 nt, Artificial Sequence
  Description of Artificial Sequence: Synthetic oligonucleotide
agguuccccgccuacuucc

SEQ ID NO: 2132938 - RNA, 19 nt, Artificial Sequence
  Description of Artificial Sequence: Synthetic oligonucleotide
agaacacaaaaucgguucu

SEQ ID NO: 2132939 - RNA, 19 nt, Artificial Sequence
  Description of Artificial Sequence: Synthetic oligonucleotide
ugugagaugauacguucau

SEQ ID NO: 2132940 - RNA, 19 nt, Artificial Sequence
  Description of Artificial Sequence: Synthetic oligonucleotide
uccgucaggcugaagaacu

SEQ ID NO: 2132941 - RNA, 19 nt, Artificial Sequence
  Description of Artificial Sequence: Synthetic oligonucleotide
cagggcauggucaaaguug

SEQ ID NO: 2132942 - RNA, 19 nt, Artificial Sequence
  Description of Artificial Sequence: Synthetic oligonucleotide
acaggcacagguuccccgc

SEQ ID NO: 2132943 - RNA, 19 nt, Artificial Sequence
  Description of Artificial Sequence: Synthetic oligonucleotide
uaaucuuccggggucuccg

SEQ ID NO: 2132944 - RNA, 19 nt, Artificial Sequence
  Description of Artificial Sequence: Synthetic oligonucleotide
ggcugaagaacuugcaccg

SEQ ID NO: 2132945 - RNA, 19 nt, Artificial Sequence
  Description of Artificial Sequence: Synthetic oligonucleotide
aauagccggcaauguuucg

SEQ ID NO: 2132946 - RNA, 19 nt, Artificial Sequence
  Description of Artificial Sequence: Synthetic oligonucleotide
agagcaguuugaugagugg

SEQ ID NO: 2132947 - RNA, 19 nt, Artificial Sequence
  Description of Artificial Sequence: Synthetic oligonucleotide
acuugcaggaacucagaug

SEQ ID NO: 2132948 - RNA, 19 nt, Artificial Sequence
  Description of Artificial Sequence: Synthetic oligonucleotide
uucccgguagauuuggaac

SEQ ID NO: 2132949 - RNA, 19 nt, Artificial Sequence
  Description of Artificial Sequence: Synthetic oligonucleotide
ugcugaucccgucuucagg

SEQ ID NO: 2132950 - RNA, 19 nt, Artificial Sequence
  Description of Artificial Sequence: Synthetic oligonucleotide
ucauccaccaugagugugu

SEQ ID NO: 2132951 - RNA, 19 nt, Artificial Sequence
  Description of Artificial Sequence: Synthetic oligonucleotide
ucggggaaagccauugcug

SEQ ID NO: 2132952 - RNA, 19 nt, Artificial Sequence
  Description of Artificial Sequence: Synthetic oligonucleotide
aaaucgguucugcgggcuc

SEQ ID NO: 2132953 - RNA, 19 nt, Artificial Sequence
  Description of Artificial Sequence: Synthetic oligonucleotide
aaugacagaccgggcaauc

SEQ ID NO: 2132954 - RNA, 19 nt, Artificial Sequence
  Description of Artificial Sequence: Synthetic oligonucleotide
ucugguauguggacaacau

SEQ ID NO: 2132955 - RNA, 19 nt, Artificial Sequence
  Description of Artificial Sequence: Synthetic oligonucleotide
ugagaacacaaaaucgguu

SEQ ID NO: 2132956 - RNA, 19 nt, Artificial Sequence
  Description of Artificial Sequence: Synthetic oligonucleotide
gagauguaacccucaauga

SEQ ID NO: 2132957 - RNA, 19 nt, Artificial Sequence
  Description of Artificial Sequence: Synthetic oligonucleotide
auguaacccucaaugaggg

SEQ ID NO: 2132958 - RNA, 19 nt, Artificial Sequence
  Description of Artificial Sequence: Synthetic oligonucleotide
aggugcugauguaauaggc

SEQ ID NO: 2132959 - RNA, 19 nt, Artificial Sequence
  Description of Artificial Sequence: Synthetic oligonucleotide
ucaucgaaacccaggggcu

SEQ ID NO: 2132960 - RNA, 19 nt, Artificial Sequence
  Description of Artificial Sequence: Synthetic oligonucleotide
acacugugugaguagaaga

SEQ ID NO: 2132961 - RNA, 19 nt, Artificial Sequence
  Description of Artificial Sequence: Synthetic oligonucleotide
agaacuugcaccggcugcg

SEQ ID NO: 2132962 - RNA, 19 nt, Artificial Sequence
  Description of Artificial Sequence: Synthetic oligonucleotide
uuugaugagugggugggug

SEQ ID NO: 2132963 - RNA, 19 nt, Artificial Sequence
  Description of Artificial Sequence: Synthetic oligonucleotide
uccaccaugaguguguaau

SEQ ID NO: 2132964 - RNA, 19 nt, Artificial Sequence
  Description of Artificial Sequence: Synthetic oligonucleotide
guaauaggcagagauguca

SEQ ID NO: 2132965 - RNA, 19 nt, Artificial Sequence
  Description of Artificial Sequence: Synthetic oligonucleotide
gacacugugugaguagaag

SEQ ID NO: 2132966 - RNA, 19 nt, Artificial Sequence
  Description of Artificial Sequence: Synthetic oligonucleotide
auagccggcaauguuucgg

SEQ ID NO: 2132967 - RNA, 19 nt, Artificial Sequence
  Description of Artificial Sequence: Synthetic oligonucleotide
uguggacaacaucaacaca

SEQ ID NO: 2132968 - RNA, 19 nt, Artificial Sequence
  Description of Artificial Sequence: Synthetic oligonucleotide
uaacccucaaugagggaga

SEQ ID NO: 2132969 - RNA, 19 nt, Artificial Sequence
  Description of Artificial Sequence: Synthetic oligonucleotide
guagaagaggacaucgaug

SEQ ID NO: 2132970 - RNA, 19 nt, Artificial Sequence
  Description of Artificial Sequence: Synthetic oligonucleotide
aguguguggaucacuacag

SEQ ID NO: 2132971 - RNA, 19 nt, Artificial Sequence
  Description of Artificial Sequence: Synthetic oligonucleotide
caaucuugguaacuccagc

SEQ ID NO: 2132972 - RNA, 19 nt, Artificial Sequence
  Description of Artificial Sequence: Synthetic oligonucleotide
ucccgguagauuuggaacu

SEQ ID NO: 2132973 - RNA, 19 nt, Artificial Sequence
  Description of Artificial Sequence: Synthetic oligonucleotide
acauucaucgaaacccagg

SEQ ID NO: 2132974 - RNA, 19 nt, Artificial Sequence
  Description of Artificial Sequence: Synthetic oligonucleotide
ugcaucacugcaccgcugu

SEQ ID NO: 2132975 - RNA, 19 nt, Artificial Sequence
  Description of Artificial Sequence: Synthetic oligonucleotide
auugcuggaaucaucccug

SEQ ID NO: 2132976 - RNA, 19 nt, Artificial Sequence
  Description of Artificial Sequence: Synthetic oligonucleotide
cccacauucaucgaaaccc

SEQ ID NO: 2132977 - RNA, 19 nt, Artificial Sequence
  Description of Artificial Sequence: Synthetic oligonucleotide
aaccagggcauggucaaag

SEQ ID NO: 2132978 - RNA, 19 nt, Artificial Sequence
  Description of Artificial Sequence: Synthetic oligonucleotide
gaagccaggccuucuugcc

SEQ ID NO: 2132979 - RNA, 19 nt, Artificial Sequence
  Description of Artificial Sequence: Synthetic oligonucleotide
gagggugguggcaauagcc

SEQ ID NO: 2132980 - RNA, 19 nt, Artificial Sequence
  Description of Artificial Sequence: Synthetic oligonucleotide
caguuugaugagugggugg

SEQ ID NO: 2132981 - RNA, 19 nt, Artificial Sequence
  Description of Artificial Sequence: Synthetic oligonucleotide
uguaauaggcagagauguc

SEQ ID NO: 2132982 - RNA, 19 nt, Artificial Sequence
  Description of Artificial Sequence: Synthetic oligonucleotide
ucccuauggaccuuuggaa

SEQ ID NO: 2132983 - RNA, 19 nt, Artificial Sequence
  Description of Artificial Sequence: Synthetic oligonucleotide
aucccacauucaucgaaac

SEQ ID NO: 2132984 - RNA, 19 nt, Artificial Sequence
  Description of Artificial Sequence: Synthetic oligonucleotide
gauggagcuugacucagga

SEQ ID NO: 2132985 - RNA, 19 nt, Artificial Sequence
  Description of Artificial Sequence: Synthetic oligonucleotide
uucugcgggcucugaaugg

SEQ ID NO: 2132986 - RNA, 19 nt, Artificial Sequence
  Description of Artificial Sequence: Synthetic oligonucleotide
gaucccgucuucaggaacc

SEQ ID NO: 2132987 - RNA, 19 nt, Artificial Sequence
  Description of Artificial Sequence: Synthetic oligonucleotide
cuugcaccggcugcgaugg

SEQ ID NO: 2132988 - RNA, 19 nt, Artificial Sequence
  Description of Artificial Sequence: Synthetic oligonucleotide
gucuccgucaggcugaaga

SEQ ID NO: 2132989 - RNA, 19 nt, Artificial Sequence
  Description of Artificial Sequence: Synthetic oligonucleotide
gaacuccugggccagugug

SEQ ID NO: 2132990 - RNA, 19 nt, Artificial Sequence
  Description of Artificial Sequence: Synthetic oligonucleotide
ucgcuggaguacaucaaug

SEQ ID NO: 2132991 - RNA, 19 nt, Artificial Sequence
  Description of Artificial Sequence: Synthetic oligonucleotide
ucugucugguauguggaca

SEQ ID NO: 2132992 - RNA, 19 nt, Artificial Sequence
  Description of Artificial Sequence: Synthetic oligonucleotide
uucgcuggaguacaucaau

SEQ ID NO: 2132993 - RNA, 19 nt, Artificial Sequence
  Description of Artificial Sequence: Synthetic oligonucleotide
ucugcgggcucugaauggg

SEQ ID NO: 2132994 - RNA, 19 nt, Artificial Sequence
  Description of Artificial Sequence: Synthetic oligonucleotide
guggggcaaugacagaccg

SEQ ID NO: 2132995 - RNA, 19 nt, Artificial Sequence
  Description of Artificial Sequence: Synthetic oligonucleotide
ugguaacuccagcagccug

SEQ ID NO: 2132996 - RNA, 19 nt, Artificial Sequence
  Description of Artificial Sequence: Synthetic oligonucleotide
auccauaacaauggagaug

SEQ ID NO: 2132997 - RNA, 19 nt, Artificial Sequence
  Description of Artificial Sequence: Synthetic oligonucleotide
caauagccggcaauguuuc

SEQ ID NO: 2132998 - RNA, 19 nt, Artificial Sequence
  Description of Artificial Sequence: Synthetic oligonucleotide
uggcgggcgacacucagga

SEQ ID NO: 2132999 - RNA, 19 nt, Artificial Sequence
  Description of Artificial Sequence: Synthetic oligonucleotide
aaaaucgguucugcgggcu

SEQ ID NO: 2133000 - RNA, 19 nt, Artificial Sequence
  Description of Artificial Sequence: Synthetic oligonucleotide
gaacacaaaaucgguucug

SEQ ID NO: 2133001 - RNA, 19 nt, Artificial Sequence
  Description of Artificial Sequence: Synthetic oligonucleotide
gcauccauaacaauggaga

SEQ ID NO: 2133002 - RNA, 19 nt, Artificial Sequence
  Description of Artificial Sequence: Synthetic oligonucleotide
guucugcgggcucugaaug

SEQ ID NO: 2133003 - RNA, 19 nt, Artificial Sequence
  Description of Artificial Sequence: Synthetic oligonucleotide
ucgggguccagugugagaa

SEQ ID NO: 2133004 - RNA, 19 nt, Artificial Sequence
  Description of Artificial Sequence: Synthetic oligonucleotide
uggcaacaggcacagguuc

SEQ ID NO: 2133005 - RNA, 19 nt, Artificial Sequence
  Description of Artificial Sequence: Synthetic oligonucleotide
uggggcaaugacagaccgg

SEQ ID NO: 2133006 - RNA, 19 nt, Artificial Sequence
  Description of Artificial Sequence: Synthetic oligonucleotide
cuauggaccuuuggaagcc

SEQ ID NO: 2133007 - RNA, 19 nt, Artificial Sequence
  Description of Artificial Sequence: Synthetic oligonucleotide
cccucaaugagggagaaag

SEQ ID NO: 2133008 - RNA, 19 nt, Artificial Sequence
  Description of Artificial Sequence: Synthetic oligonucleotide
uugaugagugggugggugu

SEQ ID NO: 2133009 - RNA, 19 nt, Artificial Sequence
  Description of Artificial Sequence: Synthetic oligonucleotide
gaccuuuggaagccaggcc

SEQ ID NO: 2133010 - RNA, 19 nt, Artificial Sequence
  Description of Artificial Sequence: Synthetic oligonucleotide
uugcuggaaucaucccugg

SEQ ID NO: 2133011 - RNA, 19 nt, Artificial Sequence
  Description of Artificial Sequence: Synthetic oligonucleotide
gaccgggcaaucuugguaa

SEQ ID NO: 2133012 - RNA, 19 nt, Artificial Sequence
  Description of Artificial Sequence: Synthetic oligonucleotide
cauaacaauggagauguaa

SEQ ID NO: 2133013 - RNA, 19 nt, Artificial Sequence
  Description of Artificial Sequence: Synthetic oligonucleotide
agggugguggcaauagccg

SEQ ID NO: 2133014 - RNA, 19 nt, Artificial Sequence
  Description of Artificial Sequence: Synthetic oligonucleotide
ugggucucugcauccauaa

SEQ ID NO: 2133015 - RNA, 19 nt, Artificial Sequence
  Description of Artificial Sequence: Synthetic oligonucleotide
ugaucccgucuucaggaac

SEQ ID NO: 2133016 - RNA, 19 nt, Artificial Sequence
  Description of Artificial Sequence: Synthetic oligonucleotide
augcgcaccauccuccaca

SEQ ID NO: 2133017 - RNA, 19 nt, Artificial Sequence
  Description of Artificial Sequence: Synthetic oligonucleotide
aucaacacagacacguggu

SEQ ID NO: 2133018 - RNA, 19 nt, Artificial Sequence
  Description of Artificial Sequence: Synthetic oligonucleotide
guggcaauagccggcaaug

SEQ ID NO: 2133019 - RNA, 19 nt, Artificial Sequence
  Description of Artificial Sequence: Synthetic oligonucleotide
ccuauggaccuuuggaagc

SEQ ID NO: 2133020 - RNA, 19 nt, Artificial Sequence
  Description of Artificial Sequence: Synthetic oligonucleotide
guggguguagagccagagg

SEQ ID NO: 2133021 - RNA, 19 nt, Artificial Sequence
  Description of Artificial Sequence: Synthetic oligonucleotide
agcuugacucaggaccacc

SEQ ID NO: 2133022 - RNA, 19 nt, Artificial Sequence
  Description of Artificial Sequence: Synthetic oligonucleotide
uaggaugugcaguuaccau

SEQ ID NO: 2133023 - RNA, 19 nt, Artificial Sequence
  Description of Artificial Sequence: Synthetic oligonucleotide
ucuccgucaggcugaagaa

SEQ ID NO: 2133024 - RNA, 19 nt, Artificial Sequence
  Description of Artificial Sequence: Synthetic oligonucleotide
ugaaggugcugauguaaua

SEQ ID NO: 2133025 - RNA, 19 nt, Artificial Sequence
  Description of Artificial Sequence: Synthetic oligonucleotide
caccgcugugagaugauac

SEQ ID NO: 2133026 - RNA, 19 nt, Artificial Sequence
  Description of Artificial Sequence: Synthetic oligonucleotide
gacagaccgggcaaucuug

SEQ ID NO: 2133027 - RNA, 19 nt, Artificial Sequence
  Description of Artificial Sequence: Synthetic oligonucleotide
ugcaccggcugcgaugggg

SEQ ID NO: 2133028 - RNA, 19 nt, Artificial Sequence
  Description of Artificial Sequence: Synthetic oligonucleotide
gacacucaggacccgcaac

SEQ ID NO: 2133029 - RNA, 19 nt, Artificial Sequence
  Description of Artificial Sequence: Synthetic oligonucleotide
caucccuggcaacaggcac

SEQ ID NO: 2133030 - RNA, 19 nt, Artificial Sequence
  Description of Artificial Sequence: Synthetic oligonucleotide
caguguguggaucacuaca

SEQ ID NO: 2133031 - RNA, 19 nt, Artificial Sequence
  Description of Artificial Sequence: Synthetic oligonucleotide
cuugccuucgcuggaguac

SEQ ID NO: 2133032 - RNA, 19 nt, Artificial Sequence
  Description of Artificial Sequence: Synthetic oligonucleotide
ugacagaccgggcaaucuu

SEQ ID NO: 2133033 - RNA, 19 nt, Artificial Sequence
  Description of Artificial Sequence: Synthetic oligonucleotide
cuggucagcaagaggucac

SEQ ID NO: 2133034 - RNA, 19 nt, Artificial Sequence
  Description of Artificial Sequence: Synthetic oligonucleotide
augagggugguggcaauag

SEQ ID NO: 2133035 - RNA, 19 nt, Artificial Sequence
  Description of Artificial Sequence: Synthetic oligonucleotide
ugcuggaaucaucccuggc

SEQ ID NO: 2133036 - RNA, 19 nt, Artificial Sequence
  Description of Artificial Sequence: Synthetic oligonucleotide
ggcaaugacagaccgggca

SEQ ID NO: 2133037 - RNA, 19 nt, Artificial Sequence
  Description of Artificial Sequence: Synthetic oligonucleotide
acccuccucauccaccaug

SEQ ID NO: 2133038 - RNA, 19 nt, Artificial Sequence
  Description of Artificial Sequence: Synthetic oligonucleotide
aaucgguucugcgggcucu

SEQ ID NO: 2133039 - RNA, 19 nt, Artificial Sequence
  Description of Artificial Sequence: Synthetic oligonucleotide
gguguagagccagaggccc

SEQ ID NO: 2133040 - RNA, 19 nt, Artificial Sequence
  Description of Artificial Sequence: Synthetic oligonucleotide
aaucuuccggggucuccgu

SEQ ID NO: 2133041 - RNA, 19 nt, Artificial Sequence
  Description of Artificial Sequence: Synthetic oligonucleotide
gcgggcgacacucaggacc

SEQ ID NO: 2133042 - RNA, 19 nt, Artificial Sequence
  Description of Artificial Sequence: Synthetic oligonucleotide
ucugaaugggaugcaccgu

SEQ ID NO: 2133043 - RNA, 19 nt, Artificial Sequence
  Description of Artificial Sequence: Synthetic oligonucleotide
agcaguuugaugagugggu

SEQ ID NO: 2133044 - RNA, 19 nt, Artificial Sequence
  Description of Artificial Sequence: Synthetic oligonucleotide
cuaggaugugcaguuacca

SEQ ID NO: 2133045 - RNA, 19 nt, Artificial Sequence
  Description of Artificial Sequence: Synthetic oligonucleotide
uguaacccucaaugaggga

SEQ ID NO: 2133046 - RNA, 19 nt, Artificial Sequence
  Description of Artificial Sequence: Synthetic oligonucleotide
cugguauguggacaacauc

SEQ ID NO: 2133047 - RNA, 19 nt, Artificial Sequence
  Description of Artificial Sequence: Synthetic oligonucleotide
uguucccuauggaccuuug

SEQ ID NO: 2133048 - RNA, 19 nt, Artificial Sequence
  Description of Artificial Sequence: Synthetic oligonucleotide
gcuggaguacaucaaugac

SEQ ID NO: 2133049 - RNA, 19 nt, Artificial Sequence
  Description of Artificial Sequence: Synthetic oligonucleotide
accaugaguguguaaucuu

SEQ ID NO: 2133050 - RNA, 19 nt, Artificial Sequence
  Description of Artificial Sequence: Synthetic oligonucleotide
uggaaucaucccuggcaac

SEQ ID NO: 2133051 - RNA, 19 nt, Artificial Sequence
  Description of Artificial Sequence: Synthetic oligonucleotide
acagaccgggcaaucuugg

SEQ ID NO: 2133052 - RNA, 19 nt, Artificial Sequence
  Description of Artificial Sequence: Synthetic oligonucleotide
agaccgggcaaucuuggua

SEQ ID NO: 2133053 - RNA, 19 nt, Artificial Sequence
  Description of Artificial Sequence: Synthetic oligonucleotide
gcugugagaugauacguuc

SEQ ID NO: 2133054 - RNA, 19 nt, Artificial Sequence
  Description of Artificial Sequence: Synthetic oligonucleotide
cccuauggaccuuuggaag

SEQ ID NO: 2133055 - RNA, 19 nt, Artificial Sequence
  Description of Artificial Sequence: Synthetic oligonucleotide
uccugguguucccuaugga

SEQ ID NO: 2133056 - RNA, 19 nt, Artificial Sequence
  Description of Artificial Sequence: Synthetic oligonucleotide
cugugagaugauacguuca

SEQ ID NO: 2133057 - RNA, 19 nt, Artificial Sequence
  Description of Artificial Sequence: Synthetic oligonucleotide
uugccuucgcuggaguaca

SEQ ID NO: 2133058 - RNA, 19 nt, Artificial Sequence
  Description of Artificial Sequence: Synthetic oligonucleotide
ugggccacaaucccacauu

SEQ ID NO: 2133059 - RNA, 19 nt, Artificial Sequence
  Description of Artificial Sequence: Synthetic oligonucleotide
gaugugcaguuaccaucgc

SEQ ID NO: 2133060 - RNA, 19 nt, Artificial Sequence
  Description of Artificial Sequence: Synthetic oligonucleotide
uggguggguguagagccag

SEQ ID NO: 2133061 - RNA, 19 nt, Artificial Sequence
  Description of Artificial Sequence: Synthetic oligonucleotide
ugggaugcaccguggggcu

SEQ ID NO: 2133062 - RNA, 19 nt, Artificial Sequence
  Description of Artificial Sequence: Synthetic oligonucleotide
aucuuccggggucuccguc

SEQ ID NO: 2133063 - RNA, 19 nt, Artificial Sequence
  Description of Artificial Sequence: Synthetic oligonucleotide
acugcugaucccgucuuca

SEQ ID NO: 2133064 - RNA, 19 nt, Artificial Sequence
  Description of Artificial Sequence: Synthetic oligonucleotide
augauacguucaucaccag

SEQ ID NO: 2133065 - RNA, 19 nt, Artificial Sequence
  Description of Artificial Sequence: Synthetic oligonucleotide
aggaccaccugaggcugcc

SEQ ID NO: 2133066 - RNA, 19 nt, Artificial Sequence
  Description of Artificial Sequence: Synthetic oligonucleotide
ucccuggcaacaggcacag

SEQ ID NO: 2133067 - RNA, 19 nt, Artificial Sequence
  Description of Artificial Sequence: Synthetic oligonucleotide
ggguagcucuuuaaaaccc

SEQ ID NO: 2133068 - RNA, 19 nt, Artificial Sequence
  Description of Artificial Sequence: Synthetic oligonucleotide
agcgaagaacgggauggag

SEQ ID NO: 2133069 - RNA, 19 nt, Artificial Sequence
  Description of Artificial Sequence: Synthetic oligonucleotide
uuucgggguccagugugag

SEQ ID NO: 2133070 - RNA, 19 nt, Artificial Sequence
  Description of Artificial Sequence: Synthetic oligonucleotide
cuacuucccgguagauuug

SEQ ID NO: 2133071 - RNA, 19 nt, Artificial Sequence
  Description of Artificial Sequence: Synthetic oligonucleotide
caaucccacauucaucgaa

SEQ ID NO: 2133072 - RNA, 19 nt, Artificial Sequence
  Description of Artificial Sequence: Synthetic oligonucleotide
ggaccuuuggaagccaggc

SEQ ID NO: 2133073 - RNA, 19 nt, Artificial Sequence
  Description of Artificial Sequence: Synthetic oligonucleotide
gaguagaagaggacaucga

SEQ ID NO: 2133074 - RNA, 19 nt, Artificial Sequence
  Description of Artificial Sequence: Synthetic oligonucleotide
ugggcucggggaaagccau

SEQ ID NO: 2133075 - RNA, 19 nt, Artificial Sequence
  Description of Artificial Sequence: Synthetic oligonucleotide
acaaucccacauucaucga

SEQ ID NO: 2133076 - RNA, 19 nt, Artificial Sequence
  Description of Artificial Sequence: Synthetic oligonucleotide
agccggcaauguuucgggg

SEQ ID NO: 2133077 - RNA, 19 nt, Artificial Sequence
  Description of Artificial Sequence: Synthetic oligonucleotide
accugaggcugccuccuug

SEQ ID NO: 2133078 - RNA, 19 nt, Artificial Sequence
  Description of Artificial Sequence: Synthetic oligonucleotide
ggaaucaucccuggcaaca

SEQ ID NO: 2133079 - RNA, 19 nt, Artificial Sequence
  Description of Artificial Sequence: Synthetic oligonucleotide
cugcugaucccgucuucag

SEQ ID NO: 2133080 - RNA, 19 nt, Artificial Sequence
  Description of Artificial Sequence: Synthetic oligonucleotide
gccacuugcaggaacucag

SEQ ID NO: 2133081 - RNA, 19 nt, Artificial Sequence
  Description of Artificial Sequence: Synthetic oligonucleotide
gcgaagaacgggauggagc

SEQ ID NO: 2133082 - RNA, 19 nt, Artificial Sequence
  Description of Artificial Sequence: Synthetic oligonucleotide
guagcucuuuaaaacccuc

SEQ ID NO: 2133083 - RNA, 19 nt, Artificial Sequence
  Description of Artificial Sequence: Synthetic oligonucleotide
guaaucuuccggggucucc

SEQ ID NO: 2133084 - RNA, 19 nt, Artificial Sequence
  Description of Artificial Sequence: Synthetic oligonucleotide
aacuugcaccggcugcgau

SEQ ID NO: 2133085 - RNA, 19 nt, Artificial Sequence
  Description of Artificial Sequence: Synthetic oligonucleotide
ugcgggcucugaaugggau

SEQ ID NO: 2133086 - RNA, 19 nt, Artificial Sequence
  Description of Artificial Sequence: Synthetic oligonucleotide
cuggcgggcgacacucagg

SEQ ID NO: 2133087 - RNA, 19 nt, Artificial Sequence
  Description of Artificial Sequence: Synthetic oligonucleotide
auguuucgggguccagugu

SEQ ID NO: 2133088 - RNA, 19 nt, Artificial Sequence
  Description of Artificial Sequence: Synthetic oligonucleotide
ugaugagugggugggugua

SEQ ID NO: 2133089 - RNA, 19 nt, Artificial Sequence
  Description of Artificial Sequence: Synthetic oligonucleotide
acaucaacacagacacgug

SEQ ID NO: 2133090 - RNA, 19 nt, Artificial Sequence
  Description of Artificial Sequence: Synthetic oligonucleotide
aagcgaagaacgggaugga

SEQ ID NO: 2133091 - RNA, 19 nt, Artificial Sequence
  Description of Artificial Sequence: Synthetic oligonucleotide
acagguuccccgccuacuu

SEQ ID NO: 2133092 - RNA, 19 nt, Artificial Sequence
  Description of Artificial Sequence: Synthetic oligonucleotide
cuucccgguagauuuggaa

SEQ ID NO: 2133093 - RNA, 19 nt, Artificial Sequence
  Description of Artificial Sequence: Synthetic oligonucleotide
ggugcugauguaauaggca

SEQ ID NO: 2133094 - RNA, 19 nt, Artificial Sequence
  Description of Artificial Sequence: Synthetic oligonucleotide
agaaagcgaagaacgggau

SEQ ID NO: 2133095 - RNA, 19 nt, Artificial Sequence
  Description of Artificial Sequence: Synthetic oligonucleotide
gucugguauguggacaaca

SEQ ID NO: 2133096 - RNA, 19 nt, Artificial Sequence
  Description of Artificial Sequence: Synthetic oligonucleotide
gggcaaucuugguaacucc

SEQ ID NO: 2133097 - RNA, 19 nt, Artificial Sequence
  Description of Artificial Sequence: Synthetic oligonucleotide
agccugcaucacugcaccg

SEQ ID NO: 2133098 - RNA, 19 nt, Artificial Sequence
  Description of Artificial Sequence: Synthetic oligonucleotide
gcugcgauggggcagggaa

SEQ ID NO: 2133099 - RNA, 19 nt, Artificial Sequence
  Description of Artificial Sequence: Synthetic oligonucleotide
gcaguuugaugagugggug

SEQ ID NO: 2133100 - RNA, 19 nt, Artificial Sequence
  Description of Artificial Sequence: Synthetic oligonucleotide
gugagaacacaaaaucggu

SEQ ID NO: 2133101 - RNA, 19 nt, Artificial Sequence
  Description of Artificial Sequence: Synthetic oligonucleotide
guuccccgccuacuucccg

SEQ ID NO: 2133102 - RNA, 19 nt, Artificial Sequence
  Description of Artificial Sequence: Synthetic oligonucleotide
guguguggaucacuacaga

SEQ ID NO: 2133103 - RNA, 19 nt, Artificial Sequence
  Description of Artificial Sequence: Synthetic oligonucleotide
cugggauccugguguuccc

SEQ ID NO: 2133104 - RNA, 19 nt, Artificial Sequence
  Description of Artificial Sequence: Synthetic oligonucleotide
gaugcgcaccauccuccac

SEQ ID NO: 2133105 - RNA, 19 nt, Artificial Sequence
  Description of Artificial Sequence: Synthetic oligonucleotide
cauccauaacaauggagau

SEQ ID NO: 2133106 - RNA, 19 nt, Artificial Sequence
  Description of Artificial Sequence: Synthetic oligonucleotide
uguaaucuuccggggucuc

SEQ ID NO: 2133107 - RNA, 19 nt, Artificial Sequence
  Description of Artificial Sequence: Synthetic oligonucleotide
ggggacacugugugaguag

SEQ ID NO: 2133108 - RNA, 19 nt, Artificial Sequence
  Description of Artificial Sequence: Synthetic oligonucleotide
aucgaaacccaggggcugu

SEQ ID NO: 2133109 - RNA, 19 nt, Artificial Sequence
  Description of Artificial Sequence: Synthetic oligonucleotide
guggaucacuacagacagg

SEQ ID NO: 2133110 - RNA, 19 nt, Artificial Sequence
  Description of Artificial Sequence: Synthetic oligonucleotide
gcgaucugggccacaaucc

SEQ ID NO: 2133111 - RNA, 19 nt, Artificial Sequence
  Description of Artificial Sequence: Synthetic oligonucleotide
gguggguguagagccagag

SEQ ID NO: 2133112 - RNA, 19 nt, Artificial Sequence
  Description of Artificial Sequence: Synthetic oligonucleotide
caggaaccagggcaugguc

SEQ ID NO: 2133113 - RNA, 19 nt, Artificial Sequence
  Description of Artificial Sequence: Synthetic oligonucleotide
ggaaccagggcauggucaa

SEQ ID NO: 2133114 - RNA, 19 nt, Artificial Sequence
  Description of Artificial Sequence: Synthetic oligonucleotide
ucugggccacaaucccaca

SEQ ID NO: 2133115 - RNA, 19 nt, Artificial Sequence
  Description of Artificial Sequence: Synthetic oligonucleotide
ccuucgcuggaguacauca

SEQ ID NO: 2133116 - RNA, 19 nt, Artificial Sequence
  Description of Artificial Sequence: Synthetic oligonucleotide
cucggccacuugcaggaac

SEQ ID NO: 2133117 - RNA, 19 nt, Artificial Sequence
  Description of Artificial Sequence: Synthetic oligonucleotide
ggagcuugacucaggacca

SEQ ID NO: 2133118 - RNA, 19 nt, Artificial Sequence
  Description of Artificial Sequence: Synthetic oligonucleotide
aacccucaaugagggagaa

SEQ ID NO: 2133119 - RNA, 19 nt, Artificial Sequence
  Description of Artificial Sequence: Synthetic oligonucleotide
ggcaaucuugguaacucca

SEQ ID NO: 2133120 - RNA, 19 nt, Artificial Sequence
  Description of Artificial Sequence: Synthetic oligonucleotide
cuccgucaggcugaagaac

SEQ ID NO: 2133121 - RNA, 19 nt, Artificial Sequence
  Description of Artificial Sequence: Synthetic oligonucleotide
gggacccgcgaucugggcc

SEQ ID NO: 2133122 - RNA, 19 nt, Artificial Sequence
  Description of Artificial Sequence: Synthetic oligonucleotide
ugggcccaugcugggcucg

SEQ ID NO: 2133123 - RNA, 19 nt, Artificial Sequence
  Description of Artificial Sequence: Synthetic oligonucleotide
ggaugcaccguggggcugg

SEQ ID NO: 2133124 - RNA, 19 nt, Artificial Sequence
  Description of Artificial Sequence: Synthetic oligonucleotide
guacaucaaugacacugcu

SEQ ID NO: 2133125 - RNA, 19 nt, Artificial Sequence
  Description of Artificial Sequence: Synthetic oligonucleotide
gcugaagaacuugcaccgg

SEQ ID NO: 2133126 - RNA, 19 nt, Artificial Sequence
  Description of Artificial Sequence: Synthetic oligonucleotide
ugggauccugguguucccu

SEQ ID NO: 2133127 - RNA, 19 nt, Artificial Sequence
  Description of Artificial Sequence: Synthetic oligonucleotide
caggcacagguuccccgcc

SEQ ID NO: 2133128 - RNA, 19 nt, Artificial Sequence
  Description of Artificial Sequence: Synthetic oligonucleotide
cucccguaccaggaugaag

SEQ ID NO: 2133129 - RNA, 19 nt, Artificial Sequence
  Description of Artificial Sequence: Synthetic oligonucleotide
uaccaggaugaagucuguc

SEQ ID NO: 2133130 - RNA, 19 nt, Artificial Sequence
  Description of Artificial Sequence: Synthetic oligonucleotide
ugucugguauguggacaac

SEQ ID NO: 2133131 - RNA, 19 nt, Artificial Sequence
  Description of Artificial Sequence: Synthetic oligonucleotide
cuucgcuggaguacaucaa

SEQ ID NO: 2133132 - RNA, 19 nt, Artificial Sequence
  Description of Artificial Sequence: Synthetic oligonucleotide
ccacaaucccacauucauc

SEQ ID NO: 2133133 - RNA, 19 nt, Artificial Sequence
  Description of Artificial Sequence: Synthetic oligonucleotide
gggauggagcuugacucag

SEQ ID NO: 2133134 - RNA, 19 nt, Artificial Sequence
  Description of Artificial Sequence: Synthetic oligonucleotide
cugcauccauaacaaugga

SEQ ID NO: 2133135 - RNA, 19 nt, Artificial Sequence
  Description of Artificial Sequence: Synthetic oligonucleotide
cucggggaaagccauugcu

SEQ ID NO: 2133136 - RNA, 19 nt, Artificial Sequence
  Description of Artificial Sequence: Synthetic oligonucleotide
ugcaccgcugugagaugau

SEQ ID NO: 2133137 - RNA, 19 nt, Artificial Sequence
  Description of Artificial Sequence: Synthetic oligonucleotide
ccuacuucccgguagauuu

SEQ ID NO: 2133138 - RNA, 19 nt, Artificial Sequence
  Description of Artificial Sequence: Synthetic oligonucleotide
gggccacaaucccacauuc

SEQ ID NO: 2133139 - RNA, 19 nt, Artificial Sequence
  Description of Artificial Sequence: Synthetic oligonucleotide
cagguuccccgccuacuuc

SEQ ID NO: 2133140 - RNA, 19 nt, Artificial Sequence
  Description of Artificial Sequence: Synthetic oligonucleotide
ggacccgcgaucugggcca

SEQ ID NO: 2133141 - RNA, 19 nt, Artificial Sequence
  Description of Artificial Sequence: Synthetic oligonucleotide
cacugcaccgcugugagau

SEQ ID NO: 2133142 - RNA, 19 nt, Artificial Sequence
  Description of Artificial Sequence: Synthetic oligonucleotide
cgaucugggccacaauccc

SEQ ID NO: 2133143 - RNA, 19 nt, Artificial Sequence
  Description of Artificial Sequence: Synthetic oligonucleotide
gaugcaccguggggcuggg

SEQ ID NO: 2133144 - RNA, 19 nt, Artificial Sequence
  Description of Artificial Sequence: Synthetic oligonucleotide
ccacauucaucgaaaccca

SEQ ID NO: 2133145 - RNA, 19 nt, Artificial Sequence
  Description of Artificial Sequence: Synthetic oligonucleotide
ggcucggggaaagccauug

SEQ ID NO: 2133146 - RNA, 19 nt, Artificial Sequence
  Description of Artificial Sequence: Synthetic oligonucleotide
acccgcaacccgguguucu

SEQ ID NO: 2133147 - RNA, 19 nt, Artificial Sequence
  Description of Artificial Sequence: Synthetic oligonucleotide
guuucgggguccaguguga

SEQ ID NO: 2133148 - RNA, 19 nt, Artificial Sequence
  Description of Artificial Sequence: Synthetic oligonucleotide
gugguggcaauagccggca

SEQ ID NO: 2133149 - RNA, 19 nt, Artificial Sequence
  Description of Artificial Sequence: Synthetic oligonucleotide
gaacuugcaccggcugcga

SEQ ID NO: 2133150 - RNA, 19 nt, Artificial Sequence
  Description of Artificial Sequence: Synthetic oligonucleotide
ggggaaagccauugcugga

SEQ ID NO: 2133151 - RNA, 19 nt, Artificial Sequence
  Description of Artificial Sequence: Synthetic oligonucleotide
ggugcucggccaguggggc

SEQ ID NO: 2133152 - RNA, 19 nt, Artificial Sequence
  Description of Artificial Sequence: Synthetic oligonucleotide
gggaaagccauugcuggaa

SEQ ID NO: 2133153 - RNA, 19 nt, Artificial Sequence
  Description of Artificial Sequence: Synthetic oligonucleotide
ccggcaauguuucgggguc

SEQ ID NO: 2133154 - RNA, 19 nt, Artificial Sequence
  Description of Artificial Sequence: Synthetic oligonucleotide
cugcaccgcugugagauga

SEQ ID NO: 2133155 - RNA, 19 nt, Artificial Sequence
  Description of Artificial Sequence: Synthetic oligonucleotide
ccgguguucuaggaugugc

SEQ ID NO: 2133156 - RNA, 19 nt, Artificial Sequence
  Description of Artificial Sequence: Synthetic oligonucleotide
gagcuugacucaggaccac

SEQ ID NO: 2133157 - RNA, 19 nt, Artificial Sequence
  Description of Artificial Sequence: Synthetic oligonucleotide
gaacgggauggagcuugac

SEQ ID NO: 2133158 - RNA, 19 nt, Artificial Sequence
  Description of Artificial Sequence: Synthetic oligonucleotide
cgcgaucugggccacaauc

SEQ ID NO: 2133159 - RNA, 19 nt, Artificial Sequence
  Description of Artificial Sequence: Synthetic oligonucleotide
cgggcucugaaugggaugc

SEQ ID NO: 2133160 - RNA, 19 nt, Artificial Sequence
  Description of Artificial Sequence: Synthetic oligonucleotide
uaacuccagcagccugcau

SEQ ID NO: 2133161 - RNA, 19 nt, Artificial Sequence
  Description of Artificial Sequence: Synthetic oligonucleotide
aucgguucugcgggcucug

SEQ ID NO: 2133162 - RNA, 19 nt, Artificial Sequence
  Description of Artificial Sequence: Synthetic oligonucleotide
cccgccuacuucccgguag

SEQ ID NO: 2133163 - RNA, 19 nt, Artificial Sequence
  Description of Artificial Sequence: Synthetic oligonucleotide
ucgaaacccaggggcuguc

SEQ ID NO: 2133164 - RNA, 19 nt, Artificial Sequence
  Description of Artificial Sequence: Synthetic oligonucleotide
cgaagaacgggauggagcu

SEQ ID NO: 2133165 - RNA, 19 nt, Artificial Sequence
  Description of Artificial Sequence: Synthetic oligonucleotide
gcaccguggggcugggccc

SEQ ID NO: 2133166 - RNA, 19 nt, Artificial Sequence
  Description of Artificial Sequence: Synthetic oligonucleotide
cugaucccgucuucaggaa

SEQ ID NO: 2133167 - RNA, 19 nt, Artificial Sequence
  Description of Artificial Sequence: Synthetic oligonucleotide
gguagcucuuuaaaacccu

SEQ ID NO: 2133168 - RNA, 19 nt, Artificial Sequence
  Description of Artificial Sequence: Synthetic oligonucleotide
ugccuucgcuggaguacau

SEQ ID NO: 2133169 - RNA, 19 nt, Artificial Sequence
  Description of Artificial Sequence: Synthetic oligonucleotide
gcgggcucugaaugggaug

SEQ ID NO: 2133170 - RNA, 19 nt, Artificial Sequence
  Description of Artificial Sequence: Synthetic oligonucleotide
cugauguaauaggcagaga

SEQ ID NO: 2133171 - RNA, 19 nt, Artificial Sequence
  Description of Artificial Sequence: Synthetic oligonucleotide
gcaauagccggcaauguuu

SEQ ID NO: 2133172 - RNA, 19 nt, Artificial Sequence
  Description of Artificial Sequence: Synthetic oligonucleotide
agaacgggauggagcuuga

SEQ ID NO: 2133173 - RNA, 19 nt, Artificial Sequence
  Description of Artificial Sequence: Synthetic oligonucleotide
guguaaucuuccggggucu

SEQ ID NO: 2133174 - RNA, 19 nt, Artificial Sequence
  Description of Artificial Sequence: Synthetic oligonucleotide
gcucggggaaagccauugc

SEQ ID NO: 2133175 - RNA, 19 nt, Artificial Sequence
  Description of Artificial Sequence: Synthetic oligonucleotide
gggguccagugugagaaca

SEQ ID NO: 2133176 - RNA, 19 nt, Artificial Sequence
  Description of Artificial Sequence: Synthetic oligonucleotide
gcaacccgguguucuagga

SEQ ID NO: 2133177 - RNA, 19 nt, Artificial Sequence
  Description of Artificial Sequence: Synthetic oligonucleotide
acguggugcucggccagug

SEQ ID NO: 2133178 - RNA, 19 nt, Artificial Sequence
  Description of Artificial Sequence: Synthetic oligonucleotide
cccgaugcgcaccauccuc

SEQ ID NO: 2133179 - RNA, 19 nt, Artificial Sequence
  Description of Artificial Sequence: Synthetic oligonucleotide
gcaagaggucacuggggaa

SEQ ID NO: 2133180 - RNA, 19 nt, Artificial Sequence
  Description of Artificial Sequence: Synthetic oligonucleotide
gguucugcgggcucugaau

SEQ ID NO: 2133181 - RNA, 19 nt, Artificial Sequence
  Description of Artificial Sequence: Synthetic oligonucleotide
ggccaguggggcaaugaca

SEQ ID NO: 2133182 - RNA, 19 nt, Artificial Sequence
  Description of Artificial Sequence: Synthetic oligonucleotide
ggcgacacucaggacccgc

SEQ ID NO: 2133183 - RNA, 19 nt, Artificial Sequence
  Description of Artificial Sequence: Synthetic oligonucleotide
cacuugcaggaacucagau

SEQ ID NO: 2133184 - RNA, 19 nt, Artificial Sequence
  Description of Artificial Sequence: Synthetic oligonucleotide
gguggcaauagccggcaau

SEQ ID NO: 2133185 - RNA, 19 nt, Artificial Sequence
  Description of Artificial Sequence: Synthetic oligonucleotide
gcaccggcugcgauggggc

SEQ ID NO: 2133186 - RNA, 19 nt, Artificial Sequence
  Description of Artificial Sequence: Synthetic oligonucleotide
ucgguucugcgggcucuga

SEQ ID NO: 2133187 - RNA, 19 nt, Artificial Sequence
  Description of Artificial Sequence: Synthetic oligonucleotide
cgcaacccgguguucuagg

SEQ ID NO: 2133188 - RNA, 19 nt, Artificial Sequence
  Description of Artificial Sequence: Synthetic oligonucleotide
cugcgggcucugaauggga

SEQ ID NO: 2133189 - RNA, 19 nt, Artificial Sequence
  Description of Artificial Sequence: Synthetic oligonucleotide
caccauccuccacagcucu

SEQ ID NO: 2133190 - RNA, 19 nt, Artificial Sequence
  Description of Artificial Sequence: Synthetic oligonucleotide
cugggcccaugcugggcuc

SEQ ID NO: 2133191 - RNA, 19 nt, Artificial Sequence
  Description of Artificial Sequence: Synthetic oligonucleotide
ggcaauguuucggggucca

SEQ ID NO: 2133192 - RNA, 19 nt, Artificial Sequence
  Description of Artificial Sequence: Synthetic oligonucleotide
ggguccagugugagaacac

SEQ ID NO: 2133193 - RNA, 19 nt, Artificial Sequence
  Description of Artificial Sequence: Synthetic oligonucleotide
cgggcaaucuugguaacuc

SEQ ID NO: 2133194 - RNA, 19 nt, Artificial Sequence
  Description of Artificial Sequence: Synthetic oligonucleotide
gccauguggccucggccac

SEQ ID NO: 2133195 - RNA, 19 nt, Artificial Sequence
  Description of Artificial Sequence: Synthetic oligonucleotide
cccguaccaggaugaaguc

SEQ ID NO: 2133196 - RNA, 19 nt, Artificial Sequence
  Description of Artificial Sequence: Synthetic oligonucleotide
augcaccguggggcugggc

SEQ ID NO: 2133197 - RNA, 19 nt, Artificial Sequence
  Description of Artificial Sequence: Synthetic oligonucleotide
gcaauguuucgggguccag

SEQ ID NO: 2133198 - RNA, 19 nt, Artificial Sequence
  Description of Artificial Sequence: Synthetic oligonucleotide
gccggcaauguuucggggu

SEQ ID NO: 2133199 - RNA, 19 nt, Artificial Sequence
  Description of Artificial Sequence: Synthetic oligonucleotide
gguuccccgccuacuuccc

SEQ ID NO: 2133200 - RNA, 19 nt, Artificial Sequence
  Description of Artificial Sequence: Synthetic oligonucleotide
ggaucacuacagacagguc

SEQ ID NO: 2133201 - RNA, 19 nt, Artificial Sequence
  Description of Artificial Sequence: Synthetic oligonucleotide
caccagccauguggccucg

SEQ ID NO: 2133202 - RNA, 19 nt, Artificial Sequence
  Description of Artificial Sequence: Synthetic oligonucleotide
gcagccgccaggggacccg

SEQ ID NO: 2133203 - RNA, 19 nt, Artificial Sequence
  Description of Artificial Sequence: Synthetic oligonucleotide
ggccacaaucccacauuca

SEQ ID NO: 2133204 - RNA, 19 nt, Artificial Sequence
  Description of Artificial Sequence: Synthetic oligonucleotide
cccgguagauuuggaacuc

SEQ ID NO: 2133205 - RNA, 19 nt, Artificial Sequence
  Description of Artificial Sequence: Synthetic oligonucleotide
caacccgguguucuaggau

SEQ ID NO: 2133206 - RNA, 19 nt, Artificial Sequence
  Description of Artificial Sequence: Synthetic oligonucleotide
gggauccugguguucccua

SEQ ID NO: 2133207 - RNA, 19 nt, Artificial Sequence
  Description of Artificial Sequence: Synthetic oligonucleotide
acccucaaugagggagaaa

SEQ ID NO: 2133208 - RNA, 19 nt, Artificial Sequence
  Description of Artificial Sequence: Synthetic oligonucleotide
gggcaaugacagaccgggc

SEQ ID NO: 2133209 - RNA, 19 nt, Artificial Sequence
  Description of Artificial Sequence: Synthetic oligonucleotide
cguggggcugggcccaugc

SEQ ID NO: 2133210 - RNA, 19 nt, Artificial Sequence
  Description of Artificial Sequence: Synthetic oligonucleotide
cagaccgggcaaucuuggu

SEQ ID NO: 2133211 - RNA, 19 nt, Artificial Sequence
  Description of Artificial Sequence: Synthetic oligonucleotide
caaugacagaccgggcaau

SEQ ID NO: 2133212 - RNA, 19 nt, Artificial Sequence
  Description of Artificial Sequence: Synthetic oligonucleotide
gaagaacgggauggagcuu

SEQ ID NO: 2133213 - RNA, 19 nt, Artificial Sequence
  Description of Artificial Sequence: Synthetic oligonucleotide
caccggcugcgauggggca

SEQ ID NO: 2133214 - RNA, 19 nt, Artificial Sequence
  Description of Artificial Sequence: Synthetic oligonucleotide
guaccaggaugaagucugu

SEQ ID NO: 2133215 - RNA, 19 nt, Artificial Sequence
  Description of Artificial Sequence: Synthetic oligonucleotide
guguagagccagaggcccu

SEQ ID NO: 2133216 - RNA, 19 nt, Artificial Sequence
  Description of Artificial Sequence: Synthetic oligonucleotide
gcccuggcgggcgacacuc

SEQ ID NO: 2133217 - RNA, 19 nt, Artificial Sequence
  Description of Artificial Sequence: Synthetic oligonucleotide
gcgauggggcagggaagag

SEQ ID NO: 2133218 - RNA, 19 nt, Artificial Sequence
  Description of Artificial Sequence: Synthetic oligonucleotide
cgggauggagcuugacuca

SEQ ID NO: 2133219 - RNA, 19 nt, Artificial Sequence
  Description of Artificial Sequence: Synthetic oligonucleotide
ggaguacaucaaugacacu

SEQ ID NO: 2133220 - RNA, 19 nt, Artificial Sequence
  Description of Artificial Sequence: Synthetic oligonucleotide
ccaggccuucuugccuucg

SEQ ID NO: 2133221 - RNA, 19 nt, Artificial Sequence
  Description of Artificial Sequence: Synthetic oligonucleotide
gacccgcaacccgguguuc

SEQ ID NO: 2133222 - RNA, 19 nt, Artificial Sequence
  Description of Artificial Sequence: Synthetic oligonucleotide
cacagguuccccgccuacu

SEQ ID NO: 2133223 - RNA, 19 nt, Artificial Sequence
  Description of Artificial Sequence: Synthetic oligonucleotide
ccgcaacccgguguucuag

SEQ ID NO: 2133224 - RNA, 19 nt, Artificial Sequence
  Description of Artificial Sequence: Synthetic oligonucleotide
cucggccaguggggcaaug

SEQ ID NO: 2133225 - RNA, 19 nt, Artificial Sequence
  Description of Artificial Sequence: Synthetic oligonucleotide
caccguggggcugggccca

SEQ ID NO: 2133226 - RNA, 19 nt, Artificial Sequence
  Description of Artificial Sequence: Synthetic oligonucleotide
gacccgcgaucugggccac

SEQ ID NO: 2133227 - RNA, 19 nt, Artificial Sequence
  Description of Artificial Sequence: Synthetic oligonucleotide
gggcccaugcugggcucgg

SEQ ID NO: 2133228 - RNA, 19 nt, Artificial Sequence
  Description of Artificial Sequence: Synthetic oligonucleotide
gccgccaggggacccgcga

SEQ ID NO: 2133229 - RNA, 19 nt, Artificial Sequence
  Description of Artificial Sequence: Synthetic oligonucleotide
gccuucgcuggaguacauc

SEQ ID NO: 2133230 - RNA, 19 nt, Artificial Sequence
  Description of Artificial Sequence: Synthetic oligonucleotide
cgaaacccaggggcugucc

SEQ ID NO: 2133231 - RNA, 19 nt, Artificial Sequence
  Description of Artificial Sequence: Synthetic oligonucleotide
ggacccgcaacccgguguu

SEQ ID NO: 2133232 - RNA, 19 nt, Artificial Sequence
  Description of Artificial Sequence: Synthetic oligonucleotide
ggcgggcgacacucaggac

SEQ ID NO: 2133233 - RNA, 19 nt, Artificial Sequence
  Description of Artificial Sequence: Synthetic oligonucleotide
ccgccuacuucccgguaga

SEQ ID NO: 2133234 - RNA, 19 nt, Artificial Sequence
  Description of Artificial Sequence: Synthetic oligonucleotide
ccaguggggcaaugacaga

SEQ ID NO: 2133235 - RNA, 19 nt, Artificial Sequence
  Description of Artificial Sequence: Synthetic oligonucleotide
gggcgacacucaggacccg

SEQ ID NO: 2133236 - RNA, 19 nt, Artificial Sequence
  Description of Artificial Sequence: Synthetic oligonucleotide
cccgguguucuaggaugug

SEQ ID NO: 2133237 - RNA, 19 nt, Artificial Sequence
  Description of Artificial Sequence: Synthetic oligonucleotide
ccgcugugagaugauacgu

SEQ ID NO: 2133238 - RNA, 19 nt, Artificial Sequence
  Description of Artificial Sequence: Synthetic oligonucleotide
cgggguccagugugagaac

SEQ ID NO: 2133239 - RNA, 19 nt, Artificial Sequence
  Description of Artificial Sequence: Synthetic oligonucleotide
ggucuccgucaggcugaag

SEQ ID NO: 2133240 - RNA, 19 nt, Artificial Sequence
  Description of Artificial Sequence: Synthetic oligonucleotide
gcaccgcugugagaugaua

SEQ ID NO: 2133241 - RNA, 19 nt, Artificial Sequence
  Description of Artificial Sequence: Synthetic oligonucleotide
ccguaccaggaugaagucu

SEQ ID NO: 2133242 - RNA, 19 nt, Artificial Sequence
  Description of Artificial Sequence: Synthetic oligonucleotide
ccauaacaauggagaugua

SEQ ID NO: 2133243 - RNA, 19 nt, Artificial Sequence
  Description of Artificial Sequence: Synthetic oligonucleotide
gccuacuucccgguagauu

SEQ ID NO: 2133244 - RNA, 19 nt, Artificial Sequence
  Description of Artificial Sequence: Synthetic oligonucleotide
cgcugugagaugauacguu

SEQ ID NO: 2133245 - RNA, 19 nt, Artificial Sequence
  Description of Artificial Sequence: Synthetic oligonucleotide
cacguggugcucggccagu

SEQ ID NO: 2133246 - RNA, 19 nt, Artificial Sequence
  Description of Artificial Sequence: Synthetic oligonucleotide
acccgcgaucugggccaca

SEQ ID NO: 2133247 - RNA, 19 nt, Artificial Sequence
  Description of Artificial Sequence: Synthetic oligonucleotide
cccgcgaucugggccacaa

SEQ ID NO: 2133248 - RNA, 19 nt, Artificial Sequence
  Description of Artificial Sequence: Synthetic oligonucleotide
cccgcaacccgguguucua

SEQ ID NO: 2133249 - RNA, 19 nt, Artificial Sequence
  Description of Artificial Sequence: Synthetic oligonucleotide
accguggggcugggcccau

SEQ ID NO: 2133250 - RNA, 19 nt, Artificial Sequence
  Description of Artificial Sequence: Synthetic oligonucleotide
ggacaucgaugaggguggu

SEQ ID NO: 2133251 - RNA, 19 nt, Artificial Sequence
  Description of Artificial Sequence: Synthetic oligonucleotide
cccuggcaacaggcacagg

SEQ ID NO: 2133252 - RNA, 19 nt, Artificial Sequence
  Description of Artificial Sequence: Synthetic oligonucleotide
cgguucugcgggcucugaa

SEQ ID NO: 2133253 - RNA, 19 nt, Artificial Sequence
  Description of Artificial Sequence: Synthetic oligonucleotide
gggucuccgucaggcugaa

SEQ ID NO: 2133254 - RNA, 19 nt, Artificial Sequence
  Description of Artificial Sequence: Synthetic oligonucleotide
ccgggcaaucuugguaacu

SEQ ID NO: 2133255 - RNA, 19 nt, Artificial Sequence
  Description of Artificial Sequence: Synthetic oligonucleotide
ggcccuggcgggcgacacu

SEQ ID NO: 2133256 - RNA, 19 nt, Artificial Sequence
  Description of Artificial Sequence: Synthetic oligonucleotide
ccgucaggcugaagaacuu

SEQ ID NO: 2133257 - RNA, 19 nt, Artificial Sequence
  Description of Artificial Sequence: Synthetic oligonucleotide
ccccgaugcgcaccauccu

SEQ ID NO: 2133258 - RNA, 19 nt, Artificial Sequence
  Description of Artificial Sequence: Synthetic oligonucleotide
ccgccaggggacccgcgau

SEQ ID NO: 2133259 - RNA, 19 nt, Artificial Sequence
  Description of Artificial Sequence: Synthetic oligonucleotide
ccccgccuacuucccggua

SEQ ID NO: 2133260 - RNA, 19 nt, Artificial Sequence
  Description of Artificial Sequence: Synthetic oligonucleotide
ccgcgaucugggccacaau

SEQ ID NO: 2133261 - RNA, 19 nt, Artificial Sequence
  Description of Artificial Sequence: Synthetic oligonucleotide
gcucggccaguggggcaau

SEQ ID NO: 2133262 - RNA, 19 nt, Artificial Sequence
  Description of Artificial Sequence: Synthetic oligonucleotide
uuuacguucaccuaagagg

SEQ ID NO: 2133263 - RNA, 19 nt, Artificial Sequence
  Description of Artificial Sequence: Synthetic oligonucleotide
aauauuacuauaaagguug

SEQ ID NO: 2133264 - RNA, 19 nt, Artificial Sequence
  Description of Artificial Sequence: Synthetic oligonucleotide
acccauauaaaguuuaucc

SEQ ID NO: 2133265 - RNA, 19 nt, Artificial Sequence
  Description of Artificial Sequence: Synthetic oligonucleotide
aaaucuuuguucuuuauca

SEQ ID NO: 2133266 - RNA, 19 nt, Artificial Sequence
  Description of Artificial Sequence: Synthetic oligonucleotide
auuauaccccuuuugaugc

SEQ ID NO: 2133267 - RNA, 19 nt, Artificial Sequence
  Description of Artificial Sequence: Synthetic oligonucleotide
aguuauaacuaccagaucu

SEQ ID NO: 2133268 - RNA, 19 nt, Artificial Sequence
  Description of Artificial Sequence: Synthetic oligonucleotide
uuacguucaccuaagaggg

SEQ ID NO: 2133269 - RNA, 19 nt, Artificial Sequence
  Description of Artificial Sequence: Synthetic oligonucleotide
agaaugaugucauaucccc

SEQ ID NO: 2133270 - RNA, 19 nt, Artificial Sequence
  Description of Artificial Sequence: Synthetic oligonucleotide
uuaguuauaacuaccagau

SEQ ID NO: 2133271 - RNA, 19 nt, Artificial Sequence
  Description of Artificial Sequence: Synthetic oligonucleotide
acuauaaagguugauuucc

SEQ ID NO: 2133272 - RNA, 19 nt, Artificial Sequence
  Description of Artificial Sequence: Synthetic oligonucleotide
ugaaugagauuccacaucc

SEQ ID NO: 2133273 - RNA, 19 nt, Artificial Sequence
  Description of Artificial Sequence: Synthetic oligonucleotide
cuugauagcucaaucaucc

SEQ ID NO: 2133274 - RNA, 19 nt, Artificial Sequence
  Description of Artificial Sequence: Synthetic oligonucleotide
uuuaguuauaacuaccaga

SEQ ID NO: 2133275 - RNA, 19 nt, Artificial Sequence
  Description of Artificial Sequence: Synthetic oligonucleotide
uaagauguuuuccugaaug

SEQ ID NO: 2133276 - RNA, 19 nt, Artificial Sequence
  Description of Artificial Sequence: Synthetic oligonucleotide
uucaauaagaaugauguca

SEQ ID NO: 2133277 - RNA, 19 nt, Artificial Sequence
  Description of Artificial Sequence: Synthetic oligonucleotide
agcacagauaaucugugcc

SEQ ID NO: 2133278 - RNA, 19 nt, Artificial Sequence
  Description of Artificial Sequence: Synthetic oligonucleotide
aagaagauggguccacagc

SEQ ID NO: 2133279 - RNA, 19 nt, Artificial Sequence
  Description of Artificial Sequence: Synthetic oligonucleotide
ugacuaaacccauauaaag

SEQ ID NO: 2133280 - RNA, 19 nt, Artificial Sequence
  Description of Artificial Sequence: Synthetic oligonucleotide
uaagcaagcucuuugcccg

SEQ ID NO: 2133281 - RNA, 19 nt, Artificial Sequence
  Description of Artificial Sequence: Synthetic oligonucleotide
aaccauaucagcaacagca

SEQ ID NO: 2133282 - RNA, 19 nt, Artificial Sequence
  Description of Artificial Sequence: Synthetic oligonucleotide
gauuauaccccuuuugaug

SEQ ID NO: 2133283 - RNA, 19 nt, Artificial Sequence
  Description of Artificial Sequence: Synthetic oligonucleotide
auucauaucucuugauagc

SEQ ID NO: 2133284 - RNA, 19 nt, Artificial Sequence
  Description of Artificial Sequence: Synthetic oligonucleotide
aauguucuaagauguuuuc

SEQ ID NO: 2133285 - RNA, 19 nt, Artificial Sequence
  Description of Artificial Sequence: Synthetic oligonucleotide
uuuuacguucaccuaagag

SEQ ID NO: 2133286 - RNA, 19 nt, Artificial Sequence
  Description of Artificial Sequence: Synthetic oligonucleotide
ugauagcucaaucauccgg

SEQ ID NO: 2133287 - RNA, 19 nt, Artificial Sequence
  Description of Artificial Sequence: Synthetic oligonucleotide
uaugcauucauaucucuug

SEQ ID NO: 2133288 - RNA, 19 nt, Artificial Sequence
  Description of Artificial Sequence: Synthetic oligonucleotide
acagcuagcacagauaauc

SEQ ID NO: 2133289 - RNA, 19 nt, Artificial Sequence
  Description of Artificial Sequence: Synthetic oligonucleotide
ugagauuccacauccagac

SEQ ID NO: 2133290 - RNA, 19 nt, Artificial Sequence
  Description of Artificial Sequence: Synthetic oligonucleotide
ucuuugugguccuucaagg

SEQ ID NO: 2133291 - RNA, 19 nt, Artificial Sequence
  Description of Artificial Sequence: Synthetic oligonucleotide
aucagcaacagcaaacucc

SEQ ID NO: 2133292 - RNA, 19 nt, Artificial Sequence
  Description of Artificial Sequence: Synthetic oligonucleotide
ucauuugugguccuuguca

SEQ ID NO: 2133293 - RNA, 19 nt, Artificial Sequence
  Description of Artificial Sequence: Synthetic oligonucleotide
accuuugguuuccagaccc

SEQ ID NO: 2133294 - RNA, 19 nt, Artificial Sequence
  Description of Artificial Sequence: Synthetic oligonucleotide
ucccacaucucacugaugc

SEQ ID NO: 2133295 - RNA, 19 nt, Artificial Sequence
  Description of Artificial Sequence: Synthetic oligonucleotide
gauguaugcauucauaucu

SEQ ID NO: 2133296 - RNA, 19 nt, Artificial Sequence
  Description of Artificial Sequence: Synthetic oligonucleotide
auaacuaccagaucugcca

SEQ ID NO: 2133297 - RNA, 19 nt, Artificial Sequence
  Description of Artificial Sequence: Synthetic oligonucleotide
uuacuauaaagguugauuu

SEQ ID NO: 2133298 - RNA, 19 nt, Artificial Sequence
  Description of Artificial Sequence: Synthetic oligonucleotide
ucugccaucucgauuauac

SEQ ID NO: 2133299 - RNA, 19 nt, Artificial Sequence
  Description of Artificial Sequence: Synthetic oligonucleotide
acguacucugcuuggaucc

SEQ ID NO: 2133300 - RNA, 19 nt, Artificial Sequence
  Description of Artificial Sequence: Synthetic oligonucleotide
gauagcucaaucauccggg

SEQ ID NO: 2133301 - RNA, 19 nt, Artificial Sequence
  Description of Artificial Sequence: Synthetic oligonucleotide
uacucgaaauguaaggggc

SEQ ID NO: 2133302 - RNA, 19 nt, Artificial Sequence
  Description of Artificial Sequence: Synthetic oligonucleotide
acauaucaaccauaucagc

SEQ ID NO: 2133303 - RNA, 19 nt, Artificial Sequence
  Description of Artificial Sequence: Synthetic oligonucleotide
ucgauuauaccccuuuuga

SEQ ID NO: 2133304 - RNA, 19 nt, Artificial Sequence
  Description of Artificial Sequence: Synthetic oligonucleotide
agaaaugcgaauuaccuuu

SEQ ID NO: 2133305 - RNA, 19 nt, Artificial Sequence
  Description of Artificial Sequence: Synthetic oligonucleotide
agcaacagcaaacuccgac

SEQ ID NO: 2133306 - RNA, 19 nt, Artificial Sequence
  Description of Artificial Sequence: Synthetic oligonucleotide
uaaucugugcccucuauca

SEQ ID NO: 2133307 - RNA, 19 nt, Artificial Sequence
  Description of Artificial Sequence: Synthetic oligonucleotide
uccuacucgaaauguaagg

SEQ ID NO: 2133308 - RNA, 19 nt, Artificial Sequence
  Description of Artificial Sequence: Synthetic oligonucleotide
agguugauuucccugcacc

SEQ ID NO: 2133309 - RNA, 19 nt, Artificial Sequence
  Description of Artificial Sequence: Synthetic oligonucleotide
aaucauccggguuuuacgu

SEQ ID NO: 2133310 - RNA, 19 nt, Artificial Sequence
  Description of Artificial Sequence: Synthetic oligonucleotide
aaauguaaggggcuuuccu

SEQ ID NO: 2133311 - RNA, 19 nt, Artificial Sequence
  Description of Artificial Sequence: Synthetic oligonucleotide
cauaucagcaacagcaaac

SEQ ID NO: 2133312 - RNA, 19 nt, Artificial Sequence
  Description of Artificial Sequence: Synthetic oligonucleotide
uauaacuaccagaucugcc

SEQ ID NO: 2133313 - RNA, 19 nt, Artificial Sequence
  Description of Artificial Sequence: Synthetic oligonucleotide
uuaccuuugguuuccagac

SEQ ID NO: 2133314 - RNA, 19 nt, Artificial Sequence
  Description of Artificial Sequence: Synthetic oligonucleotide
aagauguuuuccugaauga

SEQ ID NO: 2133315 - RNA, 19 nt, Artificial Sequence
  Description of Artificial Sequence: Synthetic oligonucleotide
uucaagguggccuggauac

SEQ ID NO: 2133316 - RNA, 19 nt, Artificial Sequence
  Description of Artificial Sequence: Synthetic oligonucleotide
agagugaguggauuccacc

SEQ ID NO: 2133317 - RNA, 19 nt, Artificial Sequence
  Description of Artificial Sequence: Synthetic oligonucleotide
aaguaccugagccagcucu

SEQ ID NO: 2133318 - RNA, 19 nt, Artificial Sequence
  Description of Artificial Sequence: Synthetic oligonucleotide
ugccaucucgauuauaccc

SEQ ID NO: 2133319 - RNA, 19 nt, Artificial Sequence
  Description of Artificial Sequence: Synthetic oligonucleotide
ucucuugauagcucaauca

SEQ ID NO: 2133320 - RNA, 19 nt, Artificial Sequence
  Description of Artificial Sequence: Synthetic oligonucleotide
uguucuuuaucagaaaguc

SEQ ID NO: 2133321 - RNA, 19 nt, Artificial Sequence
  Description of Artificial Sequence: Synthetic oligonucleotide
cuacucgaaauguaagggg

SEQ ID NO: 2133322 - RNA, 19 nt, Artificial Sequence
  Description of Artificial Sequence: Synthetic oligonucleotide
cauaucaaccauaucagca

SEQ ID NO: 2133323 - RNA, 19 nt, Artificial Sequence
  Description of Artificial Sequence: Synthetic oligonucleotide
aaugcgaauuaccuuuggu

SEQ ID NO: 2133324 - RNA, 19 nt, Artificial Sequence
  Description of Artificial Sequence: Synthetic oligonucleotide
aaaugcgaauuaccuuugg

SEQ ID NO: 2133325 - RNA, 19 nt, Artificial Sequence
  Description of Artificial Sequence: Synthetic oligonucleotide
aaauauuacuauaaagguu

SEQ ID NO: 2133326 - RNA, 19 nt, Artificial Sequence
  Description of Artificial Sequence: Synthetic oligonucleotide
agaucugccaucucgauua

SEQ ID NO: 2133327 - RNA, 19 nt, Artificial Sequence
  Description of Artificial Sequence: Synthetic oligonucleotide
auaaucugugcccucuauc

SEQ ID NO: 2133328 - RNA, 19 nt, Artificial Sequence
  Description of Artificial Sequence: Synthetic oligonucleotide
aguggauuccaccagaguu

SEQ ID NO: 2133329 - RNA, 19 nt, Artificial Sequence
  Description of Artificial Sequence: Synthetic oligonucleotide
aagucccucuuuguggucc

SEQ ID NO: 2133330 - RNA, 19 nt, Artificial Sequence
  Description of Artificial Sequence: Synthetic oligonucleotide
cagauuuaguuauaacuac

SEQ ID NO: 2133331 - RNA, 19 nt, Artificial Sequence
  Description of Artificial Sequence: Synthetic oligonucleotide
gauuuaguuauaacuacca

SEQ ID NO: 2133332 - RNA, 19 nt, Artificial Sequence
  Description of Artificial Sequence: Synthetic oligonucleotide
auguucuaagauguuuucc

SEQ ID NO: 2133333 - RNA, 19 nt, Artificial Sequence
  Description of Artificial Sequence: Synthetic oligonucleotide
agaaugcucuccucaggcc

SEQ ID NO: 2133334 - RNA, 19 nt, Artificial Sequence
  Description of Artificial Sequence: Synthetic oligonucleotide
auaucaaccauaucagcaa

SEQ ID NO: 2133335 - RNA, 19 nt, Artificial Sequence
  Description of Artificial Sequence: Synthetic oligonucleotide
uucuaagauguuuuccuga

SEQ ID NO: 2133336 - RNA, 19 nt, Artificial Sequence
  Description of Artificial Sequence: Synthetic oligonucleotide
caaucauccggguuuuacg

SEQ ID NO: 2133337 - RNA, 19 nt, Artificial Sequence
  Description of Artificial Sequence: Synthetic oligonucleotide
acagaauagcuucauuugu

SEQ ID NO: 2133338 - RNA, 19 nt, Artificial Sequence
  Description of Artificial Sequence: Synthetic oligonucleotide
ugugcccucuaucagucag

SEQ ID NO: 2133339 - RNA, 19 nt, Artificial Sequence
  Description of Artificial Sequence: Synthetic oligonucleotide
cuaaagucccacugguagg

SEQ ID NO: 2133340 - RNA, 19 nt, Artificial Sequence
  Description of Artificial Sequence: Synthetic oligonucleotide
uguaucccacaucucacug

SEQ ID NO: 2133341 - RNA, 19 nt, Artificial Sequence
  Description of Artificial Sequence: Synthetic oligonucleotide
uuucuuccgagagugagug

SEQ ID NO: 2133342 - RNA, 19 nt, Artificial Sequence
  Description of Artificial Sequence: Synthetic oligonucleotide
ucuaagauguuuuccugaa

SEQ ID NO: 2133343 - RNA, 19 nt, Artificial Sequence
  Description of Artificial Sequence: Synthetic oligonucleotide
ugcgaauuaccuuugguuu

SEQ ID NO: 2133344 - RNA, 19 nt, Artificial Sequence
  Description of Artificial Sequence: Synthetic oligonucleotide
gacaauccuacucgaaaug

SEQ ID NO: 2133345 - RNA, 19 nt, Artificial Sequence
  Description of Artificial Sequence: Synthetic oligonucleotide
uuuauccacaaaucuuugu

SEQ ID NO: 2133346 - RNA, 19 nt, Artificial Sequence
  Description of Artificial Sequence: Synthetic oligonucleotide
aguuucaauaagaaugaug

SEQ ID NO: 2133347 - RNA, 19 nt, Artificial Sequence
  Description of Artificial Sequence: Synthetic oligonucleotide
acaccuacaguuucaauaa

SEQ ID NO: 2133348 - RNA, 19 nt, Artificial Sequence
  Description of Artificial Sequence: Synthetic oligonucleotide
caucacacgcugaaacucg

SEQ ID NO: 2133349 - RNA, 19 nt, Artificial Sequence
  Description of Artificial Sequence: Synthetic oligonucleotide
ugcuaagcaagcucuuugc

SEQ ID NO: 2133350 - RNA, 19 nt, Artificial Sequence
  Description of Artificial Sequence: Synthetic oligonucleotide
aguucauccccuccugccg

SEQ ID NO: 2133351 - RNA, 19 nt, Artificial Sequence
  Description of Artificial Sequence: Synthetic oligonucleotide
ucuugauagcucaaucauc

SEQ ID NO: 2133352 - RNA, 19 nt, Artificial Sequence
  Description of Artificial Sequence: Synthetic oligonucleotide
ugguccuugucacaccucc

SEQ ID NO: 2133353 - RNA, 19 nt, Artificial Sequence
  Description of Artificial Sequence: Synthetic oligonucleotide
uuauaacuaccagaucugc

SEQ ID NO: 2133354 - RNA, 19 nt, Artificial Sequence
  Description of Artificial Sequence: Synthetic oligonucleotide
gacuaggacucucugaaga

SEQ ID NO: 2133355 - RNA, 19 nt, Artificial Sequence
  Description of Artificial Sequence: Synthetic oligonucleotide
ugaguggauuccaccagag

SEQ ID NO: 2133356 - RNA, 19 nt, Artificial Sequence
  Description of Artificial Sequence: Synthetic oligonucleotide
uaucaaccauaucagcaac

SEQ ID NO: 2133357 - RNA, 19 nt, Artificial Sequence
  Description of Artificial Sequence: Synthetic oligonucleotide
cauuguaucccacaucuca

SEQ ID NO: 2133358 - RNA, 19 nt, Artificial Sequence
  Description of Artificial Sequence: Synthetic oligonucleotide
auuguaucccacaucucac

SEQ ID NO: 2133359 - RNA, 19 nt, Artificial Sequence
  Description of Artificial Sequence: Synthetic oligonucleotide
aaagguugauuucccugca

SEQ ID NO: 2133360 - RNA, 19 nt, Artificial Sequence
  Description of Artificial Sequence: Synthetic oligonucleotide
uggugcaagaagauggguc

SEQ ID NO: 2133361 - RNA, 19 nt, Artificial Sequence
  Description of Artificial Sequence: Synthetic oligonucleotide
aacuaccagaucugccauc

SEQ ID NO: 2133362 - RNA, 19 nt, Artificial Sequence
  Description of Artificial Sequence: Synthetic oligonucleotide
cagaaugcucuccucaggc

SEQ ID NO: 2133363 - RNA, 19 nt, Artificial Sequence
  Description of Artificial Sequence: Synthetic oligonucleotide
ugauguaugcauucauauc

SEQ ID NO: 2133364 - RNA, 19 nt, Artificial Sequence
  Description of Artificial Sequence: Synthetic oligonucleotide
ggugcaagaagaugggucc

SEQ ID NO: 2133365 - RNA, 19 nt, Artificial Sequence
  Description of Artificial Sequence: Synthetic oligonucleotide
uaagagggauccaccacug

SEQ ID NO: 2133366 - RNA, 19 nt, Artificial Sequence
  Description of Artificial Sequence: Synthetic oligonucleotide
uugauagcucaaucauccg

SEQ ID NO: 2133367 - RNA, 19 nt, Artificial Sequence
  Description of Artificial Sequence: Synthetic oligonucleotide
gucauuguaucccacaucu

SEQ ID NO: 2133368 - RNA, 19 nt, Artificial Sequence
  Description of Artificial Sequence: Synthetic oligonucleotide
aaggggcuuuccuugguug

SEQ ID NO: 2133369 - RNA, 19 nt, Artificial Sequence
  Description of Artificial Sequence: Synthetic oligonucleotide
uugcccgcugacuaaaccc

SEQ ID NO: 2133370 - RNA, 19 nt, Artificial Sequence
  Description of Artificial Sequence: Synthetic oligonucleotide
cauaucucuugauagcuca

SEQ ID NO: 2133371 - RNA, 19 nt, Artificial Sequence
  Description of Artificial Sequence: Synthetic oligonucleotide
agaguuauggccucugcua

SEQ ID NO: 2133372 - RNA, 19 nt, Artificial Sequence
  Description of Artificial Sequence: Synthetic oligonucleotide
acagaaugcucuccucagg

SEQ ID NO: 2133373 - RNA, 19 nt, Artificial Sequence
  Description of Artificial Sequence: Synthetic oligonucleotide
aagcaagcucuuugcccgc

SEQ ID NO: 2133374 - RNA, 19 nt, Artificial Sequence
  Description of Artificial Sequence: Synthetic oligonucleotide
aaguuuauccacaaaucuu

SEQ ID NO: 2133375 - RNA, 19 nt, Artificial Sequence
  Description of Artificial Sequence: Synthetic oligonucleotide
cauuugugguccuugucac

SEQ ID NO: 2133376 - RNA, 19 nt, Artificial Sequence
  Description of Artificial Sequence: Synthetic oligonucleotide
aauccuacucgaaauguaa

SEQ ID NO: 2133377 - RNA, 19 nt, Artificial Sequence
  Description of Artificial Sequence: Synthetic oligonucleotide
uuugcccgcugacuaaacc

SEQ ID NO: 2133378 - RNA, 19 nt, Artificial Sequence
  Description of Artificial Sequence: Synthetic oligonucleotide
auaucagcaacagcaaacu

SEQ ID NO: 2133379 - RNA, 19 nt, Artificial Sequence
  Description of Artificial Sequence: Synthetic oligonucleotide
agacaauccuacucgaaau

SEQ ID NO: 2133380 - RNA, 19 nt, Artificial Sequence
  Description of Artificial Sequence: Synthetic oligonucleotide
uaucccacaucucacugau

SEQ ID NO: 2133381 - RNA, 19 nt, Artificial Sequence
  Description of Artificial Sequence: Synthetic oligonucleotide
agcucaaucauccggguuu

SEQ ID NO: 2133382 - RNA, 19 nt, Artificial Sequence
  Description of Artificial Sequence: Synthetic oligonucleotide
gcugacuaaacccauauaa

SEQ ID NO: 2133383 - RNA, 19 nt, Artificial Sequence
  Description of Artificial Sequence: Synthetic oligonucleotide
aagagggauccaccacugg

SEQ ID NO: 2133384 - RNA, 19 nt, Artificial Sequence
  Description of Artificial Sequence: Synthetic oligonucleotide
gaaugcucuccucaggcca

SEQ ID NO: 2133385 - RNA, 19 nt, Artificial Sequence
  Description of Artificial Sequence: Synthetic oligonucleotide
agaggaaucuguucuugga

SEQ ID NO: 2133386 - RNA, 19 nt, Artificial Sequence
  Description of Artificial Sequence: Synthetic oligonucleotide
augcgaauuaccuuugguu

SEQ ID NO: 2133387 - RNA, 19 nt, Artificial Sequence
  Description of Artificial Sequence: Synthetic oligonucleotide
cucgauuauaccccuuuug

SEQ ID NO: 2133388 - RNA, 19 nt, Artificial Sequence
  Description of Artificial Sequence: Synthetic oligonucleotide
agugcgcucacguacucug

SEQ ID NO: 2133389 - RNA, 19 nt, Artificial Sequence
  Description of Artificial Sequence: Synthetic oligonucleotide
gagugaguggauuccacca

SEQ ID NO: 2133390 - RNA, 19 nt, Artificial Sequence
  Description of Artificial Sequence: Synthetic oligonucleotide
ccuaaagucccacugguag

SEQ ID NO: 2133391 - RNA, 19 nt, Artificial Sequence
  Description of Artificial Sequence: Synthetic oligonucleotide
ucuguucuuggaugcucgg

SEQ ID NO: 2133392 - RNA, 19 nt, Artificial Sequence
  Description of Artificial Sequence: Synthetic oligonucleotide
uuaucagaaagucccucuu

SEQ ID NO: 2133393 - RNA, 19 nt, Artificial Sequence
  Description of Artificial Sequence: Synthetic oligonucleotide
caucagauuuaguuauaac

SEQ ID NO: 2133394 - RNA, 19 nt, Artificial Sequence
  Description of Artificial Sequence: Synthetic oligonucleotide
ucauaucucuugauagcuc

SEQ ID NO: 2133395 - RNA, 19 nt, Artificial Sequence
  Description of Artificial Sequence: Synthetic oligonucleotide
ggucuugaaauguucuaag

SEQ ID NO: 2133396 - RNA, 19 nt, Artificial Sequence
  Description of Artificial Sequence: Synthetic oligonucleotide
cagaggaaucuguucuugg

SEQ ID NO: 2133397 - RNA, 19 nt, Artificial Sequence
  Description of Artificial Sequence: Synthetic oligonucleotide
gaaccuuccucuccaucag

SEQ ID NO: 2133398 - RNA, 19 nt, Artificial Sequence
  Description of Artificial Sequence: Synthetic oligonucleotide
ucauccggguuuuacguuc

SEQ ID NO: 2133399 - RNA, 19 nt, Artificial Sequence
  Description of Artificial Sequence: Synthetic oligonucleotide
acagauaaucugugcccuc

SEQ ID NO: 2133400 - RNA, 19 nt, Artificial Sequence
  Description of Artificial Sequence: Synthetic oligonucleotide
agcuagcacagauaaucug

SEQ ID NO: 2133401 - RNA, 19 nt, Artificial Sequence
  Description of Artificial Sequence: Synthetic oligonucleotide
ucugugcccucuaucaguc

SEQ ID NO: 2133402 - RNA, 19 nt, Artificial Sequence
  Description of Artificial Sequence: Synthetic oligonucleotide
augcauucauaucucuuga

SEQ ID NO: 2133403 - RNA, 19 nt, Artificial Sequence
  Description of Artificial Sequence: Synthetic oligonucleotide
ucaaucauccggguuuuac

SEQ ID NO: 2133404 - RNA, 19 nt, Artificial Sequence
  Description of Artificial Sequence: Synthetic oligonucleotide
ucaccuaagagggauccac

SEQ ID NO: 2133405 - RNA, 19 nt, Artificial Sequence
  Description of Artificial Sequence: Synthetic oligonucleotide
aguuauggccucugcuaag

SEQ ID NO: 2133406 - RNA, 19 nt, Artificial Sequence
  Description of Artificial Sequence: Synthetic oligonucleotide
uucagugcgcucacguacu

SEQ ID NO: 2133407 - RNA, 19 nt, Artificial Sequence
  Description of Artificial Sequence: Synthetic oligonucleotide
uuguaucccacaucucacu

SEQ ID NO: 2133408 - RNA, 19 nt, Artificial Sequence
  Description of Artificial Sequence: Synthetic oligonucleotide
caacagcaaacuccgacug

SEQ ID NO: 2133409 - RNA, 19 nt, Artificial Sequence
  Description of Artificial Sequence: Synthetic oligonucleotide
ucuggcagaaaugcgaauu

SEQ ID NO: 2133410 - RNA, 19 nt, Artificial Sequence
  Description of Artificial Sequence: Synthetic oligonucleotide
accuaagagggauccacca

SEQ ID NO: 2133411 - RNA, 19 nt, Artificial Sequence
  Description of Artificial Sequence: Synthetic oligonucleotide
uuuccugaaugagauucca

SEQ ID NO: 2133412 - RNA, 19 nt, Artificial Sequence
  Description of Artificial Sequence: Synthetic oligonucleotide
uucauuugugguccuuguc

SEQ ID NO: 2133413 - RNA, 19 nt, Artificial Sequence
  Description of Artificial Sequence: Synthetic oligonucleotide
aucugugcccucuaucagu

SEQ ID NO: 2133414 - RNA, 19 nt, Artificial Sequence
  Description of Artificial Sequence: Synthetic oligonucleotide
uagcacagauaaucugugc

SEQ ID NO: 2133415 - RNA, 19 nt, Artificial Sequence
  Description of Artificial Sequence: Synthetic oligonucleotide
gaaaugcgaauuaccuuug

SEQ ID NO: 2133416 - RNA, 19 nt, Artificial Sequence
  Description of Artificial Sequence: Synthetic oligonucleotide
gcagcaauaaaacaaacau

SEQ ID NO: 2133417 - RNA, 19 nt, Artificial Sequence
  Description of Artificial Sequence: Synthetic oligonucleotide
uaccuuugguuuccagacc

SEQ ID NO: 2133418 - RNA, 19 nt, Artificial Sequence
  Description of Artificial Sequence: Synthetic oligonucleotide
ugcccgcugacuaaaccca

SEQ ID NO: 2133419 - RNA, 19 nt, Artificial Sequence
  Description of Artificial Sequence: Synthetic oligonucleotide
uauaccccuuuugaugccc

SEQ ID NO: 2133420 - RNA, 19 nt, Artificial Sequence
  Description of Artificial Sequence: Synthetic oligonucleotide
uuuccagaccccugagcgc

SEQ ID NO: 2133421 - RNA, 19 nt, Artificial Sequence
  Description of Artificial Sequence: Synthetic oligonucleotide
ugguagacuaggacucucu

SEQ ID NO: 2133422 - RNA, 19 nt, Artificial Sequence
  Description of Artificial Sequence: Synthetic oligonucleotide
acuaggacucucugaagaa

SEQ ID NO: 2133423 - RNA, 19 nt, Artificial Sequence
  Description of Artificial Sequence: Synthetic oligonucleotide
cugacuaaacccauauaaa

SEQ ID NO: 2133424 - RNA, 19 nt, Artificial Sequence
  Description of Artificial Sequence: Synthetic oligonucleotide
guucaccuaagagggaucc

SEQ ID NO: 2133425 - RNA, 19 nt, Artificial Sequence
  Description of Artificial Sequence: Synthetic oligonucleotide
cugcuaagcaagcucuuug

SEQ ID NO: 2133426 - RNA, 19 nt, Artificial Sequence
  Description of Artificial Sequence: Synthetic oligonucleotide
uaucagcaacagcaaacuc

SEQ ID NO: 2133427 - RNA, 19 nt, Artificial Sequence
  Description of Artificial Sequence: Synthetic oligonucleotide
guuauggccucugcuaagc

SEQ ID NO: 2133428 - RNA, 19 nt, Artificial Sequence
  Description of Artificial Sequence: Synthetic oligonucleotide
ucggucauuguaucccaca

SEQ ID NO: 2133429 - RNA, 19 nt, Artificial Sequence
  Description of Artificial Sequence: Synthetic oligonucleotide
uggcagcaauaaaacaaac

SEQ ID NO: 2133430 - RNA, 19 nt, Artificial Sequence
  Description of Artificial Sequence: Synthetic oligonucleotide
uuauaccccuuuugaugcc

SEQ ID NO: 2133431 - RNA, 19 nt, Artificial Sequence
  Description of Artificial Sequence: Synthetic oligonucleotide
gcccagacaauccuacucg

SEQ ID NO: 2133432 - RNA, 19 nt, Artificial Sequence
  Description of Artificial Sequence: Synthetic oligonucleotide
uuccugaaugagauuccac

SEQ ID NO: 2133433 - RNA, 19 nt, Artificial Sequence
  Description of Artificial Sequence: Synthetic oligonucleotide
uaguuauaacuaccagauc

SEQ ID NO: 2133434 - RNA, 19 nt, Artificial Sequence
  Description of Artificial Sequence: Synthetic oligonucleotide
ccuacucgaaauguaaggg

SEQ ID NO: 2133435 - RNA, 19 nt, Artificial Sequence
  Description of Artificial Sequence: Synthetic oligonucleotide
gaaagucccucuuuguggu

SEQ ID NO: 2133436 - RNA, 19 nt, Artificial Sequence
  Description of Artificial Sequence: Synthetic oligonucleotide
uccgagagugaguggauuc

SEQ ID NO: 2133437 - RNA, 19 nt, Artificial Sequence
  Description of Artificial Sequence: Synthetic oligonucleotide
uccuugguugagccgcucc

SEQ ID NO: 2133438 - RNA, 19 nt, Artificial Sequence
  Description of Artificial Sequence: Synthetic oligonucleotide
cuggauacagaaugcucuc

SEQ ID NO: 2133439 - RNA, 19 nt, Artificial Sequence
  Description of Artificial Sequence: Synthetic oligonucleotide
gagggauccaccacuggug

SEQ ID NO: 2133440 - RNA, 19 nt, Artificial Sequence
  Description of Artificial Sequence: Synthetic oligonucleotide
guuuauccacaaaucuuug

SEQ ID NO: 2133441 - RNA, 19 nt, Artificial Sequence
  Description of Artificial Sequence: Synthetic oligonucleotide
guucuuggaugcucggaug

SEQ ID NO: 2133442 - RNA, 19 nt, Artificial Sequence
  Description of Artificial Sequence: Synthetic oligonucleotide
cuuuaucagaaagucccuc

SEQ ID NO: 2133443 - RNA, 19 nt, Artificial Sequence
  Description of Artificial Sequence: Synthetic oligonucleotide
agacuaggacucucugaag

SEQ ID NO: 2133444 - RNA, 19 nt, Artificial Sequence
  Description of Artificial Sequence: Synthetic oligonucleotide
accuacaguuucaauaaga

SEQ ID NO: 2133445 - RNA, 19 nt, Artificial Sequence
  Description of Artificial Sequence: Synthetic oligonucleotide
caccuaagagggauccacc

SEQ ID NO: 2133446 - RNA, 19 nt, Artificial Sequence
  Description of Artificial Sequence: Synthetic oligonucleotide
aucucgauuauaccccuuu

SEQ ID NO: 2133447 - RNA, 19 nt, Artificial Sequence
  Description of Artificial Sequence: Synthetic oligonucleotide
ugcauucauaucucuugau

SEQ ID NO: 2133448 - RNA, 19 nt, Artificial Sequence
  Description of Artificial Sequence: Synthetic oligonucleotide
auagcucaaucauccgggu

SEQ ID NO: 2133449 - RNA, 19 nt, Artificial Sequence
  Description of Artificial Sequence: Synthetic oligonucleotide
uccuugucacaccuccuaa

SEQ ID NO: 2133450 - RNA, 19 nt, Artificial Sequence
  Description of Artificial Sequence: Synthetic oligonucleotide
cagcucuuucuuccgagag

SEQ ID NO: 2133451 - RNA, 19 nt, Artificial Sequence
  Description of Artificial Sequence: Synthetic oligonucleotide
cucggugguagacuaggac

SEQ ID NO: 2133452 - RNA, 19 nt, Artificial Sequence
  Description of Artificial Sequence: Synthetic oligonucleotide
ccuucacacaacagaauag

SEQ ID NO: 2133453 - RNA, 19 nt, Artificial Sequence
  Description of Artificial Sequence: Synthetic oligonucleotide
ugugguccuucaagguggc

SEQ ID NO: 2133454 - RNA, 19 nt, Artificial Sequence
  Description of Artificial Sequence: Synthetic oligonucleotide
cacguacucugcuuggauc

SEQ ID NO: 2133455 - RNA, 19 nt, Artificial Sequence
  Description of Artificial Sequence: Synthetic oligonucleotide
ugcgcucacguacucugcu

SEQ ID NO: 2133456 - RNA, 19 nt, Artificial Sequence
  Description of Artificial Sequence: Synthetic oligonucleotide
uaggugauggccugaugua

SEQ ID NO: 2133457 - RNA, 19 nt, Artificial Sequence
  Description of Artificial Sequence: Synthetic oligonucleotide
auccuacucgaaauguaag

SEQ ID NO: 2133458 - RNA, 19 nt, Artificial Sequence
  Description of Artificial Sequence: Synthetic oligonucleotide
ucacguacucugcuuggau

SEQ ID NO: 2133459 - RNA, 19 nt, Artificial Sequence
  Description of Artificial Sequence: Synthetic oligonucleotide
cugccaucucgauuauacc

SEQ ID NO: 2133460 - RNA, 19 nt, Artificial Sequence
  Description of Artificial Sequence: Synthetic oligonucleotide
ucauuguaucccacaucuc

SEQ ID NO: 2133461 - RNA, 19 nt, Artificial Sequence
  Description of Artificial Sequence: Synthetic oligonucleotide
cacacgcugaaacucgguc

SEQ ID NO: 2133462 - RNA, 19 nt, Artificial Sequence
  Description of Artificial Sequence: Synthetic oligonucleotide
cagacaauccuacucgaaa

SEQ ID NO: 2133463 - RNA, 19 nt, Artificial Sequence
  Description of Artificial Sequence: Synthetic oligonucleotide
ugggucuugaaauguucua

SEQ ID NO: 2133464 - RNA, 19 nt, Artificial Sequence
  Description of Artificial Sequence: Synthetic oligonucleotide
uucuuccgagagugagugg

SEQ ID NO: 2133465 - RNA, 19 nt, Artificial Sequence
  Description of Artificial Sequence: Synthetic oligonucleotide
ucucgauuauaccccuuuu

SEQ ID NO: 2133466 - RNA, 19 nt, Artificial Sequence
  Description of Artificial Sequence: Synthetic oligonucleotide
gauccugcgggcuggcaca

SEQ ID NO: 2133467 - RNA, 19 nt, Artificial Sequence
  Description of Artificial Sequence: Synthetic oligonucleotide
cuuggauccugcgggcugg

SEQ ID NO: 2133468 - RNA, 19 nt, Artificial Sequence
  Description of Artificial Sequence: Synthetic oligonucleotide
gcucuuucuuccgagagug

SEQ ID NO: 2133469 - RNA, 19 nt, Artificial Sequence
  Description of Artificial Sequence: Synthetic oligonucleotide
auggguccacagcuagcac

SEQ ID NO: 2133470 - RNA, 19 nt, Artificial Sequence
  Description of Artificial Sequence: Synthetic oligonucleotide
uaucucuugauagcucaau

SEQ ID NO: 2133471 - RNA, 19 nt, Artificial Sequence
  Description of Artificial Sequence: Synthetic oligonucleotide
cugauguaugcauucauau

SEQ ID NO: 2133472 - RNA, 19 nt, Artificial Sequence
  Description of Artificial Sequence: Synthetic oligonucleotide
ucucggugguagacuagga

SEQ ID NO: 2133473 - RNA, 19 nt, Artificial Sequence
  Description of Artificial Sequence: Synthetic oligonucleotide
ugaugcccucuccacuucu

SEQ ID NO: 2133474 - RNA, 19 nt, Artificial Sequence
  Description of Artificial Sequence: Synthetic oligonucleotide
cuaagagggauccaccacu

SEQ ID NO: 2133475 - RNA, 19 nt, Artificial Sequence
  Description of Artificial Sequence: Synthetic oligonucleotide
uccuaaagucccacuggua

SEQ ID NO: 2133476 - RNA, 19 nt, Artificial Sequence
  Description of Artificial Sequence: Synthetic oligonucleotide
gguagacuaggacucucug

SEQ ID NO: 2133477 - RNA, 19 nt, Artificial Sequence
  Description of Artificial Sequence: Synthetic oligonucleotide
auauuacuauaaagguuga

SEQ ID NO: 2133478 - RNA, 19 nt, Artificial Sequence
  Description of Artificial Sequence: Synthetic oligonucleotide
uccaucagauuuaguuaua

SEQ ID NO: 2133479 - RNA, 19 nt, Artificial Sequence
  Description of Artificial Sequence: Synthetic oligonucleotide
cccauauaaaguuuaucca

SEQ ID NO: 2133480 - RNA, 19 nt, Artificial Sequence
  Description of Artificial Sequence: Synthetic oligonucleotide
ugcucucggugguagacua

SEQ ID NO: 2133481 - RNA, 19 nt, Artificial Sequence
  Description of Artificial Sequence: Synthetic oligonucleotide
guaucccacaucucacuga

SEQ ID NO: 2133482 - RNA, 19 nt, Artificial Sequence
  Description of Artificial Sequence: Synthetic oligonucleotide
ugcccucuaucagucagca

SEQ ID NO: 2133483 - RNA, 19 nt, Artificial Sequence
  Description of Artificial Sequence: Synthetic oligonucleotide
uaaggggcuuuccuugguu

SEQ ID NO: 2133484 - RNA, 19 nt, Artificial Sequence
  Description of Artificial Sequence: Synthetic oligonucleotide
augggucuugaaauguucu

SEQ ID NO: 2133485 - RNA, 19 nt, Artificial Sequence
  Description of Artificial Sequence: Synthetic oligonucleotide
uacguucaccuaagaggga

SEQ ID NO: 2133486 - RNA, 19 nt, Artificial Sequence
  Description of Artificial Sequence: Synthetic oligonucleotide
cuucuggcagaaaugcgaa

SEQ ID NO: 2133487 - RNA, 19 nt, Artificial Sequence
  Description of Artificial Sequence: Synthetic oligonucleotide
gugaguggauuccaccaga

SEQ ID NO: 2133488 - RNA, 19 nt, Artificial Sequence
  Description of Artificial Sequence: Synthetic oligonucleotide
ggguuuuacguucaccuaa

SEQ ID NO: 2133489 - RNA, 19 nt, Artificial Sequence
  Description of Artificial Sequence: Synthetic oligonucleotide
gccaucucgauuauacccc

SEQ ID NO: 2133490 - RNA, 19 nt, Artificial Sequence
  Description of Artificial Sequence: Synthetic oligonucleotide
gagaaccuuccucuccauc

SEQ ID NO: 2133491 - RNA, 19 nt, Artificial Sequence
  Description of Artificial Sequence: Synthetic oligonucleotide
uccggguuuuacguucacc

SEQ ID NO: 2133492 - RNA, 19 nt, Artificial Sequence
  Description of Artificial Sequence: Synthetic oligonucleotide
acucgaaauguaaggggcu

SEQ ID NO: 2133493 - RNA, 19 nt, Artificial Sequence
  Description of Artificial Sequence: Synthetic oligonucleotide
aggucuccaucagauuuag

SEQ ID NO: 2133494 - RNA, 19 nt, Artificial Sequence
  Description of Artificial Sequence: Synthetic oligonucleotide
gaccccugagcgccggcgg

SEQ ID NO: 2133495 - RNA, 19 nt, Artificial Sequence
  Description of Artificial Sequence: Synthetic oligonucleotide
caccuacaguuucaauaag

SEQ ID NO: 2133496 - RNA, 19 nt, Artificial Sequence
  Description of Artificial Sequence: Synthetic oligonucleotide
acguucaccuaagagggau

SEQ ID NO: 2133497 - RNA, 19 nt, Artificial Sequence
  Description of Artificial Sequence: Synthetic oligonucleotide
ggcuuuccuugguugagcc

SEQ ID NO: 2133498 - RNA, 19 nt, Artificial Sequence
  Description of Artificial Sequence: Synthetic oligonucleotide
ucuuugcccgcugacuaaa

SEQ ID NO: 2133499 - RNA, 19 nt, Artificial Sequence
  Description of Artificial Sequence: Synthetic oligonucleotide
cuccaucagauuuaguuau

SEQ ID NO: 2133500 - RNA, 19 nt, Artificial Sequence
  Description of Artificial Sequence: Synthetic oligonucleotide
cagcaaacuccgacugccc

SEQ ID NO: 2133501 - RNA, 19 nt, Artificial Sequence
  Description of Artificial Sequence: Synthetic oligonucleotide
caaacuccgacugccccac

SEQ ID NO: 2133502 - RNA, 19 nt, Artificial Sequence
  Description of Artificial Sequence: Synthetic oligonucleotide
cucggaugggucuugaaau

SEQ ID NO: 2133503 - RNA, 19 nt, Artificial Sequence
  Description of Artificial Sequence: Synthetic oligonucleotide
uaccugagccagcucuuuc

SEQ ID NO: 2133504 - RNA, 19 nt, Artificial Sequence
  Description of Artificial Sequence: Synthetic oligonucleotide
cucuugauagcucaaucau

SEQ ID NO: 2133505 - RNA, 19 nt, Artificial Sequence
  Description of Artificial Sequence: Synthetic oligonucleotide
guuuuacguucaccuaaga

SEQ ID NO: 2133506 - RNA, 19 nt, Artificial Sequence
  Description of Artificial Sequence: Synthetic oligonucleotide
uccagaccccugagcgccg

SEQ ID NO: 2133507 - RNA, 19 nt, Artificial Sequence
  Description of Artificial Sequence: Synthetic oligonucleotide
uagcucaaucauccggguu

SEQ ID NO: 2133508 - RNA, 19 nt, Artificial Sequence
  Description of Artificial Sequence: Synthetic oligonucleotide
gauaaucugugcccucuau

SEQ ID NO: 2133509 - RNA, 19 nt, Artificial Sequence
  Description of Artificial Sequence: Synthetic oligonucleotide
cuugguugagccgcuccug

SEQ ID NO: 2133510 - RNA, 19 nt, Artificial Sequence
  Description of Artificial Sequence: Synthetic oligonucleotide
agauaaucugugcccucua

SEQ ID NO: 2133511 - RNA, 19 nt, Artificial Sequence
  Description of Artificial Sequence: Synthetic oligonucleotide
uucaccuaagagggaucca

SEQ ID NO: 2133512 - RNA, 19 nt, Artificial Sequence
  Description of Artificial Sequence: Synthetic oligonucleotide
auccggguuuuacguucac

SEQ ID NO: 2133513 - RNA, 19 nt, Artificial Sequence
  Description of Artificial Sequence: Synthetic oligonucleotide
aucauccggguuuuacguu

SEQ ID NO: 2133514 - RNA, 19 nt, Artificial Sequence
  Description of Artificial Sequence: Synthetic oligonucleotide
gcucacguacucugcuugg

SEQ ID NO: 2133515 - RNA, 19 nt, Artificial Sequence
  Description of Artificial Sequence: Synthetic oligonucleotide
cuuugcccgcugacuaaac

SEQ ID NO: 2133516 - RNA, 19 nt, Artificial Sequence
  Description of Artificial Sequence: Synthetic oligonucleotide
uucuggcagaaaugcgaau

SEQ ID NO: 2133517 - RNA, 19 nt, Artificial Sequence
  Description of Artificial Sequence: Synthetic oligonucleotide
ugauggccugauguaugca

SEQ ID NO: 2133518 - RNA, 19 nt, Artificial Sequence
  Description of Artificial Sequence: Synthetic oligonucleotide
gcuuuccuugguugagccg

SEQ ID NO: 2133519 - RNA, 19 nt, Artificial Sequence
  Description of Artificial Sequence: Synthetic oligonucleotide
cucggucauuguaucccac

SEQ ID NO: 2133520 - RNA, 19 nt, Artificial Sequence
  Description of Artificial Sequence: Synthetic oligonucleotide
acacaacagaauagcuuca

SEQ ID NO: 2133521 - RNA, 19 nt, Artificial Sequence
  Description of Artificial Sequence: Synthetic oligonucleotide
ucgaaauguaaggggcuuu

SEQ ID NO: 2133522 - RNA, 19 nt, Artificial Sequence
  Description of Artificial Sequence: Synthetic oligonucleotide
gaugcucggaugggucuug

SEQ ID NO: 2133523 - RNA, 19 nt, Artificial Sequence
  Description of Artificial Sequence: Synthetic oligonucleotide
ccgguggcagcaauaaaac

SEQ ID NO: 2133524 - RNA, 19 nt, Artificial Sequence
  Description of Artificial Sequence: Synthetic oligonucleotide
cuuugugguccuucaaggu

SEQ ID NO: 2133525 - RNA, 19 nt, Artificial Sequence
  Description of Artificial Sequence: Synthetic oligonucleotide
ugagaaccuuccucuccau

SEQ ID NO: 2133526 - RNA, 19 nt, Artificial Sequence
  Description of Artificial Sequence: Synthetic oligonucleotide
ggucauuguaucccacauc

SEQ ID NO: 2133527 - RNA, 19 nt, Artificial Sequence
  Description of Artificial Sequence: Synthetic oligonucleotide
uaccccuuuugaugcccug

SEQ ID NO: 2133528 - RNA, 19 nt, Artificial Sequence
  Description of Artificial Sequence: Synthetic oligonucleotide
ucaagguggccuggauaca

SEQ ID NO: 2133529 - RNA, 19 nt, Artificial Sequence
  Description of Artificial Sequence: Synthetic oligonucleotide
aggugauggccugauguau

SEQ ID NO: 2133530 - RNA, 19 nt, Artificial Sequence
  Description of Artificial Sequence: Synthetic oligonucleotide
agaccccugagcgccggcg

SEQ ID NO: 2133531 - RNA, 19 nt, Artificial Sequence
  Description of Artificial Sequence: Synthetic oligonucleotide
accagaguuauggccucug

SEQ ID NO: 2133532 - RNA, 19 nt, Artificial Sequence
  Description of Artificial Sequence: Synthetic oligonucleotide
agucccucuuugugguccu

SEQ ID NO: 2133533 - RNA, 19 nt, Artificial Sequence
  Description of Artificial Sequence: Synthetic oligonucleotide
gcggagcagcuucagugcg

SEQ ID NO: 2133534 - RNA, 19 nt, Artificial Sequence
  Description of Artificial Sequence: Synthetic oligonucleotide
ccuaagagggauccaccac

SEQ ID NO: 2133535 - RNA, 19 nt, Artificial Sequence
  Description of Artificial Sequence: Synthetic oligonucleotide
uucauccccuccugccggu

SEQ ID NO: 2133536 - RNA, 19 nt, Artificial Sequence
  Description of Artificial Sequence: Synthetic oligonucleotide
gcuagcacagauaaucugu

SEQ ID NO: 2133537 - RNA, 19 nt, Artificial Sequence
  Description of Artificial Sequence: Synthetic oligonucleotide
gcaucacacgcugaaacuc

SEQ ID NO: 2133538 - RNA, 19 nt, Artificial Sequence
  Description of Artificial Sequence: Synthetic oligonucleotide
guggucagcuccccaccug

SEQ ID NO: 2133539 - RNA, 19 nt, Artificial Sequence
  Description of Artificial Sequence: Synthetic oligonucleotide
ggacucucugaagaaguac

SEQ ID NO: 2133540 - RNA, 19 nt, Artificial Sequence
  Description of Artificial Sequence: Synthetic oligonucleotide
cuucauuugugguccuugu

SEQ ID NO: 2133541 - RNA, 19 nt, Artificial Sequence
  Description of Artificial Sequence: Synthetic oligonucleotide
accacuggugcaagaagau

SEQ ID NO: 2133542 - RNA, 19 nt, Artificial Sequence
  Description of Artificial Sequence: Synthetic oligonucleotide
gccucugcuaagcaagcuc

SEQ ID NO: 2133543 - RNA, 19 nt, Artificial Sequence
  Description of Artificial Sequence: Synthetic oligonucleotide
ccacugguaggugauggcc

SEQ ID NO: 2133544 - RNA, 19 nt, Artificial Sequence
  Description of Artificial Sequence: Synthetic oligonucleotide
caagcucuuugcccgcuga

SEQ ID NO: 2133545 - RNA, 19 nt, Artificial Sequence
  Description of Artificial Sequence: Synthetic oligonucleotide
gagauuccacauccagacu

SEQ ID NO: 2133546 - RNA, 19 nt, Artificial Sequence
  Description of Artificial Sequence: Synthetic oligonucleotide
cauccggguuuuacguuca

SEQ ID NO: 2133547 - RNA, 19 nt, Artificial Sequence
  Description of Artificial Sequence: Synthetic oligonucleotide
gggucuugaaauguucuaa

SEQ ID NO: 2133548 - RNA, 19 nt, Artificial Sequence
  Description of Artificial Sequence: Synthetic oligonucleotide
cagaaaugcgaauuaccuu

SEQ ID NO: 2133549 - RNA, 19 nt, Artificial Sequence
  Description of Artificial Sequence: Synthetic oligonucleotide
cagaguuauggccucugcu

SEQ ID NO: 2133550 - RNA, 19 nt, Artificial Sequence
  Description of Artificial Sequence: Synthetic oligonucleotide
ccacagcuagcacagauaa

SEQ ID NO: 2133551 - RNA, 19 nt, Artificial Sequence
  Description of Artificial Sequence: Synthetic oligonucleotide
gaguggauuccaccagagu

SEQ ID NO: 2133552 - RNA, 19 nt, Artificial Sequence
  Description of Artificial Sequence: Synthetic oligonucleotide
gucucuugguggucagcuc

SEQ ID NO: 2133553 - RNA, 19 nt, Artificial Sequence
  Description of Artificial Sequence: Synthetic oligonucleotide
gcucggaugggucuugaaa

SEQ ID NO: 2133554 - RNA, 19 nt, Artificial Sequence
  Description of Artificial Sequence: Synthetic oligonucleotide
ccugcgggcuggcacaacc

SEQ ID NO: 2133555 - RNA, 19 nt, Artificial Sequence
  Description of Artificial Sequence: Synthetic oligonucleotide
uuccgagagugaguggauu

SEQ ID NO: 2133556 - RNA, 19 nt, Artificial Sequence
  Description of Artificial Sequence: Synthetic oligonucleotide
aaacuccgacugccccaca

SEQ ID NO: 2133557 - RNA, 19 nt, Artificial Sequence
  Description of Artificial Sequence: Synthetic oligonucleotide
uccgacugccccacaccua

SEQ ID NO: 2133558 - RNA, 19 nt, Artificial Sequence
  Description of Artificial Sequence: Synthetic oligonucleotide
ucccucuuugugguccuuc

SEQ ID NO: 2133559 - RNA, 19 nt, Artificial Sequence
  Description of Artificial Sequence: Synthetic oligonucleotide
ugccgguggcagcaauaaa

SEQ ID NO: 2133560 - RNA, 19 nt, Artificial Sequence
  Description of Artificial Sequence: Synthetic oligonucleotide
cacagauaaucugugcccu

SEQ ID NO: 2133561 - RNA, 19 nt, Artificial Sequence
  Description of Artificial Sequence: Synthetic oligonucleotide
uccugcucucggugguaga

SEQ ID NO: 2133562 - RNA, 19 nt, Artificial Sequence
  Description of Artificial Sequence: Synthetic oligonucleotide
ccgacugccccacaccuac

SEQ ID NO: 2133563 - RNA, 19 nt, Artificial Sequence
  Description of Artificial Sequence: Synthetic oligonucleotide
ugcucggaugggucuugaa

SEQ ID NO: 2133564 - RNA, 19 nt, Artificial Sequence
  Description of Artificial Sequence: Synthetic oligonucleotide
cugaugcccucuccacuuc

SEQ ID NO: 2133565 - RNA, 19 nt, Artificial Sequence
  Description of Artificial Sequence: Synthetic oligonucleotide
gugguagacuaggacucuc

SEQ ID NO: 2133566 - RNA, 19 nt, Artificial Sequence
  Description of Artificial Sequence: Synthetic oligonucleotide
ccgagagugaguggauucc

SEQ ID NO: 2133567 - RNA, 19 nt, Artificial Sequence
  Description of Artificial Sequence: Synthetic oligonucleotide
gcucuuugcccgcugacua

SEQ ID NO: 2133568 - RNA, 19 nt, Artificial Sequence
  Description of Artificial Sequence: Synthetic oligonucleotide
aguaccugagccagcucuu

SEQ ID NO: 2133569 - RNA, 19 nt, Artificial Sequence
  Description of Artificial Sequence: Synthetic oligonucleotide
cucuuugcccgcugacuaa

SEQ ID NO: 2133570 - RNA, 19 nt, Artificial Sequence
  Description of Artificial Sequence: Synthetic oligonucleotide
gugcaagaagaugggucca

SEQ ID NO: 2133571 - RNA, 19 nt, Artificial Sequence
  Description of Artificial Sequence: Synthetic oligonucleotide
ccggguuuuacguucaccu

SEQ ID NO: 2133572 - RNA, 19 nt, Artificial Sequence
  Description of Artificial Sequence: Synthetic oligonucleotide
cagauaaucugugcccucu

SEQ ID NO: 2133573 - RNA, 19 nt, Artificial Sequence
  Description of Artificial Sequence: Synthetic oligonucleotide
cccucuaucagucagcauu

SEQ ID NO: 2133574 - RNA, 19 nt, Artificial Sequence
  Description of Artificial Sequence: Synthetic oligonucleotide
cggcggagcagcuucagug

SEQ ID NO: 2133575 - RNA, 19 nt, Artificial Sequence
  Description of Artificial Sequence: Synthetic oligonucleotide
ggggcuuuccuugguugag

SEQ ID NO: 2133576 - RNA, 19 nt, Artificial Sequence
  Description of Artificial Sequence: Synthetic oligonucleotide
cacgcugaaacucggucau

SEQ ID NO: 2133577 - RNA, 19 nt, Artificial Sequence
  Description of Artificial Sequence: Synthetic oligonucleotide
cucacguacucugcuugga

SEQ ID NO: 2133578 - RNA, 19 nt, Artificial Sequence
  Description of Artificial Sequence: Synthetic oligonucleotide
cuaccagaucugccaucuc

SEQ ID NO: 2133579 - RNA, 19 nt, Artificial Sequence
  Description of Artificial Sequence: Synthetic oligonucleotide
cuaagauguuuuccugaau

SEQ ID NO: 2133580 - RNA, 19 nt, Artificial Sequence
  Description of Artificial Sequence: Synthetic oligonucleotide
agcaagcucuuugcccgcu

SEQ ID NO: 2133581 - RNA, 19 nt, Artificial Sequence
  Description of Artificial Sequence: Synthetic oligonucleotide
ucauccccuccugccggug

SEQ ID NO: 2133582 - RNA, 19 nt, Artificial Sequence
  Description of Artificial Sequence: Synthetic oligonucleotide
uccugccgguggcagcaau

SEQ ID NO: 2133583 - RNA, 19 nt, Artificial Sequence
  Description of Artificial Sequence: Synthetic oligonucleotide
cccuuuugaugcccugaag

SEQ ID NO: 2133584 - RNA, 19 nt, Artificial Sequence
  Description of Artificial Sequence: Synthetic oligonucleotide
guaaggggcuuuccuuggu

SEQ ID NO: 2133585 - RNA, 19 nt, Artificial Sequence
  Description of Artificial Sequence: Synthetic oligonucleotide
cugagcgccggcggagcag

SEQ ID NO: 2133586 - RNA, 19 nt, Artificial Sequence
  Description of Artificial Sequence: Synthetic oligonucleotide
cuuggaugcucggaugggu

SEQ ID NO: 2133587 - RNA, 19 nt, Artificial Sequence
  Description of Artificial Sequence: Synthetic oligonucleotide
cugcgggcuggcacaacca

SEQ ID NO: 2133588 - RNA, 19 nt, Artificial Sequence
  Description of Artificial Sequence: Synthetic oligonucleotide
ccugaaugagauuccacau

SEQ ID NO: 2133589 - RNA, 19 nt, Artificial Sequence
  Description of Artificial Sequence: Synthetic oligonucleotide
ccauaucagcaacagcaaa

SEQ ID NO: 2133590 - RNA, 19 nt, Artificial Sequence
  Description of Artificial Sequence: Synthetic oligonucleotide
gugcgcucacguacucugc

SEQ ID NO: 2133591 - RNA, 19 nt, Artificial Sequence
  Description of Artificial Sequence: Synthetic oligonucleotide
ggggcccagacaauccuac

SEQ ID NO: 2133592 - RNA, 19 nt, Artificial Sequence
  Description of Artificial Sequence: Synthetic oligonucleotide
cgaaauguaaggggcuuuc

SEQ ID NO: 2133593 - RNA, 19 nt, Artificial Sequence
  Description of Artificial Sequence: Synthetic oligonucleotide
cuccgacugccccacaccu

SEQ ID NO: 2133594 - RNA, 19 nt, Artificial Sequence
  Description of Artificial Sequence: Synthetic oligonucleotide
gcaagcucuuugcccgcug

SEQ ID NO: 2133595 - RNA, 19 nt, Artificial Sequence
  Description of Artificial Sequence: Synthetic oligonucleotide
cgcucacguacucugcuug

SEQ ID NO: 2133596 - RNA, 19 nt, Artificial Sequence
  Description of Artificial Sequence: Synthetic oligonucleotide
ccacuggugcaagaagaug

SEQ ID NO: 2133597 - RNA, 19 nt, Artificial Sequence
  Description of Artificial Sequence: Synthetic oligonucleotide
cacaacagaauagcuucau

SEQ ID NO: 2133598 - RNA, 19 nt, Artificial Sequence
  Description of Artificial Sequence: Synthetic oligonucleotide
cccagacaauccuacucga

SEQ ID NO: 2133599 - RNA, 19 nt, Artificial Sequence
  Description of Artificial Sequence: Synthetic oligonucleotide
aucccacaucucacugaug

SEQ ID NO: 2133600 - RNA, 19 nt, Artificial Sequence
  Description of Artificial Sequence: Synthetic oligonucleotide
cugugcccucuaucaguca

SEQ ID NO: 2133601 - RNA, 19 nt, Artificial Sequence
  Description of Artificial Sequence: Synthetic oligonucleotide
gggauccaccacuggugca

SEQ ID NO: 2133602 - RNA, 19 nt, Artificial Sequence
  Description of Artificial Sequence: Synthetic oligonucleotide
ccagacaauccuacucgaa

SEQ ID NO: 2133603 - RNA, 19 nt, Artificial Sequence
  Description of Artificial Sequence: Synthetic oligonucleotide
ggccugauguaugcauuca

SEQ ID NO: 2133604 - RNA, 19 nt, Artificial Sequence
  Description of Artificial Sequence: Synthetic oligonucleotide
cucgaaauguaaggggcuu

SEQ ID NO: 2133605 - RNA, 19 nt, Artificial Sequence
  Description of Artificial Sequence: Synthetic oligonucleotide
cagaccccugagcgccggc

SEQ ID NO: 2133606 - RNA, 19 nt, Artificial Sequence
  Description of Artificial Sequence: Synthetic oligonucleotide
augcucggaugggucuuga

SEQ ID NO: 2133607 - RNA, 19 nt, Artificial Sequence
  Description of Artificial Sequence: Synthetic oligonucleotide
gugguccuucaagguggcc

SEQ ID NO: 2133608 - RNA, 19 nt, Artificial Sequence
  Description of Artificial Sequence: Synthetic oligonucleotide
cguucaccuaagagggauc

SEQ ID NO: 2133609 - RNA, 19 nt, Artificial Sequence
  Description of Artificial Sequence: Synthetic oligonucleotide
cuuccgagagugaguggau

SEQ ID NO: 2133610 - RNA, 19 nt, Artificial Sequence
  Description of Artificial Sequence: Synthetic oligonucleotide
cugguaggugauggccuga

SEQ ID NO: 2133611 - RNA, 19 nt, Artificial Sequence
  Description of Artificial Sequence: Synthetic oligonucleotide
aucugccaucucgauuaua

SEQ ID NO: 2133612 - RNA, 19 nt, Artificial Sequence
  Description of Artificial Sequence: Synthetic oligonucleotide
gguggucagcuccccaccu

SEQ ID NO: 2133613 - RNA, 19 nt, Artificial Sequence
  Description of Artificial Sequence: Synthetic oligonucleotide
gcucucggugguagacuag

SEQ ID NO: 2133614 - RNA, 19 nt, Artificial Sequence
  Description of Artificial Sequence: Synthetic oligonucleotide
cuggugcaagaagaugggu

SEQ ID NO: 2133615 - RNA, 19 nt, Artificial Sequence
  Description of Artificial Sequence: Synthetic oligonucleotide
cacagcuagcacagauaau

SEQ ID NO: 2133616 - RNA, 19 nt, Artificial Sequence
  Description of Artificial Sequence: Synthetic oligonucleotide
gcgccggcggagcagcuuc

SEQ ID NO: 2133617 - RNA, 19 nt, Artificial Sequence
  Description of Artificial Sequence: Synthetic oligonucleotide
gccugauguaugcauucau

SEQ ID NO: 2133618 - RNA, 19 nt, Artificial Sequence
  Description of Artificial Sequence: Synthetic oligonucleotide
cucugcuaagcaagcucuu

SEQ ID NO: 2133619 - RNA, 19 nt, Artificial Sequence
  Description of Artificial Sequence: Synthetic oligonucleotide
ggugguagacuaggacucu

SEQ ID NO: 2133620 - RNA, 19 nt, Artificial Sequence
  Description of Artificial Sequence: Synthetic oligonucleotide
ccaucucgauuauaccccu

SEQ ID NO: 2133621 - RNA, 19 nt, Artificial Sequence
  Description of Artificial Sequence: Synthetic oligonucleotide
acgcugaaacucggucauu

SEQ ID NO: 2133622 - RNA, 19 nt, Artificial Sequence
  Description of Artificial Sequence: Synthetic oligonucleotide
uccugcgggcuggcacaac

SEQ ID NO: 2133623 - RNA, 19 nt, Artificial Sequence
  Description of Artificial Sequence: Synthetic oligonucleotide
caucucgauuauaccccuu

SEQ ID NO: 2133624 - RNA, 19 nt, Artificial Sequence
  Description of Artificial Sequence: Synthetic oligonucleotide
ccuugguugagccgcuccu

SEQ ID NO: 2133625 - RNA, 19 nt, Artificial Sequence
  Description of Artificial Sequence: Synthetic oligonucleotide
cgagagugaguggauucca

SEQ ID NO: 2133626 - RNA, 19 nt, Artificial Sequence
  Description of Artificial Sequence: Synthetic oligonucleotide
guaccugagccagcucuuu

SEQ ID NO: 2133627 - RNA, 19 nt, Artificial Sequence
  Description of Artificial Sequence: Synthetic oligonucleotide
cucaaucauccggguuuua

SEQ ID NO: 2133628 - RNA, 19 nt, Artificial Sequence
  Description of Artificial Sequence: Synthetic oligonucleotide
ccgcugacuaaacccauau

SEQ ID NO: 2133629 - RNA, 19 nt, Artificial Sequence
  Description of Artificial Sequence: Synthetic oligonucleotide
gccggcggagcagcuucag

SEQ ID NO: 2133630 - RNA, 19 nt, Artificial Sequence
  Description of Artificial Sequence: Synthetic oligonucleotide
cagugcgcucacguacucu

SEQ ID NO: 2133631 - RNA, 19 nt, Artificial Sequence
  Description of Artificial Sequence: Synthetic oligonucleotide
gcccugaaguucauccccu

SEQ ID NO: 2133632 - RNA, 19 nt, Artificial Sequence
  Description of Artificial Sequence: Synthetic oligonucleotide
gggcccagacaauccuacu

SEQ ID NO: 2133633 - RNA, 19 nt, Artificial Sequence
  Description of Artificial Sequence: Synthetic oligonucleotide
cccugagcgccggcggagc

SEQ ID NO: 2133634 - RNA, 19 nt, Artificial Sequence
  Description of Artificial Sequence: Synthetic oligonucleotide
cggguuuuacguucaccua

SEQ ID NO: 2133635 - RNA, 19 nt, Artificial Sequence
  Description of Artificial Sequence: Synthetic oligonucleotide
ccccugagcgccggcggag

SEQ ID NO: 2133636 - RNA, 19 nt, Artificial Sequence
  Description of Artificial Sequence: Synthetic oligonucleotide
cccgcugacuaaacccaua

SEQ ID NO: 2133637 - RNA, 19 nt, Artificial Sequence
  Description of Artificial Sequence: Synthetic oligonucleotide
cggucauuguaucccacau

SEQ ID NO: 2133638 - RNA, 19 nt, Artificial Sequence
  Description of Artificial Sequence: Synthetic oligonucleotide
ccugagcgccggcggagca

SEQ ID NO: 2133639 - RNA, 19 nt, Artificial Sequence
  Description of Artificial Sequence: Synthetic oligonucleotide
cuccccaccuggccagcau

SEQ ID NO: 2133640 - RNA, 19 nt, Artificial Sequence
  Description of Artificial Sequence: Synthetic oligonucleotide
gcgcucacguacucugcuu

SEQ ID NO: 2133641 - RNA, 19 nt, Artificial Sequence
  Description of Artificial Sequence: Synthetic oligonucleotide
gcuccccaccuggccagca

SEQ ID NO: 2133642 - RNA, 19 nt, Artificial Sequence
  Description of Artificial Sequence: Synthetic oligonucleotide
ccacaccuacaguuucaau

SEQ ID NO: 2133643 - RNA, 19 nt, Artificial Sequence
  Description of Artificial Sequence: Synthetic oligonucleotide
cuccugccgguggcagcaa

SEQ ID NO: 2133644 - RNA, 19 nt, Artificial Sequence
  Description of Artificial Sequence: Synthetic oligonucleotide
gcccucuaucagucagcau

SEQ ID NO: 2133645 - RNA, 19 nt, Artificial Sequence
  Description of Artificial Sequence: Synthetic oligonucleotide
gcccgcugacuaaacccau

SEQ ID NO: 2133646 - RNA, 19 nt, Artificial Sequence
  Description of Artificial Sequence: Synthetic oligonucleotide
gucccucuuugugguccuu

SEQ ID NO: 2133647 - RNA, 19 nt, Artificial Sequence
  Description of Artificial Sequence: Synthetic oligonucleotide
ccggcggagcagcuucagu

SEQ ID NO: 2133648 - RNA, 19 nt, Artificial Sequence
  Description of Artificial Sequence: Synthetic oligonucleotide
cgccggcggagcagcuuca

SEQ ID NO: 2133649 - RNA, 19 nt, Artificial Sequence
  Description of Artificial Sequence: Synthetic oligonucleotide
aagaccuuuucacugaagc

SEQ ID NO: 2133650 - RNA, 19 nt, Artificial Sequence
  Description of Artificial Sequence: Synthetic oligonucleotide
aaaagaaaguaucuguauc

SEQ ID NO: 2133651 - RNA, 19 nt, Artificial Sequence
  Description of Artificial Sequence: Synthetic oligonucleotide
uauaaugucgauaugugug

SEQ ID NO: 2133652 - RNA, 19 nt, Artificial Sequence
  Description of Artificial Sequence: Synthetic oligonucleotide
ucugucuugaauaggaacg

SEQ ID NO: 2133653 - RNA, 19 nt, Artificial Sequence
  Description of Artificial Sequence: Synthetic oligonucleotide
ugaagauuaaucaaaacuc

SEQ ID NO: 2133654 - RNA, 19 nt, Artificial Sequence
  Description of Artificial Sequence: Synthetic oligonucleotide
uuuucuaaaggggagaugg

SEQ ID NO: 2133655 - RNA, 19 nt, Artificial Sequence
  Description of Artificial Sequence: Synthetic oligonucleotide
cuuugaauaugauauaugc

SEQ ID NO: 2133656 - RNA, 19 nt, Artificial Sequence
  Description of Artificial Sequence: Synthetic oligonucleotide
uuuucugagcucaaggugg

SEQ ID NO: 2133657 - RNA, 19 nt, Artificial Sequence
  Description of Artificial Sequence: Synthetic oligonucleotide
uuaagcuucaugauagccg

SEQ ID NO: 2133658 - RNA, 19 nt, Artificial Sequence
  Description of Artificial Sequence: Synthetic oligonucleotide
aaaugaaccuugcacagag

SEQ ID NO: 2133659 - RNA, 19 nt, Artificial Sequence
  Description of Artificial Sequence: Synthetic oligonucleotide
auaugauauaugcaacucc

SEQ ID NO: 2133660 - RNA, 19 nt, Artificial Sequence
  Description of Artificial Sequence: Synthetic oligonucleotide
aaauaguggugacaucacc

SEQ ID NO: 2133661 - RNA, 19 nt, Artificial Sequence
  Description of Artificial Sequence: Synthetic oligonucleotide
aauaugauauaugcaacuc

SEQ ID NO: 2133662 - RNA, 19 nt, Artificial Sequence
  Description of Artificial Sequence: Synthetic oligonucleotide
aaucaaaacucuaagauau

SEQ ID NO: 2133663 - RNA, 19 nt, Artificial Sequence
  Description of Artificial Sequence: Synthetic oligonucleotide
cacuguuagagcaagaccc

SEQ ID NO: 2133664 - RNA, 19 nt, Artificial Sequence
  Description of Artificial Sequence: Synthetic oligonucleotide
uaugauauaugcaacuccu

SEQ ID NO: 2133665 - RNA, 19 nt, Artificial Sequence
  Description of Artificial Sequence: Synthetic oligonucleotide
uaagcuucaugauagccgg

SEQ ID NO: 2133666 - RNA, 19 nt, Artificial Sequence
  Description of Artificial Sequence: Synthetic oligonucleotide
aauaggaacgugucggaag

SEQ ID NO: 2133667 - RNA, 19 nt, Artificial Sequence
  Description of Artificial Sequence: Synthetic oligonucleotide
uugaauaggaacgugucgg

SEQ ID NO: 2133668 - RNA, 19 nt, Artificial Sequence
  Description of Artificial Sequence: Synthetic oligonucleotide
auauaugcaacuccuuugg

SEQ ID NO: 2133669 - RNA, 19 nt, Artificial Sequence
  Description of Artificial Sequence: Synthetic oligonucleotide
cagaauagccaucacaugg

SEQ ID NO: 2133670 - RNA, 19 nt, Artificial Sequence
  Description of Artificial Sequence: Synthetic oligonucleotide
acuacaaucguucucucag

SEQ ID NO: 2133671 - RNA, 19 nt, Artificial Sequence
  Description of Artificial Sequence: Synthetic oligonucleotide
ucuuuuaaaaggccaacug

SEQ ID NO: 2133672 - RNA, 19 nt, Artificial Sequence
  Description of Artificial Sequence: Synthetic oligonucleotide
aaguaucuguaucaagcac

SEQ ID NO: 2133673 - RNA, 19 nt, Artificial Sequence
  Description of Artificial Sequence: Synthetic oligonucleotide
uuugaauaugauauaugca

SEQ ID NO: 2133674 - RNA, 19 nt, Artificial Sequence
  Description of Artificial Sequence: Synthetic oligonucleotide
aucuguaucaagcacaagu

SEQ ID NO: 2133675 - RNA, 19 nt, Artificial Sequence
  Description of Artificial Sequence: Synthetic oligonucleotide
gauauaugcaacuccuuug

SEQ ID NO: 2133676 - RNA, 19 nt, Artificial Sequence
  Description of Artificial Sequence: Synthetic oligonucleotide
ucuagcacaauuugagucc

SEQ ID NO: 2133677 - RNA, 19 nt, Artificial Sequence
  Description of Artificial Sequence: Synthetic oligonucleotide
ucuuucacaugucugacac

SEQ ID NO: 2133678 - RNA, 19 nt, Artificial Sequence
  Description of Artificial Sequence: Synthetic oligonucleotide
auuuuguagacaaauagug

SEQ ID NO: 2133679 - RNA, 19 nt, Artificial Sequence
  Description of Artificial Sequence: Synthetic oligonucleotide
cuuuugauaucaaagccug

SEQ ID NO: 2133680 - RNA, 19 nt, Artificial Sequence
  Description of Artificial Sequence: Synthetic oligonucleotide
aacucuaagauaucuguaa

SEQ ID NO: 2133681 - RNA, 19 nt, Artificial Sequence
  Description of Artificial Sequence: Synthetic oligonucleotide
aguggugacaucaccaucc

SEQ ID NO: 2133682 - RNA, 19 nt, Artificial Sequence
  Description of Artificial Sequence: Synthetic oligonucleotide
uuagcuggucuuuuaaaag

SEQ ID NO: 2133683 - RNA, 19 nt, Artificial Sequence
  Description of Artificial Sequence: Synthetic oligonucleotide
gaccuuuucacugaagccg

SEQ ID NO: 2133684 - RNA, 19 nt, Artificial Sequence
  Description of Artificial Sequence: Synthetic oligonucleotide
uccagaauagccaucacau

SEQ ID NO: 2133685 - RNA, 19 nt, Artificial Sequence
  Description of Artificial Sequence: Synthetic oligonucleotide
uguaucaagcacaaguguc

SEQ ID NO: 2133686 - RNA, 19 nt, Artificial Sequence
  Description of Artificial Sequence: Synthetic oligonucleotide
caaucguucucucagaaac

SEQ ID NO: 2133687 - RNA, 19 nt, Artificial Sequence
  Description of Artificial Sequence: Synthetic oligonucleotide
uucucuguaggacacuucc

SEQ ID NO: 2133688 - RNA, 19 nt, Artificial Sequence
  Description of Artificial Sequence: Synthetic oligonucleotide
uaugcaacuccuuugguuc

SEQ ID NO: 2133689 - RNA, 19 nt, Artificial Sequence
  Description of Artificial Sequence: Synthetic oligonucleotide
agugagcugaaguuuaaag

SEQ ID NO: 2133690 - RNA, 19 nt, Artificial Sequence
  Description of Artificial Sequence: Synthetic oligonucleotide
ugauagccggaaaugaacc

SEQ ID NO: 2133691 - RNA, 19 nt, Artificial Sequence
  Description of Artificial Sequence: Synthetic oligonucleotide
uauaucaccucuuccacgu

SEQ ID NO: 2133692 - RNA, 19 nt, Artificial Sequence
  Description of Artificial Sequence: Synthetic oligonucleotide
agacagauccagaauagcc

SEQ ID NO: 2133693 - RNA, 19 nt, Artificial Sequence
  Description of Artificial Sequence: Synthetic oligonucleotide
ugauggauauaucaccucu

SEQ ID NO: 2133694 - RNA, 19 nt, Artificial Sequence
  Description of Artificial Sequence: Synthetic oligonucleotide
ugcuuaauauuucuuuucu

SEQ ID NO: 2133695 - RNA, 19 nt, Artificial Sequence
  Description of Artificial Sequence: Synthetic oligonucleotide
uguaacauaguuguucaca

SEQ ID NO: 2133696 - RNA, 19 nt, Artificial Sequence
  Description of Artificial Sequence: Synthetic oligonucleotide
acaaauaguggugacauca

SEQ ID NO: 2133697 - RNA, 19 nt, Artificial Sequence
  Description of Artificial Sequence: Synthetic oligonucleotide
ugagcugaaguuuaaaguu

SEQ ID NO: 2133698 - RNA, 19 nt, Artificial Sequence
  Description of Artificial Sequence: Synthetic oligonucleotide
uucuugauggauauaucac

SEQ ID NO: 2133699 - RNA, 19 nt, Artificial Sequence
  Description of Artificial Sequence: Synthetic oligonucleotide
aucaaagccuguuuaagcu

SEQ ID NO: 2133700 - RNA, 19 nt, Artificial Sequence
  Description of Artificial Sequence: Synthetic oligonucleotide
ugucuauucugauuucucc

SEQ ID NO: 2133701 - RNA, 19 nt, Artificial Sequence
  Description of Artificial Sequence: Synthetic oligonucleotide
ucuaagauaucuguaacau

SEQ ID NO: 2133702 - RNA, 19 nt, Artificial Sequence
  Description of Artificial Sequence: Synthetic oligonucleotide
uccuauaaugucgauaugu

SEQ ID NO: 2133703 - RNA, 19 nt, Artificial Sequence
  Description of Artificial Sequence: Synthetic oligonucleotide
guugucacuucucuguagg

SEQ ID NO: 2133704 - RNA, 19 nt, Artificial Sequence
  Description of Artificial Sequence: Synthetic oligonucleotide
aauaguggugacaucacca

SEQ ID NO: 2133705 - RNA, 19 nt, Artificial Sequence
  Description of Artificial Sequence: Synthetic oligonucleotide
ugaccuuuugccuugcaca

SEQ ID NO: 2133706 - RNA, 19 nt, Artificial Sequence
  Description of Artificial Sequence: Synthetic oligonucleotide
uuguagacaaauaguggug

SEQ ID NO: 2133707 - RNA, 19 nt, Artificial Sequence
  Description of Artificial Sequence: Synthetic oligonucleotide
gauauaucaccucuuccac

SEQ ID NO: 2133708 - RNA, 19 nt, Artificial Sequence
  Description of Artificial Sequence: Synthetic oligonucleotide
cuguaggacacuuccaggg

SEQ ID NO: 2133709 - RNA, 19 nt, Artificial Sequence
  Description of Artificial Sequence: Synthetic oligonucleotide
uuuaagcuucaugauagcc

SEQ ID NO: 2133710 - RNA, 19 nt, Artificial Sequence
  Description of Artificial Sequence: Synthetic oligonucleotide
agaguugucacuucucugu

SEQ ID NO: 2133711 - RNA, 19 nt, Artificial Sequence
  Description of Artificial Sequence: Synthetic oligonucleotide
auauaucaccucuuccacg

SEQ ID NO: 2133712 - RNA, 19 nt, Artificial Sequence
  Description of Artificial Sequence: Synthetic oligonucleotide
ucaaaacucuaagauaucu

SEQ ID NO: 2133713 - RNA, 19 nt, Artificial Sequence
  Description of Artificial Sequence: Synthetic oligonucleotide
ucuuuucugagcucaaggu

SEQ ID NO: 2133714 - RNA, 19 nt, Artificial Sequence
  Description of Artificial Sequence: Synthetic oligonucleotide
aaugucgauauguguguug

SEQ ID NO: 2133715 - RNA, 19 nt, Artificial Sequence
  Description of Artificial Sequence: Synthetic oligonucleotide
auggauauaucaccucuuc

SEQ ID NO: 2133716 - RNA, 19 nt, Artificial Sequence
  Description of Artificial Sequence: Synthetic oligonucleotide
ucucucagaaacugugggg

SEQ ID NO: 2133717 - RNA, 19 nt, Artificial Sequence
  Description of Artificial Sequence: Synthetic oligonucleotide
cuugaauaggaacgugucg

SEQ ID NO: 2133718 - RNA, 19 nt, Artificial Sequence
  Description of Artificial Sequence: Synthetic oligonucleotide
gcauuuuguagacaaauag

SEQ ID NO: 2133719 - RNA, 19 nt, Artificial Sequence
  Description of Artificial Sequence: Synthetic oligonucleotide
uguugugaagauuaaucaa

SEQ ID NO: 2133720 - RNA, 19 nt, Artificial Sequence
  Description of Artificial Sequence: Synthetic oligonucleotide
auaaugucgauaugugugu

SEQ ID NO: 2133721 - RNA, 19 nt, Artificial Sequence
  Description of Artificial Sequence: Synthetic oligonucleotide
uaugguauuuguucagugu

SEQ ID NO: 2133722 - RNA, 19 nt, Artificial Sequence
  Description of Artificial Sequence: Synthetic oligonucleotide
uuuaaaaggccaacuggaa

SEQ ID NO: 2133723 - RNA, 19 nt, Artificial Sequence
  Description of Artificial Sequence: Synthetic oligonucleotide
ggaagaagguccuauaaug

SEQ ID NO: 2133724 - RNA, 19 nt, Artificial Sequence
  Description of Artificial Sequence: Synthetic oligonucleotide
ugauauaugcaacuccuuu

SEQ ID NO: 2133725 - RNA, 19 nt, Artificial Sequence
  Description of Artificial Sequence: Synthetic oligonucleotide
ucuugaauaggaacguguc

SEQ ID NO: 2133726 - RNA, 19 nt, Artificial Sequence
  Description of Artificial Sequence: Synthetic oligonucleotide
gauuucuccugucacuggc

SEQ ID NO: 2133727 - RNA, 19 nt, Artificial Sequence
  Description of Artificial Sequence: Synthetic oligonucleotide
uguagacaaauagugguga

SEQ ID NO: 2133728 - RNA, 19 nt, Artificial Sequence
  Description of Artificial Sequence: Synthetic oligonucleotide
ugguugaagaccuuuucac

SEQ ID NO: 2133729 - RNA, 19 nt, Artificial Sequence
  Description of Artificial Sequence: Synthetic oligonucleotide
acuggcauacuuccugugg

SEQ ID NO: 2133730 - RNA, 19 nt, Artificial Sequence
  Description of Artificial Sequence: Synthetic oligonucleotide
agagacuacaaucguucuc

SEQ ID NO: 2133731 - RNA, 19 nt, Artificial Sequence
  Description of Artificial Sequence: Synthetic oligonucleotide
aguaacgccucauuagcug

SEQ ID NO: 2133732 - RNA, 19 nt, Artificial Sequence
  Description of Artificial Sequence: Synthetic oligonucleotide
gaggccagaggauauuucc

SEQ ID NO: 2133733 - RNA, 19 nt, Artificial Sequence
  Description of Artificial Sequence: Synthetic oligonucleotide
aacuguggggucucugauc

SEQ ID NO: 2133734 - RNA, 19 nt, Artificial Sequence
  Description of Artificial Sequence: Synthetic oligonucleotide
cugugguuuucuaaagggg

SEQ ID NO: 2133735 - RNA, 19 nt, Artificial Sequence
  Description of Artificial Sequence: Synthetic oligonucleotide
cuugcacagagauuuuccc

SEQ ID NO: 2133736 - RNA, 19 nt, Artificial Sequence
  Description of Artificial Sequence: Synthetic oligonucleotide
uaguuguucacaugccugc

SEQ ID NO: 2133737 - RNA, 19 nt, Artificial Sequence
  Description of Artificial Sequence: Synthetic oligonucleotide
guaacgccucauuagcugg

SEQ ID NO: 2133738 - RNA, 19 nt, Artificial Sequence
  Description of Artificial Sequence: Synthetic oligonucleotide
ugugaagauuaaucaaaac

SEQ ID NO: 2133739 - RNA, 19 nt, Artificial Sequence
  Description of Artificial Sequence: Synthetic oligonucleotide
agcaagacccguugugggc

SEQ ID NO: 2133740 - RNA, 19 nt, Artificial Sequence
  Description of Artificial Sequence: Synthetic oligonucleotide
gauauguguguugugaaga

SEQ ID NO: 2133741 - RNA, 19 nt, Artificial Sequence
  Description of Artificial Sequence: Synthetic oligonucleotide
gggucucugaucuucaacg

SEQ ID NO: 2133742 - RNA, 19 nt, Artificial Sequence
  Description of Artificial Sequence: Synthetic oligonucleotide
uucaugauagccggaaaug

SEQ ID NO: 2133743 - RNA, 19 nt, Artificial Sequence
  Description of Artificial Sequence: Synthetic oligonucleotide
cuuuucugagcucaaggug

SEQ ID NO: 2133744 - RNA, 19 nt, Artificial Sequence
  Description of Artificial Sequence: Synthetic oligonucleotide
uuuaugagcucugucuuga

SEQ ID NO: 2133745 - RNA, 19 nt, Artificial Sequence
  Description of Artificial Sequence: Synthetic oligonucleotide
caguucauaaaagucacac

SEQ ID NO: 2133746 - RNA, 19 nt, Artificial Sequence
  Description of Artificial Sequence: Synthetic oligonucleotide
aacgugucggaagaagguc

SEQ ID NO: 2133747 - RNA, 19 nt, Artificial Sequence
  Description of Artificial Sequence: Synthetic oligonucleotide
augauagccggaaaugaac

SEQ ID NO: 2133748 - RNA, 19 nt, Artificial Sequence
  Description of Artificial Sequence: Synthetic oligonucleotide
uugccuugcacacuuuaug

SEQ ID NO: 2133749 - RNA, 19 nt, Artificial Sequence
  Description of Artificial Sequence: Synthetic oligonucleotide
cacaauuugaguccgaaaa

SEQ ID NO: 2133750 - RNA, 19 nt, Artificial Sequence
  Description of Artificial Sequence: Synthetic oligonucleotide
ucaccauccacccucuccu

SEQ ID NO: 2133751 - RNA, 19 nt, Artificial Sequence
  Description of Artificial Sequence: Synthetic oligonucleotide
ggaaguaacgccucauuag

SEQ ID NO: 2133752 - RNA, 19 nt, Artificial Sequence
  Description of Artificial Sequence: Synthetic oligonucleotide
guguugugaagauuaauca

SEQ ID NO: 2133753 - RNA, 19 nt, Artificial Sequence
  Description of Artificial Sequence: Synthetic oligonucleotide
aguaucuguaucaagcaca

SEQ ID NO: 2133754 - RNA, 19 nt, Artificial Sequence
  Description of Artificial Sequence: Synthetic oligonucleotide
auaggaacgugucggaaga

SEQ ID NO: 2133755 - RNA, 19 nt, Artificial Sequence
  Description of Artificial Sequence: Synthetic oligonucleotide
auaucaaagccuguuuaag

SEQ ID NO: 2133756 - RNA, 19 nt, Artificial Sequence
  Description of Artificial Sequence: Synthetic oligonucleotide
ucacaugccugcuuaauau

SEQ ID NO: 2133757 - RNA, 19 nt, Artificial Sequence
  Description of Artificial Sequence: Synthetic oligonucleotide
cugagcucaagguggagcc

SEQ ID NO: 2133758 - RNA, 19 nt, Artificial Sequence
  Description of Artificial Sequence: Synthetic oligonucleotide
guaucaagcacaagugucc

SEQ ID NO: 2133759 - RNA, 19 nt, Artificial Sequence
  Description of Artificial Sequence: Synthetic oligonucleotide
uagagcaagacccguugug

SEQ ID NO: 2133760 - RNA, 19 nt, Artificial Sequence
  Description of Artificial Sequence: Synthetic oligonucleotide
guuagagcaagacccguug

SEQ ID NO: 2133761 - RNA, 19 nt, Artificial Sequence
  Description of Artificial Sequence: Synthetic oligonucleotide
ugccuugcacacuuuauga

SEQ ID NO: 2133762 - RNA, 19 nt, Artificial Sequence
  Description of Artificial Sequence: Synthetic oligonucleotide
uccauuaccaggcuuucua

SEQ ID NO: 2133763 - RNA, 19 nt, Artificial Sequence
  Description of Artificial Sequence: Synthetic oligonucleotide
ucaugauagccggaaauga

SEQ ID NO: 2133764 - RNA, 19 nt, Artificial Sequence
  Description of Artificial Sequence: Synthetic oligonucleotide
guugugggcauuuuguaga

SEQ ID NO: 2133765 - RNA, 19 nt, Artificial Sequence
  Description of Artificial Sequence: Synthetic oligonucleotide
uggaaguaacgccucauua

SEQ ID NO: 2133766 - RNA, 19 nt, Artificial Sequence
  Description of Artificial Sequence: Synthetic oligonucleotide
uuucuaaaggggagauggc

SEQ ID NO: 2133767 - RNA, 19 nt, Artificial Sequence
  Description of Artificial Sequence: Synthetic oligonucleotide
cucugucuugaauaggaac

SEQ ID NO: 2133768 - RNA, 19 nt, Artificial Sequence
  Description of Artificial Sequence: Synthetic oligonucleotide
gagcaagacccguuguggg

SEQ ID NO: 2133769 - RNA, 19 nt, Artificial Sequence
  Description of Artificial Sequence: Synthetic oligonucleotide
agacaaauaguggugacau

SEQ ID NO: 2133770 - RNA, 19 nt, Artificial Sequence
  Description of Artificial Sequence: Synthetic oligonucleotide
agguaaaagaaaguaucug

SEQ ID NO: 2133771 - RNA, 19 nt, Artificial Sequence
  Description of Artificial Sequence: Synthetic oligonucleotide
cauaaaagucacacuugug

SEQ ID NO: 2133772 - RNA, 19 nt, Artificial Sequence
  Description of Artificial Sequence: Synthetic oligonucleotide
ugguucuugauggauauau

SEQ ID NO: 2133773 - RNA, 19 nt, Artificial Sequence
  Description of Artificial Sequence: Synthetic oligonucleotide
ugaauaggaacgugucgga

SEQ ID NO: 2133774 - RNA, 19 nt, Artificial Sequence
  Description of Artificial Sequence: Synthetic oligonucleotide
gugacaucaccauccaccc

SEQ ID NO: 2133775 - RNA, 19 nt, Artificial Sequence
  Description of Artificial Sequence: Synthetic oligonucleotide
aauagccaucacaugguug

SEQ ID NO: 2133776 - RNA, 19 nt, Artificial Sequence
  Description of Artificial Sequence: Synthetic oligonucleotide
aaaggccaacuggaagacc

SEQ ID NO: 2133777 - RNA, 19 nt, Artificial Sequence
  Description of Artificial Sequence: Synthetic oligonucleotide
ucuucaacgcugaugccau

SEQ ID NO: 2133778 - RNA, 19 nt, Artificial Sequence
  Description of Artificial Sequence: Synthetic oligonucleotide
gacacuguuagagcaagac

SEQ ID NO: 2133779 - RNA, 19 nt, Artificial Sequence
  Description of Artificial Sequence: Synthetic oligonucleotide
acacuuuaugagcucuguc

SEQ ID NO: 2133780 - RNA, 19 nt, Artificial Sequence
  Description of Artificial Sequence: Synthetic oligonucleotide
agcacaagugucccuucac

SEQ ID NO: 2133781 - RNA, 19 nt, Artificial Sequence
  Description of Artificial Sequence: Synthetic oligonucleotide
uucuaaaggggagauggcu

SEQ ID NO: 2133782 - RNA, 19 nt, Artificial Sequence
  Description of Artificial Sequence: Synthetic oligonucleotide
agauuaaucaaaacucuaa

SEQ ID NO: 2133783 - RNA, 19 nt, Artificial Sequence
  Description of Artificial Sequence: Synthetic oligonucleotide
uauucugugcaacuuucuu

SEQ ID NO: 2133784 - RNA, 19 nt, Artificial Sequence
  Description of Artificial Sequence: Synthetic oligonucleotide
uguaggacacuuccagggu

SEQ ID NO: 2133785 - RNA, 19 nt, Artificial Sequence
  Description of Artificial Sequence: Synthetic oligonucleotide
ucggaagaagguccuauaa

SEQ ID NO: 2133786 - RNA, 19 nt, Artificial Sequence
  Description of Artificial Sequence: Synthetic oligonucleotide
uagccggaaaugaaccuug

SEQ ID NO: 2133787 - RNA, 19 nt, Artificial Sequence
  Description of Artificial Sequence: Synthetic oligonucleotide
auaugcaacuccuuugguu

SEQ ID NO: 2133788 - RNA, 19 nt, Artificial Sequence
  Description of Artificial Sequence: Synthetic oligonucleotide
ucuaacaccagugucucuu

SEQ ID NO: 2133789 - RNA, 19 nt, Artificial Sequence
  Description of Artificial Sequence: Synthetic oligonucleotide
uagaguugucacuucucug

SEQ ID NO: 2133790 - RNA, 19 nt, Artificial Sequence
  Description of Artificial Sequence: Synthetic oligonucleotide
uuccuuugucugaugauau

SEQ ID NO: 2133791 - RNA, 19 nt, Artificial Sequence
  Description of Artificial Sequence: Synthetic oligonucleotide
gaccuuuugccuugcacac

SEQ ID NO: 2133792 - RNA, 19 nt, Artificial Sequence
  Description of Artificial Sequence: Synthetic oligonucleotide
aagauuaaucaaaacucua

SEQ ID NO: 2133793 - RNA, 19 nt, Artificial Sequence
  Description of Artificial Sequence: Synthetic oligonucleotide
uauaugcaacuccuuuggu

SEQ ID NO: 2133794 - RNA, 19 nt, Artificial Sequence
  Description of Artificial Sequence: Synthetic oligonucleotide
acgugucggaagaaggucc

SEQ ID NO: 2133795 - RNA, 19 nt, Artificial Sequence
  Description of Artificial Sequence: Synthetic oligonucleotide
uagacaaauaguggugaca

SEQ ID NO: 2133796 - RNA, 19 nt, Artificial Sequence
  Description of Artificial Sequence: Synthetic oligonucleotide
gguaaaagaaaguaucugu

SEQ ID NO: 2133797 - RNA, 19 nt, Artificial Sequence
  Description of Artificial Sequence: Synthetic oligonucleotide
uucacaugccugcuuaaua

SEQ ID NO: 2133798 - RNA, 19 nt, Artificial Sequence
  Description of Artificial Sequence: Synthetic oligonucleotide
caaauaguggugacaucac

SEQ ID NO: 2133799 - RNA, 19 nt, Artificial Sequence
  Description of Artificial Sequence: Synthetic oligonucleotide
uuguucacaugccugcuua

SEQ ID NO: 2133800 - RNA, 19 nt, Artificial Sequence
  Description of Artificial Sequence: Synthetic oligonucleotide
gagcugaaguuuaaaguug

SEQ ID NO: 2133801 - RNA, 19 nt, Artificial Sequence
  Description of Artificial Sequence: Synthetic oligonucleotide
cuagcacaauuugaguccg

SEQ ID NO: 2133802 - RNA, 19 nt, Artificial Sequence
  Description of Artificial Sequence: Synthetic oligonucleotide
uuaccaggcuuucuagcac

SEQ ID NO: 2133803 - RNA, 19 nt, Artificial Sequence
  Description of Artificial Sequence: Synthetic oligonucleotide
cucuaagauaucuguaaca

SEQ ID NO: 2133804 - RNA, 19 nt, Artificial Sequence
  Description of Artificial Sequence: Synthetic oligonucleotide
uuucugagcucaaggugga

SEQ ID NO: 2133805 - RNA, 19 nt, Artificial Sequence
  Description of Artificial Sequence: Synthetic oligonucleotide
uuugccuugcacacuuuau

SEQ ID NO: 2133806 - RNA, 19 nt, Artificial Sequence
  Description of Artificial Sequence: Synthetic oligonucleotide
auaguggugacaucaccau

SEQ ID NO: 2133807 - RNA, 19 nt, Artificial Sequence
  Description of Artificial Sequence: Synthetic oligonucleotide
ucgauauguguguugugaa

SEQ ID NO: 2133808 - RNA, 19 nt, Artificial Sequence
  Description of Artificial Sequence: Synthetic oligonucleotide
aaacuguggggucucugau

SEQ ID NO: 2133809 - RNA, 19 nt, Artificial Sequence
  Description of Artificial Sequence: Synthetic oligonucleotide
guaaaagaaaguaucugua

SEQ ID NO: 2133810 - RNA, 19 nt, Artificial Sequence
  Description of Artificial Sequence: Synthetic oligonucleotide
auauguguguugugaagau

SEQ ID NO: 2133811 - RNA, 19 nt, Artificial Sequence
  Description of Artificial Sequence: Synthetic oligonucleotide
ucaagguggagccccugga

SEQ ID NO: 2133812 - RNA, 19 nt, Artificial Sequence
  Description of Artificial Sequence: Synthetic oligonucleotide
gucugacacuguuagagca

SEQ ID NO: 2133813 - RNA, 19 nt, Artificial Sequence
  Description of Artificial Sequence: Synthetic oligonucleotide
uuuugccuugcacacuuua

SEQ ID NO: 2133814 - RNA, 19 nt, Artificial Sequence
  Description of Artificial Sequence: Synthetic oligonucleotide
gauggcuuuugauaucaaa

SEQ ID NO: 2133815 - RNA, 19 nt, Artificial Sequence
  Description of Artificial Sequence: Synthetic oligonucleotide
aagcacaagugucccuuca

SEQ ID NO: 2133816 - RNA, 19 nt, Artificial Sequence
  Description of Artificial Sequence: Synthetic oligonucleotide
aucguucucucagaaacug

SEQ ID NO: 2133817 - RNA, 19 nt, Artificial Sequence
  Description of Artificial Sequence: Synthetic oligonucleotide
guuuaagcuucaugauagc

SEQ ID NO: 2133818 - RNA, 19 nt, Artificial Sequence
  Description of Artificial Sequence: Synthetic oligonucleotide
auccacccucuccugacac

SEQ ID NO: 2133819 - RNA, 19 nt, Artificial Sequence
  Description of Artificial Sequence: Synthetic oligonucleotide
cuccugacacaggauaugg

SEQ ID NO: 2133820 - RNA, 19 nt, Artificial Sequence
  Description of Artificial Sequence: Synthetic oligonucleotide
uaccaggcuuucuagcaca

SEQ ID NO: 2133821 - RNA, 19 nt, Artificial Sequence
  Description of Artificial Sequence: Synthetic oligonucleotide
guagacaaauaguggugac

SEQ ID NO: 2133822 - RNA, 19 nt, Artificial Sequence
  Description of Artificial Sequence: Synthetic oligonucleotide
ccuauaaugucgauaugug

SEQ ID NO: 2133823 - RNA, 19 nt, Artificial Sequence
  Description of Artificial Sequence: Synthetic oligonucleotide
caugguugaagaccuuuuc

SEQ ID NO: 2133824 - RNA, 19 nt, Artificial Sequence
  Description of Artificial Sequence: Synthetic oligonucleotide
acuuccaggguucugucua

SEQ ID NO: 2133825 - RNA, 19 nt, Artificial Sequence
  Description of Artificial Sequence: Synthetic oligonucleotide
aaucguucucucagaaacu

SEQ ID NO: 2133826 - RNA, 19 nt, Artificial Sequence
  Description of Artificial Sequence: Synthetic oligonucleotide
uugauggauauaucaccuc

SEQ ID NO: 2133827 - RNA, 19 nt, Artificial Sequence
  Description of Artificial Sequence: Synthetic oligonucleotide
augucgauauguguguugu

SEQ ID NO: 2133828 - RNA, 19 nt, Artificial Sequence
  Description of Artificial Sequence: Synthetic oligonucleotide
agaauagccaucacauggu

SEQ ID NO: 2133829 - RNA, 19 nt, Artificial Sequence
  Description of Artificial Sequence: Synthetic oligonucleotide
augccugcuuaauauuucu

SEQ ID NO: 2133830 - RNA, 19 nt, Artificial Sequence
  Description of Artificial Sequence: Synthetic oligonucleotide
acuggaagaccagagacua

SEQ ID NO: 2133831 - RNA, 19 nt, Artificial Sequence
  Description of Artificial Sequence: Synthetic oligonucleotide
ugcacacuuuaugagcucu

SEQ ID NO: 2133832 - RNA, 19 nt, Artificial Sequence
  Description of Artificial Sequence: Synthetic oligonucleotide
ugguuuucuaaaggggaga

SEQ ID NO: 2133833 - RNA, 19 nt, Artificial Sequence
  Description of Artificial Sequence: Synthetic oligonucleotide
aaacucuaagauaucugua

SEQ ID NO: 2133834 - RNA, 19 nt, Artificial Sequence
  Description of Artificial Sequence: Synthetic oligonucleotide
cacuuuaugagcucugucu

SEQ ID NO: 2133835 - RNA, 19 nt, Artificial Sequence
  Description of Artificial Sequence: Synthetic oligonucleotide
ccuugcacacuuuaugagc

SEQ ID NO: 2133836 - RNA, 19 nt, Artificial Sequence
  Description of Artificial Sequence: Synthetic oligonucleotide
aaaggggagauggcuuuug

SEQ ID NO: 2133837 - RNA, 19 nt, Artificial Sequence
  Description of Artificial Sequence: Synthetic oligonucleotide
gaagguccuauaaugucga

SEQ ID NO: 2133838 - RNA, 19 nt, Artificial Sequence
  Description of Artificial Sequence: Synthetic oligonucleotide
agccuguuuaagcuucaug

SEQ ID NO: 2133839 - RNA, 19 nt, Artificial Sequence
  Description of Artificial Sequence: Synthetic oligonucleotide
acugaagccggagacugug

SEQ ID NO: 2133840 - RNA, 19 nt, Artificial Sequence
  Description of Artificial Sequence: Synthetic oligonucleotide
guucugucuauucugauuu

SEQ ID NO: 2133841 - RNA, 19 nt, Artificial Sequence
  Description of Artificial Sequence: Synthetic oligonucleotide
ucucuuucacaugucugac

SEQ ID NO: 2133842 - RNA, 19 nt, Artificial Sequence
  Description of Artificial Sequence: Synthetic oligonucleotide
ugucuugaauaggaacgug

SEQ ID NO: 2133843 - RNA, 19 nt, Artificial Sequence
  Description of Artificial Sequence: Synthetic oligonucleotide
ccagagacuacaaucguuc

SEQ ID NO: 2133844 - RNA, 19 nt, Artificial Sequence
  Description of Artificial Sequence: Synthetic oligonucleotide
ccggaaaugaaccuugcac

SEQ ID NO: 2133845 - RNA, 19 nt, Artificial Sequence
  Description of Artificial Sequence: Synthetic oligonucleotide
gguccuauaaugucgauau

SEQ ID NO: 2133846 - RNA, 19 nt, Artificial Sequence
  Description of Artificial Sequence: Synthetic oligonucleotide
uguggggucucugaucuuc

SEQ ID NO: 2133847 - RNA, 19 nt, Artificial Sequence
  Description of Artificial Sequence: Synthetic oligonucleotide
caaugaucucuuucacaug

SEQ ID NO: 2133848 - RNA, 19 nt, Artificial Sequence
  Description of Artificial Sequence: Synthetic oligonucleotide
auauuucuuuucucucuau

SEQ ID NO: 2133849 - RNA, 19 nt, Artificial Sequence
  Description of Artificial Sequence: Synthetic oligonucleotide
aacgccucauuagcugguc

SEQ ID NO: 2133850 - RNA, 19 nt, Artificial Sequence
  Description of Artificial Sequence: Synthetic oligonucleotide
ucguucucucagaaacugu

SEQ ID NO: 2133851 - RNA, 19 nt, Artificial Sequence
  Description of Artificial Sequence: Synthetic oligonucleotide
cuuuucacugaagccggag

SEQ ID NO: 2133852 - RNA, 19 nt, Artificial Sequence
  Description of Artificial Sequence: Synthetic oligonucleotide
aggaacgugucggaagaag

SEQ ID NO: 2133853 - RNA, 19 nt, Artificial Sequence
  Description of Artificial Sequence: Synthetic oligonucleotide
ggcuuucuagcacaauuug

SEQ ID NO: 2133854 - RNA, 19 nt, Artificial Sequence
  Description of Artificial Sequence: Synthetic oligonucleotide
caugauagccggaaaugaa

SEQ ID NO: 2133855 - RNA, 19 nt, Artificial Sequence
  Description of Artificial Sequence: Synthetic oligonucleotide
uucacugaagccggagacu

SEQ ID NO: 2133856 - RNA, 19 nt, Artificial Sequence
  Description of Artificial Sequence: Synthetic oligonucleotide
acaaucguucucucagaaa

SEQ ID NO: 2133857 - RNA, 19 nt, Artificial Sequence
  Description of Artificial Sequence: Synthetic oligonucleotide
ugaggccagaggauauuuc

SEQ ID NO: 2133858 - RNA, 19 nt, Artificial Sequence
  Description of Artificial Sequence: Synthetic oligonucleotide
uuuggaaguaacgccucau

SEQ ID NO: 2133859 - RNA, 19 nt, Artificial Sequence
  Description of Artificial Sequence: Synthetic oligonucleotide
agauccauuaccaggcuuu

SEQ ID NO: 2133860 - RNA, 19 nt, Artificial Sequence
  Description of Artificial Sequence: Synthetic oligonucleotide
cuguuuaagcuucaugaua

SEQ ID NO: 2133861 - RNA, 19 nt, Artificial Sequence
  Description of Artificial Sequence: Synthetic oligonucleotide
ugucgauauguguguugug

SEQ ID NO: 2133862 - RNA, 19 nt, Artificial Sequence
  Description of Artificial Sequence: Synthetic oligonucleotide
cuauaaugucgauaugugu

SEQ ID NO: 2133863 - RNA, 19 nt, Artificial Sequence
  Description of Artificial Sequence: Synthetic oligonucleotide
uaacgccucauuagcuggu

SEQ ID NO: 2133864 - RNA, 19 nt, Artificial Sequence
  Description of Artificial Sequence: Synthetic oligonucleotide
guagaguugucacuucucu

SEQ ID NO: 2133865 - RNA, 19 nt, Artificial Sequence
  Description of Artificial Sequence: Synthetic oligonucleotide
cagugucucuuuucugagc

SEQ ID NO: 2133866 - RNA, 19 nt, Artificial Sequence
  Description of Artificial Sequence: Synthetic oligonucleotide
uguucagugucaguucaua

SEQ ID NO: 2133867 - RNA, 19 nt, Artificial Sequence
  Description of Artificial Sequence: Synthetic oligonucleotide
gacaaauaguggugacauc

SEQ ID NO: 2133868 - RNA, 19 nt, Artificial Sequence
  Description of Artificial Sequence: Synthetic oligonucleotide
gucuauucugauuucuccu

SEQ ID NO: 2133869 - RNA, 19 nt, Artificial Sequence
  Description of Artificial Sequence: Synthetic oligonucleotide
cagacagauccagaauagc

SEQ ID NO: 2133870 - RNA, 19 nt, Artificial Sequence
  Description of Artificial Sequence: Synthetic oligonucleotide
ugucacuggcauacuuccu

SEQ ID NO: 2133871 - RNA, 19 nt, Artificial Sequence
  Description of Artificial Sequence: Synthetic oligonucleotide
cuuugguucuugauggaua

SEQ ID NO: 2133872 - RNA, 19 nt, Artificial Sequence
  Description of Artificial Sequence: Synthetic oligonucleotide
uccaggguucugucuauuc

SEQ ID NO: 2133873 - RNA, 19 nt, Artificial Sequence
  Description of Artificial Sequence: Synthetic oligonucleotide
gauauuuccuuugucugau

SEQ ID NO: 2133874 - RNA, 19 nt, Artificial Sequence
  Description of Artificial Sequence: Synthetic oligonucleotide
gauagccggaaaugaaccu

SEQ ID NO: 2133875 - RNA, 19 nt, Artificial Sequence
  Description of Artificial Sequence: Synthetic oligonucleotide
cuguaacauaguuguucac

SEQ ID NO: 2133876 - RNA, 19 nt, Artificial Sequence
  Description of Artificial Sequence: Synthetic oligonucleotide
gauaugguauuuguucagu

SEQ ID NO: 2133877 - RNA, 19 nt, Artificial Sequence
  Description of Artificial Sequence: Synthetic oligonucleotide
ggucucugaucuucaacgc

SEQ ID NO: 2133878 - RNA, 19 nt, Artificial Sequence
  Description of Artificial Sequence: Synthetic oligonucleotide
augauauucugugcaacuu

SEQ ID NO: 2133879 - RNA, 19 nt, Artificial Sequence
  Description of Artificial Sequence: Synthetic oligonucleotide
cuaagauaucuguaacaua

SEQ ID NO: 2133880 - RNA, 19 nt, Artificial Sequence
  Description of Artificial Sequence: Synthetic oligonucleotide
uguucacaugccugcuuaa

SEQ ID NO: 2133881 - RNA, 19 nt, Artificial Sequence
  Description of Artificial Sequence: Synthetic oligonucleotide
ugucggaagaagguccuau

SEQ ID NO: 2133882 - RNA, 19 nt, Artificial Sequence
  Description of Artificial Sequence: Synthetic oligonucleotide
guuuucuaaaggggagaug

SEQ ID NO: 2133883 - RNA, 19 nt, Artificial Sequence
  Description of Artificial Sequence: Synthetic oligonucleotide
uccuuugguucuugaugga

SEQ ID NO: 2133884 - RNA, 19 nt, Artificial Sequence
  Description of Artificial Sequence: Synthetic oligonucleotide
cauacuuccugugguuuuc

SEQ ID NO: 2133885 - RNA, 19 nt, Artificial Sequence
  Description of Artificial Sequence: Synthetic oligonucleotide
ggagacugugagccgaggc

SEQ ID NO: 2133886 - RNA, 19 nt, Artificial Sequence
  Description of Artificial Sequence: Synthetic oligonucleotide
aaugaaccuugcacagaga

SEQ ID NO: 2133887 - RNA, 19 nt, Artificial Sequence
  Description of Artificial Sequence: Synthetic oligonucleotide
cugaugauauucugugcaa

SEQ ID NO: 2133888 - RNA, 19 nt, Artificial Sequence
  Description of Artificial Sequence: Synthetic oligonucleotide
ugggcauuuuguagacaaa

SEQ ID NO: 2133889 - RNA, 19 nt, Artificial Sequence
  Description of Artificial Sequence: Synthetic oligonucleotide
cauaguuguucacaugccu

SEQ ID NO: 2133890 - RNA, 19 nt, Artificial Sequence
  Description of Artificial Sequence: Synthetic oligonucleotide
auagccggaaaugaaccuu

SEQ ID NO: 2133891 - RNA, 19 nt, Artificial Sequence
  Description of Artificial Sequence: Synthetic oligonucleotide
ugacaucaccauccacccu

SEQ ID NO: 2133892 - RNA, 19 nt, Artificial Sequence
  Description of Artificial Sequence: Synthetic oligonucleotide
uauguguguugugaagauu

SEQ ID NO: 2133893 - RNA, 19 nt, Artificial Sequence
  Description of Artificial Sequence: Synthetic oligonucleotide
uaucuguaucaagcacaag

SEQ ID NO: 2133894 - RNA, 19 nt, Artificial Sequence
  Description of Artificial Sequence: Synthetic oligonucleotide
uuaugagcucugucuugaa

SEQ ID NO: 2133895 - RNA, 19 nt, Artificial Sequence
  Description of Artificial Sequence: Synthetic oligonucleotide
agcacaauuugaguccgaa

SEQ ID NO: 2133896 - RNA, 19 nt, Artificial Sequence
  Description of Artificial Sequence: Synthetic oligonucleotide
cacguguucacccucauuu

SEQ ID NO: 2133897 - RNA, 19 nt, Artificial Sequence
  Description of Artificial Sequence: Synthetic oligonucleotide
auaucaccucuuccacgug

SEQ ID NO: 2133898 - RNA, 19 nt, Artificial Sequence
  Description of Artificial Sequence: Synthetic oligonucleotide
aggggagauggcuuuugau

SEQ ID NO: 2133899 - RNA, 19 nt, Artificial Sequence
  Description of Artificial Sequence: Synthetic oligonucleotide
cuacaaucguucucucaga

SEQ ID NO: 2133900 - RNA, 19 nt, Artificial Sequence
  Description of Artificial Sequence: Synthetic oligonucleotide
gaauaggaacgugucggaa

SEQ ID NO: 2133901 - RNA, 19 nt, Artificial Sequence
  Description of Artificial Sequence: Synthetic oligonucleotide
cguucucucagaaacugug

SEQ ID NO: 2133902 - RNA, 19 nt, Artificial Sequence
  Description of Artificial Sequence: Synthetic oligonucleotide
aagguccuauaaugucgau

SEQ ID NO: 2133903 - RNA, 19 nt, Artificial Sequence
  Description of Artificial Sequence: Synthetic oligonucleotide
agccggaaaugaaccuugc

SEQ ID NO: 2133904 - RNA, 19 nt, Artificial Sequence
  Description of Artificial Sequence: Synthetic oligonucleotide
aguuguucacaugccugcu

SEQ ID NO: 2133905 - RNA, 19 nt, Artificial Sequence
  Description of Artificial Sequence: Synthetic oligonucleotide
agaggucccaagugccacu

SEQ ID NO: 2133906 - RNA, 19 nt, Artificial Sequence
  Description of Artificial Sequence: Synthetic oligonucleotide
acaugccugcuuaauauuu

SEQ ID NO: 2133907 - RNA, 19 nt, Artificial Sequence
  Description of Artificial Sequence: Synthetic oligonucleotide
gauccauuaccaggcuuuc

SEQ ID NO: 2133908 - RNA, 19 nt, Artificial Sequence
  Description of Artificial Sequence: Synthetic oligonucleotide
uucuaacaccagugucucu

SEQ ID NO: 2133909 - RNA, 19 nt, Artificial Sequence
  Description of Artificial Sequence: Synthetic oligonucleotide
ccauuaccaggcuuucuag

SEQ ID NO: 2133910 - RNA, 19 nt, Artificial Sequence
  Description of Artificial Sequence: Synthetic oligonucleotide
uccuuugucugaugauauu

SEQ ID NO: 2133911 - RNA, 19 nt, Artificial Sequence
  Description of Artificial Sequence: Synthetic oligonucleotide
uaaugucgauauguguguu

SEQ ID NO: 2133912 - RNA, 19 nt, Artificial Sequence
  Description of Artificial Sequence: Synthetic oligonucleotide
gaguugucacuucucugua

SEQ ID NO: 2133913 - RNA, 19 nt, Artificial Sequence
  Description of Artificial Sequence: Synthetic oligonucleotide
uccacccucuccugacaca

SEQ ID NO: 2133914 - RNA, 19 nt, Artificial Sequence
  Description of Artificial Sequence: Synthetic oligonucleotide
guccuauaaugucgauaug

SEQ ID NO: 2133915 - RNA, 19 nt, Artificial Sequence
  Description of Artificial Sequence: Synthetic oligonucleotide
uagcacaauuugaguccga

SEQ ID NO: 2133916 - RNA, 19 nt, Artificial Sequence
  Description of Artificial Sequence: Synthetic oligonucleotide
cagguacagaggucccaag

SEQ ID NO: 2133917 - RNA, 19 nt, Artificial Sequence
  Description of Artificial Sequence: Synthetic oligonucleotide
uggcauacuuccugugguu

SEQ ID NO: 2133918 - RNA, 19 nt, Artificial Sequence
  Description of Artificial Sequence: Synthetic oligonucleotide
auuucuccugucacuggca

SEQ ID NO: 2133919 - RNA, 19 nt, Artificial Sequence
  Description of Artificial Sequence: Synthetic oligonucleotide
ggucuuuuaaaaggccaac

SEQ ID NO: 2133920 - RNA, 19 nt, Artificial Sequence
  Description of Artificial Sequence: Synthetic oligonucleotide
gaacgugucggaagaaggu

SEQ ID NO: 2133921 - RNA, 19 nt, Artificial Sequence
  Description of Artificial Sequence: Synthetic oligonucleotide
gggagauggcuuuugauau

SEQ ID NO: 2133922 - RNA, 19 nt, Artificial Sequence
  Description of Artificial Sequence: Synthetic oligonucleotide
agguccuauaaugucgaua

SEQ ID NO: 2133923 - RNA, 19 nt, Artificial Sequence
  Description of Artificial Sequence: Synthetic oligonucleotide
ccagugucucuuuucugag

SEQ ID NO: 2133924 - RNA, 19 nt, Artificial Sequence
  Description of Artificial Sequence: Synthetic oligonucleotide
cuuccacguguucacccuc

SEQ ID NO: 2133925 - RNA, 19 nt, Artificial Sequence
  Description of Artificial Sequence: Synthetic oligonucleotide
gacccacuccucaaugauc

SEQ ID NO: 2133926 - RNA, 19 nt, Artificial Sequence
  Description of Artificial Sequence: Synthetic oligonucleotide
cgauauguguguugugaag

SEQ ID NO: 2133927 - RNA, 19 nt, Artificial Sequence
  Description of Artificial Sequence: Synthetic oligonucleotide
agccggagacugugagccg

SEQ ID NO: 2133928 - RNA, 19 nt, Artificial Sequence
  Description of Artificial Sequence: Synthetic oligonucleotide
gaccagagacuacaaucgu

SEQ ID NO: 2133929 - RNA, 19 nt, Artificial Sequence
  Description of Artificial Sequence: Synthetic oligonucleotide
aggccagaggauauuuccu

SEQ ID NO: 2133930 - RNA, 19 nt, Artificial Sequence
  Description of Artificial Sequence: Synthetic oligonucleotide
cucauuagcuggucuuuua

SEQ ID NO: 2133931 - RNA, 19 nt, Artificial Sequence
  Description of Artificial Sequence: Synthetic oligonucleotide
acgccucauuagcuggucu

SEQ ID NO: 2133932 - RNA, 19 nt, Artificial Sequence
  Description of Artificial Sequence: Synthetic oligonucleotide
accagagacuacaaucguu

SEQ ID NO: 2133933 - RNA, 19 nt, Artificial Sequence
  Description of Artificial Sequence: Synthetic oligonucleotide
gaauagccaucacaugguu

SEQ ID NO: 2133934 - RNA, 19 nt, Artificial Sequence
  Description of Artificial Sequence: Synthetic oligonucleotide
cacaugucugacacuguua

SEQ ID NO: 2133935 - RNA, 19 nt, Artificial Sequence
  Description of Artificial Sequence: Synthetic oligonucleotide
ccugacacaggauauggua

SEQ ID NO: 2133936 - RNA, 19 nt, Artificial Sequence
  Description of Artificial Sequence: Synthetic oligonucleotide
aagugccacuguagaguug

SEQ ID NO: 2133937 - RNA, 19 nt, Artificial Sequence
  Description of Artificial Sequence: Synthetic oligonucleotide
ggggucucugaucuucaac

SEQ ID NO: 2133938 - RNA, 19 nt, Artificial Sequence
  Description of Artificial Sequence: Synthetic oligonucleotide
gauggauauaucaccucuu

SEQ ID NO: 2133939 - RNA, 19 nt, Artificial Sequence
  Description of Artificial Sequence: Synthetic oligonucleotide
guucacccucauuuuggaa

SEQ ID NO: 2133940 - RNA, 19 nt, Artificial Sequence
  Description of Artificial Sequence: Synthetic oligonucleotide
cuguagaguugucacuucu

SEQ ID NO: 2133941 - RNA, 19 nt, Artificial Sequence
  Description of Artificial Sequence: Synthetic oligonucleotide
acugugagccgaggcuuug

SEQ ID NO: 2133942 - RNA, 19 nt, Artificial Sequence
  Description of Artificial Sequence: Synthetic oligonucleotide
gucggaagaagguccuaua

SEQ ID NO: 2133943 - RNA, 19 nt, Artificial Sequence
  Description of Artificial Sequence: Synthetic oligonucleotide
auccauuaccaggcuuucu

SEQ ID NO: 2133944 - RNA, 19 nt, Artificial Sequence
  Description of Artificial Sequence: Synthetic oligonucleotide
guauuuguucagugucagu

SEQ ID NO: 2133945 - RNA, 19 nt, Artificial Sequence
  Description of Artificial Sequence: Synthetic oligonucleotide
gugucucuuuucugagcuc

SEQ ID NO: 2133946 - RNA, 19 nt, Artificial Sequence
  Description of Artificial Sequence: Synthetic oligonucleotide
aagcuucaugauagccgga

SEQ ID NO: 2133947 - RNA, 19 nt, Artificial Sequence
  Description of Artificial Sequence: Synthetic oligonucleotide
cagaggauauuuccuuugu

SEQ ID NO: 2133948 - RNA, 19 nt, Artificial Sequence
  Description of Artificial Sequence: Synthetic oligonucleotide
gguucuugauggauauauc

SEQ ID NO: 2133949 - RNA, 19 nt, Artificial Sequence
  Description of Artificial Sequence: Synthetic oligonucleotide
accuuuugccuugcacacu

SEQ ID NO: 2133950 - RNA, 19 nt, Artificial Sequence
  Description of Artificial Sequence: Synthetic oligonucleotide
cuucuggcagccucaggua

SEQ ID NO: 2133951 - RNA, 19 nt, Artificial Sequence
  Description of Artificial Sequence: Synthetic oligonucleotide
guaggacacuuccaggguu

SEQ ID NO: 2133952 - RNA, 19 nt, Artificial Sequence
  Description of Artificial Sequence: Synthetic oligonucleotide
uaggaacgugucggaagaa

SEQ ID NO: 2133953 - RNA, 19 nt, Artificial Sequence
  Description of Artificial Sequence: Synthetic oligonucleotide
cguguucacccucauuuug

SEQ ID NO: 2133954 - RNA, 19 nt, Artificial Sequence
  Description of Artificial Sequence: Synthetic oligonucleotide
ggucccagugagcugaagu

SEQ ID NO: 2133955 - RNA, 19 nt, Artificial Sequence
  Description of Artificial Sequence: Synthetic oligonucleotide
cacaagugucccuucacuu

SEQ ID NO: 2133956 - RNA, 19 nt, Artificial Sequence
  Description of Artificial Sequence: Synthetic oligonucleotide
ggcauuuuguagacaaaua

SEQ ID NO: 2133957 - RNA, 19 nt, Artificial Sequence
  Description of Artificial Sequence: Synthetic oligonucleotide
aggccaacuggaagaccag

SEQ ID NO: 2133958 - RNA, 19 nt, Artificial Sequence
  Description of Artificial Sequence: Synthetic oligonucleotide
cugucuugaauaggaacgu

SEQ ID NO: 2133959 - RNA, 19 nt, Artificial Sequence
  Description of Artificial Sequence: Synthetic oligonucleotide
cugaagccggagacuguga

SEQ ID NO: 2133960 - RNA, 19 nt, Artificial Sequence
  Description of Artificial Sequence: Synthetic oligonucleotide
cagagacuacaaucguucu

SEQ ID NO: 2133961 - RNA, 19 nt, Artificial Sequence
  Description of Artificial Sequence: Synthetic oligonucleotide
gcaagacccguugugggca

SEQ ID NO: 2133962 - RNA, 19 nt, Artificial Sequence
  Description of Artificial Sequence: Synthetic oligonucleotide
ugcaacuccuuugguucuu

SEQ ID NO: 2133963 - RNA, 19 nt, Artificial Sequence
  Description of Artificial Sequence: Synthetic oligonucleotide
caagugccacuguagaguu

SEQ ID NO: 2133964 - RNA, 19 nt, Artificial Sequence
  Description of Artificial Sequence: Synthetic oligonucleotide
cucagguacagagguccca

SEQ ID NO: 2133965 - RNA, 19 nt, Artificial Sequence
  Description of Artificial Sequence: Synthetic oligonucleotide
gguucugucuauucugauu

SEQ ID NO: 2133966 - RNA, 19 nt, Artificial Sequence
  Description of Artificial Sequence: Synthetic oligonucleotide
cacuguagaguugucacuu

SEQ ID NO: 2133967 - RNA, 19 nt, Artificial Sequence
  Description of Artificial Sequence: Synthetic oligonucleotide
ccucagguacagagguccc

SEQ ID NO: 2133968 - RNA, 19 nt, Artificial Sequence
  Description of Artificial Sequence: Synthetic oligonucleotide
ggucccaagugccacugua

SEQ ID NO: 2133969 - RNA, 19 nt, Artificial Sequence
  Description of Artificial Sequence: Synthetic oligonucleotide
guuguucacaugccugcuu

SEQ ID NO: 2133970 - RNA, 19 nt, Artificial Sequence
  Description of Artificial Sequence: Synthetic oligonucleotide
gguuuucuaaaggggagau

SEQ ID NO: 2133971 - RNA, 19 nt, Artificial Sequence
  Description of Artificial Sequence: Synthetic oligonucleotide
gccggaaaugaaccuugca

SEQ ID NO: 2133972 - RNA, 19 nt, Artificial Sequence
  Description of Artificial Sequence: Synthetic oligonucleotide
agacccguugugggcauuu

SEQ ID NO: 2133973 - RNA, 19 nt, Artificial Sequence
  Description of Artificial Sequence: Synthetic oligonucleotide
uuccaggguucugucuauu

SEQ ID NO: 2133974 - RNA, 19 nt, Artificial Sequence
  Description of Artificial Sequence: Synthetic oligonucleotide
ccaagugccacuguagagu

SEQ ID NO: 2133975 - RNA, 19 nt, Artificial Sequence
  Description of Artificial Sequence: Synthetic oligonucleotide
agauggcuuuugauaucaa

SEQ ID NO: 2133976 - RNA, 19 nt, Artificial Sequence
  Description of Artificial Sequence: Synthetic oligonucleotide
cacaugccugcuuaauauu

SEQ ID NO: 2133977 - RNA, 19 nt, Artificial Sequence
  Description of Artificial Sequence: Synthetic oligonucleotide
cagugagcugaaguuuaaa

SEQ ID NO: 2133978 - RNA, 19 nt, Artificial Sequence
  Description of Artificial Sequence: Synthetic oligonucleotide
cuaacaccagugucucuuu

SEQ ID NO: 2133979 - RNA, 19 nt, Artificial Sequence
  Description of Artificial Sequence: Synthetic oligonucleotide
agcucaagguggagccccu

SEQ ID NO: 2133980 - RNA, 19 nt, Artificial Sequence
  Description of Artificial Sequence: Synthetic oligonucleotide
cacaugguugaagaccuuu

SEQ ID NO: 2133981 - RNA, 19 nt, Artificial Sequence
  Description of Artificial Sequence: Synthetic oligonucleotide
ggacccacuccucaaugau

SEQ ID NO: 2133982 - RNA, 19 nt, Artificial Sequence
  Description of Artificial Sequence: Synthetic oligonucleotide
ggccagaggauauuuccuu

SEQ ID NO: 2133983 - RNA, 19 nt, Artificial Sequence
  Description of Artificial Sequence: Synthetic oligonucleotide
ccggagacugugagccgag

SEQ ID NO: 2133984 - RNA, 19 nt, Artificial Sequence
  Description of Artificial Sequence: Synthetic oligonucleotide
aagacccguugugggcauu

SEQ ID NO: 2133985 - RNA, 19 nt, Artificial Sequence
  Description of Artificial Sequence: Synthetic oligonucleotide
gccggagacugugagccga

SEQ ID NO: 2133986 - RNA, 19 nt, Artificial Sequence
  Description of Artificial Sequence: Synthetic oligonucleotide
ccuuuugccuugcacacuu

SEQ ID NO: 2133987 - RNA, 19 nt, Artificial Sequence
  Description of Artificial Sequence: Synthetic oligonucleotide
gccagaggauauuuccuuu

SEQ ID NO: 2133988 - RNA, 19 nt, Artificial Sequence
  Description of Artificial Sequence: Synthetic oligonucleotide
ccguugugggcauuuugua

SEQ ID NO: 2133989 - RNA, 19 nt, Artificial Sequence
  Description of Artificial Sequence: Synthetic oligonucleotide
ccuuuucacugaagccgga

SEQ ID NO: 2133990 - RNA, 19 nt, Artificial Sequence
  Description of Artificial Sequence: Synthetic oligonucleotide
ggguucugucuauucugau

SEQ ID NO: 2133991 - RNA, 19 nt, Artificial Sequence
  Description of Artificial Sequence: Synthetic oligonucleotide
caagacccguugugggcau

SEQ ID NO: 2133992 - RNA, 19 nt, Artificial Sequence
  Description of Artificial Sequence: Synthetic oligonucleotide
gugucggaagaagguccua

SEQ ID NO: 2133993 - RNA, 19 nt, Artificial Sequence
  Description of Artificial Sequence: Synthetic oligonucleotide
cuuuugccuugcacacuuu

SEQ ID NO: 2133994 - RNA, 19 nt, Artificial Sequence
  Description of Artificial Sequence: Synthetic oligonucleotide
ggcuuugaggccagaggau

SEQ ID NO: 2133995 - RNA, 19 nt, Artificial Sequence
  Description of Artificial Sequence: Synthetic oligonucleotide
gggucccagugagcugaag

SEQ ID NO: 2133996 - RNA, 19 nt, Artificial Sequence
  Description of Artificial Sequence: Synthetic oligonucleotide
ccccuggacccacuccuca

SEQ ID NO: 2133997 - RNA, 19 nt, Artificial Sequence
  Description of Artificial Sequence: Synthetic oligonucleotide
cgugucggaagaagguccu

SEQ ID NO: 2133998 - RNA, 19 nt, Artificial Sequence
  Description of Artificial Sequence: Synthetic oligonucleotide
cggagacugugagccgagg

SEQ ID NO: 2133999 - RNA, 19 nt, Artificial Sequence
  Description of Artificial Sequence: Synthetic oligonucleotide
gacccguugugggcauuuu

SEQ ID NO: 2134000 - RNA, 19 nt, Artificial Sequence
  Description of Artificial Sequence: Synthetic oligonucleotide
ccuggacccacuccucaau

SEQ ID NO: 2134001 - RNA, 19 nt, Artificial Sequence
  Description of Artificial Sequence: Synthetic oligonucleotide
cgccucauuagcuggucuu

SEQ ID NO: 2134002 - RNA, 19 nt, Artificial Sequence
  Description of Artificial Sequence: Synthetic oligonucleotide
ccacguguucacccucauu

SEQ ID NO: 2134003 - RNA, 19 nt, Artificial Sequence
  Description of Artificial Sequence: Synthetic oligonucleotide
ccgaggcuuugaggccaga

SEQ ID NO: 2134004 - RNA, 19 nt, Artificial Sequence
  Description of Artificial Sequence: Synthetic oligonucleotide
ugauguacaggucauagcc

SEQ ID NO: 2134005 - RNA, 19 nt, Artificial Sequence
  Description of Artificial Sequence: Synthetic oligonucleotide
gaugccacgaaacaccugg

SEQ ID NO: 2134006 - RNA, 19 nt, Artificial Sequence
  Description of Artificial Sequence: Synthetic oligonucleotide
aaagcgcguacccagggcg

SEQ ID NO: 2134007 - RNA, 19 nt, Artificial Sequence
  Description of Artificial Sequence: Synthetic oligonucleotide
acuuccagccuucucaggc

SEQ ID NO: 2134008 - RNA, 19 nt, Artificial Sequence
  Description of Artificial Sequence: Synthetic oligonucleotide
aagugacuaggccuaaggg

SEQ ID NO: 2134009 - RNA, 19 nt, Artificial Sequence
  Description of Artificial Sequence: Synthetic oligonucleotide
auagaagacacgcuggaug

SEQ ID NO: 2134010 - RNA, 19 nt, Artificial Sequence
  Description of Artificial Sequence: Synthetic oligonucleotide
accacuacagcacccaccg

SEQ ID NO: 2134011 - RNA, 19 nt, Artificial Sequence
  Description of Artificial Sequence: Synthetic oligonucleotide
gaagugacuaggccuaagg

SEQ ID NO: 2134012 - RNA, 19 nt, Artificial Sequence
  Description of Artificial Sequence: Synthetic oligonucleotide
ucacgagugauguacaggu

SEQ ID NO: 2134013 - RNA, 19 nt, Artificial Sequence
  Description of Artificial Sequence: Synthetic oligonucleotide
ucgaugcauaccaugacug

SEQ ID NO: 2134014 - RNA, 19 nt, Artificial Sequence
  Description of Artificial Sequence: Synthetic oligonucleotide
ugcauggacacgaaagcgc

SEQ ID NO: 2134015 - RNA, 19 nt, Artificial Sequence
  Description of Artificial Sequence: Synthetic oligonucleotide
gaugcauaccaugacugcg

SEQ ID NO: 2134016 - RNA, 19 nt, Artificial Sequence
  Description of Artificial Sequence: Synthetic oligonucleotide
agugacuaggccuaagggu

SEQ ID NO: 2134017 - RNA, 19 nt, Artificial Sequence
  Description of Artificial Sequence: Synthetic oligonucleotide
agggccauggcacacauga

SEQ ID NO: 2134018 - RNA, 19 nt, Artificial Sequence
  Description of Artificial Sequence: Synthetic oligonucleotide
ugaaggagcaagucgggug

SEQ ID NO: 2134019 - RNA, 19 nt, Artificial Sequence
  Description of Artificial Sequence: Synthetic oligonucleotide
agggugaaggagcaagucg

SEQ ID NO: 2134020 - RNA, 19 nt, Artificial Sequence
  Description of Artificial Sequence: Synthetic oligonucleotide
auagccggugcacacguac

SEQ ID NO: 2134021 - RNA, 19 nt, Artificial Sequence
  Description of Artificial Sequence: Synthetic oligonucleotide
gaaggagcaagucgggugc

SEQ ID NO: 2134022 - RNA, 19 nt, Artificial Sequence
  Description of Artificial Sequence: Synthetic oligonucleotide
ugggucuaccacuacagca

SEQ ID NO: 2134023 - RNA, 19 nt, Artificial Sequence
  Description of Artificial Sequence: Synthetic oligonucleotide
gauguacaggucauagccg

SEQ ID NO: 2134024 - RNA, 19 nt, Artificial Sequence
  Description of Artificial Sequence: Synthetic oligonucleotide
acgagugauguacagguca

SEQ ID NO: 2134025 - RNA, 19 nt, Artificial Sequence
  Description of Artificial Sequence: Synthetic oligonucleotide
cacuacagcacccaccgcc

SEQ ID NO: 2134026 - RNA, 19 nt, Artificial Sequence
  Description of Artificial Sequence: Synthetic oligonucleotide
uccgacaggacagggaggg

SEQ ID NO: 2134027 - RNA, 19 nt, Artificial Sequence
  Description of Artificial Sequence: Synthetic oligonucleotide
uggacgagggccauggcac

SEQ ID NO: 2134028 - RNA, 19 nt, Artificial Sequence
  Description of Artificial Sequence: Synthetic oligonucleotide
ugacuaggccuaagggucg

SEQ ID NO: 2134029 - RNA, 19 nt, Artificial Sequence
  Description of Artificial Sequence: Synthetic oligonucleotide
gaggacgccccauagaaga

SEQ ID NO: 2134030 - RNA, 19 nt, Artificial Sequence
  Description of Artificial Sequence: Synthetic oligonucleotide
gacacgaaagcgcguaccc

SEQ ID NO: 2134031 - RNA, 19 nt, Artificial Sequence
  Description of Artificial Sequence: Synthetic oligonucleotide
cagaagauccgaugcgugg

SEQ ID NO: 2134032 - RNA, 19 nt, Artificial Sequence
  Description of Artificial Sequence: Synthetic oligonucleotide
ggugguugaggucuggccg

SEQ ID NO: 2134033 - RNA, 19 nt, Artificial Sequence
  Description of Artificial Sequence: Synthetic oligonucleotide
agaagauccgaugcguggg

SEQ ID NO: 2134034 - RNA, 19 nt, Artificial Sequence
  Description of Artificial Sequence: Synthetic oligonucleotide
gaagacacgcuggaugcgg

SEQ ID NO: 2134035 - RNA, 19 nt, Artificial Sequence
  Description of Artificial Sequence: Synthetic oligonucleotide
caucgcugcagucauggcc

SEQ ID NO: 2134036 - RNA, 19 nt, Artificial Sequence
  Description of Artificial Sequence: Synthetic oligonucleotide
agauccgaugcgugggcgc

SEQ ID NO: 2134037 - RNA, 19 nt, Artificial Sequence
  Description of Artificial Sequence: Synthetic oligonucleotide
aaacaccuggaagcggugg

SEQ ID NO: 2134038 - RNA, 19 nt, Artificial Sequence
  Description of Artificial Sequence: Synthetic oligonucleotide
cacgaaagcgcguacccag

SEQ ID NO: 2134039 - RNA, 19 nt, Artificial Sequence
  Description of Artificial Sequence: Synthetic oligonucleotide
agcaccaacuccacggccc

SEQ ID NO: 2134040 - RNA, 19 nt, Artificial Sequence
  Description of Artificial Sequence: Synthetic oligonucleotide
cuaagggucgggauccagc

SEQ ID NO: 2134041 - RNA, 19 nt, Artificial Sequence
  Description of Artificial Sequence: Synthetic oligonucleotide
uaagggucgggauccagcu

SEQ ID NO: 2134042 - RNA, 19 nt, Artificial Sequence
  Description of Artificial Sequence: Synthetic oligonucleotide
agcgugggcccgcagaggg

SEQ ID NO: 2134043 - RNA, 19 nt, Artificial Sequence
  Description of Artificial Sequence: Synthetic oligonucleotide
gagaggacgccccauagaa

SEQ ID NO: 2134044 - RNA, 19 nt, Artificial Sequence
  Description of Artificial Sequence: Synthetic oligonucleotide
gagcugcccagccagugcg

SEQ ID NO: 2134045 - RNA, 19 nt, Artificial Sequence
  Description of Artificial Sequence: Synthetic oligonucleotide
ccacgaaacaccuggaagc

SEQ ID NO: 2134046 - RNA, 19 nt, Artificial Sequence
  Description of Artificial Sequence: Synthetic oligonucleotide
uaccacuacagcacccacc

SEQ ID NO: 2134047 - RNA, 19 nt, Artificial Sequence
  Description of Artificial Sequence: Synthetic oligonucleotide
ucauagccggugcacacgu

SEQ ID NO: 2134048 - RNA, 19 nt, Artificial Sequence
  Description of Artificial Sequence: Synthetic oligonucleotide
cauaccaugacugcgugca

SEQ ID NO: 2134049 - RNA, 19 nt, Artificial Sequence
  Description of Artificial Sequence: Synthetic oligonucleotide
acuacagcacccaccgccc

SEQ ID NO: 2134050 - RNA, 19 nt, Artificial Sequence
  Description of Artificial Sequence: Synthetic oligonucleotide
gucgggauccagcuggcgg

SEQ ID NO: 2134051 - RNA, 19 nt, Artificial Sequence
  Description of Artificial Sequence: Synthetic oligonucleotide
acacguacggcaugccauc

SEQ ID NO: 2134052 - RNA, 19 nt, Artificial Sequence
  Description of Artificial Sequence: Synthetic oligonucleotide
ugcauaccaugacugcgug

SEQ ID NO: 2134053 - RNA, 19 nt, Artificial Sequence
  Description of Artificial Sequence: Synthetic oligonucleotide
ucuaccacuacagcaccca

SEQ ID NO: 2134054 - RNA, 19 nt, Artificial Sequence
  Description of Artificial Sequence: Synthetic oligonucleotide
cacgaaacaccuggaagcg

SEQ ID NO: 2134055 - RNA, 19 nt, Artificial Sequence
  Description of Artificial Sequence: Synthetic oligonucleotide
aggccuaagggucgggauc

SEQ ID NO: 2134056 - RNA, 19 nt, Artificial Sequence
  Description of Artificial Sequence: Synthetic oligonucleotide
gugacuaggccuaaggguc

SEQ ID NO: 2134057 - RNA, 19 nt, Artificial Sequence
  Description of Artificial Sequence: Synthetic oligonucleotide
aagauccgaugcgugggcg

SEQ ID NO: 2134058 - RNA, 19 nt, Artificial Sequence
  Description of Artificial Sequence: Synthetic oligonucleotide
uccggaagcagaagugacu

SEQ ID NO: 2134059 - RNA, 19 nt, Artificial Sequence
  Description of Artificial Sequence: Synthetic oligonucleotide
cacgcuauccgaagcuggg

SEQ ID NO: 2134060 - RNA, 19 nt, Artificial Sequence
  Description of Artificial Sequence: Synthetic oligonucleotide
gugcauggacacgaaagcg

SEQ ID NO: 2134061 - RNA, 19 nt, Artificial Sequence
  Description of Artificial Sequence: Synthetic oligonucleotide
gaagauccgaugcgugggc

SEQ ID NO: 2134062 - RNA, 19 nt, Artificial Sequence
  Description of Artificial Sequence: Synthetic oligonucleotide
cagggcgccaucaggagag

SEQ ID NO: 2134063 - RNA, 19 nt, Artificial Sequence
  Description of Artificial Sequence: Synthetic oligonucleotide
ucgggauccagcuggcggc

SEQ ID NO: 2134064 - RNA, 19 nt, Artificial Sequence
  Description of Artificial Sequence: Synthetic oligonucleotide
cacagcagaagauccgaug

SEQ ID NO: 2134065 - RNA, 19 nt, Artificial Sequence
  Description of Artificial Sequence: Synthetic oligonucleotide
aaggagcaagucgggugcc

SEQ ID NO: 2134066 - RNA, 19 nt, Artificial Sequence
  Description of Artificial Sequence: Synthetic oligonucleotide
uagccggugcacacguacg

SEQ ID NO: 2134067 - RNA, 19 nt, Artificial Sequence
  Description of Artificial Sequence: Synthetic oligonucleotide
gugauguacaggucauagc

SEQ ID NO: 2134068 - RNA, 19 nt, Artificial Sequence
  Description of Artificial Sequence: Synthetic oligonucleotide
ugcgcuggucaccugcuug

SEQ ID NO: 2134069 - RNA, 19 nt, Artificial Sequence
  Description of Artificial Sequence: Synthetic oligonucleotide
agacacgcuggaugcgggc

SEQ ID NO: 2134070 - RNA, 19 nt, Artificial Sequence
  Description of Artificial Sequence: Synthetic oligonucleotide
caugacacagggcucacga

SEQ ID NO: 2134071 - RNA, 19 nt, Artificial Sequence
  Description of Artificial Sequence: Synthetic oligonucleotide
gaaagcgcguacccagggc

SEQ ID NO: 2134072 - RNA, 19 nt, Artificial Sequence
  Description of Artificial Sequence: Synthetic oligonucleotide
cacugcccguuccauaugg

SEQ ID NO: 2134073 - RNA, 19 nt, Artificial Sequence
  Description of Artificial Sequence: Synthetic oligonucleotide
agggaugagggcuggccag

SEQ ID NO: 2134074 - RNA, 19 nt, Artificial Sequence
  Description of Artificial Sequence: Synthetic oligonucleotide
gaugcgggcguggacgagg

SEQ ID NO: 2134075 - RNA, 19 nt, Artificial Sequence
  Description of Artificial Sequence: Synthetic oligonucleotide
agcguaggccagcaccaac

SEQ ID NO: 2134076 - RNA, 19 nt, Artificial Sequence
  Description of Artificial Sequence: Synthetic oligonucleotide
acccaccgcccgcagaccc

SEQ ID NO: 2134077 - RNA, 19 nt, Artificial Sequence
  Description of Artificial Sequence: Synthetic oligonucleotide
aagacacgcuggaugcggg

SEQ ID NO: 2134078 - RNA, 19 nt, Artificial Sequence
  Description of Artificial Sequence: Synthetic oligonucleotide
gacacgcuggaugcgggcg

SEQ ID NO: 2134079 - RNA, 19 nt, Artificial Sequence
  Description of Artificial Sequence: Synthetic oligonucleotide
uccgaagcugggucuacca

SEQ ID NO: 2134080 - RNA, 19 nt, Artificial Sequence
  Description of Artificial Sequence: Synthetic oligonucleotide
aagcgcguacccagggcgc

SEQ ID NO: 2134081 - RNA, 19 nt, Artificial Sequence
  Description of Artificial Sequence: Synthetic oligonucleotide
gcuccgacaggacagggag

SEQ ID NO: 2134082 - RNA, 19 nt, Artificial Sequence
  Description of Artificial Sequence: Synthetic oligonucleotide
gccacgaaacaccuggaag

SEQ ID NO: 2134083 - RNA, 19 nt, Artificial Sequence
  Description of Artificial Sequence: Synthetic oligonucleotide
ugccgucugaggucgcagg

SEQ ID NO: 2134084 - RNA, 19 nt, Artificial Sequence
  Description of Artificial Sequence: Synthetic oligonucleotide
ugaggucgcaggugccacg

SEQ ID NO: 2134085 - RNA, 19 nt, Artificial Sequence
  Description of Artificial Sequence: Synthetic oligonucleotide
caggucgaugcauaccaug

SEQ ID NO: 2134086 - RNA, 19 nt, Artificial Sequence
  Description of Artificial Sequence: Synthetic oligonucleotide
ucccggaggaggcgggacg

SEQ ID NO: 2134087 - RNA, 19 nt, Artificial Sequence
  Description of Artificial Sequence: Synthetic oligonucleotide
agcagaagauccgaugcgu

SEQ ID NO: 2134088 - RNA, 19 nt, Artificial Sequence
  Description of Artificial Sequence: Synthetic oligonucleotide
cuugccauugagccgucuc

SEQ ID NO: 2134089 - RNA, 19 nt, Artificial Sequence
  Description of Artificial Sequence: Synthetic oligonucleotide
augacacagggcucacgag

SEQ ID NO: 2134090 - RNA, 19 nt, Artificial Sequence
  Description of Artificial Sequence: Synthetic oligonucleotide
agcugggucuaccacuaca

SEQ ID NO: 2134091 - RNA, 19 nt, Artificial Sequence
  Description of Artificial Sequence: Synthetic oligonucleotide
aagcugggucuaccacuac

SEQ ID NO: 2134092 - RNA, 19 nt, Artificial Sequence
  Description of Artificial Sequence: Synthetic oligonucleotide
uacggcaugccaucaucgu

SEQ ID NO: 2134093 - RNA, 19 nt, Artificial Sequence
  Description of Artificial Sequence: Synthetic oligonucleotide
cuggaagcggguagauggc

SEQ ID NO: 2134094 - RNA, 19 nt, Artificial Sequence
  Description of Artificial Sequence: Synthetic oligonucleotide
caguccggaagcagaagug

SEQ ID NO: 2134095 - RNA, 19 nt, Artificial Sequence
  Description of Artificial Sequence: Synthetic oligonucleotide
gcauggacacgaaagcgcg

SEQ ID NO: 2134096 - RNA, 19 nt, Artificial Sequence
  Description of Artificial Sequence: Synthetic oligonucleotide
gaggucgcaggugccacgg

SEQ ID NO: 2134097 - RNA, 19 nt, Artificial Sequence
  Description of Artificial Sequence: Synthetic oligonucleotide
aagggucgggauccagcug

SEQ ID NO: 2134098 - RNA, 19 nt, Artificial Sequence
  Description of Artificial Sequence: Synthetic oligonucleotide
ugccacgaaacaccuggaa

SEQ ID NO: 2134099 - RNA, 19 nt, Artificial Sequence
  Description of Artificial Sequence: Synthetic oligonucleotide
ugcuccgacaggacaggga

SEQ ID NO: 2134100 - RNA, 19 nt, Artificial Sequence
  Description of Artificial Sequence: Synthetic oligonucleotide
agaagacacgcuggaugcg

SEQ ID NO: 2134101 - RNA, 19 nt, Artificial Sequence
  Description of Artificial Sequence: Synthetic oligonucleotide
aggacuggcgcagcguagg

SEQ ID NO: 2134102 - RNA, 19 nt, Artificial Sequence
  Description of Artificial Sequence: Synthetic oligonucleotide
gacgucuggcgcuugucca

SEQ ID NO: 2134103 - RNA, 19 nt, Artificial Sequence
  Description of Artificial Sequence: Synthetic oligonucleotide
aggucgaugcauaccauga

SEQ ID NO: 2134104 - RNA, 19 nt, Artificial Sequence
  Description of Artificial Sequence: Synthetic oligonucleotide
agucgggugccgucugagg

SEQ ID NO: 2134105 - RNA, 19 nt, Artificial Sequence
  Description of Artificial Sequence: Synthetic oligonucleotide
aagucgggugccgucugag

SEQ ID NO: 2134106 - RNA, 19 nt, Artificial Sequence
  Description of Artificial Sequence: Synthetic oligonucleotide
ccgugcauggacacgaaag

SEQ ID NO: 2134107 - RNA, 19 nt, Artificial Sequence
  Description of Artificial Sequence: Synthetic oligonucleotide
aguccggaagcagaaguga

SEQ ID NO: 2134108 - RNA, 19 nt, Artificial Sequence
  Description of Artificial Sequence: Synthetic oligonucleotide
gaggcgggacgucuggcgc

SEQ ID NO: 2134109 - RNA, 19 nt, Artificial Sequence
  Description of Artificial Sequence: Synthetic oligonucleotide
cuuguccaggaaaggugug

SEQ ID NO: 2134110 - RNA, 19 nt, Artificial Sequence
  Description of Artificial Sequence: Synthetic oligonucleotide
agggcccaaggccauggag

SEQ ID NO: 2134111 - RNA, 19 nt, Artificial Sequence
  Description of Artificial Sequence: Synthetic oligonucleotide
agcuugcgcacgcugccag

SEQ ID NO: 2134112 - RNA, 19 nt, Artificial Sequence
  Description of Artificial Sequence: Synthetic oligonucleotide
ggcucugcauggcugcucg

SEQ ID NO: 2134113 - RNA, 19 nt, Artificial Sequence
  Description of Artificial Sequence: Synthetic oligonucleotide
gauccgaugcgugggcgcc

SEQ ID NO: 2134114 - RNA, 19 nt, Artificial Sequence
  Description of Artificial Sequence: Synthetic oligonucleotide
auccgaagcugggucuacc

SEQ ID NO: 2134115 - RNA, 19 nt, Artificial Sequence
  Description of Artificial Sequence: Synthetic oligonucleotide
ucuggccgugcauggacac

SEQ ID NO: 2134116 - RNA, 19 nt, Artificial Sequence
  Description of Artificial Sequence: Synthetic oligonucleotide
cagugcgcuggucaccugc

SEQ ID NO: 2134117 - RNA, 19 nt, Artificial Sequence
  Description of Artificial Sequence: Synthetic oligonucleotide
ggaaaggugugcccaggcc

SEQ ID NO: 2134118 - RNA, 19 nt, Artificial Sequence
  Description of Artificial Sequence: Synthetic oligonucleotide
cagccagcgagcgugggcc

SEQ ID NO: 2134119 - RNA, 19 nt, Artificial Sequence
  Description of Artificial Sequence: Synthetic oligonucleotide
acgaaacaccuggaagcgg

SEQ ID NO: 2134120 - RNA, 19 nt, Artificial Sequence
  Description of Artificial Sequence: Synthetic oligonucleotide
ugcauggcugcucgcgccu

SEQ ID NO: 2134121 - RNA, 19 nt, Artificial Sequence
  Description of Artificial Sequence: Synthetic oligonucleotide
guggacgagggccauggca

SEQ ID NO: 2134122 - RNA, 19 nt, Artificial Sequence
  Description of Artificial Sequence: Synthetic oligonucleotide
ccuagggaggagcucagcc

SEQ ID NO: 2134123 - RNA, 19 nt, Artificial Sequence
  Description of Artificial Sequence: Synthetic oligonucleotide
uggccagcacgcuauccga

SEQ ID NO: 2134124 - RNA, 19 nt, Artificial Sequence
  Description of Artificial Sequence: Synthetic oligonucleotide
gacgccccauagaagacac

SEQ ID NO: 2134125 - RNA, 19 nt, Artificial Sequence
  Description of Artificial Sequence: Synthetic oligonucleotide
auaccaugacugcgugcag

SEQ ID NO: 2134126 - RNA, 19 nt, Artificial Sequence
  Description of Artificial Sequence: Synthetic oligonucleotide
augcauaccaugacugcgu

SEQ ID NO: 2134127 - RNA, 19 nt, Artificial Sequence
  Description of Artificial Sequence: Synthetic oligonucleotide
cacgcugccagcacgugca

SEQ ID NO: 2134128 - RNA, 19 nt, Artificial Sequence
  Description of Artificial Sequence: Synthetic oligonucleotide
gacuaggccuaagggucgg

SEQ ID NO: 2134129 - RNA, 19 nt, Artificial Sequence
  Description of Artificial Sequence: Synthetic oligonucleotide
gucgaugcauaccaugacu

SEQ ID NO: 2134130 - RNA, 19 nt, Artificial Sequence
  Description of Artificial Sequence: Synthetic oligonucleotide
agaagugacuaggccuaag

SEQ ID NO: 2134131 - RNA, 19 nt, Artificial Sequence
  Description of Artificial Sequence: Synthetic oligonucleotide
gaaacaccuggaagcggug

SEQ ID NO: 2134132 - RNA, 19 nt, Artificial Sequence
  Description of Artificial Sequence: Synthetic oligonucleotide
ccgauugcugcuccgacag

SEQ ID NO: 2134133 - RNA, 19 nt, Artificial Sequence
  Description of Artificial Sequence: Synthetic oligonucleotide
gggucuaccacuacagcac

SEQ ID NO: 2134134 - RNA, 19 nt, Artificial Sequence
  Description of Artificial Sequence: Synthetic oligonucleotide
ucuggcgcuuguccaggac

SEQ ID NO: 2134135 - RNA, 19 nt, Artificial Sequence
  Description of Artificial Sequence: Synthetic oligonucleotide
uggaagcggguagauggca

SEQ ID NO: 2134136 - RNA, 19 nt, Artificial Sequence
  Description of Artificial Sequence: Synthetic oligonucleotide
acuggggcgcacccgcuug

SEQ ID NO: 2134137 - RNA, 19 nt, Artificial Sequence
  Description of Artificial Sequence: Synthetic oligonucleotide
aggcacagcagaagauccg

SEQ ID NO: 2134138 - RNA, 19 nt, Artificial Sequence
  Description of Artificial Sequence: Synthetic oligonucleotide
gcggguagauggcagacac

SEQ ID NO: 2134139 - RNA, 19 nt, Artificial Sequence
  Description of Artificial Sequence: Synthetic oligonucleotide
gcuuguccaggacuggcgc

SEQ ID NO: 2134140 - RNA, 19 nt, Artificial Sequence
  Description of Artificial Sequence: Synthetic oligonucleotide
agcgcguacccagggcgcc

SEQ ID NO: 2134141 - RNA, 19 nt, Artificial Sequence
  Description of Artificial Sequence: Synthetic oligonucleotide
agcacgcuauccgaagcug

SEQ ID NO: 2134142 - RNA, 19 nt, Artificial Sequence
  Description of Artificial Sequence: Synthetic oligonucleotide
cuaccacuacagcacccac

SEQ ID NO: 2134143 - RNA, 19 nt, Artificial Sequence
  Description of Artificial Sequence: Synthetic oligonucleotide
acgaaagcgcguacccagg

SEQ ID NO: 2134144 - RNA, 19 nt, Artificial Sequence
  Description of Artificial Sequence: Synthetic oligonucleotide
agccagcgagcgugggccc

SEQ ID NO: 2134145 - RNA, 19 nt, Artificial Sequence
  Description of Artificial Sequence: Synthetic oligonucleotide
cuacagcacccaccgcccg

SEQ ID NO: 2134146 - RNA, 19 nt, Artificial Sequence
  Description of Artificial Sequence: Synthetic oligonucleotide
agcaagucgggugccgucu

SEQ ID NO: 2134147 - RNA, 19 nt, Artificial Sequence
  Description of Artificial Sequence: Synthetic oligonucleotide
ucgggugccgucugagguc

SEQ ID NO: 2134148 - RNA, 19 nt, Artificial Sequence
  Description of Artificial Sequence: Synthetic oligonucleotide
ccauugagccgucucuugc

SEQ ID NO: 2134149 - RNA, 19 nt, Artificial Sequence
  Description of Artificial Sequence: Synthetic oligonucleotide
ggacgucuggcgcuugucc

SEQ ID NO: 2134150 - RNA, 19 nt, Artificial Sequence
  Description of Artificial Sequence: Synthetic oligonucleotide
aggacgccccauagaagac

SEQ ID NO: 2134151 - RNA, 19 nt, Artificial Sequence
  Description of Artificial Sequence: Synthetic oligonucleotide
agaggacgccccauagaag

SEQ ID NO: 2134152 - RNA, 19 nt, Artificial Sequence
  Description of Artificial Sequence: Synthetic oligonucleotide
cacgagugauguacagguc

SEQ ID NO: 2134153 - RNA, 19 nt, Artificial Sequence
  Description of Artificial Sequence: Synthetic oligonucleotide
aggaugccacgaaacaccu

SEQ ID NO: 2134154 - RNA, 19 nt, Artificial Sequence
  Description of Artificial Sequence: Synthetic oligonucleotide
ggucgcaggugccacggcc

SEQ ID NO: 2134155 - RNA, 19 nt, Artificial Sequence
  Description of Artificial Sequence: Synthetic oligonucleotide
ugcgacuggggcgcacccg

SEQ ID NO: 2134156 - RNA, 19 nt, Artificial Sequence
  Description of Artificial Sequence: Synthetic oligonucleotide
cagcaccaacuccacggcc

SEQ ID NO: 2134157 - RNA, 19 nt, Artificial Sequence
  Description of Artificial Sequence: Synthetic oligonucleotide
agccggccuagggaggagc

SEQ ID NO: 2134158 - RNA, 19 nt, Artificial Sequence
  Description of Artificial Sequence: Synthetic oligonucleotide
gcgccaucaggagaggacg

SEQ ID NO: 2134159 - RNA, 19 nt, Artificial Sequence
  Description of Artificial Sequence: Synthetic oligonucleotide
gggcucacgagugauguac

SEQ ID NO: 2134160 - RNA, 19 nt, Artificial Sequence
  Description of Artificial Sequence: Synthetic oligonucleotide
ggcacugcgacuggggcgc

SEQ ID NO: 2134161 - RNA, 19 nt, Artificial Sequence
  Description of Artificial Sequence: Synthetic oligonucleotide
aggagcaagucgggugccg

SEQ ID NO: 2134162 - RNA, 19 nt, Artificial Sequence
  Description of Artificial Sequence: Synthetic oligonucleotide
cacagccggccuagggagg

SEQ ID NO: 2134163 - RNA, 19 nt, Artificial Sequence
  Description of Artificial Sequence: Synthetic oligonucleotide
acacgaaagcgcguaccca

SEQ ID NO: 2134164 - RNA, 19 nt, Artificial Sequence
  Description of Artificial Sequence: Synthetic oligonucleotide
ggucgaugcauaccaugac

SEQ ID NO: 2134165 - RNA, 19 nt, Artificial Sequence
  Description of Artificial Sequence: Synthetic oligonucleotide
gcucacgagugauguacag

SEQ ID NO: 2134166 - RNA, 19 nt, Artificial Sequence
  Description of Artificial Sequence: Synthetic oligonucleotide
ggccuaagggucgggaucc

SEQ ID NO: 2134167 - RNA, 19 nt, Artificial Sequence
  Description of Artificial Sequence: Synthetic oligonucleotide
acacgcuggaugcgggcgu

SEQ ID NO: 2134168 - RNA, 19 nt, Artificial Sequence
  Description of Artificial Sequence: Synthetic oligonucleotide
gggcccaaggccauggagc

SEQ ID NO: 2134169 - RNA, 19 nt, Artificial Sequence
  Description of Artificial Sequence: Synthetic oligonucleotide
gggcuggccacaucgcugc

SEQ ID NO: 2134170 - RNA, 19 nt, Artificial Sequence
  Description of Artificial Sequence: Synthetic oligonucleotide
gguccucaaggaugccacg

SEQ ID NO: 2134171 - RNA, 19 nt, Artificial Sequence
  Description of Artificial Sequence: Synthetic oligonucleotide
ggaagcggguagauggcag

SEQ ID NO: 2134172 - RNA, 19 nt, Artificial Sequence
  Description of Artificial Sequence: Synthetic oligonucleotide
guccggaagcagaagugac

SEQ ID NO: 2134173 - RNA, 19 nt, Artificial Sequence
  Description of Artificial Sequence: Synthetic oligonucleotide
gucuaccacuacagcaccc

SEQ ID NO: 2134174 - RNA, 19 nt, Artificial Sequence
  Description of Artificial Sequence: Synthetic oligonucleotide
cagggugaaggagcaaguc

SEQ ID NO: 2134175 - RNA, 19 nt, Artificial Sequence
  Description of Artificial Sequence: Synthetic oligonucleotide
gagcaagucgggugccguc

SEQ ID NO: 2134176 - RNA, 19 nt, Artificial Sequence
  Description of Artificial Sequence: Synthetic oligonucleotide
agcaguccggaagcagaag

SEQ ID NO: 2134177 - RNA, 19 nt, Artificial Sequence
  Description of Artificial Sequence: Synthetic oligonucleotide
ggucuggccgugcauggac

SEQ ID NO: 2134178 - RNA, 19 nt, Artificial Sequence
  Description of Artificial Sequence: Synthetic oligonucleotide
gcacgcuauccgaagcugg

SEQ ID NO: 2134179 - RNA, 19 nt, Artificial Sequence
  Description of Artificial Sequence: Synthetic oligonucleotide
ugccauugagccgucucuu

SEQ ID NO: 2134180 - RNA, 19 nt, Artificial Sequence
  Description of Artificial Sequence: Synthetic oligonucleotide
gccagcacgcuauccgaag

SEQ ID NO: 2134181 - RNA, 19 nt, Artificial Sequence
  Description of Artificial Sequence: Synthetic oligonucleotide
uccaggacuggcgcagcgu

SEQ ID NO: 2134182 - RNA, 19 nt, Artificial Sequence
  Description of Artificial Sequence: Synthetic oligonucleotide
acuaggccuaagggucggg

SEQ ID NO: 2134183 - RNA, 19 nt, Artificial Sequence
  Description of Artificial Sequence: Synthetic oligonucleotide
uauccgaagcugggucuac

SEQ ID NO: 2134184 - RNA, 19 nt, Artificial Sequence
  Description of Artificial Sequence: Synthetic oligonucleotide
cauugagccgucucuugcu

SEQ ID NO: 2134185 - RNA, 19 nt, Artificial Sequence
  Description of Artificial Sequence: Synthetic oligonucleotide
cgaugcauaccaugacugc

SEQ ID NO: 2134186 - RNA, 19 nt, Artificial Sequence
  Description of Artificial Sequence: Synthetic oligonucleotide
ggugcacacguacggcaug

SEQ ID NO: 2134187 - RNA, 19 nt, Artificial Sequence
  Description of Artificial Sequence: Synthetic oligonucleotide
cgcagcguaggccagcacc

SEQ ID NO: 2134188 - RNA, 19 nt, Artificial Sequence
  Description of Artificial Sequence: Synthetic oligonucleotide
gcagaagauccgaugcgug

SEQ ID NO: 2134189 - RNA, 19 nt, Artificial Sequence
  Description of Artificial Sequence: Synthetic oligonucleotide
ugguugaggucuggccgug

SEQ ID NO: 2134190 - RNA, 19 nt, Artificial Sequence
  Description of Artificial Sequence: Synthetic oligonucleotide
cacacguacggcaugccau

SEQ ID NO: 2134191 - RNA, 19 nt, Artificial Sequence
  Description of Artificial Sequence: Synthetic oligonucleotide
gcguggacgagggccaugg

SEQ ID NO: 2134192 - RNA, 19 nt, Artificial Sequence
  Description of Artificial Sequence: Synthetic oligonucleotide
ccagcacgcuauccgaagc

SEQ ID NO: 2134193 - RNA, 19 nt, Artificial Sequence
  Description of Artificial Sequence: Synthetic oligonucleotide
cugaggucgcaggugccac

SEQ ID NO: 2134194 - RNA, 19 nt, Artificial Sequence
  Description of Artificial Sequence: Synthetic oligonucleotide
ugacugcgugcagcagggg

SEQ ID NO: 2134195 - RNA, 19 nt, Artificial Sequence
  Description of Artificial Sequence: Synthetic oligonucleotide
gcauaccaugacugcgugc

SEQ ID NO: 2134196 - RNA, 19 nt, Artificial Sequence
  Description of Artificial Sequence: Synthetic oligonucleotide
gccauugagccgucucuug

SEQ ID NO: 2134197 - RNA, 19 nt, Artificial Sequence
  Description of Artificial Sequence: Synthetic oligonucleotide
acgcugccagcacgugcac

SEQ ID NO: 2134198 - RNA, 19 nt, Artificial Sequence
  Description of Artificial Sequence: Synthetic oligonucleotide
acagccggccuagggagga

SEQ ID NO: 2134199 - RNA, 19 nt, Artificial Sequence
  Description of Artificial Sequence: Synthetic oligonucleotide
cuggccgugcauggacacg

SEQ ID NO: 2134200 - RNA, 19 nt, Artificial Sequence
  Description of Artificial Sequence: Synthetic oligonucleotide
aggcgggacgucuggcgcu

SEQ ID NO: 2134201 - RNA, 19 nt, Artificial Sequence
  Description of Artificial Sequence: Synthetic oligonucleotide
acagggcucacgagugaug

SEQ ID NO: 2134202 - RNA, 19 nt, Artificial Sequence
  Description of Artificial Sequence: Synthetic oligonucleotide
ugcccucugggcggcacgc

SEQ ID NO: 2134203 - RNA, 19 nt, Artificial Sequence
  Description of Artificial Sequence: Synthetic oligonucleotide
uccgaugcgugggcgccgc

SEQ ID NO: 2134204 - RNA, 19 nt, Artificial Sequence
  Description of Artificial Sequence: Synthetic oligonucleotide
augcgggcguggacgaggg

SEQ ID NO: 2134205 - RNA, 19 nt, Artificial Sequence
  Description of Artificial Sequence: Synthetic oligonucleotide
gugguugaggucuggccgu

SEQ ID NO: 2134206 - RNA, 19 nt, Artificial Sequence
  Description of Artificial Sequence: Synthetic oligonucleotide
acguacggcaugccaucau

SEQ ID NO: 2134207 - RNA, 19 nt, Artificial Sequence
  Description of Artificial Sequence: Synthetic oligonucleotide
gcacccaccgcccgcagac

SEQ ID NO: 2134208 - RNA, 19 nt, Artificial Sequence
  Description of Artificial Sequence: Synthetic oligonucleotide
ggagaggacgccccauaga

SEQ ID NO: 2134209 - RNA, 19 nt, Artificial Sequence
  Description of Artificial Sequence: Synthetic oligonucleotide
gcgacuggggcgcacccgc

SEQ ID NO: 2134210 - RNA, 19 nt, Artificial Sequence
  Description of Artificial Sequence: Synthetic oligonucleotide
ggcacagcagaagauccga

SEQ ID NO: 2134211 - RNA, 19 nt, Artificial Sequence
  Description of Artificial Sequence: Synthetic oligonucleotide
cuugcgcacgcugccagca

SEQ ID NO: 2134212 - RNA, 19 nt, Artificial Sequence
  Description of Artificial Sequence: Synthetic oligonucleotide
cgccccauagaagacacgc

SEQ ID NO: 2134213 - RNA, 19 nt, Artificial Sequence
  Description of Artificial Sequence: Synthetic oligonucleotide
ccugcuuguccaggaaagg

SEQ ID NO: 2134214 - RNA, 19 nt, Artificial Sequence
  Description of Artificial Sequence: Synthetic oligonucleotide
gcagaagugacuaggccua

SEQ ID NO: 2134215 - RNA, 19 nt, Artificial Sequence
  Description of Artificial Sequence: Synthetic oligonucleotide
cucgcgccugugcagagaa

SEQ ID NO: 2134216 - RNA, 19 nt, Artificial Sequence
  Description of Artificial Sequence: Synthetic oligonucleotide
agugcgcuggucaccugcu

SEQ ID NO: 2134217 - RNA, 19 nt, Artificial Sequence
  Description of Artificial Sequence: Synthetic oligonucleotide
gcgggcguggacgagggcc

SEQ ID NO: 2134218 - RNA, 19 nt, Artificial Sequence
  Description of Artificial Sequence: Synthetic oligonucleotide
auccgaugcgugggcgccg

SEQ ID NO: 2134219 - RNA, 19 nt, Artificial Sequence
  Description of Artificial Sequence: Synthetic oligonucleotide
caccugcuuguccaggaaa

SEQ ID NO: 2134220 - RNA, 19 nt, Artificial Sequence
  Description of Artificial Sequence: Synthetic oligonucleotide
acgcuauccgaagcugggu

SEQ ID NO: 2134221 - RNA, 19 nt, Artificial Sequence
  Description of Artificial Sequence: Synthetic oligonucleotide
cuuccagccuucucaggcu

SEQ ID NO: 2134222 - RNA, 19 nt, Artificial Sequence
  Description of Artificial Sequence: Synthetic oligonucleotide
cgaaagcgcguacccaggg

SEQ ID NO: 2134223 - RNA, 19 nt, Artificial Sequence
  Description of Artificial Sequence: Synthetic oligonucleotide
cuggcgcagcguaggccag

SEQ ID NO: 2134224 - RNA, 19 nt, Artificial Sequence
  Description of Artificial Sequence: Synthetic oligonucleotide
cgcuuguccaggacuggcg

SEQ ID NO: 2134225 - RNA, 19 nt, Artificial Sequence
  Description of Artificial Sequence: Synthetic oligonucleotide
ggcgccaucaggagaggac

SEQ ID NO: 2134226 - RNA, 19 nt, Artificial Sequence
  Description of Artificial Sequence: Synthetic oligonucleotide
gucugaggucgcaggugcc

SEQ ID NO: 2134227 - RNA, 19 nt, Artificial Sequence
  Description of Artificial Sequence: Synthetic oligonucleotide
cucagccagcgagcguggg

SEQ ID NO: 2134228 - RNA, 19 nt, Artificial Sequence
  Description of Artificial Sequence: Synthetic oligonucleotide
gugccgucugaggucgcag

SEQ ID NO: 2134229 - RNA, 19 nt, Artificial Sequence
  Description of Artificial Sequence: Synthetic oligonucleotide
gggcggcacgcacugcccg

SEQ ID NO: 2134230 - RNA, 19 nt, Artificial Sequence
  Description of Artificial Sequence: Synthetic oligonucleotide
uggggcgcacccgcuugag

SEQ ID NO: 2134231 - RNA, 19 nt, Artificial Sequence
  Description of Artificial Sequence: Synthetic oligonucleotide
ggcacgcacugcccguucc

SEQ ID NO: 2134232 - RNA, 19 nt, Artificial Sequence
  Description of Artificial Sequence: Synthetic oligonucleotide
gcuauccgaagcugggucu

SEQ ID NO: 2134233 - RNA, 19 nt, Artificial Sequence
  Description of Artificial Sequence: Synthetic oligonucleotide
acgagggccauggcacaca

SEQ ID NO: 2134234 - RNA, 19 nt, Artificial Sequence
  Description of Artificial Sequence: Synthetic oligonucleotide
ggcgcacccgcuugaggug

SEQ ID NO: 2134235 - RNA, 19 nt, Artificial Sequence
  Description of Artificial Sequence: Synthetic oligonucleotide
gugggcgccgccggcacug

SEQ ID NO: 2134236 - RNA, 19 nt, Artificial Sequence
  Description of Artificial Sequence: Synthetic oligonucleotide
cuauccgaagcugggucua

SEQ ID NO: 2134237 - RNA, 19 nt, Artificial Sequence
  Description of Artificial Sequence: Synthetic oligonucleotide
gcaagucgggugccgucug

SEQ ID NO: 2134238 - RNA, 19 nt, Artificial Sequence
  Description of Artificial Sequence: Synthetic oligonucleotide
gucuggccgugcauggaca

SEQ ID NO: 2134239 - RNA, 19 nt, Artificial Sequence
  Description of Artificial Sequence: Synthetic oligonucleotide
ugcgggcguggacgagggc

SEQ ID NO: 2134240 - RNA, 19 nt, Artificial Sequence
  Description of Artificial Sequence: Synthetic oligonucleotide
gggcgcacccgcuugaggu

SEQ ID NO: 2134241 - RNA, 19 nt, Artificial Sequence
  Description of Artificial Sequence: Synthetic oligonucleotide
augccacgaaacaccugga

SEQ ID NO: 2134242 - RNA, 19 nt, Artificial Sequence
  Description of Artificial Sequence: Synthetic oligonucleotide
uggcgcagcguaggccagc

SEQ ID NO: 2134243 - RNA, 19 nt, Artificial Sequence
  Description of Artificial Sequence: Synthetic oligonucleotide
cguacggcaugccaucauc

SEQ ID NO: 2134244 - RNA, 19 nt, Artificial Sequence
  Description of Artificial Sequence: Synthetic oligonucleotide
acgcacugcccguuccaua

SEQ ID NO: 2134245 - RNA, 19 nt, Artificial Sequence
  Description of Artificial Sequence: Synthetic oligonucleotide
gugaaggagcaagucgggu

SEQ ID NO: 2134246 - RNA, 19 nt, Artificial Sequence
  Description of Artificial Sequence: Synthetic oligonucleotide
cacggcccugccccugggc

SEQ ID NO: 2134247 - RNA, 19 nt, Artificial Sequence
  Description of Artificial Sequence: Synthetic oligonucleotide
ggggcgcacccgcuugagg

SEQ ID NO: 2134248 - RNA, 19 nt, Artificial Sequence
  Description of Artificial Sequence: Synthetic oligonucleotide
ccggcacugcgacuggggc

SEQ ID NO: 2134249 - RNA, 19 nt, Artificial Sequence
  Description of Artificial Sequence: Synthetic oligonucleotide
agggcucacgagugaugua

SEQ ID NO: 2134250 - RNA, 19 nt, Artificial Sequence
  Description of Artificial Sequence: Synthetic oligonucleotide
cccgcuugaggugggcugg

SEQ ID NO: 2134251 - RNA, 19 nt, Artificial Sequence
  Description of Artificial Sequence: Synthetic oligonucleotide
cacgcuggaugcgggcgug

SEQ ID NO: 2134252 - RNA, 19 nt, Artificial Sequence
  Description of Artificial Sequence: Synthetic oligonucleotide
acgcuggaugcgggcgugg

SEQ ID NO: 2134253 - RNA, 19 nt, Artificial Sequence
  Description of Artificial Sequence: Synthetic oligonucleotide
acgccccauagaagacacg

SEQ ID NO: 2134254 - RNA, 19 nt, Artificial Sequence
  Description of Artificial Sequence: Synthetic oligonucleotide
cgcuauccgaagcuggguc

SEQ ID NO: 2134255 - RNA, 19 nt, Artificial Sequence
  Description of Artificial Sequence: Synthetic oligonucleotide
gcgcacccgcuugaggugg

SEQ ID NO: 2134256 - RNA, 19 nt, Artificial Sequence
  Description of Artificial Sequence: Synthetic oligonucleotide
gagggccauggcacacaug

SEQ ID NO: 2134257 - RNA, 19 nt, Artificial Sequence
  Description of Artificial Sequence: Synthetic oligonucleotide
cagcacgcuauccgaagcu

SEQ ID NO: 2134258 - RNA, 19 nt, Artificial Sequence
  Description of Artificial Sequence: Synthetic oligonucleotide
ggacgccccauagaagaca

SEQ ID NO: 2134259 - RNA, 19 nt, Artificial Sequence
  Description of Artificial Sequence: Synthetic oligonucleotide
cauggacacgaaagcgcgu

SEQ ID NO: 2134260 - RNA, 19 nt, Artificial Sequence
  Description of Artificial Sequence: Synthetic oligonucleotide
agcgagcgugggcccgcag

SEQ ID NO: 2134261 - RNA, 19 nt, Artificial Sequence
  Description of Artificial Sequence: Synthetic oligonucleotide
ggucgggauccagcuggcg

SEQ ID NO: 2134262 - RNA, 19 nt, Artificial Sequence
  Description of Artificial Sequence: Synthetic oligonucleotide
cacguacggcaugccauca

SEQ ID NO: 2134263 - RNA, 19 nt, Artificial Sequence
  Description of Artificial Sequence: Synthetic oligonucleotide
gcgccugugcagagaagag

SEQ ID NO: 2134264 - RNA, 19 nt, Artificial Sequence
  Description of Artificial Sequence: Synthetic oligonucleotide
ggacgagggccauggcaca

SEQ ID NO: 2134265 - RNA, 19 nt, Artificial Sequence
  Description of Artificial Sequence: Synthetic oligonucleotide
cguuccauauggcucugca

SEQ ID NO: 2134266 - RNA, 19 nt, Artificial Sequence
  Description of Artificial Sequence: Synthetic oligonucleotide
gcgcuuguccaggacuggc

SEQ ID NO: 2134267 - RNA, 19 nt, Artificial Sequence
  Description of Artificial Sequence: Synthetic oligonucleotide
cggaagcagaagugacuag

SEQ ID NO: 2134268 - RNA, 19 nt, Artificial Sequence
  Description of Artificial Sequence: Synthetic oligonucleotide
ccggugcacacguacggca

SEQ ID NO: 2134269 - RNA, 19 nt, Artificial Sequence
  Description of Artificial Sequence: Synthetic oligonucleotide
gccggugcacacguacggc

SEQ ID NO: 2134270 - RNA, 19 nt, Artificial Sequence
  Description of Artificial Sequence: Synthetic oligonucleotide
ggcucacgagugauguaca

SEQ ID NO: 2134271 - RNA, 19 nt, Artificial Sequence
  Description of Artificial Sequence: Synthetic oligonucleotide
ccggaagcagaagugacua

SEQ ID NO: 2134272 - RNA, 19 nt, Artificial Sequence
  Description of Artificial Sequence: Synthetic oligonucleotide
caccgcccgcagacccugg

SEQ ID NO: 2134273 - RNA, 19 nt, Artificial Sequence
  Description of Artificial Sequence: Synthetic oligonucleotide
caguggccagcacgcuauc

SEQ ID NO: 2134274 - RNA, 19 nt, Artificial Sequence
  Description of Artificial Sequence: Synthetic oligonucleotide
cccgauugcugcuccgaca

SEQ ID NO: 2134275 - RNA, 19 nt, Artificial Sequence
  Description of Artificial Sequence: Synthetic oligonucleotide
gcucagccagcgagcgugg

SEQ ID NO: 2134276 - RNA, 19 nt, Artificial Sequence
  Description of Artificial Sequence: Synthetic oligonucleotide
cggguagauggcagacacc

SEQ ID NO: 2134277 - RNA, 19 nt, Artificial Sequence
  Description of Artificial Sequence: Synthetic oligonucleotide
cgggugccgucugaggucg

SEQ ID NO: 2134278 - RNA, 19 nt, Artificial Sequence
  Description of Artificial Sequence: Synthetic oligonucleotide
cuggggcgcacccgcuuga

SEQ ID NO: 2134279 - RNA, 19 nt, Artificial Sequence
  Description of Artificial Sequence: Synthetic oligonucleotide
cagaagugacuaggccuaa

SEQ ID NO: 2134280 - RNA, 19 nt, Artificial Sequence
  Description of Artificial Sequence: Synthetic oligonucleotide
cauagccggugcacacgua

SEQ ID NO: 2134281 - RNA, 19 nt, Artificial Sequence
  Description of Artificial Sequence: Synthetic oligonucleotide
ggccuagggaggagcucag

SEQ ID NO: 2134282 - RNA, 19 nt, Artificial Sequence
  Description of Artificial Sequence: Synthetic oligonucleotide
ccccgauugcugcuccgac

SEQ ID NO: 2134283 - RNA, 19 nt, Artificial Sequence
  Description of Artificial Sequence: Synthetic oligonucleotide
cgaagcugggucuaccacu

SEQ ID NO: 2134284 - RNA, 19 nt, Artificial Sequence
  Description of Artificial Sequence: Synthetic oligonucleotide
cagcacccaccgcccgcag

SEQ ID NO: 2134285 - RNA, 19 nt, Artificial Sequence
  Description of Artificial Sequence: Synthetic oligonucleotide
ccgucugaggucgcaggug

SEQ ID NO: 2134286 - RNA, 19 nt, Artificial Sequence
  Description of Artificial Sequence: Synthetic oligonucleotide
cgauugcugcuccgacagg

SEQ ID NO: 2134287 - RNA, 19 nt, Artificial Sequence
  Description of Artificial Sequence: Synthetic oligonucleotide
gccaccaggucgaugcaua

SEQ ID NO: 2134288 - RNA, 19 nt, Artificial Sequence
  Description of Artificial Sequence: Synthetic oligonucleotide
cagcuugcgcacgcugcca

SEQ ID NO: 2134289 - RNA, 19 nt, Artificial Sequence
  Description of Artificial Sequence: Synthetic oligonucleotide
gcagagcaguccggaagca

SEQ ID NO: 2134290 - RNA, 19 nt, Artificial Sequence
  Description of Artificial Sequence: Synthetic oligonucleotide
cgucuggcgcuuguccagg

SEQ ID NO: 2134291 - RNA, 19 nt, Artificial Sequence
  Description of Artificial Sequence: Synthetic oligonucleotide
gccgugcauggacacgaaa

SEQ ID NO: 2134292 - RNA, 19 nt, Artificial Sequence
  Description of Artificial Sequence: Synthetic oligonucleotide
gacuggggcgcacccgcuu

SEQ ID NO: 2134293 - RNA, 19 nt, Artificial Sequence
  Description of Artificial Sequence: Synthetic oligonucleotide
ccaguggccagcacgcuau

SEQ ID NO: 2134294 - RNA, 19 nt, Artificial Sequence
  Description of Artificial Sequence: Synthetic oligonucleotide
ggcgcagcguaggccagca

SEQ ID NO: 2134295 - RNA, 19 nt, Artificial Sequence
  Description of Artificial Sequence: Synthetic oligonucleotide
ccacaucgcugcagucaug

SEQ ID NO: 2134296 - RNA, 19 nt, Artificial Sequence
  Description of Artificial Sequence: Synthetic oligonucleotide
gggucgggauccagcuggc

SEQ ID NO: 2134297 - RNA, 19 nt, Artificial Sequence
  Description of Artificial Sequence: Synthetic oligonucleotide
ccgcccgcagacccuggcc

SEQ ID NO: 2134298 - RNA, 19 nt, Artificial Sequence
  Description of Artificial Sequence: Synthetic oligonucleotide
cacugcgacuggggcgcac

SEQ ID NO: 2134299 - RNA, 19 nt, Artificial Sequence
  Description of Artificial Sequence: Synthetic oligonucleotide
gccgucugaggucgcaggu

SEQ ID NO: 2134300 - RNA, 19 nt, Artificial Sequence
  Description of Artificial Sequence: Synthetic oligonucleotide
gggacgucuggcgcuuguc

SEQ ID NO: 2134301 - RNA, 19 nt, Artificial Sequence
  Description of Artificial Sequence: Synthetic oligonucleotide
gggccauggcacacaugac

SEQ ID NO: 2134302 - RNA, 19 nt, Artificial Sequence
  Description of Artificial Sequence: Synthetic oligonucleotide
ggagcaagucgggugccgu

SEQ ID NO: 2134303 - RNA, 19 nt, Artificial Sequence
  Description of Artificial Sequence: Synthetic oligonucleotide
ccagggugaaggagcaagu

SEQ ID NO: 2134304 - RNA, 19 nt, Artificial Sequence
  Description of Artificial Sequence: Synthetic oligonucleotide
gcuggcggcacugguccuc

SEQ ID NO: 2134305 - RNA, 19 nt, Artificial Sequence
  Description of Artificial Sequence: Synthetic oligonucleotide
cagccggccuagggaggag

SEQ ID NO: 2134306 - RNA, 19 nt, Artificial Sequence
  Description of Artificial Sequence: Synthetic oligonucleotide
uggcggcacugguccucaa

SEQ ID NO: 2134307 - RNA, 19 nt, Artificial Sequence
  Description of Artificial Sequence: Synthetic oligonucleotide
gccagugcgcuggucaccu

SEQ ID NO: 2134308 - RNA, 19 nt, Artificial Sequence
  Description of Artificial Sequence: Synthetic oligonucleotide
ggccagcacgcuauccgaa

SEQ ID NO: 2134309 - RNA, 19 nt, Artificial Sequence
  Description of Artificial Sequence: Synthetic oligonucleotide
ccagcgagcgugggcccgc

SEQ ID NO: 2134310 - RNA, 19 nt, Artificial Sequence
  Description of Artificial Sequence: Synthetic oligonucleotide
ggcguggacgagggccaug

SEQ ID NO: 2134311 - RNA, 19 nt, Artificial Sequence
  Description of Artificial Sequence: Synthetic oligonucleotide
cagcguaggccagcaccaa

SEQ ID NO: 2134312 - RNA, 19 nt, Artificial Sequence
  Description of Artificial Sequence: Synthetic oligonucleotide
ccguuccauauggcucugc

SEQ ID NO: 2134313 - RNA, 19 nt, Artificial Sequence
  Description of Artificial Sequence: Synthetic oligonucleotide
gggguccacagccggccua

SEQ ID NO: 2134314 - RNA, 19 nt, Artificial Sequence
  Description of Artificial Sequence: Synthetic oligonucleotide
ccgcuugaggugggcuggg

SEQ ID NO: 2134315 - RNA, 19 nt, Artificial Sequence
  Description of Artificial Sequence: Synthetic oligonucleotide
gggcgccaucaggagagga

SEQ ID NO: 2134316 - RNA, 19 nt, Artificial Sequence
  Description of Artificial Sequence: Synthetic oligonucleotide
cgcacccgcuugagguggg

SEQ ID NO: 2134317 - RNA, 19 nt, Artificial Sequence
  Description of Artificial Sequence: Synthetic oligonucleotide
cguacccagggcgccauca

SEQ ID NO: 2134318 - RNA, 19 nt, Artificial Sequence
  Description of Artificial Sequence: Synthetic oligonucleotide
gccccauagaagacacgcu

SEQ ID NO: 2134319 - RNA, 19 nt, Artificial Sequence
  Description of Artificial Sequence: Synthetic oligonucleotide
cguggacgagggccauggc

SEQ ID NO: 2134320 - RNA, 19 nt, Artificial Sequence
  Description of Artificial Sequence: Synthetic oligonucleotide
ggcggcacgcacugcccgu

SEQ ID NO: 2134321 - RNA, 19 nt, Artificial Sequence
  Description of Artificial Sequence: Synthetic oligonucleotide
gcacccgcuugaggugggc

SEQ ID NO: 2134322 - RNA, 19 nt, Artificial Sequence
  Description of Artificial Sequence: Synthetic oligonucleotide
cgcccgcagacccuggcca

SEQ ID NO: 2134323 - RNA, 19 nt, Artificial Sequence
  Description of Artificial Sequence: Synthetic oligonucleotide
ccacggcccugccccuggg

SEQ ID NO: 2134324 - RNA, 19 nt, Artificial Sequence
  Description of Artificial Sequence: Synthetic oligonucleotide
cacccgcuugaggugggcu

SEQ ID NO: 2134325 - RNA, 19 nt, Artificial Sequence
  Description of Artificial Sequence: Synthetic oligonucleotide
gcucgcgccugugcagaga

SEQ ID NO: 2134326 - RNA, 19 nt, Artificial Sequence
  Description of Artificial Sequence: Synthetic oligonucleotide
gcugcccagccagugcgcu

SEQ ID NO: 2134327 - RNA, 19 nt, Artificial Sequence
  Description of Artificial Sequence: Synthetic oligonucleotide
gcacagcagaagauccgau

SEQ ID NO: 2134328 - RNA, 19 nt, Artificial Sequence
  Description of Artificial Sequence: Synthetic oligonucleotide
gugcgcuggucaccugcuu

SEQ ID NO: 2134329 - RNA, 19 nt, Artificial Sequence
  Description of Artificial Sequence: Synthetic oligonucleotide
cgcuugaggugggcugggc

SEQ ID NO: 2134330 - RNA, 19 nt, Artificial Sequence
  Description of Artificial Sequence: Synthetic oligonucleotide
gcgcagcguaggccagcac

SEQ ID NO: 2134331 - RNA, 19 nt, Artificial Sequence
  Description of Artificial Sequence: Synthetic oligonucleotide
ccggccuagggaggagcuc

SEQ ID NO: 2134332 - RNA, 19 nt, Artificial Sequence
  Description of Artificial Sequence: Synthetic oligonucleotide
cguccucguccagcuugcg

SEQ ID NO: 2134333 - RNA, 19 nt, Artificial Sequence
  Description of Artificial Sequence: Synthetic oligonucleotide
gugccacggcccugccccu

SEQ ID NO: 2134334 - RNA, 19 nt, Artificial Sequence
  Description of Artificial Sequence: Synthetic oligonucleotide
ccgucucuugcuccucacu

SEQ ID NO: 2134335 - RNA, 19 nt, Artificial Sequence
  Description of Artificial Sequence: Synthetic oligonucleotide
ccgaugcgugggcgccgcc

SEQ ID NO: 2134336 - RNA, 19 nt, Artificial Sequence
  Description of Artificial Sequence: Synthetic oligonucleotide
gcguacccagggcgccauc

SEQ ID NO: 2134337 - RNA, 19 nt, Artificial Sequence
  Description of Artificial Sequence: Synthetic oligonucleotide
cagcgagcgugggcccgca

SEQ ID NO: 2134338 - RNA, 19 nt, Artificial Sequence
  Description of Artificial Sequence: Synthetic oligonucleotide
gccggccuagggaggagcu

SEQ ID NO: 2134339 - RNA, 19 nt, Artificial Sequence
  Description of Artificial Sequence: Synthetic oligonucleotide
ggccgugcauggacacgaa

SEQ ID NO: 2134340 - RNA, 19 nt, Artificial Sequence
  Description of Artificial Sequence: Synthetic oligonucleotide
gcgcacgcugccagcacgu

SEQ ID NO: 2134341 - RNA, 19 nt, Artificial Sequence
  Description of Artificial Sequence: Synthetic oligonucleotide
gggcuggaagcggguagau

SEQ ID NO: 2134342 - RNA, 19 nt, Artificial Sequence
  Description of Artificial Sequence: Synthetic oligonucleotide
gcgggacgucuggcgcuug

SEQ ID NO: 2134343 - RNA, 19 nt, Artificial Sequence
  Description of Artificial Sequence: Synthetic oligonucleotide
gcuugccauugagccgucu

SEQ ID NO: 2134344 - RNA, 19 nt, Artificial Sequence
  Description of Artificial Sequence: Synthetic oligonucleotide
cgcacgcugccagcacgug

SEQ ID NO: 2134345 - RNA, 19 nt, Artificial Sequence
  Description of Artificial Sequence: Synthetic oligonucleotide
cggcacgcacugcccguuc

SEQ ID NO: 2134346 - RNA, 19 nt, Artificial Sequence
  Description of Artificial Sequence: Synthetic oligonucleotide
cgggauccagcuggcggca

SEQ ID NO: 2134347 - RNA, 19 nt, Artificial Sequence
  Description of Artificial Sequence: Synthetic oligonucleotide
ggcgggacgucuggcgcuu

SEQ ID NO: 2134348 - RNA, 19 nt, Artificial Sequence
  Description of Artificial Sequence: Synthetic oligonucleotide
ccgcagacccuggccagcu

SEQ ID NO: 2134349 - RNA, 19 nt, Artificial Sequence
  Description of Artificial Sequence: Synthetic oligonucleotide
gcggcacgcacugcccguu

SEQ ID NO: 2134350 - RNA, 19 nt, Artificial Sequence
  Description of Artificial Sequence: Synthetic oligonucleotide
gcccugccccugggccacc

SEQ ID NO: 2134351 - RNA, 19 nt, Artificial Sequence
  Description of Artificial Sequence: Synthetic oligonucleotide
gggcguggacgagggccau

SEQ ID NO: 2134352 - RNA, 19 nt, Artificial Sequence
  Description of Artificial Sequence: Synthetic oligonucleotide
cgggacgucuggcgcuugu

SEQ ID NO: 2134353 - RNA, 19 nt, Artificial Sequence
  Description of Artificial Sequence: Synthetic oligonucleotide
cgacuggggcgcacccgcu

SEQ ID NO: 2134354 - RNA, 19 nt, Artificial Sequence
  Description of Artificial Sequence: Synthetic oligonucleotide
cgcguacccagggcgccau

SEQ ID NO: 2134355 - RNA, 19 nt, Artificial Sequence
  Description of Artificial Sequence: Synthetic oligonucleotide
aagguaacugacgagaucc

SEQ ID NO: 2134356 - RNA, 19 nt, Artificial Sequence
  Description of Artificial Sequence: Synthetic oligonucleotide
aaucguuucaucuuugcug

SEQ ID NO: 2134357 - RNA, 19 nt, Artificial Sequence
  Description of Artificial Sequence: Synthetic oligonucleotide
auagacauccaccuuauuc

SEQ ID NO: 2134358 - RNA, 19 nt, Artificial Sequence
  Description of Artificial Sequence: Synthetic oligonucleotide
cuuaucaguaccaacagac

SEQ ID NO: 2134359 - RNA, 19 nt, Artificial Sequence
  Description of Artificial Sequence: Synthetic oligonucleotide
aaugugaaucguuucaucu

SEQ ID NO: 2134360 - RNA, 19 nt, Artificial Sequence
  Description of Artificial Sequence: Synthetic oligonucleotide
gaugaguccaucuucugcg

SEQ ID NO: 2134361 - RNA, 19 nt, Artificial Sequence
  Description of Artificial Sequence: Synthetic oligonucleotide
aucguuucaucuuugcugc

SEQ ID NO: 2134362 - RNA, 19 nt, Artificial Sequence
  Description of Artificial Sequence: Synthetic oligonucleotide
ugucuuaucaguaccaaca

SEQ ID NO: 2134363 - RNA, 19 nt, Artificial Sequence
  Description of Artificial Sequence: Synthetic oligonucleotide
uguucuuaaugucuuauca

SEQ ID NO: 2134364 - RNA, 19 nt, Artificial Sequence
  Description of Artificial Sequence: Synthetic oligonucleotide
uauggugccacugugaugc

SEQ ID NO: 2134365 - RNA, 19 nt, Artificial Sequence
  Description of Artificial Sequence: Synthetic oligonucleotide
aacugaacaugucuuuuac

SEQ ID NO: 2134366 - RNA, 19 nt, Artificial Sequence
  Description of Artificial Sequence: Synthetic oligonucleotide
agacaugucagccuggcac

SEQ ID NO: 2134367 - RNA, 19 nt, Artificial Sequence
  Description of Artificial Sequence: Synthetic oligonucleotide
acaacuauguacuucucuc

SEQ ID NO: 2134368 - RNA, 19 nt, Artificial Sequence
  Description of Artificial Sequence: Synthetic oligonucleotide
uuaaugucuuaucaguacc

SEQ ID NO: 2134369 - RNA, 19 nt, Artificial Sequence
  Description of Artificial Sequence: Synthetic oligonucleotide
auuucuucgcaucccauac

SEQ ID NO: 2134370 - RNA, 19 nt, Artificial Sequence
  Description of Artificial Sequence: Synthetic oligonucleotide
ugucuaaccacacuccaag

SEQ ID NO: 2134371 - RNA, 19 nt, Artificial Sequence
  Description of Artificial Sequence: Synthetic oligonucleotide
uuaagcauccacauuuuga

SEQ ID NO: 2134372 - RNA, 19 nt, Artificial Sequence
  Description of Artificial Sequence: Synthetic oligonucleotide
aaagcgacuguucgaugcc

SEQ ID NO: 2134373 - RNA, 19 nt, Artificial Sequence
  Description of Artificial Sequence: Synthetic oligonucleotide
aacaggaccugcucguagc

SEQ ID NO: 2134374 - RNA, 19 nt, Artificial Sequence
  Description of Artificial Sequence: Synthetic oligonucleotide
uuuccauuugugauggugc

SEQ ID NO: 2134375 - RNA, 19 nt, Artificial Sequence
  Description of Artificial Sequence: Synthetic oligonucleotide
ucuauaagauuccauguuc

SEQ ID NO: 2134376 - RNA, 19 nt, Artificial Sequence
  Description of Artificial Sequence: Synthetic oligonucleotide
uuucaugagcuuuaaauuc

SEQ ID NO: 2134377 - RNA, 19 nt, Artificial Sequence
  Description of Artificial Sequence: Synthetic oligonucleotide
auaaaugugaaucguuuca

SEQ ID NO: 2134378 - RNA, 19 nt, Artificial Sequence
  Description of Artificial Sequence: Synthetic oligonucleotide
caugucauaaaugugaauc

SEQ ID NO: 2134379 - RNA, 19 nt, Artificial Sequence
  Description of Artificial Sequence: Synthetic oligonucleotide
ucuggaauuucaaaacuga

SEQ ID NO: 2134380 - RNA, 19 nt, Artificial Sequence
  Description of Artificial Sequence: Synthetic oligonucleotide
uagaauuucaggcaaguua

SEQ ID NO: 2134381 - RNA, 19 nt, Artificial Sequence
  Description of Artificial Sequence: Synthetic oligonucleotide
uuuaauggacuucaggcau

SEQ ID NO: 2134382 - RNA, 19 nt, Artificial Sequence
  Description of Artificial Sequence: Synthetic oligonucleotide
uguucgaugccacagcuga

SEQ ID NO: 2134383 - RNA, 19 nt, Artificial Sequence
  Description of Artificial Sequence: Synthetic oligonucleotide
ugaugcugugacaagaaca

SEQ ID NO: 2134384 - RNA, 19 nt, Artificial Sequence
  Description of Artificial Sequence: Synthetic oligonucleotide
uuucaggcaaguuauggug

SEQ ID NO: 2134385 - RNA, 19 nt, Artificial Sequence
  Description of Artificial Sequence: Synthetic oligonucleotide
ggaauuucaaaacugaaca

SEQ ID NO: 2134386 - RNA, 19 nt, Artificial Sequence
  Description of Artificial Sequence: Synthetic oligonucleotide
uucaugagcuuuaaauuca

SEQ ID NO: 2134387 - RNA, 19 nt, Artificial Sequence
  Description of Artificial Sequence: Synthetic oligonucleotide
ugugaugcaccagagaccc

SEQ ID NO: 2134388 - RNA, 19 nt, Artificial Sequence
  Description of Artificial Sequence: Synthetic oligonucleotide
acugaacaugucuuuuacc

SEQ ID NO: 2134389 - RNA, 19 nt, Artificial Sequence
  Description of Artificial Sequence: Synthetic oligonucleotide
aacacgauggucuggaauu

SEQ ID NO: 2134390 - RNA, 19 nt, Artificial Sequence
  Description of Artificial Sequence: Synthetic oligonucleotide
gcuuuaauggacuucaggc

SEQ ID NO: 2134391 - RNA, 19 nt, Artificial Sequence
  Description of Artificial Sequence: Synthetic oligonucleotide
ucuuauucugcuuaagcau

SEQ ID NO: 2134392 - RNA, 19 nt, Artificial Sequence
  Description of Artificial Sequence: Synthetic oligonucleotide
aacaacuauguacuucucu

SEQ ID NO: 2134393 - RNA, 19 nt, Artificial Sequence
  Description of Artificial Sequence: Synthetic oligonucleotide
cuucgcaucccauacacag

SEQ ID NO: 2134394 - RNA, 19 nt, Artificial Sequence
  Description of Artificial Sequence: Synthetic oligonucleotide
ugcugugacaagaacacga

SEQ ID NO: 2134395 - RNA, 19 nt, Artificial Sequence
  Description of Artificial Sequence: Synthetic oligonucleotide
gauggugccgcucacggag

SEQ ID NO: 2134396 - RNA, 19 nt, Artificial Sequence
  Description of Artificial Sequence: Synthetic oligonucleotide
aacagacagagccaacuug

SEQ ID NO: 2134397 - RNA, 19 nt, Artificial Sequence
  Description of Artificial Sequence: Synthetic oligonucleotide
gagccaacuugccagacgg

SEQ ID NO: 2134398 - RNA, 19 nt, Artificial Sequence
  Description of Artificial Sequence: Synthetic oligonucleotide
acugacgagauccucuuuc

SEQ ID NO: 2134399 - RNA, 19 nt, Artificial Sequence
  Description of Artificial Sequence: Synthetic oligonucleotide
aacuauguacuucucucca

SEQ ID NO: 2134400 - RNA, 19 nt, Artificial Sequence
  Description of Artificial Sequence: Synthetic oligonucleotide
gaauagaaaggaaagucac

SEQ ID NO: 2134401 - RNA, 19 nt, Artificial Sequence
  Description of Artificial Sequence: Synthetic oligonucleotide
uuauucagcacaacaacua

SEQ ID NO: 2134402 - RNA, 19 nt, Artificial Sequence
  Description of Artificial Sequence: Synthetic oligonucleotide
uuuuacccuguuuucauga

SEQ ID NO: 2134403 - RNA, 19 nt, Artificial Sequence
  Description of Artificial Sequence: Synthetic oligonucleotide
ugcgaacccaaacaggacc

SEQ ID NO: 2134404 - RNA, 19 nt, Artificial Sequence
  Description of Artificial Sequence: Synthetic oligonucleotide
ucaaaacugaacaugucuu

SEQ ID NO: 2134405 - RNA, 19 nt, Artificial Sequence
  Description of Artificial Sequence: Synthetic oligonucleotide
cugauuaagugccugcugc

SEQ ID NO: 2134406 - RNA, 19 nt, Artificial Sequence
  Description of Artificial Sequence: Synthetic oligonucleotide
cauucagcaacgcacgugc

SEQ ID NO: 2134407 - RNA, 19 nt, Artificial Sequence
  Description of Artificial Sequence: Synthetic oligonucleotide
ucuaaccacacuccaagac

SEQ ID NO: 2134408 - RNA, 19 nt, Artificial Sequence
  Description of Artificial Sequence: Synthetic oligonucleotide
ucauaaaugugaaucguuu

SEQ ID NO: 2134409 - RNA, 19 nt, Artificial Sequence
  Description of Artificial Sequence: Synthetic oligonucleotide
uaaugucuuaucaguacca

SEQ ID NO: 2134410 - RNA, 19 nt, Artificial Sequence
  Description of Artificial Sequence: Synthetic oligonucleotide
caucauuugaugcugugac

SEQ ID NO: 2134411 - RNA, 19 nt, Artificial Sequence
  Description of Artificial Sequence: Synthetic oligonucleotide
ccucacacagcaaagaugg

SEQ ID NO: 2134412 - RNA, 19 nt, Artificial Sequence
  Description of Artificial Sequence: Synthetic oligonucleotide
uuugugauggugccgcuca

SEQ ID NO: 2134413 - RNA, 19 nt, Artificial Sequence
  Description of Artificial Sequence: Synthetic oligonucleotide
cagcacaacaacuauguac

SEQ ID NO: 2134414 - RNA, 19 nt, Artificial Sequence
  Description of Artificial Sequence: Synthetic oligonucleotide
aggaccugcucguagcugc

SEQ ID NO: 2134415 - RNA, 19 nt, Artificial Sequence
  Description of Artificial Sequence: Synthetic oligonucleotide
ucuucugcgccacugauua

SEQ ID NO: 2134416 - RNA, 19 nt, Artificial Sequence
  Description of Artificial Sequence: Synthetic oligonucleotide
uucugcuuaagcauccaca

SEQ ID NO: 2134417 - RNA, 19 nt, Artificial Sequence
  Description of Artificial Sequence: Synthetic oligonucleotide
caaagcgacuguucgaugc

SEQ ID NO: 2134418 - RNA, 19 nt, Artificial Sequence
  Description of Artificial Sequence: Synthetic oligonucleotide
cuuauucugcuuaagcauc

SEQ ID NO: 2134419 - RNA, 19 nt, Artificial Sequence
  Description of Artificial Sequence: Synthetic oligonucleotide
acuccaagacaugucagcc

SEQ ID NO: 2134420 - RNA, 19 nt, Artificial Sequence
  Description of Artificial Sequence: Synthetic oligonucleotide
ugcgccacugauuaagugc

SEQ ID NO: 2134421 - RNA, 19 nt, Artificial Sequence
  Description of Artificial Sequence: Synthetic oligonucleotide
uucaggcaaguuauggugc

SEQ ID NO: 2134422 - RNA, 19 nt, Artificial Sequence
  Description of Artificial Sequence: Synthetic oligonucleotide
gaugcugugacaagaacac

SEQ ID NO: 2134423 - RNA, 19 nt, Artificial Sequence
  Description of Artificial Sequence: Synthetic oligonucleotide
auccacauuuugaugaagc

SEQ ID NO: 2134424 - RNA, 19 nt, Artificial Sequence
  Description of Artificial Sequence: Synthetic oligonucleotide
auuucaaaacugaacaugu

SEQ ID NO: 2134425 - RNA, 19 nt, Artificial Sequence
  Description of Artificial Sequence: Synthetic oligonucleotide
agcacaacaacuauguacu

SEQ ID NO: 2134426 - RNA, 19 nt, Artificial Sequence
  Description of Artificial Sequence: Synthetic oligonucleotide
cagacgggugaauagaaag

SEQ ID NO: 2134427 - RNA, 19 nt, Artificial Sequence
  Description of Artificial Sequence: Synthetic oligonucleotide
uucagcaacgcacgugcgg

SEQ ID NO: 2134428 - RNA, 19 nt, Artificial Sequence
  Description of Artificial Sequence: Synthetic oligonucleotide
acuauguacuucucuccac

SEQ ID NO: 2134429 - RNA, 19 nt, Artificial Sequence
  Description of Artificial Sequence: Synthetic oligonucleotide
agacccaugaucgaucuuc

SEQ ID NO: 2134430 - RNA, 19 nt, Artificial Sequence
  Description of Artificial Sequence: Synthetic oligonucleotide
uuaucaguaccaacagaca

SEQ ID NO: 2134431 - RNA, 19 nt, Artificial Sequence
  Description of Artificial Sequence: Synthetic oligonucleotide
auagaaaggaaagucacau

SEQ ID NO: 2134432 - RNA, 19 nt, Artificial Sequence
  Description of Artificial Sequence: Synthetic oligonucleotide
aaccuuacgacuucuucau

SEQ ID NO: 2134433 - RNA, 19 nt, Artificial Sequence
  Description of Artificial Sequence: Synthetic oligonucleotide
ucauuugaugcugugacaa

SEQ ID NO: 2134434 - RNA, 19 nt, Artificial Sequence
  Description of Artificial Sequence: Synthetic oligonucleotide
uucuucgcaucccauacac

SEQ ID NO: 2134435 - RNA, 19 nt, Artificial Sequence
  Description of Artificial Sequence: Synthetic oligonucleotide
ucugcuuaagcauccacau

SEQ ID NO: 2134436 - RNA, 19 nt, Artificial Sequence
  Description of Artificial Sequence: Synthetic oligonucleotide
aaguuauggugccacugug

SEQ ID NO: 2134437 - RNA, 19 nt, Artificial Sequence
  Description of Artificial Sequence: Synthetic oligonucleotide
augucuuaucaguaccaac

SEQ ID NO: 2134438 - RNA, 19 nt, Artificial Sequence
  Description of Artificial Sequence: Synthetic oligonucleotide
uucuauaagauuccauguu

SEQ ID NO: 2134439 - RNA, 19 nt, Artificial Sequence
  Description of Artificial Sequence: Synthetic oligonucleotide
gugaauagaaaggaaaguc

SEQ ID NO: 2134440 - RNA, 19 nt, Artificial Sequence
  Description of Artificial Sequence: Synthetic oligonucleotide
cauaaaugugaaucguuuc

SEQ ID NO: 2134441 - RNA, 19 nt, Artificial Sequence
  Description of Artificial Sequence: Synthetic oligonucleotide
ggaccauuccacuaugugg

SEQ ID NO: 2134442 - RNA, 19 nt, Artificial Sequence
  Description of Artificial Sequence: Synthetic oligonucleotide
aaacaggaccugcucguag

SEQ ID NO: 2134443 - RNA, 19 nt, Artificial Sequence
  Description of Artificial Sequence: Synthetic oligonucleotide
auggugagugaagucagcc

SEQ ID NO: 2134444 - RNA, 19 nt, Artificial Sequence
  Description of Artificial Sequence: Synthetic oligonucleotide
uucaccucacacagcaaag

SEQ ID NO: 2134445 - RNA, 19 nt, Artificial Sequence
  Description of Artificial Sequence: Synthetic oligonucleotide
uggucuggaauuucaaaac

SEQ ID NO: 2134446 - RNA, 19 nt, Artificial Sequence
  Description of Artificial Sequence: Synthetic oligonucleotide
uggacuucaggcauuccca

SEQ ID NO: 2134447 - RNA, 19 nt, Artificial Sequence
  Description of Artificial Sequence: Synthetic oligonucleotide
auggucuggaauuucaaaa

SEQ ID NO: 2134448 - RNA, 19 nt, Artificial Sequence
  Description of Artificial Sequence: Synthetic oligonucleotide
ucuuaucaguaccaacaga

SEQ ID NO: 2134449 - RNA, 19 nt, Artificial Sequence
  Description of Artificial Sequence: Synthetic oligonucleotide
uauucagcacaacaacuau

SEQ ID NO: 2134450 - RNA, 19 nt, Artificial Sequence
  Description of Artificial Sequence: Synthetic oligonucleotide
caacuauguacuucucucc

SEQ ID NO: 2134451 - RNA, 19 nt, Artificial Sequence
  Description of Artificial Sequence: Synthetic oligonucleotide
ugucucuuugucuaaccac

SEQ ID NO: 2134452 - RNA, 19 nt, Artificial Sequence
  Description of Artificial Sequence: Synthetic oligonucleotide
cuuuaauggacuucaggca

SEQ ID NO: 2134453 - RNA, 19 nt, Artificial Sequence
  Description of Artificial Sequence: Synthetic oligonucleotide
gucacauguccuuugugag

SEQ ID NO: 2134454 - RNA, 19 nt, Artificial Sequence
  Description of Artificial Sequence: Synthetic oligonucleotide
ugauuaagugccugcugcc

SEQ ID NO: 2134455 - RNA, 19 nt, Artificial Sequence
  Description of Artificial Sequence: Synthetic oligonucleotide
uuacccuguuuucaugagc

SEQ ID NO: 2134456 - RNA, 19 nt, Artificial Sequence
  Description of Artificial Sequence: Synthetic oligonucleotide
uuuacccuguuuucaugag

SEQ ID NO: 2134457 - RNA, 19 nt, Artificial Sequence
  Description of Artificial Sequence: Synthetic oligonucleotide
gacaugucagccuggcacc

SEQ ID NO: 2134458 - RNA, 19 nt, Artificial Sequence
  Description of Artificial Sequence: Synthetic oligonucleotide
ccuucuauaagauuccaug

SEQ ID NO: 2134459 - RNA, 19 nt, Artificial Sequence
  Description of Artificial Sequence: Synthetic oligonucleotide
aagaacacgauggucugga

SEQ ID NO: 2134460 - RNA, 19 nt, Artificial Sequence
  Description of Artificial Sequence: Synthetic oligonucleotide
augaguccaucuucugcgc

SEQ ID NO: 2134461 - RNA, 19 nt, Artificial Sequence
  Description of Artificial Sequence: Synthetic oligonucleotide
uuccauuugugauggugcc

SEQ ID NO: 2134462 - RNA, 19 nt, Artificial Sequence
  Description of Artificial Sequence: Synthetic oligonucleotide
ucuuuuacccuguuuucau

SEQ ID NO: 2134463 - RNA, 19 nt, Artificial Sequence
  Description of Artificial Sequence: Synthetic oligonucleotide
uaugaaagcugaccuuccu

SEQ ID NO: 2134464 - RNA, 19 nt, Artificial Sequence
  Description of Artificial Sequence: Synthetic oligonucleotide
ucaugagcuuuaaauucac

SEQ ID NO: 2134465 - RNA, 19 nt, Artificial Sequence
  Description of Artificial Sequence: Synthetic oligonucleotide
gacaagaacacgauggucu

SEQ ID NO: 2134466 - RNA, 19 nt, Artificial Sequence
  Description of Artificial Sequence: Synthetic oligonucleotide
acaagaacacgauggucug

SEQ ID NO: 2134467 - RNA, 19 nt, Artificial Sequence
  Description of Artificial Sequence: Synthetic oligonucleotide
uucugcgccacugauuaag

SEQ ID NO: 2134468 - RNA, 19 nt, Artificial Sequence
  Description of Artificial Sequence: Synthetic oligonucleotide
cagcugauagacauccacc

SEQ ID NO: 2134469 - RNA, 19 nt, Artificial Sequence
  Description of Artificial Sequence: Synthetic oligonucleotide
gugauggugccgcucacgg

SEQ ID NO: 2134470 - RNA, 19 nt, Artificial Sequence
  Description of Artificial Sequence: Synthetic oligonucleotide
auuugaugcugugacaaga

SEQ ID NO: 2134471 - RNA, 19 nt, Artificial Sequence
  Description of Artificial Sequence: Synthetic oligonucleotide
uaaaugugaaucguuucau

SEQ ID NO: 2134472 - RNA, 19 nt, Artificial Sequence
  Description of Artificial Sequence: Synthetic oligonucleotide
ucagcaacgcacgugcggc

SEQ ID NO: 2134473 - RNA, 19 nt, Artificial Sequence
  Description of Artificial Sequence: Synthetic oligonucleotide
ucgcaucccauacacagau

SEQ ID NO: 2134474 - RNA, 19 nt, Artificial Sequence
  Description of Artificial Sequence: Synthetic oligonucleotide
acuucaggcauucccauuu

SEQ ID NO: 2134475 - RNA, 19 nt, Artificial Sequence
  Description of Artificial Sequence: Synthetic oligonucleotide
agagccaacuugccagacg

SEQ ID NO: 2134476 - RNA, 19 nt, Artificial Sequence
  Description of Artificial Sequence: Synthetic oligonucleotide
ugauagacauccaccuuau

SEQ ID NO: 2134477 - RNA, 19 nt, Artificial Sequence
  Description of Artificial Sequence: Synthetic oligonucleotide
acugcgaacccaaacagga

SEQ ID NO: 2134478 - RNA, 19 nt, Artificial Sequence
  Description of Artificial Sequence: Synthetic oligonucleotide
uacaaagcgacuguucgau

SEQ ID NO: 2134479 - RNA, 19 nt, Artificial Sequence
  Description of Artificial Sequence: Synthetic oligonucleotide
cugugaugcaccagagacc

SEQ ID NO: 2134480 - RNA, 19 nt, Artificial Sequence
  Description of Artificial Sequence: Synthetic oligonucleotide
aggcacaccagugaaccac

SEQ ID NO: 2134481 - RNA, 19 nt, Artificial Sequence
  Description of Artificial Sequence: Synthetic oligonucleotide
uccaccuuauucagcacaa

SEQ ID NO: 2134482 - RNA, 19 nt, Artificial Sequence
  Description of Artificial Sequence: Synthetic oligonucleotide
uugaugcugugacaagaac

SEQ ID NO: 2134483 - RNA, 19 nt, Artificial Sequence
  Description of Artificial Sequence: Synthetic oligonucleotide
ugucuuuuacccuguuuuc

SEQ ID NO: 2134484 - RNA, 19 nt, Artificial Sequence
  Description of Artificial Sequence: Synthetic oligonucleotide
ucucuuugucuaaccacac

SEQ ID NO: 2134485 - RNA, 19 nt, Artificial Sequence
  Description of Artificial Sequence: Synthetic oligonucleotide
cucuguugcuggaggaagg

SEQ ID NO: 2134486 - RNA, 19 nt, Artificial Sequence
  Description of Artificial Sequence: Synthetic oligonucleotide
uuucuucgcaucccauaca

SEQ ID NO: 2134487 - RNA, 19 nt, Artificial Sequence
  Description of Artificial Sequence: Synthetic oligonucleotide
uccauuugugauggugccg

SEQ ID NO: 2134488 - RNA, 19 nt, Artificial Sequence
  Description of Artificial Sequence: Synthetic oligonucleotide
guagcugccagcgaccagc

SEQ ID NO: 2134489 - RNA, 19 nt, Artificial Sequence
  Description of Artificial Sequence: Synthetic oligonucleotide
acuaugugggcauuuuguu

SEQ ID NO: 2134490 - RNA, 19 nt, Artificial Sequence
  Description of Artificial Sequence: Synthetic oligonucleotide
uugccagacgggugaauag

SEQ ID NO: 2134491 - RNA, 19 nt, Artificial Sequence
  Description of Artificial Sequence: Synthetic oligonucleotide
uauguacuucucuccacuc

SEQ ID NO: 2134492 - RNA, 19 nt, Artificial Sequence
  Description of Artificial Sequence: Synthetic oligonucleotide
cuuuuacccuguuuucaug

SEQ ID NO: 2134493 - RNA, 19 nt, Artificial Sequence
  Description of Artificial Sequence: Synthetic oligonucleotide
agagacccaugaucgaucu

SEQ ID NO: 2134494 - RNA, 19 nt, Artificial Sequence
  Description of Artificial Sequence: Synthetic oligonucleotide
caggcauucccauuucuuc

SEQ ID NO: 2134495 - RNA, 19 nt, Artificial Sequence
  Description of Artificial Sequence: Synthetic oligonucleotide
gacuguucgaugccacagc

SEQ ID NO: 2134496 - RNA, 19 nt, Artificial Sequence
  Description of Artificial Sequence: Synthetic oligonucleotide
cacugcgaacccaaacagg

SEQ ID NO: 2134497 - RNA, 19 nt, Artificial Sequence
  Description of Artificial Sequence: Synthetic oligonucleotide
gacgggugaauagaaagga

SEQ ID NO: 2134498 - RNA, 19 nt, Artificial Sequence
  Description of Artificial Sequence: Synthetic oligonucleotide
cauuugaugcugugacaag

SEQ ID NO: 2134499 - RNA, 19 nt, Artificial Sequence
  Description of Artificial Sequence: Synthetic oligonucleotide
ugugauggugccgcucacg

SEQ ID NO: 2134500 - RNA, 19 nt, Artificial Sequence
  Description of Artificial Sequence: Synthetic oligonucleotide
auuaagugccugcugccau

SEQ ID NO: 2134501 - RNA, 19 nt, Artificial Sequence
  Description of Artificial Sequence: Synthetic oligonucleotide
gggugaauagaaaggaaag

SEQ ID NO: 2134502 - RNA, 19 nt, Artificial Sequence
  Description of Artificial Sequence: Synthetic oligonucleotide
aucccauacacagaugagu

SEQ ID NO: 2134503 - RNA, 19 nt, Artificial Sequence
  Description of Artificial Sequence: Synthetic oligonucleotide
uagaagcccgaggagagga

SEQ ID NO: 2134504 - RNA, 19 nt, Artificial Sequence
  Description of Artificial Sequence: Synthetic oligonucleotide
gaagcccgaggagaggagg

SEQ ID NO: 2134505 - RNA, 19 nt, Artificial Sequence
  Description of Artificial Sequence: Synthetic oligonucleotide
uuaauggacuucaggcauu

SEQ ID NO: 2134506 - RNA, 19 nt, Artificial Sequence
  Description of Artificial Sequence: Synthetic oligonucleotide
ugcugccauagaauuucag

SEQ ID NO: 2134507 - RNA, 19 nt, Artificial Sequence
  Description of Artificial Sequence: Synthetic oligonucleotide
uucgcaucccauacacaga

SEQ ID NO: 2134508 - RNA, 19 nt, Artificial Sequence
  Description of Artificial Sequence: Synthetic oligonucleotide
uccuucuauaagauuccau

SEQ ID NO: 2134509 - RNA, 19 nt, Artificial Sequence
  Description of Artificial Sequence: Synthetic oligonucleotide
uugcggugcacugcgaacc

SEQ ID NO: 2134510 - RNA, 19 nt, Artificial Sequence
  Description of Artificial Sequence: Synthetic oligonucleotide
uuauggugccacugugaug

SEQ ID NO: 2134511 - RNA, 19 nt, Artificial Sequence
  Description of Artificial Sequence: Synthetic oligonucleotide
cuucuauaagauuccaugu

SEQ ID NO: 2134512 - RNA, 19 nt, Artificial Sequence
  Description of Artificial Sequence: Synthetic oligonucleotide
ucccggucgccacucuucg

SEQ ID NO: 2134513 - RNA, 19 nt, Artificial Sequence
  Description of Artificial Sequence: Synthetic oligonucleotide
aagauuccauguucuuaau

SEQ ID NO: 2134514 - RNA, 19 nt, Artificial Sequence
  Description of Artificial Sequence: Synthetic oligonucleotide
cuauaagauuccauguucu

SEQ ID NO: 2134515 - RNA, 19 nt, Artificial Sequence
  Description of Artificial Sequence: Synthetic oligonucleotide
cugauagacauccaccuua

SEQ ID NO: 2134516 - RNA, 19 nt, Artificial Sequence
  Description of Artificial Sequence: Synthetic oligonucleotide
gucucuuugucuaaccaca

SEQ ID NO: 2134517 - RNA, 19 nt, Artificial Sequence
  Description of Artificial Sequence: Synthetic oligonucleotide
aagacaugucagccuggca

SEQ ID NO: 2134518 - RNA, 19 nt, Artificial Sequence
  Description of Artificial Sequence: Synthetic oligonucleotide
accuuauucagcacaacaa

SEQ ID NO: 2134519 - RNA, 19 nt, Artificial Sequence
  Description of Artificial Sequence: Synthetic oligonucleotide
ucugcgccacugauuaagu

SEQ ID NO: 2134520 - RNA, 19 nt, Artificial Sequence
  Description of Artificial Sequence: Synthetic oligonucleotide
caccuuauucagcacaaca

SEQ ID NO: 2134521 - RNA, 19 nt, Artificial Sequence
  Description of Artificial Sequence: Synthetic oligonucleotide
cacaacaacuauguacuuc

SEQ ID NO: 2134522 - RNA, 19 nt, Artificial Sequence
  Description of Artificial Sequence: Synthetic oligonucleotide
ucaccucacacagcaaaga

SEQ ID NO: 2134523 - RNA, 19 nt, Artificial Sequence
  Description of Artificial Sequence: Synthetic oligonucleotide
gauuaagugccugcugcca

SEQ ID NO: 2134524 - RNA, 19 nt, Artificial Sequence
  Description of Artificial Sequence: Synthetic oligonucleotide
ucucucuuauucugcuuaa

SEQ ID NO: 2134525 - RNA, 19 nt, Artificial Sequence
  Description of Artificial Sequence: Synthetic oligonucleotide
gcaucccauacacagauga

SEQ ID NO: 2134526 - RNA, 19 nt, Artificial Sequence
  Description of Artificial Sequence: Synthetic oligonucleotide
ucuucgcaucccauacaca

SEQ ID NO: 2134527 - RNA, 19 nt, Artificial Sequence
  Description of Artificial Sequence: Synthetic oligonucleotide
agcuccauucagcaacgca

SEQ ID NO: 2134528 - RNA, 19 nt, Artificial Sequence
  Description of Artificial Sequence: Synthetic oligonucleotide
ucggggaccauuccacuau

SEQ ID NO: 2134529 - RNA, 19 nt, Artificial Sequence
  Description of Artificial Sequence: Synthetic oligonucleotide
uaacugacgagauccucuu

SEQ ID NO: 2134530 - RNA, 19 nt, Artificial Sequence
  Description of Artificial Sequence: Synthetic oligonucleotide
cauggugagugaagucagc

SEQ ID NO: 2134531 - RNA, 19 nt, Artificial Sequence
  Description of Artificial Sequence: Synthetic oligonucleotide
gauccucuuuccauuugug

SEQ ID NO: 2134532 - RNA, 19 nt, Artificial Sequence
  Description of Artificial Sequence: Synthetic oligonucleotide
caagacaugucagccuggc

SEQ ID NO: 2134533 - RNA, 19 nt, Artificial Sequence
  Description of Artificial Sequence: Synthetic oligonucleotide
cacucggggaccauuccac

SEQ ID NO: 2134534 - RNA, 19 nt, Artificial Sequence
  Description of Artificial Sequence: Synthetic oligonucleotide
gaauuucaggcaaguuaug

SEQ ID NO: 2134535 - RNA, 19 nt, Artificial Sequence
  Description of Artificial Sequence: Synthetic oligonucleotide
agcaacgcacgugcggcgc

SEQ ID NO: 2134536 - RNA, 19 nt, Artificial Sequence
  Description of Artificial Sequence: Synthetic oligonucleotide
uccauucagcaacgcacgu

SEQ ID NO: 2134537 - RNA, 19 nt, Artificial Sequence
  Description of Artificial Sequence: Synthetic oligonucleotide
cugugacaagaacacgaug

SEQ ID NO: 2134538 - RNA, 19 nt, Artificial Sequence
  Description of Artificial Sequence: Synthetic oligonucleotide
ugugagcuuuaauggacuu

SEQ ID NO: 2134539 - RNA, 19 nt, Artificial Sequence
  Description of Artificial Sequence: Synthetic oligonucleotide
ucgaugccacagcugacaa

SEQ ID NO: 2134540 - RNA, 19 nt, Artificial Sequence
  Description of Artificial Sequence: Synthetic oligonucleotide
acaaagcgacuguucgaug

SEQ ID NO: 2134541 - RNA, 19 nt, Artificial Sequence
  Description of Artificial Sequence: Synthetic oligonucleotide
cucguagcugccagcgacc

SEQ ID NO: 2134542 - RNA, 19 nt, Artificial Sequence
  Description of Artificial Sequence: Synthetic oligonucleotide
uaauggacuucaggcauuc

SEQ ID NO: 2134543 - RNA, 19 nt, Artificial Sequence
  Description of Artificial Sequence: Synthetic oligonucleotide
cagugaaccacagucaaaa

SEQ ID NO: 2134544 - RNA, 19 nt, Artificial Sequence
  Description of Artificial Sequence: Synthetic oligonucleotide
agagucagaaaggaaggua

SEQ ID NO: 2134545 - RNA, 19 nt, Artificial Sequence
  Description of Artificial Sequence: Synthetic oligonucleotide
acucuucgcgggcuugcgg

SEQ ID NO: 2134546 - RNA, 19 nt, Artificial Sequence
  Description of Artificial Sequence: Synthetic oligonucleotide
cuugcggugcacugcgaac

SEQ ID NO: 2134547 - RNA, 19 nt, Artificial Sequence
  Description of Artificial Sequence: Synthetic oligonucleotide
acgagauccucuuuccauu

SEQ ID NO: 2134548 - RNA, 19 nt, Artificial Sequence
  Description of Artificial Sequence: Synthetic oligonucleotide
accucacacagcaaagaug

SEQ ID NO: 2134549 - RNA, 19 nt, Artificial Sequence
  Description of Artificial Sequence: Synthetic oligonucleotide
accuuacgacuucuucauc

SEQ ID NO: 2134550 - RNA, 19 nt, Artificial Sequence
  Description of Artificial Sequence: Synthetic oligonucleotide
aguuauggugccacuguga

SEQ ID NO: 2134551 - RNA, 19 nt, Artificial Sequence
  Description of Artificial Sequence: Synthetic oligonucleotide
cugcucguagcugccagcg

SEQ ID NO: 2134552 - RNA, 19 nt, Artificial Sequence
  Description of Artificial Sequence: Synthetic oligonucleotide
gcuccauucagcaacgcac

SEQ ID NO: 2134553 - RNA, 19 nt, Artificial Sequence
  Description of Artificial Sequence: Synthetic oligonucleotide
ugccagacgggugaauaga

SEQ ID NO: 2134554 - RNA, 19 nt, Artificial Sequence
  Description of Artificial Sequence: Synthetic oligonucleotide
aaggaggcggugugggcau

SEQ ID NO: 2134555 - RNA, 19 nt, Artificial Sequence
  Description of Artificial Sequence: Synthetic oligonucleotide
uauucugcuuaagcaucca

SEQ ID NO: 2134556 - RNA, 19 nt, Artificial Sequence
  Description of Artificial Sequence: Synthetic oligonucleotide
cagagacccaugaucgauc

SEQ ID NO: 2134557 - RNA, 19 nt, Artificial Sequence
  Description of Artificial Sequence: Synthetic oligonucleotide
acagagccaacuugccaga

SEQ ID NO: 2134558 - RNA, 19 nt, Artificial Sequence
  Description of Artificial Sequence: Synthetic oligonucleotide
gcacugcgaacccaaacag

SEQ ID NO: 2134559 - RNA, 19 nt, Artificial Sequence
  Description of Artificial Sequence: Synthetic oligonucleotide
ccagcgaccagcuccauuc

SEQ ID NO: 2134560 - RNA, 19 nt, Artificial Sequence
  Description of Artificial Sequence: Synthetic oligonucleotide
cuacaaagcgacuguucga

SEQ ID NO: 2134561 - RNA, 19 nt, Artificial Sequence
  Description of Artificial Sequence: Synthetic oligonucleotide
ggcauucccauuucuucgc

SEQ ID NO: 2134562 - RNA, 19 nt, Artificial Sequence
  Description of Artificial Sequence: Synthetic oligonucleotide
gcacgugcggcgcagggcg

SEQ ID NO: 2134563 - RNA, 19 nt, Artificial Sequence
  Description of Artificial Sequence: Synthetic oligonucleotide
guccaugucucccggucgc

SEQ ID NO: 2134564 - RNA, 19 nt, Artificial Sequence
  Description of Artificial Sequence: Synthetic oligonucleotide
ucccauuucuucgcauccc

SEQ ID NO: 2134565 - RNA, 19 nt, Artificial Sequence
  Description of Artificial Sequence: Synthetic oligonucleotide
gaagucagccacagggguc

SEQ ID NO: 2134566 - RNA, 19 nt, Artificial Sequence
  Description of Artificial Sequence: Synthetic oligonucleotide
ggcauggugagugaaguca

SEQ ID NO: 2134567 - RNA, 19 nt, Artificial Sequence
  Description of Artificial Sequence: Synthetic oligonucleotide
uguccagcugauagacauc

SEQ ID NO: 2134568 - RNA, 19 nt, Artificial Sequence
  Description of Artificial Sequence: Synthetic oligonucleotide
guuauggugccacugugau

SEQ ID NO: 2134569 - RNA, 19 nt, Artificial Sequence
  Description of Artificial Sequence: Synthetic oligonucleotide
gguccaugucucccggucg

SEQ ID NO: 2134570 - RNA, 19 nt, Artificial Sequence
  Description of Artificial Sequence: Synthetic oligonucleotide
gacgagauccucuuuccau

SEQ ID NO: 2134571 - RNA, 19 nt, Artificial Sequence
  Description of Artificial Sequence: Synthetic oligonucleotide
ggcgagccggcguagaagc

SEQ ID NO: 2134572 - RNA, 19 nt, Artificial Sequence
  Description of Artificial Sequence: Synthetic oligonucleotide
cugucucuuugucuaacca

SEQ ID NO: 2134573 - RNA, 19 nt, Artificial Sequence
  Description of Artificial Sequence: Synthetic oligonucleotide
gcaccagagacccaugauc

SEQ ID NO: 2134574 - RNA, 19 nt, Artificial Sequence
  Description of Artificial Sequence: Synthetic oligonucleotide
cagaugaguccaucuucug

SEQ ID NO: 2134575 - RNA, 19 nt, Artificial Sequence
  Description of Artificial Sequence: Synthetic oligonucleotide
gagccggcguagaagcccg

SEQ ID NO: 2134576 - RNA, 19 nt, Artificial Sequence
  Description of Artificial Sequence: Synthetic oligonucleotide
guagaagcccgaggagagg

SEQ ID NO: 2134577 - RNA, 19 nt, Artificial Sequence
  Description of Artificial Sequence: Synthetic oligonucleotide
auagaauuucaggcaaguu

SEQ ID NO: 2134578 - RNA, 19 nt, Artificial Sequence
  Description of Artificial Sequence: Synthetic oligonucleotide
cuguucgaugccacagcug

SEQ ID NO: 2134579 - RNA, 19 nt, Artificial Sequence
  Description of Artificial Sequence: Synthetic oligonucleotide
ccagcugauagacauccac

SEQ ID NO: 2134580 - RNA, 19 nt, Artificial Sequence
  Description of Artificial Sequence: Synthetic oligonucleotide
agcgacuguucgaugccac

SEQ ID NO: 2134581 - RNA, 19 nt, Artificial Sequence
  Description of Artificial Sequence: Synthetic oligonucleotide
uguccuuugugagcuuuaa

SEQ ID NO: 2134582 - RNA, 19 nt, Artificial Sequence
  Description of Artificial Sequence: Synthetic oligonucleotide
aagcgacuguucgaugcca

SEQ ID NO: 2134583 - RNA, 19 nt, Artificial Sequence
  Description of Artificial Sequence: Synthetic oligonucleotide
cuauguacuucucuccacu

SEQ ID NO: 2134584 - RNA, 19 nt, Artificial Sequence
  Description of Artificial Sequence: Synthetic oligonucleotide
ucuucgcgggcuugcggug

SEQ ID NO: 2134585 - RNA, 19 nt, Artificial Sequence
  Description of Artificial Sequence: Synthetic oligonucleotide
gugccgcucacggaggccg

SEQ ID NO: 2134586 - RNA, 19 nt, Artificial Sequence
  Description of Artificial Sequence: Synthetic oligonucleotide
caugucucccggucgccac

SEQ ID NO: 2134587 - RNA, 19 nt, Artificial Sequence
  Description of Artificial Sequence: Synthetic oligonucleotide
ucguuucaucuuugcugcc

SEQ ID NO: 2134588 - RNA, 19 nt, Artificial Sequence
  Description of Artificial Sequence: Synthetic oligonucleotide
cucucuuauucugcuuaag

SEQ ID NO: 2134589 - RNA, 19 nt, Artificial Sequence
  Description of Artificial Sequence: Synthetic oligonucleotide
cugcgaacccaaacaggac

SEQ ID NO: 2134590 - RNA, 19 nt, Artificial Sequence
  Description of Artificial Sequence: Synthetic oligonucleotide
acggaggccguguccagcu

SEQ ID NO: 2134591 - RNA, 19 nt, Artificial Sequence
  Description of Artificial Sequence: Synthetic oligonucleotide
ugauggugccgcucacgga

SEQ ID NO: 2134592 - RNA, 19 nt, Artificial Sequence
  Description of Artificial Sequence: Synthetic oligonucleotide
cacagaggcacaccaguga

SEQ ID NO: 2134593 - RNA, 19 nt, Artificial Sequence
  Description of Artificial Sequence: Synthetic oligonucleotide
uccagcugauagacaucca

SEQ ID NO: 2134594 - RNA, 19 nt, Artificial Sequence
  Description of Artificial Sequence: Synthetic oligonucleotide
gaacacgauggucuggaau

SEQ ID NO: 2134595 - RNA, 19 nt, Artificial Sequence
  Description of Artificial Sequence: Synthetic oligonucleotide
gugaaucguuucaucuuug

SEQ ID NO: 2134596 - RNA, 19 nt, Artificial Sequence
  Description of Artificial Sequence: Synthetic oligonucleotide
gucuaaccacacuccaaga

SEQ ID NO: 2134597 - RNA, 19 nt, Artificial Sequence
  Description of Artificial Sequence: Synthetic oligonucleotide
aacugacgagauccucuuu

SEQ ID NO: 2134598 - RNA, 19 nt, Artificial Sequence
  Description of Artificial Sequence: Synthetic oligonucleotide
accagagacccaugaucga

SEQ ID NO: 2134599 - RNA, 19 nt, Artificial Sequence
  Description of Artificial Sequence: Synthetic oligonucleotide
gugacaagaacacgauggu

SEQ ID NO: 2134600 - RNA, 19 nt, Artificial Sequence
  Description of Artificial Sequence: Synthetic oligonucleotide
caacaacuauguacuucuc

SEQ ID NO: 2134601 - RNA, 19 nt, Artificial Sequence
  Description of Artificial Sequence: Synthetic oligonucleotide
gugcacugcgaacccaaac

SEQ ID NO: 2134602 - RNA, 19 nt, Artificial Sequence
  Description of Artificial Sequence: Synthetic oligonucleotide
gcaaguuauggugccacug

SEQ ID NO: 2134603 - RNA, 19 nt, Artificial Sequence
  Description of Artificial Sequence: Synthetic oligonucleotide
cuuugcugccugugacuac

SEQ ID NO: 2134604 - RNA, 19 nt, Artificial Sequence
  Description of Artificial Sequence: Synthetic oligonucleotide
auucagcaacgcacgugcg

SEQ ID NO: 2134605 - RNA, 19 nt, Artificial Sequence
  Description of Artificial Sequence: Synthetic oligonucleotide
gagcuuuaauggacuucag

SEQ ID NO: 2134606 - RNA, 19 nt, Artificial Sequence
  Description of Artificial Sequence: Synthetic oligonucleotide
gcucguagcugccagcgac

SEQ ID NO: 2134607 - RNA, 19 nt, Artificial Sequence
  Description of Artificial Sequence: Synthetic oligonucleotide
cguagaagcccgaggagag

SEQ ID NO: 2134608 - RNA, 19 nt, Artificial Sequence
  Description of Artificial Sequence: Synthetic oligonucleotide
acucggggaccauuccacu

SEQ ID NO: 2134609 - RNA, 19 nt, Artificial Sequence
  Description of Artificial Sequence: Synthetic oligonucleotide
uggugccgcucacggaggc

SEQ ID NO: 2134610 - RNA, 19 nt, Artificial Sequence
  Description of Artificial Sequence: Synthetic oligonucleotide
gggcuugcggugcacugcg

SEQ ID NO: 2134611 - RNA, 19 nt, Artificial Sequence
  Description of Artificial Sequence: Synthetic oligonucleotide
cccauacacagaugagucc

SEQ ID NO: 2134612 - RNA, 19 nt, Artificial Sequence
  Description of Artificial Sequence: Synthetic oligonucleotide
caaguuauggugccacugu

SEQ ID NO: 2134613 - RNA, 19 nt, Artificial Sequence
  Description of Artificial Sequence: Synthetic oligonucleotide
uugugauggugccgcucac

SEQ ID NO: 2134614 - RNA, 19 nt, Artificial Sequence
  Description of Artificial Sequence: Synthetic oligonucleotide
ucguagcugccagcgacca

SEQ ID NO: 2134615 - RNA, 19 nt, Artificial Sequence
  Description of Artificial Sequence: Synthetic oligonucleotide
gugagcuuuaauggacuuc

SEQ ID NO: 2134616 - RNA, 19 nt, Artificial Sequence
  Description of Artificial Sequence: Synthetic oligonucleotide
cugcgccacugauuaagug

SEQ ID NO: 2134617 - RNA, 19 nt, Artificial Sequence
  Description of Artificial Sequence: Synthetic oligonucleotide
ugcggcgcagggcgagccg

SEQ ID NO: 2134618 - RNA, 19 nt, Artificial Sequence
  Description of Artificial Sequence: Synthetic oligonucleotide
cagcaacgcacgugcggcg

SEQ ID NO: 2134619 - RNA, 19 nt, Artificial Sequence
  Description of Artificial Sequence: Synthetic oligonucleotide
accaacagacagagccaac

SEQ ID NO: 2134620 - RNA, 19 nt, Artificial Sequence
  Description of Artificial Sequence: Synthetic oligonucleotide
cauagaauuucaggcaagu

SEQ ID NO: 2134621 - RNA, 19 nt, Artificial Sequence
  Description of Artificial Sequence: Synthetic oligonucleotide
ugcucguagcugccagcga

SEQ ID NO: 2134622 - RNA, 19 nt, Artificial Sequence
  Description of Artificial Sequence: Synthetic oligonucleotide
gaugcaccagagacccaug

SEQ ID NO: 2134623 - RNA, 19 nt, Artificial Sequence
  Description of Artificial Sequence: Synthetic oligonucleotide
gcgccacugauuaagugcc

SEQ ID NO: 2134624 - RNA, 19 nt, Artificial Sequence
  Description of Artificial Sequence: Synthetic oligonucleotide
caaggaggcggugugggca

SEQ ID NO: 2134625 - RNA, 19 nt, Artificial Sequence
  Description of Artificial Sequence: Synthetic oligonucleotide
aacgcacgugcggcgcagg

SEQ ID NO: 2134626 - RNA, 19 nt, Artificial Sequence
  Description of Artificial Sequence: Synthetic oligonucleotide
uccacuaugugggcauuuu

SEQ ID NO: 2134627 - RNA, 19 nt, Artificial Sequence
  Description of Artificial Sequence: Synthetic oligonucleotide
acgcacgugcggcgcaggg

SEQ ID NO: 2134628 - RNA, 19 nt, Artificial Sequence
  Description of Artificial Sequence: Synthetic oligonucleotide
ggcguagaagcccgaggag

SEQ ID NO: 2134629 - RNA, 19 nt, Artificial Sequence
  Description of Artificial Sequence: Synthetic oligonucleotide
ccauacacagaugagucca

SEQ ID NO: 2134630 - RNA, 19 nt, Artificial Sequence
  Description of Artificial Sequence: Synthetic oligonucleotide
gucgccacucuucgcgggc

SEQ ID NO: 2134631 - RNA, 19 nt, Artificial Sequence
  Description of Artificial Sequence: Synthetic oligonucleotide
cucccggucgccacucuuc

SEQ ID NO: 2134632 - RNA, 19 nt, Artificial Sequence
  Description of Artificial Sequence: Synthetic oligonucleotide
ccaacuugccagacgggug

SEQ ID NO: 2134633 - RNA, 19 nt, Artificial Sequence
  Description of Artificial Sequence: Synthetic oligonucleotide
cucacggaggccgugucca

SEQ ID NO: 2134634 - RNA, 19 nt, Artificial Sequence
  Description of Artificial Sequence: Synthetic oligonucleotide
uucgcgggcuugcggugca

SEQ ID NO: 2134635 - RNA, 19 nt, Artificial Sequence
  Description of Artificial Sequence: Synthetic oligonucleotide
gccaucauuugaugcugug

SEQ ID NO: 2134636 - RNA, 19 nt, Artificial Sequence
  Description of Artificial Sequence: Synthetic oligonucleotide
aagugccugcugccauaga

SEQ ID NO: 2134637 - RNA, 19 nt, Artificial Sequence
  Description of Artificial Sequence: Synthetic oligonucleotide
uccaugucucccggucgcc

SEQ ID NO: 2134638 - RNA, 19 nt, Artificial Sequence
  Description of Artificial Sequence: Synthetic oligonucleotide
cuugccagacgggugaaua

SEQ ID NO: 2134639 - RNA, 19 nt, Artificial Sequence
  Description of Artificial Sequence: Synthetic oligonucleotide
agaagcccgaggagaggag

SEQ ID NO: 2134640 - RNA, 19 nt, Artificial Sequence
  Description of Artificial Sequence: Synthetic oligonucleotide
augucucccggucgccacu

SEQ ID NO: 2134641 - RNA, 19 nt, Artificial Sequence
  Description of Artificial Sequence: Synthetic oligonucleotide
gguaacugacgagauccuc

SEQ ID NO: 2134642 - RNA, 19 nt, Artificial Sequence
  Description of Artificial Sequence: Synthetic oligonucleotide
ugccacugugaugcaccag

SEQ ID NO: 2134643 - RNA, 19 nt, Artificial Sequence
  Description of Artificial Sequence: Synthetic oligonucleotide
ggucgccacucuucgcggg

SEQ ID NO: 2134644 - RNA, 19 nt, Artificial Sequence
  Description of Artificial Sequence: Synthetic oligonucleotide
cuucgcgggcuugcggugc

SEQ ID NO: 2134645 - RNA, 19 nt, Artificial Sequence
  Description of Artificial Sequence: Synthetic oligonucleotide
ugugggcauuuuguuuuau

SEQ ID NO: 2134646 - RNA, 19 nt, Artificial Sequence
  Description of Artificial Sequence: Synthetic oligonucleotide
agccuggcaccaguguuca

SEQ ID NO: 2134647 - RNA, 19 nt, Artificial Sequence
  Description of Artificial Sequence: Synthetic oligonucleotide
cacucuucgcgggcuugcg

SEQ ID NO: 2134648 - RNA, 19 nt, Artificial Sequence
  Description of Artificial Sequence: Synthetic oligonucleotide
agguaacugacgagauccu

SEQ ID NO: 2134649 - RNA, 19 nt, Artificial Sequence
  Description of Artificial Sequence: Synthetic oligonucleotide
agccaacuugccagacggg

SEQ ID NO: 2134650 - RNA, 19 nt, Artificial Sequence
  Description of Artificial Sequence: Synthetic oligonucleotide
aacuugccagacgggugaa

SEQ ID NO: 2134651 - RNA, 19 nt, Artificial Sequence
  Description of Artificial Sequence: Synthetic oligonucleotide
ccacugugaugcaccagag

SEQ ID NO: 2134652 - RNA, 19 nt, Artificial Sequence
  Description of Artificial Sequence: Synthetic oligonucleotide
cucuucgcgggcuugcggu

SEQ ID NO: 2134653 - RNA, 19 nt, Artificial Sequence
  Description of Artificial Sequence: Synthetic oligonucleotide
gcgaccagcuccauucagc

SEQ ID NO: 2134654 - RNA, 19 nt, Artificial Sequence
  Description of Artificial Sequence: Synthetic oligonucleotide
gcugaccuuccuucuauaa

SEQ ID NO: 2134655 - RNA, 19 nt, Artificial Sequence
  Description of Artificial Sequence: Synthetic oligonucleotide
ggguccaugucucccgguc

SEQ ID NO: 2134656 - RNA, 19 nt, Artificial Sequence
  Description of Artificial Sequence: Synthetic oligonucleotide
uuccacuaugugggcauuu

SEQ ID NO: 2134657 - RNA, 19 nt, Artificial Sequence
  Description of Artificial Sequence: Synthetic oligonucleotide
gcguagaagcccgaggaga

SEQ ID NO: 2134658 - RNA, 19 nt, Artificial Sequence
  Description of Artificial Sequence: Synthetic oligonucleotide
cuggcaccaguguucaccu

SEQ ID NO: 2134659 - RNA, 19 nt, Artificial Sequence
  Description of Artificial Sequence: Synthetic oligonucleotide
cgggugaauagaaaggaaa

SEQ ID NO: 2134660 - RNA, 19 nt, Artificial Sequence
  Description of Artificial Sequence: Synthetic oligonucleotide
guucgaugccacagcugac

SEQ ID NO: 2134661 - RNA, 19 nt, Artificial Sequence
  Description of Artificial Sequence: Synthetic oligonucleotide
acccuguuuucaugagcuu

SEQ ID NO: 2134662 - RNA, 19 nt, Artificial Sequence
  Description of Artificial Sequence: Synthetic oligonucleotide
cagagccaacuugccagac

SEQ ID NO: 2134663 - RNA, 19 nt, Artificial Sequence
  Description of Artificial Sequence: Synthetic oligonucleotide
ugucucccggucgccacuc

SEQ ID NO: 2134664 - RNA, 19 nt, Artificial Sequence
  Description of Artificial Sequence: Synthetic oligonucleotide
ucuccacucggggaccauu

SEQ ID NO: 2134665 - RNA, 19 nt, Artificial Sequence
  Description of Artificial Sequence: Synthetic oligonucleotide
aucuucugcgccacugauu

SEQ ID NO: 2134666 - RNA, 19 nt, Artificial Sequence
  Description of Artificial Sequence: Synthetic oligonucleotide
agggcgagccggcguagaa

SEQ ID NO: 2134667 - RNA, 19 nt, Artificial Sequence
  Description of Artificial Sequence: Synthetic oligonucleotide
gccacagggguccaugucu

SEQ ID NO: 2134668 - RNA, 19 nt, Artificial Sequence
  Description of Artificial Sequence: Synthetic oligonucleotide
cucggggaccauuccacua

SEQ ID NO: 2134669 - RNA, 19 nt, Artificial Sequence
  Description of Artificial Sequence: Synthetic oligonucleotide
ccguguccagcugauagac

SEQ ID NO: 2134670 - RNA, 19 nt, Artificial Sequence
  Description of Artificial Sequence: Synthetic oligonucleotide
cccgaggagaggaggccgg

SEQ ID NO: 2134671 - RNA, 19 nt, Artificial Sequence
  Description of Artificial Sequence: Synthetic oligonucleotide
ggaggccguguccagcuga

SEQ ID NO: 2134672 - RNA, 19 nt, Artificial Sequence
  Description of Artificial Sequence: Synthetic oligonucleotide
cacugauuaagugccugcu

SEQ ID NO: 2134673 - RNA, 19 nt, Artificial Sequence
  Description of Artificial Sequence: Synthetic oligonucleotide
ucgccacucuucgcgggcu

SEQ ID NO: 2134674 - RNA, 19 nt, Artificial Sequence
  Description of Artificial Sequence: Synthetic oligonucleotide
ccggcguagaagcccgagg

SEQ ID NO: 2134675 - RNA, 19 nt, Artificial Sequence
  Description of Artificial Sequence: Synthetic oligonucleotide
caccucacacagcaaagau

SEQ ID NO: 2134676 - RNA, 19 nt, Artificial Sequence
  Description of Artificial Sequence: Synthetic oligonucleotide
caacgcacgugcggcgcag

SEQ ID NO: 2134677 - RNA, 19 nt, Artificial Sequence
  Description of Artificial Sequence: Synthetic oligonucleotide
gcccgaggagaggaggccg

SEQ ID NO: 2134678 - RNA, 19 nt, Artificial Sequence
  Description of Artificial Sequence: Synthetic oligonucleotide
auggugccacugugaugca

SEQ ID NO: 2134679 - RNA, 19 nt, Artificial Sequence
  Description of Artificial Sequence: Synthetic oligonucleotide
ugccgcucacggaggccgu

SEQ ID NO: 2134680 - RNA, 19 nt, Artificial Sequence
  Description of Artificial Sequence: Synthetic oligonucleotide
ccaugaucgaucuucuuuu

SEQ ID NO: 2134681 - RNA, 19 nt, Artificial Sequence
  Description of Artificial Sequence: Synthetic oligonucleotide
gcuugcggugcacugcgaa

SEQ ID NO: 2134682 - RNA, 19 nt, Artificial Sequence
  Description of Artificial Sequence: Synthetic oligonucleotide
acgugcggcgcagggcgag

SEQ ID NO: 2134683 - RNA, 19 nt, Artificial Sequence
  Description of Artificial Sequence: Synthetic oligonucleotide
cagagucagaaaggaaggu

SEQ ID NO: 2134684 - RNA, 19 nt, Artificial Sequence
  Description of Artificial Sequence: Synthetic oligonucleotide
cagcuccauucagcaacgc

SEQ ID NO: 2134685 - RNA, 19 nt, Artificial Sequence
  Description of Artificial Sequence: Synthetic oligonucleotide
cauucccauuucuucgcau

SEQ ID NO: 2134686 - RNA, 19 nt, Artificial Sequence
  Description of Artificial Sequence: Synthetic oligonucleotide
gggcgagccggcguagaag

SEQ ID NO: 2134687 - RNA, 19 nt, Artificial Sequence
  Description of Artificial Sequence: Synthetic oligonucleotide
gcgacuguucgaugccaca

SEQ ID NO: 2134688 - RNA, 19 nt, Artificial Sequence
  Description of Artificial Sequence: Synthetic oligonucleotide
caggcaaguuauggugcca

SEQ ID NO: 2134689 - RNA, 19 nt, Artificial Sequence
  Description of Artificial Sequence: Synthetic oligonucleotide
gaccugcucguagcugcca

SEQ ID NO: 2134690 - RNA, 19 nt, Artificial Sequence
  Description of Artificial Sequence: Synthetic oligonucleotide
caaacaggaccugcucgua

SEQ ID NO: 2134691 - RNA, 19 nt, Artificial Sequence
  Description of Artificial Sequence: Synthetic oligonucleotide
cacaccagugaaccacagu

SEQ ID NO: 2134692 - RNA, 19 nt, Artificial Sequence
  Description of Artificial Sequence: Synthetic oligonucleotide
gcgggcuugcggugcacug

SEQ ID NO: 2134693 - RNA, 19 nt, Artificial Sequence
  Description of Artificial Sequence: Synthetic oligonucleotide
ccaacagacagagccaacu

SEQ ID NO: 2134694 - RNA, 19 nt, Artificial Sequence
  Description of Artificial Sequence: Synthetic oligonucleotide
ggaccugcucguagcugcc

SEQ ID NO: 2134695 - RNA, 19 nt, Artificial Sequence
  Description of Artificial Sequence: Synthetic oligonucleotide
cgagccggcguagaagccc

SEQ ID NO: 2134696 - RNA, 19 nt, Artificial Sequence
  Description of Artificial Sequence: Synthetic oligonucleotide
gccaacuugccagacgggu

SEQ ID NO: 2134697 - RNA, 19 nt, Artificial Sequence
  Description of Artificial Sequence: Synthetic oligonucleotide
cggcguagaagcccgagga

SEQ ID NO: 2134698 - RNA, 19 nt, Artificial Sequence
  Description of Artificial Sequence: Synthetic oligonucleotide
gcgaacccaaacaggaccu

SEQ ID NO: 2134699 - RNA, 19 nt, Artificial Sequence
  Description of Artificial Sequence: Synthetic oligonucleotide
cugugacuacaaagcgacu

SEQ ID NO: 2134700 - RNA, 19 nt, Artificial Sequence
  Description of Artificial Sequence: Synthetic oligonucleotide
ccagacgggugaauagaaa

SEQ ID NO: 2134701 - RNA, 19 nt, Artificial Sequence
  Description of Artificial Sequence: Synthetic oligonucleotide
gcugauagacauccaccuu

SEQ ID NO: 2134702 - RNA, 19 nt, Artificial Sequence
  Description of Artificial Sequence: Synthetic oligonucleotide
ccagugaaccacagucaaa

SEQ ID NO: 2134703 - RNA, 19 nt, Artificial Sequence
  Description of Artificial Sequence: Synthetic oligonucleotide
ggugccgcucacggaggcc

SEQ ID NO: 2134704 - RNA, 19 nt, Artificial Sequence
  Description of Artificial Sequence: Synthetic oligonucleotide
cugcuuaagcauccacauu

SEQ ID NO: 2134705 - RNA, 19 nt, Artificial Sequence
  Description of Artificial Sequence: Synthetic oligonucleotide
gcaacgcacgugcggcgca

SEQ ID NO: 2134706 - RNA, 19 nt, Artificial Sequence
  Description of Artificial Sequence: Synthetic oligonucleotide
ccaccuuauucagcacaac

SEQ ID NO: 2134707 - RNA, 19 nt, Artificial Sequence
  Description of Artificial Sequence: Synthetic oligonucleotide
gagacccaugaucgaucuu

SEQ ID NO: 2134708 - RNA, 19 nt, Artificial Sequence
  Description of Artificial Sequence: Synthetic oligonucleotide
gaggccguguccagcugau

SEQ ID NO: 2134709 - RNA, 19 nt, Artificial Sequence
  Description of Artificial Sequence: Synthetic oligonucleotide
cacgugcggcgcagggcga

SEQ ID NO: 2134710 - RNA, 19 nt, Artificial Sequence
  Description of Artificial Sequence: Synthetic oligonucleotide
cgcaucccauacacagaug

SEQ ID NO: 2134711 - RNA, 19 nt, Artificial Sequence
  Description of Artificial Sequence: Synthetic oligonucleotide
cccggucgccacucuucgc

SEQ ID NO: 2134712 - RNA, 19 nt, Artificial Sequence
  Description of Artificial Sequence: Synthetic oligonucleotide
ggugcacugcgaacccaaa

SEQ ID NO: 2134713 - RNA, 19 nt, Artificial Sequence
  Description of Artificial Sequence: Synthetic oligonucleotide
cgaacccaaacaggaccug

SEQ ID NO: 2134714 - RNA, 19 nt, Artificial Sequence
  Description of Artificial Sequence: Synthetic oligonucleotide
gcgagccggcguagaagcc

SEQ ID NO: 2134715 - RNA, 19 nt, Artificial Sequence
  Description of Artificial Sequence: Synthetic oligonucleotide
ccgaggagaggaggccggc

SEQ ID NO: 2134716 - RNA, 19 nt, Artificial Sequence
  Description of Artificial Sequence: Synthetic oligonucleotide
ucgcgggcuugcggugcac

SEQ ID NO: 2134717 - RNA, 19 nt, Artificial Sequence
  Description of Artificial Sequence: Synthetic oligonucleotide
ccagagacccaugaucgau

SEQ ID NO: 2134718 - RNA, 19 nt, Artificial Sequence
  Description of Artificial Sequence: Synthetic oligonucleotide
gaggcggugugggcauggu

SEQ ID NO: 2134719 - RNA, 19 nt, Artificial Sequence
  Description of Artificial Sequence: Synthetic oligonucleotide
ccaugucucccggucgcca

SEQ ID NO: 2134720 - RNA, 19 nt, Artificial Sequence
  Description of Artificial Sequence: Synthetic oligonucleotide
cagggcgagccggcguaga

SEQ ID NO: 2134721 - RNA, 19 nt, Artificial Sequence
  Description of Artificial Sequence: Synthetic oligonucleotide
cgcacgugcggcgcagggc

SEQ ID NO: 2134722 - RNA, 19 nt, Artificial Sequence
  Description of Artificial Sequence: Synthetic oligonucleotide
gcggugcacugcgaaccca

SEQ ID NO: 2134723 - RNA, 19 nt, Artificial Sequence
  Description of Artificial Sequence: Synthetic oligonucleotide
gccgcucacggaggccgug

SEQ ID NO: 2134724 - RNA, 19 nt, Artificial Sequence
  Description of Artificial Sequence: Synthetic oligonucleotide
cgagauccucuuuccauuu

SEQ ID NO: 2134725 - RNA, 19 nt, Artificial Sequence
  Description of Artificial Sequence: Synthetic oligonucleotide
gccagcgaccagcuccauu

SEQ ID NO: 2134726 - RNA, 19 nt, Artificial Sequence
  Description of Artificial Sequence: Synthetic oligonucleotide
cggaggccguguccagcug

SEQ ID NO: 2134727 - RNA, 19 nt, Artificial Sequence
  Description of Artificial Sequence: Synthetic oligonucleotide
cgugcggcgcagggcgagc

SEQ ID NO: 2134728 - RNA, 19 nt, Artificial Sequence
  Description of Artificial Sequence: Synthetic oligonucleotide
cgcagggcgagccggcgua

SEQ ID NO: 2134729 - RNA, 19 nt, Artificial Sequence
  Description of Artificial Sequence: Synthetic oligonucleotide
gcgcagggcgagccggcgu

SEQ ID NO: 2134730 - RNA, 19 nt, Artificial Sequence
  Description of Artificial Sequence: Synthetic oligonucleotide
ccgcucacggaggccgugu

SEQ ID NO: 2134731 - RNA, 19 nt, Artificial Sequence
  Description of Artificial Sequence: Synthetic oligonucleotide
cgcgggcuugcggugcacu

SEQ ID NO: 2134732 - RNA, 19 nt, Artificial Sequence
  Description of Artificial Sequence: Synthetic oligonucleotide
cggugugggcauggugagu

SEQ ID NO: 2134733 - RNA, 19 nt, Artificial Sequence
  Description of Artificial Sequence: Synthetic oligonucleotide
aaccagaggaacuauacac

SEQ ID NO: 2134734 - RNA, 19 nt, Artificial Sequence
  Description of Artificial Sequence: Synthetic oligonucleotide
acugacuaaacacaagacc

SEQ ID NO: 2134735 - RNA, 19 nt, Artificial Sequence
  Description of Artificial Sequence: Synthetic oligonucleotide
aaauauacgaaguucagua

SEQ ID NO: 2134736 - RNA, 19 nt, Artificial Sequence
  Description of Artificial Sequence: Synthetic oligonucleotide
aagaccacaaaucugucag

SEQ ID NO: 2134737 - RNA, 19 nt, Artificial Sequence
  Description of Artificial Sequence: Synthetic oligonucleotide
aauuacucaauucuuuuca

SEQ ID NO: 2134738 - RNA, 19 nt, Artificial Sequence
  Description of Artificial Sequence: Synthetic oligonucleotide
uuugcuuagacuaauuacu

SEQ ID NO: 2134739 - RNA, 19 nt, Artificial Sequence
  Description of Artificial Sequence: Synthetic oligonucleotide
agaugcuuggaacucaacc

SEQ ID NO: 2134740 - RNA, 19 nt, Artificial Sequence
  Description of Artificial Sequence: Synthetic oligonucleotide
aaguaucaggaccaaauag

SEQ ID NO: 2134741 - RNA, 19 nt, Artificial Sequence
  Description of Artificial Sequence: Synthetic oligonucleotide
aagccauaaccuuuuaagg

SEQ ID NO: 2134742 - RNA, 19 nt, Artificial Sequence
  Description of Artificial Sequence: Synthetic oligonucleotide
ucugucaggaaauauacga

SEQ ID NO: 2134743 - RNA, 19 nt, Artificial Sequence
  Description of Artificial Sequence: Synthetic oligonucleotide
ucuugauucaaaagcaacc

SEQ ID NO: 2134744 - RNA, 19 nt, Artificial Sequence
  Description of Artificial Sequence: Synthetic oligonucleotide
aaucugucaggaaauauac

SEQ ID NO: 2134745 - RNA, 19 nt, Artificial Sequence
  Description of Artificial Sequence: Synthetic oligonucleotide
ucuaaugcuggcaaaacac

SEQ ID NO: 2134746 - RNA, 19 nt, Artificial Sequence
  Description of Artificial Sequence: Synthetic oligonucleotide
uaaaagcugagauaucucc

SEQ ID NO: 2134747 - RNA, 19 nt, Artificial Sequence
  Description of Artificial Sequence: Synthetic oligonucleotide
uaaccuuuuaaggacaagg

SEQ ID NO: 2134748 - RNA, 19 nt, Artificial Sequence
  Description of Artificial Sequence: Synthetic oligonucleotide
aauacagcgaagguguauc

SEQ ID NO: 2134749 - RNA, 19 nt, Artificial Sequence
  Description of Artificial Sequence: Synthetic oligonucleotide
agacuaauuacucaauucu

SEQ ID NO: 2134750 - RNA, 19 nt, Artificial Sequence
  Description of Artificial Sequence: Synthetic oligonucleotide
ugcuguuuauaaaugcccg

SEQ ID NO: 2134751 - RNA, 19 nt, Artificial Sequence
  Description of Artificial Sequence: Synthetic oligonucleotide
ucugcuagaacuuugcaau

SEQ ID NO: 2134752 - RNA, 19 nt, Artificial Sequence
  Description of Artificial Sequence: Synthetic oligonucleotide
uaauccaucguuuccaaga

SEQ ID NO: 2134753 - RNA, 19 nt, Artificial Sequence
  Description of Artificial Sequence: Synthetic oligonucleotide
uucucuaccaucaugucuc

SEQ ID NO: 2134754 - RNA, 19 nt, Artificial Sequence
  Description of Artificial Sequence: Synthetic oligonucleotide
aaaucuugauucaaaagca

SEQ ID NO: 2134755 - RNA, 19 nt, Artificial Sequence
  Description of Artificial Sequence: Synthetic oligonucleotide
aguaucaggaccaaauagg

SEQ ID NO: 2134756 - RNA, 19 nt, Artificial Sequence
  Description of Artificial Sequence: Synthetic oligonucleotide
aaagcaacccuguaucuga

SEQ ID NO: 2134757 - RNA, 19 nt, Artificial Sequence
  Description of Artificial Sequence: Synthetic oligonucleotide
uuguccaaguaucaggacc

SEQ ID NO: 2134758 - RNA, 19 nt, Artificial Sequence
  Description of Artificial Sequence: Synthetic oligonucleotide
uggaaucuuuguuugaacc

SEQ ID NO: 2134759 - RNA, 19 nt, Artificial Sequence
  Description of Artificial Sequence: Synthetic oligonucleotide
uuuauaaaugcccgcguac

SEQ ID NO: 2134760 - RNA, 19 nt, Artificial Sequence
  Description of Artificial Sequence: Synthetic oligonucleotide
guaucugacaacucuaaug

SEQ ID NO: 2134761 - RNA, 19 nt, Artificial Sequence
  Description of Artificial Sequence: Synthetic oligonucleotide
cugacuaaacacaagacca

SEQ ID NO: 2134762 - RNA, 19 nt, Artificial Sequence
  Description of Artificial Sequence: Synthetic oligonucleotide
cuuaacucuggaaucaaug

SEQ ID NO: 2134763 - RNA, 19 nt, Artificial Sequence
  Description of Artificial Sequence: Synthetic oligonucleotide
ucugaauacagcgaaggug

SEQ ID NO: 2134764 - RNA, 19 nt, Artificial Sequence
  Description of Artificial Sequence: Synthetic oligonucleotide
acuauaugaagauccacga

SEQ ID NO: 2134765 - RNA, 19 nt, Artificial Sequence
  Description of Artificial Sequence: Synthetic oligonucleotide
aaccuuuuaaggacaaggg

SEQ ID NO: 2134766 - RNA, 19 nt, Artificial Sequence
  Description of Artificial Sequence: Synthetic oligonucleotide
uacuccuuaacucuggaau

SEQ ID NO: 2134767 - RNA, 19 nt, Artificial Sequence
  Description of Artificial Sequence: Synthetic oligonucleotide
uguccaaguaucaggacca

SEQ ID NO: 2134768 - RNA, 19 nt, Artificial Sequence
  Description of Artificial Sequence: Synthetic oligonucleotide
cuugauucaaaagcaaccc

SEQ ID NO: 2134769 - RNA, 19 nt, Artificial Sequence
  Description of Artificial Sequence: Synthetic oligonucleotide
uauacgaaguucaguauuc

SEQ ID NO: 2134770 - RNA, 19 nt, Artificial Sequence
  Description of Artificial Sequence: Synthetic oligonucleotide
agacugacuaaacacaaga

SEQ ID NO: 2134771 - RNA, 19 nt, Artificial Sequence
  Description of Artificial Sequence: Synthetic oligonucleotide
uccaucguuuccaagagaa

SEQ ID NO: 2134772 - RNA, 19 nt, Artificial Sequence
  Description of Artificial Sequence: Synthetic oligonucleotide
aauauacgaaguucaguau

SEQ ID NO: 2134773 - RNA, 19 nt, Artificial Sequence
  Description of Artificial Sequence: Synthetic oligonucleotide
ucuaccaucaugucuccug

SEQ ID NO: 2134774 - RNA, 19 nt, Artificial Sequence
  Description of Artificial Sequence: Synthetic oligonucleotide
uuuagcugugacuuucgcc

SEQ ID NO: 2134775 - RNA, 19 nt, Artificial Sequence
  Description of Artificial Sequence: Synthetic oligonucleotide
aggcgagcuaguuugcugc

SEQ ID NO: 2134776 - RNA, 19 nt, Artificial Sequence
  Description of Artificial Sequence: Synthetic oligonucleotide
ugacuuucgccaaaucuug

SEQ ID NO: 2134777 - RNA, 19 nt, Artificial Sequence
  Description of Artificial Sequence: Synthetic oligonucleotide
aaccuuguggcacuauaug

SEQ ID NO: 2134778 - RNA, 19 nt, Artificial Sequence
  Description of Artificial Sequence: Synthetic oligonucleotide
uucuguucagaaaaccaac

SEQ ID NO: 2134779 - RNA, 19 nt, Artificial Sequence
  Description of Artificial Sequence: Synthetic oligonucleotide
uuaccuuguagaugcuugg

SEQ ID NO: 2134780 - RNA, 19 nt, Artificial Sequence
  Description of Artificial Sequence: Synthetic oligonucleotide
uccaaauauuugcuuagac

SEQ ID NO: 2134781 - RNA, 19 nt, Artificial Sequence
  Description of Artificial Sequence: Synthetic oligonucleotide
ugucauaaggugucuggag

SEQ ID NO: 2134782 - RNA, 19 nt, Artificial Sequence
  Description of Artificial Sequence: Synthetic oligonucleotide
uaacucuggaaucaauggu

SEQ ID NO: 2134783 - RNA, 19 nt, Artificial Sequence
  Description of Artificial Sequence: Synthetic oligonucleotide
auacauaccgugggcaugc

SEQ ID NO: 2134784 - RNA, 19 nt, Artificial Sequence
  Description of Artificial Sequence: Synthetic oligonucleotide
ccaguuaccuuguagaugc

SEQ ID NO: 2134785 - RNA, 19 nt, Artificial Sequence
  Description of Artificial Sequence: Synthetic oligonucleotide
aaaccagaggaacuauaca

SEQ ID NO: 2134786 - RNA, 19 nt, Artificial Sequence
  Description of Artificial Sequence: Synthetic oligonucleotide
caaaccagaggaacuauac

SEQ ID NO: 2134787 - RNA, 19 nt, Artificial Sequence
  Description of Artificial Sequence: Synthetic oligonucleotide
acuugggccgccuugaacu

SEQ ID NO: 2134788 - RNA, 19 nt, Artificial Sequence
  Description of Artificial Sequence: Synthetic oligonucleotide
aaaaguggguguugugucu

SEQ ID NO: 2134789 - RNA, 19 nt, Artificial Sequence
  Description of Artificial Sequence: Synthetic oligonucleotide
uagcuaaucuuucaucaac

SEQ ID NO: 2134790 - RNA, 19 nt, Artificial Sequence
  Description of Artificial Sequence: Synthetic oligonucleotide
aaaagcaacccuguaucug

SEQ ID NO: 2134791 - RNA, 19 nt, Artificial Sequence
  Description of Artificial Sequence: Synthetic oligonucleotide
uccaagagaaacucugcug

SEQ ID NO: 2134792 - RNA, 19 nt, Artificial Sequence
  Description of Artificial Sequence: Synthetic oligonucleotide
uuagacuaauuacucaauu

SEQ ID NO: 2134793 - RNA, 19 nt, Artificial Sequence
  Description of Artificial Sequence: Synthetic oligonucleotide
gguuuuccaaagcauauag

SEQ ID NO: 2134794 - RNA, 19 nt, Artificial Sequence
  Description of Artificial Sequence: Synthetic oligonucleotide
ugcuuggaacucaaccugg

SEQ ID NO: 2134795 - RNA, 19 nt, Artificial Sequence
  Description of Artificial Sequence: Synthetic oligonucleotide
ucucccaaccuccaaauau

SEQ ID NO: 2134796 - RNA, 19 nt, Artificial Sequence
  Description of Artificial Sequence: Synthetic oligonucleotide
ucauaaggugucuggagga

SEQ ID NO: 2134797 - RNA, 19 nt, Artificial Sequence
  Description of Artificial Sequence: Synthetic oligonucleotide
acgaaauaggcagugauga

SEQ ID NO: 2134798 - RNA, 19 nt, Artificial Sequence
  Description of Artificial Sequence: Synthetic oligonucleotide
accaaauaggaagacugac

SEQ ID NO: 2134799 - RNA, 19 nt, Artificial Sequence
  Description of Artificial Sequence: Synthetic oligonucleotide
uguuuauaaaugcccgcgu

SEQ ID NO: 2134800 - RNA, 19 nt, Artificial Sequence
  Description of Artificial Sequence: Synthetic oligonucleotide
uuuuacuugggccgccuug

SEQ ID NO: 2134801 - RNA, 19 nt, Artificial Sequence
  Description of Artificial Sequence: Synthetic oligonucleotide
aauauuugcuuagacuaau

SEQ ID NO: 2134802 - RNA, 19 nt, Artificial Sequence
  Description of Artificial Sequence: Synthetic oligonucleotide
aacccuguaucugacaacu

SEQ ID NO: 2134803 - RNA, 19 nt, Artificial Sequence
  Description of Artificial Sequence: Synthetic oligonucleotide
ugagaaagccauaaccuuu

SEQ ID NO: 2134804 - RNA, 19 nt, Artificial Sequence
  Description of Artificial Sequence: Synthetic oligonucleotide
aaauaggcagugaugagaa

SEQ ID NO: 2134805 - RNA, 19 nt, Artificial Sequence
  Description of Artificial Sequence: Synthetic oligonucleotide
ugacuaaacacaagaccac

SEQ ID NO: 2134806 - RNA, 19 nt, Artificial Sequence
  Description of Artificial Sequence: Synthetic oligonucleotide
auacagcgaagguguaucc

SEQ ID NO: 2134807 - RNA, 19 nt, Artificial Sequence
  Description of Artificial Sequence: Synthetic oligonucleotide
agaggaacuauacacugaa

SEQ ID NO: 2134808 - RNA, 19 nt, Artificial Sequence
  Description of Artificial Sequence: Synthetic oligonucleotide
cuuguggcacuauaugaag

SEQ ID NO: 2134809 - RNA, 19 nt, Artificial Sequence
  Description of Artificial Sequence: Synthetic oligonucleotide
aaguggguguugugucucc

SEQ ID NO: 2134810 - RNA, 19 nt, Artificial Sequence
  Description of Artificial Sequence: Synthetic oligonucleotide
gguuguuugucauaaggug

SEQ ID NO: 2134811 - RNA, 19 nt, Artificial Sequence
  Description of Artificial Sequence: Synthetic oligonucleotide
auggcaaauuucuuagaug

SEQ ID NO: 2134812 - RNA, 19 nt, Artificial Sequence
  Description of Artificial Sequence: Synthetic oligonucleotide
caucguuuccaagagaaac

SEQ ID NO: 2134813 - RNA, 19 nt, Artificial Sequence
  Description of Artificial Sequence: Synthetic oligonucleotide
aaaucugucaggaaauaua

SEQ ID NO: 2134814 - RNA, 19 nt, Artificial Sequence
  Description of Artificial Sequence: Synthetic oligonucleotide
uugcuuagacuaauuacuc

SEQ ID NO: 2134815 - RNA, 19 nt, Artificial Sequence
  Description of Artificial Sequence: Synthetic oligonucleotide
cauaccgugggcaugccug

SEQ ID NO: 2134816 - RNA, 19 nt, Artificial Sequence
  Description of Artificial Sequence: Synthetic oligonucleotide
aaaguggguguugugucuc

SEQ ID NO: 2134817 - RNA, 19 nt, Artificial Sequence
  Description of Artificial Sequence: Synthetic oligonucleotide
ucaggaaauauacgaaguu

SEQ ID NO: 2134818 - RNA, 19 nt, Artificial Sequence
  Description of Artificial Sequence: Synthetic oligonucleotide
cuuuucaaaccagaggaac

SEQ ID NO: 2134819 - RNA, 19 nt, Artificial Sequence
  Description of Artificial Sequence: Synthetic oligonucleotide
uuauaaaugcccgcguacu

SEQ ID NO: 2134820 - RNA, 19 nt, Artificial Sequence
  Description of Artificial Sequence: Synthetic oligonucleotide
auauacgaaguucaguauu

SEQ ID NO: 2134821 - RNA, 19 nt, Artificial Sequence
  Description of Artificial Sequence: Synthetic oligonucleotide
agaaacucugcugcggugg

SEQ ID NO: 2134822 - RNA, 19 nt, Artificial Sequence
  Description of Artificial Sequence: Synthetic oligonucleotide
aaaccaacuggaaucuuug

SEQ ID NO: 2134823 - RNA, 19 nt, Artificial Sequence
  Description of Artificial Sequence: Synthetic oligonucleotide
acaacucuaaugcuggcaa

SEQ ID NO: 2134824 - RNA, 19 nt, Artificial Sequence
  Description of Artificial Sequence: Synthetic oligonucleotide
cuauaugaagauccacgag

SEQ ID NO: 2134825 - RNA, 19 nt, Artificial Sequence
  Description of Artificial Sequence: Synthetic oligonucleotide
ccaaccuccaaauauuugc

SEQ ID NO: 2134826 - RNA, 19 nt, Artificial Sequence
  Description of Artificial Sequence: Synthetic oligonucleotide
accuuuuaaggacaaggga

SEQ ID NO: 2134827 - RNA, 19 nt, Artificial Sequence
  Description of Artificial Sequence: Synthetic oligonucleotide
uccugggacuaauccaucg

SEQ ID NO: 2134828 - RNA, 19 nt, Artificial Sequence
  Description of Artificial Sequence: Synthetic oligonucleotide
gagauaucucccaaccucc

SEQ ID NO: 2134829 - RNA, 19 nt, Artificial Sequence
  Description of Artificial Sequence: Synthetic oligonucleotide
ugcuuagacuaauuacuca

SEQ ID NO: 2134830 - RNA, 19 nt, Artificial Sequence
  Description of Artificial Sequence: Synthetic oligonucleotide
uguuugaaccuuguggcac

SEQ ID NO: 2134831 - RNA, 19 nt, Artificial Sequence
  Description of Artificial Sequence: Synthetic oligonucleotide
caagagaaacucugcugcg

SEQ ID NO: 2134832 - RNA, 19 nt, Artificial Sequence
  Description of Artificial Sequence: Synthetic oligonucleotide
uauaaaugcccgcguacuc

SEQ ID NO: 2134833 - RNA, 19 nt, Artificial Sequence
  Description of Artificial Sequence: Synthetic oligonucleotide
ucugcugcgguggucaaag

SEQ ID NO: 2134834 - RNA, 19 nt, Artificial Sequence
  Description of Artificial Sequence: Synthetic oligonucleotide
ccaagagaaacucugcugc

SEQ ID NO: 2134835 - RNA, 19 nt, Artificial Sequence
  Description of Artificial Sequence: Synthetic oligonucleotide
cuaccaucaugucuccugg

SEQ ID NO: 2134836 - RNA, 19 nt, Artificial Sequence
  Description of Artificial Sequence: Synthetic oligonucleotide
uucugaauacagcgaaggu

SEQ ID NO: 2134837 - RNA, 19 nt, Artificial Sequence
  Description of Artificial Sequence: Synthetic oligonucleotide
agcugagauaucucccaac

SEQ ID NO: 2134838 - RNA, 19 nt, Artificial Sequence
  Description of Artificial Sequence: Synthetic oligonucleotide
caaaaguggguguuguguc

SEQ ID NO: 2134839 - RNA, 19 nt, Artificial Sequence
  Description of Artificial Sequence: Synthetic oligonucleotide
guucagaaaaccaacugga

SEQ ID NO: 2134840 - RNA, 19 nt, Artificial Sequence
  Description of Artificial Sequence: Synthetic oligonucleotide
uuuuaaggacaagggacug

SEQ ID NO: 2134841 - RNA, 19 nt, Artificial Sequence
  Description of Artificial Sequence: Synthetic oligonucleotide
cugaauacagcgaaggugu

SEQ ID NO: 2134842 - RNA, 19 nt, Artificial Sequence
  Description of Artificial Sequence: Synthetic oligonucleotide
cuugccacuacauccucug

SEQ ID NO: 2134843 - RNA, 19 nt, Artificial Sequence
  Description of Artificial Sequence: Synthetic oligonucleotide
acgaggacagcaaaauuuc

SEQ ID NO: 2134844 - RNA, 19 nt, Artificial Sequence
  Description of Artificial Sequence: Synthetic oligonucleotide
cauuugaaggccugugcug

SEQ ID NO: 2134845 - RNA, 19 nt, Artificial Sequence
  Description of Artificial Sequence: Synthetic oligonucleotide
cugcaggcgagcuaguuug

SEQ ID NO: 2134846 - RNA, 19 nt, Artificial Sequence
  Description of Artificial Sequence: Synthetic oligonucleotide
ggaccaaauaggaagacug

SEQ ID NO: 2134847 - RNA, 19 nt, Artificial Sequence
  Description of Artificial Sequence: Synthetic oligonucleotide
guggacuuugcauucuggc

SEQ ID NO: 2134848 - RNA, 19 nt, Artificial Sequence
  Description of Artificial Sequence: Synthetic oligonucleotide
auaugaagauccacgagga

SEQ ID NO: 2134849 - RNA, 19 nt, Artificial Sequence
  Description of Artificial Sequence: Synthetic oligonucleotide
gacgaaauaggcagugaug

SEQ ID NO: 2134850 - RNA, 19 nt, Artificial Sequence
  Description of Artificial Sequence: Synthetic oligonucleotide
acgaaguucaguauucugu

SEQ ID NO: 2134851 - RNA, 19 nt, Artificial Sequence
  Description of Artificial Sequence: Synthetic oligonucleotide
aaaaccaacuggaaucuuu

SEQ ID NO: 2134852 - RNA, 19 nt, Artificial Sequence
  Description of Artificial Sequence: Synthetic oligonucleotide
uuuacuugggccgccuuga

SEQ ID NO: 2134853 - RNA, 19 nt, Artificial Sequence
  Description of Artificial Sequence: Synthetic oligonucleotide
aacucuaaugcuggcaaaa

SEQ ID NO: 2134854 - RNA, 19 nt, Artificial Sequence
  Description of Artificial Sequence: Synthetic oligonucleotide
acucuaaugcuggcaaaac

SEQ ID NO: 2134855 - RNA, 19 nt, Artificial Sequence
  Description of Artificial Sequence: Synthetic oligonucleotide
caggaaauauacgaaguuc

SEQ ID NO: 2134856 - RNA, 19 nt, Artificial Sequence
  Description of Artificial Sequence: Synthetic oligonucleotide
uguaucugacaacucuaau

SEQ ID NO: 2134857 - RNA, 19 nt, Artificial Sequence
  Description of Artificial Sequence: Synthetic oligonucleotide
uuucaaaccagaggaacua

SEQ ID NO: 2134858 - RNA, 19 nt, Artificial Sequence
  Description of Artificial Sequence: Synthetic oligonucleotide
uuguuugaaccuuguggca

SEQ ID NO: 2134859 - RNA, 19 nt, Artificial Sequence
  Description of Artificial Sequence: Synthetic oligonucleotide
aguucaguauucugugagu

SEQ ID NO: 2134860 - RNA, 19 nt, Artificial Sequence
  Description of Artificial Sequence: Synthetic oligonucleotide
gcugagauaucucccaacc

SEQ ID NO: 2134861 - RNA, 19 nt, Artificial Sequence
  Description of Artificial Sequence: Synthetic oligonucleotide
uauacauaccgugggcaug

SEQ ID NO: 2134862 - RNA, 19 nt, Artificial Sequence
  Description of Artificial Sequence: Synthetic oligonucleotide
aagacugacuaaacacaag

SEQ ID NO: 2134863 - RNA, 19 nt, Artificial Sequence
  Description of Artificial Sequence: Synthetic oligonucleotide
uaaaugcccgcguacuccu

SEQ ID NO: 2134864 - RNA, 19 nt, Artificial Sequence
  Description of Artificial Sequence: Synthetic oligonucleotide
uccacauuuaauggcaaau

SEQ ID NO: 2134865 - RNA, 19 nt, Artificial Sequence
  Description of Artificial Sequence: Synthetic oligonucleotide
ucaaaccagaggaacuaua

SEQ ID NO: 2134866 - RNA, 19 nt, Artificial Sequence
  Description of Artificial Sequence: Synthetic oligonucleotide
gacuaauccaucguuucca

SEQ ID NO: 2134867 - RNA, 19 nt, Artificial Sequence
  Description of Artificial Sequence: Synthetic oligonucleotide
uguagaugcuuggaacuca

SEQ ID NO: 2134868 - RNA, 19 nt, Artificial Sequence
  Description of Artificial Sequence: Synthetic oligonucleotide
aacucugcugcggugguca

SEQ ID NO: 2134869 - RNA, 19 nt, Artificial Sequence
  Description of Artificial Sequence: Synthetic oligonucleotide
ugaugguuuccaguuaccu

SEQ ID NO: 2134870 - RNA, 19 nt, Artificial Sequence
  Description of Artificial Sequence: Synthetic oligonucleotide
ugaaccuuguggcacuaua

SEQ ID NO: 2134871 - RNA, 19 nt, Artificial Sequence
  Description of Artificial Sequence: Synthetic oligonucleotide
cuucuguucagaaaaccaa

SEQ ID NO: 2134872 - RNA, 19 nt, Artificial Sequence
  Description of Artificial Sequence: Synthetic oligonucleotide
gccauaaccuuuuaaggac

SEQ ID NO: 2134873 - RNA, 19 nt, Artificial Sequence
  Description of Artificial Sequence: Synthetic oligonucleotide
gcauauagcucuucuuuag

SEQ ID NO: 2134874 - RNA, 19 nt, Artificial Sequence
  Description of Artificial Sequence: Synthetic oligonucleotide
gaagacugacuaaacacaa

SEQ ID NO: 2134875 - RNA, 19 nt, Artificial Sequence
  Description of Artificial Sequence: Synthetic oligonucleotide
ugcucguggacuuugcauu

SEQ ID NO: 2134876 - RNA, 19 nt, Artificial Sequence
  Description of Artificial Sequence: Synthetic oligonucleotide
cuguagcuaaucuuucauc

SEQ ID NO: 2134877 - RNA, 19 nt, Artificial Sequence
  Description of Artificial Sequence: Synthetic oligonucleotide
uugucauaaggugucugga

SEQ ID NO: 2134878 - RNA, 19 nt, Artificial Sequence
  Description of Artificial Sequence: Synthetic oligonucleotide
aguucgugaugguuuccag

SEQ ID NO: 2134879 - RNA, 19 nt, Artificial Sequence
  Description of Artificial Sequence: Synthetic oligonucleotide
auaccgugggcaugccugg

SEQ ID NO: 2134880 - RNA, 19 nt, Artificial Sequence
  Description of Artificial Sequence: Synthetic oligonucleotide
uuggagacaguaagugcuc

SEQ ID NO: 2134881 - RNA, 19 nt, Artificial Sequence
  Description of Artificial Sequence: Synthetic oligonucleotide
agcuaaucuuucaucaacu

SEQ ID NO: 2134882 - RNA, 19 nt, Artificial Sequence
  Description of Artificial Sequence: Synthetic oligonucleotide
aaccuccaaauauuugcuu

SEQ ID NO: 2134883 - RNA, 19 nt, Artificial Sequence
  Description of Artificial Sequence: Synthetic oligonucleotide
ggaaauauacgaaguucag

SEQ ID NO: 2134884 - RNA, 19 nt, Artificial Sequence
  Description of Artificial Sequence: Synthetic oligonucleotide
ugggacuaauccaucguuu

SEQ ID NO: 2134885 - RNA, 19 nt, Artificial Sequence
  Description of Artificial Sequence: Synthetic oligonucleotide
ucaucaacugcaggcgagc

SEQ ID NO: 2134886 - RNA, 19 nt, Artificial Sequence
  Description of Artificial Sequence: Synthetic oligonucleotide
gcuuagacuaauuacucaa

SEQ ID NO: 2134887 - RNA, 19 nt, Artificial Sequence
  Description of Artificial Sequence: Synthetic oligonucleotide
guuuauaaaugcccgcgua

SEQ ID NO: 2134888 - RNA, 19 nt, Artificial Sequence
  Description of Artificial Sequence: Synthetic oligonucleotide
uacagcgaagguguauccc

SEQ ID NO: 2134889 - RNA, 19 nt, Artificial Sequence
  Description of Artificial Sequence: Synthetic oligonucleotide
cuuguagaugcuuggaacu

SEQ ID NO: 2134890 - RNA, 19 nt, Artificial Sequence
  Description of Artificial Sequence: Synthetic oligonucleotide
gcuaaucuuucaucaacug

SEQ ID NO: 2134891 - RNA, 19 nt, Artificial Sequence
  Description of Artificial Sequence: Synthetic oligonucleotide
aagcaacccuguaucugac

SEQ ID NO: 2134892 - RNA, 19 nt, Artificial Sequence
  Description of Artificial Sequence: Synthetic oligonucleotide
ccuuguagaugcuuggaac

SEQ ID NO: 2134893 - RNA, 19 nt, Artificial Sequence
  Description of Artificial Sequence: Synthetic oligonucleotide
guaagugcucuuaaaagcu

SEQ ID NO: 2134894 - RNA, 19 nt, Artificial Sequence
  Description of Artificial Sequence: Synthetic oligonucleotide
cucuaaugcuggcaaaaca

SEQ ID NO: 2134895 - RNA, 19 nt, Artificial Sequence
  Description of Artificial Sequence: Synthetic oligonucleotide
gcuaguuugcugcaccagc

SEQ ID NO: 2134896 - RNA, 19 nt, Artificial Sequence
  Description of Artificial Sequence: Synthetic oligonucleotide
uggaguucgugaugguuuc

SEQ ID NO: 2134897 - RNA, 19 nt, Artificial Sequence
  Description of Artificial Sequence: Synthetic oligonucleotide
uuguagaugcuuggaacuc

SEQ ID NO: 2134898 - RNA, 19 nt, Artificial Sequence
  Description of Artificial Sequence: Synthetic oligonucleotide
guuguuugucauaaggugu

SEQ ID NO: 2134899 - RNA, 19 nt, Artificial Sequence
  Description of Artificial Sequence: Synthetic oligonucleotide
accagaggaacuauacacu

SEQ ID NO: 2134900 - RNA, 19 nt, Artificial Sequence
  Description of Artificial Sequence: Synthetic oligonucleotide
aauaggcagugaugagaaa

SEQ ID NO: 2134901 - RNA, 19 nt, Artificial Sequence
  Description of Artificial Sequence: Synthetic oligonucleotide
auaaccuuuuaaggacaag

SEQ ID NO: 2134902 - RNA, 19 nt, Artificial Sequence
  Description of Artificial Sequence: Synthetic oligonucleotide
ggacuaauccaucguuucc

SEQ ID NO: 2134903 - RNA, 19 nt, Artificial Sequence
  Description of Artificial Sequence: Synthetic oligonucleotide
cucugcuagaacuuugcaa

SEQ ID NO: 2134904 - RNA, 19 nt, Artificial Sequence
  Description of Artificial Sequence: Synthetic oligonucleotide
agacaguaagugcucuuaa

SEQ ID NO: 2134905 - RNA, 19 nt, Artificial Sequence
  Description of Artificial Sequence: Synthetic oligonucleotide
guggguguugugucucccg

SEQ ID NO: 2134906 - RNA, 19 nt, Artificial Sequence
  Description of Artificial Sequence: Synthetic oligonucleotide
ccagaggaacuauacacug

SEQ ID NO: 2134907 - RNA, 19 nt, Artificial Sequence
  Description of Artificial Sequence: Synthetic oligonucleotide
aaugcccgcguacuccuua

SEQ ID NO: 2134908 - RNA, 19 nt, Artificial Sequence
  Description of Artificial Sequence: Synthetic oligonucleotide
ugcauucuggcuuguccaa

SEQ ID NO: 2134909 - RNA, 19 nt, Artificial Sequence
  Description of Artificial Sequence: Synthetic oligonucleotide
gaggaacuauacacugaag

SEQ ID NO: 2134910 - RNA, 19 nt, Artificial Sequence
  Description of Artificial Sequence: Synthetic oligonucleotide
cugucaggaaauauacgaa

SEQ ID NO: 2134911 - RNA, 19 nt, Artificial Sequence
  Description of Artificial Sequence: Synthetic oligonucleotide
uacuugggccgccuugaac

SEQ ID NO: 2134912 - RNA, 19 nt, Artificial Sequence
  Description of Artificial Sequence: Synthetic oligonucleotide
cuaauuacucaauucuuuu

SEQ ID NO: 2134913 - RNA, 19 nt, Artificial Sequence
  Description of Artificial Sequence: Synthetic oligonucleotide
ucccaaccuccaaauauuu

SEQ ID NO: 2134914 - RNA, 19 nt, Artificial Sequence
  Description of Artificial Sequence: Synthetic oligonucleotide
acaagaccacaaaucuguc

SEQ ID NO: 2134915 - RNA, 19 nt, Artificial Sequence
  Description of Artificial Sequence: Synthetic oligonucleotide
ugcuagaacuuugcaauuu

SEQ ID NO: 2134916 - RNA, 19 nt, Artificial Sequence
  Description of Artificial Sequence: Synthetic oligonucleotide
gaccaaauaggaagacuga

SEQ ID NO: 2134917 - RNA, 19 nt, Artificial Sequence
  Description of Artificial Sequence: Synthetic oligonucleotide
gauaucucccaaccuccaa

SEQ ID NO: 2134918 - RNA, 19 nt, Artificial Sequence
  Description of Artificial Sequence: Synthetic oligonucleotide
auacgaaguucaguauucu

SEQ ID NO: 2134919 - RNA, 19 nt, Artificial Sequence
  Description of Artificial Sequence: Synthetic oligonucleotide
uugccacuacauccucugc

SEQ ID NO: 2134920 - RNA, 19 nt, Artificial Sequence
  Description of Artificial Sequence: Synthetic oligonucleotide
ugaauacagcgaaggugua

SEQ ID NO: 2134921 - RNA, 19 nt, Artificial Sequence
  Description of Artificial Sequence: Synthetic oligonucleotide
uucaaaccagaggaacuau

SEQ ID NO: 2134922 - RNA, 19 nt, Artificial Sequence
  Description of Artificial Sequence: Synthetic oligonucleotide
uagaugcuuggaacucaac

SEQ ID NO: 2134923 - RNA, 19 nt, Artificial Sequence
  Description of Artificial Sequence: Synthetic oligonucleotide
gggacuaauccaucguuuc

SEQ ID NO: 2134924 - RNA, 19 nt, Artificial Sequence
  Description of Artificial Sequence: Synthetic oligonucleotide
gagcuaguuugcugcacca

SEQ ID NO: 2134925 - RNA, 19 nt, Artificial Sequence
  Description of Artificial Sequence: Synthetic oligonucleotide
cacgaggacagcaaaauuu

SEQ ID NO: 2134926 - RNA, 19 nt, Artificial Sequence
  Description of Artificial Sequence: Synthetic oligonucleotide
gaguucgugaugguuucca

SEQ ID NO: 2134927 - RNA, 19 nt, Artificial Sequence
  Description of Artificial Sequence: Synthetic oligonucleotide
caggcgagcuaguuugcug

SEQ ID NO: 2134928 - RNA, 19 nt, Artificial Sequence
  Description of Artificial Sequence: Synthetic oligonucleotide
uggaaucaaugguuucuuu

SEQ ID NO: 2134929 - RNA, 19 nt, Artificial Sequence
  Description of Artificial Sequence: Synthetic oligonucleotide
ugcaggcgagcuaguuugc

SEQ ID NO: 2134930 - RNA, 19 nt, Artificial Sequence
  Description of Artificial Sequence: Synthetic oligonucleotide
gagacaguaagugcucuua

SEQ ID NO: 2134931 - RNA, 19 nt, Artificial Sequence
  Description of Artificial Sequence: Synthetic oligonucleotide
agcuaguuugcugcaccag

SEQ ID NO: 2134932 - RNA, 19 nt, Artificial Sequence
  Description of Artificial Sequence: Synthetic oligonucleotide
cagaggaacuauacacuga

SEQ ID NO: 2134933 - RNA, 19 nt, Artificial Sequence
  Description of Artificial Sequence: Synthetic oligonucleotide
gaugguuuccaguuaccuu

SEQ ID NO: 2134934 - RNA, 19 nt, Artificial Sequence
  Description of Artificial Sequence: Synthetic oligonucleotide
cucaaccuggguccucuug

SEQ ID NO: 2134935 - RNA, 19 nt, Artificial Sequence
  Description of Artificial Sequence: Synthetic oligonucleotide
gucaggaaauauacgaagu

SEQ ID NO: 2134936 - RNA, 19 nt, Artificial Sequence
  Description of Artificial Sequence: Synthetic oligonucleotide
guuugcugcaccagcccug

SEQ ID NO: 2134937 - RNA, 19 nt, Artificial Sequence
  Description of Artificial Sequence: Synthetic oligonucleotide
uaaggacaagggacuggau

SEQ ID NO: 2134938 - RNA, 19 nt, Artificial Sequence
  Description of Artificial Sequence: Synthetic oligonucleotide
ucgugaugguuuccaguua

SEQ ID NO: 2134939 - RNA, 19 nt, Artificial Sequence
  Description of Artificial Sequence: Synthetic oligonucleotide
cuugggccgccuugaacug

SEQ ID NO: 2134940 - RNA, 19 nt, Artificial Sequence
  Description of Artificial Sequence: Synthetic oligonucleotide
ccaaauauuugcuuagacu

SEQ ID NO: 2134941 - RNA, 19 nt, Artificial Sequence
  Description of Artificial Sequence: Synthetic oligonucleotide
agcaacccuguaucugaca

SEQ ID NO: 2134942 - RNA, 19 nt, Artificial Sequence
  Description of Artificial Sequence: Synthetic oligonucleotide
cugcauuugaaggccugug

SEQ ID NO: 2134943 - RNA, 19 nt, Artificial Sequence
  Description of Artificial Sequence: Synthetic oligonucleotide
cuuagacuaauuacucaau

SEQ ID NO: 2134944 - RNA, 19 nt, Artificial Sequence
  Description of Artificial Sequence: Synthetic oligonucleotide
acaaaucugucaggaaaua

SEQ ID NO: 2134945 - RNA, 19 nt, Artificial Sequence
  Description of Artificial Sequence: Synthetic oligonucleotide
gcaacccuguaucugacaa

SEQ ID NO: 2134946 - RNA, 19 nt, Artificial Sequence
  Description of Artificial Sequence: Synthetic oligonucleotide
cuggguuguuugucauaag

SEQ ID NO: 2134947 - RNA, 19 nt, Artificial Sequence
  Description of Artificial Sequence: Synthetic oligonucleotide
uuacuugggccgccuugaa

SEQ ID NO: 2134948 - RNA, 19 nt, Artificial Sequence
  Description of Artificial Sequence: Synthetic oligonucleotide
caaccuccaaauauuugcu

SEQ ID NO: 2134949 - RNA, 19 nt, Artificial Sequence
  Description of Artificial Sequence: Synthetic oligonucleotide
uccaaguaucaggaccaaa

SEQ ID NO: 2134950 - RNA, 19 nt, Artificial Sequence
  Description of Artificial Sequence: Synthetic oligonucleotide
uguugugucuuggcugcuc

SEQ ID NO: 2134951 - RNA, 19 nt, Artificial Sequence
  Description of Artificial Sequence: Synthetic oligonucleotide
guuugaaccuuguggcacu

SEQ ID NO: 2134952 - RNA, 19 nt, Artificial Sequence
  Description of Artificial Sequence: Synthetic oligonucleotide
aucaacugcaggcgagcua

SEQ ID NO: 2134953 - RNA, 19 nt, Artificial Sequence
  Description of Artificial Sequence: Synthetic oligonucleotide
ggaggagagguuuuccaaa

SEQ ID NO: 2134954 - RNA, 19 nt, Artificial Sequence
  Description of Artificial Sequence: Synthetic oligonucleotide
aguuaccuuguagaugcuu

SEQ ID NO: 2134955 - RNA, 19 nt, Artificial Sequence
  Description of Artificial Sequence: Synthetic oligonucleotide
agauaucucccaaccucca

SEQ ID NO: 2134956 - RNA, 19 nt, Artificial Sequence
  Description of Artificial Sequence: Synthetic oligonucleotide
uagcugugacuuucgccaa

SEQ ID NO: 2134957 - RNA, 19 nt, Artificial Sequence
  Description of Artificial Sequence: Synthetic oligonucleotide
agaaagccauaaccuuuua

SEQ ID NO: 2134958 - RNA, 19 nt, Artificial Sequence
  Description of Artificial Sequence: Synthetic oligonucleotide
agauccacgaggacagcaa

SEQ ID NO: 2134959 - RNA, 19 nt, Artificial Sequence
  Description of Artificial Sequence: Synthetic oligonucleotide
cgugaugguuuccaguuac

SEQ ID NO: 2134960 - RNA, 19 nt, Artificial Sequence
  Description of Artificial Sequence: Synthetic oligonucleotide
agguuuuccaaagcauaua

SEQ ID NO: 2134961 - RNA, 19 nt, Artificial Sequence
  Description of Artificial Sequence: Synthetic oligonucleotide
guggcacuauaugaagauc

SEQ ID NO: 2134962 - RNA, 19 nt, Artificial Sequence
  Description of Artificial Sequence: Synthetic oligonucleotide
gcauuugaaggccugugcu

SEQ ID NO: 2134963 - RNA, 19 nt, Artificial Sequence
  Description of Artificial Sequence: Synthetic oligonucleotide
gaagauccacgaggacagc

SEQ ID NO: 2134964 - RNA, 19 nt, Artificial Sequence
  Description of Artificial Sequence: Synthetic oligonucleotide
ugggccgccuugaacugua

SEQ ID NO: 2134965 - RNA, 19 nt, Artificial Sequence
  Description of Artificial Sequence: Synthetic oligonucleotide
aacugcaggcgagcuaguu

SEQ ID NO: 2134966 - RNA, 19 nt, Artificial Sequence
  Description of Artificial Sequence: Synthetic oligonucleotide
ccucuugacgaaauaggca

SEQ ID NO: 2134967 - RNA, 19 nt, Artificial Sequence
  Description of Artificial Sequence: Synthetic oligonucleotide
aucaugucuccugggacua

SEQ ID NO: 2134968 - RNA, 19 nt, Artificial Sequence
  Description of Artificial Sequence: Synthetic oligonucleotide
uuugaaccuuguggcacua

SEQ ID NO: 2134969 - RNA, 19 nt, Artificial Sequence
  Description of Artificial Sequence: Synthetic oligonucleotide
ccuuguggcacuauaugaa

SEQ ID NO: 2134970 - RNA, 19 nt, Artificial Sequence
  Description of Artificial Sequence: Synthetic oligonucleotide
gaaccuuguggcacuauau

SEQ ID NO: 2134971 - RNA, 19 nt, Artificial Sequence
  Description of Artificial Sequence: Synthetic oligonucleotide
cccgcguacuccuuaacuc

SEQ ID NO: 2134972 - RNA, 19 nt, Artificial Sequence
  Description of Artificial Sequence: Synthetic oligonucleotide
aucuggaguucgugauggu

SEQ ID NO: 2134973 - RNA, 19 nt, Artificial Sequence
  Description of Artificial Sequence: Synthetic oligonucleotide
agcugugacuuucgccaaa

SEQ ID NO: 2134974 - RNA, 19 nt, Artificial Sequence
  Description of Artificial Sequence: Synthetic oligonucleotide
ugcgguggucaaagacuuc

SEQ ID NO: 2134975 - RNA, 19 nt, Artificial Sequence
  Description of Artificial Sequence: Synthetic oligonucleotide
ccugcguuucuguuguguc

SEQ ID NO: 2134976 - RNA, 19 nt, Artificial Sequence
  Description of Artificial Sequence: Synthetic oligonucleotide
gaauacagcgaagguguau

SEQ ID NO: 2134977 - RNA, 19 nt, Artificial Sequence
  Description of Artificial Sequence: Synthetic oligonucleotide
cgaaauaggcagugaugag

SEQ ID NO: 2134978 - RNA, 19 nt, Artificial Sequence
  Description of Artificial Sequence: Synthetic oligonucleotide
cgagcuaguuugcugcacc

SEQ ID NO: 2134979 - RNA, 19 nt, Artificial Sequence
  Description of Artificial Sequence: Synthetic oligonucleotide
cugugacuuucgccaaauc

SEQ ID NO: 2134980 - RNA, 19 nt, Artificial Sequence
  Description of Artificial Sequence: Synthetic oligonucleotide
ucccggaucuggaguucgu

SEQ ID NO: 2134981 - RNA, 19 nt, Artificial Sequence
  Description of Artificial Sequence: Synthetic oligonucleotide
caacucuaaugcuggcaaa

SEQ ID NO: 2134982 - RNA, 19 nt, Artificial Sequence
  Description of Artificial Sequence: Synthetic oligonucleotide
cccaaccuccaaauauuug

SEQ ID NO: 2134983 - RNA, 19 nt, Artificial Sequence
  Description of Artificial Sequence: Synthetic oligonucleotide
cguggacuuugcauucugg

SEQ ID NO: 2134984 - RNA, 19 nt, Artificial Sequence
  Description of Artificial Sequence: Synthetic oligonucleotide
acccuguaucugacaacuc

SEQ ID NO: 2134985 - RNA, 19 nt, Artificial Sequence
  Description of Artificial Sequence: Synthetic oligonucleotide
gcgguggucaaagacuuca

SEQ ID NO: 2134986 - RNA, 19 nt, Artificial Sequence
  Description of Artificial Sequence: Synthetic oligonucleotide
uacauaccgugggcaugcc

SEQ ID NO: 2134987 - RNA, 19 nt, Artificial Sequence
  Description of Artificial Sequence: Synthetic oligonucleotide
ggguuguuugucauaaggu

SEQ ID NO: 2134988 - RNA, 19 nt, Artificial Sequence
  Description of Artificial Sequence: Synthetic oligonucleotide
gcucguggacuuugcauuc

SEQ ID NO: 2134989 - RNA, 19 nt, Artificial Sequence
  Description of Artificial Sequence: Synthetic oligonucleotide
gccgccuugaacuguagcu

SEQ ID NO: 2134990 - RNA, 19 nt, Artificial Sequence
  Description of Artificial Sequence: Synthetic oligonucleotide
ugcccgcguacuccuuaac

SEQ ID NO: 2134991 - RNA, 19 nt, Artificial Sequence
  Description of Artificial Sequence: Synthetic oligonucleotide
gcguacuccuuaacucugg

SEQ ID NO: 2134992 - RNA, 19 nt, Artificial Sequence
  Description of Artificial Sequence: Synthetic oligonucleotide
ccuguaucugacaacucua

SEQ ID NO: 2134993 - RNA, 19 nt, Artificial Sequence
  Description of Artificial Sequence: Synthetic oligonucleotide
gucuggaggagagguuuuc

SEQ ID NO: 2134994 - RNA, 19 nt, Artificial Sequence
  Description of Artificial Sequence: Synthetic oligonucleotide
augcccgcguacuccuuaa

SEQ ID NO: 2134995 - RNA, 19 nt, Artificial Sequence
  Description of Artificial Sequence: Synthetic oligonucleotide
cugggacuaauccaucguu

SEQ ID NO: 2134996 - RNA, 19 nt, Artificial Sequence
  Description of Artificial Sequence: Synthetic oligonucleotide
cugcucguggacuuugcau

SEQ ID NO: 2134997 - RNA, 19 nt, Artificial Sequence
  Description of Artificial Sequence: Synthetic oligonucleotide
ccuggguuguuugucauaa

SEQ ID NO: 2134998 - RNA, 19 nt, Artificial Sequence
  Description of Artificial Sequence: Synthetic oligonucleotide
ggaguucgugaugguuucc

SEQ ID NO: 2134999 - RNA, 19 nt, Artificial Sequence
  Description of Artificial Sequence: Synthetic oligonucleotide
ggguguugugucucccgga

SEQ ID NO: 2135000 - RNA, 19 nt, Artificial Sequence
  Description of Artificial Sequence: Synthetic oligonucleotide
cccuguaucugacaacucu

SEQ ID NO: 2135001 - RNA, 19 nt, Artificial Sequence
  Description of Artificial Sequence: Synthetic oligonucleotide
ggcgagcuaguuugcugca

SEQ ID NO: 2135002 - RNA, 19 nt, Artificial Sequence
  Description of Artificial Sequence: Synthetic oligonucleotide
gaaggccugugcuguuuau

SEQ ID NO: 2135003 - RNA, 19 nt, Artificial Sequence
  Description of Artificial Sequence: Synthetic oligonucleotide
cgcguacuccuuaacucug

SEQ ID NO: 2135004 - RNA, 19 nt, Artificial Sequence
  Description of Artificial Sequence: Synthetic oligonucleotide
aaaugcccgcguacuccuu

SEQ ID NO: 2135005 - RNA, 19 nt, Artificial Sequence
  Description of Artificial Sequence: Synthetic oligonucleotide
acucugcugcgguggucaa

SEQ ID NO: 2135006 - RNA, 19 nt, Artificial Sequence
  Description of Artificial Sequence: Synthetic oligonucleotide
uaccgugggcaugccuggu

SEQ ID NO: 2135007 - RNA, 19 nt, Artificial Sequence
  Description of Artificial Sequence: Synthetic oligonucleotide
gggccaaaaguggguguug

SEQ ID NO: 2135008 - RNA, 19 nt, Artificial Sequence
  Description of Artificial Sequence: Synthetic oligonucleotide
cugcuagaacuuugcaauu

SEQ ID NO: 2135009 - RNA, 19 nt, Artificial Sequence
  Description of Artificial Sequence: Synthetic oligonucleotide
gggacuggaucuugugaau

SEQ ID NO: 2135010 - RNA, 19 nt, Artificial Sequence
  Description of Artificial Sequence: Synthetic oligonucleotide
cugugcucuucucuaccau

SEQ ID NO: 2135011 - RNA, 19 nt, Artificial Sequence
  Description of Artificial Sequence: Synthetic oligonucleotide
ccaucguuuccaagagaaa

SEQ ID NO: 2135012 - RNA, 19 nt, Artificial Sequence
  Description of Artificial Sequence: Synthetic oligonucleotide
gcccgcguacuccuuaacu

SEQ ID NO: 2135013 - RNA, 19 nt, Artificial Sequence
  Description of Artificial Sequence: Synthetic oligonucleotide
gcgagcuaguuugcugcac

SEQ ID NO: 2135014 - RNA, 19 nt, Artificial Sequence
  Description of Artificial Sequence: Synthetic oligonucleotide
cccggaucuggaguucgug

SEQ ID NO: 2135015 - RNA, 19 nt, Artificial Sequence
  Description of Artificial Sequence: Synthetic oligonucleotide
cguacuccuuaacucugga

SEQ ID NO: 2135016 - RNA, 19 nt, Artificial Sequence
  Description of Artificial Sequence: Synthetic oligonucleotide
cugcugcgguggucaaaga

SEQ ID NO: 2135017 - RNA, 19 nt, Artificial Sequence
  Description of Artificial Sequence: Synthetic oligonucleotide
ccugggacuaauccaucgu

SEQ ID NO: 2135018 - RNA, 19 nt, Artificial Sequence
  Description of Artificial Sequence: Synthetic oligonucleotide
cucguggacuuugcauucu

SEQ ID NO: 2135019 - RNA, 19 nt, Artificial Sequence
  Description of Artificial Sequence: Synthetic oligonucleotide
caguuaccuuguagaugcu

SEQ ID NO: 2135020 - RNA, 19 nt, Artificial Sequence
  Description of Artificial Sequence: Synthetic oligonucleotide
gcugugacuuucgccaaau

SEQ ID NO: 2135021 - RNA, 19 nt, Artificial Sequence
  Description of Artificial Sequence: Synthetic oligonucleotide
cucugcugcgguggucaaa

SEQ ID NO: 2135022 - RNA, 19 nt, Artificial Sequence
  Description of Artificial Sequence: Synthetic oligonucleotide
ccgccuugaacuguagcua

SEQ ID NO: 2135023 - RNA, 19 nt, Artificial Sequence
  Description of Artificial Sequence: Synthetic oligonucleotide
gcaggcgagcuaguuugcu

SEQ ID NO: 2135024 - RNA, 19 nt, Artificial Sequence
  Description of Artificial Sequence: Synthetic oligonucleotide
gcccuggguuguuugucau

SEQ ID NO: 2135025 - RNA, 19 nt, Artificial Sequence
  Description of Artificial Sequence: Synthetic oligonucleotide
ggcaugccuggugccccau

SEQ ID NO: 2135026 - RNA, 19 nt, Artificial Sequence
  Description of Artificial Sequence: Synthetic oligonucleotide
gaugacauaacccugaagg

SEQ ID NO: 2135027 - RNA, 19 nt, Artificial Sequence
  Description of Artificial Sequence: Synthetic oligonucleotide
ugagcuaagacccacaugu

SEQ ID NO: 2135028 - RNA, 19 nt, Artificial Sequence
  Description of Artificial Sequence: Synthetic oligonucleotide
aaauguugaggacugaaug

SEQ ID NO: 2135029 - RNA, 19 nt, Artificial Sequence
  Description of Artificial Sequence: Synthetic oligonucleotide
uaugacacccaacagauga

SEQ ID NO: 2135030 - RNA, 19 nt, Artificial Sequence
  Description of Artificial Sequence: Synthetic oligonucleotide
aaagagugaacaaagccac

SEQ ID NO: 2135031 - RNA, 19 nt, Artificial Sequence
  Description of Artificial Sequence: Synthetic oligonucleotide
aaacccaggaucuuucaac

SEQ ID NO: 2135032 - RNA, 19 nt, Artificial Sequence
  Description of Artificial Sequence: Synthetic oligonucleotide
uccaacaucacaaguagag

SEQ ID NO: 2135033 - RNA, 19 nt, Artificial Sequence
  Description of Artificial Sequence: Synthetic oligonucleotide
uauaguguaggcugcaggg

SEQ ID NO: 2135034 - RNA, 19 nt, Artificial Sequence
  Description of Artificial Sequence: Synthetic oligonucleotide
aacagaggcagucuuaugu

SEQ ID NO: 2135035 - RNA, 19 nt, Artificial Sequence
  Description of Artificial Sequence: Synthetic oligonucleotide
auauggcugagcuaagacc

SEQ ID NO: 2135036 - RNA, 19 nt, Artificial Sequence
  Description of Artificial Sequence: Synthetic oligonucleotide
uagagauugggaaauaacu

SEQ ID NO: 2135037 - RNA, 19 nt, Artificial Sequence
  Description of Artificial Sequence: Synthetic oligonucleotide
aauguugaggacugaauga

SEQ ID NO: 2135038 - RNA, 19 nt, Artificial Sequence
  Description of Artificial Sequence: Synthetic oligonucleotide
uuaaaugcuaagacuacca

SEQ ID NO: 2135039 - RNA, 19 nt, Artificial Sequence
  Description of Artificial Sequence: Synthetic oligonucleotide
uuaagagggaggaagcaag

SEQ ID NO: 2135040 - RNA, 19 nt, Artificial Sequence
  Description of Artificial Sequence: Synthetic oligonucleotide
aacuggcacacuaugaggc

SEQ ID NO: 2135041 - RNA, 19 nt, Artificial Sequence
  Description of Artificial Sequence: Synthetic oligonucleotide
ugaaugauggucugggcag

SEQ ID NO: 2135042 - RNA, 19 nt, Artificial Sequence
  Description of Artificial Sequence: Synthetic oligonucleotide
gaucuuucaacagaggcag

SEQ ID NO: 2135043 - RNA, 19 nt, Artificial Sequence
  Description of Artificial Sequence: Synthetic oligonucleotide
caaguuugcuacuuggucc

SEQ ID NO: 2135044 - RNA, 19 nt, Artificial Sequence
  Description of Artificial Sequence: Synthetic oligonucleotide
agacccacaugucaggccc

SEQ ID NO: 2135045 - RNA, 19 nt, Artificial Sequence
  Description of Artificial Sequence: Synthetic oligonucleotide
acaaguuugcuacuugguc

SEQ ID NO: 2135046 - RNA, 19 nt, Artificial Sequence
  Description of Artificial Sequence: Synthetic oligonucleotide
uugggaaauaacuuucuca

SEQ ID NO: 2135047 - RNA, 19 nt, Artificial Sequence
  Description of Artificial Sequence: Synthetic oligonucleotide
ugcgagugaagucagcucc

SEQ ID NO: 2135048 - RNA, 19 nt, Artificial Sequence
  Description of Artificial Sequence: Synthetic oligonucleotide
uaagacuaccaaauguuga

SEQ ID NO: 2135049 - RNA, 19 nt, Artificial Sequence
  Description of Artificial Sequence: Synthetic oligonucleotide
ugcuaagacuaccaaaugu

SEQ ID NO: 2135050 - RNA, 19 nt, Artificial Sequence
  Description of Artificial Sequence: Synthetic oligonucleotide
guugaggacugaaugaugg

SEQ ID NO: 2135051 - RNA, 19 nt, Artificial Sequence
  Description of Artificial Sequence: Synthetic oligonucleotide
gcuuauacaaguuugcuac

SEQ ID NO: 2135052 - RNA, 19 nt, Artificial Sequence
  Description of Artificial Sequence: Synthetic oligonucleotide
auauaguguaggcugcagg

SEQ ID NO: 2135053 - RNA, 19 nt, Artificial Sequence
  Description of Artificial Sequence: Synthetic oligonucleotide
aauaacuuucucaccagug

SEQ ID NO: 2135054 - RNA, 19 nt, Artificial Sequence
  Description of Artificial Sequence: Synthetic oligonucleotide
acuaccaaauguugaggac

SEQ ID NO: 2135055 - RNA, 19 nt, Artificial Sequence
  Description of Artificial Sequence: Synthetic oligonucleotide
guccauauaguguaggcug

SEQ ID NO: 2135056 - RNA, 19 nt, Artificial Sequence
  Description of Artificial Sequence: Synthetic oligonucleotide
uaacuuucucaccagugug

SEQ ID NO: 2135057 - RNA, 19 nt, Artificial Sequence
  Description of Artificial Sequence: Synthetic oligonucleotide
aaguuugcuacuugguccu

SEQ ID NO: 2135058 - RNA, 19 nt, Artificial Sequence
  Description of Artificial Sequence: Synthetic oligonucleotide
auugggaaauaacuuucuc

SEQ ID NO: 2135059 - RNA, 19 nt, Artificial Sequence
  Description of Artificial Sequence: Synthetic oligonucleotide
uuucuuccaagaaaaccca

SEQ ID NO: 2135060 - RNA, 19 nt, Artificial Sequence
  Description of Artificial Sequence: Synthetic oligonucleotide
aucacaaguagagauuggg

SEQ ID NO: 2135061 - RNA, 19 nt, Artificial Sequence
  Description of Artificial Sequence: Synthetic oligonucleotide
ugacauaacccugaaggcc

SEQ ID NO: 2135062 - RNA, 19 nt, Artificial Sequence
  Description of Artificial Sequence: Synthetic oligonucleotide
ggaaauaacuuucucacca

SEQ ID NO: 2135063 - RNA, 19 nt, Artificial Sequence
  Description of Artificial Sequence: Synthetic oligonucleotide
caaacacugaggcucagag

SEQ ID NO: 2135064 - RNA, 19 nt, Artificial Sequence
  Description of Artificial Sequence: Synthetic oligonucleotide
ugaagucagcuccaaacac

SEQ ID NO: 2135065 - RNA, 19 nt, Artificial Sequence
  Description of Artificial Sequence: Synthetic oligonucleotide
aacuuucucaccagugugg

SEQ ID NO: 2135066 - RNA, 19 nt, Artificial Sequence
  Description of Artificial Sequence: Synthetic oligonucleotide
uagcuuaagagggaggaag

SEQ ID NO: 2135067 - RNA, 19 nt, Artificial Sequence
  Description of Artificial Sequence: Synthetic oligonucleotide
aacccaggaucuuucaaca

SEQ ID NO: 2135068 - RNA, 19 nt, Artificial Sequence
  Description of Artificial Sequence: Synthetic oligonucleotide
cacuaugaggccuucuggg

SEQ ID NO: 2135069 - RNA, 19 nt, Artificial Sequence
  Description of Artificial Sequence: Synthetic oligonucleotide
gauauggcugagcuaagac

SEQ ID NO: 2135070 - RNA, 19 nt, Artificial Sequence
  Description of Artificial Sequence: Synthetic oligonucleotide
aggaugcucacaguuaugg

SEQ ID NO: 2135071 - RNA, 19 nt, Artificial Sequence
  Description of Artificial Sequence: Synthetic oligonucleotide
uaccaaauguugaggacug

SEQ ID NO: 2135072 - RNA, 19 nt, Artificial Sequence
  Description of Artificial Sequence: Synthetic oligonucleotide
ugaccuggaggagugaagg

SEQ ID NO: 2135073 - RNA, 19 nt, Artificial Sequence
  Description of Artificial Sequence: Synthetic oligonucleotide
agaagcuuauacaaguuug

SEQ ID NO: 2135074 - RNA, 19 nt, Artificial Sequence
  Description of Artificial Sequence: Synthetic oligonucleotide
agauugggaaauaacuuuc

SEQ ID NO: 2135075 - RNA, 19 nt, Artificial Sequence
  Description of Artificial Sequence: Synthetic oligonucleotide
gaagcuuauacaaguuugc

SEQ ID NO: 2135076 - RNA, 19 nt, Artificial Sequence
  Description of Artificial Sequence: Synthetic oligonucleotide
uaaaugcuaagacuaccaa

SEQ ID NO: 2135077 - RNA, 19 nt, Artificial Sequence
  Description of Artificial Sequence: Synthetic oligonucleotide
acugaaugauggucugggc

SEQ ID NO: 2135078 - RNA, 19 nt, Artificial Sequence
  Description of Artificial Sequence: Synthetic oligonucleotide
uccauauaguguaggcugc

SEQ ID NO: 2135079 - RNA, 19 nt, Artificial Sequence
  Description of Artificial Sequence: Synthetic oligonucleotide
acuggcacacuaugaggcc

SEQ ID NO: 2135080 - RNA, 19 nt, Artificial Sequence
  Description of Artificial Sequence: Synthetic oligonucleotide
agcuaguggggccagguag

SEQ ID NO: 2135081 - RNA, 19 nt, Artificial Sequence
  Description of Artificial Sequence: Synthetic oligonucleotide
agugaacaaagccacugcu

SEQ ID NO: 2135082 - RNA, 19 nt, Artificial Sequence
  Description of Artificial Sequence: Synthetic oligonucleotide
acacuaugaggccuucugg

SEQ ID NO: 2135083 - RNA, 19 nt, Artificial Sequence
  Description of Artificial Sequence: Synthetic oligonucleotide
gaagcaagaacagggcugc

SEQ ID NO: 2135084 - RNA, 19 nt, Artificial Sequence
  Description of Artificial Sequence: Synthetic oligonucleotide
gacuaccaaauguugagga

SEQ ID NO: 2135085 - RNA, 19 nt, Artificial Sequence
  Description of Artificial Sequence: Synthetic oligonucleotide
ucuuuaggagaugcgagug

SEQ ID NO: 2135086 - RNA, 19 nt, Artificial Sequence
  Description of Artificial Sequence: Synthetic oligonucleotide
uaguggugagagcuagugg

SEQ ID NO: 2135087 - RNA, 19 nt, Artificial Sequence
  Description of Artificial Sequence: Synthetic oligonucleotide
uacaaguuugcuacuuggu

SEQ ID NO: 2135088 - RNA, 19 nt, Artificial Sequence
  Description of Artificial Sequence: Synthetic oligonucleotide
uauggugccuggcaagucu

SEQ ID NO: 2135089 - RNA, 19 nt, Artificial Sequence
  Description of Artificial Sequence: Synthetic oligonucleotide
ugauggucugggcagcaag

SEQ ID NO: 2135090 - RNA, 19 nt, Artificial Sequence
  Description of Artificial Sequence: Synthetic oligonucleotide
aguuauggugccuggcaag

SEQ ID NO: 2135091 - RNA, 19 nt, Artificial Sequence
  Description of Artificial Sequence: Synthetic oligonucleotide
cucuccaugcuccacacug

SEQ ID NO: 2135092 - RNA, 19 nt, Artificial Sequence
  Description of Artificial Sequence: Synthetic oligonucleotide
ugugagagaggcacugcug

SEQ ID NO: 2135093 - RNA, 19 nt, Artificial Sequence
  Description of Artificial Sequence: Synthetic oligonucleotide
ugcuacuugguccugguuu

SEQ ID NO: 2135094 - RNA, 19 nt, Artificial Sequence
  Description of Artificial Sequence: Synthetic oligonucleotide
uguugaggacugaaugaug

SEQ ID NO: 2135095 - RNA, 19 nt, Artificial Sequence
  Description of Artificial Sequence: Synthetic oligonucleotide
agcaagaucaugguggccu

SEQ ID NO: 2135096 - RNA, 19 nt, Artificial Sequence
  Description of Artificial Sequence: Synthetic oligonucleotide
aguccucaaggcuuccugg

SEQ ID NO: 2135097 - RNA, 19 nt, Artificial Sequence
  Description of Artificial Sequence: Synthetic oligonucleotide
uucuuccaagaaaacccag

SEQ ID NO: 2135098 - RNA, 19 nt, Artificial Sequence
  Description of Artificial Sequence: Synthetic oligonucleotide
cuaagacccacaugucagg

SEQ ID NO: 2135099 - RNA, 19 nt, Artificial Sequence
  Description of Artificial Sequence: Synthetic oligonucleotide
aaaacccaggaucuuucaa

SEQ ID NO: 2135100 - RNA, 19 nt, Artificial Sequence
  Description of Artificial Sequence: Synthetic oligonucleotide
agcuuaagagggaggaagc

SEQ ID NO: 2135101 - RNA, 19 nt, Artificial Sequence
  Description of Artificial Sequence: Synthetic oligonucleotide
caacuggcacacuaugagg

SEQ ID NO: 2135102 - RNA, 19 nt, Artificial Sequence
  Description of Artificial Sequence: Synthetic oligonucleotide
agcuaagacccacauguca

SEQ ID NO: 2135103 - RNA, 19 nt, Artificial Sequence
  Description of Artificial Sequence: Synthetic oligonucleotide
ccuacauugaccugccugg

SEQ ID NO: 2135104 - RNA, 19 nt, Artificial Sequence
  Description of Artificial Sequence: Synthetic oligonucleotide
aaacacugaggcucagaga

SEQ ID NO: 2135105 - RNA, 19 nt, Artificial Sequence
  Description of Artificial Sequence: Synthetic oligonucleotide
acaguuauggugccuggca

SEQ ID NO: 2135106 - RNA, 19 nt, Artificial Sequence
  Description of Artificial Sequence: Synthetic oligonucleotide
agaggcagucuuauguccc

SEQ ID NO: 2135107 - RNA, 19 nt, Artificial Sequence
  Description of Artificial Sequence: Synthetic oligonucleotide
gcaagaacagggcugcugg

SEQ ID NO: 2135108 - RNA, 19 nt, Artificial Sequence
  Description of Artificial Sequence: Synthetic oligonucleotide
ugucugguucccaggcugg

SEQ ID NO: 2135109 - RNA, 19 nt, Artificial Sequence
  Description of Artificial Sequence: Synthetic oligonucleotide
augcaaguaguggugagag

SEQ ID NO: 2135110 - RNA, 19 nt, Artificial Sequence
  Description of Artificial Sequence: Synthetic oligonucleotide
ugguccauauaguguaggc

SEQ ID NO: 2135111 - RNA, 19 nt, Artificial Sequence
  Description of Artificial Sequence: Synthetic oligonucleotide
uuuaggagaugcgagugaa

SEQ ID NO: 2135112 - RNA, 19 nt, Artificial Sequence
  Description of Artificial Sequence: Synthetic oligonucleotide
agaaaacccaggaucuuuc

SEQ ID NO: 2135113 - RNA, 19 nt, Artificial Sequence
  Description of Artificial Sequence: Synthetic oligonucleotide
ucuuucaacagaggcaguc

SEQ ID NO: 2135114 - RNA, 19 nt, Artificial Sequence
  Description of Artificial Sequence: Synthetic oligonucleotide
aggaagcaagaacagggcu

SEQ ID NO: 2135115 - RNA, 19 nt, Artificial Sequence
  Description of Artificial Sequence: Synthetic oligonucleotide
uacauugaccugccuggcc

SEQ ID NO: 2135116 - RNA, 19 nt, Artificial Sequence
  Description of Artificial Sequence: Synthetic oligonucleotide
gcaacuggcacacuaugag

SEQ ID NO: 2135117 - RNA, 19 nt, Artificial Sequence
  Description of Artificial Sequence: Synthetic oligonucleotide
uagcccuacauugaccugc

SEQ ID NO: 2135118 - RNA, 19 nt, Artificial Sequence
  Description of Artificial Sequence: Synthetic oligonucleotide
cacacuaugaggccuucug

SEQ ID NO: 2135119 - RNA, 19 nt, Artificial Sequence
  Description of Artificial Sequence: Synthetic oligonucleotide
uggaguuccuuucuuccaa

SEQ ID NO: 2135120 - RNA, 19 nt, Artificial Sequence
  Description of Artificial Sequence: Synthetic oligonucleotide
ucucccauagcccuacauu

SEQ ID NO: 2135121 - RNA, 19 nt, Artificial Sequence
  Description of Artificial Sequence: Synthetic oligonucleotide
cuagggucucccauagccc

SEQ ID NO: 2135122 - RNA, 19 nt, Artificial Sequence
  Description of Artificial Sequence: Synthetic oligonucleotide
aguggcuaaccaccgggag

SEQ ID NO: 2135123 - RNA, 19 nt, Artificial Sequence
  Description of Artificial Sequence: Synthetic oligonucleotide
guugaucgccugcaacugg

SEQ ID NO: 2135124 - RNA, 19 nt, Artificial Sequence
  Description of Artificial Sequence: Synthetic oligonucleotide
uuucaacagaggcagucuu

SEQ ID NO: 2135125 - RNA, 19 nt, Artificial Sequence
  Description of Artificial Sequence: Synthetic oligonucleotide
agaugacauaacccugaag

SEQ ID NO: 2135126 - RNA, 19 nt, Artificial Sequence
  Description of Artificial Sequence: Synthetic oligonucleotide
uguggccacagcucuuuag

SEQ ID NO: 2135127 - RNA, 19 nt, Artificial Sequence
  Description of Artificial Sequence: Synthetic oligonucleotide
cuaugaggccuucugggug

SEQ ID NO: 2135128 - RNA, 19 nt, Artificial Sequence
  Description of Artificial Sequence: Synthetic oligonucleotide
ucacaguuauggugccugg

SEQ ID NO: 2135129 - RNA, 19 nt, Artificial Sequence
  Description of Artificial Sequence: Synthetic oligonucleotide
aagaaaacccaggaucuuu

SEQ ID NO: 2135130 - RNA, 19 nt, Artificial Sequence
  Description of Artificial Sequence: Synthetic oligonucleotide
cugguucccaggcuggucc

SEQ ID NO: 2135131 - RNA, 19 nt, Artificial Sequence
  Description of Artificial Sequence: Synthetic oligonucleotide
guagagauugggaaauaac

SEQ ID NO: 2135132 - RNA, 19 nt, Artificial Sequence
  Description of Artificial Sequence: Synthetic oligonucleotide
cugccuaugacacccaaca

SEQ ID NO: 2135133 - RNA, 19 nt, Artificial Sequence
  Description of Artificial Sequence: Synthetic oligonucleotide
ugccuaugacacccaacag

SEQ ID NO: 2135134 - RNA, 19 nt, Artificial Sequence
  Description of Artificial Sequence: Synthetic oligonucleotide
caucacaaguagagauugg

SEQ ID NO: 2135135 - RNA, 19 nt, Artificial Sequence
  Description of Artificial Sequence: Synthetic oligonucleotide
accgggagaagcuuauaca

SEQ ID NO: 2135136 - RNA, 19 nt, Artificial Sequence
  Description of Artificial Sequence: Synthetic oligonucleotide
uuccaacaucacaaguaga

SEQ ID NO: 2135137 - RNA, 19 nt, Artificial Sequence
  Description of Artificial Sequence: Synthetic oligonucleotide
augcgagugaagucagcuc

SEQ ID NO: 2135138 - RNA, 19 nt, Artificial Sequence
  Description of Artificial Sequence: Synthetic oligonucleotide
ccuagggucucccauagcc

SEQ ID NO: 2135139 - RNA, 19 nt, Artificial Sequence
  Description of Artificial Sequence: Synthetic oligonucleotide
acaugcaaguaguggugag

SEQ ID NO: 2135140 - RNA, 19 nt, Artificial Sequence
  Description of Artificial Sequence: Synthetic oligonucleotide
uccucaccaguccaguccu

SEQ ID NO: 2135141 - RNA, 19 nt, Artificial Sequence
  Description of Artificial Sequence: Synthetic oligonucleotide
auaacccugaaggccuggc

SEQ ID NO: 2135142 - RNA, 19 nt, Artificial Sequence
  Description of Artificial Sequence: Synthetic oligonucleotide
gaagucccugccuaugaca

SEQ ID NO: 2135143 - RNA, 19 nt, Artificial Sequence
  Description of Artificial Sequence: Synthetic oligonucleotide
guaguggugagagcuagug

SEQ ID NO: 2135144 - RNA, 19 nt, Artificial Sequence
  Description of Artificial Sequence: Synthetic oligonucleotide
uuugcuacuugguccuggu

SEQ ID NO: 2135145 - RNA, 19 nt, Artificial Sequence
  Description of Artificial Sequence: Synthetic oligonucleotide
aacaucacaaguagagauu

SEQ ID NO: 2135146 - RNA, 19 nt, Artificial Sequence
  Description of Artificial Sequence: Synthetic oligonucleotide
agagauugggaaauaacuu

SEQ ID NO: 2135147 - RNA, 19 nt, Artificial Sequence
  Description of Artificial Sequence: Synthetic oligonucleotide
ugggugcaaagagugaaca

SEQ ID NO: 2135148 - RNA, 19 nt, Artificial Sequence
  Description of Artificial Sequence: Synthetic oligonucleotide
gagauugggaaauaacuuu

SEQ ID NO: 2135149 - RNA, 19 nt, Artificial Sequence
  Description of Artificial Sequence: Synthetic oligonucleotide
agcucuuuaggagaugcga

SEQ ID NO: 2135150 - RNA, 19 nt, Artificial Sequence
  Description of Artificial Sequence: Synthetic oligonucleotide
uucaacagaggcagucuua

SEQ ID NO: 2135151 - RNA, 19 nt, Artificial Sequence
  Description of Artificial Sequence: Synthetic oligonucleotide
uccaugcuccacacugucc

SEQ ID NO: 2135152 - RNA, 19 nt, Artificial Sequence
  Description of Artificial Sequence: Synthetic oligonucleotide
gaggccucuggucaggaga

SEQ ID NO: 2135153 - RNA, 19 nt, Artificial Sequence
  Description of Artificial Sequence: Synthetic oligonucleotide
aggacugaaugauggucug

SEQ ID NO: 2135154 - RNA, 19 nt, Artificial Sequence
  Description of Artificial Sequence: Synthetic oligonucleotide
uggcuaaccaccgggagaa

SEQ ID NO: 2135155 - RNA, 19 nt, Artificial Sequence
  Description of Artificial Sequence: Synthetic oligonucleotide
acagaugacauaacccuga

SEQ ID NO: 2135156 - RNA, 19 nt, Artificial Sequence
  Description of Artificial Sequence: Synthetic oligonucleotide
gcuaagacccacaugucag

SEQ ID NO: 2135157 - RNA, 19 nt, Artificial Sequence
  Description of Artificial Sequence: Synthetic oligonucleotide
acaguaggucagugaagag

SEQ ID NO: 2135158 - RNA, 19 nt, Artificial Sequence
  Description of Artificial Sequence: Synthetic oligonucleotide
gaggcagucuuaugucccc

SEQ ID NO: 2135159 - RNA, 19 nt, Artificial Sequence
  Description of Artificial Sequence: Synthetic oligonucleotide
aucgccugcaacuggcaca

SEQ ID NO: 2135160 - RNA, 19 nt, Artificial Sequence
  Description of Artificial Sequence: Synthetic oligonucleotide
uccuuucuuccaagaaaac

SEQ ID NO: 2135161 - RNA, 19 nt, Artificial Sequence
  Description of Artificial Sequence: Synthetic oligonucleotide
aguagagauugggaaauaa

SEQ ID NO: 2135162 - RNA, 19 nt, Artificial Sequence
  Description of Artificial Sequence: Synthetic oligonucleotide
aguucugcuggauguggga

SEQ ID NO: 2135163 - RNA, 19 nt, Artificial Sequence
  Description of Artificial Sequence: Synthetic oligonucleotide
cauagcccuacauugaccu

SEQ ID NO: 2135164 - RNA, 19 nt, Artificial Sequence
  Description of Artificial Sequence: Synthetic oligonucleotide
gcaguggcuaaccaccggg

SEQ ID NO: 2135165 - RNA, 19 nt, Artificial Sequence
  Description of Artificial Sequence: Synthetic oligonucleotide
cacaguaggucagugaaga

SEQ ID NO: 2135166 - RNA, 19 nt, Artificial Sequence
  Description of Artificial Sequence: Synthetic oligonucleotide
auguugaggacugaaugau

SEQ ID NO: 2135167 - RNA, 19 nt, Artificial Sequence
  Description of Artificial Sequence: Synthetic oligonucleotide
guggagaggccucugguca

SEQ ID NO: 2135168 - RNA, 19 nt, Artificial Sequence
  Description of Artificial Sequence: Synthetic oligonucleotide
cauugaccugccuggcccg

SEQ ID NO: 2135169 - RNA, 19 nt, Artificial Sequence
  Description of Artificial Sequence: Synthetic oligonucleotide
gaggagugaaggccaggcc

SEQ ID NO: 2135170 - RNA, 19 nt, Artificial Sequence
  Description of Artificial Sequence: Synthetic oligonucleotide
gacauaacccugaaggccu

SEQ ID NO: 2135171 - RNA, 19 nt, Artificial Sequence
  Description of Artificial Sequence: Synthetic oligonucleotide
guuugcuacuugguccugg

SEQ ID NO: 2135172 - RNA, 19 nt, Artificial Sequence
  Description of Artificial Sequence: Synthetic oligonucleotide
ggagaugcgagugaaguca

SEQ ID NO: 2135173 - RNA, 19 nt, Artificial Sequence
  Description of Artificial Sequence: Synthetic oligonucleotide
uucugggugcaaagaguga

SEQ ID NO: 2135174 - RNA, 19 nt, Artificial Sequence
  Description of Artificial Sequence: Synthetic oligonucleotide
caccgggagaagcuuauac

SEQ ID NO: 2135175 - RNA, 19 nt, Artificial Sequence
  Description of Artificial Sequence: Synthetic oligonucleotide
ugcaaguaguggugagagc

SEQ ID NO: 2135176 - RNA, 19 nt, Artificial Sequence
  Description of Artificial Sequence: Synthetic oligonucleotide
agagggaagucccugccua

SEQ ID NO: 2135177 - RNA, 19 nt, Artificial Sequence
  Description of Artificial Sequence: Synthetic oligonucleotide
ucuaggggaugcuggugga

SEQ ID NO: 2135178 - RNA, 19 nt, Artificial Sequence
  Description of Artificial Sequence: Synthetic oligonucleotide
uggagaggccucuggucag

SEQ ID NO: 2135179 - RNA, 19 nt, Artificial Sequence
  Description of Artificial Sequence: Synthetic oligonucleotide
cauauaguguaggcugcag

SEQ ID NO: 2135180 - RNA, 19 nt, Artificial Sequence
  Description of Artificial Sequence: Synthetic oligonucleotide
gagaugcgagugaagucag

SEQ ID NO: 2135181 - RNA, 19 nt, Artificial Sequence
  Description of Artificial Sequence: Synthetic oligonucleotide
gucccugccuaugacaccc

SEQ ID NO: 2135182 - RNA, 19 nt, Artificial Sequence
  Description of Artificial Sequence: Synthetic oligonucleotide
gcuacuugguccugguuug

SEQ ID NO: 2135183 - RNA, 19 nt, Artificial Sequence
  Description of Artificial Sequence: Synthetic oligonucleotide
gaaugauggucugggcagc

SEQ ID NO: 2135184 - RNA, 19 nt, Artificial Sequence
  Description of Artificial Sequence: Synthetic oligonucleotide
ccuggaguuccuuucuucc

SEQ ID NO: 2135185 - RNA, 19 nt, Artificial Sequence
  Description of Artificial Sequence: Synthetic oligonucleotide
acccaggaucuuucaacag

SEQ ID NO: 2135186 - RNA, 19 nt, Artificial Sequence
  Description of Artificial Sequence: Synthetic oligonucleotide
uggggacaugcaaguagug

SEQ ID NO: 2135187 - RNA, 19 nt, Artificial Sequence
  Description of Artificial Sequence: Synthetic oligonucleotide
gaccagaggucccugcaca

SEQ ID NO: 2135188 - RNA, 19 nt, Artificial Sequence
  Description of Artificial Sequence: Synthetic oligonucleotide
ggaucuuucaacagaggca

SEQ ID NO: 2135189 - RNA, 19 nt, Artificial Sequence
  Description of Artificial Sequence: Synthetic oligonucleotide
ggggacaugcaaguagugg

SEQ ID NO: 2135190 - RNA, 19 nt, Artificial Sequence
  Description of Artificial Sequence: Synthetic oligonucleotide
gaucgccugcaacuggcac

SEQ ID NO: 2135191 - RNA, 19 nt, Artificial Sequence
  Description of Artificial Sequence: Synthetic oligonucleotide
cagcucuuuaggagaugcg

SEQ ID NO: 2135192 - RNA, 19 nt, Artificial Sequence
  Description of Artificial Sequence: Synthetic oligonucleotide
cugggugcaaagagugaac

SEQ ID NO: 2135193 - RNA, 19 nt, Artificial Sequence
  Description of Artificial Sequence: Synthetic oligonucleotide
agcaagaacagggcugcug

SEQ ID NO: 2135194 - RNA, 19 nt, Artificial Sequence
  Description of Artificial Sequence: Synthetic oligonucleotide
gcugacuucgguccuggag

SEQ ID NO: 2135195 - RNA, 19 nt, Artificial Sequence
  Description of Artificial Sequence: Synthetic oligonucleotide
gaugcgagugaagucagcu

SEQ ID NO: 2135196 - RNA, 19 nt, Artificial Sequence
  Description of Artificial Sequence: Synthetic oligonucleotide
ggggauauggcugagcuaa

SEQ ID NO: 2135197 - RNA, 19 nt, Artificial Sequence
  Description of Artificial Sequence: Synthetic oligonucleotide
gccuaugacacccaacaga

SEQ ID NO: 2135198 - RNA, 19 nt, Artificial Sequence
  Description of Artificial Sequence: Synthetic oligonucleotide
uggccuagcuuaagaggga

SEQ ID NO: 2135199 - RNA, 19 nt, Artificial Sequence
  Description of Artificial Sequence: Synthetic oligonucleotide
gaggacugaaugauggucu

SEQ ID NO: 2135200 - RNA, 19 nt, Artificial Sequence
  Description of Artificial Sequence: Synthetic oligonucleotide
auaguguaggcugcagggu

SEQ ID NO: 2135201 - RNA, 19 nt, Artificial Sequence
  Description of Artificial Sequence: Synthetic oligonucleotide
cacccaacagaugacauaa

SEQ ID NO: 2135202 - RNA, 19 nt, Artificial Sequence
  Description of Artificial Sequence: Synthetic oligonucleotide
ugaucgccugcaacuggca

SEQ ID NO: 2135203 - RNA, 19 nt, Artificial Sequence
  Description of Artificial Sequence: Synthetic oligonucleotide
cuuuaggagaugcgaguga

SEQ ID NO: 2135204 - RNA, 19 nt, Artificial Sequence
  Description of Artificial Sequence: Synthetic oligonucleotide
gcugucuaggggaugcugg

SEQ ID NO: 2135205 - RNA, 19 nt, Artificial Sequence
  Description of Artificial Sequence: Synthetic oligonucleotide
ggugcaaagagugaacaaa

SEQ ID NO: 2135206 - RNA, 19 nt, Artificial Sequence
  Description of Artificial Sequence: Synthetic oligonucleotide
gagaagcuuauacaaguuu

SEQ ID NO: 2135207 - RNA, 19 nt, Artificial Sequence
  Description of Artificial Sequence: Synthetic oligonucleotide
gauggucugggcagcaaga

SEQ ID NO: 2135208 - RNA, 19 nt, Artificial Sequence
  Description of Artificial Sequence: Synthetic oligonucleotide
ucugggcugcugacuucgg

SEQ ID NO: 2135209 - RNA, 19 nt, Artificial Sequence
  Description of Artificial Sequence: Synthetic oligonucleotide
ggccacagcucuuuaggag

SEQ ID NO: 2135210 - RNA, 19 nt, Artificial Sequence
  Description of Artificial Sequence: Synthetic oligonucleotide
ugaccugccuggcccgugc

SEQ ID NO: 2135211 - RNA, 19 nt, Artificial Sequence
  Description of Artificial Sequence: Synthetic oligonucleotide
auagcccuacauugaccug

SEQ ID NO: 2135212 - RNA, 19 nt, Artificial Sequence
  Description of Artificial Sequence: Synthetic oligonucleotide
cugagcuaagacccacaug

SEQ ID NO: 2135213 - RNA, 19 nt, Artificial Sequence
  Description of Artificial Sequence: Synthetic oligonucleotide
agcugugagagaggcacug

SEQ ID NO: 2135214 - RNA, 19 nt, Artificial Sequence
  Description of Artificial Sequence: Synthetic oligonucleotide
agcccuacauugaccugcc

SEQ ID NO: 2135215 - RNA, 19 nt, Artificial Sequence
  Description of Artificial Sequence: Synthetic oligonucleotide
cuggaugugggaggcagug

SEQ ID NO: 2135216 - RNA, 19 nt, Artificial Sequence
  Description of Artificial Sequence: Synthetic oligonucleotide
caccaguccaguccucaag

SEQ ID NO: 2135217 - RNA, 19 nt, Artificial Sequence
  Description of Artificial Sequence: Synthetic oligonucleotide
gauugggaaauaacuuucu

SEQ ID NO: 2135218 - RNA, 19 nt, Artificial Sequence
  Description of Artificial Sequence: Synthetic oligonucleotide
guggcuaaccaccgggaga

SEQ ID NO: 2135219 - RNA, 19 nt, Artificial Sequence
  Description of Artificial Sequence: Synthetic oligonucleotide
ugucuaggggaugcuggug

SEQ ID NO: 2135220 - RNA, 19 nt, Artificial Sequence
  Description of Artificial Sequence: Synthetic oligonucleotide
cuaccaaauguugaggacu

SEQ ID NO: 2135221 - RNA, 19 nt, Artificial Sequence
  Description of Artificial Sequence: Synthetic oligonucleotide
ucgccugcaacuggcacac

SEQ ID NO: 2135222 - RNA, 19 nt, Artificial Sequence
  Description of Artificial Sequence: Synthetic oligonucleotide
uggcaagucucugggcugc

SEQ ID NO: 2135223 - RNA, 19 nt, Artificial Sequence
  Description of Artificial Sequence: Synthetic oligonucleotide
uggcccgugccacugcuuc

SEQ ID NO: 2135224 - RNA, 19 nt, Artificial Sequence
  Description of Artificial Sequence: Synthetic oligonucleotide
acacccaacagaugacaua

SEQ ID NO: 2135225 - RNA, 19 nt, Artificial Sequence
  Description of Artificial Sequence: Synthetic oligonucleotide
gcuggcccaguucugcugg

SEQ ID NO: 2135226 - RNA, 19 nt, Artificial Sequence
  Description of Artificial Sequence: Synthetic oligonucleotide
aguguaggcugcaggguug

SEQ ID NO: 2135227 - RNA, 19 nt, Artificial Sequence
  Description of Artificial Sequence: Synthetic oligonucleotide
cuacauugaccugccuggc

SEQ ID NO: 2135228 - RNA, 19 nt, Artificial Sequence
  Description of Artificial Sequence: Synthetic oligonucleotide
agaugcgagugaagucagc

SEQ ID NO: 2135229 - RNA, 19 nt, Artificial Sequence
  Description of Artificial Sequence: Synthetic oligonucleotide
aagggccccaaugucuggu

SEQ ID NO: 2135230 - RNA, 19 nt, Artificial Sequence
  Description of Artificial Sequence: Synthetic oligonucleotide
cacaguuauggugccuggc

SEQ ID NO: 2135231 - RNA, 19 nt, Artificial Sequence
  Description of Artificial Sequence: Synthetic oligonucleotide
guaggucagugaagagugg

SEQ ID NO: 2135232 - RNA, 19 nt, Artificial Sequence
  Description of Artificial Sequence: Synthetic oligonucleotide
acacaguaggucagugaag

SEQ ID NO: 2135233 - RNA, 19 nt, Artificial Sequence
  Description of Artificial Sequence: Synthetic oligonucleotide
gaugcugguggagaggccu

SEQ ID NO: 2135234 - RNA, 19 nt, Artificial Sequence
  Description of Artificial Sequence: Synthetic oligonucleotide
uggugucacacagcuguga

SEQ ID NO: 2135235 - RNA, 19 nt, Artificial Sequence
  Description of Artificial Sequence: Synthetic oligonucleotide
ggaggcaguggcuaaccac

SEQ ID NO: 2135236 - RNA, 19 nt, Artificial Sequence
  Description of Artificial Sequence: Synthetic oligonucleotide
caagucucugggcugcuga

SEQ ID NO: 2135237 - RNA, 19 nt, Artificial Sequence
  Description of Artificial Sequence: Synthetic oligonucleotide
ggucaggagagggaagucc

SEQ ID NO: 2135238 - RNA, 19 nt, Artificial Sequence
  Description of Artificial Sequence: Synthetic oligonucleotide
cuaaccaccgggagaagcu

SEQ ID NO: 2135239 - RNA, 19 nt, Artificial Sequence
  Description of Artificial Sequence: Synthetic oligonucleotide
ccaaugucugguucccagg

SEQ ID NO: 2135240 - RNA, 19 nt, Artificial Sequence
  Description of Artificial Sequence: Synthetic oligonucleotide
gggacaugcaaguaguggu

SEQ ID NO: 2135241 - RNA, 19 nt, Artificial Sequence
  Description of Artificial Sequence: Synthetic oligonucleotide
ucaaggcuuccuggggacc

SEQ ID NO: 2135242 - RNA, 19 nt, Artificial Sequence
  Description of Artificial Sequence: Synthetic oligonucleotide
agagcuaguggggccaggu

SEQ ID NO: 2135243 - RNA, 19 nt, Artificial Sequence
  Description of Artificial Sequence: Synthetic oligonucleotide
cacugcuuccaacaucaca

SEQ ID NO: 2135244 - RNA, 19 nt, Artificial Sequence
  Description of Artificial Sequence: Synthetic oligonucleotide
gagagggacagggcucucc

SEQ ID NO: 2135245 - RNA, 19 nt, Artificial Sequence
  Description of Artificial Sequence: Synthetic oligonucleotide
cuggaguuccuuucuucca

SEQ ID NO: 2135246 - RNA, 19 nt, Artificial Sequence
  Description of Artificial Sequence: Synthetic oligonucleotide
cuccaugcuccacacuguc

SEQ ID NO: 2135247 - RNA, 19 nt, Artificial Sequence
  Description of Artificial Sequence: Synthetic oligonucleotide
gcuaguggggccagguagg

SEQ ID NO: 2135248 - RNA, 19 nt, Artificial Sequence
  Description of Artificial Sequence: Synthetic oligonucleotide
cccuacauugaccugccug

SEQ ID NO: 2135249 - RNA, 19 nt, Artificial Sequence
  Description of Artificial Sequence: Synthetic oligonucleotide
cucaccaguguggccacag

SEQ ID NO: 2135250 - RNA, 19 nt, Artificial Sequence
  Description of Artificial Sequence: Synthetic oligonucleotide
ggacaugcaaguaguggug

SEQ ID NO: 2135251 - RNA, 19 nt, Artificial Sequence
  Description of Artificial Sequence: Synthetic oligonucleotide
caacagaggcagucuuaug

SEQ ID NO: 2135252 - RNA, 19 nt, Artificial Sequence
  Description of Artificial Sequence: Synthetic oligonucleotide
cauaacccugaaggccugg

SEQ ID NO: 2135253 - RNA, 19 nt, Artificial Sequence
  Description of Artificial Sequence: Synthetic oligonucleotide
uaguggggccagguaggcg

SEQ ID NO: 2135254 - RNA, 19 nt, Artificial Sequence
  Description of Artificial Sequence: Synthetic oligonucleotide
aaguagagauugggaaaua

SEQ ID NO: 2135255 - RNA, 19 nt, Artificial Sequence
  Description of Artificial Sequence: Synthetic oligonucleotide
ugagagcuaguggggccag

SEQ ID NO: 2135256 - RNA, 19 nt, Artificial Sequence
  Description of Artificial Sequence: Synthetic oligonucleotide
cccaaugucugguucccag

SEQ ID NO: 2135257 - RNA, 19 nt, Artificial Sequence
  Description of Artificial Sequence: Synthetic oligonucleotide
agaggccucuggucaggag

SEQ ID NO: 2135258 - RNA, 19 nt, Artificial Sequence
  Description of Artificial Sequence: Synthetic oligonucleotide
ucaccaguccaguccucaa

SEQ ID NO: 2135259 - RNA, 19 nt, Artificial Sequence
  Description of Artificial Sequence: Synthetic oligonucleotide
caagaucaugguggccucc

SEQ ID NO: 2135260 - RNA, 19 nt, Artificial Sequence
  Description of Artificial Sequence: Synthetic oligonucleotide
gaggaugcucacaguuaug

SEQ ID NO: 2135261 - RNA, 19 nt, Artificial Sequence
  Description of Artificial Sequence: Synthetic oligonucleotide
gugaccuggaggagugaag

SEQ ID NO: 2135262 - RNA, 19 nt, Artificial Sequence
  Description of Artificial Sequence: Synthetic oligonucleotide
cuuauacaaguuugcuacu

SEQ ID NO: 2135263 - RNA, 19 nt, Artificial Sequence
  Description of Artificial Sequence: Synthetic oligonucleotide
gguugaucgccugcaacug

SEQ ID NO: 2135264 - RNA, 19 nt, Artificial Sequence
  Description of Artificial Sequence: Synthetic oligonucleotide
cugaggaugcucacaguua

SEQ ID NO: 2135265 - RNA, 19 nt, Artificial Sequence
  Description of Artificial Sequence: Synthetic oligonucleotide
cuccaaacacugaggcuca

SEQ ID NO: 2135266 - RNA, 19 nt, Artificial Sequence
  Description of Artificial Sequence: Synthetic oligonucleotide
uggcacacuaugaggccuu

SEQ ID NO: 2135267 - RNA, 19 nt, Artificial Sequence
  Description of Artificial Sequence: Synthetic oligonucleotide
uuauggugccuggcaaguc

SEQ ID NO: 2135268 - RNA, 19 nt, Artificial Sequence
  Description of Artificial Sequence: Synthetic oligonucleotide
uggugccuggcaagucucu

SEQ ID NO: 2135269 - RNA, 19 nt, Artificial Sequence
  Description of Artificial Sequence: Synthetic oligonucleotide
caaguagagauugggaaau

SEQ ID NO: 2135270 - RNA, 19 nt, Artificial Sequence
  Description of Artificial Sequence: Synthetic oligonucleotide
ccauagcccuacauugacc

SEQ ID NO: 2135271 - RNA, 19 nt, Artificial Sequence
  Description of Artificial Sequence: Synthetic oligonucleotide
cuaggggaugcugguggag

SEQ ID NO: 2135272 - RNA, 19 nt, Artificial Sequence
  Description of Artificial Sequence: Synthetic oligonucleotide
caguuauggugccuggcaa

SEQ ID NO: 2135273 - RNA, 19 nt, Artificial Sequence
  Description of Artificial Sequence: Synthetic oligonucleotide
cacaugucaggcccugaga

SEQ ID NO: 2135274 - RNA, 19 nt, Artificial Sequence
  Description of Artificial Sequence: Synthetic oligonucleotide
acccaacagaugacauaac

SEQ ID NO: 2135275 - RNA, 19 nt, Artificial Sequence
  Description of Artificial Sequence: Synthetic oligonucleotide
uggcugagcuaagacccac

SEQ ID NO: 2135276 - RNA, 19 nt, Artificial Sequence
  Description of Artificial Sequence: Synthetic oligonucleotide
aggcccugagacccaagau

SEQ ID NO: 2135277 - RNA, 19 nt, Artificial Sequence
  Description of Artificial Sequence: Synthetic oligonucleotide
cuacuugguccugguuugc

SEQ ID NO: 2135278 - RNA, 19 nt, Artificial Sequence
  Description of Artificial Sequence: Synthetic oligonucleotide
uccaaacacugaggcucag

SEQ ID NO: 2135279 - RNA, 19 nt, Artificial Sequence
  Description of Artificial Sequence: Synthetic oligonucleotide
ccuagcuuaagagggagga

SEQ ID NO: 2135280 - RNA, 19 nt, Artificial Sequence
  Description of Artificial Sequence: Synthetic oligonucleotide
gugagagcuaguggggcca

SEQ ID NO: 2135281 - RNA, 19 nt, Artificial Sequence
  Description of Artificial Sequence: Synthetic oligonucleotide
caguaggucagugaagagu

SEQ ID NO: 2135282 - RNA, 19 nt, Artificial Sequence
  Description of Artificial Sequence: Synthetic oligonucleotide
guuauggugccuggcaagu

SEQ ID NO: 2135283 - RNA, 19 nt, Artificial Sequence
  Description of Artificial Sequence: Synthetic oligonucleotide
gagcuaagacccacauguc

SEQ ID NO: 2135284 - RNA, 19 nt, Artificial Sequence
  Description of Artificial Sequence: Synthetic oligonucleotide
ggcugcaggguugaucgcc

SEQ ID NO: 2135285 - RNA, 19 nt, Artificial Sequence
  Description of Artificial Sequence: Synthetic oligonucleotide
ccgggagaagcuuauacaa

SEQ ID NO: 2135286 - RNA, 19 nt, Artificial Sequence
  Description of Artificial Sequence: Synthetic oligonucleotide
gcuaagacuaccaaauguu

SEQ ID NO: 2135287 - RNA, 19 nt, Artificial Sequence
  Description of Artificial Sequence: Synthetic oligonucleotide
gagagcuaguggggccagg

SEQ ID NO: 2135288 - RNA, 19 nt, Artificial Sequence
  Description of Artificial Sequence: Synthetic oligonucleotide
ggccuagcuuaagagggag

SEQ ID NO: 2135289 - RNA, 19 nt, Artificial Sequence
  Description of Artificial Sequence: Synthetic oligonucleotide
caguggcuaaccaccggga

SEQ ID NO: 2135290 - RNA, 19 nt, Artificial Sequence
  Description of Artificial Sequence: Synthetic oligonucleotide
ccuugggcugucuagggga

SEQ ID NO: 2135291 - RNA, 19 nt, Artificial Sequence
  Description of Artificial Sequence: Synthetic oligonucleotide
cucuggucaggagagggaa

SEQ ID NO: 2135292 - RNA, 19 nt, Artificial Sequence
  Description of Artificial Sequence: Synthetic oligonucleotide
uaaccaccgggagaagcuu

SEQ ID NO: 2135293 - RNA, 19 nt, Artificial Sequence
  Description of Artificial Sequence: Synthetic oligonucleotide
cuuucaacagaggcagucu

SEQ ID NO: 2135294 - RNA, 19 nt, Artificial Sequence
  Description of Artificial Sequence: Synthetic oligonucleotide
acauaacccugaaggccug

SEQ ID NO: 2135295 - RNA, 19 nt, Artificial Sequence
  Description of Artificial Sequence: Synthetic oligonucleotide
cacuguccucaccagucca

SEQ ID NO: 2135296 - RNA, 19 nt, Artificial Sequence
  Description of Artificial Sequence: Synthetic oligonucleotide
uggucaggagagggaaguc

SEQ ID NO: 2135297 - RNA, 19 nt, Artificial Sequence
  Description of Artificial Sequence: Synthetic oligonucleotide
cucaccaguccaguccuca

SEQ ID NO: 2135298 - RNA, 19 nt, Artificial Sequence
  Description of Artificial Sequence: Synthetic oligonucleotide
aagcaagaacagggcugcu

SEQ ID NO: 2135299 - RNA, 19 nt, Artificial Sequence
  Description of Artificial Sequence: Synthetic oligonucleotide
agguaggcggcugguguca

SEQ ID NO: 2135300 - RNA, 19 nt, Artificial Sequence
  Description of Artificial Sequence: Synthetic oligonucleotide
aaccaccgggagaagcuua

SEQ ID NO: 2135301 - RNA, 19 nt, Artificial Sequence
  Description of Artificial Sequence: Synthetic oligonucleotide
ggaccagaggucccugcac

SEQ ID NO: 2135302 - RNA, 19 nt, Artificial Sequence
  Description of Artificial Sequence: Synthetic oligonucleotide
accaaauguugaggacuga

SEQ ID NO: 2135303 - RNA, 19 nt, Artificial Sequence
  Description of Artificial Sequence: Synthetic oligonucleotide
ggauauggcugagcuaaga

SEQ ID NO: 2135304 - RNA, 19 nt, Artificial Sequence
  Description of Artificial Sequence: Synthetic oligonucleotide
guggggacaugcaaguagu

SEQ ID NO: 2135305 - RNA, 19 nt, Artificial Sequence
  Description of Artificial Sequence: Synthetic oligonucleotide
cuagcuuaagagggaggaa

SEQ ID NO: 2135306 - RNA, 19 nt, Artificial Sequence
  Description of Artificial Sequence: Synthetic oligonucleotide
cagcaagaucaugguggcc

SEQ ID NO: 2135307 - RNA, 19 nt, Artificial Sequence
  Description of Artificial Sequence: Synthetic oligonucleotide
ucccugccuaugacaccca

SEQ ID NO: 2135308 - RNA, 19 nt, Artificial Sequence
  Description of Artificial Sequence: Synthetic oligonucleotide
ggggaagggccccaauguc

SEQ ID NO: 2135309 - RNA, 19 nt, Artificial Sequence
  Description of Artificial Sequence: Synthetic oligonucleotide
gcaagaucaugguggccuc

SEQ ID NO: 2135310 - RNA, 19 nt, Artificial Sequence
  Description of Artificial Sequence: Synthetic oligonucleotide
ugcugacuucgguccugga

SEQ ID NO: 2135311 - RNA, 19 nt, Artificial Sequence
  Description of Artificial Sequence: Synthetic oligonucleotide
gccuagcuuaagagggagg

SEQ ID NO: 2135312 - RNA, 19 nt, Artificial Sequence
  Description of Artificial Sequence: Synthetic oligonucleotide
cagguggggacaugcaagu

SEQ ID NO: 2135313 - RNA, 19 nt, Artificial Sequence
  Description of Artificial Sequence: Synthetic oligonucleotide
uugaccugccuggcccgug

SEQ ID NO: 2135314 - RNA, 19 nt, Artificial Sequence
  Description of Artificial Sequence: Synthetic oligonucleotide
cgugccacugcuuccaaca

SEQ ID NO: 2135315 - RNA, 19 nt, Artificial Sequence
  Description of Artificial Sequence: Synthetic oligonucleotide
caccaguguggccacagcu

SEQ ID NO: 2135316 - RNA, 19 nt, Artificial Sequence
  Description of Artificial Sequence: Synthetic oligonucleotide
ggggaugcugguggagagg

SEQ ID NO: 2135317 - RNA, 19 nt, Artificial Sequence
  Description of Artificial Sequence: Synthetic oligonucleotide
acccuggaguuccuuucuu

SEQ ID NO: 2135318 - RNA, 19 nt, Artificial Sequence
  Description of Artificial Sequence: Synthetic oligonucleotide
auugaccugccuggcccgu

SEQ ID NO: 2135319 - RNA, 19 nt, Artificial Sequence
  Description of Artificial Sequence: Synthetic oligonucleotide
ggucccugcacagccagga

SEQ ID NO: 2135320 - RNA, 19 nt, Artificial Sequence
  Description of Artificial Sequence: Synthetic oligonucleotide
guccaguccucaaggcuuc

SEQ ID NO: 2135321 - RNA, 19 nt, Artificial Sequence
  Description of Artificial Sequence: Synthetic oligonucleotide
gagcuaguggggccaggua

SEQ ID NO: 2135322 - RNA, 19 nt, Artificial Sequence
  Description of Artificial Sequence: Synthetic oligonucleotide
ccaacaucacaaguagaga

SEQ ID NO: 2135323 - RNA, 19 nt, Artificial Sequence
  Description of Artificial Sequence: Synthetic oligonucleotide
gcugugagagaggcacugc

SEQ ID NO: 2135324 - RNA, 19 nt, Artificial Sequence
  Description of Artificial Sequence: Synthetic oligonucleotide
accaccgggagaagcuuau

SEQ ID NO: 2135325 - RNA, 19 nt, Artificial Sequence
  Description of Artificial Sequence: Synthetic oligonucleotide
cagggcacggugaccugga

SEQ ID NO: 2135326 - RNA, 19 nt, Artificial Sequence
  Description of Artificial Sequence: Synthetic oligonucleotide
gagaggccucuggucagga

SEQ ID NO: 2135327 - RNA, 19 nt, Artificial Sequence
  Description of Artificial Sequence: Synthetic oligonucleotide
ccccuagggucucccauag

SEQ ID NO: 2135328 - RNA, 19 nt, Artificial Sequence
  Description of Artificial Sequence: Synthetic oligonucleotide
gagggaagucccugccuau

SEQ ID NO: 2135329 - RNA, 19 nt, Artificial Sequence
  Description of Artificial Sequence: Synthetic oligonucleotide
gcaggguugaucgccugca

SEQ ID NO: 2135330 - RNA, 19 nt, Artificial Sequence
  Description of Artificial Sequence: Synthetic oligonucleotide
ggaugcucacaguuauggu

SEQ ID NO: 2135331 - RNA, 19 nt, Artificial Sequence
  Description of Artificial Sequence: Synthetic oligonucleotide
ccuggcaagucucugggcu

SEQ ID NO: 2135332 - RNA, 19 nt, Artificial Sequence
  Description of Artificial Sequence: Synthetic oligonucleotide
gccugcaacuggcacacua

SEQ ID NO: 2135333 - RNA, 19 nt, Artificial Sequence
  Description of Artificial Sequence: Synthetic oligonucleotide
gggauauggcugagcuaag

SEQ ID NO: 2135334 - RNA, 19 nt, Artificial Sequence
  Description of Artificial Sequence: Synthetic oligonucleotide
ggcccugagacccaagauu

SEQ ID NO: 2135335 - RNA, 19 nt, Artificial Sequence
  Description of Artificial Sequence: Synthetic oligonucleotide
gcugagcuaagacccacau

SEQ ID NO: 2135336 - RNA, 19 nt, Artificial Sequence
  Description of Artificial Sequence: Synthetic oligonucleotide
cuggcacacuaugaggccu

SEQ ID NO: 2135337 - RNA, 19 nt, Artificial Sequence
  Description of Artificial Sequence: Synthetic oligonucleotide
cuugggcugucuaggggau

SEQ ID NO: 2135338 - RNA, 19 nt, Artificial Sequence
  Description of Artificial Sequence: Synthetic oligonucleotide
gggaggcaguggcuaacca

SEQ ID NO: 2135339 - RNA, 19 nt, Artificial Sequence
  Description of Artificial Sequence: Synthetic oligonucleotide
gggaagggccccaaugucu

SEQ ID NO: 2135340 - RNA, 19 nt, Artificial Sequence
  Description of Artificial Sequence: Synthetic oligonucleotide
gccccaaugucugguuccc

SEQ ID NO: 2135341 - RNA, 19 nt, Artificial Sequence
  Description of Artificial Sequence: Synthetic oligonucleotide
agccagccuggccuagcuu

SEQ ID NO: 2135342 - RNA, 19 nt, Artificial Sequence
  Description of Artificial Sequence: Synthetic oligonucleotide
gguccugguuugcccugug

SEQ ID NO: 2135343 - RNA, 19 nt, Artificial Sequence
  Description of Artificial Sequence: Synthetic oligonucleotide
ggcccgugccacugcuucc

SEQ ID NO: 2135344 - RNA, 19 nt, Artificial Sequence
  Description of Artificial Sequence: Synthetic oligonucleotide
gggucucccauagcccuac

SEQ ID NO: 2135345 - RNA, 19 nt, Artificial Sequence
  Description of Artificial Sequence: Synthetic oligonucleotide
ggaugcugguggagaggcc

SEQ ID NO: 2135346 - RNA, 19 nt, Artificial Sequence
  Description of Artificial Sequence: Synthetic oligonucleotide
cacccuggaguuccuuucu

SEQ ID NO: 2135347 - RNA, 19 nt, Artificial Sequence
  Description of Artificial Sequence: Synthetic oligonucleotide
ggagaagcuuauacaaguu

SEQ ID NO: 2135348 - RNA, 19 nt, Artificial Sequence
  Description of Artificial Sequence: Synthetic oligonucleotide
gcgagugaagucagcucca

SEQ ID NO: 2135349 - RNA, 19 nt, Artificial Sequence
  Description of Artificial Sequence: Synthetic oligonucleotide
ccucuggucaggagaggga

SEQ ID NO: 2135350 - RNA, 19 nt, Artificial Sequence
  Description of Artificial Sequence: Synthetic oligonucleotide
aggcuuccuggggaccaga

SEQ ID NO: 2135351 - RNA, 19 nt, Artificial Sequence
  Description of Artificial Sequence: Synthetic oligonucleotide
ggccuucugggugcaaaga

SEQ ID NO: 2135352 - RNA, 19 nt, Artificial Sequence
  Description of Artificial Sequence: Synthetic oligonucleotide
ccauauaguguaggcugca

SEQ ID NO: 2135353 - RNA, 19 nt, Artificial Sequence
  Description of Artificial Sequence: Synthetic oligonucleotide
gcaagucucugggcugcug

SEQ ID NO: 2135354 - RNA, 19 nt, Artificial Sequence
  Description of Artificial Sequence: Synthetic oligonucleotide
gcccugagacccaagauuu

SEQ ID NO: 2135355 - RNA, 19 nt, Artificial Sequence
  Description of Artificial Sequence: Synthetic oligonucleotide
cuggcccaguucugcugga

SEQ ID NO: 2135356 - RNA, 19 nt, Artificial Sequence
  Description of Artificial Sequence: Synthetic oligonucleotide
gcggcuggugucacacagc

SEQ ID NO: 2135357 - RNA, 19 nt, Artificial Sequence
  Description of Artificial Sequence: Synthetic oligonucleotide
gguaggcggcuggugucac

SEQ ID NO: 2135358 - RNA, 19 nt, Artificial Sequence
  Description of Artificial Sequence: Synthetic oligonucleotide
ccagguaggcggcuggugu

SEQ ID NO: 2135359 - RNA, 19 nt, Artificial Sequence
  Description of Artificial Sequence: Synthetic oligonucleotide
agggucucccauagcccua

SEQ ID NO: 2135360 - RNA, 19 nt, Artificial Sequence
  Description of Artificial Sequence: Synthetic oligonucleotide
gacccacaugucaggcccu

SEQ ID NO: 2135361 - RNA, 19 nt, Artificial Sequence
  Description of Artificial Sequence: Synthetic oligonucleotide
cccuagggucucccauagc

SEQ ID NO: 2135362 - RNA, 19 nt, Artificial Sequence
  Description of Artificial Sequence: Synthetic oligonucleotide
ccgugccacugcuuccaac

SEQ ID NO: 2135363 - RNA, 19 nt, Artificial Sequence
  Description of Artificial Sequence: Synthetic oligonucleotide
ggcuaaccaccgggagaag

SEQ ID NO: 2135364 - RNA, 19 nt, Artificial Sequence
  Description of Artificial Sequence: Synthetic oligonucleotide
ggcacacuaugaggccuuc

SEQ ID NO: 2135365 - RNA, 19 nt, Artificial Sequence
  Description of Artificial Sequence: Synthetic oligonucleotide
gcccgugccacugcuucca

SEQ ID NO: 2135366 - RNA, 19 nt, Artificial Sequence
  Description of Artificial Sequence: Synthetic oligonucleotide
ggucucccauagcccuaca

SEQ ID NO: 2135367 - RNA, 19 nt, Artificial Sequence
  Description of Artificial Sequence: Synthetic oligonucleotide
cugcuggaugugggaggca

SEQ ID NO: 2135368 - RNA, 19 nt, Artificial Sequence
  Description of Artificial Sequence: Synthetic oligonucleotide
ggcccuggugguccauaua

SEQ ID NO: 2135369 - RNA, 19 nt, Artificial Sequence
  Description of Artificial Sequence: Synthetic oligonucleotide
gcucacaguuauggugccu

SEQ ID NO: 2135370 - RNA, 19 nt, Artificial Sequence
  Description of Artificial Sequence: Synthetic oligonucleotide
gcuggaugugggaggcagu

SEQ ID NO: 2135371 - RNA, 19 nt, Artificial Sequence
  Description of Artificial Sequence: Synthetic oligonucleotide
gggcucuccucaggucaca

SEQ ID NO: 2135372 - RNA, 19 nt, Artificial Sequence
  Description of Artificial Sequence: Synthetic oligonucleotide
gcacacuaugaggccuucu

SEQ ID NO: 2135373 - RNA, 19 nt, Artificial Sequence
  Description of Artificial Sequence: Synthetic oligonucleotide
cccacccuggaguuccuuu

SEQ ID NO: 2135374 - RNA, 19 nt, Artificial Sequence
  Description of Artificial Sequence: Synthetic oligonucleotide
cuggcccgugccacugcuu

SEQ ID NO: 2135375 - RNA, 19 nt, Artificial Sequence
  Description of Artificial Sequence: Synthetic oligonucleotide
ggcaagucucugggcugcu

SEQ ID NO: 2135376 - RNA, 19 nt, Artificial Sequence
  Description of Artificial Sequence: Synthetic oligonucleotide
cccacaugucaggcccuga

SEQ ID NO: 2135377 - RNA, 19 nt, Artificial Sequence
  Description of Artificial Sequence: Synthetic oligonucleotide
ccuggcccgugccacugcu

SEQ ID NO: 2135378 - RNA, 19 nt, Artificial Sequence
  Description of Artificial Sequence: Synthetic oligonucleotide
gcccuacauugaccugccu

SEQ ID NO: 2135379 - RNA, 19 nt, Artificial Sequence
  Description of Artificial Sequence: Synthetic oligonucleotide
cccugagacccaagauuuu

SEQ ID NO: 2135380 - RNA, 19 nt, Artificial Sequence
  Description of Artificial Sequence: Synthetic oligonucleotide
cccgugccacugcuuccaa

SEQ ID NO: 2135381 - RNA, 19 nt, Artificial Sequence
  Description of Artificial Sequence: Synthetic oligonucleotide
ccaccgggagaagcuuaua

SEQ ID NO: 2135382 - RNA, 19 nt, Artificial Sequence
  Description of Artificial Sequence: Synthetic oligonucleotide
aacauuuccaacuuccucc

SEQ ID NO: 2135383 - RNA, 19 nt, Artificial Sequence
  Description of Artificial Sequence: Synthetic oligonucleotide
aagaaaucaacuugagucc

SEQ ID NO: 2135384 - RNA, 19 nt, Artificial Sequence
  Description of Artificial Sequence: Synthetic oligonucleotide
aaugcuaacauuuccaacu

SEQ ID NO: 2135385 - RNA, 19 nt, Artificial Sequence
  Description of Artificial Sequence: Synthetic oligonucleotide
aaaggaaccacugugugcc

SEQ ID NO: 2135386 - RNA, 19 nt, Artificial Sequence
  Description of Artificial Sequence: Synthetic oligonucleotide
uguguagcaaacaaauccg

SEQ ID NO: 2135387 - RNA, 19 nt, Artificial Sequence
  Description of Artificial Sequence: Synthetic oligonucleotide
uuauugauaucccagagaa

SEQ ID NO: 2135388 - RNA, 19 nt, Artificial Sequence
  Description of Artificial Sequence: Synthetic oligonucleotide
uuauuuaccagaaugcuaa

SEQ ID NO: 2135389 - RNA, 19 nt, Artificial Sequence
  Description of Artificial Sequence: Synthetic oligonucleotide
aaagugugcaagcacauug

SEQ ID NO: 2135390 - RNA, 19 nt, Artificial Sequence
  Description of Artificial Sequence: Synthetic oligonucleotide
agcacauugacuucgaaag

SEQ ID NO: 2135391 - RNA, 19 nt, Artificial Sequence
  Description of Artificial Sequence: Synthetic oligonucleotide
augaaguuagggcagagac

SEQ ID NO: 2135392 - RNA, 19 nt, Artificial Sequence
  Description of Artificial Sequence: Synthetic oligonucleotide
agcauuauuuaccagaaug

SEQ ID NO: 2135393 - RNA, 19 nt, Artificial Sequence
  Description of Artificial Sequence: Synthetic oligonucleotide
uuuuaaaacugccaggaac

SEQ ID NO: 2135394 - RNA, 19 nt, Artificial Sequence
  Description of Artificial Sequence: Synthetic oligonucleotide
uuugguauuaaguuuggca

SEQ ID NO: 2135395 - RNA, 19 nt, Artificial Sequence
  Description of Artificial Sequence: Synthetic oligonucleotide
uuuguagccaauaacugca

SEQ ID NO: 2135396 - RNA, 19 nt, Artificial Sequence
  Description of Artificial Sequence: Synthetic oligonucleotide
aguaaaucagccuucaaga

SEQ ID NO: 2135397 - RNA, 19 nt, Artificial Sequence
  Description of Artificial Sequence: Synthetic oligonucleotide
uuaaguuuggcaaauucgu

SEQ ID NO: 2135398 - RNA, 19 nt, Artificial Sequence
  Description of Artificial Sequence: Synthetic oligonucleotide
aaguguagacaacaccagc

SEQ ID NO: 2135399 - RNA, 19 nt, Artificial Sequence
  Description of Artificial Sequence: Synthetic oligonucleotide
acaaauaucaucuucuuuu

SEQ ID NO: 2135400 - RNA, 19 nt, Artificial Sequence
  Description of Artificial Sequence: Synthetic oligonucleotide
aauaacugcaucaaacuug

SEQ ID NO: 2135401 - RNA, 19 nt, Artificial Sequence
  Description of Artificial Sequence: Synthetic oligonucleotide
aucauuuaucuuuguagcc

SEQ ID NO: 2135402 - RNA, 19 nt, Artificial Sequence
  Description of Artificial Sequence: Synthetic oligonucleotide
aaagcuugacgaaagacuc

SEQ ID NO: 2135403 - RNA, 19 nt, Artificial Sequence
  Description of Artificial Sequence: Synthetic oligonucleotide
aauuucaauucauauugga

SEQ ID NO: 2135404 - RNA, 19 nt, Artificial Sequence
  Description of Artificial Sequence: Synthetic oligonucleotide
agaaaugccuuuguggucc

SEQ ID NO: 2135405 - RNA, 19 nt, Artificial Sequence
  Description of Artificial Sequence: Synthetic oligonucleotide
uucauauuggaagaaauca

SEQ ID NO: 2135406 - RNA, 19 nt, Artificial Sequence
  Description of Artificial Sequence: Synthetic oligonucleotide
aaagggauaggccugggca

SEQ ID NO: 2135407 - RNA, 19 nt, Artificial Sequence
  Description of Artificial Sequence: Synthetic oligonucleotide
ucuuccaauuccaugacca

SEQ ID NO: 2135408 - RNA, 19 nt, Artificial Sequence
  Description of Artificial Sequence: Synthetic oligonucleotide
agagacacgaaguuuugac

SEQ ID NO: 2135409 - RNA, 19 nt, Artificial Sequence
  Description of Artificial Sequence: Synthetic oligonucleotide
ugugcaagcacauugacuu

SEQ ID NO: 2135410 - RNA, 19 nt, Artificial Sequence
  Description of Artificial Sequence: Synthetic oligonucleotide
aaauccgaaguguagacaa

SEQ ID NO: 2135411 - RNA, 19 nt, Artificial Sequence
  Description of Artificial Sequence: Synthetic oligonucleotide
auuucgucccgcuugcugc

SEQ ID NO: 2135412 - RNA, 19 nt, Artificial Sequence
  Description of Artificial Sequence: Synthetic oligonucleotide
aauucguaggcagucaguc

SEQ ID NO: 2135413 - RNA, 19 nt, Artificial Sequence
  Description of Artificial Sequence: Synthetic oligonucleotide
auuaaguuuggcaaauucg

SEQ ID NO: 2135414 - RNA, 19 nt, Artificial Sequence
  Description of Artificial Sequence: Synthetic oligonucleotide
uuuaccagaaugcuaacau

SEQ ID NO: 2135415 - RNA, 19 nt, Artificial Sequence
  Description of Artificial Sequence: Synthetic oligonucleotide
caauuugguauuaaguuug

SEQ ID NO: 2135416 - RNA, 19 nt, Artificial Sequence
  Description of Artificial Sequence: Synthetic oligonucleotide
uugguauuaaguuuggcaa

SEQ ID NO: 2135417 - RNA, 19 nt, Artificial Sequence
  Description of Artificial Sequence: Synthetic oligonucleotide
ucuuauugauaucccagag

SEQ ID NO: 2135418 - RNA, 19 nt, Artificial Sequence
  Description of Artificial Sequence: Synthetic oligonucleotide
uugacgaaagacucuaugc

SEQ ID NO: 2135419 - RNA, 19 nt, Artificial Sequence
  Description of Artificial Sequence: Synthetic oligonucleotide
gacaauauggccaugauua

SEQ ID NO: 2135420 - RNA, 19 nt, Artificial Sequence
  Description of Artificial Sequence: Synthetic oligonucleotide
uuuuacuaccucuucaggu

SEQ ID NO: 2135421 - RNA, 19 nt, Artificial Sequence
  Description of Artificial Sequence: Synthetic oligonucleotide
aaaccaggcagucuucauc

SEQ ID NO: 2135422 - RNA, 19 nt, Artificial Sequence
  Description of Artificial Sequence: Synthetic oligonucleotide
guguuuaugaaguuagggc

SEQ ID NO: 2135423 - RNA, 19 nt, Artificial Sequence
  Description of Artificial Sequence: Synthetic oligonucleotide
aguuuggcaaauucguagg

SEQ ID NO: 2135424 - RNA, 19 nt, Artificial Sequence
  Description of Artificial Sequence: Synthetic oligonucleotide
gaaguuagggcagagacac

SEQ ID NO: 2135425 - RNA, 19 nt, Artificial Sequence
  Description of Artificial Sequence: Synthetic oligonucleotide
cauauuggaagaaaucaac

SEQ ID NO: 2135426 - RNA, 19 nt, Artificial Sequence
  Description of Artificial Sequence: Synthetic oligonucleotide
guaaauuucgucccgcuug

SEQ ID NO: 2135427 - RNA, 19 nt, Artificial Sequence
  Description of Artificial Sequence: Synthetic oligonucleotide
aagucaaguagguacuuca

SEQ ID NO: 2135428 - RNA, 19 nt, Artificial Sequence
  Description of Artificial Sequence: Synthetic oligonucleotide
acauuaaaauuucaauuca

SEQ ID NO: 2135429 - RNA, 19 nt, Artificial Sequence
  Description of Artificial Sequence: Synthetic oligonucleotide
ugacgaaagacucuaugca

SEQ ID NO: 2135430 - RNA, 19 nt, Artificial Sequence
  Description of Artificial Sequence: Synthetic oligonucleotide
acaaauccgaaguguagac

SEQ ID NO: 2135431 - RNA, 19 nt, Artificial Sequence
  Description of Artificial Sequence: Synthetic oligonucleotide
aagggauaggccugggcac

SEQ ID NO: 2135432 - RNA, 19 nt, Artificial Sequence
  Description of Artificial Sequence: Synthetic oligonucleotide
acaugagauguuuuacuac

SEQ ID NO: 2135433 - RNA, 19 nt, Artificial Sequence
  Description of Artificial Sequence: Synthetic oligonucleotide
gacgaaagacucuaugcag

SEQ ID NO: 2135434 - RNA, 19 nt, Artificial Sequence
  Description of Artificial Sequence: Synthetic oligonucleotide
aagaaaugccuuugugguc

SEQ ID NO: 2135435 - RNA, 19 nt, Artificial Sequence
  Description of Artificial Sequence: Synthetic oligonucleotide
ggaacaguaagccagcaag

SEQ ID NO: 2135436 - RNA, 19 nt, Artificial Sequence
  Description of Artificial Sequence: Synthetic oligonucleotide
agguacuucauccuuccgg

SEQ ID NO: 2135437 - RNA, 19 nt, Artificial Sequence
  Description of Artificial Sequence: Synthetic oligonucleotide
accacaaagggauaggccu

SEQ ID NO: 2135438 - RNA, 19 nt, Artificial Sequence
  Description of Artificial Sequence: Synthetic oligonucleotide
uuggcaaauucguaggcag

SEQ ID NO: 2135439 - RNA, 19 nt, Artificial Sequence
  Description of Artificial Sequence: Synthetic oligonucleotide
aaauuucaauucauauugg

SEQ ID NO: 2135440 - RNA, 19 nt, Artificial Sequence
  Description of Artificial Sequence: Synthetic oligonucleotide
ucauauuggaagaaaucaa

SEQ ID NO: 2135441 - RNA, 19 nt, Artificial Sequence
  Description of Artificial Sequence: Synthetic oligonucleotide
aaaucagccuucaagaaaa

SEQ ID NO: 2135442 - RNA, 19 nt, Artificial Sequence
  Description of Artificial Sequence: Synthetic oligonucleotide
aaccaggcagucuucauca

SEQ ID NO: 2135443 - RNA, 19 nt, Artificial Sequence
  Description of Artificial Sequence: Synthetic oligonucleotide
uaucuuuguagccaauaac

SEQ ID NO: 2135444 - RNA, 19 nt, Artificial Sequence
  Description of Artificial Sequence: Synthetic oligonucleotide
ucuaugcagaagacgauga

SEQ ID NO: 2135445 - RNA, 19 nt, Artificial Sequence
  Description of Artificial Sequence: Synthetic oligonucleotide
ucauuuaucuuuguagcca

SEQ ID NO: 2135446 - RNA, 19 nt, Artificial Sequence
  Description of Artificial Sequence: Synthetic oligonucleotide
cuuuccaacaccaucaaaa

SEQ ID NO: 2135447 - RNA, 19 nt, Artificial Sequence
  Description of Artificial Sequence: Synthetic oligonucleotide
cuuggaacaaauaucaucu

SEQ ID NO: 2135448 - RNA, 19 nt, Artificial Sequence
  Description of Artificial Sequence: Synthetic oligonucleotide
aagacgaugagcaagggua

SEQ ID NO: 2135449 - RNA, 19 nt, Artificial Sequence
  Description of Artificial Sequence: Synthetic oligonucleotide
gaaccaauuugguauuaag

SEQ ID NO: 2135450 - RNA, 19 nt, Artificial Sequence
  Description of Artificial Sequence: Synthetic oligonucleotide
ucauccuuccggcuggccg

SEQ ID NO: 2135451 - RNA, 19 nt, Artificial Sequence
  Description of Artificial Sequence: Synthetic oligonucleotide
uaaauuucgucccgcuugc

SEQ ID NO: 2135452 - RNA, 19 nt, Artificial Sequence
  Description of Artificial Sequence: Synthetic oligonucleotide
uuaucuuuguagccaauaa

SEQ ID NO: 2135453 - RNA, 19 nt, Artificial Sequence
  Description of Artificial Sequence: Synthetic oligonucleotide
uucagugaggaucccauac

SEQ ID NO: 2135454 - RNA, 19 nt, Artificial Sequence
  Description of Artificial Sequence: Synthetic oligonucleotide
aaaacugccaggaaccgcu

SEQ ID NO: 2135455 - RNA, 19 nt, Artificial Sequence
  Description of Artificial Sequence: Synthetic oligonucleotide
aacaaauccgaaguguaga

SEQ ID NO: 2135456 - RNA, 19 nt, Artificial Sequence
  Description of Artificial Sequence: Synthetic oligonucleotide
uggaacaaauaucaucuuc

SEQ ID NO: 2135457 - RNA, 19 nt, Artificial Sequence
  Description of Artificial Sequence: Synthetic oligonucleotide
gaagaaaugccuuuguggu

SEQ ID NO: 2135458 - RNA, 19 nt, Artificial Sequence
  Description of Artificial Sequence: Synthetic oligonucleotide
uauuggaagaaaucaacuu

SEQ ID NO: 2135459 - RNA, 19 nt, Artificial Sequence
  Description of Artificial Sequence: Synthetic oligonucleotide
aggaaagauccuuuccaac

SEQ ID NO: 2135460 - RNA, 19 nt, Artificial Sequence
  Description of Artificial Sequence: Synthetic oligonucleotide
gaucaggacaagcucuccg

SEQ ID NO: 2135461 - RNA, 19 nt, Artificial Sequence
  Description of Artificial Sequence: Synthetic oligonucleotide
uccaacuuccuccuuuacc

SEQ ID NO: 2135462 - RNA, 19 nt, Artificial Sequence
  Description of Artificial Sequence: Synthetic oligonucleotide
aacccuaaagcacuuggaa

SEQ ID NO: 2135463 - RNA, 19 nt, Artificial Sequence
  Description of Artificial Sequence: Synthetic oligonucleotide
aucaggacaagcucuccgg

SEQ ID NO: 2135464 - RNA, 19 nt, Artificial Sequence
  Description of Artificial Sequence: Synthetic oligonucleotide
gaaaggaaccacugugugc

SEQ ID NO: 2135465 - RNA, 19 nt, Artificial Sequence
  Description of Artificial Sequence: Synthetic oligonucleotide
auggccaugauuauucuuc

SEQ ID NO: 2135466 - RNA, 19 nt, Artificial Sequence
  Description of Artificial Sequence: Synthetic oligonucleotide
uaccagaaugcuaacauuu

SEQ ID NO: 2135467 - RNA, 19 nt, Artificial Sequence
  Description of Artificial Sequence: Synthetic oligonucleotide
auacaugagauguuuuacu

SEQ ID NO: 2135468 - RNA, 19 nt, Artificial Sequence
  Description of Artificial Sequence: Synthetic oligonucleotide
uuagggcagagacacgaag

SEQ ID NO: 2135469 - RNA, 19 nt, Artificial Sequence
  Description of Artificial Sequence: Synthetic oligonucleotide
auucuuauugauaucccag

SEQ ID NO: 2135470 - RNA, 19 nt, Artificial Sequence
  Description of Artificial Sequence: Synthetic oligonucleotide
uuuacuaccucuucagguu

SEQ ID NO: 2135471 - RNA, 19 nt, Artificial Sequence
  Description of Artificial Sequence: Synthetic oligonucleotide
ugcaagcacauugacuucg

SEQ ID NO: 2135472 - RNA, 19 nt, Artificial Sequence
  Description of Artificial Sequence: Synthetic oligonucleotide
uccuguguuuuaaaacugc

SEQ ID NO: 2135473 - RNA, 19 nt, Artificial Sequence
  Description of Artificial Sequence: Synthetic oligonucleotide
auuugugcaucuuguguag

SEQ ID NO: 2135474 - RNA, 19 nt, Artificial Sequence
  Description of Artificial Sequence: Synthetic oligonucleotide
uccuagggcagccaguuca

SEQ ID NO: 2135475 - RNA, 19 nt, Artificial Sequence
  Description of Artificial Sequence: Synthetic oligonucleotide
agcacuuggaacaaauauc

SEQ ID NO: 2135476 - RNA, 19 nt, Artificial Sequence
  Description of Artificial Sequence: Synthetic oligonucleotide
uuaaaacugccaggaaccg

SEQ ID NO: 2135477 - RNA, 19 nt, Artificial Sequence
  Description of Artificial Sequence: Synthetic oligonucleotide
aaacaaauccgaaguguag

SEQ ID NO: 2135478 - RNA, 19 nt, Artificial Sequence
  Description of Artificial Sequence: Synthetic oligonucleotide
gacucuaugcagaagacga

SEQ ID NO: 2135479 - RNA, 19 nt, Artificial Sequence
  Description of Artificial Sequence: Synthetic oligonucleotide
ugaaguuagggcagagaca

SEQ ID NO: 2135480 - RNA, 19 nt, Artificial Sequence
  Description of Artificial Sequence: Synthetic oligonucleotide
aagcacauugacuucgaaa

SEQ ID NO: 2135481 - RNA, 19 nt, Artificial Sequence
  Description of Artificial Sequence: Synthetic oligonucleotide
uccaaaagugugcaagcac

SEQ ID NO: 2135482 - RNA, 19 nt, Artificial Sequence
  Description of Artificial Sequence: Synthetic oligonucleotide
agugugcaagcacauugac

SEQ ID NO: 2135483 - RNA, 19 nt, Artificial Sequence
  Description of Artificial Sequence: Synthetic oligonucleotide
uugaguccaguaaaucagc

SEQ ID NO: 2135484 - RNA, 19 nt, Artificial Sequence
  Description of Artificial Sequence: Synthetic oligonucleotide
acuguaaauuucgucccgc

SEQ ID NO: 2135485 - RNA, 19 nt, Artificial Sequence
  Description of Artificial Sequence: Synthetic oligonucleotide
uguagcaaacaaauccgaa

SEQ ID NO: 2135486 - RNA, 19 nt, Artificial Sequence
  Description of Artificial Sequence: Synthetic oligonucleotide
ugaguccaguaaaucagcc

SEQ ID NO: 2135487 - RNA, 19 nt, Artificial Sequence
  Description of Artificial Sequence: Synthetic oligonucleotide
uccuaaguugguacucggg

SEQ ID NO: 2135488 - RNA, 19 nt, Artificial Sequence
  Description of Artificial Sequence: Synthetic oligonucleotide
ucagucuuccaauuccaug

SEQ ID NO: 2135489 - RNA, 19 nt, Artificial Sequence
  Description of Artificial Sequence: Synthetic oligonucleotide
uacuucauccuuccggcug

SEQ ID NO: 2135490 - RNA, 19 nt, Artificial Sequence
  Description of Artificial Sequence: Synthetic oligonucleotide
aguccaguaaaucagccuu

SEQ ID NO: 2135491 - RNA, 19 nt, Artificial Sequence
  Description of Artificial Sequence: Synthetic oligonucleotide
cucggguucuugaugaagc

SEQ ID NO: 2135492 - RNA, 19 nt, Artificial Sequence
  Description of Artificial Sequence: Synthetic oligonucleotide
uuaccuuauuugcagcacu

SEQ ID NO: 2135493 - RNA, 19 nt, Artificial Sequence
  Description of Artificial Sequence: Synthetic oligonucleotide
aagacucuaugcagaagac

SEQ ID NO: 2135494 - RNA, 19 nt, Artificial Sequence
  Description of Artificial Sequence: Synthetic oligonucleotide
guuuaugaaguuagggcag

SEQ ID NO: 2135495 - RNA, 19 nt, Artificial Sequence
  Description of Artificial Sequence: Synthetic oligonucleotide
uaccuuauuugcagcacug

SEQ ID NO: 2135496 - RNA, 19 nt, Artificial Sequence
  Description of Artificial Sequence: Synthetic oligonucleotide
ucagugaggaucccauaca

SEQ ID NO: 2135497 - RNA, 19 nt, Artificial Sequence
  Description of Artificial Sequence: Synthetic oligonucleotide
uugugguccaaaagugugc

SEQ ID NO: 2135498 - RNA, 19 nt, Artificial Sequence
  Description of Artificial Sequence: Synthetic oligonucleotide
gacacgaaguuuugacucc

SEQ ID NO: 2135499 - RNA, 19 nt, Artificial Sequence
  Description of Artificial Sequence: Synthetic oligonucleotide
uaggcagucagucuuccaa

SEQ ID NO: 2135500 - RNA, 19 nt, Artificial Sequence
  Description of Artificial Sequence: Synthetic oligonucleotide
uccggaucuuccuagggca

SEQ ID NO: 2135501 - RNA, 19 nt, Artificial Sequence
  Description of Artificial Sequence: Synthetic oligonucleotide
gguuccugcacuuugcagc

SEQ ID NO: 2135502 - RNA, 19 nt, Artificial Sequence
  Description of Artificial Sequence: Synthetic oligonucleotide
auuugguauuaaguuuggc

SEQ ID NO: 2135503 - RNA, 19 nt, Artificial Sequence
  Description of Artificial Sequence: Synthetic oligonucleotide
ugagauguuuuacuaccuc

SEQ ID NO: 2135504 - RNA, 19 nt, Artificial Sequence
  Description of Artificial Sequence: Synthetic oligonucleotide
ugcaucuuguguagcaaac

SEQ ID NO: 2135505 - RNA, 19 nt, Artificial Sequence
  Description of Artificial Sequence: Synthetic oligonucleotide
cagucagucuuccaauucc

SEQ ID NO: 2135506 - RNA, 19 nt, Artificial Sequence
  Description of Artificial Sequence: Synthetic oligonucleotide
gaaguguagacaacaccag

SEQ ID NO: 2135507 - RNA, 19 nt, Artificial Sequence
  Description of Artificial Sequence: Synthetic oligonucleotide
aucagccuucaagaaaacc

SEQ ID NO: 2135508 - RNA, 19 nt, Artificial Sequence
  Description of Artificial Sequence: Synthetic oligonucleotide
uucguaggcagucagucuu

SEQ ID NO: 2135509 - RNA, 19 nt, Artificial Sequence
  Description of Artificial Sequence: Synthetic oligonucleotide
caaauucguaggcagucag

SEQ ID NO: 2135510 - RNA, 19 nt, Artificial Sequence
  Description of Artificial Sequence: Synthetic oligonucleotide
cucaggaaagauccuuucc

SEQ ID NO: 2135511 - RNA, 19 nt, Artificial Sequence
  Description of Artificial Sequence: Synthetic oligonucleotide
gguacuucauccuuccggc

SEQ ID NO: 2135512 - RNA, 19 nt, Artificial Sequence
  Description of Artificial Sequence: Synthetic oligonucleotide
guagguacuucauccuucc

SEQ ID NO: 2135513 - RNA, 19 nt, Artificial Sequence
  Description of Artificial Sequence: Synthetic oligonucleotide
caauuccaugaccagcucc

SEQ ID NO: 2135514 - RNA, 19 nt, Artificial Sequence
  Description of Artificial Sequence: Synthetic oligonucleotide
uugauccuguguuuuaaaa

SEQ ID NO: 2135515 - RNA, 19 nt, Artificial Sequence
  Description of Artificial Sequence: Synthetic oligonucleotide
aaggaaccacugugugccc

SEQ ID NO: 2135516 - RNA, 19 nt, Artificial Sequence
  Description of Artificial Sequence: Synthetic oligonucleotide
cucuguggaagccaacagc

SEQ ID NO: 2135517 - RNA, 19 nt, Artificial Sequence
  Description of Artificial Sequence: Synthetic oligonucleotide
gaucccauacaugagaugu

SEQ ID NO: 2135518 - RNA, 19 nt, Artificial Sequence
  Description of Artificial Sequence: Synthetic oligonucleotide
ugguauuaaguuuggcaaa

SEQ ID NO: 2135519 - RNA, 19 nt, Artificial Sequence
  Description of Artificial Sequence: Synthetic oligonucleotide
aaaucaacuugaguccagu

SEQ ID NO: 2135520 - RNA, 19 nt, Artificial Sequence
  Description of Artificial Sequence: Synthetic oligonucleotide
aguagguacuucauccuuc

SEQ ID NO: 2135521 - RNA, 19 nt, Artificial Sequence
  Description of Artificial Sequence: Synthetic oligonucleotide
gaugaagccgguguuuaug

SEQ ID NO: 2135522 - RNA, 19 nt, Artificial Sequence
  Description of Artificial Sequence: Synthetic oligonucleotide
uauugauaucccagagaac

SEQ ID NO: 2135523 - RNA, 19 nt, Artificial Sequence
  Description of Artificial Sequence: Synthetic oligonucleotide
aacaguaagccagcaagaa

SEQ ID NO: 2135524 - RNA, 19 nt, Artificial Sequence
  Description of Artificial Sequence: Synthetic oligonucleotide
aaguagguacuucauccuu

SEQ ID NO: 2135525 - RNA, 19 nt, Artificial Sequence
  Description of Artificial Sequence: Synthetic oligonucleotide
gcuaacauuuccaacuucc

SEQ ID NO: 2135526 - RNA, 19 nt, Artificial Sequence
  Description of Artificial Sequence: Synthetic oligonucleotide
cuuauugauaucccagaga

SEQ ID NO: 2135527 - RNA, 19 nt, Artificial Sequence
  Description of Artificial Sequence: Synthetic oligonucleotide
ucaggacaagcucuccggc

SEQ ID NO: 2135528 - RNA, 19 nt, Artificial Sequence
  Description of Artificial Sequence: Synthetic oligonucleotide
gcugcaguccaccacaaag

SEQ ID NO: 2135529 - RNA, 19 nt, Artificial Sequence
  Description of Artificial Sequence: Synthetic oligonucleotide
uugugcaucuuguguagca

SEQ ID NO: 2135530 - RNA, 19 nt, Artificial Sequence
  Description of Artificial Sequence: Synthetic oligonucleotide
gaggaucccauacaugaga

SEQ ID NO: 2135531 - RNA, 19 nt, Artificial Sequence
  Description of Artificial Sequence: Synthetic oligonucleotide
uuacuaccucuucagguuc

SEQ ID NO: 2135532 - RNA, 19 nt, Artificial Sequence
  Description of Artificial Sequence: Synthetic oligonucleotide
ugugguccaaaagugugca

SEQ ID NO: 2135533 - RNA, 19 nt, Artificial Sequence
  Description of Artificial Sequence: Synthetic oligonucleotide
accagcuccagugaucagg

SEQ ID NO: 2135534 - RNA, 19 nt, Artificial Sequence
  Description of Artificial Sequence: Synthetic oligonucleotide
gcauuauuuaccagaaugc

SEQ ID NO: 2135535 - RNA, 19 nt, Artificial Sequence
  Description of Artificial Sequence: Synthetic oligonucleotide
uuuaccuuauuugcagcac

SEQ ID NO: 2135536 - RNA, 19 nt, Artificial Sequence
  Description of Artificial Sequence: Synthetic oligonucleotide
aauccgaaguguagacaac

SEQ ID NO: 2135537 - RNA, 19 nt, Artificial Sequence
  Description of Artificial Sequence: Synthetic oligonucleotide
uuugcagcuguuuccucga

SEQ ID NO: 2135538 - RNA, 19 nt, Artificial Sequence
  Description of Artificial Sequence: Synthetic oligonucleotide
cuuguguagcaaacaaauc

SEQ ID NO: 2135539 - RNA, 19 nt, Artificial Sequence
  Description of Artificial Sequence: Synthetic oligonucleotide
ucgauuugugcaucuugug

SEQ ID NO: 2135540 - RNA, 19 nt, Artificial Sequence
  Description of Artificial Sequence: Synthetic oligonucleotide
guuuggcaaauucguaggc

SEQ ID NO: 2135541 - RNA, 19 nt, Artificial Sequence
  Description of Artificial Sequence: Synthetic oligonucleotide
uguaaauuucgucccgcuu

SEQ ID NO: 2135542 - RNA, 19 nt, Artificial Sequence
  Description of Artificial Sequence: Synthetic oligonucleotide
uucaucaucucuggaagaa

SEQ ID NO: 2135543 - RNA, 19 nt, Artificial Sequence
  Description of Artificial Sequence: Synthetic oligonucleotide
augaagccgguguuuauga

SEQ ID NO: 2135544 - RNA, 19 nt, Artificial Sequence
  Description of Artificial Sequence: Synthetic oligonucleotide
cauucuuauugauauccca

SEQ ID NO: 2135545 - RNA, 19 nt, Artificial Sequence
  Description of Artificial Sequence: Synthetic oligonucleotide
cuuuaccuuauuugcagca

SEQ ID NO: 2135546 - RNA, 19 nt, Artificial Sequence
  Description of Artificial Sequence: Synthetic oligonucleotide
cacauugacuucgaaaguc

SEQ ID NO: 2135547 - RNA, 19 nt, Artificial Sequence
  Description of Artificial Sequence: Synthetic oligonucleotide
uaucccagagaaccaauuu

SEQ ID NO: 2135548 - RNA, 19 nt, Artificial Sequence
  Description of Artificial Sequence: Synthetic oligonucleotide
ugacuccggaucuuccuag

SEQ ID NO: 2135549 - RNA, 19 nt, Artificial Sequence
  Description of Artificial Sequence: Synthetic oligonucleotide
aagguuccugcacuuugca

SEQ ID NO: 2135550 - RNA, 19 nt, Artificial Sequence
  Description of Artificial Sequence: Synthetic oligonucleotide
guagcaucaggaugaaguc

SEQ ID NO: 2135551 - RNA, 19 nt, Artificial Sequence
  Description of Artificial Sequence: Synthetic oligonucleotide
uugacuucgaaagucuuuu

SEQ ID NO: 2135552 - RNA, 19 nt, Artificial Sequence
  Description of Artificial Sequence: Synthetic oligonucleotide
uccgaaguguagacaacac

SEQ ID NO: 2135553 - RNA, 19 nt, Artificial Sequence
  Description of Artificial Sequence: Synthetic oligonucleotide
aaucaacuugaguccagua

SEQ ID NO: 2135554 - RNA, 19 nt, Artificial Sequence
  Description of Artificial Sequence: Synthetic oligonucleotide
uguagacaacaccagcauu

SEQ ID NO: 2135555 - RNA, 19 nt, Artificial Sequence
  Description of Artificial Sequence: Synthetic oligonucleotide
aguaagccagcaagaaagg

SEQ ID NO: 2135556 - RNA, 19 nt, Artificial Sequence
  Description of Artificial Sequence: Synthetic oligonucleotide
auccuuuccaacaccauca

SEQ ID NO: 2135557 - RNA, 19 nt, Artificial Sequence
  Description of Artificial Sequence: Synthetic oligonucleotide
uaugaaguuagggcagaga

SEQ ID NO: 2135558 - RNA, 19 nt, Artificial Sequence
  Description of Artificial Sequence: Synthetic oligonucleotide
uaaaacugccaggaaccgc

SEQ ID NO: 2135559 - RNA, 19 nt, Artificial Sequence
  Description of Artificial Sequence: Synthetic oligonucleotide
guacucggguucuugauga

SEQ ID NO: 2135560 - RNA, 19 nt, Artificial Sequence
  Description of Artificial Sequence: Synthetic oligonucleotide
uacuaccucuucagguucc

SEQ ID NO: 2135561 - RNA, 19 nt, Artificial Sequence
  Description of Artificial Sequence: Synthetic oligonucleotide
uucgaaagucuuuucgauu

SEQ ID NO: 2135562 - RNA, 19 nt, Artificial Sequence
  Description of Artificial Sequence: Synthetic oligonucleotide
gaaaucaacuugaguccag

SEQ ID NO: 2135563 - RNA, 19 nt, Artificial Sequence
  Description of Artificial Sequence: Synthetic oligonucleotide
cacuguaaauuucgucccg

SEQ ID NO: 2135564 - RNA, 19 nt, Artificial Sequence
  Description of Artificial Sequence: Synthetic oligonucleotide
gagauguuuuacuaccucu

SEQ ID NO: 2135565 - RNA, 19 nt, Artificial Sequence
  Description of Artificial Sequence: Synthetic oligonucleotide
caggacaagcucuccggcg

SEQ ID NO: 2135566 - RNA, 19 nt, Artificial Sequence
  Description of Artificial Sequence: Synthetic oligonucleotide
acaguaagccagcaagaaa

SEQ ID NO: 2135567 - RNA, 19 nt, Artificial Sequence
  Description of Artificial Sequence: Synthetic oligonucleotide
guaaaucagccuucaagaa

SEQ ID NO: 2135568 - RNA, 19 nt, Artificial Sequence
  Description of Artificial Sequence: Synthetic oligonucleotide
uagguacuucauccuuccg

SEQ ID NO: 2135569 - RNA, 19 nt, Artificial Sequence
  Description of Artificial Sequence: Synthetic oligonucleotide
aaucagccuucaagaaaac

SEQ ID NO: 2135570 - RNA, 19 nt, Artificial Sequence
  Description of Artificial Sequence: Synthetic oligonucleotide
guagacaacaccagcauua

SEQ ID NO: 2135571 - RNA, 19 nt, Artificial Sequence
  Description of Artificial Sequence: Synthetic oligonucleotide
aucuuccuagggcagccag

SEQ ID NO: 2135572 - RNA, 19 nt, Artificial Sequence
  Description of Artificial Sequence: Synthetic oligonucleotide
aagugugcaagcacauuga

SEQ ID NO: 2135573 - RNA, 19 nt, Artificial Sequence
  Description of Artificial Sequence: Synthetic oligonucleotide
aggacaagcucuccggcga

SEQ ID NO: 2135574 - RNA, 19 nt, Artificial Sequence
  Description of Artificial Sequence: Synthetic oligonucleotide
aaacccuaaagcacuugga

SEQ ID NO: 2135575 - RNA, 19 nt, Artificial Sequence
  Description of Artificial Sequence: Synthetic oligonucleotide
cucuaugcagaagacgaug

SEQ ID NO: 2135576 - RNA, 19 nt, Artificial Sequence
  Description of Artificial Sequence: Synthetic oligonucleotide
gaaagacucuaugcagaag

SEQ ID NO: 2135577 - RNA, 19 nt, Artificial Sequence
  Description of Artificial Sequence: Synthetic oligonucleotide
uugguacucggguucuuga

SEQ ID NO: 2135578 - RNA, 19 nt, Artificial Sequence
  Description of Artificial Sequence: Synthetic oligonucleotide
ucucuggaagaaaugccuu

SEQ ID NO: 2135579 - RNA, 19 nt, Artificial Sequence
  Description of Artificial Sequence: Synthetic oligonucleotide
caaacuugcuggaacagua

SEQ ID NO: 2135580 - RNA, 19 nt, Artificial Sequence
  Description of Artificial Sequence: Synthetic oligonucleotide
gucaaguagguacuucauc

SEQ ID NO: 2135581 - RNA, 19 nt, Artificial Sequence
  Description of Artificial Sequence: Synthetic oligonucleotide
caggguggguccuaaguug

SEQ ID NO: 2135582 - RNA, 19 nt, Artificial Sequence
  Description of Artificial Sequence: Synthetic oligonucleotide
ugagcaaggguagcaucag

SEQ ID NO: 2135583 - RNA, 19 nt, Artificial Sequence
  Description of Artificial Sequence: Synthetic oligonucleotide
gacuccggaucuuccuagg

SEQ ID NO: 2135584 - RNA, 19 nt, Artificial Sequence
  Description of Artificial Sequence: Synthetic oligonucleotide
uggccaugauuauucuuca

SEQ ID NO: 2135585 - RNA, 19 nt, Artificial Sequence
  Description of Artificial Sequence: Synthetic oligonucleotide
aaauucguaggcagucagu

SEQ ID NO: 2135586 - RNA, 19 nt, Artificial Sequence
  Description of Artificial Sequence: Synthetic oligonucleotide
augaagucaaguagguacu

SEQ ID NO: 2135587 - RNA, 19 nt, Artificial Sequence
  Description of Artificial Sequence: Synthetic oligonucleotide
gguccaaaagugugcaagc

SEQ ID NO: 2135588 - RNA, 19 nt, Artificial Sequence
  Description of Artificial Sequence: Synthetic oligonucleotide
auucguaggcagucagucu

SEQ ID NO: 2135589 - RNA, 19 nt, Artificial Sequence
  Description of Artificial Sequence: Synthetic oligonucleotide
gccaauaacugcaucaaac

SEQ ID NO: 2135590 - RNA, 19 nt, Artificial Sequence
  Description of Artificial Sequence: Synthetic oligonucleotide
acgaaagacucuaugcaga

SEQ ID NO: 2135591 - RNA, 19 nt, Artificial Sequence
  Description of Artificial Sequence: Synthetic oligonucleotide
gguagcaucaggaugaagu

SEQ ID NO: 2135592 - RNA, 19 nt, Artificial Sequence
  Description of Artificial Sequence: Synthetic oligonucleotide
ugcuaacauuuccaacuuc

SEQ ID NO: 2135593 - RNA, 19 nt, Artificial Sequence
  Description of Artificial Sequence: Synthetic oligonucleotide
auugauccuguguuuuaaa

SEQ ID NO: 2135594 - RNA, 19 nt, Artificial Sequence
  Description of Artificial Sequence: Synthetic oligonucleotide
augagcaaggguagcauca

SEQ ID NO: 2135595 - RNA, 19 nt, Artificial Sequence
  Description of Artificial Sequence: Synthetic oligonucleotide
gcacuguaaauuucguccc

SEQ ID NO: 2135596 - RNA, 19 nt, Artificial Sequence
  Description of Artificial Sequence: Synthetic oligonucleotide
acgaaguuuugacuccgga

SEQ ID NO: 2135597 - RNA, 19 nt, Artificial Sequence
  Description of Artificial Sequence: Synthetic oligonucleotide
gaugccauucuuauugaua

SEQ ID NO: 2135598 - RNA, 19 nt, Artificial Sequence
  Description of Artificial Sequence: Synthetic oligonucleotide
ccgguguuuaugaaguuag

SEQ ID NO: 2135599 - RNA, 19 nt, Artificial Sequence
  Description of Artificial Sequence: Synthetic oligonucleotide
ucgaugccauucuuauuga

SEQ ID NO: 2135600 - RNA, 19 nt, Artificial Sequence
  Description of Artificial Sequence: Synthetic oligonucleotide
ucuuccuagggcagccagu

SEQ ID NO: 2135601 - RNA, 19 nt, Artificial Sequence
  Description of Artificial Sequence: Synthetic oligonucleotide
auccgaaguguagacaaca

SEQ ID NO: 2135602 - RNA, 19 nt, Artificial Sequence
  Description of Artificial Sequence: Synthetic oligonucleotide
ccagaaugcuaacauuucc

SEQ ID NO: 2135603 - RNA, 19 nt, Artificial Sequence
  Description of Artificial Sequence: Synthetic oligonucleotide
caucuuguguagcaaacaa

SEQ ID NO: 2135604 - RNA, 19 nt, Artificial Sequence
  Description of Artificial Sequence: Synthetic oligonucleotide
uugacuccggaucuuccua

SEQ ID NO: 2135605 - RNA, 19 nt, Artificial Sequence
  Description of Artificial Sequence: Synthetic oligonucleotide
uguuuccucgaugccauuc

SEQ ID NO: 2135606 - RNA, 19 nt, Artificial Sequence
  Description of Artificial Sequence: Synthetic oligonucleotide
ugccaggaaccgcucagga

SEQ ID NO: 2135607 - RNA, 19 nt, Artificial Sequence
  Description of Artificial Sequence: Synthetic oligonucleotide
agcuguuuccucgaugcca

SEQ ID NO: 2135608 - RNA, 19 nt, Artificial Sequence
  Description of Artificial Sequence: Synthetic oligonucleotide
gaagucaaguagguacuuc

SEQ ID NO: 2135609 - RNA, 19 nt, Artificial Sequence
  Description of Artificial Sequence: Synthetic oligonucleotide
gccaacagcagcaaacuug

SEQ ID NO: 2135610 - RNA, 19 nt, Artificial Sequence
  Description of Artificial Sequence: Synthetic oligonucleotide
uugaugaagccgguguuua

SEQ ID NO: 2135611 - RNA, 19 nt, Artificial Sequence
  Description of Artificial Sequence: Synthetic oligonucleotide
auccgucagggcucugugg

SEQ ID NO: 2135612 - RNA, 19 nt, Artificial Sequence
  Description of Artificial Sequence: Synthetic oligonucleotide
uauggccaugauuauucuu

SEQ ID NO: 2135613 - RNA, 19 nt, Artificial Sequence
  Description of Artificial Sequence: Synthetic oligonucleotide
gguacucggguucuugaug

SEQ ID NO: 2135614 - RNA, 19 nt, Artificial Sequence
  Description of Artificial Sequence: Synthetic oligonucleotide
ccaaaagugugcaagcaca

SEQ ID NO: 2135615 - RNA, 19 nt, Artificial Sequence
  Description of Artificial Sequence: Synthetic oligonucleotide
augcuaacauuuccaacuu

SEQ ID NO: 2135616 - RNA, 19 nt, Artificial Sequence
  Description of Artificial Sequence: Synthetic oligonucleotide
ugugcaucuuguguagcaa

SEQ ID NO: 2135617 - RNA, 19 nt, Artificial Sequence
  Description of Artificial Sequence: Synthetic oligonucleotide
cccuaaagcacuuggaaca

SEQ ID NO: 2135618 - RNA, 19 nt, Artificial Sequence
  Description of Artificial Sequence: Synthetic oligonucleotide
agacgaugagcaaggguag

SEQ ID NO: 2135619 - RNA, 19 nt, Artificial Sequence
  Description of Artificial Sequence: Synthetic oligonucleotide
aaagcacuuggaacaaaua

SEQ ID NO: 2135620 - RNA, 19 nt, Artificial Sequence
  Description of Artificial Sequence: Synthetic oligonucleotide
agaagacgaugagcaaggg

SEQ ID NO: 2135621 - RNA, 19 nt, Artificial Sequence
  Description of Artificial Sequence: Synthetic oligonucleotide
aucaucucuggaagaaaug

SEQ ID NO: 2135622 - RNA, 19 nt, Artificial Sequence
  Description of Artificial Sequence: Synthetic oligonucleotide
cagcacuguaaauuucguc

SEQ ID NO: 2135623 - RNA, 19 nt, Artificial Sequence
  Description of Artificial Sequence: Synthetic oligonucleotide
agccuucaagaaaaccagg

SEQ ID NO: 2135624 - RNA, 19 nt, Artificial Sequence
  Description of Artificial Sequence: Synthetic oligonucleotide
agauguuuuacuaccucuu

SEQ ID NO: 2135625 - RNA, 19 nt, Artificial Sequence
  Description of Artificial Sequence: Synthetic oligonucleotide
aggaugaagucaaguaggu

SEQ ID NO: 2135626 - RNA, 19 nt, Artificial Sequence
  Description of Artificial Sequence: Synthetic oligonucleotide
gaagacgaugagcaagggu

SEQ ID NO: 2135627 - RNA, 19 nt, Artificial Sequence
  Description of Artificial Sequence: Synthetic oligonucleotide
cauuauuuaccagaaugcu

SEQ ID NO: 2135628 - RNA, 19 nt, Artificial Sequence
  Description of Artificial Sequence: Synthetic oligonucleotide
cuugacauugauccugugu

SEQ ID NO: 2135629 - RNA, 19 nt, Artificial Sequence
  Description of Artificial Sequence: Synthetic oligonucleotide
ucccauacaugagauguuu

SEQ ID NO: 2135630 - RNA, 19 nt, Artificial Sequence
  Description of Artificial Sequence: Synthetic oligonucleotide
ccauucuuauugauauccc

SEQ ID NO: 2135631 - RNA, 19 nt, Artificial Sequence
  Description of Artificial Sequence: Synthetic oligonucleotide
gccuucaagaaaaccaggc

SEQ ID NO: 2135632 - RNA, 19 nt, Artificial Sequence
  Description of Artificial Sequence: Synthetic oligonucleotide
ugaucaggacaagcucucc

SEQ ID NO: 2135633 - RNA, 19 nt, Artificial Sequence
  Description of Artificial Sequence: Synthetic oligonucleotide
ugacuucgaaagucuuuuc

SEQ ID NO: 2135634 - RNA, 19 nt, Artificial Sequence
  Description of Artificial Sequence: Synthetic oligonucleotide
augagauguuuuacuaccu

SEQ ID NO: 2135635 - RNA, 19 nt, Artificial Sequence
  Description of Artificial Sequence: Synthetic oligonucleotide
acucggguucuugaugaag

SEQ ID NO: 2135636 - RNA, 19 nt, Artificial Sequence
  Description of Artificial Sequence: Synthetic oligonucleotide
uagacaacaccagcauuau

SEQ ID NO: 2135637 - RNA, 19 nt, Artificial Sequence
  Description of Artificial Sequence: Synthetic oligonucleotide
acgaugagcaaggguagca

SEQ ID NO: 2135638 - RNA, 19 nt, Artificial Sequence
  Description of Artificial Sequence: Synthetic oligonucleotide
acauugauccuguguuuua

SEQ ID NO: 2135639 - RNA, 19 nt, Artificial Sequence
  Description of Artificial Sequence: Synthetic oligonucleotide
guugguacucggguucuug

SEQ ID NO: 2135640 - RNA, 19 nt, Artificial Sequence
  Description of Artificial Sequence: Synthetic oligonucleotide
uuucagugaggaucccaua

SEQ ID NO: 2135641 - RNA, 19 nt, Artificial Sequence
  Description of Artificial Sequence: Synthetic oligonucleotide
ugaugccacggugacaaua

SEQ ID NO: 2135642 - RNA, 19 nt, Artificial Sequence
  Description of Artificial Sequence: Synthetic oligonucleotide
ugaagccgguguuuaugaa

SEQ ID NO: 2135643 - RNA, 19 nt, Artificial Sequence
  Description of Artificial Sequence: Synthetic oligonucleotide
agaaccaauuugguauuaa

SEQ ID NO: 2135644 - RNA, 19 nt, Artificial Sequence
  Description of Artificial Sequence: Synthetic oligonucleotide
agcuugacgaaagacucua

SEQ ID NO: 2135645 - RNA, 19 nt, Artificial Sequence
  Description of Artificial Sequence: Synthetic oligonucleotide
ugguacucggguucuugau

SEQ ID NO: 2135646 - RNA, 19 nt, Artificial Sequence
  Description of Artificial Sequence: Synthetic oligonucleotide
ucguaggcagucagucuuc

SEQ ID NO: 2135647 - RNA, 19 nt, Artificial Sequence
  Description of Artificial Sequence: Synthetic oligonucleotide
aaacugccaggaaccgcuc

SEQ ID NO: 2135648 - RNA, 19 nt, Artificial Sequence
  Description of Artificial Sequence: Synthetic oligonucleotide
gaguccaguaaaucagccu

SEQ ID NO: 2135649 - RNA, 19 nt, Artificial Sequence
  Description of Artificial Sequence: Synthetic oligonucleotide
ccuuuaccuuauuugcagc

SEQ ID NO: 2135650 - RNA, 19 nt, Artificial Sequence
  Description of Artificial Sequence: Synthetic oligonucleotide
auugacuucgaaagucuuu

SEQ ID NO: 2135651 - RNA, 19 nt, Artificial Sequence
  Description of Artificial Sequence: Synthetic oligonucleotide
uuuccucgaugccauucuu

SEQ ID NO: 2135652 - RNA, 19 nt, Artificial Sequence
  Description of Artificial Sequence: Synthetic oligonucleotide
caguucauccgucagggcu

SEQ ID NO: 2135653 - RNA, 19 nt, Artificial Sequence
  Description of Artificial Sequence: Synthetic oligonucleotide
cuaacauuuccaacuuccu

SEQ ID NO: 2135654 - RNA, 19 nt, Artificial Sequence
  Description of Artificial Sequence: Synthetic oligonucleotide
ggugacaauauggccauga

SEQ ID NO: 2135655 - RNA, 19 nt, Artificial Sequence
  Description of Artificial Sequence: Synthetic oligonucleotide
gcugaugccacggugacaa

SEQ ID NO: 2135656 - RNA, 19 nt, Artificial Sequence
  Description of Artificial Sequence: Synthetic oligonucleotide
caucaucucuggaagaaau

SEQ ID NO: 2135657 - RNA, 19 nt, Artificial Sequence
  Description of Artificial Sequence: Synthetic oligonucleotide
cauccgucagggcucugug

SEQ ID NO: 2135658 - RNA, 19 nt, Artificial Sequence
  Description of Artificial Sequence: Synthetic oligonucleotide
aaauuucgucccgcuugcu

SEQ ID NO: 2135659 - RNA, 19 nt, Artificial Sequence
  Description of Artificial Sequence: Synthetic oligonucleotide
caaauccgaaguguagaca

SEQ ID NO: 2135660 - RNA, 19 nt, Artificial Sequence
  Description of Artificial Sequence: Synthetic oligonucleotide
gcucuguggaagccaacag

SEQ ID NO: 2135661 - RNA, 19 nt, Artificial Sequence
  Description of Artificial Sequence: Synthetic oligonucleotide
ggcaaauucguaggcaguc

SEQ ID NO: 2135662 - RNA, 19 nt, Artificial Sequence
  Description of Artificial Sequence: Synthetic oligonucleotide
cuucgaaagucuuuucgau

SEQ ID NO: 2135663 - RNA, 19 nt, Artificial Sequence
  Description of Artificial Sequence: Synthetic oligonucleotide
gaugccacggugacaauau

SEQ ID NO: 2135664 - RNA, 19 nt, Artificial Sequence
  Description of Artificial Sequence: Synthetic oligonucleotide
ucuuuucagugaggauccc

SEQ ID NO: 2135665 - RNA, 19 nt, Artificial Sequence
  Description of Artificial Sequence: Synthetic oligonucleotide
agucaaguagguacuucau

SEQ ID NO: 2135666 - RNA, 19 nt, Artificial Sequence
  Description of Artificial Sequence: Synthetic oligonucleotide
caaacuugacauugauccu

SEQ ID NO: 2135667 - RNA, 19 nt, Artificial Sequence
  Description of Artificial Sequence: Synthetic oligonucleotide
cauugauccuguguuuuaa

SEQ ID NO: 2135668 - RNA, 19 nt, Artificial Sequence
  Description of Artificial Sequence: Synthetic oligonucleotide
auaucccagagaaccaauu

SEQ ID NO: 2135669 - RNA, 19 nt, Artificial Sequence
  Description of Artificial Sequence: Synthetic oligonucleotide
gcaaacaaauccgaagugu

SEQ ID NO: 2135670 - RNA, 19 nt, Artificial Sequence
  Description of Artificial Sequence: Synthetic oligonucleotide
uuccaggguggguccuaag

SEQ ID NO: 2135671 - RNA, 19 nt, Artificial Sequence
  Description of Artificial Sequence: Synthetic oligonucleotide
guguagacaacaccagcau

SEQ ID NO: 2135672 - RNA, 19 nt, Artificial Sequence
  Description of Artificial Sequence: Synthetic oligonucleotide
augccacggugacaauaug

SEQ ID NO: 2135673 - RNA, 19 nt, Artificial Sequence
  Description of Artificial Sequence: Synthetic oligonucleotide
ccacaaagggauaggccug

SEQ ID NO: 2135674 - RNA, 19 nt, Artificial Sequence
  Description of Artificial Sequence: Synthetic oligonucleotide
gacauugauccuguguuuu

SEQ ID NO: 2135675 - RNA, 19 nt, Artificial Sequence
  Description of Artificial Sequence: Synthetic oligonucleotide
gcagucagucuuccaauuc

SEQ ID NO: 2135676 - RNA, 19 nt, Artificial Sequence
  Description of Artificial Sequence: Synthetic oligonucleotide
caaaagugugcaagcacau

SEQ ID NO: 2135677 - RNA, 19 nt, Artificial Sequence
  Description of Artificial Sequence: Synthetic oligonucleotide
agacaacaccagcauuauu

SEQ ID NO: 2135678 - RNA, 19 nt, Artificial Sequence
  Description of Artificial Sequence: Synthetic oligonucleotide
cuaaguugguacucggguu

SEQ ID NO: 2135679 - RNA, 19 nt, Artificial Sequence
  Description of Artificial Sequence: Synthetic oligonucleotide
cugugugcccagcugcuga

SEQ ID NO: 2135680 - RNA, 19 nt, Artificial Sequence
  Description of Artificial Sequence: Synthetic oligonucleotide
agccaacagcagcaaacuu

SEQ ID NO: 2135681 - RNA, 19 nt, Artificial Sequence
  Description of Artificial Sequence: Synthetic oligonucleotide
uucagguuccagggugggu

SEQ ID NO: 2135682 - RNA, 19 nt, Artificial Sequence
  Description of Artificial Sequence: Synthetic oligonucleotide
gugcaagcacauugacuuc

SEQ ID NO: 2135683 - RNA, 19 nt, Artificial Sequence
  Description of Artificial Sequence: Synthetic oligonucleotide
cagcaagaaaggaaccacu

SEQ ID NO: 2135684 - RNA, 19 nt, Artificial Sequence
  Description of Artificial Sequence: Synthetic oligonucleotide
ugcugcaguccaccacaaa

SEQ ID NO: 2135685 - RNA, 19 nt, Artificial Sequence
  Description of Artificial Sequence: Synthetic oligonucleotide
uacucggguucuugaugaa

SEQ ID NO: 2135686 - RNA, 19 nt, Artificial Sequence
  Description of Artificial Sequence: Synthetic oligonucleotide
aggaaccacugugugccca

SEQ ID NO: 2135687 - RNA, 19 nt, Artificial Sequence
  Description of Artificial Sequence: Synthetic oligonucleotide
uuccuagggcagccaguuc

SEQ ID NO: 2135688 - RNA, 19 nt, Artificial Sequence
  Description of Artificial Sequence: Synthetic oligonucleotide
acuaccucuucagguucca

SEQ ID NO: 2135689 - RNA, 19 nt, Artificial Sequence
  Description of Artificial Sequence: Synthetic oligonucleotide
acucuaugcagaagacgau

SEQ ID NO: 2135690 - RNA, 19 nt, Artificial Sequence
  Description of Artificial Sequence: Synthetic oligonucleotide
ggccugggcaccaagguuc

SEQ ID NO: 2135691 - RNA, 19 nt, Artificial Sequence
  Description of Artificial Sequence: Synthetic oligonucleotide
uucauccuuccggcuggcc

SEQ ID NO: 2135692 - RNA, 19 nt, Artificial Sequence
  Description of Artificial Sequence: Synthetic oligonucleotide
ccaccacaaagggauaggc

SEQ ID NO: 2135693 - RNA, 19 nt, Artificial Sequence
  Description of Artificial Sequence: Synthetic oligonucleotide
ccauacaugagauguuuua

SEQ ID NO: 2135694 - RNA, 19 nt, Artificial Sequence
  Description of Artificial Sequence: Synthetic oligonucleotide
cuguaaauuucgucccgcu

SEQ ID NO: 2135695 - RNA, 19 nt, Artificial Sequence
  Description of Artificial Sequence: Synthetic oligonucleotide
gaccagcuccagugaucag

SEQ ID NO: 2135696 - RNA, 19 nt, Artificial Sequence
  Description of Artificial Sequence: Synthetic oligonucleotide
gguauuaaguuuggcaaau

SEQ ID NO: 2135697 - RNA, 19 nt, Artificial Sequence
  Description of Artificial Sequence: Synthetic oligonucleotide
ugcugaugccacggugaca

SEQ ID NO: 2135698 - RNA, 19 nt, Artificial Sequence
  Description of Artificial Sequence: Synthetic oligonucleotide
guaggcagucagucuucca

SEQ ID NO: 2135699 - RNA, 19 nt, Artificial Sequence
  Description of Artificial Sequence: Synthetic oligonucleotide
gcaagaaaggaaccacugu

SEQ ID NO: 2135700 - RNA, 19 nt, Artificial Sequence
  Description of Artificial Sequence: Synthetic oligonucleotide
aggccugggcaccaagguu

SEQ ID NO: 2135701 - RNA, 19 nt, Artificial Sequence
  Description of Artificial Sequence: Synthetic oligonucleotide
cuaccucuucagguuccag

SEQ ID NO: 2135702 - RNA, 19 nt, Artificial Sequence
  Description of Artificial Sequence: Synthetic oligonucleotide
ucgucccgcuugcugcagu

SEQ ID NO: 2135703 - RNA, 19 nt, Artificial Sequence
  Description of Artificial Sequence: Synthetic oligonucleotide
gccagcaagaaaggaacca

SEQ ID NO: 2135704 - RNA, 19 nt, Artificial Sequence
  Description of Artificial Sequence: Synthetic oligonucleotide
ggcucuguggaagccaaca

SEQ ID NO: 2135705 - RNA, 19 nt, Artificial Sequence
  Description of Artificial Sequence: Synthetic oligonucleotide
cagagacacgaaguuuuga

SEQ ID NO: 2135706 - RNA, 19 nt, Artificial Sequence
  Description of Artificial Sequence: Synthetic oligonucleotide
ccaauuugguauuaaguuu

SEQ ID NO: 2135707 - RNA, 19 nt, Artificial Sequence
  Description of Artificial Sequence: Synthetic oligonucleotide
gcaucuuguguagcaaaca

SEQ ID NO: 2135708 - RNA, 19 nt, Artificial Sequence
  Description of Artificial Sequence: Synthetic oligonucleotide
uucgucccgcuugcugcag

SEQ ID NO: 2135709 - RNA, 19 nt, Artificial Sequence
  Description of Artificial Sequence: Synthetic oligonucleotide
ccuaaguugguacucgggu

SEQ ID NO: 2135710 - RNA, 19 nt, Artificial Sequence
  Description of Artificial Sequence: Synthetic oligonucleotide
gaucuuccuagggcagcca

SEQ ID NO: 2135711 - RNA, 19 nt, Artificial Sequence
  Description of Artificial Sequence: Synthetic oligonucleotide
ccagagaaccaauuuggua

SEQ ID NO: 2135712 - RNA, 19 nt, Artificial Sequence
  Description of Artificial Sequence: Synthetic oligonucleotide
gcaaauucguaggcaguca

SEQ ID NO: 2135713 - RNA, 19 nt, Artificial Sequence
  Description of Artificial Sequence: Synthetic oligonucleotide
gugugcaagcacauugacu

SEQ ID NO: 2135714 - RNA, 19 nt, Artificial Sequence
  Description of Artificial Sequence: Synthetic oligonucleotide
cagugaggaucccauacau

SEQ ID NO: 2135715 - RNA, 19 nt, Artificial Sequence
  Description of Artificial Sequence: Synthetic oligonucleotide
gcagagacacgaaguuuug

SEQ ID NO: 2135716 - RNA, 19 nt, Artificial Sequence
  Description of Artificial Sequence: Synthetic oligonucleotide
caagaaaaccaggcagucu

SEQ ID NO: 2135717 - RNA, 19 nt, Artificial Sequence
  Description of Artificial Sequence: Synthetic oligonucleotide
ccuuauuugcagcacugua

SEQ ID NO: 2135718 - RNA, 19 nt, Artificial Sequence
  Description of Artificial Sequence: Synthetic oligonucleotide
cauugacuucgaaagucuu

SEQ ID NO: 2135719 - RNA, 19 nt, Artificial Sequence
  Description of Artificial Sequence: Synthetic oligonucleotide
caagcacauugacuucgaa

SEQ ID NO: 2135720 - RNA, 19 nt, Artificial Sequence
  Description of Artificial Sequence: Synthetic oligonucleotide
agggcucuguggaagccaa

SEQ ID NO: 2135721 - RNA, 19 nt, Artificial Sequence
  Description of Artificial Sequence: Synthetic oligonucleotide
aucccauacaugagauguu

SEQ ID NO: 2135722 - RNA, 19 nt, Artificial Sequence
  Description of Artificial Sequence: Synthetic oligonucleotide
aggaaccgcucaggaaaga

SEQ ID NO: 2135723 - RNA, 19 nt, Artificial Sequence
  Description of Artificial Sequence: Synthetic oligonucleotide
guacuucauccuuccggcu

SEQ ID NO: 2135724 - RNA, 19 nt, Artificial Sequence
  Description of Artificial Sequence: Synthetic oligonucleotide
cuggaacaguaagccagca

SEQ ID NO: 2135725 - RNA, 19 nt, Artificial Sequence
  Description of Artificial Sequence: Synthetic oligonucleotide
caugaccagcuccagugau

SEQ ID NO: 2135726 - RNA, 19 nt, Artificial Sequence
  Description of Artificial Sequence: Synthetic oligonucleotide
cuccagugaucaggacaag

SEQ ID NO: 2135727 - RNA, 19 nt, Artificial Sequence
  Description of Artificial Sequence: Synthetic oligonucleotide
gucccgcuugcugcagucc

SEQ ID NO: 2135728 - RNA, 19 nt, Artificial Sequence
  Description of Artificial Sequence: Synthetic oligonucleotide
gcacauugacuucgaaagu

SEQ ID NO: 2135729 - RNA, 19 nt, Artificial Sequence
  Description of Artificial Sequence: Synthetic oligonucleotide
guauuaaguuuggcaaauu

SEQ ID NO: 2135730 - RNA, 19 nt, Artificial Sequence
  Description of Artificial Sequence: Synthetic oligonucleotide
caagcucuccggcgacuga

SEQ ID NO: 2135731 - RNA, 19 nt, Artificial Sequence
  Description of Artificial Sequence: Synthetic oligonucleotide
accgcucaggaaagauccu

SEQ ID NO: 2135732 - RNA, 19 nt, Artificial Sequence
  Description of Artificial Sequence: Synthetic oligonucleotide
cacugugugcccagcugcu

SEQ ID NO: 2135733 - RNA, 19 nt, Artificial Sequence
  Description of Artificial Sequence: Synthetic oligonucleotide
ccuaaagcacuuggaacaa

SEQ ID NO: 2135734 - RNA, 19 nt, Artificial Sequence
  Description of Artificial Sequence: Synthetic oligonucleotide
gcaagcacauugacuucga

SEQ ID NO: 2135735 - RNA, 19 nt, Artificial Sequence
  Description of Artificial Sequence: Synthetic oligonucleotide
gccgguguuuaugaaguua

SEQ ID NO: 2135736 - RNA, 19 nt, Artificial Sequence
  Description of Artificial Sequence: Synthetic oligonucleotide
gacaagcucuccggcgacu

SEQ ID NO: 2135737 - RNA, 19 nt, Artificial Sequence
  Description of Artificial Sequence: Synthetic oligonucleotide
cgucagggcucuguggaag

SEQ ID NO: 2135738 - RNA, 19 nt, Artificial Sequence
  Description of Artificial Sequence: Synthetic oligonucleotide
gcuguuuccucgaugccau

SEQ ID NO: 2135739 - RNA, 19 nt, Artificial Sequence
  Description of Artificial Sequence: Synthetic oligonucleotide
ggaaccgcucaggaaagau

SEQ ID NO: 2135740 - RNA, 19 nt, Artificial Sequence
  Description of Artificial Sequence: Synthetic oligonucleotide
guucauccgucagggcucu

SEQ ID NO: 2135741 - RNA, 19 nt, Artificial Sequence
  Description of Artificial Sequence: Synthetic oligonucleotide
ggcagucagucuuccaauu

SEQ ID NO: 2135742 - RNA, 19 nt, Artificial Sequence
  Description of Artificial Sequence: Synthetic oligonucleotide
cccgcuugcugcaguccac

SEQ ID NO: 2135743 - RNA, 19 nt, Artificial Sequence
  Description of Artificial Sequence: Synthetic oligonucleotide
cgaaguuuugacuccggau

SEQ ID NO: 2135744 - RNA, 19 nt, Artificial Sequence
  Description of Artificial Sequence: Synthetic oligonucleotide
agcucuccggcgacugauu

SEQ ID NO: 2135745 - RNA, 19 nt, Artificial Sequence
  Description of Artificial Sequence: Synthetic oligonucleotide
ggcagccaguucauccguc

SEQ ID NO: 2135746 - RNA, 19 nt, Artificial Sequence
  Description of Artificial Sequence: Synthetic oligonucleotide
gcagcacuguaaauuucgu

SEQ ID NO: 2135747 - RNA, 19 nt, Artificial Sequence
  Description of Artificial Sequence: Synthetic oligonucleotide
gggauaggccugggcacca

SEQ ID NO: 2135748 - RNA, 19 nt, Artificial Sequence
  Description of Artificial Sequence: Synthetic oligonucleotide
cucuccggcgacugauuuu

SEQ ID NO: 2135749 - RNA, 19 nt, Artificial Sequence
  Description of Artificial Sequence: Synthetic oligonucleotide
ggccaugauuauucuucau

SEQ ID NO: 2135750 - RNA, 19 nt, Artificial Sequence
  Description of Artificial Sequence: Synthetic oligonucleotide
gggcagccaguucauccgu

SEQ ID NO: 2135751 - RNA, 19 nt, Artificial Sequence
  Description of Artificial Sequence: Synthetic oligonucleotide
ccaggguggguccuaaguu

SEQ ID NO: 2135752 - RNA, 19 nt, Artificial Sequence
  Description of Artificial Sequence: Synthetic oligonucleotide
cgucccgcuugcugcaguc

SEQ ID NO: 2135753 - RNA, 19 nt, Artificial Sequence
  Description of Artificial Sequence: Synthetic oligonucleotide
gcucuccggcgacugauuu

SEQ ID NO: 2135754 - RNA, 19 nt, Artificial Sequence
  Description of Artificial Sequence: Synthetic oligonucleotide
gggcagagacacgaaguuu

SEQ ID NO: 2135755 - RNA, 19 nt, Artificial Sequence
  Description of Artificial Sequence: Synthetic oligonucleotide
cuuccggcuggccgguguu

SEQ ID NO: 2135756 - RNA, 19 nt, Artificial Sequence
  Description of Artificial Sequence: Synthetic oligonucleotide
gggcucuguggaagccaac

SEQ ID NO: 2135757 - RNA, 19 nt, Artificial Sequence
  Description of Artificial Sequence: Synthetic oligonucleotide
ccuagggcagccaguucau

SEQ ID NO: 2135758 - RNA, 19 nt, Artificial Sequence
  Description of Artificial Sequence: Synthetic oligonucleotide
ggauaggccugggcaccaa

SEQ ID NO: 2135759 - RNA, 19 nt, Artificial Sequence
  Description of Artificial Sequence: Synthetic oligonucleotide
gcuugacgaaagacucuau

SEQ ID NO: 2135760 - RNA, 19 nt, Artificial Sequence
  Description of Artificial Sequence: Synthetic oligonucleotide
ccgucagggcucuguggaa

SEQ ID NO: 2135761 - RNA, 19 nt, Artificial Sequence
  Description of Artificial Sequence: Synthetic oligonucleotide
cgcucaggaaagauccuuu

SEQ ID NO: 2135762 - RNA, 19 nt, Artificial Sequence
  Description of Artificial Sequence: Synthetic oligonucleotide
ggguggguccuaaguuggu

SEQ ID NO: 2135763 - RNA, 19 nt, Artificial Sequence
  Description of Artificial Sequence: Synthetic oligonucleotide
cgaugccauucuuauugau

SEQ ID NO: 2135764 - RNA, 19 nt, Artificial Sequence
  Description of Artificial Sequence: Synthetic oligonucleotide
ccucgaugccauucuuauu

SEQ ID NO: 2135765 - RNA, 19 nt, Artificial Sequence
  Description of Artificial Sequence: Synthetic oligonucleotide
ccuuccggcuggccggugu

SEQ ID NO: 2135766 - RNA, 19 nt, Artificial Sequence
  Description of Artificial Sequence: Synthetic oligonucleotide
ccgcucaggaaagauccuu

SEQ ID NO: 2135767 - RNA, 19 nt, Artificial Sequence
  Description of Artificial Sequence: Synthetic oligonucleotide
ccugggcaccaagguuccu

SEQ ID NO: 2135768 - RNA, 19 nt, Artificial Sequence
  Description of Artificial Sequence: Synthetic oligonucleotide
aaauguaaccuuuggaggc

SEQ ID NO: 2135769 - RNA, 19 nt, Artificial Sequence
  Description of Artificial Sequence: Synthetic oligonucleotide
uuggcuauuaauauuacag

SEQ ID NO: 2135770 - RNA, 19 nt, Artificial Sequence
  Description of Artificial Sequence: Synthetic oligonucleotide
agugucuacacauacauuc

SEQ ID NO: 2135771 - RNA, 19 nt, Artificial Sequence
  Description of Artificial Sequence: Synthetic oligonucleotide
gauaccuuaaguuacaaca

SEQ ID NO: 2135772 - RNA, 19 nt, Artificial Sequence
  Description of Artificial Sequence: Synthetic oligonucleotide
aagcaaauaacuccuuggc

SEQ ID NO: 2135773 - RNA, 19 nt, Artificial Sequence
  Description of Artificial Sequence: Synthetic oligonucleotide
agugauaaauucuuguacg

SEQ ID NO: 2135774 - RNA, 19 nt, Artificial Sequence
  Description of Artificial Sequence: Synthetic oligonucleotide
aauauguccaagcaaauaa

SEQ ID NO: 2135775 - RNA, 19 nt, Artificial Sequence
  Description of Artificial Sequence: Synthetic oligonucleotide
ugaauaauaucuguuauag

SEQ ID NO: 2135776 - RNA, 19 nt, Artificial Sequence
  Description of Artificial Sequence: Synthetic oligonucleotide
aaaucuuaggaaguaagac

SEQ ID NO: 2135777 - RNA, 19 nt, Artificial Sequence
  Description of Artificial Sequence: Synthetic oligonucleotide
auaucuguuauagaaauac

SEQ ID NO: 2135778 - RNA, 19 nt, Artificial Sequence
  Description of Artificial Sequence: Synthetic oligonucleotide
gaaauguaaccuuuggagg

SEQ ID NO: 2135779 - RNA, 19 nt, Artificial Sequence
  Description of Artificial Sequence: Synthetic oligonucleotide
aaacugacagcucuaaaag

SEQ ID NO: 2135780 - RNA, 19 nt, Artificial Sequence
  Description of Artificial Sequence: Synthetic oligonucleotide
aaauacccuacucuuuacc

SEQ ID NO: 2135781 - RNA, 19 nt, Artificial Sequence
  Description of Artificial Sequence: Synthetic oligonucleotide
aaucuuaggaaguaagacu

SEQ ID NO: 2135782 - RNA, 19 nt, Artificial Sequence
  Description of Artificial Sequence: Synthetic oligonucleotide
cuaaaagucacuauuacca

SEQ ID NO: 2135783 - RNA, 19 nt, Artificial Sequence
  Description of Artificial Sequence: Synthetic oligonucleotide
agcaacagcaacuauuaac

SEQ ID NO: 2135784 - RNA, 19 nt, Artificial Sequence
  Description of Artificial Sequence: Synthetic oligonucleotide
uucaauauguccaagcaaa

SEQ ID NO: 2135785 - RNA, 19 nt, Artificial Sequence
  Description of Artificial Sequence: Synthetic oligonucleotide
ucuuguacgaaauguaacc

SEQ ID NO: 2135786 - RNA, 19 nt, Artificial Sequence
  Description of Artificial Sequence: Synthetic oligonucleotide
aacagcaacuauuaaccag

SEQ ID NO: 2135787 - RNA, 19 nt, Artificial Sequence
  Description of Artificial Sequence: Synthetic oligonucleotide
uuuuauguagcguaucucu

SEQ ID NO: 2135788 - RNA, 19 nt, Artificial Sequence
  Description of Artificial Sequence: Synthetic oligonucleotide
uguccaagcaaauaacucc

SEQ ID NO: 2135789 - RNA, 19 nt, Artificial Sequence
  Description of Artificial Sequence: Synthetic oligonucleotide
ucuguuauagaaauacccu

SEQ ID NO: 2135790 - RNA, 19 nt, Artificial Sequence
  Description of Artificial Sequence: Synthetic oligonucleotide
acuauuaccaauuugucua

SEQ ID NO: 2135791 - RNA, 19 nt, Artificial Sequence
  Description of Artificial Sequence: Synthetic oligonucleotide
uugaucuccacucauagau

SEQ ID NO: 2135792 - RNA, 19 nt, Artificial Sequence
  Description of Artificial Sequence: Synthetic oligonucleotide
uguuauagaaauacccuac

SEQ ID NO: 2135793 - RNA, 19 nt, Artificial Sequence
  Description of Artificial Sequence: Synthetic oligonucleotide
aucgucauccgacauagcg

SEQ ID NO: 2135794 - RNA, 19 nt, Artificial Sequence
  Description of Artificial Sequence: Synthetic oligonucleotide
uuacaacaaaaucuuagga

SEQ ID NO: 2135795 - RNA, 19 nt, Artificial Sequence
  Description of Artificial Sequence: Synthetic oligonucleotide
aauacccuacucuuuacca

SEQ ID NO: 2135796 - RNA, 19 nt, Artificial Sequence
  Description of Artificial Sequence: Synthetic oligonucleotide
aaauucuuguacgaaaugu

SEQ ID NO: 2135797 - RNA, 19 nt, Artificial Sequence
  Description of Artificial Sequence: Synthetic oligonucleotide
uacaacaaaaucuuaggaa

SEQ ID NO: 2135798 - RNA, 19 nt, Artificial Sequence
  Description of Artificial Sequence: Synthetic oligonucleotide
aaaaucauaagcagcucuc

SEQ ID NO: 2135799 - RNA, 19 nt, Artificial Sequence
  Description of Artificial Sequence: Synthetic oligonucleotide
ugguguaaaagugauauca

SEQ ID NO: 2135800 - RNA, 19 nt, Artificial Sequence
  Description of Artificial Sequence: Synthetic oligonucleotide
aagacugaauaauaucugu

SEQ ID NO: 2135801 - RNA, 19 nt, Artificial Sequence
  Description of Artificial Sequence: Synthetic oligonucleotide
uaauaucuguuauagaaau

SEQ ID NO: 2135802 - RNA, 19 nt, Artificial Sequence
  Description of Artificial Sequence: Synthetic oligonucleotide
ucuugcaaaacugacagcu

SEQ ID NO: 2135803 - RNA, 19 nt, Artificial Sequence
  Description of Artificial Sequence: Synthetic oligonucleotide
acugaguggcaauacuucc

SEQ ID NO: 2135804 - RNA, 19 nt, Artificial Sequence
  Description of Artificial Sequence: Synthetic oligonucleotide
uguagcaagauaccuuaag

SEQ ID NO: 2135805 - RNA, 19 nt, Artificial Sequence
  Description of Artificial Sequence: Synthetic oligonucleotide
uacgaaauguaaccuuugg

SEQ ID NO: 2135806 - RNA, 19 nt, Artificial Sequence
  Description of Artificial Sequence: Synthetic oligonucleotide
ucuuucaauauguccaagc

SEQ ID NO: 2135807 - RNA, 19 nt, Artificial Sequence
  Description of Artificial Sequence: Synthetic oligonucleotide
aucauaagcagcucucuuc

SEQ ID NO: 2135808 - RNA, 19 nt, Artificial Sequence
  Description of Artificial Sequence: Synthetic oligonucleotide
cuauuaaccaggcaauggc

SEQ ID NO: 2135809 - RNA, 19 nt, Artificial Sequence
  Description of Artificial Sequence: Synthetic oligonucleotide
ucugguguaaaagugauau

SEQ ID NO: 2135810 - RNA, 19 nt, Artificial Sequence
  Description of Artificial Sequence: Synthetic oligonucleotide
aucaaggaagaauacacca

SEQ ID NO: 2135811 - RNA, 19 nt, Artificial Sequence
  Description of Artificial Sequence: Synthetic oligonucleotide
uuuacucuccuucuucuug

SEQ ID NO: 2135812 - RNA, 19 nt, Artificial Sequence
  Description of Artificial Sequence: Synthetic oligonucleotide
aaaagucagcuaaucuugc

SEQ ID NO: 2135813 - RNA, 19 nt, Artificial Sequence
  Description of Artificial Sequence: Synthetic oligonucleotide
ucuaaagugaugucugcca

SEQ ID NO: 2135814 - RNA, 19 nt, Artificial Sequence
  Description of Artificial Sequence: Synthetic oligonucleotide
uauguccaagcaaauaacu

SEQ ID NO: 2135815 - RNA, 19 nt, Artificial Sequence
  Description of Artificial Sequence: Synthetic oligonucleotide
ugguguucugcccuguugg

SEQ ID NO: 2135816 - RNA, 19 nt, Artificial Sequence
  Description of Artificial Sequence: Synthetic oligonucleotide
caaagggucagcaggauug

SEQ ID NO: 2135817 - RNA, 19 nt, Artificial Sequence
  Description of Artificial Sequence: Synthetic oligonucleotide
agacagauaauggaagaac

SEQ ID NO: 2135818 - RNA, 19 nt, Artificial Sequence
  Description of Artificial Sequence: Synthetic oligonucleotide
aaagugauaucaaggaaga

SEQ ID NO: 2135819 - RNA, 19 nt, Artificial Sequence
  Description of Artificial Sequence: Synthetic oligonucleotide
cauacauucuuuucuguug

SEQ ID NO: 2135820 - RNA, 19 nt, Artificial Sequence
  Description of Artificial Sequence: Synthetic oligonucleotide
uacagugauaaauucuugu

SEQ ID NO: 2135821 - RNA, 19 nt, Artificial Sequence
  Description of Artificial Sequence: Synthetic oligonucleotide
uuuaccaacucccacccuc

SEQ ID NO: 2135822 - RNA, 19 nt, Artificial Sequence
  Description of Artificial Sequence: Synthetic oligonucleotide
aacugaaaaccccaguuuu

SEQ ID NO: 2135823 - RNA, 19 nt, Artificial Sequence
  Description of Artificial Sequence: Synthetic oligonucleotide
cuaaucuugcaaaacugac

SEQ ID NO: 2135824 - RNA, 19 nt, Artificial Sequence
  Description of Artificial Sequence: Synthetic oligonucleotide
gaaucgucauccgacauag

SEQ ID NO: 2135825 - RNA, 19 nt, Artificial Sequence
  Description of Artificial Sequence: Synthetic oligonucleotide
uuauagaaauacccuacuc

SEQ ID NO: 2135826 - RNA, 19 nt, Artificial Sequence
  Description of Artificial Sequence: Synthetic oligonucleotide
gaaugguugaucuccacuc

SEQ ID NO: 2135827 - RNA, 19 nt, Artificial Sequence
  Description of Artificial Sequence: Synthetic oligonucleotide
uucuggauccucuuggcgc

SEQ ID NO: 2135828 - RNA, 19 nt, Artificial Sequence
  Description of Artificial Sequence: Synthetic oligonucleotide
aaaaucuuaggaaguaaga

SEQ ID NO: 2135829 - RNA, 19 nt, Artificial Sequence
  Description of Artificial Sequence: Synthetic oligonucleotide
aguuuuauguagcguaucu

SEQ ID NO: 2135830 - RNA, 19 nt, Artificial Sequence
  Description of Artificial Sequence: Synthetic oligonucleotide
uauuaaccaggcaauggcu

SEQ ID NO: 2135831 - RNA, 19 nt, Artificial Sequence
  Description of Artificial Sequence: Synthetic oligonucleotide
aucuuaggaaguaagacug

SEQ ID NO: 2135832 - RNA, 19 nt, Artificial Sequence
  Description of Artificial Sequence: Synthetic oligonucleotide
ucaaggaagaauacaccac

SEQ ID NO: 2135833 - RNA, 19 nt, Artificial Sequence
  Description of Artificial Sequence: Synthetic oligonucleotide
aacccaagugucuacacau

SEQ ID NO: 2135834 - RNA, 19 nt, Artificial Sequence
  Description of Artificial Sequence: Synthetic oligonucleotide
uugcaaaacugacagcucu

SEQ ID NO: 2135835 - RNA, 19 nt, Artificial Sequence
  Description of Artificial Sequence: Synthetic oligonucleotide
agauaccuuaaguuacaac

SEQ ID NO: 2135836 - RNA, 19 nt, Artificial Sequence
  Description of Artificial Sequence: Synthetic oligonucleotide
ucaauggaacccaaguguc

SEQ ID NO: 2135837 - RNA, 19 nt, Artificial Sequence
  Description of Artificial Sequence: Synthetic oligonucleotide
ugcccuguuggucauauac

SEQ ID NO: 2135838 - RNA, 19 nt, Artificial Sequence
  Description of Artificial Sequence: Synthetic oligonucleotide
uguacgaaauguaaccuuu

SEQ ID NO: 2135839 - RNA, 19 nt, Artificial Sequence
  Description of Artificial Sequence: Synthetic oligonucleotide
agugauaucaaggaagaau

SEQ ID NO: 2135840 - RNA, 19 nt, Artificial Sequence
  Description of Artificial Sequence: Synthetic oligonucleotide
agcaagauaccuuaaguua

SEQ ID NO: 2135841 - RNA, 19 nt, Artificial Sequence
  Description of Artificial Sequence: Synthetic oligonucleotide
ggcuauuaauauuacagug

SEQ ID NO: 2135842 - RNA, 19 nt, Artificial Sequence
  Description of Artificial Sequence: Synthetic oligonucleotide
auuaccaauuugucuacug

SEQ ID NO: 2135843 - RNA, 19 nt, Artificial Sequence
  Description of Artificial Sequence: Synthetic oligonucleotide
uggucauauacugaguggc

SEQ ID NO: 2135844 - RNA, 19 nt, Artificial Sequence
  Description of Artificial Sequence: Synthetic oligonucleotide
uuucgagaugguuagugcu

SEQ ID NO: 2135845 - RNA, 19 nt, Artificial Sequence
  Description of Artificial Sequence: Synthetic oligonucleotide
agagaagcggaagugcagc

SEQ ID NO: 2135846 - RNA, 19 nt, Artificial Sequence
  Description of Artificial Sequence: Synthetic oligonucleotide
uuugucuacuguagcaaga

SEQ ID NO: 2135847 - RNA, 19 nt, Artificial Sequence
  Description of Artificial Sequence: Synthetic oligonucleotide
cagugauaaauucuuguac

SEQ ID NO: 2135848 - RNA, 19 nt, Artificial Sequence
  Description of Artificial Sequence: Synthetic oligonucleotide
ugaguggcaauacuuccca

SEQ ID NO: 2135849 - RNA, 19 nt, Artificial Sequence
  Description of Artificial Sequence: Synthetic oligonucleotide
uggcuauuaauauuacagu

SEQ ID NO: 2135850 - RNA, 19 nt, Artificial Sequence
  Description of Artificial Sequence: Synthetic oligonucleotide
uucgagaugguuagugcug

SEQ ID NO: 2135851 - RNA, 19 nt, Artificial Sequence
  Description of Artificial Sequence: Synthetic oligonucleotide
ugauaucaaggaagaauac

SEQ ID NO: 2135852 - RNA, 19 nt, Artificial Sequence
  Description of Artificial Sequence: Synthetic oligonucleotide
ucauccgacauagcgaacc

SEQ ID NO: 2135853 - RNA, 19 nt, Artificial Sequence
  Description of Artificial Sequence: Synthetic oligonucleotide
aaagggucagcaggauugc

SEQ ID NO: 2135854 - RNA, 19 nt, Artificial Sequence
  Description of Artificial Sequence: Synthetic oligonucleotide
uuacagugauaaauucuug

SEQ ID NO: 2135855 - RNA, 19 nt, Artificial Sequence
  Description of Artificial Sequence: Synthetic oligonucleotide
aagaacugaaaaccccagu

SEQ ID NO: 2135856 - RNA, 19 nt, Artificial Sequence
  Description of Artificial Sequence: Synthetic oligonucleotide
cuuugugucuggcugcucc

SEQ ID NO: 2135857 - RNA, 19 nt, Artificial Sequence
  Description of Artificial Sequence: Synthetic oligonucleotide
cgaaauguaaccuuuggag

SEQ ID NO: 2135858 - RNA, 19 nt, Artificial Sequence
  Description of Artificial Sequence: Synthetic oligonucleotide
cuuucgagaugguuagugc

SEQ ID NO: 2135859 - RNA, 19 nt, Artificial Sequence
  Description of Artificial Sequence: Synthetic oligonucleotide
agcucuaaaagucacuauu

SEQ ID NO: 2135860 - RNA, 19 nt, Artificial Sequence
  Description of Artificial Sequence: Synthetic oligonucleotide
agcaaauaacuccuuggcu

SEQ ID NO: 2135861 - RNA, 19 nt, Artificial Sequence
  Description of Artificial Sequence: Synthetic oligonucleotide
aaagucacuauuaccaauu

SEQ ID NO: 2135862 - RNA, 19 nt, Artificial Sequence
  Description of Artificial Sequence: Synthetic oligonucleotide
acuguagcaagauaccuua

SEQ ID NO: 2135863 - RNA, 19 nt, Artificial Sequence
  Description of Artificial Sequence: Synthetic oligonucleotide
acagacagauaauggaaga

SEQ ID NO: 2135864 - RNA, 19 nt, Artificial Sequence
  Description of Artificial Sequence: Synthetic oligonucleotide
agaaugguugaucuccacu

SEQ ID NO: 2135865 - RNA, 19 nt, Artificial Sequence
  Description of Artificial Sequence: Synthetic oligonucleotide
acugucugguguucugccc

SEQ ID NO: 2135866 - RNA, 19 nt, Artificial Sequence
  Description of Artificial Sequence: Synthetic oligonucleotide
uugguggagggucuaaagu

SEQ ID NO: 2135867 - RNA, 19 nt, Artificial Sequence
  Description of Artificial Sequence: Synthetic oligonucleotide
ucacuauuaccaauuuguc

SEQ ID NO: 2135868 - RNA, 19 nt, Artificial Sequence
  Description of Artificial Sequence: Synthetic oligonucleotide
aaaucauaagcagcucucu

SEQ ID NO: 2135869 - RNA, 19 nt, Artificial Sequence
  Description of Artificial Sequence: Synthetic oligonucleotide
uuugugucuggcugcuccg

SEQ ID NO: 2135870 - RNA, 19 nt, Artificial Sequence
  Description of Artificial Sequence: Synthetic oligonucleotide
aacuauuaaccaggcaaug

SEQ ID NO: 2135871 - RNA, 19 nt, Artificial Sequence
  Description of Artificial Sequence: Synthetic oligonucleotide
ucgucauccgacauagcga

SEQ ID NO: 2135872 - RNA, 19 nt, Artificial Sequence
  Description of Artificial Sequence: Synthetic oligonucleotide
acgaaauguaaccuuugga

SEQ ID NO: 2135873 - RNA, 19 nt, Artificial Sequence
  Description of Artificial Sequence: Synthetic oligonucleotide
aacaaaaucuuaggaagua

SEQ ID NO: 2135874 - RNA, 19 nt, Artificial Sequence
  Description of Artificial Sequence: Synthetic oligonucleotide
cacccuuucaaaaucauaa

SEQ ID NO: 2135875 - RNA, 19 nt, Artificial Sequence
  Description of Artificial Sequence: Synthetic oligonucleotide
caugcugacuuuacucucc

SEQ ID NO: 2135876 - RNA, 19 nt, Artificial Sequence
  Description of Artificial Sequence: Synthetic oligonucleotide
aaguaagacugaauaauau

SEQ ID NO: 2135877 - RNA, 19 nt, Artificial Sequence
  Description of Artificial Sequence: Synthetic oligonucleotide
aauucuuguacgaaaugua

SEQ ID NO: 2135878 - RNA, 19 nt, Artificial Sequence
  Description of Artificial Sequence: Synthetic oligonucleotide
acucgugucucgcucucgc

SEQ ID NO: 2135879 - RNA, 19 nt, Artificial Sequence
  Description of Artificial Sequence: Synthetic oligonucleotide
cucucuuugugucuggcug

SEQ ID NO: 2135880 - RNA, 19 nt, Artificial Sequence
  Description of Artificial Sequence: Synthetic oligonucleotide
aaucauaagcagcucucuu

SEQ ID NO: 2135881 - RNA, 19 nt, Artificial Sequence
  Description of Artificial Sequence: Synthetic oligonucleotide
aacuccuuggcuauuaaua

SEQ ID NO: 2135882 - RNA, 19 nt, Artificial Sequence
  Description of Artificial Sequence: Synthetic oligonucleotide
aauguaaccuuuggaggcu

SEQ ID NO: 2135883 - RNA, 19 nt, Artificial Sequence
  Description of Artificial Sequence: Synthetic oligonucleotide
uucucggucugcugguugg

SEQ ID NO: 2135884 - RNA, 19 nt, Artificial Sequence
  Description of Artificial Sequence: Synthetic oligonucleotide
uaccuuaaguuacaacaaa

SEQ ID NO: 2135885 - RNA, 19 nt, Artificial Sequence
  Description of Artificial Sequence: Synthetic oligonucleotide
ugaucuccacucauagaug

SEQ ID NO: 2135886 - RNA, 19 nt, Artificial Sequence
  Description of Artificial Sequence: Synthetic oligonucleotide
uuaccaacucccacccucc

SEQ ID NO: 2135887 - RNA, 19 nt, Artificial Sequence
  Description of Artificial Sequence: Synthetic oligonucleotide
cugaguggcaauacuuccc

SEQ ID NO: 2135888 - RNA, 19 nt, Artificial Sequence
  Description of Artificial Sequence: Synthetic oligonucleotide
ucucuuugugucuggcugc

SEQ ID NO: 2135889 - RNA, 19 nt, Artificial Sequence
  Description of Artificial Sequence: Synthetic oligonucleotide
auguccaagcaaauaacuc

SEQ ID NO: 2135890 - RNA, 19 nt, Artificial Sequence
  Description of Artificial Sequence: Synthetic oligonucleotide
ucuuaggaaguaagacuga

SEQ ID NO: 2135891 - RNA, 19 nt, Artificial Sequence
  Description of Artificial Sequence: Synthetic oligonucleotide
gaagcggaagugcagcaac

SEQ ID NO: 2135892 - RNA, 19 nt, Artificial Sequence
  Description of Artificial Sequence: Synthetic oligonucleotide
ucgagaugguuagugcugg

SEQ ID NO: 2135893 - RNA, 19 nt, Artificial Sequence
  Description of Artificial Sequence: Synthetic oligonucleotide
uuaggaaguaagacugaau

SEQ ID NO: 2135894 - RNA, 19 nt, Artificial Sequence
  Description of Artificial Sequence: Synthetic oligonucleotide
gguugaucuccacucauag

SEQ ID NO: 2135895 - RNA, 19 nt, Artificial Sequence
  Description of Artificial Sequence: Synthetic oligonucleotide
acuuucgagaugguuagug

SEQ ID NO: 2135896 - RNA, 19 nt, Artificial Sequence
  Description of Artificial Sequence: Synthetic oligonucleotide
ccuuucaaaaucauaagca

SEQ ID NO: 2135897 - RNA, 19 nt, Artificial Sequence
  Description of Artificial Sequence: Synthetic oligonucleotide
uacccuacucuuuaccaac

SEQ ID NO: 2135898 - RNA, 19 nt, Artificial Sequence
  Description of Artificial Sequence: Synthetic oligonucleotide
gugauaucaaggaagaaua

SEQ ID NO: 2135899 - RNA, 19 nt, Artificial Sequence
  Description of Artificial Sequence: Synthetic oligonucleotide
ucagcuaaucuugcaaaac

SEQ ID NO: 2135900 - RNA, 19 nt, Artificial Sequence
  Description of Artificial Sequence: Synthetic oligonucleotide
cuacacauacauucuuuuc

SEQ ID NO: 2135901 - RNA, 19 nt, Artificial Sequence
  Description of Artificial Sequence: Synthetic oligonucleotide
acagauaauggaagaacug

SEQ ID NO: 2135902 - RNA, 19 nt, Artificial Sequence
  Description of Artificial Sequence: Synthetic oligonucleotide
aagugcagcaacagcaacu

SEQ ID NO: 2135903 - RNA, 19 nt, Artificial Sequence
  Description of Artificial Sequence: Synthetic oligonucleotide
gaaauacccuacucuuuac

SEQ ID NO: 2135904 - RNA, 19 nt, Artificial Sequence
  Description of Artificial Sequence: Synthetic oligonucleotide
uguugucaccuuugggacc

SEQ ID NO: 2135905 - RNA, 19 nt, Artificial Sequence
  Description of Artificial Sequence: Synthetic oligonucleotide
ugcaguuugguggaggguc

SEQ ID NO: 2135906 - RNA, 19 nt, Artificial Sequence
  Description of Artificial Sequence: Synthetic oligonucleotide
ucggucugcugguuggagg

SEQ ID NO: 2135907 - RNA, 19 nt, Artificial Sequence
  Description of Artificial Sequence: Synthetic oligonucleotide
gaugguuagugcugggcuc

SEQ ID NO: 2135908 - RNA, 19 nt, Artificial Sequence
  Description of Artificial Sequence: Synthetic oligonucleotide
uagagaggaggacuuucga

SEQ ID NO: 2135909 - RNA, 19 nt, Artificial Sequence
  Description of Artificial Sequence: Synthetic oligonucleotide
ccaagaaugguugaucucc

SEQ ID NO: 2135910 - RNA, 19 nt, Artificial Sequence
  Description of Artificial Sequence: Synthetic oligonucleotide
ggacuuucgagaugguuag

SEQ ID NO: 2135911 - RNA, 19 nt, Artificial Sequence
  Description of Artificial Sequence: Synthetic oligonucleotide
uggagguccaagaaugguu

SEQ ID NO: 2135912 - RNA, 19 nt, Artificial Sequence
  Description of Artificial Sequence: Synthetic oligonucleotide
auggaacccaagugucuac

SEQ ID NO: 2135913 - RNA, 19 nt, Artificial Sequence
  Description of Artificial Sequence: Synthetic oligonucleotide
ucgugucucgcucucgcug

SEQ ID NO: 2135914 - RNA, 19 nt, Artificial Sequence
  Description of Artificial Sequence: Synthetic oligonucleotide
uuguacgaaauguaaccuu

SEQ ID NO: 2135915 - RNA, 19 nt, Artificial Sequence
  Description of Artificial Sequence: Synthetic oligonucleotide
agggucuaaagugaugucu

SEQ ID NO: 2135916 - RNA, 19 nt, Artificial Sequence
  Description of Artificial Sequence: Synthetic oligonucleotide
gaucuccacucauagaugu

SEQ ID NO: 2135917 - RNA, 19 nt, Artificial Sequence
  Description of Artificial Sequence: Synthetic oligonucleotide
uccaguugucuuucaauau

SEQ ID NO: 2135918 - RNA, 19 nt, Artificial Sequence
  Description of Artificial Sequence: Synthetic oligonucleotide
ugucuacacauacauucuu

SEQ ID NO: 2135919 - RNA, 19 nt, Artificial Sequence
  Description of Artificial Sequence: Synthetic oligonucleotide
aaccaggcaauggcuuccc

SEQ ID NO: 2135920 - RNA, 19 nt, Artificial Sequence
  Description of Artificial Sequence: Synthetic oligonucleotide
gcaaauaacuccuuggcua

SEQ ID NO: 2135921 - RNA, 19 nt, Artificial Sequence
  Description of Artificial Sequence: Synthetic oligonucleotide
aagucacuauuaccaauuu

SEQ ID NO: 2135922 - RNA, 19 nt, Artificial Sequence
  Description of Artificial Sequence: Synthetic oligonucleotide
uggagaggagcuucgaguu

SEQ ID NO: 2135923 - RNA, 19 nt, Artificial Sequence
  Description of Artificial Sequence: Synthetic oligonucleotide
agaggaggacuuucgagau

SEQ ID NO: 2135924 - RNA, 19 nt, Artificial Sequence
  Description of Artificial Sequence: Synthetic oligonucleotide
gacagauaauggaagaacu

SEQ ID NO: 2135925 - RNA, 19 nt, Artificial Sequence
  Description of Artificial Sequence: Synthetic oligonucleotide
gcuauuaauauuacaguga

SEQ ID NO: 2135926 - RNA, 19 nt, Artificial Sequence
  Description of Artificial Sequence: Synthetic oligonucleotide
agauaauggaagaacugaa

SEQ ID NO: 2135927 - RNA, 19 nt, Artificial Sequence
  Description of Artificial Sequence: Synthetic oligonucleotide
auacuucccaccaaagggu

SEQ ID NO: 2135928 - RNA, 19 nt, Artificial Sequence
  Description of Artificial Sequence: Synthetic oligonucleotide
auucuuguacgaaauguaa

SEQ ID NO: 2135929 - RNA, 19 nt, Artificial Sequence
  Description of Artificial Sequence: Synthetic oligonucleotide
ggugcuggcccucgaaucg

SEQ ID NO: 2135930 - RNA, 19 nt, Artificial Sequence
  Description of Artificial Sequence: Synthetic oligonucleotide
gaacccaagugucuacaca

SEQ ID NO: 2135931 - RNA, 19 nt, Artificial Sequence
  Description of Artificial Sequence: Synthetic oligonucleotide
ugcaaaacugacagcucua

SEQ ID NO: 2135932 - RNA, 19 nt, Artificial Sequence
  Description of Artificial Sequence: Synthetic oligonucleotide
gcaagauaccuuaaguuac

SEQ ID NO: 2135933 - RNA, 19 nt, Artificial Sequence
  Description of Artificial Sequence: Synthetic oligonucleotide
cucucgcugggagagaagc

SEQ ID NO: 2135934 - RNA, 19 nt, Artificial Sequence
  Description of Artificial Sequence: Synthetic oligonucleotide
auacccuacucuuuaccaa

SEQ ID NO: 2135935 - RNA, 19 nt, Artificial Sequence
  Description of Artificial Sequence: Synthetic oligonucleotide
cugacagcucuaaaaguca

SEQ ID NO: 2135936 - RNA, 19 nt, Artificial Sequence
  Description of Artificial Sequence: Synthetic oligonucleotide
cugaauaauaucuguuaua

SEQ ID NO: 2135937 - RNA, 19 nt, Artificial Sequence
  Description of Artificial Sequence: Synthetic oligonucleotide
auaccuuaaguuacaacaa

SEQ ID NO: 2135938 - RNA, 19 nt, Artificial Sequence
  Description of Artificial Sequence: Synthetic oligonucleotide
uccaagaaugguugaucuc

SEQ ID NO: 2135939 - RNA, 19 nt, Artificial Sequence
  Description of Artificial Sequence: Synthetic oligonucleotide
aggacuuucgagaugguua

SEQ ID NO: 2135940 - RNA, 19 nt, Artificial Sequence
  Description of Artificial Sequence: Synthetic oligonucleotide
acaaaaucuuaggaaguaa

SEQ ID NO: 2135941 - RNA, 19 nt, Artificial Sequence
  Description of Artificial Sequence: Synthetic oligonucleotide
uggagggucuaaagugaug

SEQ ID NO: 2135942 - RNA, 19 nt, Artificial Sequence
  Description of Artificial Sequence: Synthetic oligonucleotide
aagcagcucucuucuguga

SEQ ID NO: 2135943 - RNA, 19 nt, Artificial Sequence
  Description of Artificial Sequence: Synthetic oligonucleotide
acagcucuaaaagucacua

SEQ ID NO: 2135944 - RNA, 19 nt, Artificial Sequence
  Description of Artificial Sequence: Synthetic oligonucleotide
uaaccaggcaauggcuucc

SEQ ID NO: 2135945 - RNA, 19 nt, Artificial Sequence
  Description of Artificial Sequence: Synthetic oligonucleotide
ggcuugaagggauauucug

SEQ ID NO: 2135946 - RNA, 19 nt, Artificial Sequence
  Description of Artificial Sequence: Synthetic oligonucleotide
aagauaccuuaaguuacaa

SEQ ID NO: 2135947 - RNA, 19 nt, Artificial Sequence
  Description of Artificial Sequence: Synthetic oligonucleotide
ccuuuggaggcuugaaggg

SEQ ID NO: 2135948 - RNA, 19 nt, Artificial Sequence
  Description of Artificial Sequence: Synthetic oligonucleotide
guuuuauguagcguaucuc

SEQ ID NO: 2135949 - RNA, 19 nt, Artificial Sequence
  Description of Artificial Sequence: Synthetic oligonucleotide
cagcaacuauuaaccaggc

SEQ ID NO: 2135950 - RNA, 19 nt, Artificial Sequence
  Description of Artificial Sequence: Synthetic oligonucleotide
accuuaaguuacaacaaaa

SEQ ID NO: 2135951 - RNA, 19 nt, Artificial Sequence
  Description of Artificial Sequence: Synthetic oligonucleotide
auccgacauagcgaacccc

SEQ ID NO: 2135952 - RNA, 19 nt, Artificial Sequence
  Description of Artificial Sequence: Synthetic oligonucleotide
cauccgacauagcgaaccc

SEQ ID NO: 2135953 - RNA, 19 nt, Artificial Sequence
  Description of Artificial Sequence: Synthetic oligonucleotide
agcaacuauuaaccaggca

SEQ ID NO: 2135954 - RNA, 19 nt, Artificial Sequence
  Description of Artificial Sequence: Synthetic oligonucleotide
uauuaccaauuugucuacu

SEQ ID NO: 2135955 - RNA, 19 nt, Artificial Sequence
  Description of Artificial Sequence: Synthetic oligonucleotide
ccaauuugucuacuguagc

SEQ ID NO: 2135956 - RNA, 19 nt, Artificial Sequence
  Description of Artificial Sequence: Synthetic oligonucleotide
ugguugaucuccacucaua

SEQ ID NO: 2135957 - RNA, 19 nt, Artificial Sequence
  Description of Artificial Sequence: Synthetic oligonucleotide
ucgaaucgucauccgacau

SEQ ID NO: 2135958 - RNA, 19 nt, Artificial Sequence
  Description of Artificial Sequence: Synthetic oligonucleotide
auucugguguaaaagugau

SEQ ID NO: 2135959 - RNA, 19 nt, Artificial Sequence
  Description of Artificial Sequence: Synthetic oligonucleotide
uugcucaugcugacuuuac

SEQ ID NO: 2135960 - RNA, 19 nt, Artificial Sequence
  Description of Artificial Sequence: Synthetic oligonucleotide
ugacuuuacucuccuucuu

SEQ ID NO: 2135961 - RNA, 19 nt, Artificial Sequence
  Description of Artificial Sequence: Synthetic oligonucleotide
ggagguccaagaaugguug

SEQ ID NO: 2135962 - RNA, 19 nt, Artificial Sequence
  Description of Artificial Sequence: Synthetic oligonucleotide
cacuauuaccaauuugucu

SEQ ID NO: 2135963 - RNA, 19 nt, Artificial Sequence
  Description of Artificial Sequence: Synthetic oligonucleotide
augguugaucuccacucau

SEQ ID NO: 2135964 - RNA, 19 nt, Artificial Sequence
  Description of Artificial Sequence: Synthetic oligonucleotide
uggaacccaagugucuaca

SEQ ID NO: 2135965 - RNA, 19 nt, Artificial Sequence
  Description of Artificial Sequence: Synthetic oligonucleotide
auuaaccaggcaauggcuu

SEQ ID NO: 2135966 - RNA, 19 nt, Artificial Sequence
  Description of Artificial Sequence: Synthetic oligonucleotide
guacgaaauguaaccuuug

SEQ ID NO: 2135967 - RNA, 19 nt, Artificial Sequence
  Description of Artificial Sequence: Synthetic oligonucleotide
guugaucuccacucauaga

SEQ ID NO: 2135968 - RNA, 19 nt, Artificial Sequence
  Description of Artificial Sequence: Synthetic oligonucleotide
cuccaguugucuuucaaua

SEQ ID NO: 2135969 - RNA, 19 nt, Artificial Sequence
  Description of Artificial Sequence: Synthetic oligonucleotide
caagaaugguugaucucca

SEQ ID NO: 2135970 - RNA, 19 nt, Artificial Sequence
  Description of Artificial Sequence: Synthetic oligonucleotide
cucaugcugacuuuacucu

SEQ ID NO: 2135971 - RNA, 19 nt, Artificial Sequence
  Description of Artificial Sequence: Synthetic oligonucleotide
uauacagauccuggagguc

SEQ ID NO: 2135972 - RNA, 19 nt, Artificial Sequence
  Description of Artificial Sequence: Synthetic oligonucleotide
ugucugguguucugcccug

SEQ ID NO: 2135973 - RNA, 19 nt, Artificial Sequence
  Description of Artificial Sequence: Synthetic oligonucleotide
ucuuggcgcugguggagag

SEQ ID NO: 2135974 - RNA, 19 nt, Artificial Sequence
  Description of Artificial Sequence: Synthetic oligonucleotide
cagcucucuucugugacag

SEQ ID NO: 2135975 - RNA, 19 nt, Artificial Sequence
  Description of Artificial Sequence: Synthetic oligonucleotide
guccaagaaugguugaucu

SEQ ID NO: 2135976 - RNA, 19 nt, Artificial Sequence
  Description of Artificial Sequence: Synthetic oligonucleotide
ggucuaaagugaugucugc

SEQ ID NO: 2135977 - RNA, 19 nt, Artificial Sequence
  Description of Artificial Sequence: Synthetic oligonucleotide
auaacuccuuggcuauuaa

SEQ ID NO: 2135978 - RNA, 19 nt, Artificial Sequence
  Description of Artificial Sequence: Synthetic oligonucleotide
gaacugaaaaccccaguuu

SEQ ID NO: 2135979 - RNA, 19 nt, Artificial Sequence
  Description of Artificial Sequence: Synthetic oligonucleotide
uggugcuggcccucgaauc

SEQ ID NO: 2135980 - RNA, 19 nt, Artificial Sequence
  Description of Artificial Sequence: Synthetic oligonucleotide
ccucgaaucgucauccgac

SEQ ID NO: 2135981 - RNA, 19 nt, Artificial Sequence
  Description of Artificial Sequence: Synthetic oligonucleotide
aagugauaucaaggaagaa

SEQ ID NO: 2135982 - RNA, 19 nt, Artificial Sequence
  Description of Artificial Sequence: Synthetic oligonucleotide
uuuugcucaugcugacuuu

SEQ ID NO: 2135983 - RNA, 19 nt, Artificial Sequence
  Description of Artificial Sequence: Synthetic oligonucleotide
cccuguuggucauauacug

SEQ ID NO: 2135984 - RNA, 19 nt, Artificial Sequence
  Description of Artificial Sequence: Synthetic oligonucleotide
cugguguucugcccuguug

SEQ ID NO: 2135985 - RNA, 19 nt, Artificial Sequence
  Description of Artificial Sequence: Synthetic oligonucleotide
gcuaaucuugcaaaacuga

SEQ ID NO: 2135986 - RNA, 19 nt, Artificial Sequence
  Description of Artificial Sequence: Synthetic oligonucleotide
ccaagcaaauaacuccuug

SEQ ID NO: 2135987 - RNA, 19 nt, Artificial Sequence
  Description of Artificial Sequence: Synthetic oligonucleotide
gucauauacugaguggcaa

SEQ ID NO: 2135988 - RNA, 19 nt, Artificial Sequence
  Description of Artificial Sequence: Synthetic oligonucleotide
gagggucuaaagugauguc

SEQ ID NO: 2135989 - RNA, 19 nt, Artificial Sequence
  Description of Artificial Sequence: Synthetic oligonucleotide
agggauauucugguguaaa

SEQ ID NO: 2135990 - RNA, 19 nt, Artificial Sequence
  Description of Artificial Sequence: Synthetic oligonucleotide
cucgaaucgucauccgaca

SEQ ID NO: 2135991 - RNA, 19 nt, Artificial Sequence
  Description of Artificial Sequence: Synthetic oligonucleotide
caaauaacuccuuggcuau

SEQ ID NO: 2135992 - RNA, 19 nt, Artificial Sequence
  Description of Artificial Sequence: Synthetic oligonucleotide
cagcuaaucuugcaaaacu

SEQ ID NO: 2135993 - RNA, 19 nt, Artificial Sequence
  Description of Artificial Sequence: Synthetic oligonucleotide
aagcggaagugcagcaaca

SEQ ID NO: 2135994 - RNA, 19 nt, Artificial Sequence
  Description of Artificial Sequence: Synthetic oligonucleotide
cuuuggaggcuugaaggga

SEQ ID NO: 2135995 - RNA, 19 nt, Artificial Sequence
  Description of Artificial Sequence: Synthetic oligonucleotide
uggauccucuuggcgcugg

SEQ ID NO: 2135996 - RNA, 19 nt, Artificial Sequence
  Description of Artificial Sequence: Synthetic oligonucleotide
aagggauauucugguguaa

SEQ ID NO: 2135997 - RNA, 19 nt, Artificial Sequence
  Description of Artificial Sequence: Synthetic oligonucleotide
cugacuuuacucuccuucu

SEQ ID NO: 2135998 - RNA, 19 nt, Artificial Sequence
  Description of Artificial Sequence: Synthetic oligonucleotide
cuuguacgaaauguaaccu

SEQ ID NO: 2135999 - RNA, 19 nt, Artificial Sequence
  Description of Artificial Sequence: Synthetic oligonucleotide
ucucgcucucgcugggaga

SEQ ID NO: 2136000 - RNA, 19 nt, Artificial Sequence
  Description of Artificial Sequence: Synthetic oligonucleotide
gaguggcaauacuucccac

SEQ ID NO: 2136001 - RNA, 19 nt, Artificial Sequence
  Description of Artificial Sequence: Synthetic oligonucleotide
ucccaccaaagggucagca

SEQ ID NO: 2136002 - RNA, 19 nt, Artificial Sequence
  Description of Artificial Sequence: Synthetic oligonucleotide
ugguccacugucugguguu

SEQ ID NO: 2136003 - RNA, 19 nt, Artificial Sequence
  Description of Artificial Sequence: Synthetic oligonucleotide
caguuuuauguagcguauc

SEQ ID NO: 2136004 - RNA, 19 nt, Artificial Sequence
  Description of Artificial Sequence: Synthetic oligonucleotide
gcucucuucugugacagac

SEQ ID NO: 2136005 - RNA, 19 nt, Artificial Sequence
  Description of Artificial Sequence: Synthetic oligonucleotide
gcaauacuucccaccaaag

SEQ ID NO: 2136006 - RNA, 19 nt, Artificial Sequence
  Description of Artificial Sequence: Synthetic oligonucleotide
guccaagcaaauaacuccu

SEQ ID NO: 2136007 - RNA, 19 nt, Artificial Sequence
  Description of Artificial Sequence: Synthetic oligonucleotide
caauauguccaagcaaaua

SEQ ID NO: 2136008 - RNA, 19 nt, Artificial Sequence
  Description of Artificial Sequence: Synthetic oligonucleotide
gguguaaaagugauaucaa

SEQ ID NO: 2136009 - RNA, 19 nt, Artificial Sequence
  Description of Artificial Sequence: Synthetic oligonucleotide
ccuggagguccaagaaugg

SEQ ID NO: 2136010 - RNA, 19 nt, Artificial Sequence
  Description of Artificial Sequence: Synthetic oligonucleotide
ggaacccaagugucuacac

SEQ ID NO: 2136011 - RNA, 19 nt, Artificial Sequence
  Description of Artificial Sequence: Synthetic oligonucleotide
cuuugggaccagcacugca

SEQ ID NO: 2136012 - RNA, 19 nt, Artificial Sequence
  Description of Artificial Sequence: Synthetic oligonucleotide
uuggaggcuugaagggaua

SEQ ID NO: 2136013 - RNA, 19 nt, Artificial Sequence
  Description of Artificial Sequence: Synthetic oligonucleotide
cagacagauaauggaagaa

SEQ ID NO: 2136014 - RNA, 19 nt, Artificial Sequence
  Description of Artificial Sequence: Synthetic oligonucleotide
ggagggucuaaagugaugu

SEQ ID NO: 2136015 - RNA, 19 nt, Artificial Sequence
  Description of Artificial Sequence: Synthetic oligonucleotide
guaaccuuuggaggcuuga

SEQ ID NO: 2136016 - RNA, 19 nt, Artificial Sequence
  Description of Artificial Sequence: Synthetic oligonucleotide
gguggagggucuaaaguga

SEQ ID NO: 2136017 - RNA, 19 nt, Artificial Sequence
  Description of Artificial Sequence: Synthetic oligonucleotide
ucugguguucugcccuguu

SEQ ID NO: 2136018 - RNA, 19 nt, Artificial Sequence
  Description of Artificial Sequence: Synthetic oligonucleotide
cccaguuuuauguagcgua

SEQ ID NO: 2136019 - RNA, 19 nt, Artificial Sequence
  Description of Artificial Sequence: Synthetic oligonucleotide
caccccaccccgcgaacgg

SEQ ID NO: 2136020 - RNA, 19 nt, Artificial Sequence
  Description of Artificial Sequence: Synthetic oligonucleotide
cuuggcgcugguggagagg

SEQ ID NO: 2136021 - RNA, 19 nt, Artificial Sequence
  Description of Artificial Sequence: Synthetic oligonucleotide
gggauauucugguguaaaa

SEQ ID NO: 2136022 - RNA, 19 nt, Artificial Sequence
  Description of Artificial Sequence: Synthetic oligonucleotide
gguccaagaaugguugauc

SEQ ID NO: 2136023 - RNA, 19 nt, Artificial Sequence
  Description of Artificial Sequence: Synthetic oligonucleotide
agguccaagaaugguugau

SEQ ID NO: 2136024 - RNA, 19 nt, Artificial Sequence
  Description of Artificial Sequence: Synthetic oligonucleotide
ggcccucgaaucgucaucc

SEQ ID NO: 2136025 - RNA, 19 nt, Artificial Sequence
  Description of Artificial Sequence: Synthetic oligonucleotide
ugucaccuuugggaccagc

SEQ ID NO: 2136026 - RNA, 19 nt, Artificial Sequence
  Description of Artificial Sequence: Synthetic oligonucleotide
gcucuaaaagucacuauua

SEQ ID NO: 2136027 - RNA, 19 nt, Artificial Sequence
  Description of Artificial Sequence: Synthetic oligonucleotide
uugugucuggcugcuccgu

SEQ ID NO: 2136028 - RNA, 19 nt, Artificial Sequence
  Description of Artificial Sequence: Synthetic oligonucleotide
caauggaacccaagugucu

SEQ ID NO: 2136029 - RNA, 19 nt, Artificial Sequence
  Description of Artificial Sequence: Synthetic oligonucleotide
ccuuggcuauuaauauuac

SEQ ID NO: 2136030 - RNA, 19 nt, Artificial Sequence
  Description of Artificial Sequence: Synthetic oligonucleotide
cgugucucgcucucgcugg

SEQ ID NO: 2136031 - RNA, 19 nt, Artificial Sequence
  Description of Artificial Sequence: Synthetic oligonucleotide
caccuuugggaccagcacu

SEQ ID NO: 2136032 - RNA, 19 nt, Artificial Sequence
  Description of Artificial Sequence: Synthetic oligonucleotide
cagauagagaggaggacuu

SEQ ID NO: 2136033 - RNA, 19 nt, Artificial Sequence
  Description of Artificial Sequence: Synthetic oligonucleotide
acggccccucucuuugugu

SEQ ID NO: 2136034 - RNA, 19 nt, Artificial Sequence
  Description of Artificial Sequence: Synthetic oligonucleotide
gcagauagagaggaggacu

SEQ ID NO: 2136035 - RNA, 19 nt, Artificial Sequence
  Description of Artificial Sequence: Synthetic oligonucleotide
ggucauauacugaguggca

SEQ ID NO: 2136036 - RNA, 19 nt, Artificial Sequence
  Description of Artificial Sequence: Synthetic oligonucleotide
agauagagaggaggacuuu

SEQ ID NO: 2136037 - RNA, 19 nt, Artificial Sequence
  Description of Artificial Sequence: Synthetic oligonucleotide
ucucggucugcugguugga

SEQ ID NO: 2136038 - RNA, 19 nt, Artificial Sequence
  Description of Artificial Sequence: Synthetic oligonucleotide
cccaccaaagggucagcag

SEQ ID NO: 2136039 - RNA, 19 nt, Artificial Sequence
  Description of Artificial Sequence: Synthetic oligonucleotide
acccuacucuuuaccaacu

SEQ ID NO: 2136040 - RNA, 19 nt, Artificial Sequence
  Description of Artificial Sequence: Synthetic oligonucleotide
gacagcucuaaaagucacu

SEQ ID NO: 2136041 - RNA, 19 nt, Artificial Sequence
  Description of Artificial Sequence: Synthetic oligonucleotide
cugaaaaccccaguuuuau

SEQ ID NO: 2136042 - RNA, 19 nt, Artificial Sequence
  Description of Artificial Sequence: Synthetic oligonucleotide
ugguggagaggagcuucga

SEQ ID NO: 2136043 - RNA, 19 nt, Artificial Sequence
  Description of Artificial Sequence: Synthetic oligonucleotide
aguuugguggagggucuaa

SEQ ID NO: 2136044 - RNA, 19 nt, Artificial Sequence
  Description of Artificial Sequence: Synthetic oligonucleotide
uggccacucgugucucgcu

SEQ ID NO: 2136045 - RNA, 19 nt, Artificial Sequence
  Description of Artificial Sequence: Synthetic oligonucleotide
cugggccuggccacucgug

SEQ ID NO: 2136046 - RNA, 19 nt, Artificial Sequence
  Description of Artificial Sequence: Synthetic oligonucleotide
cacucgugucucgcucucg

SEQ ID NO: 2136047 - RNA, 19 nt, Artificial Sequence
  Description of Artificial Sequence: Synthetic oligonucleotide
cuguagcaagauaccuuaa

SEQ ID NO: 2136048 - RNA, 19 nt, Artificial Sequence
  Description of Artificial Sequence: Synthetic oligonucleotide
ugcugacuuuacucuccuu

SEQ ID NO: 2136049 - RNA, 19 nt, Artificial Sequence
  Description of Artificial Sequence: Synthetic oligonucleotide
gcaaaacugacagcucuaa

SEQ ID NO: 2136050 - RNA, 19 nt, Artificial Sequence
  Description of Artificial Sequence: Synthetic oligonucleotide
gucuacacauacauucuuu

SEQ ID NO: 2136051 - RNA, 19 nt, Artificial Sequence
  Description of Artificial Sequence: Synthetic oligonucleotide
auguaaccuuuggaggcuu

SEQ ID NO: 2136052 - RNA, 19 nt, Artificial Sequence
  Description of Artificial Sequence: Synthetic oligonucleotide
cgucauccgacauagcgaa

SEQ ID NO: 2136053 - RNA, 19 nt, Artificial Sequence
  Description of Artificial Sequence: Synthetic oligonucleotide
ggccacucgugucucgcuc

SEQ ID NO: 2136054 - RNA, 19 nt, Artificial Sequence
  Description of Artificial Sequence: Synthetic oligonucleotide
gcccucgaaucgucauccg

SEQ ID NO: 2136055 - RNA, 19 nt, Artificial Sequence
  Description of Artificial Sequence: Synthetic oligonucleotide
cuucugugacagacagaua

SEQ ID NO: 2136056 - RNA, 19 nt, Artificial Sequence
  Description of Artificial Sequence: Synthetic oligonucleotide
gucauccgacauagcgaac

SEQ ID NO: 2136057 - RNA, 19 nt, Artificial Sequence
  Description of Artificial Sequence: Synthetic oligonucleotide
cccuacucuuuaccaacuc

SEQ ID NO: 2136058 - RNA, 19 nt, Artificial Sequence
  Description of Artificial Sequence: Synthetic oligonucleotide
agcuggugcuggcccucga

SEQ ID NO: 2136059 - RNA, 19 nt, Artificial Sequence
  Description of Artificial Sequence: Synthetic oligonucleotide
cagcucuaaaagucacuau

SEQ ID NO: 2136060 - RNA, 19 nt, Artificial Sequence
  Description of Artificial Sequence: Synthetic oligonucleotide
gguguucugcccuguuggu

SEQ ID NO: 2136061 - RNA, 19 nt, Artificial Sequence
  Description of Artificial Sequence: Synthetic oligonucleotide
gccccucucuuugugucug

SEQ ID NO: 2136062 - RNA, 19 nt, Artificial Sequence
  Description of Artificial Sequence: Synthetic oligonucleotide
ccccacccuuucaaaauca

SEQ ID NO: 2136063 - RNA, 19 nt, Artificial Sequence
  Description of Artificial Sequence: Synthetic oligonucleotide
cuuuaccaacucccacccu

SEQ ID NO: 2136064 - RNA, 19 nt, Artificial Sequence
  Description of Artificial Sequence: Synthetic oligonucleotide
cucuuugugucuggcugcu

SEQ ID NO: 2136065 - RNA, 19 nt, Artificial Sequence
  Description of Artificial Sequence: Synthetic oligonucleotide
ccccaccccgcgaacggcc

SEQ ID NO: 2136066 - RNA, 19 nt, Artificial Sequence
  Description of Artificial Sequence: Synthetic oligonucleotide
gacuuucgagaugguuagu

SEQ ID NO: 2136067 - RNA, 19 nt, Artificial Sequence
  Description of Artificial Sequence: Synthetic oligonucleotide
cccucgaaucgucauccga

SEQ ID NO: 2136068 - RNA, 19 nt, Artificial Sequence
  Description of Artificial Sequence: Synthetic oligonucleotide
ccacccuuucaaaaucaua

SEQ ID NO: 2136069 - RNA, 19 nt, Artificial Sequence
  Description of Artificial Sequence: Synthetic oligonucleotide
cuggugcuggcccucgaau

SEQ ID NO: 2136070 - RNA, 19 nt, Artificial Sequence
  Description of Artificial Sequence: Synthetic oligonucleotide
cucgugucucgcucucgcu

SEQ ID NO: 2136071 - RNA, 19 nt, Artificial Sequence
  Description of Artificial Sequence: Synthetic oligonucleotide
uucugcccuguuggucaua

SEQ ID NO: 2136072 - RNA, 19 nt, Artificial Sequence
  Description of Artificial Sequence: Synthetic oligonucleotide
cugcuccgugccgccgcgg

SEQ ID NO: 2136073 - RNA, 19 nt, Artificial Sequence
  Description of Artificial Sequence: Synthetic oligonucleotide
guucugcccuguuggucau

SEQ ID NO: 2136074 - RNA, 19 nt, Artificial Sequence
  Description of Artificial Sequence: Synthetic oligonucleotide
gccacucgugucucgcucu

SEQ ID NO: 2136075 - RNA, 19 nt, Artificial Sequence
  Description of Artificial Sequence: Synthetic oligonucleotide
gcucucgcugggagagaag

SEQ ID NO: 2136076 - RNA, 19 nt, Artificial Sequence
  Description of Artificial Sequence: Synthetic oligonucleotide
gcccuguuggucauauacu

SEQ ID NO: 2136077 - RNA, 19 nt, Artificial Sequence
  Description of Artificial Sequence: Synthetic oligonucleotide
guccacugucugguguucu

SEQ ID NO: 2136078 - RNA, 19 nt, Artificial Sequence
  Description of Artificial Sequence: Synthetic oligonucleotide
ccacucgugucucgcucuc

SEQ ID NO: 2136079 - RNA, 19 nt, Artificial Sequence
  Description of Artificial Sequence: Synthetic oligonucleotide
cccgcgaacggccccucuc

SEQ ID NO: 2136080 - RNA, 19 nt, Artificial Sequence
  Description of Artificial Sequence: Synthetic oligonucleotide
gcaguuugguggagggucu

SEQ ID NO: 2136081 - RNA, 19 nt, Artificial Sequence
  Description of Artificial Sequence: Synthetic oligonucleotide
accccgcgaacggccccuc

SEQ ID NO: 2136082 - RNA, 19 nt, Artificial Sequence
  Description of Artificial Sequence: Synthetic oligonucleotide
gugcagcaacagcaacuau

SEQ ID NO: 2136083 - RNA, 19 nt, Artificial Sequence
  Description of Artificial Sequence: Synthetic oligonucleotide
caguuugguggagggucua

SEQ ID NO: 2136084 - RNA, 19 nt, Artificial Sequence
  Description of Artificial Sequence: Synthetic oligonucleotide
gggcuccaguugucuuuca

SEQ ID NO: 2136085 - RNA, 19 nt, Artificial Sequence
  Description of Artificial Sequence: Synthetic oligonucleotide
ccaaagggucagcaggauu

SEQ ID NO: 2136086 - RNA, 19 nt, Artificial Sequence
  Description of Artificial Sequence: Synthetic oligonucleotide
cuuucucggucugcugguu

SEQ ID NO: 2136087 - RNA, 19 nt, Artificial Sequence
  Description of Artificial Sequence: Synthetic oligonucleotide
cugcccuguuggucauaua

SEQ ID NO: 2136088 - RNA, 19 nt, Artificial Sequence
  Description of Artificial Sequence: Synthetic oligonucleotide
cccacccuuucaaaaucau

SEQ ID NO: 2136089 - RNA, 19 nt, Artificial Sequence
  Description of Artificial Sequence: Synthetic oligonucleotide
gccuggccacucgugucuc

SEQ ID NO: 2136090 - RNA, 19 nt, Artificial Sequence
  Description of Artificial Sequence: Synthetic oligonucleotide
gcgaacggccccucucuuu

SEQ ID NO: 2136091 - RNA, 19 nt, Artificial Sequence
  Description of Artificial Sequence: Synthetic oligonucleotide
ccgcgaacggccccucucu

SEQ ID NO: 2136092 - RNA, 19 nt, Artificial Sequence
  Description of Artificial Sequence: Synthetic oligonucleotide
caccccgcgaacggccccu

SEQ ID NO: 2136093 - RNA, 19 nt, Artificial Sequence
  Description of Artificial Sequence: Synthetic oligonucleotide
cgcucucgcugggagagaa

SEQ ID NO: 2136094 - RNA, 19 nt, Artificial Sequence
  Description of Artificial Sequence: Synthetic oligonucleotide
gcggcugggccuggccacu

SEQ ID NO: 2136095 - RNA, 19 nt, Artificial Sequence
  Description of Artificial Sequence: Synthetic oligonucleotide
cgcgaacggccccucucuu

SEQ ID NO: 2136096 - RNA, 19 nt, Artificial Sequence
  Description of Artificial Sequence: Synthetic oligonucleotide
ccccgcgaacggccccucu

SEQ ID NO: 2136097 - RNA, 19 nt, Artificial Sequence
  Description of Artificial Sequence: Synthetic oligonucleotide
aacgggauaguuuuguucc

SEQ ID NO: 2136098 - RNA, 19 nt, Artificial Sequence
  Description of Artificial Sequence: Synthetic oligonucleotide
auugauucccuacuuaacc

SEQ ID NO: 2136099 - RNA, 19 nt, Artificial Sequence
  Description of Artificial Sequence: Synthetic oligonucleotide
uuuuaauucaaaaucaguu

SEQ ID NO: 2136100 - RNA, 19 nt, Artificial Sequence
  Description of Artificial Sequence: Synthetic oligonucleotide
auaguuuuguuccagaaug

SEQ ID NO: 2136101 - RNA, 19 nt, Artificial Sequence
  Description of Artificial Sequence: Synthetic oligonucleotide
aaucggugggucuaggagc

SEQ ID NO: 2136102 - RNA, 19 nt, Artificial Sequence
  Description of Artificial Sequence: Synthetic oligonucleotide
aauguguccgcucgaagac

SEQ ID NO: 2136103 - RNA, 19 nt, Artificial Sequence
  Description of Artificial Sequence: Synthetic oligonucleotide
ucucugaagagguuaaccg

SEQ ID NO: 2136104 - RNA, 19 nt, Artificial Sequence
  Description of Artificial Sequence: Synthetic oligonucleotide
gagcauuacacauugauuc

SEQ ID NO: 2136105 - RNA, 19 nt, Artificial Sequence
  Description of Artificial Sequence: Synthetic oligonucleotide
aguugaaugucucugaaga

SEQ ID NO: 2136106 - RNA, 19 nt, Artificial Sequence
  Description of Artificial Sequence: Synthetic oligonucleotide
aaacgggauaguuuuguuc

SEQ ID NO: 2136107 - RNA, 19 nt, Artificial Sequence
  Description of Artificial Sequence: Synthetic oligonucleotide
gaccuuuuaauucaaaauc

SEQ ID NO: 2136108 - RNA, 19 nt, Artificial Sequence
  Description of Artificial Sequence: Synthetic oligonucleotide
uacacuuggagcauuacac

SEQ ID NO: 2136109 - RNA, 19 nt, Artificial Sequence
  Description of Artificial Sequence: Synthetic oligonucleotide
uuuaguccuacacuuggag

SEQ ID NO: 2136110 - RNA, 19 nt, Artificial Sequence
  Description of Artificial Sequence: Synthetic oligonucleotide
agcauuacacauugauucc

SEQ ID NO: 2136111 - RNA, 19 nt, Artificial Sequence
  Description of Artificial Sequence: Synthetic oligonucleotide
uugauucccuacuuaaccg

SEQ ID NO: 2136112 - RNA, 19 nt, Artificial Sequence
  Description of Artificial Sequence: Synthetic oligonucleotide
uuaaccgcaacacagcaaa

SEQ ID NO: 2136113 - RNA, 19 nt, Artificial Sequence
  Description of Artificial Sequence: Synthetic oligonucleotide
uugaucauuguccugcuga

SEQ ID NO: 2136114 - RNA, 19 nt, Artificial Sequence
  Description of Artificial Sequence: Synthetic oligonucleotide
aaagcauccggguaaugug

SEQ ID NO: 2136115 - RNA, 19 nt, Artificial Sequence
  Description of Artificial Sequence: Synthetic oligonucleotide
aguggagcaagcuguaugg

SEQ ID NO: 2136116 - RNA, 19 nt, Artificial Sequence
  Description of Artificial Sequence: Synthetic oligonucleotide
cuacuuaaccgcaacacag

SEQ ID NO: 2136117 - RNA, 19 nt, Artificial Sequence
  Description of Artificial Sequence: Synthetic oligonucleotide
aguucaguugaucauuguc

SEQ ID NO: 2136118 - RNA, 19 nt, Artificial Sequence
  Description of Artificial Sequence: Synthetic oligonucleotide
ugcaaaagcagccuugaga

SEQ ID NO: 2136119 - RNA, 19 nt, Artificial Sequence
  Description of Artificial Sequence: Synthetic oligonucleotide
gaucuucucgcacaaaagc

SEQ ID NO: 2136120 - RNA, 19 nt, Artificial Sequence
  Description of Artificial Sequence: Synthetic oligonucleotide
ucuuaaacgggauaguuuu

SEQ ID NO: 2136121 - RNA, 19 nt, Artificial Sequence
  Description of Artificial Sequence: Synthetic oligonucleotide
cuuuuaguccuacacuugg

SEQ ID NO: 2136122 - RNA, 19 nt, Artificial Sequence
  Description of Artificial Sequence: Synthetic oligonucleotide
uucuuuuauauucuuuccu

SEQ ID NO: 2136123 - RNA, 19 nt, Artificial Sequence
  Description of Artificial Sequence: Synthetic oligonucleotide
acgugcaagaucuucucgc

SEQ ID NO: 2136124 - RNA, 19 nt, Artificial Sequence
  Description of Artificial Sequence: Synthetic oligonucleotide
uguauggagaggcuguccc

SEQ ID NO: 2136125 - RNA, 19 nt, Artificial Sequence
  Description of Artificial Sequence: Synthetic oligonucleotide
aguaaggaaugucagccag

SEQ ID NO: 2136126 - RNA, 19 nt, Artificial Sequence
  Description of Artificial Sequence: Synthetic oligonucleotide
acuuucguccgccugugcc

SEQ ID NO: 2136127 - RNA, 19 nt, Artificial Sequence
  Description of Artificial Sequence: Synthetic oligonucleotide
uaaucggugggucuaggag

SEQ ID NO: 2136128 - RNA, 19 nt, Artificial Sequence
  Description of Artificial Sequence: Synthetic oligonucleotide
uaguccuacacuuggagca

SEQ ID NO: 2136129 - RNA, 19 nt, Artificial Sequence
  Description of Artificial Sequence: Synthetic oligonucleotide
aagcguguggaaguggagc

SEQ ID NO: 2136130 - RNA, 19 nt, Artificial Sequence
  Description of Artificial Sequence: Synthetic oligonucleotide
ucgcacaaaagcauccggg

SEQ ID NO: 2136131 - RNA, 19 nt, Artificial Sequence
  Description of Artificial Sequence: Synthetic oligonucleotide
uugaaggucguucuguuuc

SEQ ID NO: 2136132 - RNA, 19 nt, Artificial Sequence
  Description of Artificial Sequence: Synthetic oligonucleotide
uuauuggccagcauggcuc

SEQ ID NO: 2136133 - RNA, 19 nt, Artificial Sequence
  Description of Artificial Sequence: Synthetic oligonucleotide
uuauauucuuuccugguuu

SEQ ID NO: 2136134 - RNA, 19 nt, Artificial Sequence
  Description of Artificial Sequence: Synthetic oligonucleotide
uacacauugauucccuacu

SEQ ID NO: 2136135 - RNA, 19 nt, Artificial Sequence
  Description of Artificial Sequence: Synthetic oligonucleotide
aaaagcauccggguaaugu

SEQ ID NO: 2136136 - RNA, 19 nt, Artificial Sequence
  Description of Artificial Sequence: Synthetic oligonucleotide
aaguggagcaagcuguaug

SEQ ID NO: 2136137 - RNA, 19 nt, Artificial Sequence
  Description of Artificial Sequence: Synthetic oligonucleotide
ucgaagacacgcuccaagg

SEQ ID NO: 2136138 - RNA, 19 nt, Artificial Sequence
  Description of Artificial Sequence: Synthetic oligonucleotide
ugggucuaggagcaggccg

SEQ ID NO: 2136139 - RNA, 19 nt, Artificial Sequence
  Description of Artificial Sequence: Synthetic oligonucleotide
uggagcauuacacauugau

SEQ ID NO: 2136140 - RNA, 19 nt, Artificial Sequence
  Description of Artificial Sequence: Synthetic oligonucleotide
ugaguaggacuugaggagg

SEQ ID NO: 2136141 - RNA, 19 nt, Artificial Sequence
  Description of Artificial Sequence: Synthetic oligonucleotide
aaccgcaacacagcaaagg

SEQ ID NO: 2136142 - RNA, 19 nt, Artificial Sequence
  Description of Artificial Sequence: Synthetic oligonucleotide
uucaguugaucauuguccu

SEQ ID NO: 2136143 - RNA, 19 nt, Artificial Sequence
  Description of Artificial Sequence: Synthetic oligonucleotide
uuaguccuacacuuggagc

SEQ ID NO: 2136144 - RNA, 19 nt, Artificial Sequence
  Description of Artificial Sequence: Synthetic oligonucleotide
uuuauauucuuuccugguu

SEQ ID NO: 2136145 - RNA, 19 nt, Artificial Sequence
  Description of Artificial Sequence: Synthetic oligonucleotide
cuuccugaccuuuuaauuc

SEQ ID NO: 2136146 - RNA, 19 nt, Artificial Sequence
  Description of Artificial Sequence: Synthetic oligonucleotide
ucuucugccccaaacccug

SEQ ID NO: 2136147 - RNA, 19 nt, Artificial Sequence
  Description of Artificial Sequence: Synthetic oligonucleotide
uacuuaaccgcaacacagc

SEQ ID NO: 2136148 - RNA, 19 nt, Artificial Sequence
  Description of Artificial Sequence: Synthetic oligonucleotide
ugcaagaucuucucgcaca

SEQ ID NO: 2136149 - RNA, 19 nt, Artificial Sequence
  Description of Artificial Sequence: Synthetic oligonucleotide
ugauucccuacuuaaccgc

SEQ ID NO: 2136150 - RNA, 19 nt, Artificial Sequence
  Description of Artificial Sequence: Synthetic oligonucleotide
uuacacauugauucccuac

SEQ ID NO: 2136151 - RNA, 19 nt, Artificial Sequence
  Description of Artificial Sequence: Synthetic oligonucleotide
agucacaucuccugaguag

SEQ ID NO: 2136152 - RNA, 19 nt, Artificial Sequence
  Description of Artificial Sequence: Synthetic oligonucleotide
ugaucauuguccugcugag

SEQ ID NO: 2136153 - RNA, 19 nt, Artificial Sequence
  Description of Artificial Sequence: Synthetic oligonucleotide
uuccugaccuuuuaauuca

SEQ ID NO: 2136154 - RNA, 19 nt, Artificial Sequence
  Description of Artificial Sequence: Synthetic oligonucleotide
aggagagauaaucgguggg

SEQ ID NO: 2136155 - RNA, 19 nt, Artificial Sequence
  Description of Artificial Sequence: Synthetic oligonucleotide
caaaggugucuuaaacggg

SEQ ID NO: 2136156 - RNA, 19 nt, Artificial Sequence
  Description of Artificial Sequence: Synthetic oligonucleotide
uuaaacgggauaguuuugu

SEQ ID NO: 2136157 - RNA, 19 nt, Artificial Sequence
  Description of Artificial Sequence: Synthetic oligonucleotide
ucuucucgcacaaaagcau

SEQ ID NO: 2136158 - RNA, 19 nt, Artificial Sequence
  Description of Artificial Sequence: Synthetic oligonucleotide
uggagcaagcuguauggag

SEQ ID NO: 2136159 - RNA, 19 nt, Artificial Sequence
  Description of Artificial Sequence: Synthetic oligonucleotide
uucucgcacaaaagcaucc

SEQ ID NO: 2136160 - RNA, 19 nt, Artificial Sequence
  Description of Artificial Sequence: Synthetic oligonucleotide
aggucguucuguuucuccg

SEQ ID NO: 2136161 - RNA, 19 nt, Artificial Sequence
  Description of Artificial Sequence: Synthetic oligonucleotide
aggacuugaggagggaagc

SEQ ID NO: 2136162 - RNA, 19 nt, Artificial Sequence
  Description of Artificial Sequence: Synthetic oligonucleotide
agggugucgagguugcccg

SEQ ID NO: 2136163 - RNA, 19 nt, Artificial Sequence
  Description of Artificial Sequence: Synthetic oligonucleotide
uuuuaguccuacacuugga

SEQ ID NO: 2136164 - RNA, 19 nt, Artificial Sequence
  Description of Artificial Sequence: Synthetic oligonucleotide
caguugaucauuguccugc

SEQ ID NO: 2136165 - RNA, 19 nt, Artificial Sequence
  Description of Artificial Sequence: Synthetic oligonucleotide
auuccugaguccaagagga

SEQ ID NO: 2136166 - RNA, 19 nt, Artificial Sequence
  Description of Artificial Sequence: Synthetic oligonucleotide
agguacgaugggcugcucc

SEQ ID NO: 2136167 - RNA, 19 nt, Artificial Sequence
  Description of Artificial Sequence: Synthetic oligonucleotide
ugaggggugucgcuugccg

SEQ ID NO: 2136168 - RNA, 19 nt, Artificial Sequence
  Description of Artificial Sequence: Synthetic oligonucleotide
ucuagccucagugagguuc

SEQ ID NO: 2136169 - RNA, 19 nt, Artificial Sequence
  Description of Artificial Sequence: Synthetic oligonucleotide
acuuaaccgcaacacagca

SEQ ID NO: 2136170 - RNA, 19 nt, Artificial Sequence
  Description of Artificial Sequence: Synthetic oligonucleotide
gagcaagcuguauggagag

SEQ ID NO: 2136171 - RNA, 19 nt, Artificial Sequence
  Description of Artificial Sequence: Synthetic oligonucleotide
uggcaagaauuccugaguc

SEQ ID NO: 2136172 - RNA, 19 nt, Artificial Sequence
  Description of Artificial Sequence: Synthetic oligonucleotide
ugaaaccacaccugcacuc

SEQ ID NO: 2136173 - RNA, 19 nt, Artificial Sequence
  Description of Artificial Sequence: Synthetic oligonucleotide
auggcucucucauuccgac

SEQ ID NO: 2136174 - RNA, 19 nt, Artificial Sequence
  Description of Artificial Sequence: Synthetic oligonucleotide
cuuucguccgccugugccg

SEQ ID NO: 2136175 - RNA, 19 nt, Artificial Sequence
  Description of Artificial Sequence: Synthetic oligonucleotide
ggugucuuaaacgggauag

SEQ ID NO: 2136176 - RNA, 19 nt, Artificial Sequence
  Description of Artificial Sequence: Synthetic oligonucleotide
ugagguucacccgacgugc

SEQ ID NO: 2136177 - RNA, 19 nt, Artificial Sequence
  Description of Artificial Sequence: Synthetic oligonucleotide
gacgugcaagaucuucucg

SEQ ID NO: 2136178 - RNA, 19 nt, Artificial Sequence
  Description of Artificial Sequence: Synthetic oligonucleotide
aaccgaguaaggaauguca

SEQ ID NO: 2136179 - RNA, 19 nt, Artificial Sequence
  Description of Artificial Sequence: Synthetic oligonucleotide
ucugaguucaguugaucau

SEQ ID NO: 2136180 - RNA, 19 nt, Artificial Sequence
  Description of Artificial Sequence: Synthetic oligonucleotide
agcaaguugaaugucucug

SEQ ID NO: 2136181 - RNA, 19 nt, Artificial Sequence
  Description of Artificial Sequence: Synthetic oligonucleotide
uuccagaaugguuccaaga

SEQ ID NO: 2136182 - RNA, 19 nt, Artificial Sequence
  Description of Artificial Sequence: Synthetic oligonucleotide
guuuucaaaggaucuguuc

SEQ ID NO: 2136183 - RNA, 19 nt, Artificial Sequence
  Description of Artificial Sequence: Synthetic oligonucleotide
agagauaaucggugggucu

SEQ ID NO: 2136184 - RNA, 19 nt, Artificial Sequence
  Description of Artificial Sequence: Synthetic oligonucleotide
ucuagcaggugacggagaa

SEQ ID NO: 2136185 - RNA, 19 nt, Artificial Sequence
  Description of Artificial Sequence: Synthetic oligonucleotide
ugagagugguggauggcug

SEQ ID NO: 2136186 - RNA, 19 nt, Artificial Sequence
  Description of Artificial Sequence: Synthetic oligonucleotide
aggaucuguucuuuuauau

SEQ ID NO: 2136187 - RNA, 19 nt, Artificial Sequence
  Description of Artificial Sequence: Synthetic oligonucleotide
cauugauucccuacuuaac

SEQ ID NO: 2136188 - RNA, 19 nt, Artificial Sequence
  Description of Artificial Sequence: Synthetic oligonucleotide
agguuaaccgaguaaggaa

SEQ ID NO: 2136189 - RNA, 19 nt, Artificial Sequence
  Description of Artificial Sequence: Synthetic oligonucleotide
ggcucucucauuccgacgg

SEQ ID NO: 2136190 - RNA, 19 nt, Artificial Sequence
  Description of Artificial Sequence: Synthetic oligonucleotide
uguguccgcucgaagacac

SEQ ID NO: 2136191 - RNA, 19 nt, Artificial Sequence
  Description of Artificial Sequence: Synthetic oligonucleotide
accacaccugcacucuagc

SEQ ID NO: 2136192 - RNA, 19 nt, Artificial Sequence
  Description of Artificial Sequence: Synthetic oligonucleotide
ugcacucuagccucaguga

SEQ ID NO: 2136193 - RNA, 19 nt, Artificial Sequence
  Description of Artificial Sequence: Synthetic oligonucleotide
aggagauugcugauggccg

SEQ ID NO: 2136194 - RNA, 19 nt, Artificial Sequence
  Description of Artificial Sequence: Synthetic oligonucleotide
cucgaagacacgcuccaag

SEQ ID NO: 2136195 - RNA, 19 nt, Artificial Sequence
  Description of Artificial Sequence: Synthetic oligonucleotide
ucucgcacaaaagcauccg

SEQ ID NO: 2136196 - RNA, 19 nt, Artificial Sequence
  Description of Artificial Sequence: Synthetic oligonucleotide
guuuuauugggaagagagc

SEQ ID NO: 2136197 - RNA, 19 nt, Artificial Sequence
  Description of Artificial Sequence: Synthetic oligonucleotide
ugcuguugaaggucguucu

SEQ ID NO: 2136198 - RNA, 19 nt, Artificial Sequence
  Description of Artificial Sequence: Synthetic oligonucleotide
gaacuuggcucuucgguuc

SEQ ID NO: 2136199 - RNA, 19 nt, Artificial Sequence
  Description of Artificial Sequence: Synthetic oligonucleotide
aggggugucgcuugccgac

SEQ ID NO: 2136200 - RNA, 19 nt, Artificial Sequence
  Description of Artificial Sequence: Synthetic oligonucleotide
aaggaucuguucuuuuaua

SEQ ID NO: 2136201 - RNA, 19 nt, Artificial Sequence
  Description of Artificial Sequence: Synthetic oligonucleotide
ucauuccgacggaacuugg

SEQ ID NO: 2136202 - RNA, 19 nt, Artificial Sequence
  Description of Artificial Sequence: Synthetic oligonucleotide
uuuugcaaccuuggcaaga

SEQ ID NO: 2136203 - RNA, 19 nt, Artificial Sequence
  Description of Artificial Sequence: Synthetic oligonucleotide
caaacccugcuccuggggc

SEQ ID NO: 2136204 - RNA, 19 nt, Artificial Sequence
  Description of Artificial Sequence: Synthetic oligonucleotide
acaguuuucaaaggaucug

SEQ ID NO: 2136205 - RNA, 19 nt, Artificial Sequence
  Description of Artificial Sequence: Synthetic oligonucleotide
ucuucgguucugaaaccac

SEQ ID NO: 2136206 - RNA, 19 nt, Artificial Sequence
  Description of Artificial Sequence: Synthetic oligonucleotide
gucgcuugccgacuggucc

SEQ ID NO: 2136207 - RNA, 19 nt, Artificial Sequence
  Description of Artificial Sequence: Synthetic oligonucleotide
gagguuaaccgaguaagga

SEQ ID NO: 2136208 - RNA, 19 nt, Artificial Sequence
  Description of Artificial Sequence: Synthetic oligonucleotide
gaagagguuaaccgaguaa

SEQ ID NO: 2136209 - RNA, 19 nt, Artificial Sequence
  Description of Artificial Sequence: Synthetic oligonucleotide
cucgcacaaaagcauccgg

SEQ ID NO: 2136210 - RNA, 19 nt, Artificial Sequence
  Description of Artificial Sequence: Synthetic oligonucleotide
ucucucauuccgacggaac

SEQ ID NO: 2136211 - RNA, 19 nt, Artificial Sequence
  Description of Artificial Sequence: Synthetic oligonucleotide
uccgacggaacuuggcucu

SEQ ID NO: 2136212 - RNA, 19 nt, Artificial Sequence
  Description of Artificial Sequence: Synthetic oligonucleotide
cugcacucuagccucagug

SEQ ID NO: 2136213 - RNA, 19 nt, Artificial Sequence
  Description of Artificial Sequence: Synthetic oligonucleotide
auaaucggugggucuagga

SEQ ID NO: 2136214 - RNA, 19 nt, Artificial Sequence
  Description of Artificial Sequence: Synthetic oligonucleotide
agagguuaaccgaguaagg

SEQ ID NO: 2136215 - RNA, 19 nt, Artificial Sequence
  Description of Artificial Sequence: Synthetic oligonucleotide
gaguaggacuugaggaggg

SEQ ID NO: 2136216 - RNA, 19 nt, Artificial Sequence
  Description of Artificial Sequence: Synthetic oligonucleotide
uuaaccgaguaaggaaugu

SEQ ID NO: 2136217 - RNA, 19 nt, Artificial Sequence
  Description of Artificial Sequence: Synthetic oligonucleotide
auccggguaauguguccgc

SEQ ID NO: 2136218 - RNA, 19 nt, Artificial Sequence
  Description of Artificial Sequence: Synthetic oligonucleotide
cacucuagccucagugagg

SEQ ID NO: 2136219 - RNA, 19 nt, Artificial Sequence
  Description of Artificial Sequence: Synthetic oligonucleotide
agugguggauggcugagaa

SEQ ID NO: 2136220 - RNA, 19 nt, Artificial Sequence
  Description of Artificial Sequence: Synthetic oligonucleotide
ucaguugaucauuguccug

SEQ ID NO: 2136221 - RNA, 19 nt, Artificial Sequence
  Description of Artificial Sequence: Synthetic oligonucleotide
aguuuuguuccagaauggu

SEQ ID NO: 2136222 - RNA, 19 nt, Artificial Sequence
  Description of Artificial Sequence: Synthetic oligonucleotide
ucgccccacacuuucgucc

SEQ ID NO: 2136223 - RNA, 19 nt, Artificial Sequence
  Description of Artificial Sequence: Synthetic oligonucleotide
guaauguguccgcucgaag

SEQ ID NO: 2136224 - RNA, 19 nt, Artificial Sequence
  Description of Artificial Sequence: Synthetic oligonucleotide
aagacacgcuccaaggccu

SEQ ID NO: 2136225 - RNA, 19 nt, Artificial Sequence
  Description of Artificial Sequence: Synthetic oligonucleotide
cuucucgcacaaaagcauc

SEQ ID NO: 2136226 - RNA, 19 nt, Artificial Sequence
  Description of Artificial Sequence: Synthetic oligonucleotide
uccugaguccaagaggaga

SEQ ID NO: 2136227 - RNA, 19 nt, Artificial Sequence
  Description of Artificial Sequence: Synthetic oligonucleotide
gacugguccaguccuggug

SEQ ID NO: 2136228 - RNA, 19 nt, Artificial Sequence
  Description of Artificial Sequence: Synthetic oligonucleotide
ugucuuaaacgggauaguu

SEQ ID NO: 2136229 - RNA, 19 nt, Artificial Sequence
  Description of Artificial Sequence: Synthetic oligonucleotide
aguccuggugacuccagca

SEQ ID NO: 2136230 - RNA, 19 nt, Artificial Sequence
  Description of Artificial Sequence: Synthetic oligonucleotide
cacaaaagcauccggguaa

SEQ ID NO: 2136231 - RNA, 19 nt, Artificial Sequence
  Description of Artificial Sequence: Synthetic oligonucleotide
acgaugggcugcuccacgg

SEQ ID NO: 2136232 - RNA, 19 nt, Artificial Sequence
  Description of Artificial Sequence: Synthetic oligonucleotide
ucccuacuuaaccgcaaca

SEQ ID NO: 2136233 - RNA, 19 nt, Artificial Sequence
  Description of Artificial Sequence: Synthetic oligonucleotide
gauaguuuuguuccagaau

SEQ ID NO: 2136234 - RNA, 19 nt, Artificial Sequence
  Description of Artificial Sequence: Synthetic oligonucleotide
gauaaucggugggucuagg

SEQ ID NO: 2136235 - RNA, 19 nt, Artificial Sequence
  Description of Artificial Sequence: Synthetic oligonucleotide
cucugaagagguuaaccga

SEQ ID NO: 2136236 - RNA, 19 nt, Artificial Sequence
  Description of Artificial Sequence: Synthetic oligonucleotide
uucccuacuuaaccgcaac

SEQ ID NO: 2136237 - RNA, 19 nt, Artificial Sequence
  Description of Artificial Sequence: Synthetic oligonucleotide
cauccggguaauguguccg

SEQ ID NO: 2136238 - RNA, 19 nt, Artificial Sequence
  Description of Artificial Sequence: Synthetic oligonucleotide
ggggcaaccagcaaucucc

SEQ ID NO: 2136239 - RNA, 19 nt, Artificial Sequence
  Description of Artificial Sequence: Synthetic oligonucleotide
acucuagccucagugaggu

SEQ ID NO: 2136240 - RNA, 19 nt, Artificial Sequence
  Description of Artificial Sequence: Synthetic oligonucleotide
gaguaaggaaugucagcca

SEQ ID NO: 2136241 - RNA, 19 nt, Artificial Sequence
  Description of Artificial Sequence: Synthetic oligonucleotide
guuaaccgaguaaggaaug

SEQ ID NO: 2136242 - RNA, 19 nt, Artificial Sequence
  Description of Artificial Sequence: Synthetic oligonucleotide
caagaggggcacuggacac

SEQ ID NO: 2136243 - RNA, 19 nt, Artificial Sequence
  Description of Artificial Sequence: Synthetic oligonucleotide
ugagaagcguguggaagug

SEQ ID NO: 2136244 - RNA, 19 nt, Artificial Sequence
  Description of Artificial Sequence: Synthetic oligonucleotide
uaaccgcaacacagcaaag

SEQ ID NO: 2136245 - RNA, 19 nt, Artificial Sequence
  Description of Artificial Sequence: Synthetic oligonucleotide
aagcauccggguaaugugu

SEQ ID NO: 2136246 - RNA, 19 nt, Artificial Sequence
  Description of Artificial Sequence: Synthetic oligonucleotide
gugagguucacccgacgug

SEQ ID NO: 2136247 - RNA, 19 nt, Artificial Sequence
  Description of Artificial Sequence: Synthetic oligonucleotide
caaccuuggcaagaauucc

SEQ ID NO: 2136248 - RNA, 19 nt, Artificial Sequence
  Description of Artificial Sequence: Synthetic oligonucleotide
accgaguaaggaaugucag

SEQ ID NO: 2136249 - RNA, 19 nt, Artificial Sequence
  Description of Artificial Sequence: Synthetic oligonucleotide
uguugaaggucguucuguu

SEQ ID NO: 2136250 - RNA, 19 nt, Artificial Sequence
  Description of Artificial Sequence: Synthetic oligonucleotide
ucuccucccucccucgugu

SEQ ID NO: 2136251 - RNA, 19 nt, Artificial Sequence
  Description of Artificial Sequence: Synthetic oligonucleotide
cagcauggcucucucauuc

SEQ ID NO: 2136252 - RNA, 19 nt, Artificial Sequence
  Description of Artificial Sequence: Synthetic oligonucleotide
gcaagcuguauggagaggc

SEQ ID NO: 2136253 - RNA, 19 nt, Artificial Sequence
  Description of Artificial Sequence: Synthetic oligonucleotide
aguugaucauuguccugcu

SEQ ID NO: 2136254 - RNA, 19 nt, Artificial Sequence
  Description of Artificial Sequence: Synthetic oligonucleotide
ccagaaugguuccaagagg

SEQ ID NO: 2136255 - RNA, 19 nt, Artificial Sequence
  Description of Artificial Sequence: Synthetic oligonucleotide
uucuccguugcuuucucuu

SEQ ID NO: 2136256 - RNA, 19 nt, Artificial Sequence
  Description of Artificial Sequence: Synthetic oligonucleotide
cgaguaaggaaugucagcc

SEQ ID NO: 2136257 - RNA, 19 nt, Artificial Sequence
  Description of Artificial Sequence: Synthetic oligonucleotide
caggucuagcaggugacgg

SEQ ID NO: 2136258 - RNA, 19 nt, Artificial Sequence
  Description of Artificial Sequence: Synthetic oligonucleotide
guccuggugacuccagcag

SEQ ID NO: 2136259 - RNA, 19 nt, Artificial Sequence
  Description of Artificial Sequence: Synthetic oligonucleotide
ucaaaggaucuguucuuuu

SEQ ID NO: 2136260 - RNA, 19 nt, Artificial Sequence
  Description of Artificial Sequence: Synthetic oligonucleotide
guauggagaggcugucccc

SEQ ID NO: 2136261 - RNA, 19 nt, Artificial Sequence
  Description of Artificial Sequence: Synthetic oligonucleotide
ucacccgacgugcaagauc

SEQ ID NO: 2136262 - RNA, 19 nt, Artificial Sequence
  Description of Artificial Sequence: Synthetic oligonucleotide
gagagauaaucgguggguc

SEQ ID NO: 2136263 - RNA, 19 nt, Artificial Sequence
  Description of Artificial Sequence: Synthetic oligonucleotide
aaccacaccugcacucuag

SEQ ID NO: 2136264 - RNA, 19 nt, Artificial Sequence
  Description of Artificial Sequence: Synthetic oligonucleotide
uggcucucucauuccgacg

SEQ ID NO: 2136265 - RNA, 19 nt, Artificial Sequence
  Description of Artificial Sequence: Synthetic oligonucleotide
cucauuccgacggaacuug

SEQ ID NO: 2136266 - RNA, 19 nt, Artificial Sequence
  Description of Artificial Sequence: Synthetic oligonucleotide
ggcaagaauuccugagucc

SEQ ID NO: 2136267 - RNA, 19 nt, Artificial Sequence
  Description of Artificial Sequence: Synthetic oligonucleotide
agcaggccgagguacgaug

SEQ ID NO: 2136268 - RNA, 19 nt, Artificial Sequence
  Description of Artificial Sequence: Synthetic oligonucleotide
gauucccuacuuaaccgca

SEQ ID NO: 2136269 - RNA, 19 nt, Artificial Sequence
  Description of Artificial Sequence: Synthetic oligonucleotide
acggaacuuggcucuucgg

SEQ ID NO: 2136270 - RNA, 19 nt, Artificial Sequence
  Description of Artificial Sequence: Synthetic oligonucleotide
ucuccguugcuuucucuuc

SEQ ID NO: 2136271 - RNA, 19 nt, Artificial Sequence
  Description of Artificial Sequence: Synthetic oligonucleotide
uaaacgggauaguuuuguu

SEQ ID NO: 2136272 - RNA, 19 nt, Artificial Sequence
  Description of Artificial Sequence: Synthetic oligonucleotide
gagaagcguguggaagugg

SEQ ID NO: 2136273 - RNA, 19 nt, Artificial Sequence
  Description of Artificial Sequence: Synthetic oligonucleotide
uuccugaguccaagaggag

SEQ ID NO: 2136274 - RNA, 19 nt, Artificial Sequence
  Description of Artificial Sequence: Synthetic oligonucleotide
uaaccgaguaaggaauguc

SEQ ID NO: 2136275 - RNA, 19 nt, Artificial Sequence
  Description of Artificial Sequence: Synthetic oligonucleotide
ggacacaguuuucaaagga

SEQ ID NO: 2136276 - RNA, 19 nt, Artificial Sequence
  Description of Artificial Sequence: Synthetic oligonucleotide
cuucgguucugaaaccaca

SEQ ID NO: 2136277 - RNA, 19 nt, Artificial Sequence
  Description of Artificial Sequence: Synthetic oligonucleotide
ucuccugaguaggacuuga

SEQ ID NO: 2136278 - RNA, 19 nt, Artificial Sequence
  Description of Artificial Sequence: Synthetic oligonucleotide
uucaaaggaucuguucuuu

SEQ ID NO: 2136279 - RNA, 19 nt, Artificial Sequence
  Description of Artificial Sequence: Synthetic oligonucleotide
ucucgccccacacuuucgu

SEQ ID NO: 2136280 - RNA, 19 nt, Artificial Sequence
  Description of Artificial Sequence: Synthetic oligonucleotide
agauaaucggugggucuag

SEQ ID NO: 2136281 - RNA, 19 nt, Artificial Sequence
  Description of Artificial Sequence: Synthetic oligonucleotide
acacauugauucccuacuu

SEQ ID NO: 2136282 - RNA, 19 nt, Artificial Sequence
  Description of Artificial Sequence: Synthetic oligonucleotide
cauguccccggccuccucc

SEQ ID NO: 2136283 - RNA, 19 nt, Artificial Sequence
  Description of Artificial Sequence: Synthetic oligonucleotide
auuacacauugauucccua

SEQ ID NO: 2136284 - RNA, 19 nt, Artificial Sequence
  Description of Artificial Sequence: Synthetic oligonucleotide
gauggcugagaagcgugug

SEQ ID NO: 2136285 - RNA, 19 nt, Artificial Sequence
  Description of Artificial Sequence: Synthetic oligonucleotide
ucguucuguuucuccguug

SEQ ID NO: 2136286 - RNA, 19 nt, Artificial Sequence
  Description of Artificial Sequence: Synthetic oligonucleotide
caaaggaucuguucuuuua

SEQ ID NO: 2136287 - RNA, 19 nt, Artificial Sequence
  Description of Artificial Sequence: Synthetic oligonucleotide
guugaucauuguccugcug

SEQ ID NO: 2136288 - RNA, 19 nt, Artificial Sequence
  Description of Artificial Sequence: Synthetic oligonucleotide
ggggaugccagcaaguuga

SEQ ID NO: 2136289 - RNA, 19 nt, Artificial Sequence
  Description of Artificial Sequence: Synthetic oligonucleotide
uggugacuccagcaggcuc

SEQ ID NO: 2136290 - RNA, 19 nt, Artificial Sequence
  Description of Artificial Sequence: Synthetic oligonucleotide
uucgccugcagggugucga

SEQ ID NO: 2136291 - RNA, 19 nt, Artificial Sequence
  Description of Artificial Sequence: Synthetic oligonucleotide
gagauugcugauggccgcc

SEQ ID NO: 2136292 - RNA, 19 nt, Artificial Sequence
  Description of Artificial Sequence: Synthetic oligonucleotide
gcauuacacauugauuccc

SEQ ID NO: 2136293 - RNA, 19 nt, Artificial Sequence
  Description of Artificial Sequence: Synthetic oligonucleotide
uggggcaaccagcaaucuc

SEQ ID NO: 2136294 - RNA, 19 nt, Artificial Sequence
  Description of Artificial Sequence: Synthetic oligonucleotide
uccuacacuuggagcauua

SEQ ID NO: 2136295 - RNA, 19 nt, Artificial Sequence
  Description of Artificial Sequence: Synthetic oligonucleotide
uggcucuucgguucugaaa

SEQ ID NO: 2136296 - RNA, 19 nt, Artificial Sequence
  Description of Artificial Sequence: Synthetic oligonucleotide
gagauaaucggugggucua

SEQ ID NO: 2136297 - RNA, 19 nt, Artificial Sequence
  Description of Artificial Sequence: Synthetic oligonucleotide
ggagauugcugauggccgc

SEQ ID NO: 2136298 - RNA, 19 nt, Artificial Sequence
  Description of Artificial Sequence: Synthetic oligonucleotide
cuugagagugguggauggc

SEQ ID NO: 2136299 - RNA, 19 nt, Artificial Sequence
  Description of Artificial Sequence: Synthetic oligonucleotide
uccacggcagucacaucuc

SEQ ID NO: 2136300 - RNA, 19 nt, Artificial Sequence
  Description of Artificial Sequence: Synthetic oligonucleotide
uuucuccguugcuuucucu

SEQ ID NO: 2136301 - RNA, 19 nt, Artificial Sequence
  Description of Artificial Sequence: Synthetic oligonucleotide
agcauccggguaauguguc

SEQ ID NO: 2136302 - RNA, 19 nt, Artificial Sequence
  Description of Artificial Sequence: Synthetic oligonucleotide
cuagccucagugagguuca

SEQ ID NO: 2136303 - RNA, 19 nt, Artificial Sequence
  Description of Artificial Sequence: Synthetic oligonucleotide
ggcagucacaucuccugag

SEQ ID NO: 2136304 - RNA, 19 nt, Artificial Sequence
  Description of Artificial Sequence: Synthetic oligonucleotide
cagggugucgagguugccc

SEQ ID NO: 2136305 - RNA, 19 nt, Artificial Sequence
  Description of Artificial Sequence: Synthetic oligonucleotide
gucgagguugcccgggcug

SEQ ID NO: 2136306 - RNA, 19 nt, Artificial Sequence
  Description of Artificial Sequence: Synthetic oligonucleotide
aaaccacaccugcacucua

SEQ ID NO: 2136307 - RNA, 19 nt, Artificial Sequence
  Description of Artificial Sequence: Synthetic oligonucleotide
ggauaguuuuguuccagaa

SEQ ID NO: 2136308 - RNA, 19 nt, Artificial Sequence
  Description of Artificial Sequence: Synthetic oligonucleotide
accuuggcaagaauuccug

SEQ ID NO: 2136309 - RNA, 19 nt, Artificial Sequence
  Description of Artificial Sequence: Synthetic oligonucleotide
gguacgaugggcugcucca

SEQ ID NO: 2136310 - RNA, 19 nt, Artificial Sequence
  Description of Artificial Sequence: Synthetic oligonucleotide
cuuaaccgcaacacagcaa

SEQ ID NO: 2136311 - RNA, 19 nt, Artificial Sequence
  Description of Artificial Sequence: Synthetic oligonucleotide
cacccgacgugcaagaucu

SEQ ID NO: 2136312 - RNA, 19 nt, Artificial Sequence
  Description of Artificial Sequence: Synthetic oligonucleotide
gagagcuuuuaguccuaca

SEQ ID NO: 2136313 - RNA, 19 nt, Artificial Sequence
  Description of Artificial Sequence: Synthetic oligonucleotide
ggagcaagcuguauggaga

SEQ ID NO: 2136314 - RNA, 19 nt, Artificial Sequence
  Description of Artificial Sequence: Synthetic oligonucleotide
aaccagcaaucuccuguaa

SEQ ID NO: 2136315 - RNA, 19 nt, Artificial Sequence
  Description of Artificial Sequence: Synthetic oligonucleotide
ugucgagguugcccgggcu

SEQ ID NO: 2136316 - RNA, 19 nt, Artificial Sequence
  Description of Artificial Sequence: Synthetic oligonucleotide
acgggauaguuuuguucca

SEQ ID NO: 2136317 - RNA, 19 nt, Artificial Sequence
  Description of Artificial Sequence: Synthetic oligonucleotide
cuguauggagaggcugucc

SEQ ID NO: 2136318 - RNA, 19 nt, Artificial Sequence
  Description of Artificial Sequence: Synthetic oligonucleotide
uccucugaguucaguugau

SEQ ID NO: 2136319 - RNA, 19 nt, Artificial Sequence
  Description of Artificial Sequence: Synthetic oligonucleotide
ccccaggagagauaaucgg

SEQ ID NO: 2136320 - RNA, 19 nt, Artificial Sequence
  Description of Artificial Sequence: Synthetic oligonucleotide
ucccucgugucucccuucu

SEQ ID NO: 2136321 - RNA, 19 nt, Artificial Sequence
  Description of Artificial Sequence: Synthetic oligonucleotide
gcaaccuuggcaagaauuc

SEQ ID NO: 2136322 - RNA, 19 nt, Artificial Sequence
  Description of Artificial Sequence: Synthetic oligonucleotide
gugcaagaucuucucgcac

SEQ ID NO: 2136323 - RNA, 19 nt, Artificial Sequence
  Description of Artificial Sequence: Synthetic oligonucleotide
aucggugggucuaggagca

SEQ ID NO: 2136324 - RNA, 19 nt, Artificial Sequence
  Description of Artificial Sequence: Synthetic oligonucleotide
cugcuguugaaggucguuc

SEQ ID NO: 2136325 - RNA, 19 nt, Artificial Sequence
  Description of Artificial Sequence: Synthetic oligonucleotide
cauuacacauugauucccu

SEQ ID NO: 2136326 - RNA, 19 nt, Artificial Sequence
  Description of Artificial Sequence: Synthetic oligonucleotide
aaggugucuuaaacgggau

SEQ ID NO: 2136327 - RNA, 19 nt, Artificial Sequence
  Description of Artificial Sequence: Synthetic oligonucleotide
uccaguccuggugacucca

SEQ ID NO: 2136328 - RNA, 19 nt, Artificial Sequence
  Description of Artificial Sequence: Synthetic oligonucleotide
ccgaguaaggaaugucagc

SEQ ID NO: 2136329 - RNA, 19 nt, Artificial Sequence
  Description of Artificial Sequence: Synthetic oligonucleotide
ugucgcuugccgacugguc

SEQ ID NO: 2136330 - RNA, 19 nt, Artificial Sequence
  Description of Artificial Sequence: Synthetic oligonucleotide
gcaaccagcaaucuccugu

SEQ ID NO: 2136331 - RNA, 19 nt, Artificial Sequence
  Description of Artificial Sequence: Synthetic oligonucleotide
agcaagcuguauggagagg

SEQ ID NO: 2136332 - RNA, 19 nt, Artificial Sequence
  Description of Artificial Sequence: Synthetic oligonucleotide
cugugccgccaccaugucc

SEQ ID NO: 2136333 - RNA, 19 nt, Artificial Sequence
  Description of Artificial Sequence: Synthetic oligonucleotide
guucacccgacgugcaaga

SEQ ID NO: 2136334 - RNA, 19 nt, Artificial Sequence
  Description of Artificial Sequence: Synthetic oligonucleotide
aggugucuuaaacgggaua

SEQ ID NO: 2136335 - RNA, 19 nt, Artificial Sequence
  Description of Artificial Sequence: Synthetic oligonucleotide
cauggcucucucauuccga

SEQ ID NO: 2136336 - RNA, 19 nt, Artificial Sequence
  Description of Artificial Sequence: Synthetic oligonucleotide
ggacuugaggagggaagcg

SEQ ID NO: 2136337 - RNA, 19 nt, Artificial Sequence
  Description of Artificial Sequence: Synthetic oligonucleotide
gguuccaagaggggcacug

SEQ ID NO: 2136338 - RNA, 19 nt, Artificial Sequence
  Description of Artificial Sequence: Synthetic oligonucleotide
cacauugauucccuacuua

SEQ ID NO: 2136339 - RNA, 19 nt, Artificial Sequence
  Description of Artificial Sequence: Synthetic oligonucleotide
gguggauggcugagaagcg

SEQ ID NO: 2136340 - RNA, 19 nt, Artificial Sequence
  Description of Artificial Sequence: Synthetic oligonucleotide
gguucacccgacgugcaag

SEQ ID NO: 2136341 - RNA, 19 nt, Artificial Sequence
  Description of Artificial Sequence: Synthetic oligonucleotide
acuuggagcauuacacauu

SEQ ID NO: 2136342 - RNA, 19 nt, Artificial Sequence
  Description of Artificial Sequence: Synthetic oligonucleotide
uccugcugaggggugucgc

SEQ ID NO: 2136343 - RNA, 19 nt, Artificial Sequence
  Description of Artificial Sequence: Synthetic oligonucleotide
gaggggugucgcuugccga

SEQ ID NO: 2136344 - RNA, 19 nt, Artificial Sequence
  Description of Artificial Sequence: Synthetic oligonucleotide
caggccgagguacgauggg

SEQ ID NO: 2136345 - RNA, 19 nt, Artificial Sequence
  Description of Artificial Sequence: Synthetic oligonucleotide
gcuuuuaguccuacacuug

SEQ ID NO: 2136346 - RNA, 19 nt, Artificial Sequence
  Description of Artificial Sequence: Synthetic oligonucleotide
cuucugccccaaacccugc

SEQ ID NO: 2136347 - RNA, 19 nt, Artificial Sequence
  Description of Artificial Sequence: Synthetic oligonucleotide
cuccggucccgucucgccc

SEQ ID NO: 2136348 - RNA, 19 nt, Artificial Sequence
  Description of Artificial Sequence: Synthetic oligonucleotide
ucgugucucccuucuucuc

SEQ ID NO: 2136349 - RNA, 19 nt, Artificial Sequence
  Description of Artificial Sequence: Synthetic oligonucleotide
ucgagguugcccgggcugu

SEQ ID NO: 2136350 - RNA, 19 nt, Artificial Sequence
  Description of Artificial Sequence: Synthetic oligonucleotide
cccuacuuaaccgcaacac

SEQ ID NO: 2136351 - RNA, 19 nt, Artificial Sequence
  Description of Artificial Sequence: Synthetic oligonucleotide
uccggguaauguguccgcu

SEQ ID NO: 2136352 - RNA, 19 nt, Artificial Sequence
  Description of Artificial Sequence: Synthetic oligonucleotide
ccuacuuaaccgcaacaca

SEQ ID NO: 2136353 - RNA, 19 nt, Artificial Sequence
  Description of Artificial Sequence: Synthetic oligonucleotide
cggguaauguguccgcucg

SEQ ID NO: 2136354 - RNA, 19 nt, Artificial Sequence
  Description of Artificial Sequence: Synthetic oligonucleotide
aggagcaggccgagguacg

SEQ ID NO: 2136355 - RNA, 19 nt, Artificial Sequence
  Description of Artificial Sequence: Synthetic oligonucleotide
ugauggccgccccucucuc

SEQ ID NO: 2136356 - RNA, 19 nt, Artificial Sequence
  Description of Artificial Sequence: Synthetic oligonucleotide
gggauaguuuuguuccaga

SEQ ID NO: 2136357 - RNA, 19 nt, Artificial Sequence
  Description of Artificial Sequence: Synthetic oligonucleotide
caaccagcaaucuccugua

SEQ ID NO: 2136358 - RNA, 19 nt, Artificial Sequence
  Description of Artificial Sequence: Synthetic oligonucleotide
ugcugauggccgccccucu

SEQ ID NO: 2136359 - RNA, 19 nt, Artificial Sequence
  Description of Artificial Sequence: Synthetic oligonucleotide
uuucgccugcagggugucg

SEQ ID NO: 2136360 - RNA, 19 nt, Artificial Sequence
  Description of Artificial Sequence: Synthetic oligonucleotide
ccuggggcaaccagcaauc

SEQ ID NO: 2136361 - RNA, 19 nt, Artificial Sequence
  Description of Artificial Sequence: Synthetic oligonucleotide
uccguugcuuucucuucuu

SEQ ID NO: 2136362 - RNA, 19 nt, Artificial Sequence
  Description of Artificial Sequence: Synthetic oligonucleotide
guugcccgggcuguccaag

SEQ ID NO: 2136363 - RNA, 19 nt, Artificial Sequence
  Description of Artificial Sequence: Synthetic oligonucleotide
guaggacuugaggagggaa

SEQ ID NO: 2136364 - RNA, 19 nt, Artificial Sequence
  Description of Artificial Sequence: Synthetic oligonucleotide
gguuaaccgaguaaggaau

SEQ ID NO: 2136365 - RNA, 19 nt, Artificial Sequence
  Description of Artificial Sequence: Synthetic oligonucleotide
uuguccugcugaggggugu

SEQ ID NO: 2136366 - RNA, 19 nt, Artificial Sequence
  Description of Artificial Sequence: Synthetic oligonucleotide
aguccuacacuuggagcau

SEQ ID NO: 2136367 - RNA, 19 nt, Artificial Sequence
  Description of Artificial Sequence: Synthetic oligonucleotide
ggugggucuaggagcaggc

SEQ ID NO: 2136368 - RNA, 19 nt, Artificial Sequence
  Description of Artificial Sequence: Synthetic oligonucleotide
gaaggucguucuguuucuc

SEQ ID NO: 2136369 - RNA, 19 nt, Artificial Sequence
  Description of Artificial Sequence: Synthetic oligonucleotide
gcaggccgagguacgaugg

SEQ ID NO: 2136370 - RNA, 19 nt, Artificial Sequence
  Description of Artificial Sequence: Synthetic oligonucleotide
cgaagacacgcuccaaggc

SEQ ID NO: 2136371 - RNA, 19 nt, Artificial Sequence
  Description of Artificial Sequence: Synthetic oligonucleotide
ccaagaggggcacuggaca

SEQ ID NO: 2136372 - RNA, 19 nt, Artificial Sequence
  Description of Artificial Sequence: Synthetic oligonucleotide
gcaggugacggagaaguuc

SEQ ID NO: 2136373 - RNA, 19 nt, Artificial Sequence
  Description of Artificial Sequence: Synthetic oligonucleotide
ggugucgagguugcccggg

SEQ ID NO: 2136374 - RNA, 19 nt, Artificial Sequence
  Description of Artificial Sequence: Synthetic oligonucleotide
cucuccucccucccucgug

SEQ ID NO: 2136375 - RNA, 19 nt, Artificial Sequence
  Description of Artificial Sequence: Synthetic oligonucleotide
gugucgagguugcccgggc

SEQ ID NO: 2136376 - RNA, 19 nt, Artificial Sequence
  Description of Artificial Sequence: Synthetic oligonucleotide
auuguccugcugaggggug

SEQ ID NO: 2136377 - RNA, 19 nt, Artificial Sequence
  Description of Artificial Sequence: Synthetic oligonucleotide
agcaggcuccggucccguc

SEQ ID NO: 2136378 - RNA, 19 nt, Artificial Sequence
  Description of Artificial Sequence: Synthetic oligonucleotide
agguucacccgacgugcaa

SEQ ID NO: 2136379 - RNA, 19 nt, Artificial Sequence
  Description of Artificial Sequence: Synthetic oligonucleotide
gcauccggguaaugugucc

SEQ ID NO: 2136380 - RNA, 19 nt, Artificial Sequence
  Description of Artificial Sequence: Synthetic oligonucleotide
cucgccccacacuuucguc

SEQ ID NO: 2136381 - RNA, 19 nt, Artificial Sequence
  Description of Artificial Sequence: Synthetic oligonucleotide
ucccuucuucucccucccu

SEQ ID NO: 2136382 - RNA, 19 nt, Artificial Sequence
  Description of Artificial Sequence: Synthetic oligonucleotide
caaaagcauccggguaaug

SEQ ID NO: 2136383 - RNA, 19 nt, Artificial Sequence
  Description of Artificial Sequence: Synthetic oligonucleotide
ccacaccugcacucuagcc

SEQ ID NO: 2136384 - RNA, 19 nt, Artificial Sequence
  Description of Artificial Sequence: Synthetic oligonucleotide
auguccccggccuccucca

SEQ ID NO: 2136385 - RNA, 19 nt, Artificial Sequence
  Description of Artificial Sequence: Synthetic oligonucleotide
auggccgccccucucucuu

SEQ ID NO: 2136386 - RNA, 19 nt, Artificial Sequence
  Description of Artificial Sequence: Synthetic oligonucleotide
cagucacaucuccugagua

SEQ ID NO: 2136387 - RNA, 19 nt, Artificial Sequence
  Description of Artificial Sequence: Synthetic oligonucleotide
uuuucgccugcaggguguc

SEQ ID NO: 2136388 - RNA, 19 nt, Artificial Sequence
  Description of Artificial Sequence: Synthetic oligonucleotide
ccucgugucucccuucuuc

SEQ ID NO: 2136389 - RNA, 19 nt, Artificial Sequence
  Description of Artificial Sequence: Synthetic oligonucleotide
auucccuacuuaaccgcaa

SEQ ID NO: 2136390 - RNA, 19 nt, Artificial Sequence
  Description of Artificial Sequence: Synthetic oligonucleotide
gucuaggagcaggccgagg

SEQ ID NO: 2136391 - RNA, 19 nt, Artificial Sequence
  Description of Artificial Sequence: Synthetic oligonucleotide
cgcaacacagcaaaggugu

SEQ ID NO: 2136392 - RNA, 19 nt, Artificial Sequence
  Description of Artificial Sequence: Synthetic oligonucleotide
gguaauguguccgcucgaa

SEQ ID NO: 2136393 - RNA, 19 nt, Artificial Sequence
  Description of Artificial Sequence: Synthetic oligonucleotide
ggagagauaaucggugggu

SEQ ID NO: 2136394 - RNA, 19 nt, Artificial Sequence
  Description of Artificial Sequence: Synthetic oligonucleotide
cucccucccucgugucucc

SEQ ID NO: 2136395 - RNA, 19 nt, Artificial Sequence
  Description of Artificial Sequence: Synthetic oligonucleotide
cacuuucguccgccugugc

SEQ ID NO: 2136396 - RNA, 19 nt, Artificial Sequence
  Description of Artificial Sequence: Synthetic oligonucleotide
gccuugagagugguggaug

SEQ ID NO: 2136397 - RNA, 19 nt, Artificial Sequence
  Description of Artificial Sequence: Synthetic oligonucleotide
ugguccaguccuggugacu

SEQ ID NO: 2136398 - RNA, 19 nt, Artificial Sequence
  Description of Artificial Sequence: Synthetic oligonucleotide
ggaucuguucuuuuauauu

SEQ ID NO: 2136399 - RNA, 19 nt, Artificial Sequence
  Description of Artificial Sequence: Synthetic oligonucleotide
cagccuugagaguggugga

SEQ ID NO: 2136400 - RNA, 19 nt, Artificial Sequence
  Description of Artificial Sequence: Synthetic oligonucleotide
guccugcugaggggugucg

SEQ ID NO: 2136401 - RNA, 19 nt, Artificial Sequence
  Description of Artificial Sequence: Synthetic oligonucleotide
gagugguggauggcugaga

SEQ ID NO: 2136402 - RNA, 19 nt, Artificial Sequence
  Description of Artificial Sequence: Synthetic oligonucleotide
gccgagguacgaugggcug

SEQ ID NO: 2136403 - RNA, 19 nt, Artificial Sequence
  Description of Artificial Sequence: Synthetic oligonucleotide
uucacccgacgugcaagau

SEQ ID NO: 2136404 - RNA, 19 nt, Artificial Sequence
  Description of Artificial Sequence: Synthetic oligonucleotide
gggucuaggagcaggccga

SEQ ID NO: 2136405 - RNA, 19 nt, Artificial Sequence
  Description of Artificial Sequence: Synthetic oligonucleotide
gagguucacccgacgugca

SEQ ID NO: 2136406 - RNA, 19 nt, Artificial Sequence
  Description of Artificial Sequence: Synthetic oligonucleotide
guugaaggucguucuguuu

SEQ ID NO: 2136407 - RNA, 19 nt, Artificial Sequence
  Description of Artificial Sequence: Synthetic oligonucleotide
gucccgucucgccccacac

SEQ ID NO: 2136408 - RNA, 19 nt, Artificial Sequence
  Description of Artificial Sequence: Synthetic oligonucleotide
guguccgcucgaagacacg

SEQ ID NO: 2136409 - RNA, 19 nt, Artificial Sequence
  Description of Artificial Sequence: Synthetic oligonucleotide
cccaaacccugcuccuggg

SEQ ID NO: 2136410 - RNA, 19 nt, Artificial Sequence
  Description of Artificial Sequence: Synthetic oligonucleotide
cuccguugcuuucucuucu

SEQ ID NO: 2136411 - RNA, 19 nt, Artificial Sequence
  Description of Artificial Sequence: Synthetic oligonucleotide
gggugucgagguugcccgg

SEQ ID NO: 2136412 - RNA, 19 nt, Artificial Sequence
  Description of Artificial Sequence: Synthetic oligonucleotide
ccaggucuagcaggugacg

SEQ ID NO: 2136413 - RNA, 19 nt, Artificial Sequence
  Description of Artificial Sequence: Synthetic oligonucleotide
ggagcauuacacauugauu

SEQ ID NO: 2136414 - RNA, 19 nt, Artificial Sequence
  Description of Artificial Sequence: Synthetic oligonucleotide
gccccucucucuucugccc

SEQ ID NO: 2136415 - RNA, 19 nt, Artificial Sequence
  Description of Artificial Sequence: Synthetic oligonucleotide
gugucuuaaacgggauagu

SEQ ID NO: 2136416 - RNA, 19 nt, Artificial Sequence
  Description of Artificial Sequence: Synthetic oligonucleotide
cuugaggagggaagcguuu

SEQ ID NO: 2136417 - RNA, 19 nt, Artificial Sequence
  Description of Artificial Sequence: Synthetic oligonucleotide
ccugaguccaagaggagau

SEQ ID NO: 2136418 - RNA, 19 nt, Artificial Sequence
  Description of Artificial Sequence: Synthetic oligonucleotide
ccgacugguccaguccugg

SEQ ID NO: 2136419 - RNA, 19 nt, Artificial Sequence
  Description of Artificial Sequence: Synthetic oligonucleotide
gucuagcaggugacggaga

SEQ ID NO: 2136420 - RNA, 19 nt, Artificial Sequence
  Description of Artificial Sequence: Synthetic oligonucleotide
ccacggcagucacaucucc

SEQ ID NO: 2136421 - RNA, 19 nt, Artificial Sequence
  Description of Artificial Sequence: Synthetic oligonucleotide
gauggccgccccucucucu

SEQ ID NO: 2136422 - RNA, 19 nt, Artificial Sequence
  Description of Artificial Sequence: Synthetic oligonucleotide
gaaguggagcaagcuguau

SEQ ID NO: 2136423 - RNA, 19 nt, Artificial Sequence
  Description of Artificial Sequence: Synthetic oligonucleotide
ccgagguacgaugggcugc

SEQ ID NO: 2136424 - RNA, 19 nt, Artificial Sequence
  Description of Artificial Sequence: Synthetic oligonucleotide
ugguuccaagaggggcacu

SEQ ID NO: 2136425 - RNA, 19 nt, Artificial Sequence
  Description of Artificial Sequence: Synthetic oligonucleotide
gcagucacaucuccugagu

SEQ ID NO: 2136426 - RNA, 19 nt, Artificial Sequence
  Description of Artificial Sequence: Synthetic oligonucleotide
cgugcaagaucuucucgca

SEQ ID NO: 2136427 - RNA, 19 nt, Artificial Sequence
  Description of Artificial Sequence: Synthetic oligonucleotide
ggucguucuguuucuccgu

SEQ ID NO: 2136428 - RNA, 19 nt, Artificial Sequence
  Description of Artificial Sequence: Synthetic oligonucleotide
ggguaauguguccgcucga

SEQ ID NO: 2136429 - RNA, 19 nt, Artificial Sequence
  Description of Artificial Sequence: Synthetic oligonucleotide
ccuacacuuggagcauuac

SEQ ID NO: 2136430 - RNA, 19 nt, Artificial Sequence
  Description of Artificial Sequence: Synthetic oligonucleotide
cuccucccucccucguguc

SEQ ID NO: 2136431 - RNA, 19 nt, Artificial Sequence
  Description of Artificial Sequence: Synthetic oligonucleotide
cacggcagucacaucuccu

SEQ ID NO: 2136432 - RNA, 19 nt, Artificial Sequence
  Description of Artificial Sequence: Synthetic oligonucleotide
ccggguaauguguccgcuc

SEQ ID NO: 2136433 - RNA, 19 nt, Artificial Sequence
  Description of Artificial Sequence: Synthetic oligonucleotide
ccuuccugaccuuuuaauu

SEQ ID NO: 2136434 - RNA, 19 nt, Artificial Sequence
  Description of Artificial Sequence: Synthetic oligonucleotide
ggaaguggagcaagcugua

SEQ ID NO: 2136435 - RNA, 19 nt, Artificial Sequence
  Description of Artificial Sequence: Synthetic oligonucleotide
gcaacacagcaaagguguc

SEQ ID NO: 2136436 - RNA, 19 nt, Artificial Sequence
  Description of Artificial Sequence: Synthetic oligonucleotide
cccgacgugcaagaucuuc

SEQ ID NO: 2136437 - RNA, 19 nt, Artificial Sequence
  Description of Artificial Sequence: Synthetic oligonucleotide
caccugcacucuagccuca

SEQ ID NO: 2136438 - RNA, 19 nt, Artificial Sequence
  Description of Artificial Sequence: Synthetic oligonucleotide
ccugaccuuuuaauucaaa

SEQ ID NO: 2136439 - RNA, 19 nt, Artificial Sequence
  Description of Artificial Sequence: Synthetic oligonucleotide
ccguugcuuucucuucuuc

SEQ ID NO: 2136440 - RNA, 19 nt, Artificial Sequence
  Description of Artificial Sequence: Synthetic oligonucleotide
ccgacgugcaagaucuucu

SEQ ID NO: 2136441 - RNA, 19 nt, Artificial Sequence
  Description of Artificial Sequence: Synthetic oligonucleotide
ggagcaggccgagguacga

SEQ ID NO: 2136442 - RNA, 19 nt, Artificial Sequence
  Description of Artificial Sequence: Synthetic oligonucleotide
guccgccugugccgccacc

SEQ ID NO: 2136443 - RNA, 19 nt, Artificial Sequence
  Description of Artificial Sequence: Synthetic oligonucleotide
guggggaugccagcaaguu

SEQ ID NO: 2136444 - RNA, 19 nt, Artificial Sequence
  Description of Artificial Sequence: Synthetic oligonucleotide
gugucgcuugccgacuggu

SEQ ID NO: 2136445 - RNA, 19 nt, Artificial Sequence
  Description of Artificial Sequence: Synthetic oligonucleotide
cgaugggcugcuccacggc

SEQ ID NO: 2136446 - RNA, 19 nt, Artificial Sequence
  Description of Artificial Sequence: Synthetic oligonucleotide
cgcacaaaagcauccgggu

SEQ ID NO: 2136447 - RNA, 19 nt, Artificial Sequence
  Description of Artificial Sequence: Synthetic oligonucleotide
gcaggcuccggucccgucu

SEQ ID NO: 2136448 - RNA, 19 nt, Artificial Sequence
  Description of Artificial Sequence: Synthetic oligonucleotide
cggaacuuggcucuucggu

SEQ ID NO: 2136449 - RNA, 19 nt, Artificial Sequence
  Description of Artificial Sequence: Synthetic oligonucleotide
ggugacggagaaguucuuu

SEQ ID NO: 2136450 - RNA, 19 nt, Artificial Sequence
  Description of Artificial Sequence: Synthetic oligonucleotide
aggugacggagaaguucuu

SEQ ID NO: 2136451 - RNA, 19 nt, Artificial Sequence
  Description of Artificial Sequence: Synthetic oligonucleotide
cgcucgaagacacgcucca

SEQ ID NO: 2136452 - RNA, 19 nt, Artificial Sequence
  Description of Artificial Sequence: Synthetic oligonucleotide
guccgcucgaagacacgcu

SEQ ID NO: 2136453 - RNA, 19 nt, Artificial Sequence
  Description of Artificial Sequence: Synthetic oligonucleotide
gagcaggccgagguacgau

SEQ ID NO: 2136454 - RNA, 19 nt, Artificial Sequence
  Description of Artificial Sequence: Synthetic oligonucleotide
gguugcccgggcuguccaa

SEQ ID NO: 2136455 - RNA, 19 nt, Artificial Sequence
  Description of Artificial Sequence: Synthetic oligonucleotide
gcguguggaaguggagcaa

SEQ ID NO: 2136456 - RNA, 19 nt, Artificial Sequence
  Description of Artificial Sequence: Synthetic oligonucleotide
gccgccccucucucuucug

SEQ ID NO: 2136457 - RNA, 19 nt, Artificial Sequence
  Description of Artificial Sequence: Synthetic oligonucleotide
ccugugccgccaccauguc

SEQ ID NO: 2136458 - RNA, 19 nt, Artificial Sequence
  Description of Artificial Sequence: Synthetic oligonucleotide
gcucgaagacacgcuccaa

SEQ ID NO: 2136459 - RNA, 19 nt, Artificial Sequence
  Description of Artificial Sequence: Synthetic oligonucleotide
cggcagucacaucuccuga

SEQ ID NO: 2136460 - RNA, 19 nt, Artificial Sequence
  Description of Artificial Sequence: Synthetic oligonucleotide
guccuacacuuggagcauu

SEQ ID NO: 2136461 - RNA, 19 nt, Artificial Sequence
  Description of Artificial Sequence: Synthetic oligonucleotide
gcuccacggcagucacauc

SEQ ID NO: 2136462 - RNA, 19 nt, Artificial Sequence
  Description of Artificial Sequence: Synthetic oligonucleotide
cccgucucgccccacacuu

SEQ ID NO: 2136463 - RNA, 19 nt, Artificial Sequence
  Description of Artificial Sequence: Synthetic oligonucleotide
ccugcuccuggggcaacca

SEQ ID NO: 2136464 - RNA, 19 nt, Artificial Sequence
  Description of Artificial Sequence: Synthetic oligonucleotide
gggcugcuccacggcaguc

SEQ ID NO: 2136465 - RNA, 19 nt, Artificial Sequence
  Description of Artificial Sequence: Synthetic oligonucleotide
ggaugccagcaaguugaau

SEQ ID NO: 2136466 - RNA, 19 nt, Artificial Sequence
  Description of Artificial Sequence: Synthetic oligonucleotide
ggccgccccucucucuucu

SEQ ID NO: 2136467 - RNA, 19 nt, Artificial Sequence
  Description of Artificial Sequence: Synthetic oligonucleotide
cgcuugccgacugguccag

SEQ ID NO: 2136468 - RNA, 19 nt, Artificial Sequence
  Description of Artificial Sequence: Synthetic oligonucleotide
ggggugucgcuugccgacu

SEQ ID NO: 2136469 - RNA, 19 nt, Artificial Sequence
  Description of Artificial Sequence: Synthetic oligonucleotide
cucuagccucagugagguu

SEQ ID NO: 2136470 - RNA, 19 nt, Artificial Sequence
  Description of Artificial Sequence: Synthetic oligonucleotide
cguccgccugugccgccac

SEQ ID NO: 2136471 - RNA, 19 nt, Artificial Sequence
  Description of Artificial Sequence: Synthetic oligonucleotide
ccucuccucccucccucgu

SEQ ID NO: 2136472 - RNA, 19 nt, Artificial Sequence
  Description of Artificial Sequence: Synthetic oligonucleotide
cgacugguccaguccuggu

SEQ ID NO: 2136473 - RNA, 19 nt, Artificial Sequence
  Description of Artificial Sequence: Synthetic oligonucleotide
gcuugccgacugguccagu

SEQ ID NO: 2136474 - RNA, 19 nt, Artificial Sequence
  Description of Artificial Sequence: Synthetic oligonucleotide
ccgucucgccccacacuuu

SEQ ID NO: 2136475 - RNA, 19 nt, Artificial Sequence
  Description of Artificial Sequence: Synthetic oligonucleotide
ccgccugugccgccaccau

SEQ ID NO: 2136476 - RNA, 19 nt, Artificial Sequence
  Description of Artificial Sequence: Synthetic oligonucleotide
cccucgugucucccuucuu

SEQ ID NO: 2136477 - RNA, 19 nt, Artificial Sequence
  Description of Artificial Sequence: Synthetic oligonucleotide
cggucccgucucgccccac

SEQ ID NO: 2136478 - RNA, 19 nt, Artificial Sequence
  Description of Artificial Sequence: Synthetic oligonucleotide
gacgcgaaauucuugaagg

SEQ ID NO: 2136479 - RNA, 19 nt, Artificial Sequence
  Description of Artificial Sequence: Synthetic oligonucleotide
aacugggugaccucagagc

SEQ ID NO: 2136480 - RNA, 19 nt, Artificial Sequence
  Description of Artificial Sequence: Synthetic oligonucleotide
aacgucagcgccuccaagg

SEQ ID NO: 2136481 - RNA, 19 nt, Artificial Sequence
  Description of Artificial Sequence: Synthetic oligonucleotide
uauccuuaagcuuccauug

SEQ ID NO: 2136482 - RNA, 19 nt, Artificial Sequence
  Description of Artificial Sequence: Synthetic oligonucleotide
agaaccgcggccuuaggcc

SEQ ID NO: 2136483 - RNA, 19 nt, Artificial Sequence
  Description of Artificial Sequence: Synthetic oligonucleotide
ugaaaguucaggcucugug

SEQ ID NO: 2136484 - RNA, 19 nt, Artificial Sequence
  Description of Artificial Sequence: Synthetic oligonucleotide
cuuugagccagagagaggc

SEQ ID NO: 2136485 - RNA, 19 nt, Artificial Sequence
  Description of Artificial Sequence: Synthetic oligonucleotide
guaucuggaaacgucagcg

SEQ ID NO: 2136486 - RNA, 19 nt, Artificial Sequence
  Description of Artificial Sequence: Synthetic oligonucleotide
gaaacccguguucugaaag

SEQ ID NO: 2136487 - RNA, 19 nt, Artificial Sequence
  Description of Artificial Sequence: Synthetic oligonucleotide
uguucugaaaguucaggcu

SEQ ID NO: 2136488 - RNA, 19 nt, Artificial Sequence
  Description of Artificial Sequence: Synthetic oligonucleotide
agagggacccgagagacgc

SEQ ID NO: 2136489 - RNA, 19 nt, Artificial Sequence
  Description of Artificial Sequence: Synthetic oligonucleotide
ugaaggcccuccauuaucc

SEQ ID NO: 2136490 - RNA, 19 nt, Artificial Sequence
  Description of Artificial Sequence: Synthetic oligonucleotide
ucuguguagccucacccag

SEQ ID NO: 2136491 - RNA, 19 nt, Artificial Sequence
  Description of Artificial Sequence: Synthetic oligonucleotide
ucggauaagccacacuucu

SEQ ID NO: 2136492 - RNA, 19 nt, Artificial Sequence
  Description of Artificial Sequence: Synthetic oligonucleotide
uccaaggagaaacgagggg

SEQ ID NO: 2136493 - RNA, 19 nt, Artificial Sequence
  Description of Artificial Sequence: Synthetic oligonucleotide
uuauccuuaagcuuccauu

SEQ ID NO: 2136494 - RNA, 19 nt, Artificial Sequence
  Description of Artificial Sequence: Synthetic oligonucleotide
agcgccuccaaggagaaac

SEQ ID NO: 2136495 - RNA, 19 nt, Artificial Sequence
  Description of Artificial Sequence: Synthetic oligonucleotide
uguaucuggaaacgucagc

SEQ ID NO: 2136496 - RNA, 19 nt, Artificial Sequence
  Description of Artificial Sequence: Synthetic oligonucleotide
agagacgcgaaauucuuga

SEQ ID NO: 2136497 - RNA, 19 nt, Artificial Sequence
  Description of Artificial Sequence: Synthetic oligonucleotide
gaaaguucaggcucuguga

SEQ ID NO: 2136498 - RNA, 19 nt, Artificial Sequence
  Description of Artificial Sequence: Synthetic oligonucleotide
ucauuucuaggccacccca

SEQ ID NO: 2136499 - RNA, 19 nt, Artificial Sequence
  Description of Artificial Sequence: Synthetic oligonucleotide
acgcgaaauucuugaaggc

SEQ ID NO: 2136500 - RNA, 19 nt, Artificial Sequence
  Description of Artificial Sequence: Synthetic oligonucleotide
uugccauccaguuugcccu

SEQ ID NO: 2136501 - RNA, 19 nt, Artificial Sequence
  Description of Artificial Sequence: Synthetic oligonucleotide
ucuucgagcuuucucuucu

SEQ ID NO: 2136502 - RNA, 19 nt, Artificial Sequence
  Description of Artificial Sequence: Synthetic oligonucleotide
agacgcgaaauucuugaag

SEQ ID NO: 2136503 - RNA, 19 nt, Artificial Sequence
  Description of Artificial Sequence: Synthetic oligonucleotide
aggagaaccgagcggcacc

SEQ ID NO: 2136504 - RNA, 19 nt, Artificial Sequence
  Description of Artificial Sequence: Synthetic oligonucleotide
uucuguaucuggaaacguc

SEQ ID NO: 2136505 - RNA, 19 nt, Artificial Sequence
  Description of Artificial Sequence: Synthetic oligonucleotide
aaacccguguucugaaagu

SEQ ID NO: 2136506 - RNA, 19 nt, Artificial Sequence
  Description of Artificial Sequence: Synthetic oligonucleotide
cauuuugcccacagguucc

SEQ ID NO: 2136507 - RNA, 19 nt, Artificial Sequence
  Description of Artificial Sequence: Synthetic oligonucleotide
gucuuugagccagagagag

SEQ ID NO: 2136508 - RNA, 19 nt, Artificial Sequence
  Description of Artificial Sequence: Synthetic oligonucleotide
gacaccgcggugaaguugg

SEQ ID NO: 2136509 - RNA, 19 nt, Artificial Sequence
  Description of Artificial Sequence: Synthetic oligonucleotide
ucuggcuccaccaccaaau

SEQ ID NO: 2136510 - RNA, 19 nt, Artificial Sequence
  Description of Artificial Sequence: Synthetic oligonucleotide
ucugcaggggcucggauaa

SEQ ID NO: 2136511 - RNA, 19 nt, Artificial Sequence
  Description of Artificial Sequence: Synthetic oligonucleotide
cagagagaggcacacgccg

SEQ ID NO: 2136512 - RNA, 19 nt, Artificial Sequence
  Description of Artificial Sequence: Synthetic oligonucleotide
auccuuaagcuuccauugg

SEQ ID NO: 2136513 - RNA, 19 nt, Artificial Sequence
  Description of Artificial Sequence: Synthetic oligonucleotide
gaacugggugaccucagag

SEQ ID NO: 2136514 - RNA, 19 nt, Artificial Sequence
  Description of Artificial Sequence: Synthetic oligonucleotide
uccgagucuggagacaccg

SEQ ID NO: 2136515 - RNA, 19 nt, Artificial Sequence
  Description of Artificial Sequence: Synthetic oligonucleotide
ugaccucagagccaugacu

SEQ ID NO: 2136516 - RNA, 19 nt, Artificial Sequence
  Description of Artificial Sequence: Synthetic oligonucleotide
caguuugcccuuaacaguc

SEQ ID NO: 2136517 - RNA, 19 nt, Artificial Sequence
  Description of Artificial Sequence: Synthetic oligonucleotide
gugggaaugggcugcagag

SEQ ID NO: 2136518 - RNA, 19 nt, Artificial Sequence
  Description of Artificial Sequence: Synthetic oligonucleotide
agccaugacugacccaggc

SEQ ID NO: 2136519 - RNA, 19 nt, Artificial Sequence
  Description of Artificial Sequence: Synthetic oligonucleotide
gaccucagagccaugacug

SEQ ID NO: 2136520 - RNA, 19 nt, Artificial Sequence
  Description of Artificial Sequence: Synthetic oligonucleotide
ucuuugagccagagagagg

SEQ ID NO: 2136521 - RNA, 19 nt, Artificial Sequence
  Description of Artificial Sequence: Synthetic oligonucleotide
ucuaggccaccccagggug

SEQ ID NO: 2136522 - RNA, 19 nt, Artificial Sequence
  Description of Artificial Sequence: Synthetic oligonucleotide
uaucuggaaacgucagcgc

SEQ ID NO: 2136523 - RNA, 19 nt, Artificial Sequence
  Description of Artificial Sequence: Synthetic oligonucleotide
acacgccgcccauugaggc

SEQ ID NO: 2136524 - RNA, 19 nt, Artificial Sequence
  Description of Artificial Sequence: Synthetic oligonucleotide
uuguucauuucuaggccac

SEQ ID NO: 2136525 - RNA, 19 nt, Artificial Sequence
  Description of Artificial Sequence: Synthetic oligonucleotide
ggauggucccaucaggagg

SEQ ID NO: 2136526 - RNA, 19 nt, Artificial Sequence
  Description of Artificial Sequence: Synthetic oligonucleotide
agcgaccugugacugagag

SEQ ID NO: 2136527 - RNA, 19 nt, Artificial Sequence
  Description of Artificial Sequence: Synthetic oligonucleotide
guugacgaggccagcaggg

SEQ ID NO: 2136528 - RNA, 19 nt, Artificial Sequence
  Description of Artificial Sequence: Synthetic oligonucleotide
gagggcugccuccaaaggc

SEQ ID NO: 2136529 - RNA, 19 nt, Artificial Sequence
  Description of Artificial Sequence: Synthetic oligonucleotide
uugcccuuaacagucuuug

SEQ ID NO: 2136530 - RNA, 19 nt, Artificial Sequence
  Description of Artificial Sequence: Synthetic oligonucleotide
auaagccacacuucuguau

SEQ ID NO: 2136531 - RNA, 19 nt, Artificial Sequence
  Description of Artificial Sequence: Synthetic oligonucleotide
cucugugaccgcuccaggg

SEQ ID NO: 2136532 - RNA, 19 nt, Artificial Sequence
  Description of Artificial Sequence: Synthetic oligonucleotide
uggggcgaagucugcaggg

SEQ ID NO: 2136533 - RNA, 19 nt, Artificial Sequence
  Description of Artificial Sequence: Synthetic oligonucleotide
gagaaccgcggccuuaggc

SEQ ID NO: 2136534 - RNA, 19 nt, Artificial Sequence
  Description of Artificial Sequence: Synthetic oligonucleotide
aaccgagcggcacccgagg

SEQ ID NO: 2136535 - RNA, 19 nt, Artificial Sequence
  Description of Artificial Sequence: Synthetic oligonucleotide
ccuccaaggagaaacgagg

SEQ ID NO: 2136536 - RNA, 19 nt, Artificial Sequence
  Description of Artificial Sequence: Synthetic oligonucleotide
uugaaggcccuccauuauc

SEQ ID NO: 2136537 - RNA, 19 nt, Artificial Sequence
  Description of Artificial Sequence: Synthetic oligonucleotide
ggugugcccaccuccaugg

SEQ ID NO: 2136538 - RNA, 19 nt, Artificial Sequence
  Description of Artificial Sequence: Synthetic oligonucleotide
aaacgucagcgccuccaag

SEQ ID NO: 2136539 - RNA, 19 nt, Artificial Sequence
  Description of Artificial Sequence: Synthetic oligonucleotide
uguggggcgaagucugcag

SEQ ID NO: 2136540 - RNA, 19 nt, Artificial Sequence
  Description of Artificial Sequence: Synthetic oligonucleotide
ugaggacccgguaucggca

SEQ ID NO: 2136541 - RNA, 19 nt, Artificial Sequence
  Description of Artificial Sequence: Synthetic oligonucleotide
caucugggaucugaggugg

SEQ ID NO: 2136542 - RNA, 19 nt, Artificial Sequence
  Description of Artificial Sequence: Synthetic oligonucleotide
uuccguguuuucuucuucu

SEQ ID NO: 2136543 - RNA, 19 nt, Artificial Sequence
  Description of Artificial Sequence: Synthetic oligonucleotide
auuauccuuaagcuuccau

SEQ ID NO: 2136544 - RNA, 19 nt, Artificial Sequence
  Description of Artificial Sequence: Synthetic oligonucleotide
uucucuguguagccucacc

SEQ ID NO: 2136545 - RNA, 19 nt, Artificial Sequence
  Description of Artificial Sequence: Synthetic oligonucleotide
agagagaggcacacgccgc

SEQ ID NO: 2136546 - RNA, 19 nt, Artificial Sequence
  Description of Artificial Sequence: Synthetic oligonucleotide
ugagccagagagaggcaca

SEQ ID NO: 2136547 - RNA, 19 nt, Artificial Sequence
  Description of Artificial Sequence: Synthetic oligonucleotide
ucuguugacgaggccagca

SEQ ID NO: 2136548 - RNA, 19 nt, Artificial Sequence
  Description of Artificial Sequence: Synthetic oligonucleotide
ugacgaggccagcagggug

SEQ ID NO: 2136549 - RNA, 19 nt, Artificial Sequence
  Description of Artificial Sequence: Synthetic oligonucleotide
ugacugagagccagacaug

SEQ ID NO: 2136550 - RNA, 19 nt, Artificial Sequence
  Description of Artificial Sequence: Synthetic oligonucleotide
caggcuugugggaaugggc

SEQ ID NO: 2136551 - RNA, 19 nt, Artificial Sequence
  Description of Artificial Sequence: Synthetic oligonucleotide
gaaugggcugcagagggac

SEQ ID NO: 2136552 - RNA, 19 nt, Artificial Sequence
  Description of Artificial Sequence: Synthetic oligonucleotide
cuccugggguuccacagcg

SEQ ID NO: 2136553 - RNA, 19 nt, Artificial Sequence
  Description of Artificial Sequence: Synthetic oligonucleotide
acauggugcccuccgccac

SEQ ID NO: 2136554 - RNA, 19 nt, Artificial Sequence
  Description of Artificial Sequence: Synthetic oligonucleotide
guucauuucuaggccaccc

SEQ ID NO: 2136555 - RNA, 19 nt, Artificial Sequence
  Description of Artificial Sequence: Synthetic oligonucleotide
gcccuuaacagucuuugag

SEQ ID NO: 2136556 - RNA, 19 nt, Artificial Sequence
  Description of Artificial Sequence: Synthetic oligonucleotide
caugacugacccaggcccc

SEQ ID NO: 2136557 - RNA, 19 nt, Artificial Sequence
  Description of Artificial Sequence: Synthetic oligonucleotide
ugaacugggugaccucaga

SEQ ID NO: 2136558 - RNA, 19 nt, Artificial Sequence
  Description of Artificial Sequence: Synthetic oligonucleotide
gguaucggcaccucuugcc

SEQ ID NO: 2136559 - RNA, 19 nt, Artificial Sequence
  Description of Artificial Sequence: Synthetic oligonucleotide
gacaccguagcugccucgg

SEQ ID NO: 2136560 - RNA, 19 nt, Artificial Sequence
  Description of Artificial Sequence: Synthetic oligonucleotide
ccaugacugacccaggccc

SEQ ID NO: 2136561 - RNA, 19 nt, Artificial Sequence
  Description of Artificial Sequence: Synthetic oligonucleotide
cgaccugugacugagagcc

SEQ ID NO: 2136562 - RNA, 19 nt, Artificial Sequence
  Description of Artificial Sequence: Synthetic oligonucleotide
acagcgaccugugacugag

SEQ ID NO: 2136563 - RNA, 19 nt, Artificial Sequence
  Description of Artificial Sequence: Synthetic oligonucleotide
ccuuaagcuuccauugggg

SEQ ID NO: 2136564 - RNA, 19 nt, Artificial Sequence
  Description of Artificial Sequence: Synthetic oligonucleotide
uggcugaggccucuucgag

SEQ ID NO: 2136565 - RNA, 19 nt, Artificial Sequence
  Description of Artificial Sequence: Synthetic oligonucleotide
aucggcaccucuugccauc

SEQ ID NO: 2136566 - RNA, 19 nt, Artificial Sequence
  Description of Artificial Sequence: Synthetic oligonucleotide
gauccgagucuggagacac

SEQ ID NO: 2136567 - RNA, 19 nt, Artificial Sequence
  Description of Artificial Sequence: Synthetic oligonucleotide
cacuguggggcgaagucug

SEQ ID NO: 2136568 - RNA, 19 nt, Artificial Sequence
  Description of Artificial Sequence: Synthetic oligonucleotide
gugaggacccgguaucggc

SEQ ID NO: 2136569 - RNA, 19 nt, Artificial Sequence
  Description of Artificial Sequence: Synthetic oligonucleotide
uguucauuucuaggccacc

SEQ ID NO: 2136570 - RNA, 19 nt, Artificial Sequence
  Description of Artificial Sequence: Synthetic oligonucleotide
cucggauaagccacacuuc

SEQ ID NO: 2136571 - RNA, 19 nt, Artificial Sequence
  Description of Artificial Sequence: Synthetic oligonucleotide
ugugaccgcuccagggagc

SEQ ID NO: 2136572 - RNA, 19 nt, Artificial Sequence
  Description of Artificial Sequence: Synthetic oligonucleotide
uggugaggacccgguaucg

SEQ ID NO: 2136573 - RNA, 19 nt, Artificial Sequence
  Description of Artificial Sequence: Synthetic oligonucleotide
aaggcccuccauuauccuu

SEQ ID NO: 2136574 - RNA, 19 nt, Artificial Sequence
  Description of Artificial Sequence: Synthetic oligonucleotide
guggggcgaagucugcagg

SEQ ID NO: 2136575 - RNA, 19 nt, Artificial Sequence
  Description of Artificial Sequence: Synthetic oligonucleotide
auggcugaggccucuucga

SEQ ID NO: 2136576 - RNA, 19 nt, Artificial Sequence
  Description of Artificial Sequence: Synthetic oligonucleotide
cuguugacgaggccagcag

SEQ ID NO: 2136577 - RNA, 19 nt, Artificial Sequence
  Description of Artificial Sequence: Synthetic oligonucleotide
ggcaggagaaccgagcggc

SEQ ID NO: 2136578 - RNA, 19 nt, Artificial Sequence
  Description of Artificial Sequence: Synthetic oligonucleotide
gacauggugcccuccgcca

SEQ ID NO: 2136579 - RNA, 19 nt, Artificial Sequence
  Description of Artificial Sequence: Synthetic oligonucleotide
ugccucggccugaaacccg

SEQ ID NO: 2136580 - RNA, 19 nt, Artificial Sequence
  Description of Artificial Sequence: Synthetic oligonucleotide
gcggccuuaggccaucugg

SEQ ID NO: 2136581 - RNA, 19 nt, Artificial Sequence
  Description of Artificial Sequence: Synthetic oligonucleotide
agagaggcacacgccgccc

SEQ ID NO: 2136582 - RNA, 19 nt, Artificial Sequence
  Description of Artificial Sequence: Synthetic oligonucleotide
ugacuggagggcugccucc

SEQ ID NO: 2136583 - RNA, 19 nt, Artificial Sequence
  Description of Artificial Sequence: Synthetic oligonucleotide
gauaagccacacuucugua

SEQ ID NO: 2136584 - RNA, 19 nt, Artificial Sequence
  Description of Artificial Sequence: Synthetic oligonucleotide
gagagacgcgaaauucuug

SEQ ID NO: 2136585 - RNA, 19 nt, Artificial Sequence
  Description of Artificial Sequence: Synthetic oligonucleotide
guaucggcaccucuugcca

SEQ ID NO: 2136586 - RNA, 19 nt, Artificial Sequence
  Description of Artificial Sequence: Synthetic oligonucleotide
uggcuccaccaccaaauuc

SEQ ID NO: 2136587 - RNA, 19 nt, Artificial Sequence
  Description of Artificial Sequence: Synthetic oligonucleotide
cugugaccgcuccagggag

SEQ ID NO: 2136588 - RNA, 19 nt, Artificial Sequence
  Description of Artificial Sequence: Synthetic oligonucleotide
ucccugaacugggugaccu

SEQ ID NO: 2136589 - RNA, 19 nt, Artificial Sequence
  Description of Artificial Sequence: Synthetic oligonucleotide
aggacccgguaucggcacc

SEQ ID NO: 2136590 - RNA, 19 nt, Artificial Sequence
  Description of Artificial Sequence: Synthetic oligonucleotide
uucucuucuuggugggguc

SEQ ID NO: 2136591 - RNA, 19 nt, Artificial Sequence
  Description of Artificial Sequence: Synthetic oligonucleotide
agaaccgagcggcacccga

SEQ ID NO: 2136592 - RNA, 19 nt, Artificial Sequence
  Description of Artificial Sequence: Synthetic oligonucleotide
gaaccgcggccuuaggcca

SEQ ID NO: 2136593 - RNA, 19 nt, Artificial Sequence
  Description of Artificial Sequence: Synthetic oligonucleotide
ugcccuuaacagucuuuga

SEQ ID NO: 2136594 - RNA, 19 nt, Artificial Sequence
  Description of Artificial Sequence: Synthetic oligonucleotide
acgucagcgccuccaagga

SEQ ID NO: 2136595 - RNA, 19 nt, Artificial Sequence
  Description of Artificial Sequence: Synthetic oligonucleotide
ggauaagccacacuucugu

SEQ ID NO: 2136596 - RNA, 19 nt, Artificial Sequence
  Description of Artificial Sequence: Synthetic oligonucleotide
cucuguguagccucaccca

SEQ ID NO: 2136597 - RNA, 19 nt, Artificial Sequence
  Description of Artificial Sequence: Synthetic oligonucleotide
cccuucaggauucuccugc

SEQ ID NO: 2136598 - RNA, 19 nt, Artificial Sequence
  Description of Artificial Sequence: Synthetic oligonucleotide
aacccguguucugaaaguu

SEQ ID NO: 2136599 - RNA, 19 nt, Artificial Sequence
  Description of Artificial Sequence: Synthetic oligonucleotide
ugggugaccucagagccau

SEQ ID NO: 2136600 - RNA, 19 nt, Artificial Sequence
  Description of Artificial Sequence: Synthetic oligonucleotide
gaccgcuccagggagcccc

SEQ ID NO: 2136601 - RNA, 19 nt, Artificial Sequence
  Description of Artificial Sequence: Synthetic oligonucleotide
ucggccugaaacccguguu

SEQ ID NO: 2136602 - RNA, 19 nt, Artificial Sequence
  Description of Artificial Sequence: Synthetic oligonucleotide
gaaacgucagcgccuccaa

SEQ ID NO: 2136603 - RNA, 19 nt, Artificial Sequence
  Description of Artificial Sequence: Synthetic oligonucleotide
augacugacccaggccccg

SEQ ID NO: 2136604 - RNA, 19 nt, Artificial Sequence
  Description of Artificial Sequence: Synthetic oligonucleotide
gccacacuucuguaucugg

SEQ ID NO: 2136605 - RNA, 19 nt, Artificial Sequence
  Description of Artificial Sequence: Synthetic oligonucleotide
gaaccgagcggcacccgag

SEQ ID NO: 2136606 - RNA, 19 nt, Artificial Sequence
  Description of Artificial Sequence: Synthetic oligonucleotide
agggcugccuccaaaggca

SEQ ID NO: 2136607 - RNA, 19 nt, Artificial Sequence
  Description of Artificial Sequence: Synthetic oligonucleotide
acccguguucugaaaguuc

SEQ ID NO: 2136608 - RNA, 19 nt, Artificial Sequence
  Description of Artificial Sequence: Synthetic oligonucleotide
ucccgccugccucuguuga

SEQ ID NO: 2136609 - RNA, 19 nt, Artificial Sequence
  Description of Artificial Sequence: Synthetic oligonucleotide
caaauucugccucuucucu

SEQ ID NO: 2136610 - RNA, 19 nt, Artificial Sequence
  Description of Artificial Sequence: Synthetic oligonucleotide
cagguuccguguuuucuuc

SEQ ID NO: 2136611 - RNA, 19 nt, Artificial Sequence
  Description of Artificial Sequence: Synthetic oligonucleotide
ccauuauccuuaagcuucc

SEQ ID NO: 2136612 - RNA, 19 nt, Artificial Sequence
  Description of Artificial Sequence: Synthetic oligonucleotide
agguuccguguuuucuucu

SEQ ID NO: 2136613 - RNA, 19 nt, Artificial Sequence
  Description of Artificial Sequence: Synthetic oligonucleotide
cuccauggccccgugcccg

SEQ ID NO: 2136614 - RNA, 19 nt, Artificial Sequence
  Description of Artificial Sequence: Synthetic oligonucleotide
agagaaccgcggccuuagg

SEQ ID NO: 2136615 - RNA, 19 nt, Artificial Sequence
  Description of Artificial Sequence: Synthetic oligonucleotide
ggagggcugccuccaaagg

SEQ ID NO: 2136616 - RNA, 19 nt, Artificial Sequence
  Description of Artificial Sequence: Synthetic oligonucleotide
cagagaaccgcggccuuag

SEQ ID NO: 2136617 - RNA, 19 nt, Artificial Sequence
  Description of Artificial Sequence: Synthetic oligonucleotide
cagagggacccgagagacg

SEQ ID NO: 2136618 - RNA, 19 nt, Artificial Sequence
  Description of Artificial Sequence: Synthetic oligonucleotide
uaucggcaccucuugccau

SEQ ID NO: 2136619 - RNA, 19 nt, Artificial Sequence
  Description of Artificial Sequence: Synthetic oligonucleotide
uuucccgccugccucuguu

SEQ ID NO: 2136620 - RNA, 19 nt, Artificial Sequence
  Description of Artificial Sequence: Synthetic oligonucleotide
cauccaguuugcccuuaac

SEQ ID NO: 2136621 - RNA, 19 nt, Artificial Sequence
  Description of Artificial Sequence: Synthetic oligonucleotide
gagacgcgaaauucuugaa

SEQ ID NO: 2136622 - RNA, 19 nt, Artificial Sequence
  Description of Artificial Sequence: Synthetic oligonucleotide
ccuuaggccaucugggauc

SEQ ID NO: 2136623 - RNA, 19 nt, Artificial Sequence
  Description of Artificial Sequence: Synthetic oligonucleotide
gugagauggcuuccuccug

SEQ ID NO: 2136624 - RNA, 19 nt, Artificial Sequence
  Description of Artificial Sequence: Synthetic oligonucleotide
ucaggcucugugaccgcuc

SEQ ID NO: 2136625 - RNA, 19 nt, Artificial Sequence
  Description of Artificial Sequence: Synthetic oligonucleotide
gagccagagagaggcacac

SEQ ID NO: 2136626 - RNA, 19 nt, Artificial Sequence
  Description of Artificial Sequence: Synthetic oligonucleotide
ggcaccucuugccauccag

SEQ ID NO: 2136627 - RNA, 19 nt, Artificial Sequence
  Description of Artificial Sequence: Synthetic oligonucleotide
cgagucuggagacaccgcg

SEQ ID NO: 2136628 - RNA, 19 nt, Artificial Sequence
  Description of Artificial Sequence: Synthetic oligonucleotide
uccguguuuucuucuucuu

SEQ ID NO: 2136629 - RNA, 19 nt, Artificial Sequence
  Description of Artificial Sequence: Synthetic oligonucleotide
ggggauccgagucuggaga

SEQ ID NO: 2136630 - RNA, 19 nt, Artificial Sequence
  Description of Artificial Sequence: Synthetic oligonucleotide
acugacccaggccccguga

SEQ ID NO: 2136631 - RNA, 19 nt, Artificial Sequence
  Description of Artificial Sequence: Synthetic oligonucleotide
ggcgcaggugaguuucccg

SEQ ID NO: 2136632 - RNA, 19 nt, Artificial Sequence
  Description of Artificial Sequence: Synthetic oligonucleotide
agacaccgcggugaaguug

SEQ ID NO: 2136633 - RNA, 19 nt, Artificial Sequence
  Description of Artificial Sequence: Synthetic oligonucleotide
cacccgaggccugugggcc

SEQ ID NO: 2136634 - RNA, 19 nt, Artificial Sequence
  Description of Artificial Sequence: Synthetic oligonucleotide
gcgcaggugaguuucccgc

SEQ ID NO: 2136635 - RNA, 19 nt, Artificial Sequence
  Description of Artificial Sequence: Synthetic oligonucleotide
uugacgaggccagcagggu

SEQ ID NO: 2136636 - RNA, 19 nt, Artificial Sequence
  Description of Artificial Sequence: Synthetic oligonucleotide
ugaggccucuucgagcuuu

SEQ ID NO: 2136637 - RNA, 19 nt, Artificial Sequence
  Description of Artificial Sequence: Synthetic oligonucleotide
gccaugacugacccaggcc

SEQ ID NO: 2136638 - RNA, 19 nt, Artificial Sequence
  Description of Artificial Sequence: Synthetic oligonucleotide
ccucuguugacgaggccag

SEQ ID NO: 2136639 - RNA, 19 nt, Artificial Sequence
  Description of Artificial Sequence: Synthetic oligonucleotide
ggcacccgaggccuguggg

SEQ ID NO: 2136640 - RNA, 19 nt, Artificial Sequence
  Description of Artificial Sequence: Synthetic oligonucleotide
gugaccgcuccagggagcc

SEQ ID NO: 2136641 - RNA, 19 nt, Artificial Sequence
  Description of Artificial Sequence: Synthetic oligonucleotide
auccgagucuggagacacc

SEQ ID NO: 2136642 - RNA, 19 nt, Artificial Sequence
  Description of Artificial Sequence: Synthetic oligonucleotide
cugaaacccguguucugaa

SEQ ID NO: 2136643 - RNA, 19 nt, Artificial Sequence
  Description of Artificial Sequence: Synthetic oligonucleotide
ucggcaccucuugccaucc

SEQ ID NO: 2136644 - RNA, 19 nt, Artificial Sequence
  Description of Artificial Sequence: Synthetic oligonucleotide
uggaaacgucagcgccucc

SEQ ID NO: 2136645 - RNA, 19 nt, Artificial Sequence
  Description of Artificial Sequence: Synthetic oligonucleotide
gacugacccaggccccgug

SEQ ID NO: 2136646 - RNA, 19 nt, Artificial Sequence
  Description of Artificial Sequence: Synthetic oligonucleotide
cgcgaaauucuugaaggcc

SEQ ID NO: 2136647 - RNA, 19 nt, Artificial Sequence
  Description of Artificial Sequence: Synthetic oligonucleotide
ugccucuguugacgaggcc

SEQ ID NO: 2136648 - RNA, 19 nt, Artificial Sequence
  Description of Artificial Sequence: Synthetic oligonucleotide
gcucggauaagccacacuu

SEQ ID NO: 2136649 - RNA, 19 nt, Artificial Sequence
  Description of Artificial Sequence: Synthetic oligonucleotide
uccugggguuccacagcga

SEQ ID NO: 2136650 - RNA, 19 nt, Artificial Sequence
  Description of Artificial Sequence: Synthetic oligonucleotide
cccguguucugaaaguuca

SEQ ID NO: 2136651 - RNA, 19 nt, Artificial Sequence
  Description of Artificial Sequence: Synthetic oligonucleotide
ggugaggacccgguaucgg

SEQ ID NO: 2136652 - RNA, 19 nt, Artificial Sequence
  Description of Artificial Sequence: Synthetic oligonucleotide
ggagaaccgagcggcaccc

SEQ ID NO: 2136653 - RNA, 19 nt, Artificial Sequence
  Description of Artificial Sequence: Synthetic oligonucleotide
ggagacaccgcggugaagu

SEQ ID NO: 2136654 - RNA, 19 nt, Artificial Sequence
  Description of Artificial Sequence: Synthetic oligonucleotide
ggugaccucagagccauga

SEQ ID NO: 2136655 - RNA, 19 nt, Artificial Sequence
  Description of Artificial Sequence: Synthetic oligonucleotide
acccgagagacgcgaaauu

SEQ ID NO: 2136656 - RNA, 19 nt, Artificial Sequence
  Description of Artificial Sequence: Synthetic oligonucleotide
ugcuggugaggacccggua

SEQ ID NO: 2136657 - RNA, 19 nt, Artificial Sequence
  Description of Artificial Sequence: Synthetic oligonucleotide
aguuugcccuuaacagucu

SEQ ID NO: 2136658 - RNA, 19 nt, Artificial Sequence
  Description of Artificial Sequence: Synthetic oligonucleotide
ggacaccguagcugccucg

SEQ ID NO: 2136659 - RNA, 19 nt, Artificial Sequence
  Description of Artificial Sequence: Synthetic oligonucleotide
gccucuguugacgaggcca

SEQ ID NO: 2136660 - RNA, 19 nt, Artificial Sequence
  Description of Artificial Sequence: Synthetic oligonucleotide
ugcccguccacugccuccu

SEQ ID NO: 2136661 - RNA, 19 nt, Artificial Sequence
  Description of Artificial Sequence: Synthetic oligonucleotide
gagaaccgagcggcacccg

SEQ ID NO: 2136662 - RNA, 19 nt, Artificial Sequence
  Description of Artificial Sequence: Synthetic oligonucleotide
gggcgaagucugcaggggc

SEQ ID NO: 2136663 - RNA, 19 nt, Artificial Sequence
  Description of Artificial Sequence: Synthetic oligonucleotide
aggcccuccauuauccuua

SEQ ID NO: 2136664 - RNA, 19 nt, Artificial Sequence
  Description of Artificial Sequence: Synthetic oligonucleotide
agggacccgagagacgcga

SEQ ID NO: 2136665 - RNA, 19 nt, Artificial Sequence
  Description of Artificial Sequence: Synthetic oligonucleotide
cggccuuaggccaucuggg

SEQ ID NO: 2136666 - RNA, 19 nt, Artificial Sequence
  Description of Artificial Sequence: Synthetic oligonucleotide
gagggacccgagagacgcg

SEQ ID NO: 2136667 - RNA, 19 nt, Artificial Sequence
  Description of Artificial Sequence: Synthetic oligonucleotide
gggugugcccaccuccaug

SEQ ID NO: 2136668 - RNA, 19 nt, Artificial Sequence
  Description of Artificial Sequence: Synthetic oligonucleotide
cugggugaccucagagcca

SEQ ID NO: 2136669 - RNA, 19 nt, Artificial Sequence
  Description of Artificial Sequence: Synthetic oligonucleotide
gaguuucccgccugccucu

SEQ ID NO: 2136670 - RNA, 19 nt, Artificial Sequence
  Description of Artificial Sequence: Synthetic oligonucleotide
ccguguuuucuucuucuuc

SEQ ID NO: 2136671 - RNA, 19 nt, Artificial Sequence
  Description of Artificial Sequence: Synthetic oligonucleotide
gggaucugagguggcaggc

SEQ ID NO: 2136672 - RNA, 19 nt, Artificial Sequence
  Description of Artificial Sequence: Synthetic oligonucleotide
uccauggccccgugcccgu

SEQ ID NO: 2136673 - RNA, 19 nt, Artificial Sequence
  Description of Artificial Sequence: Synthetic oligonucleotide
gacagugagauggcuuccu

SEQ ID NO: 2136674 - RNA, 19 nt, Artificial Sequence
  Description of Artificial Sequence: Synthetic oligonucleotide
acccgguaucggcaccucu

SEQ ID NO: 2136675 - RNA, 19 nt, Artificial Sequence
  Description of Artificial Sequence: Synthetic oligonucleotide
gacuggagggcugccucca

SEQ ID NO: 2136676 - RNA, 19 nt, Artificial Sequence
  Description of Artificial Sequence: Synthetic oligonucleotide
gccucacccagccacuuuc

SEQ ID NO: 2136677 - RNA, 19 nt, Artificial Sequence
  Description of Artificial Sequence: Synthetic oligonucleotide
ggggcgaagucugcagggg

SEQ ID NO: 2136678 - RNA, 19 nt, Artificial Sequence
  Description of Artificial Sequence: Synthetic oligonucleotide
caccgcggugaaguugggg

SEQ ID NO: 2136679 - RNA, 19 nt, Artificial Sequence
  Description of Artificial Sequence: Synthetic oligonucleotide
uugaggcacuguggggcga

SEQ ID NO: 2136680 - RNA, 19 nt, Artificial Sequence
  Description of Artificial Sequence: Synthetic oligonucleotide
gcgaccugugacugagagc

SEQ ID NO: 2136681 - RNA, 19 nt, Artificial Sequence
  Description of Artificial Sequence: Synthetic oligonucleotide
guuccacagcgaccuguga

SEQ ID NO: 2136682 - RNA, 19 nt, Artificial Sequence
  Description of Artificial Sequence: Synthetic oligonucleotide
cucuguugacgaggccagc

SEQ ID NO: 2136683 - RNA, 19 nt, Artificial Sequence
  Description of Artificial Sequence: Synthetic oligonucleotide
cacccagccacuuuccuuu

SEQ ID NO: 2136684 - RNA, 19 nt, Artificial Sequence
  Description of Artificial Sequence: Synthetic oligonucleotide
gagccccgccucuggcucc

SEQ ID NO: 2136685 - RNA, 19 nt, Artificial Sequence
  Description of Artificial Sequence: Synthetic oligonucleotide
ugccauccaguuugcccuu

SEQ ID NO: 2136686 - RNA, 19 nt, Artificial Sequence
  Description of Artificial Sequence: Synthetic oligonucleotide
ccugaaacccguguucuga

SEQ ID NO: 2136687 - RNA, 19 nt, Artificial Sequence
  Description of Artificial Sequence: Synthetic oligonucleotide
ggccuuaggccaucuggga

SEQ ID NO: 2136688 - RNA, 19 nt, Artificial Sequence
  Description of Artificial Sequence: Synthetic oligonucleotide
ccguguucugaaaguucag

SEQ ID NO: 2136689 - RNA, 19 nt, Artificial Sequence
  Description of Artificial Sequence: Synthetic oligonucleotide
cuucuguaucuggaaacgu

SEQ ID NO: 2136690 - RNA, 19 nt, Artificial Sequence
  Description of Artificial Sequence: Synthetic oligonucleotide
cuuaggccaucugggaucu

SEQ ID NO: 2136691 - RNA, 19 nt, Artificial Sequence
  Description of Artificial Sequence: Synthetic oligonucleotide
gcacccgaggccugugggc

SEQ ID NO: 2136692 - RNA, 19 nt, Artificial Sequence
  Description of Artificial Sequence: Synthetic oligonucleotide
ggcaggcuugugggaaugg

SEQ ID NO: 2136693 - RNA, 19 nt, Artificial Sequence
  Description of Artificial Sequence: Synthetic oligonucleotide
ugacugacccaggccccgu

SEQ ID NO: 2136694 - RNA, 19 nt, Artificial Sequence
  Description of Artificial Sequence: Synthetic oligonucleotide
gccugaaacccguguucug

SEQ ID NO: 2136695 - RNA, 19 nt, Artificial Sequence
  Description of Artificial Sequence: Synthetic oligonucleotide
cuugaaggcccuccauuau

SEQ ID NO: 2136696 - RNA, 19 nt, Artificial Sequence
  Description of Artificial Sequence: Synthetic oligonucleotide
ccaguuugcccuuaacagu

SEQ ID NO: 2136697 - RNA, 19 nt, Artificial Sequence
  Description of Artificial Sequence: Synthetic oligonucleotide
cacgccgcccauugaggca

SEQ ID NO: 2136698 - RNA, 19 nt, Artificial Sequence
  Description of Artificial Sequence: Synthetic oligonucleotide
cuugugggaaugggcugca

SEQ ID NO: 2136699 - RNA, 19 nt, Artificial Sequence
  Description of Artificial Sequence: Synthetic oligonucleotide
caccuccauggccccgugc

SEQ ID NO: 2136700 - RNA, 19 nt, Artificial Sequence
  Description of Artificial Sequence: Synthetic oligonucleotide
aguuucccgccugccucug

SEQ ID NO: 2136701 - RNA, 19 nt, Artificial Sequence
  Description of Artificial Sequence: Synthetic oligonucleotide
caccccagggugugcccac

SEQ ID NO: 2136702 - RNA, 19 nt, Artificial Sequence
  Description of Artificial Sequence: Synthetic oligonucleotide
cauuauccuuaagcuucca

SEQ ID NO: 2136703 - RNA, 19 nt, Artificial Sequence
  Description of Artificial Sequence: Synthetic oligonucleotide
auggccccgugcccgucca

SEQ ID NO: 2136704 - RNA, 19 nt, Artificial Sequence
  Description of Artificial Sequence: Synthetic oligonucleotide
cgcccauugaggcacugug

SEQ ID NO: 2136705 - RNA, 19 nt, Artificial Sequence
  Description of Artificial Sequence: Synthetic oligonucleotide
uccaucccuucaggauucu

SEQ ID NO: 2136706 - RNA, 19 nt, Artificial Sequence
  Description of Artificial Sequence: Synthetic oligonucleotide
ccgguaucggcaccucuug

SEQ ID NO: 2136707 - RNA, 19 nt, Artificial Sequence
  Description of Artificial Sequence: Synthetic oligonucleotide
gcgccuccaaggagaaacg

SEQ ID NO: 2136708 - RNA, 19 nt, Artificial Sequence
  Description of Artificial Sequence: Synthetic oligonucleotide
cucuggcuccaccaccaaa

SEQ ID NO: 2136709 - RNA, 19 nt, Artificial Sequence
  Description of Artificial Sequence: Synthetic oligonucleotide
agccucacccagccacuuu

SEQ ID NO: 2136710 - RNA, 19 nt, Artificial Sequence
  Description of Artificial Sequence: Synthetic oligonucleotide
ccgccugccucuguugacg

SEQ ID NO: 2136711 - RNA, 19 nt, Artificial Sequence
  Description of Artificial Sequence: Synthetic oligonucleotide
cgcaggugaguuucccgcc

SEQ ID NO: 2136712 - RNA, 19 nt, Artificial Sequence
  Description of Artificial Sequence: Synthetic oligonucleotide
ccgagcggcacccgaggcc

SEQ ID NO: 2136713 - RNA, 19 nt, Artificial Sequence
  Description of Artificial Sequence: Synthetic oligonucleotide
ccgagucuggagacaccgc

SEQ ID NO: 2136714 - RNA, 19 nt, Artificial Sequence
  Description of Artificial Sequence: Synthetic oligonucleotide
accgcggccuuaggccauc

SEQ ID NO: 2136715 - RNA, 19 nt, Artificial Sequence
  Description of Artificial Sequence: Synthetic oligonucleotide
cuguggggcgaagucugca

SEQ ID NO: 2136716 - RNA, 19 nt, Artificial Sequence
  Description of Artificial Sequence: Synthetic oligonucleotide
ugaccgcuccagggagccc

SEQ ID NO: 2136717 - RNA, 19 nt, Artificial Sequence
  Description of Artificial Sequence: Synthetic oligonucleotide
cccgugcccguccacugcc

SEQ ID NO: 2136718 - RNA, 19 nt, Artificial Sequence
  Description of Artificial Sequence: Synthetic oligonucleotide
aaccgcggccuuaggccau

SEQ ID NO: 2136719 - RNA, 19 nt, Artificial Sequence
  Description of Artificial Sequence: Synthetic oligonucleotide
uagccucacccagccacuu

SEQ ID NO: 2136720 - RNA, 19 nt, Artificial Sequence
  Description of Artificial Sequence: Synthetic oligonucleotide
cuaggccaccccagggugu

SEQ ID NO: 2136721 - RNA, 19 nt, Artificial Sequence
  Description of Artificial Sequence: Synthetic oligonucleotide
ccuccauggccccgugccc

SEQ ID NO: 2136722 - RNA, 19 nt, Artificial Sequence
  Description of Artificial Sequence: Synthetic oligonucleotide
guagcugccucggccugaa

SEQ ID NO: 2136723 - RNA, 19 nt, Artificial Sequence
  Description of Artificial Sequence: Synthetic oligonucleotide
ccgagagacgcgaaauucu

SEQ ID NO: 2136724 - RNA, 19 nt, Artificial Sequence
  Description of Artificial Sequence: Synthetic oligonucleotide
cucggccugaaacccgugu

SEQ ID NO: 2136725 - RNA, 19 nt, Artificial Sequence
  Description of Artificial Sequence: Synthetic oligonucleotide
ggacccgagagacgcgaaa

SEQ ID NO: 2136726 - RNA, 19 nt, Artificial Sequence
  Description of Artificial Sequence: Synthetic oligonucleotide
ggaaugggcugcagaggga

SEQ ID NO: 2136727 - RNA, 19 nt, Artificial Sequence
  Description of Artificial Sequence: Synthetic oligonucleotide
ccacagcgaccugugacug

SEQ ID NO: 2136728 - RNA, 19 nt, Artificial Sequence
  Description of Artificial Sequence: Synthetic oligonucleotide
gaccugugacugagagcca

SEQ ID NO: 2136729 - RNA, 19 nt, Artificial Sequence
  Description of Artificial Sequence: Synthetic oligonucleotide
ggauccgagucuggagaca

SEQ ID NO: 2136730 - RNA, 19 nt, Artificial Sequence
  Description of Artificial Sequence: Synthetic oligonucleotide
guagccucacccagccacu

SEQ ID NO: 2136731 - RNA, 19 nt, Artificial Sequence
  Description of Artificial Sequence: Synthetic oligonucleotide
cucacccagccacuuuccu

SEQ ID NO: 2136732 - RNA, 19 nt, Artificial Sequence
  Description of Artificial Sequence: Synthetic oligonucleotide
gagacaccgcggugaaguu

SEQ ID NO: 2136733 - RNA, 19 nt, Artificial Sequence
  Description of Artificial Sequence: Synthetic oligonucleotide
acaccgcggugaaguuggg

SEQ ID NO: 2136734 - RNA, 19 nt, Artificial Sequence
  Description of Artificial Sequence: Synthetic oligonucleotide
gccuuaggccaucugggau

SEQ ID NO: 2136735 - RNA, 19 nt, Artificial Sequence
  Description of Artificial Sequence: Synthetic oligonucleotide
cgguaucggcaccucuugc

SEQ ID NO: 2136736 - RNA, 19 nt, Artificial Sequence
  Description of Artificial Sequence: Synthetic oligonucleotide
gacccgguaucggcaccuc

SEQ ID NO: 2136737 - RNA, 19 nt, Artificial Sequence
  Description of Artificial Sequence: Synthetic oligonucleotide
gcgaagucugcaggggcuc

SEQ ID NO: 2136738 - RNA, 19 nt, Artificial Sequence
  Description of Artificial Sequence: Synthetic oligonucleotide
cugcaggggcucggauaag

SEQ ID NO: 2136739 - RNA, 19 nt, Artificial Sequence
  Description of Artificial Sequence: Synthetic oligonucleotide
cgaagucugcaggggcucg

SEQ ID NO: 2136740 - RNA, 19 nt, Artificial Sequence
  Description of Artificial Sequence: Synthetic oligonucleotide
cugcuggugaggacccggu

SEQ ID NO: 2136741 - RNA, 19 nt, Artificial Sequence
  Description of Artificial Sequence: Synthetic oligonucleotide
cggccugaaacccguguuc

SEQ ID NO: 2136742 - RNA, 19 nt, Artificial Sequence
  Description of Artificial Sequence: Synthetic oligonucleotide
ggcgaagucugcaggggcu

SEQ ID NO: 2136743 - RNA, 19 nt, Artificial Sequence
  Description of Artificial Sequence: Synthetic oligonucleotide
guggcaggcuugugggaau

SEQ ID NO: 2136744 - RNA, 19 nt, Artificial Sequence
  Description of Artificial Sequence: Synthetic oligonucleotide
cgucagcgccuccaaggag

SEQ ID NO: 2136745 - RNA, 19 nt, Artificial Sequence
  Description of Artificial Sequence: Synthetic oligonucleotide
gccccgugcccguccacug

SEQ ID NO: 2136746 - RNA, 19 nt, Artificial Sequence
  Description of Artificial Sequence: Synthetic oligonucleotide
gccaccccagggugugccc

SEQ ID NO: 2136747 - RNA, 19 nt, Artificial Sequence
  Description of Artificial Sequence: Synthetic oligonucleotide
uggccccgugcccguccac

SEQ ID NO: 2136748 - RNA, 19 nt, Artificial Sequence
  Description of Artificial Sequence: Synthetic oligonucleotide
gccagacauggugcccucc

SEQ ID NO: 2136749 - RNA, 19 nt, Artificial Sequence
  Description of Artificial Sequence: Synthetic oligonucleotide
cgaaauucuugaaggcccu

SEQ ID NO: 2136750 - RNA, 19 nt, Artificial Sequence
  Description of Artificial Sequence: Synthetic oligonucleotide
cugaauggcugaggccucu

SEQ ID NO: 2136751 - RNA, 19 nt, Artificial Sequence
  Description of Artificial Sequence: Synthetic oligonucleotide
ccuccaucccuucaggauu

SEQ ID NO: 2136752 - RNA, 19 nt, Artificial Sequence
  Description of Artificial Sequence: Synthetic oligonucleotide
gcacuguggggcgaagucu

SEQ ID NO: 2136753 - RNA, 19 nt, Artificial Sequence
  Description of Artificial Sequence: Synthetic oligonucleotide
ggcacacgccgcccauuga

SEQ ID NO: 2136754 - RNA, 19 nt, Artificial Sequence
  Description of Artificial Sequence: Synthetic oligonucleotide
cagcgaccugugacugaga

SEQ ID NO: 2136755 - RNA, 19 nt, Artificial Sequence
  Description of Artificial Sequence: Synthetic oligonucleotide
cccgccugccucuguugac

SEQ ID NO: 2136756 - RNA, 19 nt, Artificial Sequence
  Description of Artificial Sequence: Synthetic oligonucleotide
ccccgugcccguccacugc

SEQ ID NO: 2136757 - RNA, 19 nt, Artificial Sequence
  Description of Artificial Sequence: Synthetic oligonucleotide
gcaggagaaccgagcggca

SEQ ID NO: 2136758 - RNA, 19 nt, Artificial Sequence
  Description of Artificial Sequence: Synthetic oligonucleotide
gcuccagggagccccgccu

SEQ ID NO: 2136759 - RNA, 19 nt, Artificial Sequence
  Description of Artificial Sequence: Synthetic oligonucleotide
ggcccuccauuauccuuaa

SEQ ID NO: 2136760 - RNA, 19 nt, Artificial Sequence
  Description of Artificial Sequence: Synthetic oligonucleotide
cuggcuccaccaccaaauu

SEQ ID NO: 2136761 - RNA, 19 nt, Artificial Sequence
  Description of Artificial Sequence: Synthetic oligonucleotide
ggcucggauaagccacacu

SEQ ID NO: 2136762 - RNA, 19 nt, Artificial Sequence
  Description of Artificial Sequence: Synthetic oligonucleotide
gagcggcacccgaggccug

SEQ ID NO: 2136763 - RNA, 19 nt, Artificial Sequence
  Description of Artificial Sequence: Synthetic oligonucleotide
ggggcucggauaagccaca

SEQ ID NO: 2136764 - RNA, 19 nt, Artificial Sequence
  Description of Artificial Sequence: Synthetic oligonucleotide
gggcucggauaagccacac

SEQ ID NO: 2136765 - RNA, 19 nt, Artificial Sequence
  Description of Artificial Sequence: Synthetic oligonucleotide
ccccgugacuggagggcug

SEQ ID NO: 2136766 - RNA, 19 nt, Artificial Sequence
  Description of Artificial Sequence: Synthetic oligonucleotide
ccguagcugccucggccug

SEQ ID NO: 2136767 - RNA, 19 nt, Artificial Sequence
  Description of Artificial Sequence: Synthetic oligonucleotide
cggggcgcaggugaguuuc

SEQ ID NO: 2136768 - RNA, 19 nt, Artificial Sequence
  Description of Artificial Sequence: Synthetic oligonucleotide
gcaccucuugccauccagu

SEQ ID NO: 2136769 - RNA, 19 nt, Artificial Sequence
  Description of Artificial Sequence: Synthetic oligonucleotide
aggcugcauuuugcccaca

SEQ ID NO: 2136770 - RNA, 19 nt, Artificial Sequence
  Description of Artificial Sequence: Synthetic oligonucleotide
ggggcgcaggugaguuucc

SEQ ID NO: 2136771 - RNA, 19 nt, Artificial Sequence
  Description of Artificial Sequence: Synthetic oligonucleotide
gggagccccgccucuggcu

SEQ ID NO: 2136772 - RNA, 19 nt, Artificial Sequence
  Description of Artificial Sequence: Synthetic oligonucleotide
gcagagaaccgcggccuua

SEQ ID NO: 2136773 - RNA, 19 nt, Artificial Sequence
  Description of Artificial Sequence: Synthetic oligonucleotide
ggacccgguaucggcaccu

SEQ ID NO: 2136774 - RNA, 19 nt, Artificial Sequence
  Description of Artificial Sequence: Synthetic oligonucleotide
ccucggccugaaacccgug

SEQ ID NO: 2136775 - RNA, 19 nt, Artificial Sequence
  Description of Artificial Sequence: Synthetic oligonucleotide
cgagagacgcgaaauucuu

SEQ ID NO: 2136776 - RNA, 19 nt, Artificial Sequence
  Description of Artificial Sequence: Synthetic oligonucleotide
gaggcacacgccgcccauu

SEQ ID NO: 2136777 - RNA, 19 nt, Artificial Sequence
  Description of Artificial Sequence: Synthetic oligonucleotide
cccgguaucggcaccucuu

SEQ ID NO: 2136778 - RNA, 19 nt, Artificial Sequence
  Description of Artificial Sequence: Synthetic oligonucleotide
cgugcccguccacugccuc

SEQ ID NO: 2136779 - RNA, 19 nt, Artificial Sequence
  Description of Artificial Sequence: Synthetic oligonucleotide
cccguccacugccuccuga

SEQ ID NO: 2136780 - RNA, 19 nt, Artificial Sequence
  Description of Artificial Sequence: Synthetic oligonucleotide
ccgugacuggagggcugcc

SEQ ID NO: 2136781 - RNA, 19 nt, Artificial Sequence
  Description of Artificial Sequence: Synthetic oligonucleotide
gccucggccugaaacccgu

SEQ ID NO: 2136782 - RNA, 19 nt, Artificial Sequence
  Description of Artificial Sequence: Synthetic oligonucleotide
ggcagagaaccgcggccuu

SEQ ID NO: 2136783 - RNA, 19 nt, Artificial Sequence
  Description of Artificial Sequence: Synthetic oligonucleotide
gggacccgagagacgcgaa

SEQ ID NO: 2136784 - RNA, 19 nt, Artificial Sequence
  Description of Artificial Sequence: Synthetic oligonucleotide
gccgcccauugaggcacug

SEQ ID NO: 2136785 - RNA, 19 nt, Artificial Sequence
  Description of Artificial Sequence: Synthetic oligonucleotide
cgccugccucuguugacga

SEQ ID NO: 2136786 - RNA, 19 nt, Artificial Sequence
  Description of Artificial Sequence: Synthetic oligonucleotide
ccgccaccuccaucccuuc

SEQ ID NO: 2136787 - RNA, 19 nt, Artificial Sequence
  Description of Artificial Sequence: Synthetic oligonucleotide
gcggcacccgaggccugug

SEQ ID NO: 2136788 - RNA, 19 nt, Artificial Sequence
  Description of Artificial Sequence: Synthetic oligonucleotide
ggccccgugcccguccacu

SEQ ID NO: 2136789 - RNA, 19 nt, Artificial Sequence
  Description of Artificial Sequence: Synthetic oligonucleotide
gccccgugacuggagggcu

SEQ ID NO: 2136790 - RNA, 19 nt, Artificial Sequence
  Description of Artificial Sequence: Synthetic oligonucleotide
cgagcggcacccgaggccu

SEQ ID NO: 2136791 - RNA, 19 nt, Artificial Sequence
  Description of Artificial Sequence: Synthetic oligonucleotide
cgcggccuuaggccaucug

SEQ ID NO: 2136792 - RNA, 19 nt, Artificial Sequence
  Description of Artificial Sequence: Synthetic oligonucleotide
gccauccaguuugcccuua

SEQ ID NO: 2136793 - RNA, 19 nt, Artificial Sequence
  Description of Artificial Sequence: Synthetic oligonucleotide
cugaggccucuucgagcuu

SEQ ID NO: 2136794 - RNA, 19 nt, Artificial Sequence
  Description of Artificial Sequence: Synthetic oligonucleotide
gccggggcgcaggugaguu

SEQ ID NO: 2136795 - RNA, 19 nt, Artificial Sequence
  Description of Artificial Sequence: Synthetic oligonucleotide
cgaggccugugggcccgcc

SEQ ID NO: 2136796 - RNA, 19 nt, Artificial Sequence
  Description of Artificial Sequence: Synthetic oligonucleotide
ccgaggccugugggcccgc

SEQ ID NO: 2136797 - RNA, 19 nt, Artificial Sequence
  Description of Artificial Sequence: Synthetic oligonucleotide
ccccagggugugcccaccu

SEQ ID NO: 2136798 - RNA, 19 nt, Artificial Sequence
  Description of Artificial Sequence: Synthetic oligonucleotide
cguccacugccuccugaau

SEQ ID NO: 2136799 - RNA, 19 nt, Artificial Sequence
  Description of Artificial Sequence: Synthetic oligonucleotide
cggcaccucuugccaucca

SEQ ID NO: 2136800 - RNA, 19 nt, Artificial Sequence
  Description of Artificial Sequence: Synthetic oligonucleotide
ccggggcgcaggugaguuu

SEQ ID NO: 2136801 - RNA, 19 nt, Artificial Sequence
  Description of Artificial Sequence: Synthetic oligonucleotide
gccccgccucuggcuccac

SEQ ID NO: 2136802 - RNA, 19 nt, Artificial Sequence
  Description of Artificial Sequence: Synthetic oligonucleotide
cgccgcccauugaggcacu

SEQ ID NO: 2136803 - RNA, 19 nt, Artificial Sequence
  Description of Artificial Sequence: Synthetic oligonucleotide
ccgcggccuuaggccaucu

SEQ ID NO: 2136804 - RNA, 19 nt, Artificial Sequence
  Description of Artificial Sequence: Synthetic oligonucleotide
aaaguggugaauucuaugg

SEQ ID NO: 2136805 - RNA, 19 nt, Artificial Sequence
  Description of Artificial Sequence: Synthetic oligonucleotide
gaauauagaaaucugacac

SEQ ID NO: 2136806 - RNA, 19 nt, Artificial Sequence
  Description of Artificial Sequence: Synthetic oligonucleotide
aaaacaucgcagaagagcc

SEQ ID NO: 2136807 - RNA, 19 nt, Artificial Sequence
  Description of Artificial Sequence: Synthetic oligonucleotide
auagaaaucugacacugcc

SEQ ID NO: 2136808 - RNA, 19 nt, Artificial Sequence
  Description of Artificial Sequence: Synthetic oligonucleotide
gauuaauuaugauggaggg

SEQ ID NO: 2136809 - RNA, 19 nt, Artificial Sequence
  Description of Artificial Sequence: Synthetic oligonucleotide
acuauaaaugcuuugggag

SEQ ID NO: 2136810 - RNA, 19 nt, Artificial Sequence
  Description of Artificial Sequence: Synthetic oligonucleotide
uuuggcaccaucuucauug

SEQ ID NO: 2136811 - RNA, 19 nt, Artificial Sequence
  Description of Artificial Sequence: Synthetic oligonucleotide
uuuugucacauauaaaagc

SEQ ID NO: 2136812 - RNA, 19 nt, Artificial Sequence
  Description of Artificial Sequence: Synthetic oligonucleotide
uuaauuaugauggaggggu

SEQ ID NO: 2136813 - RNA, 19 nt, Artificial Sequence
  Description of Artificial Sequence: Synthetic oligonucleotide
aguaaaacaucgcagaaga

SEQ ID NO: 2136814 - RNA, 19 nt, Artificial Sequence
  Description of Artificial Sequence: Synthetic oligonucleotide
aaguggugaauucuauggc

SEQ ID NO: 2136815 - RNA, 19 nt, Artificial Sequence
  Description of Artificial Sequence: Synthetic oligonucleotide
uucggagacaggaauauag

SEQ ID NO: 2136816 - RNA, 19 nt, Artificial Sequence
  Description of Artificial Sequence: Synthetic oligonucleotide
ugcugauaaacuuccaagg

SEQ ID NO: 2136817 - RNA, 19 nt, Artificial Sequence
  Description of Artificial Sequence: Synthetic oligonucleotide
uucauuuuacuucuuguca

SEQ ID NO: 2136818 - RNA, 19 nt, Artificial Sequence
  Description of Artificial Sequence: Synthetic oligonucleotide
ucuucuaucaccaugccuu

SEQ ID NO: 2136819 - RNA, 19 nt, Artificial Sequence
  Description of Artificial Sequence: Synthetic oligonucleotide
agcacgauuaauuaugaug

SEQ ID NO: 2136820 - RNA, 19 nt, Artificial Sequence
  Description of Artificial Sequence: Synthetic oligonucleotide
aacuauaaaugcuuuggga

SEQ ID NO: 2136821 - RNA, 19 nt, Artificial Sequence
  Description of Artificial Sequence: Synthetic oligonucleotide
auaacgucggcccagcgcg

SEQ ID NO: 2136822 - RNA, 19 nt, Artificial Sequence
  Description of Artificial Sequence: Synthetic oligonucleotide
ucauuuuacuucuugucag

SEQ ID NO: 2136823 - RNA, 19 nt, Artificial Sequence
  Description of Artificial Sequence: Synthetic oligonucleotide
uucauuguuaucugcagug

SEQ ID NO: 2136824 - RNA, 19 nt, Artificial Sequence
  Description of Artificial Sequence: Synthetic oligonucleotide
uucucuucuaucaccaugc

SEQ ID NO: 2136825 - RNA, 19 nt, Artificial Sequence
  Description of Artificial Sequence: Synthetic oligonucleotide
acagcaguaacuugguuuc

SEQ ID NO: 2136826 - RNA, 19 nt, Artificial Sequence
  Description of Artificial Sequence: Synthetic oligonucleotide
cuauaaaugcuuugggagc

SEQ ID NO: 2136827 - RNA, 19 nt, Artificial Sequence
  Description of Artificial Sequence: Synthetic oligonucleotide
aaagcgagccauaacgucg

SEQ ID NO: 2136828 - RNA, 19 nt, Artificial Sequence
  Description of Artificial Sequence: Synthetic oligonucleotide
ugcuauuucauccucugac

SEQ ID NO: 2136829 - RNA, 19 nt, Artificial Sequence
  Description of Artificial Sequence: Synthetic oligonucleotide
aaacuuccaaggcauuccg

SEQ ID NO: 2136830 - RNA, 19 nt, Artificial Sequence
  Description of Artificial Sequence: Synthetic oligonucleotide
aucacaaaggacuguauug

SEQ ID NO: 2136831 - RNA, 19 nt, Artificial Sequence
  Description of Artificial Sequence: Synthetic oligonucleotide
aacaggaccccguaacccg

SEQ ID NO: 2136832 - RNA, 19 nt, Artificial Sequence
  Description of Artificial Sequence: Synthetic oligonucleotide
ugauaaacuuccaaggcau

SEQ ID NO: 2136833 - RNA, 19 nt, Artificial Sequence
  Description of Artificial Sequence: Synthetic oligonucleotide
uuugguuacaaugaucaca

SEQ ID NO: 2136834 - RNA, 19 nt, Artificial Sequence
  Description of Artificial Sequence: Synthetic oligonucleotide
uuauccuuagcaaaggauu

SEQ ID NO: 2136835 - RNA, 19 nt, Artificial Sequence
  Description of Artificial Sequence: Synthetic oligonucleotide
agcagaugcagguaguccg

SEQ ID NO: 2136836 - RNA, 19 nt, Artificial Sequence
  Description of Artificial Sequence: Synthetic oligonucleotide
auauaaaagcugugugucg

SEQ ID NO: 2136837 - RNA, 19 nt, Artificial Sequence
  Description of Artificial Sequence: Synthetic oligonucleotide
aaaagcugugugucgugac

SEQ ID NO: 2136838 - RNA, 19 nt, Artificial Sequence
  Description of Artificial Sequence: Synthetic oligonucleotide
caaaggacuguauugacuc

SEQ ID NO: 2136839 - RNA, 19 nt, Artificial Sequence
  Description of Artificial Sequence: Synthetic oligonucleotide
aaguaaaacaucgcagaag

SEQ ID NO: 2136840 - RNA, 19 nt, Artificial Sequence
  Description of Artificial Sequence: Synthetic oligonucleotide
gaauucuauggccaagaag

SEQ ID NO: 2136841 - RNA, 19 nt, Artificial Sequence
  Description of Artificial Sequence: Synthetic oligonucleotide
uauaaaugcuuugggagcc

SEQ ID NO: 2136842 - RNA, 19 nt, Artificial Sequence
  Description of Artificial Sequence: Synthetic oligonucleotide
ugugugucgugaccgaagg

SEQ ID NO: 2136843 - RNA, 19 nt, Artificial Sequence
  Description of Artificial Sequence: Synthetic oligonucleotide
gcacgauuaauuaugaugg

SEQ ID NO: 2136844 - RNA, 19 nt, Artificial Sequence
  Description of Artificial Sequence: Synthetic oligonucleotide
acugacuuugccccgcgcc

SEQ ID NO: 2136845 - RNA, 19 nt, Artificial Sequence
  Description of Artificial Sequence: Synthetic oligonucleotide
aaucugacacugccgcagc

SEQ ID NO: 2136846 - RNA, 19 nt, Artificial Sequence
  Description of Artificial Sequence: Synthetic oligonucleotide
gaagcgaugggcauagggg

SEQ ID NO: 2136847 - RNA, 19 nt, Artificial Sequence
  Description of Artificial Sequence: Synthetic oligonucleotide
agaacaggaccccguaacc

SEQ ID NO: 2136848 - RNA, 19 nt, Artificial Sequence
  Description of Artificial Sequence: Synthetic oligonucleotide
guaacuugguuucugaguc

SEQ ID NO: 2136849 - RNA, 19 nt, Artificial Sequence
  Description of Artificial Sequence: Synthetic oligonucleotide
uuuauccuuagcaaaggau

SEQ ID NO: 2136850 - RNA, 19 nt, Artificial Sequence
  Description of Artificial Sequence: Synthetic oligonucleotide
aaaucugacacugccgcag

SEQ ID NO: 2136851 - RNA, 19 nt, Artificial Sequence
  Description of Artificial Sequence: Synthetic oligonucleotide
aagaccucgacugacuuug

SEQ ID NO: 2136852 - RNA, 19 nt, Artificial Sequence
  Description of Artificial Sequence: Synthetic oligonucleotide
auuguuaucugcagugggc

SEQ ID NO: 2136853 - RNA, 19 nt, Artificial Sequence
  Description of Artificial Sequence: Synthetic oligonucleotide
aaucuuuaaccagaggaga

SEQ ID NO: 2136854 - RNA, 19 nt, Artificial Sequence
  Description of Artificial Sequence: Synthetic oligonucleotide
aguguuaagaaccccggcu

SEQ ID NO: 2136855 - RNA, 19 nt, Artificial Sequence
  Description of Artificial Sequence: Synthetic oligonucleotide
uuugcuauuucauccucug

SEQ ID NO: 2136856 - RNA, 19 nt, Artificial Sequence
  Description of Artificial Sequence: Synthetic oligonucleotide
augcuagaugaguauuucc

SEQ ID NO: 2136857 - RNA, 19 nt, Artificial Sequence
  Description of Artificial Sequence: Synthetic oligonucleotide
uucucuucggccuccagcc

SEQ ID NO: 2136858 - RNA, 19 nt, Artificial Sequence
  Description of Artificial Sequence: Synthetic oligonucleotide
uguucaggcauuucggaga

SEQ ID NO: 2136859 - RNA, 19 nt, Artificial Sequence
  Description of Artificial Sequence: Synthetic oligonucleotide
auuaauuaugauggagggg

SEQ ID NO: 2136860 - RNA, 19 nt, Artificial Sequence
  Description of Artificial Sequence: Synthetic oligonucleotide
uuuaaccagaggagaaagc

SEQ ID NO: 2136861 - RNA, 19 nt, Artificial Sequence
  Description of Artificial Sequence: Synthetic oligonucleotide
cauauaaaagcuguguguc

SEQ ID NO: 2136862 - RNA, 19 nt, Artificial Sequence
  Description of Artificial Sequence: Synthetic oligonucleotide
uuccaaggcauuccgagca

SEQ ID NO: 2136863 - RNA, 19 nt, Artificial Sequence
  Description of Artificial Sequence: Synthetic oligonucleotide
uguauugacucgaggauau

SEQ ID NO: 2136864 - RNA, 19 nt, Artificial Sequence
  Description of Artificial Sequence: Synthetic oligonucleotide
ucuuuauccuuagcaaagg

SEQ ID NO: 2136865 - RNA, 19 nt, Artificial Sequence
  Description of Artificial Sequence: Synthetic oligonucleotide
uauccuuagcaaaggauuc

SEQ ID NO: 2136866 - RNA, 19 nt, Artificial Sequence
  Description of Artificial Sequence: Synthetic oligonucleotide
auuucauccucugacagca

SEQ ID NO: 2136867 - RNA, 19 nt, Artificial Sequence
  Description of Artificial Sequence: Synthetic oligonucleotide
auaaacuuccaaggcauuc

SEQ ID NO: 2136868 - RNA, 19 nt, Artificial Sequence
  Description of Artificial Sequence: Synthetic oligonucleotide
uagcaaaggauucauuuua

SEQ ID NO: 2136869 - RNA, 19 nt, Artificial Sequence
  Description of Artificial Sequence: Synthetic oligonucleotide
uauuucauccucugacagc

SEQ ID NO: 2136870 - RNA, 19 nt, Artificial Sequence
  Description of Artificial Sequence: Synthetic oligonucleotide
ugauggaggggucaguuuc

SEQ ID NO: 2136871 - RNA, 19 nt, Artificial Sequence
  Description of Artificial Sequence: Synthetic oligonucleotide
aaguuguccagaaagcgca

SEQ ID NO: 2136872 - RNA, 19 nt, Artificial Sequence
  Description of Artificial Sequence: Synthetic oligonucleotide
auugacucgaggauauugg

SEQ ID NO: 2136873 - RNA, 19 nt, Artificial Sequence
  Description of Artificial Sequence: Synthetic oligonucleotide
ucacaaaggacuguauuga

SEQ ID NO: 2136874 - RNA, 19 nt, Artificial Sequence
  Description of Artificial Sequence: Synthetic oligonucleotide
uugucaguguuaagaaccc

SEQ ID NO: 2136875 - RNA, 19 nt, Artificial Sequence
  Description of Artificial Sequence: Synthetic oligonucleotide
augaguauuucccucaguu

SEQ ID NO: 2136876 - RNA, 19 nt, Artificial Sequence
  Description of Artificial Sequence: Synthetic oligonucleotide
ucgguacaagaacaggacc

SEQ ID NO: 2136877 - RNA, 19 nt, Artificial Sequence
  Description of Artificial Sequence: Synthetic oligonucleotide
ucuacuaucuucucuucua

SEQ ID NO: 2136878 - RNA, 19 nt, Artificial Sequence
  Description of Artificial Sequence: Synthetic oligonucleotide
cauaggggaaggccgagcg

SEQ ID NO: 2136879 - RNA, 19 nt, Artificial Sequence
  Description of Artificial Sequence: Synthetic oligonucleotide
agccaaguaaaacaucgca

SEQ ID NO: 2136880 - RNA, 19 nt, Artificial Sequence
  Description of Artificial Sequence: Synthetic oligonucleotide
uuugaugcuagaugaguau

SEQ ID NO: 2136881 - RNA, 19 nt, Artificial Sequence
  Description of Artificial Sequence: Synthetic oligonucleotide
acgauuaauuaugauggag

SEQ ID NO: 2136882 - RNA, 19 nt, Artificial Sequence
  Description of Artificial Sequence: Synthetic oligonucleotide
guaacccgcagccaggaag

SEQ ID NO: 2136883 - RNA, 19 nt, Artificial Sequence
  Description of Artificial Sequence: Synthetic oligonucleotide
cgauuaauuaugauggagg

SEQ ID NO: 2136884 - RNA, 19 nt, Artificial Sequence
  Description of Artificial Sequence: Synthetic oligonucleotide
ugggccaccagacgagugg

SEQ ID NO: 2136885 - RNA, 19 nt, Artificial Sequence
  Description of Artificial Sequence: Synthetic oligonucleotide
gagugcauucucuucggcc

SEQ ID NO: 2136886 - RNA, 19 nt, Artificial Sequence
  Description of Artificial Sequence: Synthetic oligonucleotide
uuguuaucugcagugggcc

SEQ ID NO: 2136887 - RNA, 19 nt, Artificial Sequence
  Description of Artificial Sequence: Synthetic oligonucleotide
agccagguccauuuccgcc

SEQ ID NO: 2136888 - RNA, 19 nt, Artificial Sequence
  Description of Artificial Sequence: Synthetic oligonucleotide
acuguauugacucgaggau

SEQ ID NO: 2136889 - RNA, 19 nt, Artificial Sequence
  Description of Artificial Sequence: Synthetic oligonucleotide
uguguucaggcauuucgga

SEQ ID NO: 2136890 - RNA, 19 nt, Artificial Sequence
  Description of Artificial Sequence: Synthetic oligonucleotide
aaggucgcagggccgacag

SEQ ID NO: 2136891 - RNA, 19 nt, Artificial Sequence
  Description of Artificial Sequence: Synthetic oligonucleotide
aaagcccgggagugcauuc

SEQ ID NO: 2136892 - RNA, 19 nt, Artificial Sequence
  Description of Artificial Sequence: Synthetic oligonucleotide
ugugucgugaccgaagguc

SEQ ID NO: 2136893 - RNA, 19 nt, Artificial Sequence
  Description of Artificial Sequence: Synthetic oligonucleotide
agguaguccgccaaagugg

SEQ ID NO: 2136894 - RNA, 19 nt, Artificial Sequence
  Description of Artificial Sequence: Synthetic oligonucleotide
ucggagacaggaauauaga

SEQ ID NO: 2136895 - RNA, 19 nt, Artificial Sequence
  Description of Artificial Sequence: Synthetic oligonucleotide
agccuagugggcugagugc

SEQ ID NO: 2136896 - RNA, 19 nt, Artificial Sequence
  Description of Artificial Sequence: Synthetic oligonucleotide
caaaguggugaauucuaug

SEQ ID NO: 2136897 - RNA, 19 nt, Artificial Sequence
  Description of Artificial Sequence: Synthetic oligonucleotide
gacgugaccagcaccaccc

SEQ ID NO: 2136898 - RNA, 19 nt, Artificial Sequence
  Description of Artificial Sequence: Synthetic oligonucleotide
agacgaguggaucuugugu

SEQ ID NO: 2136899 - RNA, 19 nt, Artificial Sequence
  Description of Artificial Sequence: Synthetic oligonucleotide
gaaccccggcuuuugaugc

SEQ ID NO: 2136900 - RNA, 19 nt, Artificial Sequence
  Description of Artificial Sequence: Synthetic oligonucleotide
uacaagaacaggaccccgu

SEQ ID NO: 2136901 - RNA, 19 nt, Artificial Sequence
  Description of Artificial Sequence: Synthetic oligonucleotide
cucgguacaagaacaggac

SEQ ID NO: 2136902 - RNA, 19 nt, Artificial Sequence
  Description of Artificial Sequence: Synthetic oligonucleotide
gacaggaauauagaaaucu

SEQ ID NO: 2136903 - RNA, 19 nt, Artificial Sequence
  Description of Artificial Sequence: Synthetic oligonucleotide
ccaaucuuuaaccagagga

SEQ ID NO: 2136904 - RNA, 19 nt, Artificial Sequence
  Description of Artificial Sequence: Synthetic oligonucleotide
agcaaaggauucauuuuac

SEQ ID NO: 2136905 - RNA, 19 nt, Artificial Sequence
  Description of Artificial Sequence: Synthetic oligonucleotide
gcugauaaacuuccaaggc

SEQ ID NO: 2136906 - RNA, 19 nt, Artificial Sequence
  Description of Artificial Sequence: Synthetic oligonucleotide
auuaugauggaggggucag

SEQ ID NO: 2136907 - RNA, 19 nt, Artificial Sequence
  Description of Artificial Sequence: Synthetic oligonucleotide
caggaauauagaaaucuga

SEQ ID NO: 2136908 - RNA, 19 nt, Artificial Sequence
  Description of Artificial Sequence: Synthetic oligonucleotide
cauaacgucggcccagcgc

SEQ ID NO: 2136909 - RNA, 19 nt, Artificial Sequence
  Description of Artificial Sequence: Synthetic oligonucleotide
aaugaucacaaaggacugu

SEQ ID NO: 2136910 - RNA, 19 nt, Artificial Sequence
  Description of Artificial Sequence: Synthetic oligonucleotide
cagguaguccgccaaagug

SEQ ID NO: 2136911 - RNA, 19 nt, Artificial Sequence
  Description of Artificial Sequence: Synthetic oligonucleotide
agaugaguauuucccucag

SEQ ID NO: 2136912 - RNA, 19 nt, Artificial Sequence
  Description of Artificial Sequence: Synthetic oligonucleotide
ucgggcggcggcaaguccg

SEQ ID NO: 2136913 - RNA, 19 nt, Artificial Sequence
  Description of Artificial Sequence: Synthetic oligonucleotide
aaggacuguauugacucga

SEQ ID NO: 2136914 - RNA, 19 nt, Artificial Sequence
  Description of Artificial Sequence: Synthetic oligonucleotide
auuuuacuucuugucagug

SEQ ID NO: 2136915 - RNA, 19 nt, Artificial Sequence
  Description of Artificial Sequence: Synthetic oligonucleotide
auaaaagcugugugucgug

SEQ ID NO: 2136916 - RNA, 19 nt, Artificial Sequence
  Description of Artificial Sequence: Synthetic oligonucleotide
ugcaaugcugcagcaaagc

SEQ ID NO: 2136917 - RNA, 19 nt, Artificial Sequence
  Description of Artificial Sequence: Synthetic oligonucleotide
uaguccgccaaagugguga

SEQ ID NO: 2136918 - RNA, 19 nt, Artificial Sequence
  Description of Artificial Sequence: Synthetic oligonucleotide
ggaagcgaugggcauaggg

SEQ ID NO: 2136919 - RNA, 19 nt, Artificial Sequence
  Description of Artificial Sequence: Synthetic oligonucleotide
guguucaggcauuucggag

SEQ ID NO: 2136920 - RNA, 19 nt, Artificial Sequence
  Description of Artificial Sequence: Synthetic oligonucleotide
gaccccguaacccgcagcc

SEQ ID NO: 2136921 - RNA, 19 nt, Artificial Sequence
  Description of Artificial Sequence: Synthetic oligonucleotide
aagcgagccauaacgucgg

SEQ ID NO: 2136922 - RNA, 19 nt, Artificial Sequence
  Description of Artificial Sequence: Synthetic oligonucleotide
ggaaacuauaaaugcuuug

SEQ ID NO: 2136923 - RNA, 19 nt, Artificial Sequence
  Description of Artificial Sequence: Synthetic oligonucleotide
acaggaauauagaaaucug

SEQ ID NO: 2136924 - RNA, 19 nt, Artificial Sequence
  Description of Artificial Sequence: Synthetic oligonucleotide
ucaccaugccuuuugcuau

SEQ ID NO: 2136925 - RNA, 19 nt, Artificial Sequence
  Description of Artificial Sequence: Synthetic oligonucleotide
agcggcugccucuugguag

SEQ ID NO: 2136926 - RNA, 19 nt, Artificial Sequence
  Description of Artificial Sequence: Synthetic oligonucleotide
uaaaagcugugugucguga

SEQ ID NO: 2136927 - RNA, 19 nt, Artificial Sequence
  Description of Artificial Sequence: Synthetic oligonucleotide
acgaguggaucuuguguuc

SEQ ID NO: 2136928 - RNA, 19 nt, Artificial Sequence
  Description of Artificial Sequence: Synthetic oligonucleotide
aucugacacugccgcagcc

SEQ ID NO: 2136929 - RNA, 19 nt, Artificial Sequence
  Description of Artificial Sequence: Synthetic oligonucleotide
gaacaggaccccguaaccc

SEQ ID NO: 2136930 - RNA, 19 nt, Artificial Sequence
  Description of Artificial Sequence: Synthetic oligonucleotide
cugacuuugccccgcgccg

SEQ ID NO: 2136931 - RNA, 19 nt, Artificial Sequence
  Description of Artificial Sequence: Synthetic oligonucleotide
cgcaaagcgagccauaacg

SEQ ID NO: 2136932 - RNA, 19 nt, Artificial Sequence
  Description of Artificial Sequence: Synthetic oligonucleotide
gaugcuagaugaguauuuc

SEQ ID NO: 2136933 - RNA, 19 nt, Artificial Sequence
  Description of Artificial Sequence: Synthetic oligonucleotide
ugacgugaccagcaccacc

SEQ ID NO: 2136934 - RNA, 19 nt, Artificial Sequence
  Description of Artificial Sequence: Synthetic oligonucleotide
uaggggaaggccgagcgug

SEQ ID NO: 2136935 - RNA, 19 nt, Artificial Sequence
  Description of Artificial Sequence: Synthetic oligonucleotide
caaagcgagccauaacguc

SEQ ID NO: 2136936 - RNA, 19 nt, Artificial Sequence
  Description of Artificial Sequence: Synthetic oligonucleotide
uguuaucugcagugggcca

SEQ ID NO: 2136937 - RNA, 19 nt, Artificial Sequence
  Description of Artificial Sequence: Synthetic oligonucleotide
uaauuaugauggagggguc

SEQ ID NO: 2136938 - RNA, 19 nt, Artificial Sequence
  Description of Artificial Sequence: Synthetic oligonucleotide
accuugguaccuccugacg

SEQ ID NO: 2136939 - RNA, 19 nt, Artificial Sequence
  Description of Artificial Sequence: Synthetic oligonucleotide
ugaccagcaccacccgccg

SEQ ID NO: 2136940 - RNA, 19 nt, Artificial Sequence
  Description of Artificial Sequence: Synthetic oligonucleotide
aaagcgcacggcucgcgcu

SEQ ID NO: 2136941 - RNA, 19 nt, Artificial Sequence
  Description of Artificial Sequence: Synthetic oligonucleotide
uuaagaaccccggcuuuug

SEQ ID NO: 2136942 - RNA, 19 nt, Artificial Sequence
  Description of Artificial Sequence: Synthetic oligonucleotide
ugcucgguacaagaacagg

SEQ ID NO: 2136943 - RNA, 19 nt, Artificial Sequence
  Description of Artificial Sequence: Synthetic oligonucleotide
cuuagcaaaggauucauuu

SEQ ID NO: 2136944 - RNA, 19 nt, Artificial Sequence
  Description of Artificial Sequence: Synthetic oligonucleotide
gauauuggccaccaccacu

SEQ ID NO: 2136945 - RNA, 19 nt, Artificial Sequence
  Description of Artificial Sequence: Synthetic oligonucleotide
uguuaagaaccccggcuuu

SEQ ID NO: 2136946 - RNA, 19 nt, Artificial Sequence
  Description of Artificial Sequence: Synthetic oligonucleotide
cuaucaccaugccuuuugc

SEQ ID NO: 2136947 - RNA, 19 nt, Artificial Sequence
  Description of Artificial Sequence: Synthetic oligonucleotide
ugccuuuugcuauuucauc

SEQ ID NO: 2136948 - RNA, 19 nt, Artificial Sequence
  Description of Artificial Sequence: Synthetic oligonucleotide
ugcgcgcccaggcuggccg

SEQ ID NO: 2136949 - RNA, 19 nt, Artificial Sequence
  Description of Artificial Sequence: Synthetic oligonucleotide
gacagcaguaacuugguuu

SEQ ID NO: 2136950 - RNA, 19 nt, Artificial Sequence
  Description of Artificial Sequence: Synthetic oligonucleotide
caccacuugaugcugauaa

SEQ ID NO: 2136951 - RNA, 19 nt, Artificial Sequence
  Description of Artificial Sequence: Synthetic oligonucleotide
aacaucgcagaagagccua

SEQ ID NO: 2136952 - RNA, 19 nt, Artificial Sequence
  Description of Artificial Sequence: Synthetic oligonucleotide
agucuuugguuacaaugau

SEQ ID NO: 2136953 - RNA, 19 nt, Artificial Sequence
  Description of Artificial Sequence: Synthetic oligonucleotide
gggagcccaaucuuuaacc

SEQ ID NO: 2136954 - RNA, 19 nt, Artificial Sequence
  Description of Artificial Sequence: Synthetic oligonucleotide
acggcucgcgcuuccaggg

SEQ ID NO: 2136955 - RNA, 19 nt, Artificial Sequence
  Description of Artificial Sequence: Synthetic oligonucleotide
agcuuaaaggaaacuauaa

SEQ ID NO: 2136956 - RNA, 19 nt, Artificial Sequence
  Description of Artificial Sequence: Synthetic oligonucleotide
ugaucacaaaggacuguau

SEQ ID NO: 2136957 - RNA, 19 nt, Artificial Sequence
  Description of Artificial Sequence: Synthetic oligonucleotide
acaaaggacuguauugacu

SEQ ID NO: 2136958 - RNA, 19 nt, Artificial Sequence
  Description of Artificial Sequence: Synthetic oligonucleotide
auuucggagacaggaauau

SEQ ID NO: 2136959 - RNA, 19 nt, Artificial Sequence
  Description of Artificial Sequence: Synthetic oligonucleotide
uuccgagcacgauuaauua

SEQ ID NO: 2136960 - RNA, 19 nt, Artificial Sequence
  Description of Artificial Sequence: Synthetic oligonucleotide
gccaaguaaaacaucgcag

SEQ ID NO: 2136961 - RNA, 19 nt, Artificial Sequence
  Description of Artificial Sequence: Synthetic oligonucleotide
gaguggaucuuguguucag

SEQ ID NO: 2136962 - RNA, 19 nt, Artificial Sequence
  Description of Artificial Sequence: Synthetic oligonucleotide
cagccaaguaaaacaucgc

SEQ ID NO: 2136963 - RNA, 19 nt, Artificial Sequence
  Description of Artificial Sequence: Synthetic oligonucleotide
gugaccgaaggucuucuac

SEQ ID NO: 2136964 - RNA, 19 nt, Artificial Sequence
  Description of Artificial Sequence: Synthetic oligonucleotide
ccaaguaaaacaucgcaga

SEQ ID NO: 2136965 - RNA, 19 nt, Artificial Sequence
  Description of Artificial Sequence: Synthetic oligonucleotide
uccgagcacgauuaauuau

SEQ ID NO: 2136966 - RNA, 19 nt, Artificial Sequence
  Description of Artificial Sequence: Synthetic oligonucleotide
ugcagguaguccgccaaag

SEQ ID NO: 2136967 - RNA, 19 nt, Artificial Sequence
  Description of Artificial Sequence: Synthetic oligonucleotide
guaaaacaucgcagaagag

SEQ ID NO: 2136968 - RNA, 19 nt, Artificial Sequence
  Description of Artificial Sequence: Synthetic oligonucleotide
guuguccagaaagcgcacg

SEQ ID NO: 2136969 - RNA, 19 nt, Artificial Sequence
  Description of Artificial Sequence: Synthetic oligonucleotide
cugugugucgugaccgaag

SEQ ID NO: 2136970 - RNA, 19 nt, Artificial Sequence
  Description of Artificial Sequence: Synthetic oligonucleotide
gauggaggggucaguuucc

SEQ ID NO: 2136971 - RNA, 19 nt, Artificial Sequence
  Description of Artificial Sequence: Synthetic oligonucleotide
auuccgagcacgauuaauu

SEQ ID NO: 2136972 - RNA, 19 nt, Artificial Sequence
  Description of Artificial Sequence: Synthetic oligonucleotide
ccgagcacgauuaauuaug

SEQ ID NO: 2136973 - RNA, 19 nt, Artificial Sequence
  Description of Artificial Sequence: Synthetic oligonucleotide
guacaagaacaggaccccg

SEQ ID NO: 2136974 - RNA, 19 nt, Artificial Sequence
  Description of Artificial Sequence: Synthetic oligonucleotide
caguguuaagaaccccggc

SEQ ID NO: 2136975 - RNA, 19 nt, Artificial Sequence
  Description of Artificial Sequence: Synthetic oligonucleotide
uaaaugcuuugggagccca

SEQ ID NO: 2136976 - RNA, 19 nt, Artificial Sequence
  Description of Artificial Sequence: Synthetic oligonucleotide
gaugcagguaguccgccaa

SEQ ID NO: 2136977 - RNA, 19 nt, Artificial Sequence
  Description of Artificial Sequence: Synthetic oligonucleotide
ucugagucuuugguuacaa

SEQ ID NO: 2136978 - RNA, 19 nt, Artificial Sequence
  Description of Artificial Sequence: Synthetic oligonucleotide
ugucaguguuaagaacccc

SEQ ID NO: 2136979 - RNA, 19 nt, Artificial Sequence
  Description of Artificial Sequence: Synthetic oligonucleotide
guuaucugcagugggccac

SEQ ID NO: 2136980 - RNA, 19 nt, Artificial Sequence
  Description of Artificial Sequence: Synthetic oligonucleotide
agcccaaucuuuaaccaga

SEQ ID NO: 2136981 - RNA, 19 nt, Artificial Sequence
  Description of Artificial Sequence: Synthetic oligonucleotide
ccucgacugacuuugcccc

SEQ ID NO: 2136982 - RNA, 19 nt, Artificial Sequence
  Description of Artificial Sequence: Synthetic oligonucleotide
gguacaagaacaggacccc

SEQ ID NO: 2136983 - RNA, 19 nt, Artificial Sequence
  Description of Artificial Sequence: Synthetic oligonucleotide
uccgccaaaguggugaauu

SEQ ID NO: 2136984 - RNA, 19 nt, Artificial Sequence
  Description of Artificial Sequence: Synthetic oligonucleotide
acaagaacaggaccccgua

SEQ ID NO: 2136985 - RNA, 19 nt, Artificial Sequence
  Description of Artificial Sequence: Synthetic oligonucleotide
ccagaaagcgcacggcucg

SEQ ID NO: 2136986 - RNA, 19 nt, Artificial Sequence
  Description of Artificial Sequence: Synthetic oligonucleotide
ucgaggauauuggccacca

SEQ ID NO: 2136987 - RNA, 19 nt, Artificial Sequence
  Description of Artificial Sequence: Synthetic oligonucleotide
gugaccagcaccacccgcc

SEQ ID NO: 2136988 - RNA, 19 nt, Artificial Sequence
  Description of Artificial Sequence: Synthetic oligonucleotide
uccgcagccagguccauuu

SEQ ID NO: 2136989 - RNA, 19 nt, Artificial Sequence
  Description of Artificial Sequence: Synthetic oligonucleotide
uccuuagcaaaggauucau

SEQ ID NO: 2136990 - RNA, 19 nt, Artificial Sequence
  Description of Artificial Sequence: Synthetic oligonucleotide
cucgacugacuuugccccg

SEQ ID NO: 2136991 - RNA, 19 nt, Artificial Sequence
  Description of Artificial Sequence: Synthetic oligonucleotide
acaggaccccguaacccgc

SEQ ID NO: 2136992 - RNA, 19 nt, Artificial Sequence
  Description of Artificial Sequence: Synthetic oligonucleotide
guggugaauucuauggcca

SEQ ID NO: 2136993 - RNA, 19 nt, Artificial Sequence
  Description of Artificial Sequence: Synthetic oligonucleotide
cgagccauaacgucggccc

SEQ ID NO: 2136994 - RNA, 19 nt, Artificial Sequence
  Description of Artificial Sequence: Synthetic oligonucleotide
gacgaguggaucuuguguu

SEQ ID NO: 2136995 - RNA, 19 nt, Artificial Sequence
  Description of Artificial Sequence: Synthetic oligonucleotide
acugccgcagccaaguaaa

SEQ ID NO: 2136996 - RNA, 19 nt, Artificial Sequence
  Description of Artificial Sequence: Synthetic oligonucleotide
cacggcucgcgcuuccagg

SEQ ID NO: 2136997 - RNA, 19 nt, Artificial Sequence
  Description of Artificial Sequence: Synthetic oligonucleotide
auccuuagcaaaggauuca

SEQ ID NO: 2136998 - RNA, 19 nt, Artificial Sequence
  Description of Artificial Sequence: Synthetic oligonucleotide
ggacuguauugacucgagg

SEQ ID NO: 2136999 - RNA, 19 nt, Artificial Sequence
  Description of Artificial Sequence: Synthetic oligonucleotide
agcacccucgggcggcggc

SEQ ID NO: 2137000 - RNA, 19 nt, Artificial Sequence
  Description of Artificial Sequence: Synthetic oligonucleotide
ggaaggccgagcgugcucg

SEQ ID NO: 2137001 - RNA, 19 nt, Artificial Sequence
  Description of Artificial Sequence: Synthetic oligonucleotide
cagacgaguggaucuugug

SEQ ID NO: 2137002 - RNA, 19 nt, Artificial Sequence
  Description of Artificial Sequence: Synthetic oligonucleotide
ugcugaaguuguccagaaa

SEQ ID NO: 2137003 - RNA, 19 nt, Artificial Sequence
  Description of Artificial Sequence: Synthetic oligonucleotide
gagcgugcucgguacaaga

SEQ ID NO: 2137004 - RNA, 19 nt, Artificial Sequence
  Description of Artificial Sequence: Synthetic oligonucleotide
cauuucggagacaggaaua

SEQ ID NO: 2137005 - RNA, 19 nt, Artificial Sequence
  Description of Artificial Sequence: Synthetic oligonucleotide
agaugcagguaguccgcca

SEQ ID NO: 2137006 - RNA, 19 nt, Artificial Sequence
  Description of Artificial Sequence: Synthetic oligonucleotide
aggcauuccgagcacgauu

SEQ ID NO: 2137007 - RNA, 19 nt, Artificial Sequence
  Description of Artificial Sequence: Synthetic oligonucleotide
uugguaccuccugacguga

SEQ ID NO: 2137008 - RNA, 19 nt, Artificial Sequence
  Description of Artificial Sequence: Synthetic oligonucleotide
cacgauuaauuaugaugga

SEQ ID NO: 2137009 - RNA, 19 nt, Artificial Sequence
  Description of Artificial Sequence: Synthetic oligonucleotide
cagugggccaccagacgag

SEQ ID NO: 2137010 - RNA, 19 nt, Artificial Sequence
  Description of Artificial Sequence: Synthetic oligonucleotide
auaggggaaggccgagcgu

SEQ ID NO: 2137011 - RNA, 19 nt, Artificial Sequence
  Description of Artificial Sequence: Synthetic oligonucleotide
uuaugauggaggggucagu

SEQ ID NO: 2137012 - RNA, 19 nt, Artificial Sequence
  Description of Artificial Sequence: Synthetic oligonucleotide
ggagcccaaucuuuaacca

SEQ ID NO: 2137013 - RNA, 19 nt, Artificial Sequence
  Description of Artificial Sequence: Synthetic oligonucleotide
ugcauucucuucggccucc

SEQ ID NO: 2137014 - RNA, 19 nt, Artificial Sequence
  Description of Artificial Sequence: Synthetic oligonucleotide
ggucgcagggccgacagcc

SEQ ID NO: 2137015 - RNA, 19 nt, Artificial Sequence
  Description of Artificial Sequence: Synthetic oligonucleotide
aaguccgcagccaggucca

SEQ ID NO: 2137016 - RNA, 19 nt, Artificial Sequence
  Description of Artificial Sequence: Synthetic oligonucleotide
ucgacugacuuugccccgc

SEQ ID NO: 2137017 - RNA, 19 nt, Artificial Sequence
  Description of Artificial Sequence: Synthetic oligonucleotide
aggaaacuauaaaugcuuu

SEQ ID NO: 2137018 - RNA, 19 nt, Artificial Sequence
  Description of Artificial Sequence: Synthetic oligonucleotide
agcgagccauaacgucggc

SEQ ID NO: 2137019 - RNA, 19 nt, Artificial Sequence
  Description of Artificial Sequence: Synthetic oligonucleotide
aaccccggcuuuugaugcu

SEQ ID NO: 2137020 - RNA, 19 nt, Artificial Sequence
  Description of Artificial Sequence: Synthetic oligonucleotide
guaccuccugacgugacca

SEQ ID NO: 2137021 - RNA, 19 nt, Artificial Sequence
  Description of Artificial Sequence: Synthetic oligonucleotide
caaggcauuccgagcacga

SEQ ID NO: 2137022 - RNA, 19 nt, Artificial Sequence
  Description of Artificial Sequence: Synthetic oligonucleotide
accacuugaugcugauaaa

SEQ ID NO: 2137023 - RNA, 19 nt, Artificial Sequence
  Description of Artificial Sequence: Synthetic oligonucleotide
acgugaccagcaccacccg

SEQ ID NO: 2137024 - RNA, 19 nt, Artificial Sequence
  Description of Artificial Sequence: Synthetic oligonucleotide
cugcagcaaagcccgggag

SEQ ID NO: 2137025 - RNA, 19 nt, Artificial Sequence
  Description of Artificial Sequence: Synthetic oligonucleotide
gguaccuccugacgugacc

SEQ ID NO: 2137026 - RNA, 19 nt, Artificial Sequence
  Description of Artificial Sequence: Synthetic oligonucleotide
agccauaacgucggcccag

SEQ ID NO: 2137027 - RNA, 19 nt, Artificial Sequence
  Description of Artificial Sequence: Synthetic oligonucleotide
gaaggccgagcgugcucgg

SEQ ID NO: 2137028 - RNA, 19 nt, Artificial Sequence
  Description of Artificial Sequence: Synthetic oligonucleotide
cucgaggauauuggccacc

SEQ ID NO: 2137029 - RNA, 19 nt, Artificial Sequence
  Description of Artificial Sequence: Synthetic oligonucleotide
ucucuucggccuccagccu

SEQ ID NO: 2137030 - RNA, 19 nt, Artificial Sequence
  Description of Artificial Sequence: Synthetic oligonucleotide
ugacagcaguaacuugguu

SEQ ID NO: 2137031 - RNA, 19 nt, Artificial Sequence
  Description of Artificial Sequence: Synthetic oligonucleotide
aaggcauuccgagcacgau

SEQ ID NO: 2137032 - RNA, 19 nt, Artificial Sequence
  Description of Artificial Sequence: Synthetic oligonucleotide
aggggaaggccgagcgugc

SEQ ID NO: 2137033 - RNA, 19 nt, Artificial Sequence
  Description of Artificial Sequence: Synthetic oligonucleotide
cagccagguccauuuccgc

SEQ ID NO: 2137034 - RNA, 19 nt, Artificial Sequence
  Description of Artificial Sequence: Synthetic oligonucleotide
gaugaguauuucccucagu

SEQ ID NO: 2137035 - RNA, 19 nt, Artificial Sequence
  Description of Artificial Sequence: Synthetic oligonucleotide
gugcucgguacaagaacag

SEQ ID NO: 2137036 - RNA, 19 nt, Artificial Sequence
  Description of Artificial Sequence: Synthetic oligonucleotide
gggccagaaggucgcaggg

SEQ ID NO: 2137037 - RNA, 19 nt, Artificial Sequence
  Description of Artificial Sequence: Synthetic oligonucleotide
cuuugccccgcgccgcccg

SEQ ID NO: 2137038 - RNA, 19 nt, Artificial Sequence
  Description of Artificial Sequence: Synthetic oligonucleotide
aggccugaggcgggaagcg

SEQ ID NO: 2137039 - RNA, 19 nt, Artificial Sequence
  Description of Artificial Sequence: Synthetic oligonucleotide
gcucgguacaagaacagga

SEQ ID NO: 2137040 - RNA, 19 nt, Artificial Sequence
  Description of Artificial Sequence: Synthetic oligonucleotide
ugguaccuccugacgugac

SEQ ID NO: 2137041 - RNA, 19 nt, Artificial Sequence
  Description of Artificial Sequence: Synthetic oligonucleotide
ugucgugaccgaaggucuu

SEQ ID NO: 2137042 - RNA, 19 nt, Artificial Sequence
  Description of Artificial Sequence: Synthetic oligonucleotide
gcaguaacuugguuucuga

SEQ ID NO: 2137043 - RNA, 19 nt, Artificial Sequence
  Description of Artificial Sequence: Synthetic oligonucleotide
gacugacuuugccccgcgc

SEQ ID NO: 2137044 - RNA, 19 nt, Artificial Sequence
  Description of Artificial Sequence: Synthetic oligonucleotide
cgggagugcauucucuucg

SEQ ID NO: 2137045 - RNA, 19 nt, Artificial Sequence
  Description of Artificial Sequence: Synthetic oligonucleotide
cuagugggcugagugccug

SEQ ID NO: 2137046 - RNA, 19 nt, Artificial Sequence
  Description of Artificial Sequence: Synthetic oligonucleotide
aagcgcacggcucgcgcuu

SEQ ID NO: 2137047 - RNA, 19 nt, Artificial Sequence
  Description of Artificial Sequence: Synthetic oligonucleotide
guguuaagaaccccggcuu

SEQ ID NO: 2137048 - RNA, 19 nt, Artificial Sequence
  Description of Artificial Sequence: Synthetic oligonucleotide
ucuuguguucaggcauuuc

SEQ ID NO: 2137049 - RNA, 19 nt, Artificial Sequence
  Description of Artificial Sequence: Synthetic oligonucleotide
uaacgucggcccagcgcgc

SEQ ID NO: 2137050 - RNA, 19 nt, Artificial Sequence
  Description of Artificial Sequence: Synthetic oligonucleotide
aagcccgggagugcauucu

SEQ ID NO: 2137051 - RNA, 19 nt, Artificial Sequence
  Description of Artificial Sequence: Synthetic oligonucleotide
aaaugcuuugggagcccaa

SEQ ID NO: 2137052 - RNA, 19 nt, Artificial Sequence
  Description of Artificial Sequence: Synthetic oligonucleotide
cuguauugacucgaggaua

SEQ ID NO: 2137053 - RNA, 19 nt, Artificial Sequence
  Description of Artificial Sequence: Synthetic oligonucleotide
aggaagaccucgacugacu

SEQ ID NO: 2137054 - RNA, 19 nt, Artificial Sequence
  Description of Artificial Sequence: Synthetic oligonucleotide
gaagagccuagugggcuga

SEQ ID NO: 2137055 - RNA, 19 nt, Artificial Sequence
  Description of Artificial Sequence: Synthetic oligonucleotide
gagccauaacgucggccca

SEQ ID NO: 2137056 - RNA, 19 nt, Artificial Sequence
  Description of Artificial Sequence: Synthetic oligonucleotide
uuucggagacaggaauaua

SEQ ID NO: 2137057 - RNA, 19 nt, Artificial Sequence
  Description of Artificial Sequence: Synthetic oligonucleotide
ggauauuggccaccaccac

SEQ ID NO: 2137058 - RNA, 19 nt, Artificial Sequence
  Description of Artificial Sequence: Synthetic oligonucleotide
ucgugaccgaaggucuucu

SEQ ID NO: 2137059 - RNA, 19 nt, Artificial Sequence
  Description of Artificial Sequence: Synthetic oligonucleotide
gcuagaugaguauuucccu

SEQ ID NO: 2137060 - RNA, 19 nt, Artificial Sequence
  Description of Artificial Sequence: Synthetic oligonucleotide
gccuagugggcugagugcc

SEQ ID NO: 2137061 - RNA, 19 nt, Artificial Sequence
  Description of Artificial Sequence: Synthetic oligonucleotide
agaaggucgcagggccgac

SEQ ID NO: 2137062 - RNA, 19 nt, Artificial Sequence
  Description of Artificial Sequence: Synthetic oligonucleotide
ugguuacaaugaucacaaa

SEQ ID NO: 2137063 - RNA, 19 nt, Artificial Sequence
  Description of Artificial Sequence: Synthetic oligonucleotide
cauucucuucggccuccag

SEQ ID NO: 2137064 - RNA, 19 nt, Artificial Sequence
  Description of Artificial Sequence: Synthetic oligonucleotide
agaccucgacugacuuugc

SEQ ID NO: 2137065 - RNA, 19 nt, Artificial Sequence
  Description of Artificial Sequence: Synthetic oligonucleotide
aacgucggcccagcgcgca

SEQ ID NO: 2137066 - RNA, 19 nt, Artificial Sequence
  Description of Artificial Sequence: Synthetic oligonucleotide
aguccgccaaaguggugaa

SEQ ID NO: 2137067 - RNA, 19 nt, Artificial Sequence
  Description of Artificial Sequence: Synthetic oligonucleotide
acaucgcagaagagccuag

SEQ ID NO: 2137068 - RNA, 19 nt, Artificial Sequence
  Description of Artificial Sequence: Synthetic oligonucleotide
caagaacaggaccccguaa

SEQ ID NO: 2137069 - RNA, 19 nt, Artificial Sequence
  Description of Artificial Sequence: Synthetic oligonucleotide
aggaccccguaacccgcag

SEQ ID NO: 2137070 - RNA, 19 nt, Artificial Sequence
  Description of Artificial Sequence: Synthetic oligonucleotide
gcggcaaguccgcagccag

SEQ ID NO: 2137071 - RNA, 19 nt, Artificial Sequence
  Description of Artificial Sequence: Synthetic oligonucleotide
cccaaucuuuaaccagagg

SEQ ID NO: 2137072 - RNA, 19 nt, Artificial Sequence
  Description of Artificial Sequence: Synthetic oligonucleotide
uuugccccgcgccgcccgc

SEQ ID NO: 2137073 - RNA, 19 nt, Artificial Sequence
  Description of Artificial Sequence: Synthetic oligonucleotide
cagaaagcgcacggcucgc

SEQ ID NO: 2137074 - RNA, 19 nt, Artificial Sequence
  Description of Artificial Sequence: Synthetic oligonucleotide
gugcauucucuucggccuc

SEQ ID NO: 2137075 - RNA, 19 nt, Artificial Sequence
  Description of Artificial Sequence: Synthetic oligonucleotide
cugacacugccgcagccaa

SEQ ID NO: 2137076 - RNA, 19 nt, Artificial Sequence
  Description of Artificial Sequence: Synthetic oligonucleotide
ggcauuccgagcacgauua

SEQ ID NO: 2137077 - RNA, 19 nt, Artificial Sequence
  Description of Artificial Sequence: Synthetic oligonucleotide
cuacuaucuucucuucuau

SEQ ID NO: 2137078 - RNA, 19 nt, Artificial Sequence
  Description of Artificial Sequence: Synthetic oligonucleotide
gcggcugccucuugguagc

SEQ ID NO: 2137079 - RNA, 19 nt, Artificial Sequence
  Description of Artificial Sequence: Synthetic oligonucleotide
gcagaugcagguaguccgc

SEQ ID NO: 2137080 - RNA, 19 nt, Artificial Sequence
  Description of Artificial Sequence: Synthetic oligonucleotide
agugggccaccagacgagu

SEQ ID NO: 2137081 - RNA, 19 nt, Artificial Sequence
  Description of Artificial Sequence: Synthetic oligonucleotide
ccgacagccaggccugagg

SEQ ID NO: 2137082 - RNA, 19 nt, Artificial Sequence
  Description of Artificial Sequence: Synthetic oligonucleotide
cgugcucgguacaagaaca

SEQ ID NO: 2137083 - RNA, 19 nt, Artificial Sequence
  Description of Artificial Sequence: Synthetic oligonucleotide
uucuaucaccaugccuuuu

SEQ ID NO: 2137084 - RNA, 19 nt, Artificial Sequence
  Description of Artificial Sequence: Synthetic oligonucleotide
aggugccggcagcggcugc

SEQ ID NO: 2137085 - RNA, 19 nt, Artificial Sequence
  Description of Artificial Sequence: Synthetic oligonucleotide
gcccaaucuuuaaccagag

SEQ ID NO: 2137086 - RNA, 19 nt, Artificial Sequence
  Description of Artificial Sequence: Synthetic oligonucleotide
gguccauuuccgccaucug

SEQ ID NO: 2137087 - RNA, 19 nt, Artificial Sequence
  Description of Artificial Sequence: Synthetic oligonucleotide
ccccguaacccgcagccag

SEQ ID NO: 2137088 - RNA, 19 nt, Artificial Sequence
  Description of Artificial Sequence: Synthetic oligonucleotide
gucgugaccgaaggucuuc

SEQ ID NO: 2137089 - RNA, 19 nt, Artificial Sequence
  Description of Artificial Sequence: Synthetic oligonucleotide
agcgugcucgguacaagaa

SEQ ID NO: 2137090 - RNA, 19 nt, Artificial Sequence
  Description of Artificial Sequence: Synthetic oligonucleotide
aggcgggaagcgaugggca

SEQ ID NO: 2137091 - RNA, 19 nt, Artificial Sequence
  Description of Artificial Sequence: Synthetic oligonucleotide
gcauuucggagacaggaau

SEQ ID NO: 2137092 - RNA, 19 nt, Artificial Sequence
  Description of Artificial Sequence: Synthetic oligonucleotide
cagaagagccuagugggcu

SEQ ID NO: 2137093 - RNA, 19 nt, Artificial Sequence
  Description of Artificial Sequence: Synthetic oligonucleotide
gaaggugccggcagcggcu

SEQ ID NO: 2137094 - RNA, 19 nt, Artificial Sequence
  Description of Artificial Sequence: Synthetic oligonucleotide
agcgaugggcauaggggaa

SEQ ID NO: 2137095 - RNA, 19 nt, Artificial Sequence
  Description of Artificial Sequence: Synthetic oligonucleotide
gaaggucgcagggccgaca

SEQ ID NO: 2137096 - RNA, 19 nt, Artificial Sequence
  Description of Artificial Sequence: Synthetic oligonucleotide
gagcacgauuaauuaugau

SEQ ID NO: 2137097 - RNA, 19 nt, Artificial Sequence
  Description of Artificial Sequence: Synthetic oligonucleotide
gugucgugaccgaaggucu

SEQ ID NO: 2137098 - RNA, 19 nt, Artificial Sequence
  Description of Artificial Sequence: Synthetic oligonucleotide
cccguaacccgcagccagg

SEQ ID NO: 2137099 - RNA, 19 nt, Artificial Sequence
  Description of Artificial Sequence: Synthetic oligonucleotide
gcgaugggcauaggggaag

SEQ ID NO: 2137100 - RNA, 19 nt, Artificial Sequence
  Description of Artificial Sequence: Synthetic oligonucleotide
aggccgagcgugcucggua

SEQ ID NO: 2137101 - RNA, 19 nt, Artificial Sequence
  Description of Artificial Sequence: Synthetic oligonucleotide
gcggcggcaaguccgcagc

SEQ ID NO: 2137102 - RNA, 19 nt, Artificial Sequence
  Description of Artificial Sequence: Synthetic oligonucleotide
uucaggcauuucggagaca

SEQ ID NO: 2137103 - RNA, 19 nt, Artificial Sequence
  Description of Artificial Sequence: Synthetic oligonucleotide
aucuuguguucaggcauuu

SEQ ID NO: 2137104 - RNA, 19 nt, Artificial Sequence
  Description of Artificial Sequence: Synthetic oligonucleotide
agagccuagugggcugagu

SEQ ID NO: 2137105 - RNA, 19 nt, Artificial Sequence
  Description of Artificial Sequence: Synthetic oligonucleotide
cugacgugaccagcaccac

SEQ ID NO: 2137106 - RNA, 19 nt, Artificial Sequence
  Description of Artificial Sequence: Synthetic oligonucleotide
ggcggcggcaaguccgcag

SEQ ID NO: 2137107 - RNA, 19 nt, Artificial Sequence
  Description of Artificial Sequence: Synthetic oligonucleotide
gccaaaguggugaauucua

SEQ ID NO: 2137108 - RNA, 19 nt, Artificial Sequence
  Description of Artificial Sequence: Synthetic oligonucleotide
acgucggcccagcgcgcag

SEQ ID NO: 2137109 - RNA, 19 nt, Artificial Sequence
  Description of Artificial Sequence: Synthetic oligonucleotide
gguaguccgccaaaguggu

SEQ ID NO: 2137110 - RNA, 19 nt, Artificial Sequence
  Description of Artificial Sequence: Synthetic oligonucleotide
gcugccucuugguagcucu

SEQ ID NO: 2137111 - RNA, 19 nt, Artificial Sequence
  Description of Artificial Sequence: Synthetic oligonucleotide
guaguccgccaaaguggug

SEQ ID NO: 2137112 - RNA, 19 nt, Artificial Sequence
  Description of Artificial Sequence: Synthetic oligonucleotide
gugggccaccagacgagug

SEQ ID NO: 2137113 - RNA, 19 nt, Artificial Sequence
  Description of Artificial Sequence: Synthetic oligonucleotide
ggccgagcgugcucgguac

SEQ ID NO: 2137114 - RNA, 19 nt, Artificial Sequence
  Description of Artificial Sequence: Synthetic oligonucleotide
ggcauuucggagacaggaa

SEQ ID NO: 2137115 - RNA, 19 nt, Artificial Sequence
  Description of Artificial Sequence: Synthetic oligonucleotide
ggcauaggggaaggccgag

SEQ ID NO: 2137116 - RNA, 19 nt, Artificial Sequence
  Description of Artificial Sequence: Synthetic oligonucleotide
gcgagccauaacgucggcc

SEQ ID NO: 2137117 - RNA, 19 nt, Artificial Sequence
  Description of Artificial Sequence: Synthetic oligonucleotide
gcauaggggaaggccgagc

SEQ ID NO: 2137118 - RNA, 19 nt, Artificial Sequence
  Description of Artificial Sequence: Synthetic oligonucleotide
ccauaacgucggcccagcg

SEQ ID NO: 2137119 - RNA, 19 nt, Artificial Sequence
  Description of Artificial Sequence: Synthetic oligonucleotide
ccgccaaaguggugaauuc

SEQ ID NO: 2137120 - RNA, 19 nt, Artificial Sequence
  Description of Artificial Sequence: Synthetic oligonucleotide
accaugccuuuugcuauuu

SEQ ID NO: 2137121 - RNA, 19 nt, Artificial Sequence
  Description of Artificial Sequence: Synthetic oligonucleotide
cuucuaucaccaugccuuu

SEQ ID NO: 2137122 - RNA, 19 nt, Artificial Sequence
  Description of Artificial Sequence: Synthetic oligonucleotide
cagcaccacccgccggccc

SEQ ID NO: 2137123 - RNA, 19 nt, Artificial Sequence
  Description of Artificial Sequence: Synthetic oligonucleotide
gccauaacgucggcccagc

SEQ ID NO: 2137124 - RNA, 19 nt, Artificial Sequence
  Description of Artificial Sequence: Synthetic oligonucleotide
ggugccggcagcggcugcc

SEQ ID NO: 2137125 - RNA, 19 nt, Artificial Sequence
  Description of Artificial Sequence: Synthetic oligonucleotide
ccgggagugcauucucuuc

SEQ ID NO: 2137126 - RNA, 19 nt, Artificial Sequence
  Description of Artificial Sequence: Synthetic oligonucleotide
caggaccccguaacccgca

SEQ ID NO: 2137127 - RNA, 19 nt, Artificial Sequence
  Description of Artificial Sequence: Synthetic oligonucleotide
ggaagaccucgacugacuu

SEQ ID NO: 2137128 - RNA, 19 nt, Artificial Sequence
  Description of Artificial Sequence: Synthetic oligonucleotide
cauuccgagcacgauuaau

SEQ ID NO: 2137129 - RNA, 19 nt, Artificial Sequence
  Description of Artificial Sequence: Synthetic oligonucleotide
cgugaccagcaccacccgc

SEQ ID NO: 2137130 - RNA, 19 nt, Artificial Sequence
  Description of Artificial Sequence: Synthetic oligonucleotide
gucggcccagcgcgcagca

SEQ ID NO: 2137131 - RNA, 19 nt, Artificial Sequence
  Description of Artificial Sequence: Synthetic oligonucleotide
accccguaacccgcagcca

SEQ ID NO: 2137132 - RNA, 19 nt, Artificial Sequence
  Description of Artificial Sequence: Synthetic oligonucleotide
gugugucgugaccgaaggu

SEQ ID NO: 2137133 - RNA, 19 nt, Artificial Sequence
  Description of Artificial Sequence: Synthetic oligonucleotide
acccucgggcggcggcaag

SEQ ID NO: 2137134 - RNA, 19 nt, Artificial Sequence
  Description of Artificial Sequence: Synthetic oligonucleotide
cugagucuuugguuacaau

SEQ ID NO: 2137135 - RNA, 19 nt, Artificial Sequence
  Description of Artificial Sequence: Synthetic oligonucleotide
ggccgcagccugcagcaga

SEQ ID NO: 2137136 - RNA, 19 nt, Artificial Sequence
  Description of Artificial Sequence: Synthetic oligonucleotide
gcagguaguccgccaaagu

SEQ ID NO: 2137137 - RNA, 19 nt, Artificial Sequence
  Description of Artificial Sequence: Synthetic oligonucleotide
cgggaagcgaugggcauag

SEQ ID NO: 2137138 - RNA, 19 nt, Artificial Sequence
  Description of Artificial Sequence: Synthetic oligonucleotide
ccucuugguagcucugcaa

SEQ ID NO: 2137139 - RNA, 19 nt, Artificial Sequence
  Description of Artificial Sequence: Synthetic oligonucleotide
ccaccagacgaguggaucu

SEQ ID NO: 2137140 - RNA, 19 nt, Artificial Sequence
  Description of Artificial Sequence: Synthetic oligonucleotide
ccaggaagaccucgacuga

SEQ ID NO: 2137141 - RNA, 19 nt, Artificial Sequence
  Description of Artificial Sequence: Synthetic oligonucleotide
gggcauaggggaaggccga

SEQ ID NO: 2137142 - RNA, 19 nt, Artificial Sequence
  Description of Artificial Sequence: Synthetic oligonucleotide
ccaaaguggugaauucuau

SEQ ID NO: 2137143 - RNA, 19 nt, Artificial Sequence
  Description of Artificial Sequence: Synthetic oligonucleotide
ccgcaaagcgagccauaac

SEQ ID NO: 2137144 - RNA, 19 nt, Artificial Sequence
  Description of Artificial Sequence: Synthetic oligonucleotide
caucgcagaagagccuagu

SEQ ID NO: 2137145 - RNA, 19 nt, Artificial Sequence
  Description of Artificial Sequence: Synthetic oligonucleotide
ccaugccuuuugcuauuuc

SEQ ID NO: 2137146 - RNA, 19 nt, Artificial Sequence
  Description of Artificial Sequence: Synthetic oligonucleotide
cagggccgacagccaggcc

SEQ ID NO: 2137147 - RNA, 19 nt, Artificial Sequence
  Description of Artificial Sequence: Synthetic oligonucleotide
gcgcagcacccucgggcgg

SEQ ID NO: 2137148 - RNA, 19 nt, Artificial Sequence
  Description of Artificial Sequence: Synthetic oligonucleotide
ggccaagaaggugccggca

SEQ ID NO: 2137149 - RNA, 19 nt, Artificial Sequence
  Description of Artificial Sequence: Synthetic oligonucleotide
ccccggcuuuugaugcuag

SEQ ID NO: 2137150 - RNA, 19 nt, Artificial Sequence
  Description of Artificial Sequence: Synthetic oligonucleotide
cagguccauuuccgccauc

SEQ ID NO: 2137151 - RNA, 19 nt, Artificial Sequence
  Description of Artificial Sequence: Synthetic oligonucleotide
gcugugugucgugaccgaa

SEQ ID NO: 2137152 - RNA, 19 nt, Artificial Sequence
  Description of Artificial Sequence: Synthetic oligonucleotide
cgaguggaucuuguguuca

SEQ ID NO: 2137153 - RNA, 19 nt, Artificial Sequence
  Description of Artificial Sequence: Synthetic oligonucleotide
cagcggcugccucuuggua

SEQ ID NO: 2137154 - RNA, 19 nt, Artificial Sequence
  Description of Artificial Sequence: Synthetic oligonucleotide
gggaagcgaugggcauagg

SEQ ID NO: 2137155 - RNA, 19 nt, Artificial Sequence
  Description of Artificial Sequence: Synthetic oligonucleotide
gcagcggcugccucuuggu

SEQ ID NO: 2137156 - RNA, 19 nt, Artificial Sequence
  Description of Artificial Sequence: Synthetic oligonucleotide
ccagacgaguggaucuugu

SEQ ID NO: 2137157 - RNA, 19 nt, Artificial Sequence
  Description of Artificial Sequence: Synthetic oligonucleotide
cugacugggcugggccaga

SEQ ID NO: 2137158 - RNA, 19 nt, Artificial Sequence
  Description of Artificial Sequence: Synthetic oligonucleotide
guauugacucgaggauauu

SEQ ID NO: 2137159 - RNA, 19 nt, Artificial Sequence
  Description of Artificial Sequence: Synthetic oligonucleotide
cgagcgugcucgguacaag

SEQ ID NO: 2137160 - RNA, 19 nt, Artificial Sequence
  Description of Artificial Sequence: Synthetic oligonucleotide
cgaggauauuggccaccac

SEQ ID NO: 2137161 - RNA, 19 nt, Artificial Sequence
  Description of Artificial Sequence: Synthetic oligonucleotide
ggcgggaagcgaugggcau

SEQ ID NO: 2137162 - RNA, 19 nt, Artificial Sequence
  Description of Artificial Sequence: Synthetic oligonucleotide
caaagcccgggagugcauu

SEQ ID NO: 2137163 - RNA, 19 nt, Artificial Sequence
  Description of Artificial Sequence: Synthetic oligonucleotide
cagcacccucgggcggcgg

SEQ ID NO: 2137164 - RNA, 19 nt, Artificial Sequence
  Description of Artificial Sequence: Synthetic oligonucleotide
cagcaguaacuugguuucu

SEQ ID NO: 2137165 - RNA, 19 nt, Artificial Sequence
  Description of Artificial Sequence: Synthetic oligonucleotide
gccgagcgugcucgguaca

SEQ ID NO: 2137166 - RNA, 19 nt, Artificial Sequence
  Description of Artificial Sequence: Synthetic oligonucleotide
ccuuagcaaaggauucauu

SEQ ID NO: 2137167 - RNA, 19 nt, Artificial Sequence
  Description of Artificial Sequence: Synthetic oligonucleotide
ggcugccucuugguagcuc

SEQ ID NO: 2137168 - RNA, 19 nt, Artificial Sequence
  Description of Artificial Sequence: Synthetic oligonucleotide
aguccgcagccagguccau

SEQ ID NO: 2137169 - RNA, 19 nt, Artificial Sequence
  Description of Artificial Sequence: Synthetic oligonucleotide
cgggcggcggcaaguccgc

SEQ ID NO: 2137170 - RNA, 19 nt, Artificial Sequence
  Description of Artificial Sequence: Synthetic oligonucleotide
gcgggaagcgaugggcaua

SEQ ID NO: 2137171 - RNA, 19 nt, Artificial Sequence
  Description of Artificial Sequence: Synthetic oligonucleotide
ccggcuuuugaugcuagau

SEQ ID NO: 2137172 - RNA, 19 nt, Artificial Sequence
  Description of Artificial Sequence: Synthetic oligonucleotide
ccguaacccgcagccagga

SEQ ID NO: 2137173 - RNA, 19 nt, Artificial Sequence
  Description of Artificial Sequence: Synthetic oligonucleotide
caccagacgaguggaucuu

SEQ ID NO: 2137174 - RNA, 19 nt, Artificial Sequence
  Description of Artificial Sequence: Synthetic oligonucleotide
cggcccugcgcgcccaggc

SEQ ID NO: 2137175 - RNA, 19 nt, Artificial Sequence
  Description of Artificial Sequence: Synthetic oligonucleotide
ccuagugggcugagugccu

SEQ ID NO: 2137176 - RNA, 19 nt, Artificial Sequence
  Description of Artificial Sequence: Synthetic oligonucleotide
gcgcgcccaggcuggccgc

SEQ ID NO: 2137177 - RNA, 19 nt, Artificial Sequence
  Description of Artificial Sequence: Synthetic oligonucleotide
gcacccucgggcggcggca

SEQ ID NO: 2137178 - RNA, 19 nt, Artificial Sequence
  Description of Artificial Sequence: Synthetic oligonucleotide
gccugaggcgggaagcgau

SEQ ID NO: 2137179 - RNA, 19 nt, Artificial Sequence
  Description of Artificial Sequence: Synthetic oligonucleotide
ggcccugcgcgcccaggcu

SEQ ID NO: 2137180 - RNA, 19 nt, Artificial Sequence
  Description of Artificial Sequence: Synthetic oligonucleotide
cgucggcccagcgcgcagc

SEQ ID NO: 2137181 - RNA, 19 nt, Artificial Sequence
  Description of Artificial Sequence: Synthetic oligonucleotide
ccgagcgugcucgguacaa

SEQ ID NO: 2137182 - RNA, 19 nt, Artificial Sequence
  Description of Artificial Sequence: Synthetic oligonucleotide
guccgccaaaguggugaau

SEQ ID NO: 2137183 - RNA, 19 nt, Artificial Sequence
  Description of Artificial Sequence: Synthetic oligonucleotide
ggccgcaaagcgagccaua

SEQ ID NO: 2137184 - RNA, 19 nt, Artificial Sequence
  Description of Artificial Sequence: Synthetic oligonucleotide
gccgcagccugcagcagau

SEQ ID NO: 2137185 - RNA, 19 nt, Artificial Sequence
  Description of Artificial Sequence: Synthetic oligonucleotide
gugccggcagcggcugccu

SEQ ID NO: 2137186 - RNA, 19 nt, Artificial Sequence
  Description of Artificial Sequence: Synthetic oligonucleotide
ccgcagccaggaagaccuc

SEQ ID NO: 2137187 - RNA, 19 nt, Artificial Sequence
  Description of Artificial Sequence: Synthetic oligonucleotide
gcccgggagugcauucucu

SEQ ID NO: 2137188 - RNA, 19 nt, Artificial Sequence
  Description of Artificial Sequence: Synthetic oligonucleotide
guccgcagccagguccauu

SEQ ID NO: 2137189 - RNA, 19 nt, Artificial Sequence
  Description of Artificial Sequence: Synthetic oligonucleotide
ccaccacuugaugcugaua

SEQ ID NO: 2137190 - RNA, 19 nt, Artificial Sequence
  Description of Artificial Sequence: Synthetic oligonucleotide
cguaacccgcagccaggaa

SEQ ID NO: 2137191 - RNA, 19 nt, Artificial Sequence
  Description of Artificial Sequence: Synthetic oligonucleotide
ggccaccagacgaguggau

SEQ ID NO: 2137192 - RNA, 19 nt, Artificial Sequence
  Description of Artificial Sequence: Synthetic oligonucleotide
gggcggcggcaaguccgca

SEQ ID NO: 2137193 - RNA, 19 nt, Artificial Sequence
  Description of Artificial Sequence: Synthetic oligonucleotide
gccgcccgcugcugaaguu

SEQ ID NO: 2137194 - RNA, 19 nt, Artificial Sequence
  Description of Artificial Sequence: Synthetic oligonucleotide
cccucgggcggcggcaagu

SEQ ID NO: 2137195 - RNA, 19 nt, Artificial Sequence
  Description of Artificial Sequence: Synthetic oligonucleotide
gcgcccaggcuggccgcaa

SEQ ID NO: 2137196 - RNA, 19 nt, Artificial Sequence
  Description of Artificial Sequence: Synthetic oligonucleotide
cgccgcccgcugcugaagu

SEQ ID NO: 2137197 - RNA, 19 nt, Artificial Sequence
  Description of Artificial Sequence: Synthetic oligonucleotide
ccggcagcggcugccucuu

SEQ ID NO: 2137198 - RNA, 19 nt, Artificial Sequence
  Description of Artificial Sequence: Synthetic oligonucleotide
cgcgcccaggcuggccgca

SEQ ID NO: 2137199 - RNA, 19 nt, Artificial Sequence
  Description of Artificial Sequence: Synthetic oligonucleotide
cggcugccucuugguagcu

SEQ ID NO: 2137200 - RNA, 19 nt, Artificial Sequence
  Description of Artificial Sequence: Synthetic oligonucleotide
aauacagugggauucagcu

SEQ ID NO: 2137201 - RNA, 19 nt, Artificial Sequence
  Description of Artificial Sequence: Synthetic oligonucleotide
ucuauuucacauuuuauug

SEQ ID NO: 2137202 - RNA, 19 nt, Artificial Sequence
  Description of Artificial Sequence: Synthetic oligonucleotide
gugggauucagcuauaugg

SEQ ID NO: 2137203 - RNA, 19 nt, Artificial Sequence
  Description of Artificial Sequence: Synthetic oligonucleotide
gaagacuaaagccacaccc

SEQ ID NO: 2137204 - RNA, 19 nt, Artificial Sequence
  Description of Artificial Sequence: Synthetic oligonucleotide
auuggaauggccucgcgcc

SEQ ID NO: 2137205 - RNA, 19 nt, Artificial Sequence
  Description of Artificial Sequence: Synthetic oligonucleotide
uuauugugcucauuaaugg

SEQ ID NO: 2137206 - RNA, 19 nt, Artificial Sequence
  Description of Artificial Sequence: Synthetic oligonucleotide
auucauuccuuuuagauga

SEQ ID NO: 2137207 - RNA, 19 nt, Artificial Sequence
  Description of Artificial Sequence: Synthetic oligonucleotide
uuuuagaugagcugcaugu

SEQ ID NO: 2137208 - RNA, 19 nt, Artificial Sequence
  Description of Artificial Sequence: Synthetic oligonucleotide
agucuuauuauguaguuca

SEQ ID NO: 2137209 - RNA, 19 nt, Artificial Sequence
  Description of Artificial Sequence: Synthetic oligonucleotide
uagaacuacacucaggcgu

SEQ ID NO: 2137210 - RNA, 19 nt, Artificial Sequence
  Description of Artificial Sequence: Synthetic oligonucleotide
aaggugaaagcacacagca

SEQ ID NO: 2137211 - RNA, 19 nt, Artificial Sequence
  Description of Artificial Sequence: Synthetic oligonucleotide
ugauuuucuccacauaccc

SEQ ID NO: 2137212 - RNA, 19 nt, Artificial Sequence
  Description of Artificial Sequence: Synthetic oligonucleotide
uugucuuugacgaaugaug

SEQ ID NO: 2137213 - RNA, 19 nt, Artificial Sequence
  Description of Artificial Sequence: Synthetic oligonucleotide
uuaauggucuggaagaagu

SEQ ID NO: 2137214 - RNA, 19 nt, Artificial Sequence
  Description of Artificial Sequence: Synthetic oligonucleotide
uugaauucauuccuuuuag

SEQ ID NO: 2137215 - RNA, 19 nt, Artificial Sequence
  Description of Artificial Sequence: Synthetic oligonucleotide
ucauacgagauccagucug

SEQ ID NO: 2137216 - RNA, 19 nt, Artificial Sequence
  Description of Artificial Sequence: Synthetic oligonucleotide
uggaaguuagaacacggag

SEQ ID NO: 2137217 - RNA, 19 nt, Artificial Sequence
  Description of Artificial Sequence: Synthetic oligonucleotide
uugacgaaugaugacaagg

SEQ ID NO: 2137218 - RNA, 19 nt, Artificial Sequence
  Description of Artificial Sequence: Synthetic oligonucleotide
aaaugcccgaguucucucc

SEQ ID NO: 2137219 - RNA, 19 nt, Artificial Sequence
  Description of Artificial Sequence: Synthetic oligonucleotide
gauuuguuggcuagaagcg

SEQ ID NO: 2137220 - RNA, 19 nt, Artificial Sequence
  Description of Artificial Sequence: Synthetic oligonucleotide
acacucuucagucacuacg

SEQ ID NO: 2137221 - RNA, 19 nt, Artificial Sequence
  Description of Artificial Sequence: Synthetic oligonucleotide
ugaaccuucuucauacgag

SEQ ID NO: 2137222 - RNA, 19 nt, Artificial Sequence
  Description of Artificial Sequence: Synthetic oligonucleotide
ugacgaaugaugacaaggc

SEQ ID NO: 2137223 - RNA, 19 nt, Artificial Sequence
  Description of Artificial Sequence: Synthetic oligonucleotide
ugucuuugacgaaugauga

SEQ ID NO: 2137224 - RNA, 19 nt, Artificial Sequence
  Description of Artificial Sequence: Synthetic oligonucleotide
cucauuaauggucuggaag

SEQ ID NO: 2137225 - RNA, 19 nt, Artificial Sequence
  Description of Artificial Sequence: Synthetic oligonucleotide
ggauuuguuggcuagaagc

SEQ ID NO: 2137226 - RNA, 19 nt, Artificial Sequence
  Description of Artificial Sequence: Synthetic oligonucleotide
guuuuaaucuggaaguuag

SEQ ID NO: 2137227 - RNA, 19 nt, Artificial Sequence
  Description of Artificial Sequence: Synthetic oligonucleotide
uuaaucuggaaguuagaac

SEQ ID NO: 2137228 - RNA, 19 nt, Artificial Sequence
  Description of Artificial Sequence: Synthetic oligonucleotide
uauggacucaauuugcuuc

SEQ ID NO: 2137229 - RNA, 19 nt, Artificial Sequence
  Description of Artificial Sequence: Synthetic oligonucleotide
ucacauuuuauugugcuca

SEQ ID NO: 2137230 - RNA, 19 nt, Artificial Sequence
  Description of Artificial Sequence: Synthetic oligonucleotide
uacugaaccuucuucauac

SEQ ID NO: 2137231 - RNA, 19 nt, Artificial Sequence
  Description of Artificial Sequence: Synthetic oligonucleotide
aaugcccgaguucucuccc

SEQ ID NO: 2137232 - RNA, 19 nt, Artificial Sequence
  Description of Artificial Sequence: Synthetic oligonucleotide
aauuuaccaaguagccucc

SEQ ID NO: 2137233 - RNA, 19 nt, Artificial Sequence
  Description of Artificial Sequence: Synthetic oligonucleotide
uguaguucagccuagccua

SEQ ID NO: 2137234 - RNA, 19 nt, Artificial Sequence
  Description of Artificial Sequence: Synthetic oligonucleotide
ucuuugacgaaugaugaca

SEQ ID NO: 2137235 - RNA, 19 nt, Artificial Sequence
  Description of Artificial Sequence: Synthetic oligonucleotide
acuaaagccacacccacca

SEQ ID NO: 2137236 - RNA, 19 nt, Artificial Sequence
  Description of Artificial Sequence: Synthetic oligonucleotide
aguugaggagcucacugac

SEQ ID NO: 2137237 - RNA, 19 nt, Artificial Sequence
  Description of Artificial Sequence: Synthetic oligonucleotide
aaauucuccuacugaaccu

SEQ ID NO: 2137238 - RNA, 19 nt, Artificial Sequence
  Description of Artificial Sequence: Synthetic oligonucleotide
ucaggcguuguuuuaaucu

SEQ ID NO: 2137239 - RNA, 19 nt, Artificial Sequence
  Description of Artificial Sequence: Synthetic oligonucleotide
cuucauacgagauccaguc

SEQ ID NO: 2137240 - RNA, 19 nt, Artificial Sequence
  Description of Artificial Sequence: Synthetic oligonucleotide
ucaauuugcuuccggaccu

SEQ ID NO: 2137241 - RNA, 19 nt, Artificial Sequence
  Description of Artificial Sequence: Synthetic oligonucleotide
uuccuuuuagaugagcugc

SEQ ID NO: 2137242 - RNA, 19 nt, Artificial Sequence
  Description of Artificial Sequence: Synthetic oligonucleotide
gcaacuaaggcucuauugg

SEQ ID NO: 2137243 - RNA, 19 nt, Artificial Sequence
  Description of Artificial Sequence: Synthetic oligonucleotide
gauucagcuauauggacuc

SEQ ID NO: 2137244 - RNA, 19 nt, Artificial Sequence
  Description of Artificial Sequence: Synthetic oligonucleotide
uagaacacggaguacacuc

SEQ ID NO: 2137245 - RNA, 19 nt, Artificial Sequence
  Description of Artificial Sequence: Synthetic oligonucleotide
uuuaaucuggaaguuagaa

SEQ ID NO: 2137246 - RNA, 19 nt, Artificial Sequence
  Description of Artificial Sequence: Synthetic oligonucleotide
gacaacuucuccucgagca

SEQ ID NO: 2137247 - RNA, 19 nt, Artificial Sequence
  Description of Artificial Sequence: Synthetic oligonucleotide
agagugcaaauucuccuac

SEQ ID NO: 2137248 - RNA, 19 nt, Artificial Sequence
  Description of Artificial Sequence: Synthetic oligonucleotide
uauuggaauggccucgcgc

SEQ ID NO: 2137249 - RNA, 19 nt, Artificial Sequence
  Description of Artificial Sequence: Synthetic oligonucleotide
uaaggugaaagcacacagc

SEQ ID NO: 2137250 - RNA, 19 nt, Artificial Sequence
  Description of Artificial Sequence: Synthetic oligonucleotide
uaaggcucuauuggaaugg

SEQ ID NO: 2137251 - RNA, 19 nt, Artificial Sequence
  Description of Artificial Sequence: Synthetic oligonucleotide
uuauuauguaguucagccu

SEQ ID NO: 2137252 - RNA, 19 nt, Artificial Sequence
  Description of Artificial Sequence: Synthetic oligonucleotide
uccagaauaaguguuguuc

SEQ ID NO: 2137253 - RNA, 19 nt, Artificial Sequence
  Description of Artificial Sequence: Synthetic oligonucleotide
caagcgaagacuaaagcca

SEQ ID NO: 2137254 - RNA, 19 nt, Artificial Sequence
  Description of Artificial Sequence: Synthetic oligonucleotide
auaaguguuguuccaucag

SEQ ID NO: 2137255 - RNA, 19 nt, Artificial Sequence
  Description of Artificial Sequence: Synthetic oligonucleotide
agcuauauggacucaauuu

SEQ ID NO: 2137256 - RNA, 19 nt, Artificial Sequence
  Description of Artificial Sequence: Synthetic oligonucleotide
uaccaaguagccuccagcc

SEQ ID NO: 2137257 - RNA, 19 nt, Artificial Sequence
  Description of Artificial Sequence: Synthetic oligonucleotide
agugcaaauucuccuacug

SEQ ID NO: 2137258 - RNA, 19 nt, Artificial Sequence
  Description of Artificial Sequence: Synthetic oligonucleotide
aagcgcgaggccuucgugg

SEQ ID NO: 2137259 - RNA, 19 nt, Artificial Sequence
  Description of Artificial Sequence: Synthetic oligonucleotide
aguuagaacacggaguaca

SEQ ID NO: 2137260 - RNA, 19 nt, Artificial Sequence
  Description of Artificial Sequence: Synthetic oligonucleotide
gcuauauggacucaauuug

SEQ ID NO: 2137261 - RNA, 19 nt, Artificial Sequence
  Description of Artificial Sequence: Synthetic oligonucleotide
uuggcuagaagcgcgaggc

SEQ ID NO: 2137262 - RNA, 19 nt, Artificial Sequence
  Description of Artificial Sequence: Synthetic oligonucleotide
uaauacagugggauucagc

SEQ ID NO: 2137263 - RNA, 19 nt, Artificial Sequence
  Description of Artificial Sequence: Synthetic oligonucleotide
ucuuauuauguaguucagc

SEQ ID NO: 2137264 - RNA, 19 nt, Artificial Sequence
  Description of Artificial Sequence: Synthetic oligonucleotide
augaugacaaggcaagcga

SEQ ID NO: 2137265 - RNA, 19 nt, Artificial Sequence
  Description of Artificial Sequence: Synthetic oligonucleotide
acgaacucuuccaucagcc

SEQ ID NO: 2137266 - RNA, 19 nt, Artificial Sequence
  Description of Artificial Sequence: Synthetic oligonucleotide
agcuuuaaggugaaagcac

SEQ ID NO: 2137267 - RNA, 19 nt, Artificial Sequence
  Description of Artificial Sequence: Synthetic oligonucleotide
aaguugaggagcucacuga

SEQ ID NO: 2137268 - RNA, 19 nt, Artificial Sequence
  Description of Artificial Sequence: Synthetic oligonucleotide
uucgcagagcuuuaaggug

SEQ ID NO: 2137269 - RNA, 19 nt, Artificial Sequence
  Description of Artificial Sequence: Synthetic oligonucleotide
gaaggugcuaguaccacag

SEQ ID NO: 2137270 - RNA, 19 nt, Artificial Sequence
  Description of Artificial Sequence: Synthetic oligonucleotide
ucuucauacgagauccagu

SEQ ID NO: 2137271 - RNA, 19 nt, Artificial Sequence
  Description of Artificial Sequence: Synthetic oligonucleotide
gacccagcauaauacagug

SEQ ID NO: 2137272 - RNA, 19 nt, Artificial Sequence
  Description of Artificial Sequence: Synthetic oligonucleotide
ucgcagagcuuuaagguga

SEQ ID NO: 2137273 - RNA, 19 nt, Artificial Sequence
  Description of Artificial Sequence: Synthetic oligonucleotide
aagcgaagacuaaagccac

SEQ ID NO: 2137274 - RNA, 19 nt, Artificial Sequence
  Description of Artificial Sequence: Synthetic oligonucleotide
ggagcggccaucuugcucg

SEQ ID NO: 2137275 - RNA, 19 nt, Artificial Sequence
  Description of Artificial Sequence: Synthetic oligonucleotide
gcaagcgaagacuaaagcc

SEQ ID NO: 2137276 - RNA, 19 nt, Artificial Sequence
  Description of Artificial Sequence: Synthetic oligonucleotide
ucugcaagacccagcauaa

SEQ ID NO: 2137277 - RNA, 19 nt, Artificial Sequence
  Description of Artificial Sequence: Synthetic oligonucleotide
ugaacggcagcuuuugaau

SEQ ID NO: 2137278 - RNA, 19 nt, Artificial Sequence
  Description of Artificial Sequence: Synthetic oligonucleotide
ugcaagacccagcauaaua

SEQ ID NO: 2137279 - RNA, 19 nt, Artificial Sequence
  Description of Artificial Sequence: Synthetic oligonucleotide
aaggcucuauuggaauggc

SEQ ID NO: 2137280 - RNA, 19 nt, Artificial Sequence
  Description of Artificial Sequence: Synthetic oligonucleotide
agcgagaguaauccaugcg

SEQ ID NO: 2137281 - RNA, 19 nt, Artificial Sequence
  Description of Artificial Sequence: Synthetic oligonucleotide
uacgaacucuuccaucagc

SEQ ID NO: 2137282 - RNA, 19 nt, Artificial Sequence
  Description of Artificial Sequence: Synthetic oligonucleotide
cccagcauaauacaguggg

SEQ ID NO: 2137283 - RNA, 19 nt, Artificial Sequence
  Description of Artificial Sequence: Synthetic oligonucleotide
gcgagaguaauccaugcgg

SEQ ID NO: 2137284 - RNA, 19 nt, Artificial Sequence
  Description of Artificial Sequence: Synthetic oligonucleotide
ucacugucgcaccuguugc

SEQ ID NO: 2137285 - RNA, 19 nt, Artificial Sequence
  Description of Artificial Sequence: Synthetic oligonucleotide
guagaacuacacucaggcg

SEQ ID NO: 2137286 - RNA, 19 nt, Artificial Sequence
  Description of Artificial Sequence: Synthetic oligonucleotide
cuaccuacaaauuuaccaa

SEQ ID NO: 2137287 - RNA, 19 nt, Artificial Sequence
  Description of Artificial Sequence: Synthetic oligonucleotide
uucuucauacgagauccag

SEQ ID NO: 2137288 - RNA, 19 nt, Artificial Sequence
  Description of Artificial Sequence: Synthetic oligonucleotide
ggcgcaagcagcuggaggg

SEQ ID NO: 2137289 - RNA, 19 nt, Artificial Sequence
  Description of Artificial Sequence: Synthetic oligonucleotide
uuccggaccuuuucaagag

SEQ ID NO: 2137290 - RNA, 19 nt, Artificial Sequence
  Description of Artificial Sequence: Synthetic oligonucleotide
gugcuaguaccacagacac

SEQ ID NO: 2137291 - RNA, 19 nt, Artificial Sequence
  Description of Artificial Sequence: Synthetic oligonucleotide
gucacuacgaacucuucca

SEQ ID NO: 2137292 - RNA, 19 nt, Artificial Sequence
  Description of Artificial Sequence: Synthetic oligonucleotide
ugaugacaaggcaagcgaa

SEQ ID NO: 2137293 - RNA, 19 nt, Artificial Sequence
  Description of Artificial Sequence: Synthetic oligonucleotide
ggugccuucaaacuuccag

SEQ ID NO: 2137294 - RNA, 19 nt, Artificial Sequence
  Description of Artificial Sequence: Synthetic oligonucleotide
cauacgagauccagucugc

SEQ ID NO: 2137295 - RNA, 19 nt, Artificial Sequence
  Description of Artificial Sequence: Synthetic oligonucleotide
cuuuuagaugagcugcaug

SEQ ID NO: 2137296 - RNA, 19 nt, Artificial Sequence
  Description of Artificial Sequence: Synthetic oligonucleotide
uccaucagagcugaacggc

SEQ ID NO: 2137297 - RNA, 19 nt, Artificial Sequence
  Description of Artificial Sequence: Synthetic oligonucleotide
uacccuguagaacuacacu

SEQ ID NO: 2137298 - RNA, 19 nt, Artificial Sequence
  Description of Artificial Sequence: Synthetic oligonucleotide
uuugacgaaugaugacaag

SEQ ID NO: 2137299 - RNA, 19 nt, Artificial Sequence
  Description of Artificial Sequence: Synthetic oligonucleotide
aaguuagaacacggaguac

SEQ ID NO: 2137300 - RNA, 19 nt, Artificial Sequence
  Description of Artificial Sequence: Synthetic oligonucleotide
uguuccaucagagcugaac

SEQ ID NO: 2137301 - RNA, 19 nt, Artificial Sequence
  Description of Artificial Sequence: Synthetic oligonucleotide
uuuagaugagcugcaugug

SEQ ID NO: 2137302 - RNA, 19 nt, Artificial Sequence
  Description of Artificial Sequence: Synthetic oligonucleotide
ccagaauaaguguuguucc

SEQ ID NO: 2137303 - RNA, 19 nt, Artificial Sequence
  Description of Artificial Sequence: Synthetic oligonucleotide
auuaauggucuggaagaag

SEQ ID NO: 2137304 - RNA, 19 nt, Artificial Sequence
  Description of Artificial Sequence: Synthetic oligonucleotide
uagccuaccuacaaauuua

SEQ ID NO: 2137305 - RNA, 19 nt, Artificial Sequence
  Description of Artificial Sequence: Synthetic oligonucleotide
ccuucuucauacgagaucc

SEQ ID NO: 2137306 - RNA, 19 nt, Artificial Sequence
  Description of Artificial Sequence: Synthetic oligonucleotide
acuaaggcucuauuggaau

SEQ ID NO: 2137307 - RNA, 19 nt, Artificial Sequence
  Description of Artificial Sequence: Synthetic oligonucleotide
acggaguacacucuucagu

SEQ ID NO: 2137308 - RNA, 19 nt, Artificial Sequence
  Description of Artificial Sequence: Synthetic oligonucleotide
agcucuauuucacauuuua

SEQ ID NO: 2137309 - RNA, 19 nt, Artificial Sequence
  Description of Artificial Sequence: Synthetic oligonucleotide
ugacaaggcaagcgaagac

SEQ ID NO: 2137310 - RNA, 19 nt, Artificial Sequence
  Description of Artificial Sequence: Synthetic oligonucleotide
uucaaacuuccagaauaag

SEQ ID NO: 2137311 - RNA, 19 nt, Artificial Sequence
  Description of Artificial Sequence: Synthetic oligonucleotide
cguuguuuuaaucuggaag

SEQ ID NO: 2137312 - RNA, 19 nt, Artificial Sequence
  Description of Artificial Sequence: Synthetic oligonucleotide
gacgaaugaugacaaggca

SEQ ID NO: 2137313 - RNA, 19 nt, Artificial Sequence
  Description of Artificial Sequence: Synthetic oligonucleotide
cugcaugugauuuucucca

SEQ ID NO: 2137314 - RNA, 19 nt, Artificial Sequence
  Description of Artificial Sequence: Synthetic oligonucleotide
ucgggagcggccaucuugc

SEQ ID NO: 2137315 - RNA, 19 nt, Artificial Sequence
  Description of Artificial Sequence: Synthetic oligonucleotide
ugcucauuaauggucugga

SEQ ID NO: 2137316 - RNA, 19 nt, Artificial Sequence
  Description of Artificial Sequence: Synthetic oligonucleotide
ccuaccuacaaauuuacca

SEQ ID NO: 2137317 - RNA, 19 nt, Artificial Sequence
  Description of Artificial Sequence: Synthetic oligonucleotide
uuuaguccuuuauuaguuu

SEQ ID NO: 2137318 - RNA, 19 nt, Artificial Sequence
  Description of Artificial Sequence: Synthetic oligonucleotide
uguuuuaaucuggaaguua

SEQ ID NO: 2137319 - RNA, 19 nt, Artificial Sequence
  Description of Artificial Sequence: Synthetic oligonucleotide
ugacaacuucuccucgagc

SEQ ID NO: 2137320 - RNA, 19 nt, Artificial Sequence
  Description of Artificial Sequence: Synthetic oligonucleotide
cucuauuggaauggccucg

SEQ ID NO: 2137321 - RNA, 19 nt, Artificial Sequence
  Description of Artificial Sequence: Synthetic oligonucleotide
guuggcuagaagcgcgagg

SEQ ID NO: 2137322 - RNA, 19 nt, Artificial Sequence
  Description of Artificial Sequence: Synthetic oligonucleotide
caggcguuguuuuaaucug

SEQ ID NO: 2137323 - RNA, 19 nt, Artificial Sequence
  Description of Artificial Sequence: Synthetic oligonucleotide
auacccuguagaacuacac

SEQ ID NO: 2137324 - RNA, 19 nt, Artificial Sequence
  Description of Artificial Sequence: Synthetic oligonucleotide
cuccgagcagccaaaugcc

SEQ ID NO: 2137325 - RNA, 19 nt, Artificial Sequence
  Description of Artificial Sequence: Synthetic oligonucleotide
uucauacgagauccagucu

SEQ ID NO: 2137326 - RNA, 19 nt, Artificial Sequence
  Description of Artificial Sequence: Synthetic oligonucleotide
ggcaacuaaggcucuauug

SEQ ID NO: 2137327 - RNA, 19 nt, Artificial Sequence
  Description of Artificial Sequence: Synthetic oligonucleotide
agugggauucagcuauaug

SEQ ID NO: 2137328 - RNA, 19 nt, Artificial Sequence
  Description of Artificial Sequence: Synthetic oligonucleotide
acacggaguacacucuuca

SEQ ID NO: 2137329 - RNA, 19 nt, Artificial Sequence
  Description of Artificial Sequence: Synthetic oligonucleotide
ugucgcaccuguugcagca

SEQ ID NO: 2137330 - RNA, 19 nt, Artificial Sequence
  Description of Artificial Sequence: Synthetic oligonucleotide
ucuauuggaauggccucgc

SEQ ID NO: 2137331 - RNA, 19 nt, Artificial Sequence
  Description of Artificial Sequence: Synthetic oligonucleotide
agccaaaugcccgaguucu

SEQ ID NO: 2137332 - RNA, 19 nt, Artificial Sequence
  Description of Artificial Sequence: Synthetic oligonucleotide
ucagcuauauggacucaau

SEQ ID NO: 2137333 - RNA, 19 nt, Artificial Sequence
  Description of Artificial Sequence: Synthetic oligonucleotide
uuuucuccacauacccugu

SEQ ID NO: 2137334 - RNA, 19 nt, Artificial Sequence
  Description of Artificial Sequence: Synthetic oligonucleotide
acugacaacuucuccucga

SEQ ID NO: 2137335 - RNA, 19 nt, Artificial Sequence
  Description of Artificial Sequence: Synthetic oligonucleotide
ugccuucaaacuuccagaa

SEQ ID NO: 2137336 - RNA, 19 nt, Artificial Sequence
  Description of Artificial Sequence: Synthetic oligonucleotide
aacacggaguacacucuuc

SEQ ID NO: 2137337 - RNA, 19 nt, Artificial Sequence
  Description of Artificial Sequence: Synthetic oligonucleotide
caacauggcgaaguugagg

SEQ ID NO: 2137338 - RNA, 19 nt, Artificial Sequence
  Description of Artificial Sequence: Synthetic oligonucleotide
cuuugacgaaugaugacaa

SEQ ID NO: 2137339 - RNA, 19 nt, Artificial Sequence
  Description of Artificial Sequence: Synthetic oligonucleotide
ucagccuagccuaccuaca

SEQ ID NO: 2137340 - RNA, 19 nt, Artificial Sequence
  Description of Artificial Sequence: Synthetic oligonucleotide
acacagagugcaaauucuc

SEQ ID NO: 2137341 - RNA, 19 nt, Artificial Sequence
  Description of Artificial Sequence: Synthetic oligonucleotide
agcgcgaggccuucguggg

SEQ ID NO: 2137342 - RNA, 19 nt, Artificial Sequence
  Description of Artificial Sequence: Synthetic oligonucleotide
gcugcaugugauuuucucc

SEQ ID NO: 2137343 - RNA, 19 nt, Artificial Sequence
  Description of Artificial Sequence: Synthetic oligonucleotide
aacuaaggcucuauuggaa

SEQ ID NO: 2137344 - RNA, 19 nt, Artificial Sequence
  Description of Artificial Sequence: Synthetic oligonucleotide
gagguuccagcuccgagca

SEQ ID NO: 2137345 - RNA, 19 nt, Artificial Sequence
  Description of Artificial Sequence: Synthetic oligonucleotide
cuauccaguugucuuugac

SEQ ID NO: 2137346 - RNA, 19 nt, Artificial Sequence
  Description of Artificial Sequence: Synthetic oligonucleotide
agcauaauacagugggauu

SEQ ID NO: 2137347 - RNA, 19 nt, Artificial Sequence
  Description of Artificial Sequence: Synthetic oligonucleotide
acgaaugaugacaaggcaa

SEQ ID NO: 2137348 - RNA, 19 nt, Artificial Sequence
  Description of Artificial Sequence: Synthetic oligonucleotide
cugacaacuucuccucgag

SEQ ID NO: 2137349 - RNA, 19 nt, Artificial Sequence
  Description of Artificial Sequence: Synthetic oligonucleotide
gugccuucaaacuuccaga

SEQ ID NO: 2137350 - RNA, 19 nt, Artificial Sequence
  Description of Artificial Sequence: Synthetic oligonucleotide
uacacucaggcguuguuuu

SEQ ID NO: 2137351 - RNA, 19 nt, Artificial Sequence
  Description of Artificial Sequence: Synthetic oligonucleotide
gaaugaugacaaggcaagc

SEQ ID NO: 2137352 - RNA, 19 nt, Artificial Sequence
  Description of Artificial Sequence: Synthetic oligonucleotide
aguucagccuagccuaccu

SEQ ID NO: 2137353 - RNA, 19 nt, Artificial Sequence
  Description of Artificial Sequence: Synthetic oligonucleotide
uuggaauggccucgcgccc

SEQ ID NO: 2137354 - RNA, 19 nt, Artificial Sequence
  Description of Artificial Sequence: Synthetic oligonucleotide
agaauaaguguuguuccau

SEQ ID NO: 2137355 - RNA, 19 nt, Artificial Sequence
  Description of Artificial Sequence: Synthetic oligonucleotide
agccuaccuacaaauuuac

SEQ ID NO: 2137356 - RNA, 19 nt, Artificial Sequence
  Description of Artificial Sequence: Synthetic oligonucleotide
ucgcggaggcuccuggucc

SEQ ID NO: 2137357 - RNA, 19 nt, Artificial Sequence
  Description of Artificial Sequence: Synthetic oligonucleotide
acauacccuguagaacuac

SEQ ID NO: 2137358 - RNA, 19 nt, Artificial Sequence
  Description of Artificial Sequence: Synthetic oligonucleotide
augcggauuuguuggcuag

SEQ ID NO: 2137359 - RNA, 19 nt, Artificial Sequence
  Description of Artificial Sequence: Synthetic oligonucleotide
ccaaguagccuccagcccc

SEQ ID NO: 2137360 - RNA, 19 nt, Artificial Sequence
  Description of Artificial Sequence: Synthetic oligonucleotide
aguaccacagacacagagu

SEQ ID NO: 2137361 - RNA, 19 nt, Artificial Sequence
  Description of Artificial Sequence: Synthetic oligonucleotide
ucauuccuuuuagaugagc

SEQ ID NO: 2137362 - RNA, 19 nt, Artificial Sequence
  Description of Artificial Sequence: Synthetic oligonucleotide
cauuccuuuuagaugagcu

SEQ ID NO: 2137363 - RNA, 19 nt, Artificial Sequence
  Description of Artificial Sequence: Synthetic oligonucleotide
ucacuacgaacucuuccau

SEQ ID NO: 2137364 - RNA, 19 nt, Artificial Sequence
  Description of Artificial Sequence: Synthetic oligonucleotide
aguugucuuugacgaauga

SEQ ID NO: 2137365 - RNA, 19 nt, Artificial Sequence
  Description of Artificial Sequence: Synthetic oligonucleotide
cuuccggaccuuuucaaga

SEQ ID NO: 2137366 - RNA, 19 nt, Artificial Sequence
  Description of Artificial Sequence: Synthetic oligonucleotide
caagagccuuucuauccag

SEQ ID NO: 2137367 - RNA, 19 nt, Artificial Sequence
  Description of Artificial Sequence: Synthetic oligonucleotide
uccggaccuuuucaagagc

SEQ ID NO: 2137368 - RNA, 19 nt, Artificial Sequence
  Description of Artificial Sequence: Synthetic oligonucleotide
uuagaacacggaguacacu

SEQ ID NO: 2137369 - RNA, 19 nt, Artificial Sequence
  Description of Artificial Sequence: Synthetic oligonucleotide
cagcgagaguaauccaugc

SEQ ID NO: 2137370 - RNA, 19 nt, Artificial Sequence
  Description of Artificial Sequence: Synthetic oligonucleotide
guuagaacacggaguacac

SEQ ID NO: 2137371 - RNA, 19 nt, Artificial Sequence
  Description of Artificial Sequence: Synthetic oligonucleotide
agagcugaacggcagcuuu

SEQ ID NO: 2137372 - RNA, 19 nt, Artificial Sequence
  Description of Artificial Sequence: Synthetic oligonucleotide
uuguuggcuagaagcgcga

SEQ ID NO: 2137373 - RNA, 19 nt, Artificial Sequence
  Description of Artificial Sequence: Synthetic oligonucleotide
auaauacagugggauucag

SEQ ID NO: 2137374 - RNA, 19 nt, Artificial Sequence
  Description of Artificial Sequence: Synthetic oligonucleotide
uucagcuauauggacucaa

SEQ ID NO: 2137375 - RNA, 19 nt, Artificial Sequence
  Description of Artificial Sequence: Synthetic oligonucleotide
ucuugcucgcggaggcucc

SEQ ID NO: 2137376 - RNA, 19 nt, Artificial Sequence
  Description of Artificial Sequence: Synthetic oligonucleotide
uacgagauccagucugcaa

SEQ ID NO: 2137377 - RNA, 19 nt, Artificial Sequence
  Description of Artificial Sequence: Synthetic oligonucleotide
ggcaagcgaagacuaaagc

SEQ ID NO: 2137378 - RNA, 19 nt, Artificial Sequence
  Description of Artificial Sequence: Synthetic oligonucleotide
gucuuugacgaaugaugac

SEQ ID NO: 2137379 - RNA, 19 nt, Artificial Sequence
  Description of Artificial Sequence: Synthetic oligonucleotide
cuucgcagagcuuuaaggu

SEQ ID NO: 2137380 - RNA, 19 nt, Artificial Sequence
  Description of Artificial Sequence: Synthetic oligonucleotide
ugcuaguaccacagacaca

SEQ ID NO: 2137381 - RNA, 19 nt, Artificial Sequence
  Description of Artificial Sequence: Synthetic oligonucleotide
auggugccuucaaacuucc

SEQ ID NO: 2137382 - RNA, 19 nt, Artificial Sequence
  Description of Artificial Sequence: Synthetic oligonucleotide
uccaugcggauuuguuggc

SEQ ID NO: 2137383 - RNA, 19 nt, Artificial Sequence
  Description of Artificial Sequence: Synthetic oligonucleotide
ugcucgcggaggcuccugg

SEQ ID NO: 2137384 - RNA, 19 nt, Artificial Sequence
  Description of Artificial Sequence: Synthetic oligonucleotide
aucuugcucgcggaggcuc

SEQ ID NO: 2137385 - RNA, 19 nt, Artificial Sequence
  Description of Artificial Sequence: Synthetic oligonucleotide
cucgggagcggccaucuug

SEQ ID NO: 2137386 - RNA, 19 nt, Artificial Sequence
  Description of Artificial Sequence: Synthetic oligonucleotide
accuacaaauuuaccaagu

SEQ ID NO: 2137387 - RNA, 19 nt, Artificial Sequence
  Description of Artificial Sequence: Synthetic oligonucleotide
agaguaauccaugcggauu

SEQ ID NO: 2137388 - RNA, 19 nt, Artificial Sequence
  Description of Artificial Sequence: Synthetic oligonucleotide
caguugucuuugacgaaug

SEQ ID NO: 2137389 - RNA, 19 nt, Artificial Sequence
  Description of Artificial Sequence: Synthetic oligonucleotide
uccagucugcaagacccag

SEQ ID NO: 2137390 - RNA, 19 nt, Artificial Sequence
  Description of Artificial Sequence: Synthetic oligonucleotide
uuguuuuaaucuggaaguu

SEQ ID NO: 2137391 - RNA, 19 nt, Artificial Sequence
  Description of Artificial Sequence: Synthetic oligonucleotide
cugaaccuucuucauacga

SEQ ID NO: 2137392 - RNA, 19 nt, Artificial Sequence
  Description of Artificial Sequence: Synthetic oligonucleotide
agacccagcauaauacagu

SEQ ID NO: 2137393 - RNA, 19 nt, Artificial Sequence
  Description of Artificial Sequence: Synthetic oligonucleotide
ggagcagucacugucgcac

SEQ ID NO: 2137394 - RNA, 19 nt, Artificial Sequence
  Description of Artificial Sequence: Synthetic oligonucleotide
gaguaauccaugcggauuu

SEQ ID NO: 2137395 - RNA, 19 nt, Artificial Sequence
  Description of Artificial Sequence: Synthetic oligonucleotide
aggcguuguuuuaaucugg

SEQ ID NO: 2137396 - RNA, 19 nt, Artificial Sequence
  Description of Artificial Sequence: Synthetic oligonucleotide
caggggaaggugcuaguac

SEQ ID NO: 2137397 - RNA, 19 nt, Artificial Sequence
  Description of Artificial Sequence: Synthetic oligonucleotide
cuauuggaauggccucgcg

SEQ ID NO: 2137398 - RNA, 19 nt, Artificial Sequence
  Description of Artificial Sequence: Synthetic oligonucleotide
cacggaguacacucuucag

SEQ ID NO: 2137399 - RNA, 19 nt, Artificial Sequence
  Description of Artificial Sequence: Synthetic oligonucleotide
agagguggccgccccgggg

SEQ ID NO: 2137400 - RNA, 19 nt, Artificial Sequence
  Description of Artificial Sequence: Synthetic oligonucleotide
gaccuaaugcccgcgcccc

SEQ ID NO: 2137401 - RNA, 19 nt, Artificial Sequence
  Description of Artificial Sequence: Synthetic oligonucleotide
uguuggcuagaagcgcgag

SEQ ID NO: 2137402 - RNA, 19 nt, Artificial Sequence
  Description of Artificial Sequence: Synthetic oligonucleotide
gacaaggcaagcgaagacu

SEQ ID NO: 2137403 - RNA, 19 nt, Artificial Sequence
  Description of Artificial Sequence: Synthetic oligonucleotide
cugaacggcagcuuuugaa

SEQ ID NO: 2137404 - RNA, 19 nt, Artificial Sequence
  Description of Artificial Sequence: Synthetic oligonucleotide
aggcaagcgaagacuaaag

SEQ ID NO: 2137405 - RNA, 19 nt, Artificial Sequence
  Description of Artificial Sequence: Synthetic oligonucleotide
cacuacgaacucuuccauc

SEQ ID NO: 2137406 - RNA, 19 nt, Artificial Sequence
  Description of Artificial Sequence: Synthetic oligonucleotide
cuaaugcccgcgccccucg

SEQ ID NO: 2137407 - RNA, 19 nt, Artificial Sequence
  Description of Artificial Sequence: Synthetic oligonucleotide
cuggaaguuagaacacgga

SEQ ID NO: 2137408 - RNA, 19 nt, Artificial Sequence
  Description of Artificial Sequence: Synthetic oligonucleotide
uuccaucagccaacauggc

SEQ ID NO: 2137409 - RNA, 19 nt, Artificial Sequence
  Description of Artificial Sequence: Synthetic oligonucleotide
cagucuuauuauguaguuc

SEQ ID NO: 2137410 - RNA, 19 nt, Artificial Sequence
  Description of Artificial Sequence: Synthetic oligonucleotide
aaccuucuucauacgagau

SEQ ID NO: 2137411 - RNA, 19 nt, Artificial Sequence
  Description of Artificial Sequence: Synthetic oligonucleotide
uacacucuucagucacuac

SEQ ID NO: 2137412 - RNA, 19 nt, Artificial Sequence
  Description of Artificial Sequence: Synthetic oligonucleotide
cauacccuguagaacuaca

SEQ ID NO: 2137413 - RNA, 19 nt, Artificial Sequence
  Description of Artificial Sequence: Synthetic oligonucleotide
gaagcgcgaggccuucgug

SEQ ID NO: 2137414 - RNA, 19 nt, Artificial Sequence
  Description of Artificial Sequence: Synthetic oligonucleotide
ugcccgaguucucucccug

SEQ ID NO: 2137415 - RNA, 19 nt, Artificial Sequence
  Description of Artificial Sequence: Synthetic oligonucleotide
gagcagucacugucgcacc

SEQ ID NO: 2137416 - RNA, 19 nt, Artificial Sequence
  Description of Artificial Sequence: Synthetic oligonucleotide
ugcccagcucuauuucaca

SEQ ID NO: 2137417 - RNA, 19 nt, Artificial Sequence
  Description of Artificial Sequence: Synthetic oligonucleotide
ccggaccuuuucaagagcc

SEQ ID NO: 2137418 - RNA, 19 nt, Artificial Sequence
  Description of Artificial Sequence: Synthetic oligonucleotide
uggcuagaagcgcgaggcc

SEQ ID NO: 2137419 - RNA, 19 nt, Artificial Sequence
  Description of Artificial Sequence: Synthetic oligonucleotide
aagagccuuucuauccagu

SEQ ID NO: 2137420 - RNA, 19 nt, Artificial Sequence
  Description of Artificial Sequence: Synthetic oligonucleotide
ggacucaauuugcuuccgg

SEQ ID NO: 2137421 - RNA, 19 nt, Artificial Sequence
  Description of Artificial Sequence: Synthetic oligonucleotide
gggauucagcuauauggac

SEQ ID NO: 2137422 - RNA, 19 nt, Artificial Sequence
  Description of Artificial Sequence: Synthetic oligonucleotide
agaagcgcgaggccuucgu

SEQ ID NO: 2137423 - RNA, 19 nt, Artificial Sequence
  Description of Artificial Sequence: Synthetic oligonucleotide
cucaggcguuguuuuaauc

SEQ ID NO: 2137424 - RNA, 19 nt, Artificial Sequence
  Description of Artificial Sequence: Synthetic oligonucleotide
uccucgagcaccggggccu

SEQ ID NO: 2137425 - RNA, 19 nt, Artificial Sequence
  Description of Artificial Sequence: Synthetic oligonucleotide
acaaggcaagcgaagacua

SEQ ID NO: 2137426 - RNA, 19 nt, Artificial Sequence
  Description of Artificial Sequence: Synthetic oligonucleotide
ugaggagcucacugacaac

SEQ ID NO: 2137427 - RNA, 19 nt, Artificial Sequence
  Description of Artificial Sequence: Synthetic oligonucleotide
agaacacggaguacacucu

SEQ ID NO: 2137428 - RNA, 19 nt, Artificial Sequence
  Description of Artificial Sequence: Synthetic oligonucleotide
gcgagcauggagcagucac

SEQ ID NO: 2137429 - RNA, 19 nt, Artificial Sequence
  Description of Artificial Sequence: Synthetic oligonucleotide
uuccagaauaaguguuguu

SEQ ID NO: 2137430 - RNA, 19 nt, Artificial Sequence
  Description of Artificial Sequence: Synthetic oligonucleotide
uaaugcccgcgccccucgg

SEQ ID NO: 2137431 - RNA, 19 nt, Artificial Sequence
  Description of Artificial Sequence: Synthetic oligonucleotide
agcugaacggcagcuuuug

SEQ ID NO: 2137432 - RNA, 19 nt, Artificial Sequence
  Description of Artificial Sequence: Synthetic oligonucleotide
ggugcuaguaccacagaca

SEQ ID NO: 2137433 - RNA, 19 nt, Artificial Sequence
  Description of Artificial Sequence: Synthetic oligonucleotide
gcgguggggaccuaaugcc

SEQ ID NO: 2137434 - RNA, 19 nt, Artificial Sequence
  Description of Artificial Sequence: Synthetic oligonucleotide
gcuuccggaccuuuucaag

SEQ ID NO: 2137435 - RNA, 19 nt, Artificial Sequence
  Description of Artificial Sequence: Synthetic oligonucleotide
accuguugcagcagaccuc

SEQ ID NO: 2137436 - RNA, 19 nt, Artificial Sequence
  Description of Artificial Sequence: Synthetic oligonucleotide
ggaaguuagaacacggagu

SEQ ID NO: 2137437 - RNA, 19 nt, Artificial Sequence
  Description of Artificial Sequence: Synthetic oligonucleotide
ggaccuaaugcccgcgccc

SEQ ID NO: 2137438 - RNA, 19 nt, Artificial Sequence
  Description of Artificial Sequence: Synthetic oligonucleotide
cugucgcaccuguugcagc

SEQ ID NO: 2137439 - RNA, 19 nt, Artificial Sequence
  Description of Artificial Sequence: Synthetic oligonucleotide
agcuccgagcagccaaaug

SEQ ID NO: 2137440 - RNA, 19 nt, Artificial Sequence
  Description of Artificial Sequence: Synthetic oligonucleotide
ccgagcagccaaaugcccg

SEQ ID NO: 2137441 - RNA, 19 nt, Artificial Sequence
  Description of Artificial Sequence: Synthetic oligonucleotide
caaauuuaccaaguagccu

SEQ ID NO: 2137442 - RNA, 19 nt, Artificial Sequence
  Description of Artificial Sequence: Synthetic oligonucleotide
cucgcgcccacagcgagag

SEQ ID NO: 2137443 - RNA, 19 nt, Artificial Sequence
  Description of Artificial Sequence: Synthetic oligonucleotide
cuagccuaccuacaaauuu

SEQ ID NO: 2137444 - RNA, 19 nt, Artificial Sequence
  Description of Artificial Sequence: Synthetic oligonucleotide
uggaauggccucgcgccca

SEQ ID NO: 2137445 - RNA, 19 nt, Artificial Sequence
  Description of Artificial Sequence: Synthetic oligonucleotide
cggaguacacucuucaguc

SEQ ID NO: 2137446 - RNA, 19 nt, Artificial Sequence
  Description of Artificial Sequence: Synthetic oligonucleotide
cagcagaccucccagaggu

SEQ ID NO: 2137447 - RNA, 19 nt, Artificial Sequence
  Description of Artificial Sequence: Synthetic oligonucleotide
gagauccagucugcaagac

SEQ ID NO: 2137448 - RNA, 19 nt, Artificial Sequence
  Description of Artificial Sequence: Synthetic oligonucleotide
acucaggcguuguuuuaau

SEQ ID NO: 2137449 - RNA, 19 nt, Artificial Sequence
  Description of Artificial Sequence: Synthetic oligonucleotide
ucaggggaaggugcuagua

SEQ ID NO: 2137450 - RNA, 19 nt, Artificial Sequence
  Description of Artificial Sequence: Synthetic oligonucleotide
ugcggauuuguuggcuaga

SEQ ID NO: 2137451 - RNA, 19 nt, Artificial Sequence
  Description of Artificial Sequence: Synthetic oligonucleotide
uggggaccuaaugcccgcg

SEQ ID NO: 2137452 - RNA, 19 nt, Artificial Sequence
  Description of Artificial Sequence: Synthetic oligonucleotide
acggcagcuuuugaauuca

SEQ ID NO: 2137453 - RNA, 19 nt, Artificial Sequence
  Description of Artificial Sequence: Synthetic oligonucleotide
cagccaaaugcccgaguuc

SEQ ID NO: 2137454 - RNA, 19 nt, Artificial Sequence
  Description of Artificial Sequence: Synthetic oligonucleotide
ggaaggugcuaguaccaca

SEQ ID NO: 2137455 - RNA, 19 nt, Artificial Sequence
  Description of Artificial Sequence: Synthetic oligonucleotide
gcggccaucuugcucgcgg

SEQ ID NO: 2137456 - RNA, 19 nt, Artificial Sequence
  Description of Artificial Sequence: Synthetic oligonucleotide
gcucuauuggaauggccuc

SEQ ID NO: 2137457 - RNA, 19 nt, Artificial Sequence
  Description of Artificial Sequence: Synthetic oligonucleotide
gagaguaauccaugcggau

SEQ ID NO: 2137458 - RNA, 19 nt, Artificial Sequence
  Description of Artificial Sequence: Synthetic oligonucleotide
cuacugaaccuucuucaua

SEQ ID NO: 2137459 - RNA, 19 nt, Artificial Sequence
  Description of Artificial Sequence: Synthetic oligonucleotide
guggggaccuaaugcccgc

SEQ ID NO: 2137460 - RNA, 19 nt, Artificial Sequence
  Description of Artificial Sequence: Synthetic oligonucleotide
gagugcaaauucuccuacu

SEQ ID NO: 2137461 - RNA, 19 nt, Artificial Sequence
  Description of Artificial Sequence: Synthetic oligonucleotide
ccacauacccuguagaacu

SEQ ID NO: 2137462 - RNA, 19 nt, Artificial Sequence
  Description of Artificial Sequence: Synthetic oligonucleotide
auacgagauccagucugca

SEQ ID NO: 2137463 - RNA, 19 nt, Artificial Sequence
  Description of Artificial Sequence: Synthetic oligonucleotide
agccaacauggcgaaguug

SEQ ID NO: 2137464 - RNA, 19 nt, Artificial Sequence
  Description of Artificial Sequence: Synthetic oligonucleotide
gcgaagacuaaagccacac

SEQ ID NO: 2137465 - RNA, 19 nt, Artificial Sequence
  Description of Artificial Sequence: Synthetic oligonucleotide
agcaaccagcagagguggc

SEQ ID NO: 2137466 - RNA, 19 nt, Artificial Sequence
  Description of Artificial Sequence: Synthetic oligonucleotide
gggcgcaagcagcuggagg

SEQ ID NO: 2137467 - RNA, 19 nt, Artificial Sequence
  Description of Artificial Sequence: Synthetic oligonucleotide
ggaguacacucuucaguca

SEQ ID NO: 2137468 - RNA, 19 nt, Artificial Sequence
  Description of Artificial Sequence: Synthetic oligonucleotide
guugaggagcucacugaca

SEQ ID NO: 2137469 - RNA, 19 nt, Artificial Sequence
  Description of Artificial Sequence: Synthetic oligonucleotide
guugucuuugacgaaugau

SEQ ID NO: 2137470 - RNA, 19 nt, Artificial Sequence
  Description of Artificial Sequence: Synthetic oligonucleotide
gggaccuaaugcccgcgcc

SEQ ID NO: 2137471 - RNA, 19 nt, Artificial Sequence
  Description of Artificial Sequence: Synthetic oligonucleotide
caugcggauuuguuggcua

SEQ ID NO: 2137472 - RNA, 19 nt, Artificial Sequence
  Description of Artificial Sequence: Synthetic oligonucleotide
gaacggcagcuuuugaauu

SEQ ID NO: 2137473 - RNA, 19 nt, Artificial Sequence
  Description of Artificial Sequence: Synthetic oligonucleotide
ggcucuauuggaauggccu

SEQ ID NO: 2137474 - RNA, 19 nt, Artificial Sequence
  Description of Artificial Sequence: Synthetic oligonucleotide
ggauucagcuauauggacu

SEQ ID NO: 2137475 - RNA, 19 nt, Artificial Sequence
  Description of Artificial Sequence: Synthetic oligonucleotide
guaguucagccuagccuac

SEQ ID NO: 2137476 - RNA, 19 nt, Artificial Sequence
  Description of Artificial Sequence: Synthetic oligonucleotide
cagcauaauacagugggau

SEQ ID NO: 2137477 - RNA, 19 nt, Artificial Sequence
  Description of Artificial Sequence: Synthetic oligonucleotide
cucgcggaggcuccugguc

SEQ ID NO: 2137478 - RNA, 19 nt, Artificial Sequence
  Description of Artificial Sequence: Synthetic oligonucleotide
cccuguagaacuacacuca

SEQ ID NO: 2137479 - RNA, 19 nt, Artificial Sequence
  Description of Artificial Sequence: Synthetic oligonucleotide
caccuguugcagcagaccu

SEQ ID NO: 2137480 - RNA, 19 nt, Artificial Sequence
  Description of Artificial Sequence: Synthetic oligonucleotide
caucagccaacauggcgaa

SEQ ID NO: 2137481 - RNA, 19 nt, Artificial Sequence
  Description of Artificial Sequence: Synthetic oligonucleotide
acacucaggcguuguuuua

SEQ ID NO: 2137482 - RNA, 19 nt, Artificial Sequence
  Description of Artificial Sequence: Synthetic oligonucleotide
ccagucugcaagacccagc

SEQ ID NO: 2137483 - RNA, 19 nt, Artificial Sequence
  Description of Artificial Sequence: Synthetic oligonucleotide
guacacucuucagucacua

SEQ ID NO: 2137484 - RNA, 19 nt, Artificial Sequence
  Description of Artificial Sequence: Synthetic oligonucleotide
agucugcaagacccagcau

SEQ ID NO: 2137485 - RNA, 19 nt, Artificial Sequence
  Description of Artificial Sequence: Synthetic oligonucleotide
cgcgguggggaccuaaugc

SEQ ID NO: 2137486 - RNA, 19 nt, Artificial Sequence
  Description of Artificial Sequence: Synthetic oligonucleotide
gaacacggaguacacucuu

SEQ ID NO: 2137487 - RNA, 19 nt, Artificial Sequence
  Description of Artificial Sequence: Synthetic oligonucleotide
agcaccggggccucugcuu

SEQ ID NO: 2137488 - RNA, 19 nt, Artificial Sequence
  Description of Artificial Sequence: Synthetic oligonucleotide
caaggcaagcgaagacuaa

SEQ ID NO: 2137489 - RNA, 19 nt, Artificial Sequence
  Description of Artificial Sequence: Synthetic oligonucleotide
augcccgaguucucucccu

SEQ ID NO: 2137490 - RNA, 19 nt, Artificial Sequence
  Description of Artificial Sequence: Synthetic oligonucleotide
cacugucgcaccuguugca

SEQ ID NO: 2137491 - RNA, 19 nt, Artificial Sequence
  Description of Artificial Sequence: Synthetic oligonucleotide
ccuacaaauuuaccaagua

SEQ ID NO: 2137492 - RNA, 19 nt, Artificial Sequence
  Description of Artificial Sequence: Synthetic oligonucleotide
agcgaagacuaaagccaca

SEQ ID NO: 2137493 - RNA, 19 nt, Artificial Sequence
  Description of Artificial Sequence: Synthetic oligonucleotide
gaggcuccuggucccggca

SEQ ID NO: 2137494 - RNA, 19 nt, Artificial Sequence
  Description of Artificial Sequence: Synthetic oligonucleotide
caagccuccccgcgcccgc

SEQ ID NO: 2137495 - RNA, 19 nt, Artificial Sequence
  Description of Artificial Sequence: Synthetic oligonucleotide
accuaaugcccgcgccccu

SEQ ID NO: 2137496 - RNA, 19 nt, Artificial Sequence
  Description of Artificial Sequence: Synthetic oligonucleotide
cuagaagcgcgaggccuuc

SEQ ID NO: 2137497 - RNA, 19 nt, Artificial Sequence
  Description of Artificial Sequence: Synthetic oligonucleotide
ggcguuguuuuaaucugga

SEQ ID NO: 2137498 - RNA, 19 nt, Artificial Sequence
  Description of Artificial Sequence: Synthetic oligonucleotide
cgaagacuaaagccacacc

SEQ ID NO: 2137499 - RNA, 19 nt, Artificial Sequence
  Description of Artificial Sequence: Synthetic oligonucleotide
cacauacccuguagaacua

SEQ ID NO: 2137500 - RNA, 19 nt, Artificial Sequence
  Description of Artificial Sequence: Synthetic oligonucleotide
cagccuagccuaccuacaa

SEQ ID NO: 2137501 - RNA, 19 nt, Artificial Sequence
  Description of Artificial Sequence: Synthetic oligonucleotide
ccgaguucucucccugggg

SEQ ID NO: 2137502 - RNA, 19 nt, Artificial Sequence
  Description of Artificial Sequence: Synthetic oligonucleotide
guucagccuagccuaccua

SEQ ID NO: 2137503 - RNA, 19 nt, Artificial Sequence
  Description of Artificial Sequence: Synthetic oligonucleotide
gagggcgcgcgguggggac

SEQ ID NO: 2137504 - RNA, 19 nt, Artificial Sequence
  Description of Artificial Sequence: Synthetic oligonucleotide
guaauccaugcggauuugu

SEQ ID NO: 2137505 - RNA, 19 nt, Artificial Sequence
  Description of Artificial Sequence: Synthetic oligonucleotide
gaccucccagagguuccag

SEQ ID NO: 2137506 - RNA, 19 nt, Artificial Sequence
  Description of Artificial Sequence: Synthetic oligonucleotide
ggggaccuaaugcccgcgc

SEQ ID NO: 2137507 - RNA, 19 nt, Artificial Sequence
  Description of Artificial Sequence: Synthetic oligonucleotide
gccuaccuacaaauuuacc

SEQ ID NO: 2137508 - RNA, 19 nt, Artificial Sequence
  Description of Artificial Sequence: Synthetic oligonucleotide
gagcggccaucuugcucgc

SEQ ID NO: 2137509 - RNA, 19 nt, Artificial Sequence
  Description of Artificial Sequence: Synthetic oligonucleotide
ccagcauaauacaguggga

SEQ ID NO: 2137510 - RNA, 19 nt, Artificial Sequence
  Description of Artificial Sequence: Synthetic oligonucleotide
gccuagccuaccuacaaau

SEQ ID NO: 2137511 - RNA, 19 nt, Artificial Sequence
  Description of Artificial Sequence: Synthetic oligonucleotide
cucucccuggggcaacuaa

SEQ ID NO: 2137512 - RNA, 19 nt, Artificial Sequence
  Description of Artificial Sequence: Synthetic oligonucleotide
gcgcccgcgagcauggagc

SEQ ID NO: 2137513 - RNA, 19 nt, Artificial Sequence
  Description of Artificial Sequence: Synthetic oligonucleotide
cagcuauauggacucaauu

SEQ ID NO: 2137514 - RNA, 19 nt, Artificial Sequence
  Description of Artificial Sequence: Synthetic oligonucleotide
gcgaaguugaggagcucac

SEQ ID NO: 2137515 - RNA, 19 nt, Artificial Sequence
  Description of Artificial Sequence: Synthetic oligonucleotide
gggagcggccaucuugcuc

SEQ ID NO: 2137516 - RNA, 19 nt, Artificial Sequence
  Description of Artificial Sequence: Synthetic oligonucleotide
aggagcucacugacaacuu

SEQ ID NO: 2137517 - RNA, 19 nt, Artificial Sequence
  Description of Artificial Sequence: Synthetic oligonucleotide
cggauuuguuggcuagaag

SEQ ID NO: 2137518 - RNA, 19 nt, Artificial Sequence
  Description of Artificial Sequence: Synthetic oligonucleotide
cccagagguuccagcuccg

SEQ ID NO: 2137519 - RNA, 19 nt, Artificial Sequence
  Description of Artificial Sequence: Synthetic oligonucleotide
ggcuagaagcgcgaggccu

SEQ ID NO: 2137520 - RNA, 19 nt, Artificial Sequence
  Description of Artificial Sequence: Synthetic oligonucleotide
ggaauggccucgcgcccac

SEQ ID NO: 2137521 - RNA, 19 nt, Artificial Sequence
  Description of Artificial Sequence: Synthetic oligonucleotide
gccucgcgcccacagcgag

SEQ ID NO: 2137522 - RNA, 19 nt, Artificial Sequence
  Description of Artificial Sequence: Synthetic oligonucleotide
gcguuguuuuaaucuggaa

SEQ ID NO: 2137523 - RNA, 19 nt, Artificial Sequence
  Description of Artificial Sequence: Synthetic oligonucleotide
uggggcaacuaaggcucua

SEQ ID NO: 2137524 - RNA, 19 nt, Artificial Sequence
  Description of Artificial Sequence: Synthetic oligonucleotide
gcugaacggcagcuuuuga

SEQ ID NO: 2137525 - RNA, 19 nt, Artificial Sequence
  Description of Artificial Sequence: Synthetic oligonucleotide
cgagauccagucugcaaga

SEQ ID NO: 2137526 - RNA, 19 nt, Artificial Sequence
  Description of Artificial Sequence: Synthetic oligonucleotide
gucaggggaaggugcuagu

SEQ ID NO: 2137527 - RNA, 19 nt, Artificial Sequence
  Description of Artificial Sequence: Synthetic oligonucleotide
ggccucggucucgggagcg

SEQ ID NO: 2137528 - RNA, 19 nt, Artificial Sequence
  Description of Artificial Sequence: Synthetic oligonucleotide
gcggauuuguuggcuagaa

SEQ ID NO: 2137529 - RNA, 19 nt, Artificial Sequence
  Description of Artificial Sequence: Synthetic oligonucleotide
gcucuauuucacauuuuau

SEQ ID NO: 2137530 - RNA, 19 nt, Artificial Sequence
  Description of Artificial Sequence: Synthetic oligonucleotide
uggcgaaguugaggagcuc

SEQ ID NO: 2137531 - RNA, 19 nt, Artificial Sequence
  Description of Artificial Sequence: Synthetic oligonucleotide
gcgcgguggggaccuaaug

SEQ ID NO: 2137532 - RNA, 19 nt, Artificial Sequence
  Description of Artificial Sequence: Synthetic oligonucleotide
acagugggauucagcuaua

SEQ ID NO: 2137533 - RNA, 19 nt, Artificial Sequence
  Description of Artificial Sequence: Synthetic oligonucleotide
ucucucccuggggcaacua

SEQ ID NO: 2137534 - RNA, 19 nt, Artificial Sequence
  Description of Artificial Sequence: Synthetic oligonucleotide
cgagcagccaaaugcccga

SEQ ID NO: 2137535 - RNA, 19 nt, Artificial Sequence
  Description of Artificial Sequence: Synthetic oligonucleotide
cccuggggcaacuaaggcu

SEQ ID NO: 2137536 - RNA, 19 nt, Artificial Sequence
  Description of Artificial Sequence: Synthetic oligonucleotide
cagacacagagugcaaauu

SEQ ID NO: 2137537 - RNA, 19 nt, Artificial Sequence
  Description of Artificial Sequence: Synthetic oligonucleotide
gcgcgaggccuucgugggg

SEQ ID NO: 2137538 - RNA, 19 nt, Artificial Sequence
  Description of Artificial Sequence: Synthetic oligonucleotide
cgcaccuguugcagcagac

SEQ ID NO: 2137539 - RNA, 19 nt, Artificial Sequence
  Description of Artificial Sequence: Synthetic oligonucleotide
gagcaccggggccucugcu

SEQ ID NO: 2137540 - RNA, 19 nt, Artificial Sequence
  Description of Artificial Sequence: Synthetic oligonucleotide
gagcugaacggcagcuuuu

SEQ ID NO: 2137541 - RNA, 19 nt, Artificial Sequence
  Description of Artificial Sequence: Synthetic oligonucleotide
gucucgggagcggccaucu

SEQ ID NO: 2137542 - RNA, 19 nt, Artificial Sequence
  Description of Artificial Sequence: Synthetic oligonucleotide
gaauggccucgcgcccaca

SEQ ID NO: 2137543 - RNA, 19 nt, Artificial Sequence
  Description of Artificial Sequence: Synthetic oligonucleotide
ccacagcgagaguaaucca

SEQ ID NO: 2137544 - RNA, 19 nt, Artificial Sequence
  Description of Artificial Sequence: Synthetic oligonucleotide
ggggcgcaagcagcuggag

SEQ ID NO: 2137545 - RNA, 19 nt, Artificial Sequence
  Description of Artificial Sequence: Synthetic oligonucleotide
gccucggucucgggagcgg

SEQ ID NO: 2137546 - RNA, 19 nt, Artificial Sequence
  Description of Artificial Sequence: Synthetic oligonucleotide
gccuucaaacuuccagaau

SEQ ID NO: 2137547 - RNA, 19 nt, Artificial Sequence
  Description of Artificial Sequence: Synthetic oligonucleotide
ccucggucucgggagcggc

SEQ ID NO: 2137548 - RNA, 19 nt, Artificial Sequence
  Description of Artificial Sequence: Synthetic oligonucleotide
ucgcgcccacagcgagagu

SEQ ID NO: 2137549 - RNA, 19 nt, Artificial Sequence
  Description of Artificial Sequence: Synthetic oligonucleotide
gccaaaugcccgaguucuc

SEQ ID NO: 2137550 - RNA, 19 nt, Artificial Sequence
  Description of Artificial Sequence: Synthetic oligonucleotide
ccauggugccuucaaacuu

SEQ ID NO: 2137551 - RNA, 19 nt, Artificial Sequence
  Description of Artificial Sequence: Synthetic oligonucleotide
cccaccauggugccuucaa

SEQ ID NO: 2137552 - RNA, 19 nt, Artificial Sequence
  Description of Artificial Sequence: Synthetic oligonucleotide
cuggggcaacuaaggcucu

SEQ ID NO: 2137553 - RNA, 19 nt, Artificial Sequence
  Description of Artificial Sequence: Synthetic oligonucleotide
cccggcacuggcggcgacg

SEQ ID NO: 2137554 - RNA, 19 nt, Artificial Sequence
  Description of Artificial Sequence: Synthetic oligonucleotide
ccagcuccgagcagccaaa

SEQ ID NO: 2137555 - RNA, 19 nt, Artificial Sequence
  Description of Artificial Sequence: Synthetic oligonucleotide
ggucucgggagcggccauc

SEQ ID NO: 2137556 - RNA, 19 nt, Artificial Sequence
  Description of Artificial Sequence: Synthetic oligonucleotide
ggagggcgcgcggugggga

SEQ ID NO: 2137557 - RNA, 19 nt, Artificial Sequence
  Description of Artificial Sequence: Synthetic oligonucleotide
cagcucuauuucacauuuu

SEQ ID NO: 2137558 - RNA, 19 nt, Artificial Sequence
  Description of Artificial Sequence: Synthetic oligonucleotide
ccuagccuaccuacaaauu

SEQ ID NO: 2137559 - RNA, 19 nt, Artificial Sequence
  Description of Artificial Sequence: Synthetic oligonucleotide
cagugggauucagcuauau

SEQ ID NO: 2137560 - RNA, 19 nt, Artificial Sequence
  Description of Artificial Sequence: Synthetic oligonucleotide
gggcaacuaaggcucuauu

SEQ ID NO: 2137561 - RNA, 19 nt, Artificial Sequence
  Description of Artificial Sequence: Synthetic oligonucleotide
caccaugcccagcucuauu

SEQ ID NO: 2137562 - RNA, 19 nt, Artificial Sequence
  Description of Artificial Sequence: Synthetic oligonucleotide
gcuagaagcgcgaggccuu

SEQ ID NO: 2137563 - RNA, 19 nt, Artificial Sequence
  Description of Artificial Sequence: Synthetic oligonucleotide
caucuugcucgcggaggcu

SEQ ID NO: 2137564 - RNA, 19 nt, Artificial Sequence
  Description of Artificial Sequence: Synthetic oligonucleotide
gccuccccgcgcccgcgag

SEQ ID NO: 2137565 - RNA, 19 nt, Artificial Sequence
  Description of Artificial Sequence: Synthetic oligonucleotide
cgagcauggagcagucacu

SEQ ID NO: 2137566 - RNA, 19 nt, Artificial Sequence
  Description of Artificial Sequence: Synthetic oligonucleotide
ccgcgagcauggagcaguc

SEQ ID NO: 2137567 - RNA, 19 nt, Artificial Sequence
  Description of Artificial Sequence: Synthetic oligonucleotide
cuugcucgcggaggcuccu

SEQ ID NO: 2137568 - RNA, 19 nt, Artificial Sequence
  Description of Artificial Sequence: Synthetic oligonucleotide
cccgcgagcauggagcagu

SEQ ID NO: 2137569 - RNA, 19 nt, Artificial Sequence
  Description of Artificial Sequence: Synthetic oligonucleotide
uccccgcgcccgcgagcau

SEQ ID NO: 2137570 - RNA, 19 nt, Artificial Sequence
  Description of Artificial Sequence: Synthetic oligonucleotide
cgcgcccacagcgagagua

SEQ ID NO: 2137571 - RNA, 19 nt, Artificial Sequence
  Description of Artificial Sequence: Synthetic oligonucleotide
ccuuuuagaugagcugcau

SEQ ID NO: 2137572 - RNA, 19 nt, Artificial Sequence
  Description of Artificial Sequence: Synthetic oligonucleotide
ccucgcgcccacagcgaga

SEQ ID NO: 2137573 - RNA, 19 nt, Artificial Sequence
  Description of Artificial Sequence: Synthetic oligonucleotide
gcccgcgagcauggagcag

SEQ ID NO: 2137574 - RNA, 19 nt, Artificial Sequence
  Description of Artificial Sequence: Synthetic oligonucleotide
gcucgcggaggcuccuggu

SEQ ID NO: 2137575 - RNA, 19 nt, Artificial Sequence
  Description of Artificial Sequence: Synthetic oligonucleotide
ccggcacuggcggcgacga

SEQ ID NO: 2137576 - RNA, 19 nt, Artificial Sequence
  Description of Artificial Sequence: Synthetic oligonucleotide
ccccgcgcccgcgagcaug

SEQ ID NO: 2137577 - RNA, 19 nt, Artificial Sequence
  Description of Artificial Sequence: Synthetic oligonucleotide
gcccgcgccccucggccuc

SEQ ID NO: 2137578 - RNA, 19 nt, Artificial Sequence
  Description of Artificial Sequence: Synthetic oligonucleotide
cgcccgcgagcauggagca

SEQ ID NO: 2137579 - RNA, 19 nt, Artificial Sequence
  Description of Artificial Sequence: Synthetic oligonucleotide
cagcuccgagcagccaaau

SEQ ID NO: 2137580 - RNA, 19 nt, Artificial Sequence
  Description of Artificial Sequence: Synthetic oligonucleotide
gggcgcgcgguggggaccu

SEQ ID NO: 2137581 - RNA, 19 nt, Artificial Sequence
  Description of Artificial Sequence: Synthetic oligonucleotide
gcgcgcgguggggaccuaa

SEQ ID NO: 2137582 - RNA, 19 nt, Artificial Sequence
  Description of Artificial Sequence: Synthetic oligonucleotide
cgcgagcauggagcaguca

SEQ ID NO: 2137583 - RNA, 19 nt, Artificial Sequence
  Description of Artificial Sequence: Synthetic oligonucleotide
cggcacuggcggcgacgac

SEQ ID NO: 2137584 - RNA, 19 nt, Artificial Sequence
  Description of Artificial Sequence: Synthetic oligonucleotide
ccgcgccccucggccucgg

SEQ ID NO: 2137585 - RNA, 19 nt, Artificial Sequence
  Description of Artificial Sequence: Synthetic oligonucleotide
cgcgcgguggggaccuaau

SEQ ID NO: 2137586 - RNA, 19 nt, Artificial Sequence
  Description of Artificial Sequence: Synthetic oligonucleotide
cgggagcggccaucuugcu

SEQ ID NO: 2137587 - RNA, 19 nt, Artificial Sequence
  Description of Artificial Sequence: Synthetic oligonucleotide
ggcgcgcgguggggaccua

SEQ ID NO: 2137588 - RNA, 19 nt, Artificial Sequence
  Description of Artificial Sequence: Synthetic oligonucleotide
ccgcgcccgcgagcaugga

SEQ ID NO: 2137589 - RNA, 19 nt, Artificial Sequence
  Description of Artificial Sequence: Synthetic oligonucleotide
aaauguacuauuuaaaugc

SEQ ID NO: 2137590 - RNA, 19 nt, Artificial Sequence
  Description of Artificial Sequence: Synthetic oligonucleotide
aaggagauaauauaguggc

SEQ ID NO: 2137591 - RNA, 19 nt, Artificial Sequence
  Description of Artificial Sequence: Synthetic oligonucleotide
ugagauuaccuuaagaugg

SEQ ID NO: 2137592 - RNA, 19 nt, Artificial Sequence
  Description of Artificial Sequence: Synthetic oligonucleotide
aauauaguggcuuugggcu

SEQ ID NO: 2137593 - RNA, 19 nt, Artificial Sequence
  Description of Artificial Sequence: Synthetic oligonucleotide
ugucauauauuaaagauga

SEQ ID NO: 2137594 - RNA, 19 nt, Artificial Sequence
  Description of Artificial Sequence: Synthetic oligonucleotide
aaugagauuaccuuaagau

SEQ ID NO: 2137595 - RNA, 19 nt, Artificial Sequence
  Description of Artificial Sequence: Synthetic oligonucleotide
aauacagaucuuuauuggg

SEQ ID NO: 2137596 - RNA, 19 nt, Artificial Sequence
  Description of Artificial Sequence: Synthetic oligonucleotide
auugauaugacuucaaagu

SEQ ID NO: 2137597 - RNA, 19 nt, Artificial Sequence
  Description of Artificial Sequence: Synthetic oligonucleotide
gauacuauaacaaaggaga

SEQ ID NO: 2137598 - RNA, 19 nt, Artificial Sequence
  Description of Artificial Sequence: Synthetic oligonucleotide
aauuuggagguuucuaugg

SEQ ID NO: 2137599 - RNA, 19 nt, Artificial Sequence
  Description of Artificial Sequence: Synthetic oligonucleotide
aaagauacuauaacaaagg

SEQ ID NO: 2137600 - RNA, 19 nt, Artificial Sequence
  Description of Artificial Sequence: Synthetic oligonucleotide
aaagagacaaaccugggga

SEQ ID NO: 2137601 - RNA, 19 nt, Artificial Sequence
  Description of Artificial Sequence: Synthetic oligonucleotide
uggacaaucagacuaaaug

SEQ ID NO: 2137602 - RNA, 19 nt, Artificial Sequence
  Description of Artificial Sequence: Synthetic oligonucleotide
uuaucugggagacagaacu

SEQ ID NO: 2137603 - RNA, 19 nt, Artificial Sequence
  Description of Artificial Sequence: Synthetic oligonucleotide
aacagaacccacuggaggg

SEQ ID NO: 2137604 - RNA, 19 nt, Artificial Sequence
  Description of Artificial Sequence: Synthetic oligonucleotide
augcauauuugcuuuaggc

SEQ ID NO: 2137605 - RNA, 19 nt, Artificial Sequence
  Description of Artificial Sequence: Synthetic oligonucleotide
aaauaaacaccauguaucu

SEQ ID NO: 2137606 - RNA, 19 nt, Artificial Sequence
  Description of Artificial Sequence: Synthetic oligonucleotide
auaaacaccauguaucuug

SEQ ID NO: 2137607 - RNA, 19 nt, Artificial Sequence
  Description of Artificial Sequence: Synthetic oligonucleotide
uaaauguacuauuuaaaug

SEQ ID NO: 2137608 - RNA, 19 nt, Artificial Sequence
  Description of Artificial Sequence: Synthetic oligonucleotide
uaauacagaucuuuauugg

SEQ ID NO: 2137609 - RNA, 19 nt, Artificial Sequence
  Description of Artificial Sequence: Synthetic oligonucleotide
caaagauacuauaacaaag

SEQ ID NO: 2137610 - RNA, 19 nt, Artificial Sequence
  Description of Artificial Sequence: Synthetic oligonucleotide
uuaccaacgacauuggaca

SEQ ID NO: 2137611 - RNA, 19 nt, Artificial Sequence
  Description of Artificial Sequence: Synthetic oligonucleotide
auuaccuuaagauggacca

SEQ ID NO: 2137612 - RNA, 19 nt, Artificial Sequence
  Description of Artificial Sequence: Synthetic oligonucleotide
aaaaucacgugugagaaga

SEQ ID NO: 2137613 - RNA, 19 nt, Artificial Sequence
  Description of Artificial Sequence: Synthetic oligonucleotide
guaauacagaucuuuauug

SEQ ID NO: 2137614 - RNA, 19 nt, Artificial Sequence
  Description of Artificial Sequence: Synthetic oligonucleotide
ucauauauuaaagaugaga

SEQ ID NO: 2137615 - RNA, 19 nt, Artificial Sequence
  Description of Artificial Sequence: Synthetic oligonucleotide
uugcuacauaaucaaaugg

SEQ ID NO: 2137616 - RNA, 19 nt, Artificial Sequence
  Description of Artificial Sequence: Synthetic oligonucleotide
ugagcgagaaugaugagca

SEQ ID NO: 2137617 - RNA, 19 nt, Artificial Sequence
  Description of Artificial Sequence: Synthetic oligonucleotide
uuucuuauguaaauguacu

SEQ ID NO: 2137618 - RNA, 19 nt, Artificial Sequence
  Description of Artificial Sequence: Synthetic oligonucleotide
acuauuuaaaugcauauuu

SEQ ID NO: 2137619 - RNA, 19 nt, Artificial Sequence
  Description of Artificial Sequence: Synthetic oligonucleotide
aagauaacagaacccacug

SEQ ID NO: 2137620 - RNA, 19 nt, Artificial Sequence
  Description of Artificial Sequence: Synthetic oligonucleotide
uaauauaguggcuuugggc

SEQ ID NO: 2137621 - RNA, 19 nt, Artificial Sequence
  Description of Artificial Sequence: Synthetic oligonucleotide
aaaccggugcauuaccugg

SEQ ID NO: 2137622 - RNA, 19 nt, Artificial Sequence
  Description of Artificial Sequence: Synthetic oligonucleotide
ugcuacauaaucaaauggu

SEQ ID NO: 2137623 - RNA, 19 nt, Artificial Sequence
  Description of Artificial Sequence: Synthetic oligonucleotide
aacgacauuggacaaucag

SEQ ID NO: 2137624 - RNA, 19 nt, Artificial Sequence
  Description of Artificial Sequence: Synthetic oligonucleotide
uguaaauguacuauuuaaa

SEQ ID NO: 2137625 - RNA, 19 nt, Artificial Sequence
  Description of Artificial Sequence: Synthetic oligonucleotide
uguaucuugcuacauaauc

SEQ ID NO: 2137626 - RNA, 19 nt, Artificial Sequence
  Description of Artificial Sequence: Synthetic oligonucleotide
gauaauauaguggcuuugg

SEQ ID NO: 2137627 - RNA, 19 nt, Artificial Sequence
  Description of Artificial Sequence: Synthetic oligonucleotide
aaugcauauuugcuuuagg

SEQ ID NO: 2137628 - RNA, 19 nt, Artificial Sequence
  Description of Artificial Sequence: Synthetic oligonucleotide
uucuauggaacauuuugag

SEQ ID NO: 2137629 - RNA, 19 nt, Artificial Sequence
  Description of Artificial Sequence: Synthetic oligonucleotide
gauaacagaacccacugga

SEQ ID NO: 2137630 - RNA, 19 nt, Artificial Sequence
  Description of Artificial Sequence: Synthetic oligonucleotide
ugagaagauaacagaaccc

SEQ ID NO: 2137631 - RNA, 19 nt, Artificial Sequence
  Description of Artificial Sequence: Synthetic oligonucleotide
cauugauaugacuucaaag

SEQ ID NO: 2137632 - RNA, 19 nt, Artificial Sequence
  Description of Artificial Sequence: Synthetic oligonucleotide
acaguguaacaacacaggg

SEQ ID NO: 2137633 - RNA, 19 nt, Artificial Sequence
  Description of Artificial Sequence: Synthetic oligonucleotide
uguacuauuuaaaugcaua

SEQ ID NO: 2137634 - RNA, 19 nt, Artificial Sequence
  Description of Artificial Sequence: Synthetic oligonucleotide
aaaugagauuaccuuaaga

SEQ ID NO: 2137635 - RNA, 19 nt, Artificial Sequence
  Description of Artificial Sequence: Synthetic oligonucleotide
uguaauacagaucuuuauu

SEQ ID NO: 2137636 - RNA, 19 nt, Artificial Sequence
  Description of Artificial Sequence: Synthetic oligonucleotide
ugcauauuugcuuuaggca

SEQ ID NO: 2137637 - RNA, 19 nt, Artificial Sequence
  Description of Artificial Sequence: Synthetic oligonucleotide
aauagcacagcgugggaug

SEQ ID NO: 2137638 - RNA, 19 nt, Artificial Sequence
  Description of Artificial Sequence: Synthetic oligonucleotide
aagcacacacugcauauag

SEQ ID NO: 2137639 - RNA, 19 nt, Artificial Sequence
  Description of Artificial Sequence: Synthetic oligonucleotide
ugucucagcucaaagagac

SEQ ID NO: 2137640 - RNA, 19 nt, Artificial Sequence
  Description of Artificial Sequence: Synthetic oligonucleotide
acugcauauaggaagcugc

SEQ ID NO: 2137641 - RNA, 19 nt, Artificial Sequence
  Description of Artificial Sequence: Synthetic oligonucleotide
caaaggagauaauauagug

SEQ ID NO: 2137642 - RNA, 19 nt, Artificial Sequence
  Description of Artificial Sequence: Synthetic oligonucleotide
augagauuaccuuaagaug

SEQ ID NO: 2137643 - RNA, 19 nt, Artificial Sequence
  Description of Artificial Sequence: Synthetic oligonucleotide
ucuugcuacauaaucaaau

SEQ ID NO: 2137644 - RNA, 19 nt, Artificial Sequence
  Description of Artificial Sequence: Synthetic oligonucleotide
uugagaaaugagauuaccu

SEQ ID NO: 2137645 - RNA, 19 nt, Artificial Sequence
  Description of Artificial Sequence: Synthetic oligonucleotide
acuuccuugcuagugaccc

SEQ ID NO: 2137646 - RNA, 19 nt, Artificial Sequence
  Description of Artificial Sequence: Synthetic oligonucleotide
agcaugauggaugaauagc

SEQ ID NO: 2137647 - RNA, 19 nt, Artificial Sequence
  Description of Artificial Sequence: Synthetic oligonucleotide
uuggcaaugaccagucucc

SEQ ID NO: 2137648 - RNA, 19 nt, Artificial Sequence
  Description of Artificial Sequence: Synthetic oligonucleotide
auuuugagaaaugagauua

SEQ ID NO: 2137649 - RNA, 19 nt, Artificial Sequence
  Description of Artificial Sequence: Synthetic oligonucleotide
auaauauaguggcuuuggg

SEQ ID NO: 2137650 - RNA, 19 nt, Artificial Sequence
  Description of Artificial Sequence: Synthetic oligonucleotide
uugcuagugacccauugcc

SEQ ID NO: 2137651 - RNA, 19 nt, Artificial Sequence
  Description of Artificial Sequence: Synthetic oligonucleotide
uguaaggaaagacucccca

SEQ ID NO: 2137652 - RNA, 19 nt, Artificial Sequence
  Description of Artificial Sequence: Synthetic oligonucleotide
ugugagaagauaacagaac

SEQ ID NO: 2137653 - RNA, 19 nt, Artificial Sequence
  Description of Artificial Sequence: Synthetic oligonucleotide
ugggcuguuaccaacgaca

SEQ ID NO: 2137654 - RNA, 19 nt, Artificial Sequence
  Description of Artificial Sequence: Synthetic oligonucleotide
ugagaaaugagauuaccuu

SEQ ID NO: 2137655 - RNA, 19 nt, Artificial Sequence
  Description of Artificial Sequence: Synthetic oligonucleotide
uuuucacauuaucugggag

SEQ ID NO: 2137656 - RNA, 19 nt, Artificial Sequence
  Description of Artificial Sequence: Synthetic oligonucleotide
uuuucauugauaugacuuc

SEQ ID NO: 2137657 - RNA, 19 nt, Artificial Sequence
  Description of Artificial Sequence: Synthetic oligonucleotide
uguguaaggaaagacuccc

SEQ ID NO: 2137658 - RNA, 19 nt, Artificial Sequence
  Description of Artificial Sequence: Synthetic oligonucleotide
acauuggacaaucagacua

SEQ ID NO: 2137659 - RNA, 19 nt, Artificial Sequence
  Description of Artificial Sequence: Synthetic oligonucleotide
uugggaaaauuguagguga

SEQ ID NO: 2137660 - RNA, 19 nt, Artificial Sequence
  Description of Artificial Sequence: Synthetic oligonucleotide
aaaauuguaggugaagaua

SEQ ID NO: 2137661 - RNA, 19 nt, Artificial Sequence
  Description of Artificial Sequence: Synthetic oligonucleotide
augaggguggcucucacuc

SEQ ID NO: 2137662 - RNA, 19 nt, Artificial Sequence
  Description of Artificial Sequence: Synthetic oligonucleotide
uuauguaaauguacuauuu

SEQ ID NO: 2137663 - RNA, 19 nt, Artificial Sequence
  Description of Artificial Sequence: Synthetic oligonucleotide
uauugggaaaauuguaggu

SEQ ID NO: 2137664 - RNA, 19 nt, Artificial Sequence
  Description of Artificial Sequence: Synthetic oligonucleotide
uauguaaauguacuauuua

SEQ ID NO: 2137665 - RNA, 19 nt, Artificial Sequence
  Description of Artificial Sequence: Synthetic oligonucleotide
augagcgagaaugaugagc

SEQ ID NO: 2137666 - RNA, 19 nt, Artificial Sequence
  Description of Artificial Sequence: Synthetic oligonucleotide
gaauuuggagguuucuaug

SEQ ID NO: 2137667 - RNA, 19 nt, Artificial Sequence
  Description of Artificial Sequence: Synthetic oligonucleotide
gcauauuugcuuuaggcag

SEQ ID NO: 2137668 - RNA, 19 nt, Artificial Sequence
  Description of Artificial Sequence: Synthetic oligonucleotide
ucaaaguagaaauggcuuc

SEQ ID NO: 2137669 - RNA, 19 nt, Artificial Sequence
  Description of Artificial Sequence: Synthetic oligonucleotide
aucuuuauugggaaaauug

SEQ ID NO: 2137670 - RNA, 19 nt, Artificial Sequence
  Description of Artificial Sequence: Synthetic oligonucleotide
agauacuauaacaaaggag

SEQ ID NO: 2137671 - RNA, 19 nt, Artificial Sequence
  Description of Artificial Sequence: Synthetic oligonucleotide
uaaggaaagacuccccagu

SEQ ID NO: 2137672 - RNA, 19 nt, Artificial Sequence
  Description of Artificial Sequence: Synthetic oligonucleotide
ucauccagcuagaaaccgg

SEQ ID NO: 2137673 - RNA, 19 nt, Artificial Sequence
  Description of Artificial Sequence: Synthetic oligonucleotide
caaagagacaaaccugggg

SEQ ID NO: 2137674 - RNA, 19 nt, Artificial Sequence
  Description of Artificial Sequence: Synthetic oligonucleotide
ugcaagaccgucgagguug

SEQ ID NO: 2137675 - RNA, 19 nt, Artificial Sequence
  Description of Artificial Sequence: Synthetic oligonucleotide
uuugcuuuaggcagacugu

SEQ ID NO: 2137676 - RNA, 19 nt, Artificial Sequence
  Description of Artificial Sequence: Synthetic oligonucleotide
auauauuaaagaugagaau

SEQ ID NO: 2137677 - RNA, 19 nt, Artificial Sequence
  Description of Artificial Sequence: Synthetic oligonucleotide
ugagaaaaucacgugugag

SEQ ID NO: 2137678 - RNA, 19 nt, Artificial Sequence
  Description of Artificial Sequence: Synthetic oligonucleotide
aaaugcauauuugcuuuag

SEQ ID NO: 2137679 - RNA, 19 nt, Artificial Sequence
  Description of Artificial Sequence: Synthetic oligonucleotide
aacaccauguaucuugcua

SEQ ID NO: 2137680 - RNA, 19 nt, Artificial Sequence
  Description of Artificial Sequence: Synthetic oligonucleotide
uaccuuaagauggaccagg

SEQ ID NO: 2137681 - RNA, 19 nt, Artificial Sequence
  Description of Artificial Sequence: Synthetic oligonucleotide
gaaauggcuucucaaauaa

SEQ ID NO: 2137682 - RNA, 19 nt, Artificial Sequence
  Description of Artificial Sequence: Synthetic oligonucleotide
agauaacagaacccacugg

SEQ ID NO: 2137683 - RNA, 19 nt, Artificial Sequence
  Description of Artificial Sequence: Synthetic oligonucleotide
auugggaaaauuguaggug

SEQ ID NO: 2137684 - RNA, 19 nt, Artificial Sequence
  Description of Artificial Sequence: Synthetic oligonucleotide
gauuaccuuaagauggacc

SEQ ID NO: 2137685 - RNA, 19 nt, Artificial Sequence
  Description of Artificial Sequence: Synthetic oligonucleotide
aaugaccagucuccugggg

SEQ ID NO: 2137686 - RNA, 19 nt, Artificial Sequence
  Description of Artificial Sequence: Synthetic oligonucleotide
uggaugagcgagaaugaug

SEQ ID NO: 2137687 - RNA, 19 nt, Artificial Sequence
  Description of Artificial Sequence: Synthetic oligonucleotide
gauaugacuucaaaguaga

SEQ ID NO: 2137688 - RNA, 19 nt, Artificial Sequence
  Description of Artificial Sequence: Synthetic oligonucleotide
gcaaugaccagucuccugg

SEQ ID NO: 2137689 - RNA, 19 nt, Artificial Sequence
  Description of Artificial Sequence: Synthetic oligonucleotide
ugacuucaaaguagaaaug

SEQ ID NO: 2137690 - RNA, 19 nt, Artificial Sequence
  Description of Artificial Sequence: Synthetic oligonucleotide
ucauuuucauugauaugac

SEQ ID NO: 2137691 - RNA, 19 nt, Artificial Sequence
  Description of Artificial Sequence: Synthetic oligonucleotide
gaugaauagcacagcgugg

SEQ ID NO: 2137692 - RNA, 19 nt, Artificial Sequence
  Description of Artificial Sequence: Synthetic oligonucleotide
aaaguagaaauggcuucuc

SEQ ID NO: 2137693 - RNA, 19 nt, Artificial Sequence
  Description of Artificial Sequence: Synthetic oligonucleotide
aaguagaaauggcuucuca

SEQ ID NO: 2137694 - RNA, 19 nt, Artificial Sequence
  Description of Artificial Sequence: Synthetic oligonucleotide
augauggaugaauagcaca

SEQ ID NO: 2137695 - RNA, 19 nt, Artificial Sequence
  Description of Artificial Sequence: Synthetic oligonucleotide
uucacauuaucugggagac

SEQ ID NO: 2137696 - RNA, 19 nt, Artificial Sequence
  Description of Artificial Sequence: Synthetic oligonucleotide
cuuugggcuguuaccaacg

SEQ ID NO: 2137697 - RNA, 19 nt, Artificial Sequence
  Description of Artificial Sequence: Synthetic oligonucleotide
ucauugauaugacuucaaa

SEQ ID NO: 2137698 - RNA, 19 nt, Artificial Sequence
  Description of Artificial Sequence: Synthetic oligonucleotide
cuacauaaucaaaugguga

SEQ ID NO: 2137699 - RNA, 19 nt, Artificial Sequence
  Description of Artificial Sequence: Synthetic oligonucleotide
uggaacauuuugagaaaug

SEQ ID NO: 2137700 - RNA, 19 nt, Artificial Sequence
  Description of Artificial Sequence: Synthetic oligonucleotide
guuaccaacgacauuggac

SEQ ID NO: 2137701 - RNA, 19 nt, Artificial Sequence
  Description of Artificial Sequence: Synthetic oligonucleotide
guaaggaaagacuccccag

SEQ ID NO: 2137702 - RNA, 19 nt, Artificial Sequence
  Description of Artificial Sequence: Synthetic oligonucleotide
uacagaucuuuauugggaa

SEQ ID NO: 2137703 - RNA, 19 nt, Artificial Sequence
  Description of Artificial Sequence: Synthetic oligonucleotide
ugcuuuugugaacuuggca

SEQ ID NO: 2137704 - RNA, 19 nt, Artificial Sequence
  Description of Artificial Sequence: Synthetic oligonucleotide
agugagaaaaucacgugug

SEQ ID NO: 2137705 - RNA, 19 nt, Artificial Sequence
  Description of Artificial Sequence: Synthetic oligonucleotide
ugacccauugcccucggga

SEQ ID NO: 2137706 - RNA, 19 nt, Artificial Sequence
  Description of Artificial Sequence: Synthetic oligonucleotide
uuguaauacagaucuuuau

SEQ ID NO: 2137707 - RNA, 19 nt, Artificial Sequence
  Description of Artificial Sequence: Synthetic oligonucleotide
ggacaaucagacuaaauga

SEQ ID NO: 2137708 - RNA, 19 nt, Artificial Sequence
  Description of Artificial Sequence: Synthetic oligonucleotide
ugcacuuccuugcuaguga

SEQ ID NO: 2137709 - RNA, 19 nt, Artificial Sequence
  Description of Artificial Sequence: Synthetic oligonucleotide
uaggugaagauacaucauu

SEQ ID NO: 2137710 - RNA, 19 nt, Artificial Sequence
  Description of Artificial Sequence: Synthetic oligonucleotide
ugagcaugauggaugaaua

SEQ ID NO: 2137711 - RNA, 19 nt, Artificial Sequence
  Description of Artificial Sequence: Synthetic oligonucleotide
auuuucacauuaucuggga

SEQ ID NO: 2137712 - RNA, 19 nt, Artificial Sequence
  Description of Artificial Sequence: Synthetic oligonucleotide
gagcaugauggaugaauag

SEQ ID NO: 2137713 - RNA, 19 nt, Artificial Sequence
  Description of Artificial Sequence: Synthetic oligonucleotide
aaaccuggggagccccuac

SEQ ID NO: 2137714 - RNA, 19 nt, Artificial Sequence
  Description of Artificial Sequence: Synthetic oligonucleotide
gaaaccggugcauuaccug

SEQ ID NO: 2137715 - RNA, 19 nt, Artificial Sequence
  Description of Artificial Sequence: Synthetic oligonucleotide
ucucagcucaaagagacaa

SEQ ID NO: 2137716 - RNA, 19 nt, Artificial Sequence
  Description of Artificial Sequence: Synthetic oligonucleotide
uggcuucucaaauaacugu

SEQ ID NO: 2137717 - RNA, 19 nt, Artificial Sequence
  Description of Artificial Sequence: Synthetic oligonucleotide
ugucuccgauggaugagcg

SEQ ID NO: 2137718 - RNA, 19 nt, Artificial Sequence
  Description of Artificial Sequence: Synthetic oligonucleotide
uggaugaauagcacagcgu

SEQ ID NO: 2137719 - RNA, 19 nt, Artificial Sequence
  Description of Artificial Sequence: Synthetic oligonucleotide
uuguaggugaagauacauc

SEQ ID NO: 2137720 - RNA, 19 nt, Artificial Sequence
  Description of Artificial Sequence: Synthetic oligonucleotide
aggaaagacuccccaguuc

SEQ ID NO: 2137721 - RNA, 19 nt, Artificial Sequence
  Description of Artificial Sequence: Synthetic oligonucleotide
uagaaaccggugcauuacc

SEQ ID NO: 2137722 - RNA, 19 nt, Artificial Sequence
  Description of Artificial Sequence: Synthetic oligonucleotide
cuuggcaaugaccagucuc

SEQ ID NO: 2137723 - RNA, 19 nt, Artificial Sequence
  Description of Artificial Sequence: Synthetic oligonucleotide
cauuauucaccacacacaa

SEQ ID NO: 2137724 - RNA, 19 nt, Artificial Sequence
  Description of Artificial Sequence: Synthetic oligonucleotide
cuugcuagugacccauugc

SEQ ID NO: 2137725 - RNA, 19 nt, Artificial Sequence
  Description of Artificial Sequence: Synthetic oligonucleotide
aacugaaacaaaauacauu

SEQ ID NO: 2137726 - RNA, 19 nt, Artificial Sequence
  Description of Artificial Sequence: Synthetic oligonucleotide
ucacacuccugccucagcu

SEQ ID NO: 2137727 - RNA, 19 nt, Artificial Sequence
  Description of Artificial Sequence: Synthetic oligonucleotide
guaucuugcuacauaauca

SEQ ID NO: 2137728 - RNA, 19 nt, Artificial Sequence
  Description of Artificial Sequence: Synthetic oligonucleotide
uauggaacauuuugagaaa

SEQ ID NO: 2137729 - RNA, 19 nt, Artificial Sequence
  Description of Artificial Sequence: Synthetic oligonucleotide
cuguguaaggaaagacucc

SEQ ID NO: 2137730 - RNA, 19 nt, Artificial Sequence
  Description of Artificial Sequence: Synthetic oligonucleotide
acugcaagaccgucgaggu

SEQ ID NO: 2137731 - RNA, 19 nt, Artificial Sequence
  Description of Artificial Sequence: Synthetic oligonucleotide
caugauggaugaauagcac

SEQ ID NO: 2137732 - RNA, 19 nt, Artificial Sequence
  Description of Artificial Sequence: Synthetic oligonucleotide
augaugagcaugauggaug

SEQ ID NO: 2137733 - RNA, 19 nt, Artificial Sequence
  Description of Artificial Sequence: Synthetic oligonucleotide
ugcuagugacccauugccc

SEQ ID NO: 2137734 - RNA, 19 nt, Artificial Sequence
  Description of Artificial Sequence: Synthetic oligonucleotide
aaagacuccccaguucuca

SEQ ID NO: 2137735 - RNA, 19 nt, Artificial Sequence
  Description of Artificial Sequence: Synthetic oligonucleotide
guagaaauggcuucucaaa

SEQ ID NO: 2137736 - RNA, 19 nt, Artificial Sequence
  Description of Artificial Sequence: Synthetic oligonucleotide
acuggaggggccccaggcc

SEQ ID NO: 2137737 - RNA, 19 nt, Artificial Sequence
  Description of Artificial Sequence: Synthetic oligonucleotide
accagugagaaaaucacgu

SEQ ID NO: 2137738 - RNA, 19 nt, Artificial Sequence
  Description of Artificial Sequence: Synthetic oligonucleotide
ucgggagccagcagcacag

SEQ ID NO: 2137739 - RNA, 19 nt, Artificial Sequence
  Description of Artificial Sequence: Synthetic oligonucleotide
caccagugagaaaaucacg

SEQ ID NO: 2137740 - RNA, 19 nt, Artificial Sequence
  Description of Artificial Sequence: Synthetic oligonucleotide
cauauaggaagcugccuuc

SEQ ID NO: 2137741 - RNA, 19 nt, Artificial Sequence
  Description of Artificial Sequence: Synthetic oligonucleotide
acaggguacaaaucuggcu

SEQ ID NO: 2137742 - RNA, 19 nt, Artificial Sequence
  Description of Artificial Sequence: Synthetic oligonucleotide
uuugugaacuuggcaauga

SEQ ID NO: 2137743 - RNA, 19 nt, Artificial Sequence
  Description of Artificial Sequence: Synthetic oligonucleotide
uauucaccacacacaacac

SEQ ID NO: 2137744 - RNA, 19 nt, Artificial Sequence
  Description of Artificial Sequence: Synthetic oligonucleotide
gacccauugcccucgggag

SEQ ID NO: 2137745 - RNA, 19 nt, Artificial Sequence
  Description of Artificial Sequence: Synthetic oligonucleotide
cugcauauaggaagcugcc

SEQ ID NO: 2137746 - RNA, 19 nt, Artificial Sequence
  Description of Artificial Sequence: Synthetic oligonucleotide
auauaguggcuuugggcug

SEQ ID NO: 2137747 - RNA, 19 nt, Artificial Sequence
  Description of Artificial Sequence: Synthetic oligonucleotide
acacacaacacugaaccca

SEQ ID NO: 2137748 - RNA, 19 nt, Artificial Sequence
  Description of Artificial Sequence: Synthetic oligonucleotide
acauuauucaccacacaca

SEQ ID NO: 2137749 - RNA, 19 nt, Artificial Sequence
  Description of Artificial Sequence: Synthetic oligonucleotide
agccccuacucagagaagg

SEQ ID NO: 2137750 - RNA, 19 nt, Artificial Sequence
  Description of Artificial Sequence: Synthetic oligonucleotide
auacagaucuuuauuggga

SEQ ID NO: 2137751 - RNA, 19 nt, Artificial Sequence
  Description of Artificial Sequence: Synthetic oligonucleotide
acgugugagaagauaacag

SEQ ID NO: 2137752 - RNA, 19 nt, Artificial Sequence
  Description of Artificial Sequence: Synthetic oligonucleotide
cacugcaagaccgucgagg

SEQ ID NO: 2137753 - RNA, 19 nt, Artificial Sequence
  Description of Artificial Sequence: Synthetic oligonucleotide
agaaaugagauuaccuuaa

SEQ ID NO: 2137754 - RNA, 19 nt, Artificial Sequence
  Description of Artificial Sequence: Synthetic oligonucleotide
acacaggguacaaaucugg

SEQ ID NO: 2137755 - RNA, 19 nt, Artificial Sequence
  Description of Artificial Sequence: Synthetic oligonucleotide
ucacgugugagaagauaac

SEQ ID NO: 2137756 - RNA, 19 nt, Artificial Sequence
  Description of Artificial Sequence: Synthetic oligonucleotide
uacucagagaagguccucc

SEQ ID NO: 2137757 - RNA, 19 nt, Artificial Sequence
  Description of Artificial Sequence: Synthetic oligonucleotide
uggugacaccaccagugag

SEQ ID NO: 2137758 - RNA, 19 nt, Artificial Sequence
  Description of Artificial Sequence: Synthetic oligonucleotide
gacacugcaagaccgucga

SEQ ID NO: 2137759 - RNA, 19 nt, Artificial Sequence
  Description of Artificial Sequence: Synthetic oligonucleotide
acccauugcccucgggagc

SEQ ID NO: 2137760 - RNA, 19 nt, Artificial Sequence
  Description of Artificial Sequence: Synthetic oligonucleotide
uguuaccaacgacauugga

SEQ ID NO: 2137761 - RNA, 19 nt, Artificial Sequence
  Description of Artificial Sequence: Synthetic oligonucleotide
ugcucagacacugcaagac

SEQ ID NO: 2137762 - RNA, 19 nt, Artificial Sequence
  Description of Artificial Sequence: Synthetic oligonucleotide
auuaucugggagacagaac

SEQ ID NO: 2137763 - RNA, 19 nt, Artificial Sequence
  Description of Artificial Sequence: Synthetic oligonucleotide
gauggaugaauagcacagc

SEQ ID NO: 2137764 - RNA, 19 nt, Artificial Sequence
  Description of Artificial Sequence: Synthetic oligonucleotide
cacaggguacaaaucuggc

SEQ ID NO: 2137765 - RNA, 19 nt, Artificial Sequence
  Description of Artificial Sequence: Synthetic oligonucleotide
ucuugggguggugacaccc

SEQ ID NO: 2137766 - RNA, 19 nt, Artificial Sequence
  Description of Artificial Sequence: Synthetic oligonucleotide
agcgagaaugaugagcaug

SEQ ID NO: 2137767 - RNA, 19 nt, Artificial Sequence
  Description of Artificial Sequence: Synthetic oligonucleotide
agauaauauaguggcuuug

SEQ ID NO: 2137768 - RNA, 19 nt, Artificial Sequence
  Description of Artificial Sequence: Synthetic oligonucleotide
auaacagaacccacuggag

SEQ ID NO: 2137769 - RNA, 19 nt, Artificial Sequence
  Description of Artificial Sequence: Synthetic oligonucleotide
auuguaggugaagauacau

SEQ ID NO: 2137770 - RNA, 19 nt, Artificial Sequence
  Description of Artificial Sequence: Synthetic oligonucleotide
acacccaguucccauuaag

SEQ ID NO: 2137771 - RNA, 19 nt, Artificial Sequence
  Description of Artificial Sequence: Synthetic oligonucleotide
acaacacaggguacaaauc

SEQ ID NO: 2137772 - RNA, 19 nt, Artificial Sequence
  Description of Artificial Sequence: Synthetic oligonucleotide
uacuauaacaaaggagaua

SEQ ID NO: 2137773 - RNA, 19 nt, Artificial Sequence
  Description of Artificial Sequence: Synthetic oligonucleotide
uuaccuuaagauggaccag

SEQ ID NO: 2137774 - RNA, 19 nt, Artificial Sequence
  Description of Artificial Sequence: Synthetic oligonucleotide
gcugcuuuugugaacuugg

SEQ ID NO: 2137775 - RNA, 19 nt, Artificial Sequence
  Description of Artificial Sequence: Synthetic oligonucleotide
agauuaccuuaagauggac

SEQ ID NO: 2137776 - RNA, 19 nt, Artificial Sequence
  Description of Artificial Sequence: Synthetic oligonucleotide
ggaaaauuguaggugaaga

SEQ ID NO: 2137777 - RNA, 19 nt, Artificial Sequence
  Description of Artificial Sequence: Synthetic oligonucleotide
ggaugagcgagaaugauga

SEQ ID NO: 2137778 - RNA, 19 nt, Artificial Sequence
  Description of Artificial Sequence: Synthetic oligonucleotide
acgacauuggacaaucaga

SEQ ID NO: 2137779 - RNA, 19 nt, Artificial Sequence
  Description of Artificial Sequence: Synthetic oligonucleotide
uuggaccauuuucacauua

SEQ ID NO: 2137780 - RNA, 19 nt, Artificial Sequence
  Description of Artificial Sequence: Synthetic oligonucleotide
gcuacauaaucaaauggug

SEQ ID NO: 2137781 - RNA, 19 nt, Artificial Sequence
  Description of Artificial Sequence: Synthetic oligonucleotide
cuagaaaccggugcauuac

SEQ ID NO: 2137782 - RNA, 19 nt, Artificial Sequence
  Description of Artificial Sequence: Synthetic oligonucleotide
aagaccgucgagguuggca

SEQ ID NO: 2137783 - RNA, 19 nt, Artificial Sequence
  Description of Artificial Sequence: Synthetic oligonucleotide
augagcaugauggaugaau

SEQ ID NO: 2137784 - RNA, 19 nt, Artificial Sequence
  Description of Artificial Sequence: Synthetic oligonucleotide
auuaccuggggagggugac

SEQ ID NO: 2137785 - RNA, 19 nt, Artificial Sequence
  Description of Artificial Sequence: Synthetic oligonucleotide
acccaguucccauuaagaa

SEQ ID NO: 2137786 - RNA, 19 nt, Artificial Sequence
  Description of Artificial Sequence: Synthetic oligonucleotide
cuguuaccaacgacauugg

SEQ ID NO: 2137787 - RNA, 19 nt, Artificial Sequence
  Description of Artificial Sequence: Synthetic oligonucleotide
ugggaaaauuguaggugaa

SEQ ID NO: 2137788 - RNA, 19 nt, Artificial Sequence
  Description of Artificial Sequence: Synthetic oligonucleotide
ugaauagcacagcguggga

SEQ ID NO: 2137789 - RNA, 19 nt, Artificial Sequence
  Description of Artificial Sequence: Synthetic oligonucleotide
uggcuuugggcuguuacca

SEQ ID NO: 2137790 - RNA, 19 nt, Artificial Sequence
  Description of Artificial Sequence: Synthetic oligonucleotide
ugcuuuaggcagacugucu

SEQ ID NO: 2137791 - RNA, 19 nt, Artificial Sequence
  Description of Artificial Sequence: Synthetic oligonucleotide
cuucugucucagcucaaag

SEQ ID NO: 2137792 - RNA, 19 nt, Artificial Sequence
  Description of Artificial Sequence: Synthetic oligonucleotide
aauaaacaccauguaucuu

SEQ ID NO: 2137793 - RNA, 19 nt, Artificial Sequence
  Description of Artificial Sequence: Synthetic oligonucleotide
aggaggucccuggugacac

SEQ ID NO: 2137794 - RNA, 19 nt, Artificial Sequence
  Description of Artificial Sequence: Synthetic oligonucleotide
cucauccagcuagaaaccg

SEQ ID NO: 2137795 - RNA, 19 nt, Artificial Sequence
  Description of Artificial Sequence: Synthetic oligonucleotide
aucacgugugagaagauaa

SEQ ID NO: 2137796 - RNA, 19 nt, Artificial Sequence
  Description of Artificial Sequence: Synthetic oligonucleotide
ugacuggccccugugagga

SEQ ID NO: 2137797 - RNA, 19 nt, Artificial Sequence
  Description of Artificial Sequence: Synthetic oligonucleotide
aaacaccauguaucuugcu

SEQ ID NO: 2137798 - RNA, 19 nt, Artificial Sequence
  Description of Artificial Sequence: Synthetic oligonucleotide
uucccugaccucacacucc

SEQ ID NO: 2137799 - RNA, 19 nt, Artificial Sequence
  Description of Artificial Sequence: Synthetic oligonucleotide
cacaacacugaacccauca

SEQ ID NO: 2137800 - RNA, 19 nt, Artificial Sequence
  Description of Artificial Sequence: Synthetic oligonucleotide
gaugagcgagaaugaugag

SEQ ID NO: 2137801 - RNA, 19 nt, Artificial Sequence
  Description of Artificial Sequence: Synthetic oligonucleotide
agaccgucgagguuggcaa

SEQ ID NO: 2137802 - RNA, 19 nt, Artificial Sequence
  Description of Artificial Sequence: Synthetic oligonucleotide
caaugaccagucuccuggg

SEQ ID NO: 2137803 - RNA, 19 nt, Artificial Sequence
  Description of Artificial Sequence: Synthetic oligonucleotide
uugggguggugacacccag

SEQ ID NO: 2137804 - RNA, 19 nt, Artificial Sequence
  Description of Artificial Sequence: Synthetic oligonucleotide
uauaggaagcugccuucuc

SEQ ID NO: 2137805 - RNA, 19 nt, Artificial Sequence
  Description of Artificial Sequence: Synthetic oligonucleotide
gacugucuccgauggauga

SEQ ID NO: 2137806 - RNA, 19 nt, Artificial Sequence
  Description of Artificial Sequence: Synthetic oligonucleotide
cugcuuuugugaacuuggc

SEQ ID NO: 2137807 - RNA, 19 nt, Artificial Sequence
  Description of Artificial Sequence: Synthetic oligonucleotide
gcacaguguaacaacacag

SEQ ID NO: 2137808 - RNA, 19 nt, Artificial Sequence
  Description of Artificial Sequence: Synthetic oligonucleotide
aaucacgugugagaagaua

SEQ ID NO: 2137809 - RNA, 19 nt, Artificial Sequence
  Description of Artificial Sequence: Synthetic oligonucleotide
gugugagaagauaacagaa

SEQ ID NO: 2137810 - RNA, 19 nt, Artificial Sequence
  Description of Artificial Sequence: Synthetic oligonucleotide
caucacugcucagacacug

SEQ ID NO: 2137811 - RNA, 19 nt, Artificial Sequence
  Description of Artificial Sequence: Synthetic oligonucleotide
cugaccucacacuccugcc

SEQ ID NO: 2137812 - RNA, 19 nt, Artificial Sequence
  Description of Artificial Sequence: Synthetic oligonucleotide
uagugacccauugcccucg

SEQ ID NO: 2137813 - RNA, 19 nt, Artificial Sequence
  Description of Artificial Sequence: Synthetic oligonucleotide
caacacaggguacaaaucu

SEQ ID NO: 2137814 - RNA, 19 nt, Artificial Sequence
  Description of Artificial Sequence: Synthetic oligonucleotide
aagacuccccaguucucau

SEQ ID NO: 2137815 - RNA, 19 nt, Artificial Sequence
  Description of Artificial Sequence: Synthetic oligonucleotide
uugcuuuaggcagacuguc

SEQ ID NO: 2137816 - RNA, 19 nt, Artificial Sequence
  Description of Artificial Sequence: Synthetic oligonucleotide
accggugcauuaccugggg

SEQ ID NO: 2137817 - RNA, 19 nt, Artificial Sequence
  Description of Artificial Sequence: Synthetic oligonucleotide
cucagcuugggaaagcucu

SEQ ID NO: 2137818 - RNA, 19 nt, Artificial Sequence
  Description of Artificial Sequence: Synthetic oligonucleotide
aucugggagacagaacuga

SEQ ID NO: 2137819 - RNA, 19 nt, Artificial Sequence
  Description of Artificial Sequence: Synthetic oligonucleotide
uugggcuguuaccaacgac

SEQ ID NO: 2137820 - RNA, 19 nt, Artificial Sequence
  Description of Artificial Sequence: Synthetic oligonucleotide
accuuaagauggaccaggg

SEQ ID NO: 2137821 - RNA, 19 nt, Artificial Sequence
  Description of Artificial Sequence: Synthetic oligonucleotide
cauuggacaaucagacuaa

SEQ ID NO: 2137822 - RNA, 19 nt, Artificial Sequence
  Description of Artificial Sequence: Synthetic oligonucleotide
agacaaaccuggggagccc

SEQ ID NO: 2137823 - RNA, 19 nt, Artificial Sequence
  Description of Artificial Sequence: Synthetic oligonucleotide
gcuuuucuuauguaaaugu

SEQ ID NO: 2137824 - RNA, 19 nt, Artificial Sequence
  Description of Artificial Sequence: Synthetic oligonucleotide
auauaggaagcugccuucu

SEQ ID NO: 2137825 - RNA, 19 nt, Artificial Sequence
  Description of Artificial Sequence: Synthetic oligonucleotide
ggugcauuaccuggggagg

SEQ ID NO: 2137826 - RNA, 19 nt, Artificial Sequence
  Description of Artificial Sequence: Synthetic oligonucleotide
cauuaucugggagacagaa

SEQ ID NO: 2137827 - RNA, 19 nt, Artificial Sequence
  Description of Artificial Sequence: Synthetic oligonucleotide
gagauuaccuuaagaugga

SEQ ID NO: 2137828 - RNA, 19 nt, Artificial Sequence
  Description of Artificial Sequence: Synthetic oligonucleotide
agcacagcgugggaugagg

SEQ ID NO: 2137829 - RNA, 19 nt, Artificial Sequence
  Description of Artificial Sequence: Synthetic oligonucleotide
accuggggagccccuacuc

SEQ ID NO: 2137830 - RNA, 19 nt, Artificial Sequence
  Description of Artificial Sequence: Synthetic oligonucleotide
uaccuggggagggugacug

SEQ ID NO: 2137831 - RNA, 19 nt, Artificial Sequence
  Description of Artificial Sequence: Synthetic oligonucleotide
uaggcagacugucuccgau

SEQ ID NO: 2137832 - RNA, 19 nt, Artificial Sequence
  Description of Artificial Sequence: Synthetic oligonucleotide
gucauauauuaaagaugag

SEQ ID NO: 2137833 - RNA, 19 nt, Artificial Sequence
  Description of Artificial Sequence: Synthetic oligonucleotide
agcuugggaaagcucugca

SEQ ID NO: 2137834 - RNA, 19 nt, Artificial Sequence
  Description of Artificial Sequence: Synthetic oligonucleotide
auggaacauuuugagaaau

SEQ ID NO: 2137835 - RNA, 19 nt, Artificial Sequence
  Description of Artificial Sequence: Synthetic oligonucleotide
uuaggcagacugucuccga

SEQ ID NO: 2137836 - RNA, 19 nt, Artificial Sequence
  Description of Artificial Sequence: Synthetic oligonucleotide
cuagugacccauugcccuc

SEQ ID NO: 2137837 - RNA, 19 nt, Artificial Sequence
  Description of Artificial Sequence: Synthetic oligonucleotide
aaagcacacacugcauaua

SEQ ID NO: 2137838 - RNA, 19 nt, Artificial Sequence
  Description of Artificial Sequence: Synthetic oligonucleotide
ggaaagacuccccaguucu

SEQ ID NO: 2137839 - RNA, 19 nt, Artificial Sequence
  Description of Artificial Sequence: Synthetic oligonucleotide
ggaagcuguguaaggaaag

SEQ ID NO: 2137840 - RNA, 19 nt, Artificial Sequence
  Description of Artificial Sequence: Synthetic oligonucleotide
ugacacccaguucccauua

SEQ ID NO: 2137841 - RNA, 19 nt, Artificial Sequence
  Description of Artificial Sequence: Synthetic oligonucleotide
aaccuggggagccccuacu

SEQ ID NO: 2137842 - RNA, 19 nt, Artificial Sequence
  Description of Artificial Sequence: Synthetic oligonucleotide
gugcauuaccuggggaggg

SEQ ID NO: 2137843 - RNA, 19 nt, Artificial Sequence
  Description of Artificial Sequence: Synthetic oligonucleotide
cugucuccgauggaugagc

SEQ ID NO: 2137844 - RNA, 19 nt, Artificial Sequence
  Description of Artificial Sequence: Synthetic oligonucleotide
gcuuuaggcagacugucuc

SEQ ID NO: 2137845 - RNA, 19 nt, Artificial Sequence
  Description of Artificial Sequence: Synthetic oligonucleotide
cacccaguucccauuaaga

SEQ ID NO: 2137846 - RNA, 19 nt, Artificial Sequence
  Description of Artificial Sequence: Synthetic oligonucleotide
cagugagaaaaucacgugu

SEQ ID NO: 2137847 - RNA, 19 nt, Artificial Sequence
  Description of Artificial Sequence: Synthetic oligonucleotide
agaucuuuauugggaaaau

SEQ ID NO: 2137848 - RNA, 19 nt, Artificial Sequence
  Description of Artificial Sequence: Synthetic oligonucleotide
uggcucucacucuucccug

SEQ ID NO: 2137849 - RNA, 19 nt, Artificial Sequence
  Description of Artificial Sequence: Synthetic oligonucleotide
aagauggaccagggaagcu

SEQ ID NO: 2137850 - RNA, 19 nt, Artificial Sequence
  Description of Artificial Sequence: Synthetic oligonucleotide
aggcagacugucuccgaug

SEQ ID NO: 2137851 - RNA, 19 nt, Artificial Sequence
  Description of Artificial Sequence: Synthetic oligonucleotide
aggugaagauacaucauuu

SEQ ID NO: 2137852 - RNA, 19 nt, Artificial Sequence
  Description of Artificial Sequence: Synthetic oligonucleotide
gcucaaagagacaaaccug

SEQ ID NO: 2137853 - RNA, 19 nt, Artificial Sequence
  Description of Artificial Sequence: Synthetic oligonucleotide
ggagccccuacucagagaa

SEQ ID NO: 2137854 - RNA, 19 nt, Artificial Sequence
  Description of Artificial Sequence: Synthetic oligonucleotide
cacuuccuugcuagugacc

SEQ ID NO: 2137855 - RNA, 19 nt, Artificial Sequence
  Description of Artificial Sequence: Synthetic oligonucleotide
agaaaccggugcauuaccu

SEQ ID NO: 2137856 - RNA, 19 nt, Artificial Sequence
  Description of Artificial Sequence: Synthetic oligonucleotide
gggaaaauuguaggugaag

SEQ ID NO: 2137857 - RNA, 19 nt, Artificial Sequence
  Description of Artificial Sequence: Synthetic oligonucleotide
gaacuuggcaaugaccagu

SEQ ID NO: 2137858 - RNA, 19 nt, Artificial Sequence
  Description of Artificial Sequence: Synthetic oligonucleotide
ugaggguggcucucacucu

SEQ ID NO: 2137859 - RNA, 19 nt, Artificial Sequence
  Description of Artificial Sequence: Synthetic oligonucleotide
cacugcauauaggaagcug

SEQ ID NO: 2137860 - RNA, 19 nt, Artificial Sequence
  Description of Artificial Sequence: Synthetic oligonucleotide
acugucuccgauggaugag

SEQ ID NO: 2137861 - RNA, 19 nt, Artificial Sequence
  Description of Artificial Sequence: Synthetic oligonucleotide
cucuuggaccauuuucaca

SEQ ID NO: 2137862 - RNA, 19 nt, Artificial Sequence
  Description of Artificial Sequence: Synthetic oligonucleotide
uaccaacgacauuggacaa

SEQ ID NO: 2137863 - RNA, 19 nt, Artificial Sequence
  Description of Artificial Sequence: Synthetic oligonucleotide
cacgugugagaagauaaca

SEQ ID NO: 2137864 - RNA, 19 nt, Artificial Sequence
  Description of Artificial Sequence: Synthetic oligonucleotide
ggaccauuuucacauuauc

SEQ ID NO: 2137865 - RNA, 19 nt, Artificial Sequence
  Description of Artificial Sequence: Synthetic oligonucleotide
agaacccacuggaggggcc

SEQ ID NO: 2137866 - RNA, 19 nt, Artificial Sequence
  Description of Artificial Sequence: Synthetic oligonucleotide
gcucagacacugcaagacc

SEQ ID NO: 2137867 - RNA, 19 nt, Artificial Sequence
  Description of Artificial Sequence: Synthetic oligonucleotide
aggguacaaaucuggcuuu

SEQ ID NO: 2137868 - RNA, 19 nt, Artificial Sequence
  Description of Artificial Sequence: Synthetic oligonucleotide
gacauuggacaaucagacu

SEQ ID NO: 2137869 - RNA, 19 nt, Artificial Sequence
  Description of Artificial Sequence: Synthetic oligonucleotide
auguacuauuuaaaugcau

SEQ ID NO: 2137870 - RNA, 19 nt, Artificial Sequence
  Description of Artificial Sequence: Synthetic oligonucleotide
guguaaggaaagacucccc

SEQ ID NO: 2137871 - RNA, 19 nt, Artificial Sequence
  Description of Artificial Sequence: Synthetic oligonucleotide
aguucuugggguggugaca

SEQ ID NO: 2137872 - RNA, 19 nt, Artificial Sequence
  Description of Artificial Sequence: Synthetic oligonucleotide
auagcacagcgugggauga

SEQ ID NO: 2137873 - RNA, 19 nt, Artificial Sequence
  Description of Artificial Sequence: Synthetic oligonucleotide
ccagugagaaaaucacgug

SEQ ID NO: 2137874 - RNA, 19 nt, Artificial Sequence
  Description of Artificial Sequence: Synthetic oligonucleotide
uggggagccccuacucaga

SEQ ID NO: 2137875 - RNA, 19 nt, Artificial Sequence
  Description of Artificial Sequence: Synthetic oligonucleotide
ggaauuuggagguuucuau

SEQ ID NO: 2137876 - RNA, 19 nt, Artificial Sequence
  Description of Artificial Sequence: Synthetic oligonucleotide
caacacugaacccaucacu

SEQ ID NO: 2137877 - RNA, 19 nt, Artificial Sequence
  Description of Artificial Sequence: Synthetic oligonucleotide
agugacccauugcccucgg

SEQ ID NO: 2137878 - RNA, 19 nt, Artificial Sequence
  Description of Artificial Sequence: Synthetic oligonucleotide
caggguacaaaucuggcuu

SEQ ID NO: 2137879 - RNA, 19 nt, Artificial Sequence
  Description of Artificial Sequence: Synthetic oligonucleotide
guaacaacacaggguacaa

SEQ ID NO: 2137880 - RNA, 19 nt, Artificial Sequence
  Description of Artificial Sequence: Synthetic oligonucleotide
gcgagaaugaugagcauga

SEQ ID NO: 2137881 - RNA, 19 nt, Artificial Sequence
  Description of Artificial Sequence: Synthetic oligonucleotide
aaaucacgugugagaagau

SEQ ID NO: 2137882 - RNA, 19 nt, Artificial Sequence
  Description of Artificial Sequence: Synthetic oligonucleotide
agacugucuccgauggaug

SEQ ID NO: 2137883 - RNA, 19 nt, Artificial Sequence
  Description of Artificial Sequence: Synthetic oligonucleotide
agguccuccauggcaaaga

SEQ ID NO: 2137884 - RNA, 19 nt, Artificial Sequence
  Description of Artificial Sequence: Synthetic oligonucleotide
auggaugagcgagaaugau

SEQ ID NO: 2137885 - RNA, 19 nt, Artificial Sequence
  Description of Artificial Sequence: Synthetic oligonucleotide
cauccagcuagaaaccggu

SEQ ID NO: 2137886 - RNA, 19 nt, Artificial Sequence
  Description of Artificial Sequence: Synthetic oligonucleotide
caccauguaucuugcuaca

SEQ ID NO: 2137887 - RNA, 19 nt, Artificial Sequence
  Description of Artificial Sequence: Synthetic oligonucleotide
agguuucuauggaacauuu

SEQ ID NO: 2137888 - RNA, 19 nt, Artificial Sequence
  Description of Artificial Sequence: Synthetic oligonucleotide
cauuaccuggggaggguga

SEQ ID NO: 2137889 - RNA, 19 nt, Artificial Sequence
  Description of Artificial Sequence: Synthetic oligonucleotide
gaauagcacagcgugggau

SEQ ID NO: 2137890 - RNA, 19 nt, Artificial Sequence
  Description of Artificial Sequence: Synthetic oligonucleotide
uucuugggguggugacacc

SEQ ID NO: 2137891 - RNA, 19 nt, Artificial Sequence
  Description of Artificial Sequence: Synthetic oligonucleotide
acacugcaagaccgucgag

SEQ ID NO: 2137892 - RNA, 19 nt, Artificial Sequence
  Description of Artificial Sequence: Synthetic oligonucleotide
cugaaacaaaauacauuau

SEQ ID NO: 2137893 - RNA, 19 nt, Artificial Sequence
  Description of Artificial Sequence: Synthetic oligonucleotide
gcuagugacccauugcccu

SEQ ID NO: 2137894 - RNA, 19 nt, Artificial Sequence
  Description of Artificial Sequence: Synthetic oligonucleotide
ccaacgacauuggacaauc

SEQ ID NO: 2137895 - RNA, 19 nt, Artificial Sequence
  Description of Artificial Sequence: Synthetic oligonucleotide
gauggaccagggaagcugu

SEQ ID NO: 2137896 - RNA, 19 nt, Artificial Sequence
  Description of Artificial Sequence: Synthetic oligonucleotide
accgucgagguuggcaaug

SEQ ID NO: 2137897 - RNA, 19 nt, Artificial Sequence
  Description of Artificial Sequence: Synthetic oligonucleotide
cgugugagaagauaacaga

SEQ ID NO: 2137898 - RNA, 19 nt, Artificial Sequence
  Description of Artificial Sequence: Synthetic oligonucleotide
gaggucccuggugacacca

SEQ ID NO: 2137899 - RNA, 19 nt, Artificial Sequence
  Description of Artificial Sequence: Synthetic oligonucleotide
ggcaaugaccagucuccug

SEQ ID NO: 2137900 - RNA, 19 nt, Artificial Sequence
  Description of Artificial Sequence: Synthetic oligonucleotide
aggccgcugcacuuccuug

SEQ ID NO: 2137901 - RNA, 19 nt, Artificial Sequence
  Description of Artificial Sequence: Synthetic oligonucleotide
agcgugggaugaggguggc

SEQ ID NO: 2137902 - RNA, 19 nt, Artificial Sequence
  Description of Artificial Sequence: Synthetic oligonucleotide
cggugcauuaccuggggag

SEQ ID NO: 2137903 - RNA, 19 nt, Artificial Sequence
  Description of Artificial Sequence: Synthetic oligonucleotide
accauguaucuugcuacau

SEQ ID NO: 2137904 - RNA, 19 nt, Artificial Sequence
  Description of Artificial Sequence: Synthetic oligonucleotide
accaacgacauuggacaau

SEQ ID NO: 2137905 - RNA, 19 nt, Artificial Sequence
  Description of Artificial Sequence: Synthetic oligonucleotide
aucuugcuacauaaucaaa

SEQ ID NO: 2137906 - RNA, 19 nt, Artificial Sequence
  Description of Artificial Sequence: Synthetic oligonucleotide
cugcucagacacugcaaga

SEQ ID NO: 2137907 - RNA, 19 nt, Artificial Sequence
  Description of Artificial Sequence: Synthetic oligonucleotide
gcuagaaaccggugcauua

SEQ ID NO: 2137908 - RNA, 19 nt, Artificial Sequence
  Description of Artificial Sequence: Synthetic oligonucleotide
uauuugcuuuaggcagacu

SEQ ID NO: 2137909 - RNA, 19 nt, Artificial Sequence
  Description of Artificial Sequence: Synthetic oligonucleotide
cucagcucaaagagacaaa

SEQ ID NO: 2137910 - RNA, 19 nt, Artificial Sequence
  Description of Artificial Sequence: Synthetic oligonucleotide
aguucucauccagcuagaa

SEQ ID NO: 2137911 - RNA, 19 nt, Artificial Sequence
  Description of Artificial Sequence: Synthetic oligonucleotide
agcuagaaaccggugcauu

SEQ ID NO: 2137912 - RNA, 19 nt, Artificial Sequence
  Description of Artificial Sequence: Synthetic oligonucleotide
cagacacugcaagaccguc

SEQ ID NO: 2137913 - RNA, 19 nt, Artificial Sequence
  Description of Artificial Sequence: Synthetic oligonucleotide
uuaccuggggagggugacu

SEQ ID NO: 2137914 - RNA, 19 nt, Artificial Sequence
  Description of Artificial Sequence: Synthetic oligonucleotide
gcacuuccuugcuagugac

SEQ ID NO: 2137915 - RNA, 19 nt, Artificial Sequence
  Description of Artificial Sequence: Synthetic oligonucleotide
ccuugcuagugacccauug

SEQ ID NO: 2137916 - RNA, 19 nt, Artificial Sequence
  Description of Artificial Sequence: Synthetic oligonucleotide
gucgagguuggcaaugacu

SEQ ID NO: 2137917 - RNA, 19 nt, Artificial Sequence
  Description of Artificial Sequence: Synthetic oligonucleotide
acucuucccugaccucaca

SEQ ID NO: 2137918 - RNA, 19 nt, Artificial Sequence
  Description of Artificial Sequence: Synthetic oligonucleotide
gugacccauugcccucggg

SEQ ID NO: 2137919 - RNA, 19 nt, Artificial Sequence
  Description of Artificial Sequence: Synthetic oligonucleotide
gcauauaggaagcugccuu

SEQ ID NO: 2137920 - RNA, 19 nt, Artificial Sequence
  Description of Artificial Sequence: Synthetic oligonucleotide
cuuccuugcuagugaccca

SEQ ID NO: 2137921 - RNA, 19 nt, Artificial Sequence
  Description of Artificial Sequence: Synthetic oligonucleotide
cccaguucccauuaagaaa

SEQ ID NO: 2137922 - RNA, 19 nt, Artificial Sequence
  Description of Artificial Sequence: Synthetic oligonucleotide
acauuaucugggagacaga

SEQ ID NO: 2137923 - RNA, 19 nt, Artificial Sequence
  Description of Artificial Sequence: Synthetic oligonucleotide
ggugaagauacaucauuuu

SEQ ID NO: 2137924 - RNA, 19 nt, Artificial Sequence
  Description of Artificial Sequence: Synthetic oligonucleotide
acacaacacugaacccauc

SEQ ID NO: 2137925 - RNA, 19 nt, Artificial Sequence
  Description of Artificial Sequence: Synthetic oligonucleotide
gucuccgauggaugagcga

SEQ ID NO: 2137926 - RNA, 19 nt, Artificial Sequence
  Description of Artificial Sequence: Synthetic oligonucleotide
cuacucagagaagguccuc

SEQ ID NO: 2137927 - RNA, 19 nt, Artificial Sequence
  Description of Artificial Sequence: Synthetic oligonucleotide
auccagcuagaaaccggug

SEQ ID NO: 2137928 - RNA, 19 nt, Artificial Sequence
  Description of Artificial Sequence: Synthetic oligonucleotide
caacgacauuggacaauca

SEQ ID NO: 2137929 - RNA, 19 nt, Artificial Sequence
  Description of Artificial Sequence: Synthetic oligonucleotide
gcacagcgugggaugaggg

SEQ ID NO: 2137930 - RNA, 19 nt, Artificial Sequence
  Description of Artificial Sequence: Synthetic oligonucleotide
gucccuggugacaccacca

SEQ ID NO: 2137931 - RNA, 19 nt, Artificial Sequence
  Description of Artificial Sequence: Synthetic oligonucleotide
cagacugucuccgauggau

SEQ ID NO: 2137932 - RNA, 19 nt, Artificial Sequence
  Description of Artificial Sequence: Synthetic oligonucleotide
gggaagcuguguaaggaaa

SEQ ID NO: 2137933 - RNA, 19 nt, Artificial Sequence
  Description of Artificial Sequence: Synthetic oligonucleotide
gagccccuacucagagaag

SEQ ID NO: 2137934 - RNA, 19 nt, Artificial Sequence
  Description of Artificial Sequence: Synthetic oligonucleotide
gcaagaccgucgagguugg

SEQ ID NO: 2137935 - RNA, 19 nt, Artificial Sequence
  Description of Artificial Sequence: Synthetic oligonucleotide
guaggugaagauacaucau

SEQ ID NO: 2137936 - RNA, 19 nt, Artificial Sequence
  Description of Artificial Sequence: Synthetic oligonucleotide
aggucccuggugacaccac

SEQ ID NO: 2137937 - RNA, 19 nt, Artificial Sequence
  Description of Artificial Sequence: Synthetic oligonucleotide
cuauaacaaaggagauaau

SEQ ID NO: 2137938 - RNA, 19 nt, Artificial Sequence
  Description of Artificial Sequence: Synthetic oligonucleotide
gaugagcaugauggaugaa

SEQ ID NO: 2137939 - RNA, 19 nt, Artificial Sequence
  Description of Artificial Sequence: Synthetic oligonucleotide
ggugugccuucugucucag

SEQ ID NO: 2137940 - RNA, 19 nt, Artificial Sequence
  Description of Artificial Sequence: Synthetic oligonucleotide
ccugccucagcuugggaaa

SEQ ID NO: 2137941 - RNA, 19 nt, Artificial Sequence
  Description of Artificial Sequence: Synthetic oligonucleotide
gcucucacucuucccugac

SEQ ID NO: 2137942 - RNA, 19 nt, Artificial Sequence
  Description of Artificial Sequence: Synthetic oligonucleotide
ggcucucacucuucccuga

SEQ ID NO: 2137943 - RNA, 19 nt, Artificial Sequence
  Description of Artificial Sequence: Synthetic oligonucleotide
ccauguaucuugcuacaua

SEQ ID NO: 2137944 - RNA, 19 nt, Artificial Sequence
  Description of Artificial Sequence: Synthetic oligonucleotide
cacagcgugggaugagggu

SEQ ID NO: 2137945 - RNA, 19 nt, Artificial Sequence
  Description of Artificial Sequence: Synthetic oligonucleotide
ccuuaagauggaccaggga

SEQ ID NO: 2137946 - RNA, 19 nt, Artificial Sequence
  Description of Artificial Sequence: Synthetic oligonucleotide
gggugacuggccccuguga

SEQ ID NO: 2137947 - RNA, 19 nt, Artificial Sequence
  Description of Artificial Sequence: Synthetic oligonucleotide
auggaccagggaagcugug

SEQ ID NO: 2137948 - RNA, 19 nt, Artificial Sequence
  Description of Artificial Sequence: Synthetic oligonucleotide
gugacacccaguucccauu

SEQ ID NO: 2137949 - RNA, 19 nt, Artificial Sequence
  Description of Artificial Sequence: Synthetic oligonucleotide
ggaggucccuggugacacc

SEQ ID NO: 2137950 - RNA, 19 nt, Artificial Sequence
  Description of Artificial Sequence: Synthetic oligonucleotide
ggcuuugggcuguuaccaa

SEQ ID NO: 2137951 - RNA, 19 nt, Artificial Sequence
  Description of Artificial Sequence: Synthetic oligonucleotide
cucagagaagguccuccau

SEQ ID NO: 2137952 - RNA, 19 nt, Artificial Sequence
  Description of Artificial Sequence: Synthetic oligonucleotide
ccuacucagagaagguccu

SEQ ID NO: 2137953 - RNA, 19 nt, Artificial Sequence
  Description of Artificial Sequence: Synthetic oligonucleotide
ggguggugacacccaguuc

SEQ ID NO: 2137954 - RNA, 19 nt, Artificial Sequence
  Description of Artificial Sequence: Synthetic oligonucleotide
cccaggccgcugcacuucc

SEQ ID NO: 2137955 - RNA, 19 nt, Artificial Sequence
  Description of Artificial Sequence: Synthetic oligonucleotide
gaccgucgagguuggcaau

SEQ ID NO: 2137956 - RNA, 19 nt, Artificial Sequence
  Description of Artificial Sequence: Synthetic oligonucleotide
caaaccuggggagccccua

SEQ ID NO: 2137957 - RNA, 19 nt, Artificial Sequence
  Description of Artificial Sequence: Synthetic oligonucleotide
acccacuggaggggcccca

SEQ ID NO: 2137958 - RNA, 19 nt, Artificial Sequence
  Description of Artificial Sequence: Synthetic oligonucleotide
uaguggcuuugggcuguua

SEQ ID NO: 2137959 - RNA, 19 nt, Artificial Sequence
  Description of Artificial Sequence: Synthetic oligonucleotide
gggcuguuaccaacgacau

SEQ ID NO: 2137960 - RNA, 19 nt, Artificial Sequence
  Description of Artificial Sequence: Synthetic oligonucleotide
gguuucuauggaacauuuu

SEQ ID NO: 2137961 - RNA, 19 nt, Artificial Sequence
  Description of Artificial Sequence: Synthetic oligonucleotide
cagcuagaaaccggugcau

SEQ ID NO: 2137962 - RNA, 19 nt, Artificial Sequence
  Description of Artificial Sequence: Synthetic oligonucleotide
cgucgagguuggcaaugac

SEQ ID NO: 2137963 - RNA, 19 nt, Artificial Sequence
  Description of Artificial Sequence: Synthetic oligonucleotide
uggccccugugaggagguc

SEQ ID NO: 2137964 - RNA, 19 nt, Artificial Sequence
  Description of Artificial Sequence: Synthetic oligonucleotide
ccggugcauuaccugggga

SEQ ID NO: 2137965 - RNA, 19 nt, Artificial Sequence
  Description of Artificial Sequence: Synthetic oligonucleotide
cugcaguucuugggguggu

SEQ ID NO: 2137966 - RNA, 19 nt, Artificial Sequence
  Description of Artificial Sequence: Synthetic oligonucleotide
cccugaccucacacuccug

SEQ ID NO: 2137967 - RNA, 19 nt, Artificial Sequence
  Description of Artificial Sequence: Synthetic oligonucleotide
cugcaagaccgucgagguu

SEQ ID NO: 2137968 - RNA, 19 nt, Artificial Sequence
  Description of Artificial Sequence: Synthetic oligonucleotide
ggcuguuaccaacgacauu

SEQ ID NO: 2137969 - RNA, 19 nt, Artificial Sequence
  Description of Artificial Sequence: Synthetic oligonucleotide
gccccuacucagagaaggu

SEQ ID NO: 2137970 - RNA, 19 nt, Artificial Sequence
  Description of Artificial Sequence: Synthetic oligonucleotide
ccuccauggcaaagauacu

SEQ ID NO: 2137971 - RNA, 19 nt, Artificial Sequence
  Description of Artificial Sequence: Synthetic oligonucleotide
ccgauggaugagcgagaau

SEQ ID NO: 2137972 - RNA, 19 nt, Artificial Sequence
  Description of Artificial Sequence: Synthetic oligonucleotide
gcgugggaugaggguggcu

SEQ ID NO: 2137973 - RNA, 19 nt, Artificial Sequence
  Description of Artificial Sequence: Synthetic oligonucleotide
gauacuuaaucccagaagg

SEQ ID NO: 2137974 - RNA, 19 nt, Artificial Sequence
  Description of Artificial Sequence: Synthetic oligonucleotide
aauuauuuguaauaaagga

SEQ ID NO: 2137975 - RNA, 19 nt, Artificial Sequence
  Description of Artificial Sequence: Synthetic oligonucleotide
uaugaaaguaaacaaagag

SEQ ID NO: 2137976 - RNA, 19 nt, Artificial Sequence
  Description of Artificial Sequence: Synthetic oligonucleotide
aauaaaguauaacaguaag

SEQ ID NO: 2137977 - RNA, 19 nt, Artificial Sequence
  Description of Artificial Sequence: Synthetic oligonucleotide
uuagaauugaguauuuugc

SEQ ID NO: 2137978 - RNA, 19 nt, Artificial Sequence
  Description of Artificial Sequence: Synthetic oligonucleotide
aacuaauuuaaauuugucu

SEQ ID NO: 2137979 - RNA, 19 nt, Artificial Sequence
  Description of Artificial Sequence: Synthetic oligonucleotide
aaacaaaacaaaacaaaac

SEQ ID NO: 2137980 - RNA, 19 nt, Artificial Sequence
  Description of Artificial Sequence: Synthetic oligonucleotide
auuaccaagggguggaugc

SEQ ID NO: 2137981 - RNA, 19 nt, Artificial Sequence
  Description of Artificial Sequence: Synthetic oligonucleotide
aaguauaacaguaagccag

SEQ ID NO: 2137982 - RNA, 19 nt, Artificial Sequence
  Description of Artificial Sequence: Synthetic oligonucleotide
ucuguuaauuaccaagggg

SEQ ID NO: 2137983 - RNA, 19 nt, Artificial Sequence
  Description of Artificial Sequence: Synthetic oligonucleotide
acuuccugcacuuaaaauc

SEQ ID NO: 2137984 - RNA, 19 nt, Artificial Sequence
  Description of Artificial Sequence: Synthetic oligonucleotide
uuuagaauugaguauuuug

SEQ ID NO: 2137985 - RNA, 19 nt, Artificial Sequence
  Description of Artificial Sequence: Synthetic oligonucleotide
aaauuggaauacaaaauac

SEQ ID NO: 2137986 - RNA, 19 nt, Artificial Sequence
  Description of Artificial Sequence: Synthetic oligonucleotide
cuugccauaacacaagagg

SEQ ID NO: 2137987 - RNA, 19 nt, Artificial Sequence
  Description of Artificial Sequence: Synthetic oligonucleotide
aauagugagagauccuguc

SEQ ID NO: 2137988 - RNA, 19 nt, Artificial Sequence
  Description of Artificial Sequence: Synthetic oligonucleotide
uuuuguagaaauucuguug

SEQ ID NO: 2137989 - RNA, 19 nt, Artificial Sequence
  Description of Artificial Sequence: Synthetic oligonucleotide
caugaugauacuuaauccc

SEQ ID NO: 2137990 - RNA, 19 nt, Artificial Sequence
  Description of Artificial Sequence: Synthetic oligonucleotide
uuaucuguuagaauuacaa

SEQ ID NO: 2137991 - RNA, 19 nt, Artificial Sequence
  Description of Artificial Sequence: Synthetic oligonucleotide
auaacuaucucugauguag

SEQ ID NO: 2137992 - RNA, 19 nt, Artificial Sequence
  Description of Artificial Sequence: Synthetic oligonucleotide
agaauacagugucagaagg

SEQ ID NO: 2137993 - RNA, 19 nt, Artificial Sequence
  Description of Artificial Sequence: Synthetic oligonucleotide
aauaaaggauuugcuaugg

SEQ ID NO: 2137994 - RNA, 19 nt, Artificial Sequence
  Description of Artificial Sequence: Synthetic oligonucleotide
aaaacgguguuugagacug

SEQ ID NO: 2137995 - RNA, 19 nt, Artificial Sequence
  Description of Artificial Sequence: Synthetic oligonucleotide
ucaaaggaaacuuggaacu

SEQ ID NO: 2137996 - RNA, 19 nt, Artificial Sequence
  Description of Artificial Sequence: Synthetic oligonucleotide
uguuagugugcacaguggg

SEQ ID NO: 2137997 - RNA, 19 nt, Artificial Sequence
  Description of Artificial Sequence: Synthetic oligonucleotide
gaagaauugaguuccaguc

SEQ ID NO: 2137998 - RNA, 19 nt, Artificial Sequence
  Description of Artificial Sequence: Synthetic oligonucleotide
aaaacaaaacaaaacaaaa

SEQ ID NO: 2137999 - RNA, 19 nt, Artificial Sequence
  Description of Artificial Sequence: Synthetic oligonucleotide
guuaguugaauugacauug

SEQ ID NO: 2138000 - RNA, 19 nt, Artificial Sequence
  Description of Artificial Sequence: Synthetic oligonucleotide
aaguuaguugaauugacau

SEQ ID NO: 2138001 - RNA, 19 nt, Artificial Sequence
  Description of Artificial Sequence: Synthetic oligonucleotide
auaacaguaagccaggcau

SEQ ID NO: 2138002 - RNA, 19 nt, Artificial Sequence
  Description of Artificial Sequence: Synthetic oligonucleotide
uucaaaggaaacuuggaac

SEQ ID NO: 2138003 - RNA, 19 nt, Artificial Sequence
  Description of Artificial Sequence: Synthetic oligonucleotide
gacuguuugagacauggag

SEQ ID NO: 2138004 - RNA, 19 nt, Artificial Sequence
  Description of Artificial Sequence: Synthetic oligonucleotide
uguauagugaguugcaagu

SEQ ID NO: 2138005 - RNA, 19 nt, Artificial Sequence
  Description of Artificial Sequence: Synthetic oligonucleotide
ugauacuuaaucccagaag

SEQ ID NO: 2138006 - RNA, 19 nt, Artificial Sequence
  Description of Artificial Sequence: Synthetic oligonucleotide
uuuaucucucucaacuucc

SEQ ID NO: 2138007 - RNA, 19 nt, Artificial Sequence
  Description of Artificial Sequence: Synthetic oligonucleotide
aaaguauaacaguaagcca

SEQ ID NO: 2138008 - RNA, 19 nt, Artificial Sequence
  Description of Artificial Sequence: Synthetic oligonucleotide
gacagggacaaauagugag

SEQ ID NO: 2138009 - RNA, 19 nt, Artificial Sequence
  Description of Artificial Sequence: Synthetic oligonucleotide
uuuaaguuaguugaauuga

SEQ ID NO: 2138010 - RNA, 19 nt, Artificial Sequence
  Description of Artificial Sequence: Synthetic oligonucleotide
gauguuagugugcacagug

SEQ ID NO: 2138011 - RNA, 19 nt, Artificial Sequence
  Description of Artificial Sequence: Synthetic oligonucleotide
aucuguuagaauuacaaaa

SEQ ID NO: 2138012 - RNA, 19 nt, Artificial Sequence
  Description of Artificial Sequence: Synthetic oligonucleotide
uuuugcacccugaauauga

SEQ ID NO: 2138013 - RNA, 19 nt, Artificial Sequence
  Description of Artificial Sequence: Synthetic oligonucleotide
agaauugaguuccagucag

SEQ ID NO: 2138014 - RNA, 19 nt, Artificial Sequence
  Description of Artificial Sequence: Synthetic oligonucleotide
guuccagucaguuuuguag

SEQ ID NO: 2138015 - RNA, 19 nt, Artificial Sequence
  Description of Artificial Sequence: Synthetic oligonucleotide
uuggaauacaaaauacugu

SEQ ID NO: 2138016 - RNA, 19 nt, Artificial Sequence
  Description of Artificial Sequence: Synthetic oligonucleotide
aacucagcaaugcucuccg

SEQ ID NO: 2138017 - RNA, 19 nt, Artificial Sequence
  Description of Artificial Sequence: Synthetic oligonucleotide
uuagcuugccauaacacaa

SEQ ID NO: 2138018 - RNA, 19 nt, Artificial Sequence
  Description of Artificial Sequence: Synthetic oligonucleotide
uuuagcuugccauaacaca

SEQ ID NO: 2138019 - RNA, 19 nt, Artificial Sequence
  Description of Artificial Sequence: Synthetic oligonucleotide
aauuggaauacaaaauacu

SEQ ID NO: 2138020 - RNA, 19 nt, Artificial Sequence
  Description of Artificial Sequence: Synthetic oligonucleotide
uuuagccagacucaugugu

SEQ ID NO: 2138021 - RNA, 19 nt, Artificial Sequence
  Description of Artificial Sequence: Synthetic oligonucleotide
uguuaauuaccaaggggug

SEQ ID NO: 2138022 - RNA, 19 nt, Artificial Sequence
  Description of Artificial Sequence: Synthetic oligonucleotide
uggaauacaaaauacuguu

SEQ ID NO: 2138023 - RNA, 19 nt, Artificial Sequence
  Description of Artificial Sequence: Synthetic oligonucleotide
ucuaacucuuuucucacac

SEQ ID NO: 2138024 - RNA, 19 nt, Artificial Sequence
  Description of Artificial Sequence: Synthetic oligonucleotide
ucugaaacagaagaguucu

SEQ ID NO: 2138025 - RNA, 19 nt, Artificial Sequence
  Description of Artificial Sequence: Synthetic oligonucleotide
auuggaauacaaaauacug

SEQ ID NO: 2138026 - RNA, 19 nt, Artificial Sequence
  Description of Artificial Sequence: Synthetic oligonucleotide
uguugaaacauguuuuagu

SEQ ID NO: 2138027 - RNA, 19 nt, Artificial Sequence
  Description of Artificial Sequence: Synthetic oligonucleotide
aagaauugaguuccaguca

SEQ ID NO: 2138028 - RNA, 19 nt, Artificial Sequence
  Description of Artificial Sequence: Synthetic oligonucleotide
uugcaagucagacagggac

SEQ ID NO: 2138029 - RNA, 19 nt, Artificial Sequence
  Description of Artificial Sequence: Synthetic oligonucleotide
uugccauaacacaagagga

SEQ ID NO: 2138030 - RNA, 19 nt, Artificial Sequence
  Description of Artificial Sequence: Synthetic oligonucleotide
uauuuugcauucuggaaga

SEQ ID NO: 2138031 - RNA, 19 nt, Artificial Sequence
  Description of Artificial Sequence: Synthetic oligonucleotide
gagacuguuugagacaugg

SEQ ID NO: 2138032 - RNA, 19 nt, Artificial Sequence
  Description of Artificial Sequence: Synthetic oligonucleotide
aaggagaauacagugucag

SEQ ID NO: 2138033 - RNA, 19 nt, Artificial Sequence
  Description of Artificial Sequence: Synthetic oligonucleotide
uagaaauucuguugaaaca

SEQ ID NO: 2138034 - RNA, 19 nt, Artificial Sequence
  Description of Artificial Sequence: Synthetic oligonucleotide
aacaaagagaaggagaaua

SEQ ID NO: 2138035 - RNA, 19 nt, Artificial Sequence
  Description of Artificial Sequence: Synthetic oligonucleotide
uuuuagcuugccauaacac

SEQ ID NO: 2138036 - RNA, 19 nt, Artificial Sequence
  Description of Artificial Sequence: Synthetic oligonucleotide
caagaggacguguuuaucc

SEQ ID NO: 2138037 - RNA, 19 nt, Artificial Sequence
  Description of Artificial Sequence: Synthetic oligonucleotide
aaugccuacucuguuaucu

SEQ ID NO: 2138038 - RNA, 19 nt, Artificial Sequence
  Description of Artificial Sequence: Synthetic oligonucleotide
cuguucaaaggaaacuugg

SEQ ID NO: 2138039 - RNA, 19 nt, Artificial Sequence
  Description of Artificial Sequence: Synthetic oligonucleotide
uaaguuaguugaauugaca

SEQ ID NO: 2138040 - RNA, 19 nt, Artificial Sequence
  Description of Artificial Sequence: Synthetic oligonucleotide
gagaauacagugucagaag

SEQ ID NO: 2138041 - RNA, 19 nt, Artificial Sequence
  Description of Artificial Sequence: Synthetic oligonucleotide
uguuuauccuccauaacua

SEQ ID NO: 2138042 - RNA, 19 nt, Artificial Sequence
  Description of Artificial Sequence: Synthetic oligonucleotide
uuguaauaaaggauuugcu

SEQ ID NO: 2138043 - RNA, 19 nt, Artificial Sequence
  Description of Artificial Sequence: Synthetic oligonucleotide
cucaaauuggaauacaaaa

SEQ ID NO: 2138044 - RNA, 19 nt, Artificial Sequence
  Description of Artificial Sequence: Synthetic oligonucleotide
uauaacaguaagccaggca

SEQ ID NO: 2138045 - RNA, 19 nt, Artificial Sequence
  Description of Artificial Sequence: Synthetic oligonucleotide
agauuuaauuauuuguaau

SEQ ID NO: 2138046 - RNA, 19 nt, Artificial Sequence
  Description of Artificial Sequence: Synthetic oligonucleotide
ucugaauccaacucagccu

SEQ ID NO: 2138047 - RNA, 19 nt, Artificial Sequence
  Description of Artificial Sequence: Synthetic oligonucleotide
ugaugauacuuaaucccag

SEQ ID NO: 2138048 - RNA, 19 nt, Artificial Sequence
  Description of Artificial Sequence: Synthetic oligonucleotide
caaaacaaaacaaaacaaa

SEQ ID NO: 2138049 - RNA, 19 nt, Artificial Sequence
  Description of Artificial Sequence: Synthetic oligonucleotide
aggacgccaugucagaagc

SEQ ID NO: 2138050 - RNA, 19 nt, Artificial Sequence
  Description of Artificial Sequence: Synthetic oligonucleotide
cugcagaugcccaacaacc

SEQ ID NO: 2138051 - RNA, 19 nt, Artificial Sequence
  Description of Artificial Sequence: Synthetic oligonucleotide
aguugcaagucagacaggg

SEQ ID NO: 2138052 - RNA, 19 nt, Artificial Sequence
  Description of Artificial Sequence: Synthetic oligonucleotide
augaaaguaaacaaagaga

SEQ ID NO: 2138053 - RNA, 19 nt, Artificial Sequence
  Description of Artificial Sequence: Synthetic oligonucleotide
augucuaacucuuuucuca

SEQ ID NO: 2138054 - RNA, 19 nt, Artificial Sequence
  Description of Artificial Sequence: Synthetic oligonucleotide
cauugauguguuuucacug

SEQ ID NO: 2138055 - RNA, 19 nt, Artificial Sequence
  Description of Artificial Sequence: Synthetic oligonucleotide
agugaguugcaagucagac

SEQ ID NO: 2138056 - RNA, 19 nt, Artificial Sequence
  Description of Artificial Sequence: Synthetic oligonucleotide
auuauuuguaauaaaggau

SEQ ID NO: 2138057 - RNA, 19 nt, Artificial Sequence
  Description of Artificial Sequence: Synthetic oligonucleotide
ugagaugauguuagugugc

SEQ ID NO: 2138058 - RNA, 19 nt, Artificial Sequence
  Description of Artificial Sequence: Synthetic oligonucleotide
gauugcauaagagaacuca

SEQ ID NO: 2138059 - RNA, 19 nt, Artificial Sequence
  Description of Artificial Sequence: Synthetic oligonucleotide
gagagauuuaauuauuugu

SEQ ID NO: 2138060 - RNA, 19 nt, Artificial Sequence
  Description of Artificial Sequence: Synthetic oligonucleotide
uuaauuaccaaggggugga

SEQ ID NO: 2138061 - RNA, 19 nt, Artificial Sequence
  Description of Artificial Sequence: Synthetic oligonucleotide
aguaaacaaagagaaggag

SEQ ID NO: 2138062 - RNA, 19 nt, Artificial Sequence
  Description of Artificial Sequence: Synthetic oligonucleotide
cuauggucuguuaauuacc

SEQ ID NO: 2138063 - RNA, 19 nt, Artificial Sequence
  Description of Artificial Sequence: Synthetic oligonucleotide
guuaauuaccaaggggugg

SEQ ID NO: 2138064 - RNA, 19 nt, Artificial Sequence
  Description of Artificial Sequence: Synthetic oligonucleotide
gaugauguuagugugcaca

SEQ ID NO: 2138065 - RNA, 19 nt, Artificial Sequence
  Description of Artificial Sequence: Synthetic oligonucleotide
auacuuaaucccagaaggc

SEQ ID NO: 2138066 - RNA, 19 nt, Artificial Sequence
  Description of Artificial Sequence: Synthetic oligonucleotide
aagaggacguguuuauccu

SEQ ID NO: 2138067 - RNA, 19 nt, Artificial Sequence
  Description of Artificial Sequence: Synthetic oligonucleotide
aaauaaaguauaacaguaa

SEQ ID NO: 2138068 - RNA, 19 nt, Artificial Sequence
  Description of Artificial Sequence: Synthetic oligonucleotide
acuggauuuuaucucucuc

SEQ ID NO: 2138069 - RNA, 19 nt, Artificial Sequence
  Description of Artificial Sequence: Synthetic oligonucleotide
cuaucucugauguagaaaa

SEQ ID NO: 2138070 - RNA, 19 nt, Artificial Sequence
  Description of Artificial Sequence: Synthetic oligonucleotide
aaauucuguugaaacaugu

SEQ ID NO: 2138071 - RNA, 19 nt, Artificial Sequence
  Description of Artificial Sequence: Synthetic oligonucleotide
uggauuuuaucucucucaa

SEQ ID NO: 2138072 - RNA, 19 nt, Artificial Sequence
  Description of Artificial Sequence: Synthetic oligonucleotide
agaauugaguauuuugcau

SEQ ID NO: 2138073 - RNA, 19 nt, Artificial Sequence
  Description of Artificial Sequence: Synthetic oligonucleotide
uuugcuauggucuguuaau

SEQ ID NO: 2138074 - RNA, 19 nt, Artificial Sequence
  Description of Artificial Sequence: Synthetic oligonucleotide
gagauuuaauuauuuguaa

SEQ ID NO: 2138075 - RNA, 19 nt, Artificial Sequence
  Description of Artificial Sequence: Synthetic oligonucleotide
aagugccucaaauuggaau

SEQ ID NO: 2138076 - RNA, 19 nt, Artificial Sequence
  Description of Artificial Sequence: Synthetic oligonucleotide
augauguuagugugcacag

SEQ ID NO: 2138077 - RNA, 19 nt, Artificial Sequence
  Description of Artificial Sequence: Synthetic oligonucleotide
aaggacgccaugucagaag

SEQ ID NO: 2138078 - RNA, 19 nt, Artificial Sequence
  Description of Artificial Sequence: Synthetic oligonucleotide
aguugaauugacauugaug

SEQ ID NO: 2138079 - RNA, 19 nt, Artificial Sequence
  Description of Artificial Sequence: Synthetic oligonucleotide
ugaaugccuacucuguuau

SEQ ID NO: 2138080 - RNA, 19 nt, Artificial Sequence
  Description of Artificial Sequence: Synthetic oligonucleotide
ugccauaacacaagaggac

SEQ ID NO: 2138081 - RNA, 19 nt, Artificial Sequence
  Description of Artificial Sequence: Synthetic oligonucleotide
aagagaaggagaauacagu

SEQ ID NO: 2138082 - RNA, 19 nt, Artificial Sequence
  Description of Artificial Sequence: Synthetic oligonucleotide
gucuguuaauuaccaaggg

SEQ ID NO: 2138083 - RNA, 19 nt, Artificial Sequence
  Description of Artificial Sequence: Synthetic oligonucleotide
uaucuguuagaauuacaaa

SEQ ID NO: 2138084 - RNA, 19 nt, Artificial Sequence
  Description of Artificial Sequence: Synthetic oligonucleotide
uuagugugcacaguggggu

SEQ ID NO: 2138085 - RNA, 19 nt, Artificial Sequence
  Description of Artificial Sequence: Synthetic oligonucleotide
aguauaacaguaagccagg

SEQ ID NO: 2138086 - RNA, 19 nt, Artificial Sequence
  Description of Artificial Sequence: Synthetic oligonucleotide
aguguuuguucccacgcug

SEQ ID NO: 2138087 - RNA, 19 nt, Artificial Sequence
  Description of Artificial Sequence: Synthetic oligonucleotide
ggcaugaugauacuuaauc

SEQ ID NO: 2138088 - RNA, 19 nt, Artificial Sequence
  Description of Artificial Sequence: Synthetic oligonucleotide
cuguuaauuaccaaggggu

SEQ ID NO: 2138089 - RNA, 19 nt, Artificial Sequence
  Description of Artificial Sequence: Synthetic oligonucleotide
aaucugaaacagaagaguu

SEQ ID NO: 2138090 - RNA, 19 nt, Artificial Sequence
  Description of Artificial Sequence: Synthetic oligonucleotide
cugggguuuagccagacuc

SEQ ID NO: 2138091 - RNA, 19 nt, Artificial Sequence
  Description of Artificial Sequence: Synthetic oligonucleotide
ugugucugggguuuagcca

SEQ ID NO: 2138092 - RNA, 19 nt, Artificial Sequence
  Description of Artificial Sequence: Synthetic oligonucleotide
acaacuaauuuaaauuugu

SEQ ID NO: 2138093 - RNA, 19 nt, Artificial Sequence
  Description of Artificial Sequence: Synthetic oligonucleotide
gugucugggguuuagccag

SEQ ID NO: 2138094 - RNA, 19 nt, Artificial Sequence
  Description of Artificial Sequence: Synthetic oligonucleotide
agacucauguguuggagga

SEQ ID NO: 2138095 - RNA, 19 nt, Artificial Sequence
  Description of Artificial Sequence: Synthetic oligonucleotide
uaacaguaagccaggcaug

SEQ ID NO: 2138096 - RNA, 19 nt, Artificial Sequence
  Description of Artificial Sequence: Synthetic oligonucleotide
agagauuuaauuauuugua

SEQ ID NO: 2138097 - RNA, 19 nt, Artificial Sequence
  Description of Artificial Sequence: Synthetic oligonucleotide
uugacauugauguguuuuc

SEQ ID NO: 2138098 - RNA, 19 nt, Artificial Sequence
  Description of Artificial Sequence: Synthetic oligonucleotide
aggauugcauaagagaacu

SEQ ID NO: 2138099 - RNA, 19 nt, Artificial Sequence
  Description of Artificial Sequence: Synthetic oligonucleotide
ucuguugaaacauguuuua

SEQ ID NO: 2138100 - RNA, 19 nt, Artificial Sequence
  Description of Artificial Sequence: Synthetic oligonucleotide
caguuuuguagaaauucug

SEQ ID NO: 2138101 - RNA, 19 nt, Artificial Sequence
  Description of Artificial Sequence: Synthetic oligonucleotide
gucaggauugcauaagaga

SEQ ID NO: 2138102 - RNA, 19 nt, Artificial Sequence
  Description of Artificial Sequence: Synthetic oligonucleotide
uuaguugaauugacauuga

SEQ ID NO: 2138103 - RNA, 19 nt, Artificial Sequence
  Description of Artificial Sequence: Synthetic oligonucleotide
uguuugagacuguuugaga

SEQ ID NO: 2138104 - RNA, 19 nt, Artificial Sequence
  Description of Artificial Sequence: Synthetic oligonucleotide
uacucuguuaucuguuaga

SEQ ID NO: 2138105 - RNA, 19 nt, Artificial Sequence
  Description of Artificial Sequence: Synthetic oligonucleotide
ugucuaacucuuuucucac

SEQ ID NO: 2138106 - RNA, 19 nt, Artificial Sequence
  Description of Artificial Sequence: Synthetic oligonucleotide
uccccuugaaaacaacuaa

SEQ ID NO: 2138107 - RNA, 19 nt, Artificial Sequence
  Description of Artificial Sequence: Synthetic oligonucleotide
aaugccggugaugcucugc

SEQ ID NO: 2138108 - RNA, 19 nt, Artificial Sequence
  Description of Artificial Sequence: Synthetic oligonucleotide
gaugucuaacucuuuucuc

SEQ ID NO: 2138109 - RNA, 19 nt, Artificial Sequence
  Description of Artificial Sequence: Synthetic oligonucleotide
ucucucucaacuuccugca

SEQ ID NO: 2138110 - RNA, 19 nt, Artificial Sequence
  Description of Artificial Sequence: Synthetic oligonucleotide
auuugcuauggucuguuaa

SEQ ID NO: 2138111 - RNA, 19 nt, Artificial Sequence
  Description of Artificial Sequence: Synthetic oligonucleotide
ugugagucaggauugcaua

SEQ ID NO: 2138112 - RNA, 19 nt, Artificial Sequence
  Description of Artificial Sequence: Synthetic oligonucleotide
caacuaauuuaaauuuguc

SEQ ID NO: 2138113 - RNA, 19 nt, Artificial Sequence
  Description of Artificial Sequence: Synthetic oligonucleotide
uagcuugccauaacacaag

SEQ ID NO: 2138114 - RNA, 19 nt, Artificial Sequence
  Description of Artificial Sequence: Synthetic oligonucleotide
ggucuguuaauuaccaagg

SEQ ID NO: 2138115 - RNA, 19 nt, Artificial Sequence
  Description of Artificial Sequence: Synthetic oligonucleotide
ggugacgugggaaaggacg

SEQ ID NO: 2138116 - RNA, 19 nt, Artificial Sequence
  Description of Artificial Sequence: Synthetic oligonucleotide
gaugauacuuaaucccaga

SEQ ID NO: 2138117 - RNA, 19 nt, Artificial Sequence
  Description of Artificial Sequence: Synthetic oligonucleotide
aaguggaucucugaaucca

SEQ ID NO: 2138118 - RNA, 19 nt, Artificial Sequence
  Description of Artificial Sequence: Synthetic oligonucleotide
gaaauucuguugaaacaug

SEQ ID NO: 2138119 - RNA, 19 nt, Artificial Sequence
  Description of Artificial Sequence: Synthetic oligonucleotide
guguuuauccuccauaacu

SEQ ID NO: 2138120 - RNA, 19 nt, Artificial Sequence
  Description of Artificial Sequence: Synthetic oligonucleotide
auugacauugauguguuuu

SEQ ID NO: 2138121 - RNA, 19 nt, Artificial Sequence
  Description of Artificial Sequence: Synthetic oligonucleotide
aauugaguuccagucaguu

SEQ ID NO: 2138122 - RNA, 19 nt, Artificial Sequence
  Description of Artificial Sequence: Synthetic oligonucleotide
aaauagugagagauccugu

SEQ ID NO: 2138123 - RNA, 19 nt, Artificial Sequence
  Description of Artificial Sequence: Synthetic oligonucleotide
uuagccagacucauguguu

SEQ ID NO: 2138124 - RNA, 19 nt, Artificial Sequence
  Description of Artificial Sequence: Synthetic oligonucleotide
uggagagauuuaauuauuu

SEQ ID NO: 2138125 - RNA, 19 nt, Artificial Sequence
  Description of Artificial Sequence: Synthetic oligonucleotide
augauacuuaaucccagaa

SEQ ID NO: 2138126 - RNA, 19 nt, Artificial Sequence
  Description of Artificial Sequence: Synthetic oligonucleotide
aguuaguugaauugacauu

SEQ ID NO: 2138127 - RNA, 19 nt, Artificial Sequence
  Description of Artificial Sequence: Synthetic oligonucleotide
aauccaacucagccuggug

SEQ ID NO: 2138128 - RNA, 19 nt, Artificial Sequence
  Description of Artificial Sequence: Synthetic oligonucleotide
ugagucaggauugcauaag

SEQ ID NO: 2138129 - RNA, 19 nt, Artificial Sequence
  Description of Artificial Sequence: Synthetic oligonucleotide
ugggguuuagccagacuca

SEQ ID NO: 2138130 - RNA, 19 nt, Artificial Sequence
  Description of Artificial Sequence: Synthetic oligonucleotide
aacacaagaggacguguuu

SEQ ID NO: 2138131 - RNA, 19 nt, Artificial Sequence
  Description of Artificial Sequence: Synthetic oligonucleotide
aggaguguuuguucccacg

SEQ ID NO: 2138132 - RNA, 19 nt, Artificial Sequence
  Description of Artificial Sequence: Synthetic oligonucleotide
guuagugugcacagugggg

SEQ ID NO: 2138133 - RNA, 19 nt, Artificial Sequence
  Description of Artificial Sequence: Synthetic oligonucleotide
uuccccuugaaaacaacua

SEQ ID NO: 2138134 - RNA, 19 nt, Artificial Sequence
  Description of Artificial Sequence: Synthetic oligonucleotide
augaugauacuuaauccca

SEQ ID NO: 2138135 - RNA, 19 nt, Artificial Sequence
  Description of Artificial Sequence: Synthetic oligonucleotide
cuggauuuuaucucucuca

SEQ ID NO: 2138136 - RNA, 19 nt, Artificial Sequence
  Description of Artificial Sequence: Synthetic oligonucleotide
ugaauccaacucagccugg

SEQ ID NO: 2138137 - RNA, 19 nt, Artificial Sequence
  Description of Artificial Sequence: Synthetic oligonucleotide
cauaagagaacucagcaau

SEQ ID NO: 2138138 - RNA, 19 nt, Artificial Sequence
  Description of Artificial Sequence: Synthetic oligonucleotide
aauuaccaagggguggaug

SEQ ID NO: 2138139 - RNA, 19 nt, Artificial Sequence
  Description of Artificial Sequence: Synthetic oligonucleotide
agaggacguguuuauccuc

SEQ ID NO: 2138140 - RNA, 19 nt, Artificial Sequence
  Description of Artificial Sequence: Synthetic oligonucleotide
acguguuuauccuccauaa

SEQ ID NO: 2138141 - RNA, 19 nt, Artificial Sequence
  Description of Artificial Sequence: Synthetic oligonucleotide
auuuuaucucucucaacuu

SEQ ID NO: 2138142 - RNA, 19 nt, Artificial Sequence
  Description of Artificial Sequence: Synthetic oligonucleotide
gguguguauagugaguugc

SEQ ID NO: 2138143 - RNA, 19 nt, Artificial Sequence
  Description of Artificial Sequence: Synthetic oligonucleotide
guugaaacauguuuuaguu

SEQ ID NO: 2138144 - RNA, 19 nt, Artificial Sequence
  Description of Artificial Sequence: Synthetic oligonucleotide
cuacucuguuaucuguuag

SEQ ID NO: 2138145 - RNA, 19 nt, Artificial Sequence
  Description of Artificial Sequence: Synthetic oligonucleotide
uugagacuguuugagacau

SEQ ID NO: 2138146 - RNA, 19 nt, Artificial Sequence
  Description of Artificial Sequence: Synthetic oligonucleotide
aaaggaaacuuggaacuuu

SEQ ID NO: 2138147 - RNA, 19 nt, Artificial Sequence
  Description of Artificial Sequence: Synthetic oligonucleotide
auacuguucaaaggaaacu

SEQ ID NO: 2138148 - RNA, 19 nt, Artificial Sequence
  Description of Artificial Sequence: Synthetic oligonucleotide
uggaugucuaacucuuuuc

SEQ ID NO: 2138149 - RNA, 19 nt, Artificial Sequence
  Description of Artificial Sequence: Synthetic oligonucleotide
caggauugcauaagagaac

SEQ ID NO: 2138150 - RNA, 19 nt, Artificial Sequence
  Description of Artificial Sequence: Synthetic oligonucleotide
caguaagccaggcaugaug

SEQ ID NO: 2138151 - RNA, 19 nt, Artificial Sequence
  Description of Artificial Sequence: Synthetic oligonucleotide
uaacacaagaggacguguu

SEQ ID NO: 2138152 - RNA, 19 nt, Artificial Sequence
  Description of Artificial Sequence: Synthetic oligonucleotide
gccauaacacaagaggacg

SEQ ID NO: 2138153 - RNA, 19 nt, Artificial Sequence
  Description of Artificial Sequence: Synthetic oligonucleotide
gaggacguguuuauccucc

SEQ ID NO: 2138154 - RNA, 19 nt, Artificial Sequence
  Description of Artificial Sequence: Synthetic oligonucleotide
uuaaucccagaaggcagag

SEQ ID NO: 2138155 - RNA, 19 nt, Artificial Sequence
  Description of Artificial Sequence: Synthetic oligonucleotide
ugagacauggagagauuua

SEQ ID NO: 2138156 - RNA, 19 nt, Artificial Sequence
  Description of Artificial Sequence: Synthetic oligonucleotide
uaguugaauugacauugau

SEQ ID NO: 2138157 - RNA, 19 nt, Artificial Sequence
  Description of Artificial Sequence: Synthetic oligonucleotide
cagggacaaauagugagag

SEQ ID NO: 2138158 - RNA, 19 nt, Artificial Sequence
  Description of Artificial Sequence: Synthetic oligonucleotide
gcuauggucuguuaauuac

SEQ ID NO: 2138159 - RNA, 19 nt, Artificial Sequence
  Description of Artificial Sequence: Synthetic oligonucleotide
gacgccaugucagaagcug

SEQ ID NO: 2138160 - RNA, 19 nt, Artificial Sequence
  Description of Artificial Sequence: Synthetic oligonucleotide
uccgaggcaaugccgguga

SEQ ID NO: 2138161 - RNA, 19 nt, Artificial Sequence
  Description of Artificial Sequence: Synthetic oligonucleotide
caugucagaagcuggaugu

SEQ ID NO: 2138162 - RNA, 19 nt, Artificial Sequence
  Description of Artificial Sequence: Synthetic oligonucleotide
ggaaaggacgccaugucag

SEQ ID NO: 2138163 - RNA, 19 nt, Artificial Sequence
  Description of Artificial Sequence: Synthetic oligonucleotide
acuguucaaaggaaacuug

SEQ ID NO: 2138164 - RNA, 19 nt, Artificial Sequence
  Description of Artificial Sequence: Synthetic oligonucleotide
cauaacacaagaggacgug

SEQ ID NO: 2138165 - RNA, 19 nt, Artificial Sequence
  Description of Artificial Sequence: Synthetic oligonucleotide
uguucccacgcugugaguc

SEQ ID NO: 2138166 - RNA, 19 nt, Artificial Sequence
  Description of Artificial Sequence: Synthetic oligonucleotide
gacauggagagauuuaauu

SEQ ID NO: 2138167 - RNA, 19 nt, Artificial Sequence
  Description of Artificial Sequence: Synthetic oligonucleotide
ucauguguuggaggaagca

SEQ ID NO: 2138168 - RNA, 19 nt, Artificial Sequence
  Description of Artificial Sequence: Synthetic oligonucleotide
gagucaggauugcauaaga

SEQ ID NO: 2138169 - RNA, 19 nt, Artificial Sequence
  Description of Artificial Sequence: Synthetic oligonucleotide
aaugcucuccgaggcaaug

SEQ ID NO: 2138170 - RNA, 19 nt, Artificial Sequence
  Description of Artificial Sequence: Synthetic oligonucleotide
agaacucagcaaugcucuc

SEQ ID NO: 2138171 - RNA, 19 nt, Artificial Sequence
  Description of Artificial Sequence: Synthetic oligonucleotide
uuugcacccugaauaugaa

SEQ ID NO: 2138172 - RNA, 19 nt, Artificial Sequence
  Description of Artificial Sequence: Synthetic oligonucleotide
agccccaugcuuuccuuuc

SEQ ID NO: 2138173 - RNA, 19 nt, Artificial Sequence
  Description of Artificial Sequence: Synthetic oligonucleotide
ugacucagccccaugcuuu

SEQ ID NO: 2138174 - RNA, 19 nt, Artificial Sequence
  Description of Artificial Sequence: Synthetic oligonucleotide
aauucuguugaaacauguu

SEQ ID NO: 2138175 - RNA, 19 nt, Artificial Sequence
  Description of Artificial Sequence: Synthetic oligonucleotide
gcaaguggaucucugaauc

SEQ ID NO: 2138176 - RNA, 19 nt, Artificial Sequence
  Description of Artificial Sequence: Synthetic oligonucleotide
ugucagaagcuggaugucu

SEQ ID NO: 2138177 - RNA, 19 nt, Artificial Sequence
  Description of Artificial Sequence: Synthetic oligonucleotide
auaacacaagaggacgugu

SEQ ID NO: 2138178 - RNA, 19 nt, Artificial Sequence
  Description of Artificial Sequence: Synthetic oligonucleotide
auguuagugugcacagugg

SEQ ID NO: 2138179 - RNA, 19 nt, Artificial Sequence
  Description of Artificial Sequence: Synthetic oligonucleotide
ggaguguuuguucccacgc

SEQ ID NO: 2138180 - RNA, 19 nt, Artificial Sequence
  Description of Artificial Sequence: Synthetic oligonucleotide
agucaggauugcauaagag

SEQ ID NO: 2138181 - RNA, 19 nt, Artificial Sequence
  Description of Artificial Sequence: Synthetic oligonucleotide
uguguauagugaguugcaa

SEQ ID NO: 2138182 - RNA, 19 nt, Artificial Sequence
  Description of Artificial Sequence: Synthetic oligonucleotide
uuggaacuuuugcacccug

SEQ ID NO: 2138183 - RNA, 19 nt, Artificial Sequence
  Description of Artificial Sequence: Synthetic oligonucleotide
cucauguguuggaggaagc

SEQ ID NO: 2138184 - RNA, 19 nt, Artificial Sequence
  Description of Artificial Sequence: Synthetic oligonucleotide
uuuugcauucuggaagaau

SEQ ID NO: 2138185 - RNA, 19 nt, Artificial Sequence
  Description of Artificial Sequence: Synthetic oligonucleotide
ugguguguauagugaguug

SEQ ID NO: 2138186 - RNA, 19 nt, Artificial Sequence
  Description of Artificial Sequence: Synthetic oligonucleotide
agccagacucauguguugg

SEQ ID NO: 2138187 - RNA, 19 nt, Artificial Sequence
  Description of Artificial Sequence: Synthetic oligonucleotide
gaaaggacgccaugucaga

SEQ ID NO: 2138188 - RNA, 19 nt, Artificial Sequence
  Description of Artificial Sequence: Synthetic oligonucleotide
auugaguuccagucaguuu

SEQ ID NO: 2138189 - RNA, 19 nt, Artificial Sequence
  Description of Artificial Sequence: Synthetic oligonucleotide
uugagacauggagagauuu

SEQ ID NO: 2138190 - RNA, 19 nt, Artificial Sequence
  Description of Artificial Sequence: Synthetic oligonucleotide
aguggggugacgugggaaa

SEQ ID NO: 2138191 - RNA, 19 nt, Artificial Sequence
  Description of Artificial Sequence: Synthetic oligonucleotide
ggagaauacagugucagaa

SEQ ID NO: 2138192 - RNA, 19 nt, Artificial Sequence
  Description of Artificial Sequence: Synthetic oligonucleotide
ugccuacucuguuaucugu

SEQ ID NO: 2138193 - RNA, 19 nt, Artificial Sequence
  Description of Artificial Sequence: Synthetic oligonucleotide
gguuuagccagacucaugu

SEQ ID NO: 2138194 - RNA, 19 nt, Artificial Sequence
  Description of Artificial Sequence: Synthetic oligonucleotide
acaagaggacguguuuauc

SEQ ID NO: 2138195 - RNA, 19 nt, Artificial Sequence
  Description of Artificial Sequence: Synthetic oligonucleotide
augcucuccgaggcaaugc

SEQ ID NO: 2138196 - RNA, 19 nt, Artificial Sequence
  Description of Artificial Sequence: Synthetic oligonucleotide
gacguguuuauccuccaua

SEQ ID NO: 2138197 - RNA, 19 nt, Artificial Sequence
  Description of Artificial Sequence: Synthetic oligonucleotide
gugaguugcaagucagaca

SEQ ID NO: 2138198 - RNA, 19 nt, Artificial Sequence
  Description of Artificial Sequence: Synthetic oligonucleotide
aacucuuuucucacacagu

SEQ ID NO: 2138199 - RNA, 19 nt, Artificial Sequence
  Description of Artificial Sequence: Synthetic oligonucleotide
agcuugccauaacacaaga

SEQ ID NO: 2138200 - RNA, 19 nt, Artificial Sequence
  Description of Artificial Sequence: Synthetic oligonucleotide
guuugagacauggagagau

SEQ ID NO: 2138201 - RNA, 19 nt, Artificial Sequence
  Description of Artificial Sequence: Synthetic oligonucleotide
gaguaggcugcuguugccc

SEQ ID NO: 2138202 - RNA, 19 nt, Artificial Sequence
  Description of Artificial Sequence: Synthetic oligonucleotide
uuugagacauggagagauu

SEQ ID NO: 2138203 - RNA, 19 nt, Artificial Sequence
  Description of Artificial Sequence: Synthetic oligonucleotide
aaaggacgccaugucagaa

SEQ ID NO: 2138204 - RNA, 19 nt, Artificial Sequence
  Description of Artificial Sequence: Synthetic oligonucleotide
ucuggcugccuugugggga

SEQ ID NO: 2138205 - RNA, 19 nt, Artificial Sequence
  Description of Artificial Sequence: Synthetic oligonucleotide
aaggaaacuuggaacuuuu

SEQ ID NO: 2138206 - RNA, 19 nt, Artificial Sequence
  Description of Artificial Sequence: Synthetic oligonucleotide
uagccagacucauguguug

SEQ ID NO: 2138207 - RNA, 19 nt, Artificial Sequence
  Description of Artificial Sequence: Synthetic oligonucleotide
guuuagccagacucaugug

SEQ ID NO: 2138208 - RNA, 19 nt, Artificial Sequence
  Description of Artificial Sequence: Synthetic oligonucleotide
aauugacauugauguguuu

SEQ ID NO: 2138209 - RNA, 19 nt, Artificial Sequence
  Description of Artificial Sequence: Synthetic oligonucleotide
gugacgugggaaaggacgc

SEQ ID NO: 2138210 - RNA, 19 nt, Artificial Sequence
  Description of Artificial Sequence: Synthetic oligonucleotide
acugaaugccuacucuguu

SEQ ID NO: 2138211 - RNA, 19 nt, Artificial Sequence
  Description of Artificial Sequence: Synthetic oligonucleotide
gauguguuuucacuggauu

SEQ ID NO: 2138212 - RNA, 19 nt, Artificial Sequence
  Description of Artificial Sequence: Synthetic oligonucleotide
acagggacaaauagugaga

SEQ ID NO: 2138213 - RNA, 19 nt, Artificial Sequence
  Description of Artificial Sequence: Synthetic oligonucleotide
guauagugaguugcaaguc

SEQ ID NO: 2138214 - RNA, 19 nt, Artificial Sequence
  Description of Artificial Sequence: Synthetic oligonucleotide
ugugugucugggguuuagc

SEQ ID NO: 2138215 - RNA, 19 nt, Artificial Sequence
  Description of Artificial Sequence: Synthetic oligonucleotide
aacucagccugguguguau

SEQ ID NO: 2138216 - RNA, 19 nt, Artificial Sequence
  Description of Artificial Sequence: Synthetic oligonucleotide
cagaaggcugugugucugg

SEQ ID NO: 2138217 - RNA, 19 nt, Artificial Sequence
  Description of Artificial Sequence: Synthetic oligonucleotide
guauaacaguaagccaggc

SEQ ID NO: 2138218 - RNA, 19 nt, Artificial Sequence
  Description of Artificial Sequence: Synthetic oligonucleotide
gggaguaggcugcuguugc

SEQ ID NO: 2138219 - RNA, 19 nt, Artificial Sequence
  Description of Artificial Sequence: Synthetic oligonucleotide
acaaauagugagagauccu

SEQ ID NO: 2138220 - RNA, 19 nt, Artificial Sequence
  Description of Artificial Sequence: Synthetic oligonucleotide
gagaaggagaauacagugu

SEQ ID NO: 2138221 - RNA, 19 nt, Artificial Sequence
  Description of Artificial Sequence: Synthetic oligonucleotide
agggacaaauagugagaga

SEQ ID NO: 2138222 - RNA, 19 nt, Artificial Sequence
  Description of Artificial Sequence: Synthetic oligonucleotide
ugauguuagugugcacagu

SEQ ID NO: 2138223 - RNA, 19 nt, Artificial Sequence
  Description of Artificial Sequence: Synthetic oligonucleotide
ucugggguuuagccagacu

SEQ ID NO: 2138224 - RNA, 19 nt, Artificial Sequence
  Description of Artificial Sequence: Synthetic oligonucleotide
gaaacauguuuuaguuuaa

SEQ ID NO: 2138225 - RNA, 19 nt, Artificial Sequence
  Description of Artificial Sequence: Synthetic oligonucleotide
ugcccaggaguguuuguuc

SEQ ID NO: 2138226 - RNA, 19 nt, Artificial Sequence
  Description of Artificial Sequence: Synthetic oligonucleotide
ggauuuuaucucucucaac

SEQ ID NO: 2138227 - RNA, 19 nt, Artificial Sequence
  Description of Artificial Sequence: Synthetic oligonucleotide
aacgguguuugagacuguu

SEQ ID NO: 2138228 - RNA, 19 nt, Artificial Sequence
  Description of Artificial Sequence: Synthetic oligonucleotide
uugcuauggucuguuaauu

SEQ ID NO: 2138229 - RNA, 19 nt, Artificial Sequence
  Description of Artificial Sequence: Synthetic oligonucleotide
ggaugucuaacucuuuucu

SEQ ID NO: 2138230 - RNA, 19 nt, Artificial Sequence
  Description of Artificial Sequence: Synthetic oligonucleotide
ugccucaaauuggaauaca

SEQ ID NO: 2138231 - RNA, 19 nt, Artificial Sequence
  Description of Artificial Sequence: Synthetic oligonucleotide
acacaagaggacguguuua

SEQ ID NO: 2138232 - RNA, 19 nt, Artificial Sequence
  Description of Artificial Sequence: Synthetic oligonucleotide
gccugguguguauagugag

SEQ ID NO: 2138233 - RNA, 19 nt, Artificial Sequence
  Description of Artificial Sequence: Synthetic oligonucleotide
acccugaauaugaaaguaa

SEQ ID NO: 2138234 - RNA, 19 nt, Artificial Sequence
  Description of Artificial Sequence: Synthetic oligonucleotide
ugacgugggaaaggacgcc

SEQ ID NO: 2138235 - RNA, 19 nt, Artificial Sequence
  Description of Artificial Sequence: Synthetic oligonucleotide
gacucagccccaugcuuuc

SEQ ID NO: 2138236 - RNA, 19 nt, Artificial Sequence
  Description of Artificial Sequence: Synthetic oligonucleotide
cugaaugccuacucuguua

SEQ ID NO: 2138237 - RNA, 19 nt, Artificial Sequence
  Description of Artificial Sequence: Synthetic oligonucleotide
cgguguuugagacuguuug

SEQ ID NO: 2138238 - RNA, 19 nt, Artificial Sequence
  Description of Artificial Sequence: Synthetic oligonucleotide
gucuaacucuuuucucaca

SEQ ID NO: 2138239 - RNA, 19 nt, Artificial Sequence
  Description of Artificial Sequence: Synthetic oligonucleotide
ggaacuuuugcacccugaa

SEQ ID NO: 2138240 - RNA, 19 nt, Artificial Sequence
  Description of Artificial Sequence: Synthetic oligonucleotide
acgccaugucagaagcugg

SEQ ID NO: 2138241 - RNA, 19 nt, Artificial Sequence
  Description of Artificial Sequence: Synthetic oligonucleotide
cacgcugugagucaggauu

SEQ ID NO: 2138242 - RNA, 19 nt, Artificial Sequence
  Description of Artificial Sequence: Synthetic oligonucleotide
gaguugcaagucagacagg

SEQ ID NO: 2138243 - RNA, 19 nt, Artificial Sequence
  Description of Artificial Sequence: Synthetic oligonucleotide
caggcaugaugauacuuaa

SEQ ID NO: 2138244 - RNA, 19 nt, Artificial Sequence
  Description of Artificial Sequence: Synthetic oligonucleotide
gacgugggaaaggacgcca

SEQ ID NO: 2138245 - RNA, 19 nt, Artificial Sequence
  Description of Artificial Sequence: Synthetic oligonucleotide
uucccacgcugugagucag

SEQ ID NO: 2138246 - RNA, 19 nt, Artificial Sequence
  Description of Artificial Sequence: Synthetic oligonucleotide
gaaugccuacucuguuauc

SEQ ID NO: 2138247 - RNA, 19 nt, Artificial Sequence
  Description of Artificial Sequence: Synthetic oligonucleotide
cagcacugaaugccuacuc

SEQ ID NO: 2138248 - RNA, 19 nt, Artificial Sequence
  Description of Artificial Sequence: Synthetic oligonucleotide
cccuuuuccccuugaaaac

SEQ ID NO: 2138249 - RNA, 19 nt, Artificial Sequence
  Description of Artificial Sequence: Synthetic oligonucleotide
acgcugugagucaggauug

SEQ ID NO: 2138250 - RNA, 19 nt, Artificial Sequence
  Description of Artificial Sequence: Synthetic oligonucleotide
agacagggacaaauaguga

SEQ ID NO: 2138251 - RNA, 19 nt, Artificial Sequence
  Description of Artificial Sequence: Synthetic oligonucleotide
gugccucaaauuggaauac

SEQ ID NO: 2138252 - RNA, 19 nt, Artificial Sequence
  Description of Artificial Sequence: Synthetic oligonucleotide
guguguauagugaguugca

SEQ ID NO: 2138253 - RNA, 19 nt, Artificial Sequence
  Description of Artificial Sequence: Synthetic oligonucleotide
aggacguguuuauccucca

SEQ ID NO: 2138254 - RNA, 19 nt, Artificial Sequence
  Description of Artificial Sequence: Synthetic oligonucleotide
ucuccgaggcaaugccggu

SEQ ID NO: 2138255 - RNA, 19 nt, Artificial Sequence
  Description of Artificial Sequence: Synthetic oligonucleotide
ccaugucagaagcuggaug

SEQ ID NO: 2138256 - RNA, 19 nt, Artificial Sequence
  Description of Artificial Sequence: Synthetic oligonucleotide
aggauuugcuauggucugu

SEQ ID NO: 2138257 - RNA, 19 nt, Artificial Sequence
  Description of Artificial Sequence: Synthetic oligonucleotide
gcccaggaguguuuguucc

SEQ ID NO: 2138258 - RNA, 19 nt, Artificial Sequence
  Description of Artificial Sequence: Synthetic oligonucleotide
caggaguguuuguucccac

SEQ ID NO: 2138259 - RNA, 19 nt, Artificial Sequence
  Description of Artificial Sequence: Synthetic oligonucleotide
gaguguuuguucccacgcu

SEQ ID NO: 2138260 - RNA, 19 nt, Artificial Sequence
  Description of Artificial Sequence: Synthetic oligonucleotide
gauuugcuauggucuguua

SEQ ID NO: 2138261 - RNA, 19 nt, Artificial Sequence
  Description of Artificial Sequence: Synthetic oligonucleotide
cauaacuaucucugaugua

SEQ ID NO: 2138262 - RNA, 19 nt, Artificial Sequence
  Description of Artificial Sequence: Synthetic oligonucleotide
ggcaaugccggugaugcuc

SEQ ID NO: 2138263 - RNA, 19 nt, Artificial Sequence
  Description of Artificial Sequence: Synthetic oligonucleotide
cucucucaacuuccugcac

SEQ ID NO: 2138264 - RNA, 19 nt, Artificial Sequence
  Description of Artificial Sequence: Synthetic oligonucleotide
agacauggagagauuuaau

SEQ ID NO: 2138265 - RNA, 19 nt, Artificial Sequence
  Description of Artificial Sequence: Synthetic oligonucleotide
gcuugccauaacacaagag

SEQ ID NO: 2138266 - RNA, 19 nt, Artificial Sequence
  Description of Artificial Sequence: Synthetic oligonucleotide
uaauuaccaagggguggau

SEQ ID NO: 2138267 - RNA, 19 nt, Artificial Sequence
  Description of Artificial Sequence: Synthetic oligonucleotide
agccugguguguauaguga

SEQ ID NO: 2138268 - RNA, 19 nt, Artificial Sequence
  Description of Artificial Sequence: Synthetic oligonucleotide
agucagacagggacaaaua

SEQ ID NO: 2138269 - RNA, 19 nt, Artificial Sequence
  Description of Artificial Sequence: Synthetic oligonucleotide
agucaguuuuguagaaauu

SEQ ID NO: 2138270 - RNA, 19 nt, Artificial Sequence
  Description of Artificial Sequence: Synthetic oligonucleotide
cacaguuccagcacugaau

SEQ ID NO: 2138271 - RNA, 19 nt, Artificial Sequence
  Description of Artificial Sequence: Synthetic oligonucleotide
uggggaguaggcugcuguu

SEQ ID NO: 2138272 - RNA, 19 nt, Artificial Sequence
  Description of Artificial Sequence: Synthetic oligonucleotide
cacugaaugccuacucugu

SEQ ID NO: 2138273 - RNA, 19 nt, Artificial Sequence
  Description of Artificial Sequence: Synthetic oligonucleotide
ccucaaauuggaauacaaa

SEQ ID NO: 2138274 - RNA, 19 nt, Artificial Sequence
  Description of Artificial Sequence: Synthetic oligonucleotide
cugugagucaggauugcau

SEQ ID NO: 2138275 - RNA, 19 nt, Artificial Sequence
  Description of Artificial Sequence: Synthetic oligonucleotide
guugcaagucagacaggga

SEQ ID NO: 2138276 - RNA, 19 nt, Artificial Sequence
  Description of Artificial Sequence: Synthetic oligonucleotide
cacccugaauaugaaagua

SEQ ID NO: 2138277 - RNA, 19 nt, Artificial Sequence
  Description of Artificial Sequence: Synthetic oligonucleotide
acaguggggugacguggga

SEQ ID NO: 2138278 - RNA, 19 nt, Artificial Sequence
  Description of Artificial Sequence: Synthetic oligonucleotide
uaccaagggguggaugcua

SEQ ID NO: 2138279 - RNA, 19 nt, Artificial Sequence
  Description of Artificial Sequence: Synthetic oligonucleotide
uguggggaguaggcugcug

SEQ ID NO: 2138280 - RNA, 19 nt, Artificial Sequence
  Description of Artificial Sequence: Synthetic oligonucleotide
cugugugucugggguuuag

SEQ ID NO: 2138281 - RNA, 19 nt, Artificial Sequence
  Description of Artificial Sequence: Synthetic oligonucleotide
uccuuucccuuuuccccuu

SEQ ID NO: 2138282 - RNA, 19 nt, Artificial Sequence
  Description of Artificial Sequence: Synthetic oligonucleotide
cuccgaggcaaugccggug

SEQ ID NO: 2138283 - RNA, 19 nt, Artificial Sequence
  Description of Artificial Sequence: Synthetic oligonucleotide
aaacgguguuugagacugu

SEQ ID NO: 2138284 - RNA, 19 nt, Artificial Sequence
  Description of Artificial Sequence: Synthetic oligonucleotide
cuggaugucuaacucuuuu

SEQ ID NO: 2138285 - RNA, 19 nt, Artificial Sequence
  Description of Artificial Sequence: Synthetic oligonucleotide
gaauugaguuccagucagu

SEQ ID NO: 2138286 - RNA, 19 nt, Artificial Sequence
  Description of Artificial Sequence: Synthetic oligonucleotide
cacuggauuuuaucucucu

SEQ ID NO: 2138287 - RNA, 19 nt, Artificial Sequence
  Description of Artificial Sequence: Synthetic oligonucleotide
gcucuccgaggcaaugccg

SEQ ID NO: 2138288 - RNA, 19 nt, Artificial Sequence
  Description of Artificial Sequence: Synthetic oligonucleotide
gcaagucagacagggacaa

SEQ ID NO: 2138289 - RNA, 19 nt, Artificial Sequence
  Description of Artificial Sequence: Synthetic oligonucleotide
ggggaguaggcugcuguug

SEQ ID NO: 2138290 - RNA, 19 nt, Artificial Sequence
  Description of Artificial Sequence: Synthetic oligonucleotide
gccucaaauuggaauacaa

SEQ ID NO: 2138291 - RNA, 19 nt, Artificial Sequence
  Description of Artificial Sequence: Synthetic oligonucleotide
acaguaagccaggcaugau

SEQ ID NO: 2138292 - RNA, 19 nt, Artificial Sequence
  Description of Artificial Sequence: Synthetic oligonucleotide
aggcaugaugauacuuaau

SEQ ID NO: 2138293 - RNA, 19 nt, Artificial Sequence
  Description of Artificial Sequence: Synthetic oligonucleotide
cucucaacuuccugcacuu

SEQ ID NO: 2138294 - RNA, 19 nt, Artificial Sequence
  Description of Artificial Sequence: Synthetic oligonucleotide
caagggguggaugcuaagu

SEQ ID NO: 2138295 - RNA, 19 nt, Artificial Sequence
  Description of Artificial Sequence: Synthetic oligonucleotide
uuguggggaguaggcugcu

SEQ ID NO: 2138296 - RNA, 19 nt, Artificial Sequence
  Description of Artificial Sequence: Synthetic oligonucleotide
gcacccugaauaugaaagu

SEQ ID NO: 2138297 - RNA, 19 nt, Artificial Sequence
  Description of Artificial Sequence: Synthetic oligonucleotide
ccccaugcuuuccuuuccc

SEQ ID NO: 2138298 - RNA, 19 nt, Artificial Sequence
  Description of Artificial Sequence: Synthetic oligonucleotide
ggggugacgugggaaagga

SEQ ID NO: 2138299 - RNA, 19 nt, Artificial Sequence
  Description of Artificial Sequence: Synthetic oligonucleotide
ggauugcauaagagaacuc

SEQ ID NO: 2138300 - RNA, 19 nt, Artificial Sequence
  Description of Artificial Sequence: Synthetic oligonucleotide
gccccaugcuuuccuuucc

SEQ ID NO: 2138301 - RNA, 19 nt, Artificial Sequence
  Description of Artificial Sequence: Synthetic oligonucleotide
caaugccggugaugcucug

SEQ ID NO: 2138302 - RNA, 19 nt, Artificial Sequence
  Description of Artificial Sequence: Synthetic oligonucleotide
ggguuuagccagacucaug

SEQ ID NO: 2138303 - RNA, 19 nt, Artificial Sequence
  Description of Artificial Sequence: Synthetic oligonucleotide
ccauaacacaagaggacgu

SEQ ID NO: 2138304 - RNA, 19 nt, Artificial Sequence
  Description of Artificial Sequence: Synthetic oligonucleotide
acgguguuugagacuguuu

SEQ ID NO: 2138305 - RNA, 19 nt, Artificial Sequence
  Description of Artificial Sequence: Synthetic oligonucleotide
gucugggguuuagccagac

SEQ ID NO: 2138306 - RNA, 19 nt, Artificial Sequence
  Description of Artificial Sequence: Synthetic oligonucleotide
acucagccugguguguaua

SEQ ID NO: 2138307 - RNA, 19 nt, Artificial Sequence
  Description of Artificial Sequence: Synthetic oligonucleotide
caaaggaaacuuggaacuu

SEQ ID NO: 2138308 - RNA, 19 nt, Artificial Sequence
  Description of Artificial Sequence: Synthetic oligonucleotide
cuuggaacuuuugcacccu

SEQ ID NO: 2138309 - RNA, 19 nt, Artificial Sequence
  Description of Artificial Sequence: Synthetic oligonucleotide
ccuacucuguuaucuguua

SEQ ID NO: 2138310 - RNA, 19 nt, Artificial Sequence
  Description of Artificial Sequence: Synthetic oligonucleotide
cccuugaaaacaacuaauu

SEQ ID NO: 2138311 - RNA, 19 nt, Artificial Sequence
  Description of Artificial Sequence: Synthetic oligonucleotide
guugcccaggaguguuugu

SEQ ID NO: 2138312 - RNA, 19 nt, Artificial Sequence
  Description of Artificial Sequence: Synthetic oligonucleotide
gcugugagucaggauugca

SEQ ID NO: 2138313 - RNA, 19 nt, Artificial Sequence
  Description of Artificial Sequence: Synthetic oligonucleotide
cugacucagccccaugcuu

SEQ ID NO: 2138314 - RNA, 19 nt, Artificial Sequence
  Description of Artificial Sequence: Synthetic oligonucleotide
caacucagccuggugugua

SEQ ID NO: 2138315 - RNA, 19 nt, Artificial Sequence
  Description of Artificial Sequence: Synthetic oligonucleotide
gggguggaugcuaaguuuu

SEQ ID NO: 2138316 - RNA, 19 nt, Artificial Sequence
  Description of Artificial Sequence: Synthetic oligonucleotide
ggauuugcuauggucuguu

SEQ ID NO: 2138317 - RNA, 19 nt, Artificial Sequence
  Description of Artificial Sequence: Synthetic oligonucleotide
ccuuucccuuuuccccuug

SEQ ID NO: 2138318 - RNA, 19 nt, Artificial Sequence
  Description of Artificial Sequence: Synthetic oligonucleotide
gcaaugccggugaugcucu

SEQ ID NO: 2138319 - RNA, 19 nt, Artificial Sequence
  Description of Artificial Sequence: Synthetic oligonucleotide
caagucagacagggacaaa

SEQ ID NO: 2138320 - RNA, 19 nt, Artificial Sequence
  Description of Artificial Sequence: Synthetic oligonucleotide
gggugacgugggaaaggac

SEQ ID NO: 2138321 - RNA, 19 nt, Artificial Sequence
  Description of Artificial Sequence: Synthetic oligonucleotide
caaugcucuccgaggcaau

SEQ ID NO: 2138322 - RNA, 19 nt, Artificial Sequence
  Description of Artificial Sequence: Synthetic oligonucleotide
gggguuuagccagacucau

SEQ ID NO: 2138323 - RNA, 19 nt, Artificial Sequence
  Description of Artificial Sequence: Synthetic oligonucleotide
ggacguguuuauccuccau

SEQ ID NO: 2138324 - RNA, 19 nt, Artificial Sequence
  Description of Artificial Sequence: Synthetic oligonucleotide
cgaggcaaugccggugaug

SEQ ID NO: 2138325 - RNA, 19 nt, Artificial Sequence
  Description of Artificial Sequence: Synthetic oligonucleotide
cccacgcugugagucagga

SEQ ID NO: 2138326 - RNA, 19 nt, Artificial Sequence
  Description of Artificial Sequence: Synthetic oligonucleotide
ccaugcuuuccuuucccuu

SEQ ID NO: 2138327 - RNA, 19 nt, Artificial Sequence
  Description of Artificial Sequence: Synthetic oligonucleotide
cgcugugagucaggauugc

SEQ ID NO: 2138328 - RNA, 19 nt, Artificial Sequence
  Description of Artificial Sequence: Synthetic oligonucleotide
cuguugcccaggaguguuu

SEQ ID NO: 2138329 - RNA, 19 nt, Artificial Sequence
  Description of Artificial Sequence: Synthetic oligonucleotide
gccuacucuguuaucuguu

SEQ ID NO: 2138330 - RNA, 19 nt, Artificial Sequence
  Description of Artificial Sequence: Synthetic oligonucleotide
gccuuguggggaguaggcu

SEQ ID NO: 2138331 - RNA, 19 nt, Artificial Sequence
  Description of Artificial Sequence: Synthetic oligonucleotide
cggugaugcucugcagaug

SEQ ID NO: 2138332 - RNA, 19 nt, Artificial Sequence
  Description of Artificial Sequence: Synthetic oligonucleotide
ggacgccaugucagaagcu

SEQ ID NO: 2138333 - RNA, 19 nt, Artificial Sequence
  Description of Artificial Sequence: Synthetic oligonucleotide
gcuggaugucuaacucuuu

SEQ ID NO: 2138334 - RNA, 19 nt, Artificial Sequence
  Description of Artificial Sequence: Synthetic oligonucleotide
ccaacucagccuggugugu

SEQ ID NO: 2138335 - RNA, 19 nt, Artificial Sequence
  Description of Artificial Sequence: Synthetic oligonucleotide
ccacgcugugagucaggau

SEQ ID NO: 2138336 - RNA, 19 nt, Artificial Sequence
  Description of Artificial Sequence: Synthetic oligonucleotide
ccgaggcaaugccggugau

SEQ ID NO: 2138337 - RNA, 19 nt, Artificial Sequence
  Description of Artificial Sequence: Synthetic oligonucleotide
aaaaugacuagauagccuc

SEQ ID NO: 2138338 - RNA, 19 nt, Artificial Sequence
  Description of Artificial Sequence: Synthetic oligonucleotide
aaaacgaacacccaguccu

SEQ ID NO: 2138339 - RNA, 19 nt, Artificial Sequence
  Description of Artificial Sequence: Synthetic oligonucleotide
aauaauaccauuuuccaua

SEQ ID NO: 2138340 - RNA, 19 nt, Artificial Sequence
  Description of Artificial Sequence: Synthetic oligonucleotide
uccaauaauaccauuuucc

SEQ ID NO: 2138341 - RNA, 19 nt, Artificial Sequence
  Description of Artificial Sequence: Synthetic oligonucleotide
ugugauuacgaaauaauga

SEQ ID NO: 2138342 - RNA, 19 nt, Artificial Sequence
  Description of Artificial Sequence: Synthetic oligonucleotide
uuagauuaacuucuuuugg

SEQ ID NO: 2138343 - RNA, 19 nt, Artificial Sequence
  Description of Artificial Sequence: Synthetic oligonucleotide
uuaacaugccaugagaacg

SEQ ID NO: 2138344 - RNA, 19 nt, Artificial Sequence
  Description of Artificial Sequence: Synthetic oligonucleotide
uuuagauuaacuucuuuug

SEQ ID NO: 2138345 - RNA, 19 nt, Artificial Sequence
  Description of Artificial Sequence: Synthetic oligonucleotide
aaaggagaaagacuuucac

SEQ ID NO: 2138346 - RNA, 19 nt, Artificial Sequence
  Description of Artificial Sequence: Synthetic oligonucleotide
aaauacaucucacaucuca

SEQ ID NO: 2138347 - RNA, 19 nt, Artificial Sequence
  Description of Artificial Sequence: Synthetic oligonucleotide
aaggguccuguuuaaaccc

SEQ ID NO: 2138348 - RNA, 19 nt, Artificial Sequence
  Description of Artificial Sequence: Synthetic oligonucleotide
auauagaacuuccuucucc

SEQ ID NO: 2138349 - RNA, 19 nt, Artificial Sequence
  Description of Artificial Sequence: Synthetic oligonucleotide
aacauauaaaauacuuccc

SEQ ID NO: 2138350 - RNA, 19 nt, Artificial Sequence
  Description of Artificial Sequence: Synthetic oligonucleotide
uaguaauuagagcagaacu

SEQ ID NO: 2138351 - RNA, 19 nt, Artificial Sequence
  Description of Artificial Sequence: Synthetic oligonucleotide
uguucauacaaugagauaa

SEQ ID NO: 2138352 - RNA, 19 nt, Artificial Sequence
  Description of Artificial Sequence: Synthetic oligonucleotide
acaguaguugugcagaaac

SEQ ID NO: 2138353 - RNA, 19 nt, Artificial Sequence
  Description of Artificial Sequence: Synthetic oligonucleotide
aagacuuucacaaauauua

SEQ ID NO: 2138354 - RNA, 19 nt, Artificial Sequence
  Description of Artificial Sequence: Synthetic oligonucleotide
uuccauauggaaaaguaca

SEQ ID NO: 2138355 - RNA, 19 nt, Artificial Sequence
  Description of Artificial Sequence: Synthetic oligonucleotide
aauuguaggcaccaucaag

SEQ ID NO: 2138356 - RNA, 19 nt, Artificial Sequence
  Description of Artificial Sequence: Synthetic oligonucleotide
gauuacgaaauaaugacug

SEQ ID NO: 2138357 - RNA, 19 nt, Artificial Sequence
  Description of Artificial Sequence: Synthetic oligonucleotide
uauacuguuaacaugccau

SEQ ID NO: 2138358 - RNA, 19 nt, Artificial Sequence
  Description of Artificial Sequence: Synthetic oligonucleotide
ugucuuuagauuaacuucu

SEQ ID NO: 2138359 - RNA, 19 nt, Artificial Sequence
  Description of Artificial Sequence: Synthetic oligonucleotide
agccauaguaauuagagca

SEQ ID NO: 2138360 - RNA, 19 nt, Artificial Sequence
  Description of Artificial Sequence: Synthetic oligonucleotide
agaaaauacaucucacauc

SEQ ID NO: 2138361 - RNA, 19 nt, Artificial Sequence
  Description of Artificial Sequence: Synthetic oligonucleotide
uauacaacaugugauuacg

SEQ ID NO: 2138362 - RNA, 19 nt, Artificial Sequence
  Description of Artificial Sequence: Synthetic oligonucleotide
uaacaaaggagaaagacuu

SEQ ID NO: 2138363 - RNA, 19 nt, Artificial Sequence
  Description of Artificial Sequence: Synthetic oligonucleotide
ucagagaaagcucauacaa

SEQ ID NO: 2138364 - RNA, 19 nt, Artificial Sequence
  Description of Artificial Sequence: Synthetic oligonucleotide
auuacgaaauaaugacugc

SEQ ID NO: 2138365 - RNA, 19 nt, Artificial Sequence
  Description of Artificial Sequence: Synthetic oligonucleotide
aaacaauaaauagccauag

SEQ ID NO: 2138366 - RNA, 19 nt, Artificial Sequence
  Description of Artificial Sequence: Synthetic oligonucleotide
uuggguuauauuuacaagu

SEQ ID NO: 2138367 - RNA, 19 nt, Artificial Sequence
  Description of Artificial Sequence: Synthetic oligonucleotide
acucagagaaagcucauac

SEQ ID NO: 2138368 - RNA, 19 nt, Artificial Sequence
  Description of Artificial Sequence: Synthetic oligonucleotide
aauggaguauugcggggcc

SEQ ID NO: 2138369 - RNA, 19 nt, Artificial Sequence
  Description of Artificial Sequence: Synthetic oligonucleotide
aguuagagauaauuguagg

SEQ ID NO: 2138370 - RNA, 19 nt, Artificial Sequence
  Description of Artificial Sequence: Synthetic oligonucleotide
ugagauaaagugcuguuac

SEQ ID NO: 2138371 - RNA, 19 nt, Artificial Sequence
  Description of Artificial Sequence: Synthetic oligonucleotide
caugaauggaguauugcgg

SEQ ID NO: 2138372 - RNA, 19 nt, Artificial Sequence
  Description of Artificial Sequence: Synthetic oligonucleotide
acaauaaauagccauagua

SEQ ID NO: 2138373 - RNA, 19 nt, Artificial Sequence
  Description of Artificial Sequence: Synthetic oligonucleotide
uuagagauaauuguaggca

SEQ ID NO: 2138374 - RNA, 19 nt, Artificial Sequence
  Description of Artificial Sequence: Synthetic oligonucleotide
auauacaacaugugauuac

SEQ ID NO: 2138375 - RNA, 19 nt, Artificial Sequence
  Description of Artificial Sequence: Synthetic oligonucleotide
agaccuggcagucuugucc

SEQ ID NO: 2138376 - RNA, 19 nt, Artificial Sequence
  Description of Artificial Sequence: Synthetic oligonucleotide
gugauuacgaaauaaugac

SEQ ID NO: 2138377 - RNA, 19 nt, Artificial Sequence
  Description of Artificial Sequence: Synthetic oligonucleotide
auaaugacugcaauaauag

SEQ ID NO: 2138378 - RNA, 19 nt, Artificial Sequence
  Description of Artificial Sequence: Synthetic oligonucleotide
uuuuggguuauauuuacaa

SEQ ID NO: 2138379 - RNA, 19 nt, Artificial Sequence
  Description of Artificial Sequence: Synthetic oligonucleotide
aagcacgcuacacacacag

SEQ ID NO: 2138380 - RNA, 19 nt, Artificial Sequence
  Description of Artificial Sequence: Synthetic oligonucleotide
aggagaaagacuuucacaa

SEQ ID NO: 2138381 - RNA, 19 nt, Artificial Sequence
  Description of Artificial Sequence: Synthetic oligonucleotide
guaggcaccaucaagagug

SEQ ID NO: 2138382 - RNA, 19 nt, Artificial Sequence
  Description of Artificial Sequence: Synthetic oligonucleotide
ucuuauuacuuuugcuacg

SEQ ID NO: 2138383 - RNA, 19 nt, Artificial Sequence
  Description of Artificial Sequence: Synthetic oligonucleotide
guuagagauaauuguaggc

SEQ ID NO: 2138384 - RNA, 19 nt, Artificial Sequence
  Description of Artificial Sequence: Synthetic oligonucleotide
ucaaaaugacuagauagcc

SEQ ID NO: 2138385 - RNA, 19 nt, Artificial Sequence
  Description of Artificial Sequence: Synthetic oligonucleotide
cauucugcaaauauagaac

SEQ ID NO: 2138386 - RNA, 19 nt, Artificial Sequence
  Description of Artificial Sequence: Synthetic oligonucleotide
aguaauuagagcagaacuc

SEQ ID NO: 2138387 - RNA, 19 nt, Artificial Sequence
  Description of Artificial Sequence: Synthetic oligonucleotide
uuuuguacaaagcacgcua

SEQ ID NO: 2138388 - RNA, 19 nt, Artificial Sequence
  Description of Artificial Sequence: Synthetic oligonucleotide
uuuggguuauauuuacaag

SEQ ID NO: 2138389 - RNA, 19 nt, Artificial Sequence
  Description of Artificial Sequence: Synthetic oligonucleotide
auucugcaaauauagaacu

SEQ ID NO: 2138390 - RNA, 19 nt, Artificial Sequence
  Description of Artificial Sequence: Synthetic oligonucleotide
auacaaauggccuagcuuu

SEQ ID NO: 2138391 - RNA, 19 nt, Artificial Sequence
  Description of Artificial Sequence: Synthetic oligonucleotide
ucucuuauuacuuuugcua

SEQ ID NO: 2138392 - RNA, 19 nt, Artificial Sequence
  Description of Artificial Sequence: Synthetic oligonucleotide
agauaaagugcuguuacgg

SEQ ID NO: 2138393 - RNA, 19 nt, Artificial Sequence
  Description of Artificial Sequence: Synthetic oligonucleotide
uugucuuuagauuaacuuc

SEQ ID NO: 2138394 - RNA, 19 nt, Artificial Sequence
  Description of Artificial Sequence: Synthetic oligonucleotide
gagguguucauacaaugag

SEQ ID NO: 2138395 - RNA, 19 nt, Artificial Sequence
  Description of Artificial Sequence: Synthetic oligonucleotide
aauaaugacugcaauaaua

SEQ ID NO: 2138396 - RNA, 19 nt, Artificial Sequence
  Description of Artificial Sequence: Synthetic oligonucleotide
acaucuuccaauaauacca

SEQ ID NO: 2138397 - RNA, 19 nt, Artificial Sequence
  Description of Artificial Sequence: Synthetic oligonucleotide
ugaacaucuuccaauaaua

SEQ ID NO: 2138398 - RNA, 19 nt, Artificial Sequence
  Description of Artificial Sequence: Synthetic oligonucleotide
agagaaagcucauacaaau

SEQ ID NO: 2138399 - RNA, 19 nt, Artificial Sequence
  Description of Artificial Sequence: Synthetic oligonucleotide
acauucugcaaauauagaa

SEQ ID NO: 2138400 - RNA, 19 nt, Artificial Sequence
  Description of Artificial Sequence: Synthetic oligonucleotide
uguuaacaugccaugagaa

SEQ ID NO: 2138401 - RNA, 19 nt, Artificial Sequence
  Description of Artificial Sequence: Synthetic oligonucleotide
ugauuacgaaauaaugacu

SEQ ID NO: 2138402 - RNA, 19 nt, Artificial Sequence
  Description of Artificial Sequence: Synthetic oligonucleotide
accaguuagagauaauugu

SEQ ID NO: 2138403 - RNA, 19 nt, Artificial Sequence
  Description of Artificial Sequence: Synthetic oligonucleotide
auaguaauuagagcagaac

SEQ ID NO: 2138404 - RNA, 19 nt, Artificial Sequence
  Description of Artificial Sequence: Synthetic oligonucleotide
uuugauucgagagucuggc

SEQ ID NO: 2138405 - RNA, 19 nt, Artificial Sequence
  Description of Artificial Sequence: Synthetic oligonucleotide
accucagagguguucauac

SEQ ID NO: 2138406 - RNA, 19 nt, Artificial Sequence
  Description of Artificial Sequence: Synthetic oligonucleotide
aaguacaguaguugugcag

SEQ ID NO: 2138407 - RNA, 19 nt, Artificial Sequence
  Description of Artificial Sequence: Synthetic oligonucleotide
gaaaacaauaaauagccau

SEQ ID NO: 2138408 - RNA, 19 nt, Artificial Sequence
  Description of Artificial Sequence: Synthetic oligonucleotide
uuuugcuacgcaaguaucu

SEQ ID NO: 2138409 - RNA, 19 nt, Artificial Sequence
  Description of Artificial Sequence: Synthetic oligonucleotide
auacaucucacaucucaac

SEQ ID NO: 2138410 - RNA, 19 nt, Artificial Sequence
  Description of Artificial Sequence: Synthetic oligonucleotide
uaccuuuagcaccucagag

SEQ ID NO: 2138411 - RNA, 19 nt, Artificial Sequence
  Description of Artificial Sequence: Synthetic oligonucleotide
uguuucagagacuuccagc

SEQ ID NO: 2138412 - RNA, 19 nt, Artificial Sequence
  Description of Artificial Sequence: Synthetic oligonucleotide
uaauuagagcagaacucag

SEQ ID NO: 2138413 - RNA, 19 nt, Artificial Sequence
  Description of Artificial Sequence: Synthetic oligonucleotide
aaguaucugaccugguaca

SEQ ID NO: 2138414 - RNA, 19 nt, Artificial Sequence
  Description of Artificial Sequence: Synthetic oligonucleotide
uaacaugccaugagaacgc

SEQ ID NO: 2138415 - RNA, 19 nt, Artificial Sequence
  Description of Artificial Sequence: Synthetic oligonucleotide
gauaauuguaggcaccauc

SEQ ID NO: 2138416 - RNA, 19 nt, Artificial Sequence
  Description of Artificial Sequence: Synthetic oligonucleotide
aauaccuuuagcaccucag

SEQ ID NO: 2138417 - RNA, 19 nt, Artificial Sequence
  Description of Artificial Sequence: Synthetic oligonucleotide
agauuaacuucuuuugggu

SEQ ID NO: 2138418 - RNA, 19 nt, Artificial Sequence
  Description of Artificial Sequence: Synthetic oligonucleotide
aacuaacauaacaaaggag

SEQ ID NO: 2138419 - RNA, 19 nt, Artificial Sequence
  Description of Artificial Sequence: Synthetic oligonucleotide
acuguuaacaugccaugag

SEQ ID NO: 2138420 - RNA, 19 nt, Artificial Sequence
  Description of Artificial Sequence: Synthetic oligonucleotide
ugcuguuacggguauacug

SEQ ID NO: 2138421 - RNA, 19 nt, Artificial Sequence
  Description of Artificial Sequence: Synthetic oligonucleotide
gagauaaagugcuguuacg

SEQ ID NO: 2138422 - RNA, 19 nt, Artificial Sequence
  Description of Artificial Sequence: Synthetic oligonucleotide
ugacuagauagccucuucc

SEQ ID NO: 2138423 - RNA, 19 nt, Artificial Sequence
  Description of Artificial Sequence: Synthetic oligonucleotide
auuacuuuugcuacgcaag

SEQ ID NO: 2138424 - RNA, 19 nt, Artificial Sequence
  Description of Artificial Sequence: Synthetic oligonucleotide
caaacgcugagucauacug

SEQ ID NO: 2138425 - RNA, 19 nt, Artificial Sequence
  Description of Artificial Sequence: Synthetic oligonucleotide
uugaacaucuuccaauaau

SEQ ID NO: 2138426 - RNA, 19 nt, Artificial Sequence
  Description of Artificial Sequence: Synthetic oligonucleotide
aacgcugagucauacugca

SEQ ID NO: 2138427 - RNA, 19 nt, Artificial Sequence
  Description of Artificial Sequence: Synthetic oligonucleotide
auaaagugcuguuacgggu

SEQ ID NO: 2138428 - RNA, 19 nt, Artificial Sequence
  Description of Artificial Sequence: Synthetic oligonucleotide
uggaaaaguacaguaguug

SEQ ID NO: 2138429 - RNA, 19 nt, Artificial Sequence
  Description of Artificial Sequence: Synthetic oligonucleotide
aaacgcugagucauacugc

SEQ ID NO: 2138430 - RNA, 19 nt, Artificial Sequence
  Description of Artificial Sequence: Synthetic oligonucleotide
aacaaacgcugagucauac

SEQ ID NO: 2138431 - RNA, 19 nt, Artificial Sequence
  Description of Artificial Sequence: Synthetic oligonucleotide
aacaauaaauagccauagu

SEQ ID NO: 2138432 - RNA, 19 nt, Artificial Sequence
  Description of Artificial Sequence: Synthetic oligonucleotide
aauggcgggguucuguugu

SEQ ID NO: 2138433 - RNA, 19 nt, Artificial Sequence
  Description of Artificial Sequence: Synthetic oligonucleotide
uuacgaaauaaugacugca

SEQ ID NO: 2138434 - RNA, 19 nt, Artificial Sequence
  Description of Artificial Sequence: Synthetic oligonucleotide
caugagaacgcauuguuca

SEQ ID NO: 2138435 - RNA, 19 nt, Artificial Sequence
  Description of Artificial Sequence: Synthetic oligonucleotide
uagagauaauuguaggcac

SEQ ID NO: 2138436 - RNA, 19 nt, Artificial Sequence
  Description of Artificial Sequence: Synthetic oligonucleotide
guuucagagacuuccagca

SEQ ID NO: 2138437 - RNA, 19 nt, Artificial Sequence
  Description of Artificial Sequence: Synthetic oligonucleotide
uggaugaagcuuacagagg

SEQ ID NO: 2138438 - RNA, 19 nt, Artificial Sequence
  Description of Artificial Sequence: Synthetic oligonucleotide
uuuguacaaagcacgcuac

SEQ ID NO: 2138439 - RNA, 19 nt, Artificial Sequence
  Description of Artificial Sequence: Synthetic oligonucleotide
gacaugcagaucaauggcg

SEQ ID NO: 2138440 - RNA, 19 nt, Artificial Sequence
  Description of Artificial Sequence: Synthetic oligonucleotide
caaggguccuguuuaaacc

SEQ ID NO: 2138441 - RNA, 19 nt, Artificial Sequence
  Description of Artificial Sequence: Synthetic oligonucleotide
cuuauuacuuuugcuacgc

SEQ ID NO: 2138442 - RNA, 19 nt, Artificial Sequence
  Description of Artificial Sequence: Synthetic oligonucleotide
aagagugcuucucuuauua

SEQ ID NO: 2138443 - RNA, 19 nt, Artificial Sequence
  Description of Artificial Sequence: Synthetic oligonucleotide
uacgaaauaaugacugcaa

SEQ ID NO: 2138444 - RNA, 19 nt, Artificial Sequence
  Description of Artificial Sequence: Synthetic oligonucleotide
agucauacugcaagguucc

SEQ ID NO: 2138445 - RNA, 19 nt, Artificial Sequence
  Description of Artificial Sequence: Synthetic oligonucleotide
auaauuguaggcaccauca

SEQ ID NO: 2138446 - RNA, 19 nt, Artificial Sequence
  Description of Artificial Sequence: Synthetic oligonucleotide
ugaccugguacaaucaaaa

SEQ ID NO: 2138447 - RNA, 19 nt, Artificial Sequence
  Description of Artificial Sequence: Synthetic oligonucleotide
caaguaucugaccugguac

SEQ ID NO: 2138448 - RNA, 19 nt, Artificial Sequence
  Description of Artificial Sequence: Synthetic oligonucleotide
auagaacuuccuucucccc

SEQ ID NO: 2138449 - RNA, 19 nt, Artificial Sequence
  Description of Artificial Sequence: Synthetic oligonucleotide
uguuugcagggacaucacg

SEQ ID NO: 2138450 - RNA, 19 nt, Artificial Sequence
  Description of Artificial Sequence: Synthetic oligonucleotide
agagauaauuguaggcacc

SEQ ID NO: 2138451 - RNA, 19 nt, Artificial Sequence
  Description of Artificial Sequence: Synthetic oligonucleotide
guacaaucaaaaugacuag

SEQ ID NO: 2138452 - RNA, 19 nt, Artificial Sequence
  Description of Artificial Sequence: Synthetic oligonucleotide
auuaacuucuuuuggguua

SEQ ID NO: 2138453 - RNA, 19 nt, Artificial Sequence
  Description of Artificial Sequence: Synthetic oligonucleotide
agugcuguuacggguauac

SEQ ID NO: 2138454 - RNA, 19 nt, Artificial Sequence
  Description of Artificial Sequence: Synthetic oligonucleotide
uguuguuugucuuuagauu

SEQ ID NO: 2138455 - RNA, 19 nt, Artificial Sequence
  Description of Artificial Sequence: Synthetic oligonucleotide
acgcuacacacacaggaac

SEQ ID NO: 2138456 - RNA, 19 nt, Artificial Sequence
  Description of Artificial Sequence: Synthetic oligonucleotide
gaacgcauuguucagugca

SEQ ID NO: 2138457 - RNA, 19 nt, Artificial Sequence
  Description of Artificial Sequence: Synthetic oligonucleotide
ucaaggguccuguuuaaac

SEQ ID NO: 2138458 - RNA, 19 nt, Artificial Sequence
  Description of Artificial Sequence: Synthetic oligonucleotide
uuugcagggacaucacggc

SEQ ID NO: 2138459 - RNA, 19 nt, Artificial Sequence
  Description of Artificial Sequence: Synthetic oligonucleotide
ucucaacauauaaaauacu

SEQ ID NO: 2138460 - RNA, 19 nt, Artificial Sequence
  Description of Artificial Sequence: Synthetic oligonucleotide
ugcaaauauagaacuuccu

SEQ ID NO: 2138461 - RNA, 19 nt, Artificial Sequence
  Description of Artificial Sequence: Synthetic oligonucleotide
uuacuuuugcuacgcaagu

SEQ ID NO: 2138462 - RNA, 19 nt, Artificial Sequence
  Description of Artificial Sequence: Synthetic oligonucleotide
uacaaucaaaaugacuaga

SEQ ID NO: 2138463 - RNA, 19 nt, Artificial Sequence
  Description of Artificial Sequence: Synthetic oligonucleotide
acuuuugcuacgcaaguau

SEQ ID NO: 2138464 - RNA, 19 nt, Artificial Sequence
  Description of Artificial Sequence: Synthetic oligonucleotide
gagaacgcauuguucagug

SEQ ID NO: 2138465 - RNA, 19 nt, Artificial Sequence
  Description of Artificial Sequence: Synthetic oligonucleotide
cuucgugauguuugcaggg

SEQ ID NO: 2138466 - RNA, 19 nt, Artificial Sequence
  Description of Artificial Sequence: Synthetic oligonucleotide
gccauuuauauauacaaca

SEQ ID NO: 2138467 - RNA, 19 nt, Artificial Sequence
  Description of Artificial Sequence: Synthetic oligonucleotide
auuugaacaucuuccaaua

SEQ ID NO: 2138468 - RNA, 19 nt, Artificial Sequence
  Description of Artificial Sequence: Synthetic oligonucleotide
guaauuagagcagaacuca

SEQ ID NO: 2138469 - RNA, 19 nt, Artificial Sequence
  Description of Artificial Sequence: Synthetic oligonucleotide
cuuacagaggacaugcaga

SEQ ID NO: 2138470 - RNA, 19 nt, Artificial Sequence
  Description of Artificial Sequence: Synthetic oligonucleotide
guuaacaugccaugagaac

SEQ ID NO: 2138471 - RNA, 19 nt, Artificial Sequence
  Description of Artificial Sequence: Synthetic oligonucleotide
uaucugaccugguacaauc

SEQ ID NO: 2138472 - RNA, 19 nt, Artificial Sequence
  Description of Artificial Sequence: Synthetic oligonucleotide
ucaagagugcuucucuuau

SEQ ID NO: 2138473 - RNA, 19 nt, Artificial Sequence
  Description of Artificial Sequence: Synthetic oligonucleotide
agaacuuccuucuccccag

SEQ ID NO: 2138474 - RNA, 19 nt, Artificial Sequence
  Description of Artificial Sequence: Synthetic oligonucleotide
gaauaaaacugggcuagcc

SEQ ID NO: 2138475 - RNA, 19 nt, Artificial Sequence
  Description of Artificial Sequence: Synthetic oligonucleotide
ggguauacuguuaacaugc

SEQ ID NO: 2138476 - RNA, 19 nt, Artificial Sequence
  Description of Artificial Sequence: Synthetic oligonucleotide
ucgagagucuggcagugcc

SEQ ID NO: 2138477 - RNA, 19 nt, Artificial Sequence
  Description of Artificial Sequence: Synthetic oligonucleotide
aguacaguaguugugcaga

SEQ ID NO: 2138478 - RNA, 19 nt, Artificial Sequence
  Description of Artificial Sequence: Synthetic oligonucleotide
accuucgugauguuugcag

SEQ ID NO: 2138479 - RNA, 19 nt, Artificial Sequence
  Description of Artificial Sequence: Synthetic oligonucleotide
ccugguacaaucaaaauga

SEQ ID NO: 2138480 - RNA, 19 nt, Artificial Sequence
  Description of Artificial Sequence: Synthetic oligonucleotide
auacuguuaacaugccaug

SEQ ID NO: 2138481 - RNA, 19 nt, Artificial Sequence
  Description of Artificial Sequence: Synthetic oligonucleotide
uacugcaagguuccuauuc

SEQ ID NO: 2138482 - RNA, 19 nt, Artificial Sequence
  Description of Artificial Sequence: Synthetic oligonucleotide
ugucuuugauucgagaguc

SEQ ID NO: 2138483 - RNA, 19 nt, Artificial Sequence
  Description of Artificial Sequence: Synthetic oligonucleotide
uacggguauacuguuaaca

SEQ ID NO: 2138484 - RNA, 19 nt, Artificial Sequence
  Description of Artificial Sequence: Synthetic oligonucleotide
aauuagagcagaacucaga

SEQ ID NO: 2138485 - RNA, 19 nt, Artificial Sequence
  Description of Artificial Sequence: Synthetic oligonucleotide
gcauggaugaagcuuacag

SEQ ID NO: 2138486 - RNA, 19 nt, Artificial Sequence
  Description of Artificial Sequence: Synthetic oligonucleotide
ugcuacgcaaguaucugac

SEQ ID NO: 2138487 - RNA, 19 nt, Artificial Sequence
  Description of Artificial Sequence: Synthetic oligonucleotide
uuugcuacgcaaguaucug

SEQ ID NO: 2138488 - RNA, 19 nt, Artificial Sequence
  Description of Artificial Sequence: Synthetic oligonucleotide
agagugcuucucuuauuac

SEQ ID NO: 2138489 - RNA, 19 nt, Artificial Sequence
  Description of Artificial Sequence: Synthetic oligonucleotide
uuguaggcaccaucaagag

SEQ ID NO: 2138490 - RNA, 19 nt, Artificial Sequence
  Description of Artificial Sequence: Synthetic oligonucleotide
acuagauagccucuucccu

SEQ ID NO: 2138491 - RNA, 19 nt, Artificial Sequence
  Description of Artificial Sequence: Synthetic oligonucleotide
uuguucagugcagugacca

SEQ ID NO: 2138492 - RNA, 19 nt, Artificial Sequence
  Description of Artificial Sequence: Synthetic oligonucleotide
agaacgcauuguucagugc

SEQ ID NO: 2138493 - RNA, 19 nt, Artificial Sequence
  Description of Artificial Sequence: Synthetic oligonucleotide
augugauuacgaaauaaug

SEQ ID NO: 2138494 - RNA, 19 nt, Artificial Sequence
  Description of Artificial Sequence: Synthetic oligonucleotide
ccaugaauggaguauugcg

SEQ ID NO: 2138495 - RNA, 19 nt, Artificial Sequence
  Description of Artificial Sequence: Synthetic oligonucleotide
uagccauaguaauuagagc

SEQ ID NO: 2138496 - RNA, 19 nt, Artificial Sequence
  Description of Artificial Sequence: Synthetic oligonucleotide
aacugggcuagccauuuau

SEQ ID NO: 2138497 - RNA, 19 nt, Artificial Sequence
  Description of Artificial Sequence: Synthetic oligonucleotide
ugaagcuuacagaggacau

SEQ ID NO: 2138498 - RNA, 19 nt, Artificial Sequence
  Description of Artificial Sequence: Synthetic oligonucleotide
gacuuucacaaauauuaaa

SEQ ID NO: 2138499 - RNA, 19 nt, Artificial Sequence
  Description of Artificial Sequence: Synthetic oligonucleotide
uccucaaggguccuguuua

SEQ ID NO: 2138500 - RNA, 19 nt, Artificial Sequence
  Description of Artificial Sequence: Synthetic oligonucleotide
ugagucauacugcaagguu

SEQ ID NO: 2138501 - RNA, 19 nt, Artificial Sequence
  Description of Artificial Sequence: Synthetic oligonucleotide
augacuagauagccucuuc

SEQ ID NO: 2138502 - RNA, 19 nt, Artificial Sequence
  Description of Artificial Sequence: Synthetic oligonucleotide
uuguacaaagcacgcuaca

SEQ ID NO: 2138503 - RNA, 19 nt, Artificial Sequence
  Description of Artificial Sequence: Synthetic oligonucleotide
aguaguugugcagaaacaa

SEQ ID NO: 2138504 - RNA, 19 nt, Artificial Sequence
  Description of Artificial Sequence: Synthetic oligonucleotide
gaauggaguauugcggggc

SEQ ID NO: 2138505 - RNA, 19 nt, Artificial Sequence
  Description of Artificial Sequence: Synthetic oligonucleotide
augagaacgcauuguucag

SEQ ID NO: 2138506 - RNA, 19 nt, Artificial Sequence
  Description of Artificial Sequence: Synthetic oligonucleotide
acaucucacaucucaacau

SEQ ID NO: 2138507 - RNA, 19 nt, Artificial Sequence
  Description of Artificial Sequence: Synthetic oligonucleotide
gagucauacugcaagguuc

SEQ ID NO: 2138508 - RNA, 19 nt, Artificial Sequence
  Description of Artificial Sequence: Synthetic oligonucleotide
uuauuacuuuugcuacgca

SEQ ID NO: 2138509 - RNA, 19 nt, Artificial Sequence
  Description of Artificial Sequence: Synthetic oligonucleotide
acggguauacuguuaacau

SEQ ID NO: 2138510 - RNA, 19 nt, Artificial Sequence
  Description of Artificial Sequence: Synthetic oligonucleotide
uacgcaaguaucugaccug

SEQ ID NO: 2138511 - RNA, 19 nt, Artificial Sequence
  Description of Artificial Sequence: Synthetic oligonucleotide
uguaggcaccaucaagagu

SEQ ID NO: 2138512 - RNA, 19 nt, Artificial Sequence
  Description of Artificial Sequence: Synthetic oligonucleotide
cuagccauuuauauauaca

SEQ ID NO: 2138513 - RNA, 19 nt, Artificial Sequence
  Description of Artificial Sequence: Synthetic oligonucleotide
cccuagaggacauuggagg

SEQ ID NO: 2138514 - RNA, 19 nt, Artificial Sequence
  Description of Artificial Sequence: Synthetic oligonucleotide
auaccuuuagcaccucaga

SEQ ID NO: 2138515 - RNA, 19 nt, Artificial Sequence
  Description of Artificial Sequence: Synthetic oligonucleotide
uucucucaaaccagcauuu

SEQ ID NO: 2138516 - RNA, 19 nt, Artificial Sequence
  Description of Artificial Sequence: Synthetic oligonucleotide
acaaucaaaaugacuagau

SEQ ID NO: 2138517 - RNA, 19 nt, Artificial Sequence
  Description of Artificial Sequence: Synthetic oligonucleotide
aaagacuuucacaaauauu

SEQ ID NO: 2138518 - RNA, 19 nt, Artificial Sequence
  Description of Artificial Sequence: Synthetic oligonucleotide
uguucaguggugccgcccu

SEQ ID NO: 2138519 - RNA, 19 nt, Artificial Sequence
  Description of Artificial Sequence: Synthetic oligonucleotide
uaccuuugucuuugauucg

SEQ ID NO: 2138520 - RNA, 19 nt, Artificial Sequence
  Description of Artificial Sequence: Synthetic oligonucleotide
aagaccuggcagucuuguc

SEQ ID NO: 2138521 - RNA, 19 nt, Artificial Sequence
  Description of Artificial Sequence: Synthetic oligonucleotide
acgaaauaaugacugcaau

SEQ ID NO: 2138522 - RNA, 19 nt, Artificial Sequence
  Description of Artificial Sequence: Synthetic oligonucleotide
guacaaagcacgcuacaca

SEQ ID NO: 2138523 - RNA, 19 nt, Artificial Sequence
  Description of Artificial Sequence: Synthetic oligonucleotide
cauggaugaagcuuacaga

SEQ ID NO: 2138524 - RNA, 19 nt, Artificial Sequence
  Description of Artificial Sequence: Synthetic oligonucleotide
gagaaagcucauacaaaug

SEQ ID NO: 2138525 - RNA, 19 nt, Artificial Sequence
  Description of Artificial Sequence: Synthetic oligonucleotide
cuuuugcuacgcaaguauc

SEQ ID NO: 2138526 - RNA, 19 nt, Artificial Sequence
  Description of Artificial Sequence: Synthetic oligonucleotide
guuacggguauacuguuaa

SEQ ID NO: 2138527 - RNA, 19 nt, Artificial Sequence
  Description of Artificial Sequence: Synthetic oligonucleotide
augcagaucaauggcgggg

SEQ ID NO: 2138528 - RNA, 19 nt, Artificial Sequence
  Description of Artificial Sequence: Synthetic oligonucleotide
aacgcauuguucagugcag

SEQ ID NO: 2138529 - RNA, 19 nt, Artificial Sequence
  Description of Artificial Sequence: Synthetic oligonucleotide
gaagcuuacagaggacaug

SEQ ID NO: 2138530 - RNA, 19 nt, Artificial Sequence
  Description of Artificial Sequence: Synthetic oligonucleotide
gugaccagcauggaugaag

SEQ ID NO: 2138531 - RNA, 19 nt, Artificial Sequence
  Description of Artificial Sequence: Synthetic oligonucleotide
agcagaacucagagaaagc

SEQ ID NO: 2138532 - RNA, 19 nt, Artificial Sequence
  Description of Artificial Sequence: Synthetic oligonucleotide
uccugaggacuucuggaac

SEQ ID NO: 2138533 - RNA, 19 nt, Artificial Sequence
  Description of Artificial Sequence: Synthetic oligonucleotide
ggacaugcagaucaauggc

SEQ ID NO: 2138534 - RNA, 19 nt, Artificial Sequence
  Description of Artificial Sequence: Synthetic oligonucleotide
uguucagugcagugaccag

SEQ ID NO: 2138535 - RNA, 19 nt, Artificial Sequence
  Description of Artificial Sequence: Synthetic oligonucleotide
aguauugcggggccugugu

SEQ ID NO: 2138536 - RNA, 19 nt, Artificial Sequence
  Description of Artificial Sequence: Synthetic oligonucleotide
augacugcaauaauagaaa

SEQ ID NO: 2138537 - RNA, 19 nt, Artificial Sequence
  Description of Artificial Sequence: Synthetic oligonucleotide
aaagugcuguuacggguau

SEQ ID NO: 2138538 - RNA, 19 nt, Artificial Sequence
  Description of Artificial Sequence: Synthetic oligonucleotide
cucacaucucaacauauaa

SEQ ID NO: 2138539 - RNA, 19 nt, Artificial Sequence
  Description of Artificial Sequence: Synthetic oligonucleotide
acgcaaguaucugaccugg

SEQ ID NO: 2138540 - RNA, 19 nt, Artificial Sequence
  Description of Artificial Sequence: Synthetic oligonucleotide
aacuucuuuuggguuauau

SEQ ID NO: 2138541 - RNA, 19 nt, Artificial Sequence
  Description of Artificial Sequence: Synthetic oligonucleotide
uggcccuagaggacauugg

SEQ ID NO: 2138542 - RNA, 19 nt, Artificial Sequence
  Description of Artificial Sequence: Synthetic oligonucleotide
accaucaagagugcuucuc

SEQ ID NO: 2138543 - RNA, 19 nt, Artificial Sequence
  Description of Artificial Sequence: Synthetic oligonucleotide
aguugugcagaaacaaacu

SEQ ID NO: 2138544 - RNA, 19 nt, Artificial Sequence
  Description of Artificial Sequence: Synthetic oligonucleotide
uuaacuucuuuuggguuau

SEQ ID NO: 2138545 - RNA, 19 nt, Artificial Sequence
  Description of Artificial Sequence: Synthetic oligonucleotide
cucaacauauaaaauacuu

SEQ ID NO: 2138546 - RNA, 19 nt, Artificial Sequence
  Description of Artificial Sequence: Synthetic oligonucleotide
aaaugacuagauagccucu

SEQ ID NO: 2138547 - RNA, 19 nt, Artificial Sequence
  Description of Artificial Sequence: Synthetic oligonucleotide
uugcuacgcaaguaucuga

SEQ ID NO: 2138548 - RNA, 19 nt, Artificial Sequence
  Description of Artificial Sequence: Synthetic oligonucleotide
uagauagccucuucccuuc

SEQ ID NO: 2138549 - RNA, 19 nt, Artificial Sequence
  Description of Artificial Sequence: Synthetic oligonucleotide
ucgugauguuugcagggac

SEQ ID NO: 2138550 - RNA, 19 nt, Artificial Sequence
  Description of Artificial Sequence: Synthetic oligonucleotide
aaugacuagauagccucuu

SEQ ID NO: 2138551 - RNA, 19 nt, Artificial Sequence
  Description of Artificial Sequence: Synthetic oligonucleotide
uguuugucuuuagauuaac

SEQ ID NO: 2138552 - RNA, 19 nt, Artificial Sequence
  Description of Artificial Sequence: Synthetic oligonucleotide
agagucuggcagugccacc

SEQ ID NO: 2138553 - RNA, 19 nt, Artificial Sequence
  Description of Artificial Sequence: Synthetic oligonucleotide
agaaaacaauaaauagcca

SEQ ID NO: 2138554 - RNA, 19 nt, Artificial Sequence
  Description of Artificial Sequence: Synthetic oligonucleotide
cuguuaacaugccaugaga

SEQ ID NO: 2138555 - RNA, 19 nt, Artificial Sequence
  Description of Artificial Sequence: Synthetic oligonucleotide
ugggcuagccauuuauaua

SEQ ID NO: 2138556 - RNA, 19 nt, Artificial Sequence
  Description of Artificial Sequence: Synthetic oligonucleotide
cugguacaaucaaaaugac

SEQ ID NO: 2138557 - RNA, 19 nt, Artificial Sequence
  Description of Artificial Sequence: Synthetic oligonucleotide
agagguguucauacaauga

SEQ ID NO: 2138558 - RNA, 19 nt, Artificial Sequence
  Description of Artificial Sequence: Synthetic oligonucleotide
gcagugaccagcauggaug

SEQ ID NO: 2138559 - RNA, 19 nt, Artificial Sequence
  Description of Artificial Sequence: Synthetic oligonucleotide
ugagaacgcauuguucagu

SEQ ID NO: 2138560 - RNA, 19 nt, Artificial Sequence
  Description of Artificial Sequence: Synthetic oligonucleotide
cauaguaauuagagcagaa

SEQ ID NO: 2138561 - RNA, 19 nt, Artificial Sequence
  Description of Artificial Sequence: Synthetic oligonucleotide
gagugcuucucuuauuacu

SEQ ID NO: 2138562 - RNA, 19 nt, Artificial Sequence
  Description of Artificial Sequence: Synthetic oligonucleotide
aucaagagugcuucucuua

SEQ ID NO: 2138563 - RNA, 19 nt, Artificial Sequence
  Description of Artificial Sequence: Synthetic oligonucleotide
uuuaaacccuggcccuaga

SEQ ID NO: 2138564 - RNA, 19 nt, Artificial Sequence
  Description of Artificial Sequence: Synthetic oligonucleotide
uguuacggguauacuguua

SEQ ID NO: 2138565 - RNA, 19 nt, Artificial Sequence
  Description of Artificial Sequence: Synthetic oligonucleotide
ugguugguaccuuugucuu

SEQ ID NO: 2138566 - RNA, 19 nt, Artificial Sequence
  Description of Artificial Sequence: Synthetic oligonucleotide
augaugcccaugaauggag

SEQ ID NO: 2138567 - RNA, 19 nt, Artificial Sequence
  Description of Artificial Sequence: Synthetic oligonucleotide
ccaauaauaccauuuucca

SEQ ID NO: 2138568 - RNA, 19 nt, Artificial Sequence
  Description of Artificial Sequence: Synthetic oligonucleotide
gcaagguuccuauucguac

SEQ ID NO: 2138569 - RNA, 19 nt, Artificial Sequence
  Description of Artificial Sequence: Synthetic oligonucleotide
cucagagaaagcucauaca

SEQ ID NO: 2138570 - RNA, 19 nt, Artificial Sequence
  Description of Artificial Sequence: Synthetic oligonucleotide
ugcagaucaauggcggggu

SEQ ID NO: 2138571 - RNA, 19 nt, Artificial Sequence
  Description of Artificial Sequence: Synthetic oligonucleotide
uugauucgagagucuggca

SEQ ID NO: 2138572 - RNA, 19 nt, Artificial Sequence
  Description of Artificial Sequence: Synthetic oligonucleotide
gaccuggcagucuugucca

SEQ ID NO: 2138573 - RNA, 19 nt, Artificial Sequence
  Description of Artificial Sequence: Synthetic oligonucleotide
ccuagaggacauuggaggc

SEQ ID NO: 2138574 - RNA, 19 nt, Artificial Sequence
  Description of Artificial Sequence: Synthetic oligonucleotide
acaaacgcugagucauacu

SEQ ID NO: 2138575 - RNA, 19 nt, Artificial Sequence
  Description of Artificial Sequence: Synthetic oligonucleotide
uccuucuccccaguucuag

SEQ ID NO: 2138576 - RNA, 19 nt, Artificial Sequence
  Description of Artificial Sequence: Synthetic oligonucleotide
guuuaaacccuggcccuag

SEQ ID NO: 2138577 - RNA, 19 nt, Artificial Sequence
  Description of Artificial Sequence: Synthetic oligonucleotide
cucagagguguucauacaa

SEQ ID NO: 2138578 - RNA, 19 nt, Artificial Sequence
  Description of Artificial Sequence: Synthetic oligonucleotide
gaugaagcuuacagaggac

SEQ ID NO: 2138579 - RNA, 19 nt, Artificial Sequence
  Description of Artificial Sequence: Synthetic oligonucleotide
ccuucgugauguuugcagg

SEQ ID NO: 2138580 - RNA, 19 nt, Artificial Sequence
  Description of Artificial Sequence: Synthetic oligonucleotide
agguguucauacaaugaga

SEQ ID NO: 2138581 - RNA, 19 nt, Artificial Sequence
  Description of Artificial Sequence: Synthetic oligonucleotide
acaucacggcuauucauuu

SEQ ID NO: 2138582 - RNA, 19 nt, Artificial Sequence
  Description of Artificial Sequence: Synthetic oligonucleotide
uuacggguauacuguuaac

SEQ ID NO: 2138583 - RNA, 19 nt, Artificial Sequence
  Description of Artificial Sequence: Synthetic oligonucleotide
gauucgagagucuggcagu

SEQ ID NO: 2138584 - RNA, 19 nt, Artificial Sequence
  Description of Artificial Sequence: Synthetic oligonucleotide
ccugaggacuucuggaacc

SEQ ID NO: 2138585 - RNA, 19 nt, Artificial Sequence
  Description of Artificial Sequence: Synthetic oligonucleotide
ucucucaaaccagcauuug

SEQ ID NO: 2138586 - RNA, 19 nt, Artificial Sequence
  Description of Artificial Sequence: Synthetic oligonucleotide
gcacgcuacacacacagga

SEQ ID NO: 2138587 - RNA, 19 nt, Artificial Sequence
  Description of Artificial Sequence: Synthetic oligonucleotide
agaaagacuuucacaaaua

SEQ ID NO: 2138588 - RNA, 19 nt, Artificial Sequence
  Description of Artificial Sequence: Synthetic oligonucleotide
aacgaacacccaguccuca

SEQ ID NO: 2138589 - RNA, 19 nt, Artificial Sequence
  Description of Artificial Sequence: Synthetic oligonucleotide
uaggcaccaucaagagugc

SEQ ID NO: 2138590 - RNA, 19 nt, Artificial Sequence
  Description of Artificial Sequence: Synthetic oligonucleotide
cuguguucaguggugccgc

SEQ ID NO: 2138591 - RNA, 19 nt, Artificial Sequence
  Description of Artificial Sequence: Synthetic oligonucleotide
acaucucaacauauaaaau

SEQ ID NO: 2138592 - RNA, 19 nt, Artificial Sequence
  Description of Artificial Sequence: Synthetic oligonucleotide
ucaauggcgggguucuguu

SEQ ID NO: 2138593 - RNA, 19 nt, Artificial Sequence
  Description of Artificial Sequence: Synthetic oligonucleotide
cuacgcaaguaucugaccu

SEQ ID NO: 2138594 - RNA, 19 nt, Artificial Sequence
  Description of Artificial Sequence: Synthetic oligonucleotide
cauacugcaagguuccuau

SEQ ID NO: 2138595 - RNA, 19 nt, Artificial Sequence
  Description of Artificial Sequence: Synthetic oligonucleotide
augagauaaagugcuguua

SEQ ID NO: 2138596 - RNA, 19 nt, Artificial Sequence
  Description of Artificial Sequence: Synthetic oligonucleotide
aaccagcauuugaacaucu

SEQ ID NO: 2138597 - RNA, 19 nt, Artificial Sequence
  Description of Artificial Sequence: Synthetic oligonucleotide
acaaugagauaaagugcug

SEQ ID NO: 2138598 - RNA, 19 nt, Artificial Sequence
  Description of Artificial Sequence: Synthetic oligonucleotide
cagagaaagcucauacaaa

SEQ ID NO: 2138599 - RNA, 19 nt, Artificial Sequence
  Description of Artificial Sequence: Synthetic oligonucleotide
gcucauacaaauggccuag

SEQ ID NO: 2138600 - RNA, 19 nt, Artificial Sequence
  Description of Artificial Sequence: Synthetic oligonucleotide
ucauacugcaagguuccua

SEQ ID NO: 2138601 - RNA, 19 nt, Artificial Sequence
  Description of Artificial Sequence: Synthetic oligonucleotide
caguaguugugcagaaaca

SEQ ID NO: 2138602 - RNA, 19 nt, Artificial Sequence
  Description of Artificial Sequence: Synthetic oligonucleotide
acauaacaaaggagaaaga

SEQ ID NO: 2138603 - RNA, 19 nt, Artificial Sequence
  Description of Artificial Sequence: Synthetic oligonucleotide
ugccaugagaacgcauugu

SEQ ID NO: 2138604 - RNA, 19 nt, Artificial Sequence
  Description of Artificial Sequence: Synthetic oligonucleotide
auaccauuuuccauauaaa

SEQ ID NO: 2138605 - RNA, 19 nt, Artificial Sequence
  Description of Artificial Sequence: Synthetic oligonucleotide
gguuccuauucguacaaaa

SEQ ID NO: 2138606 - RNA, 19 nt, Artificial Sequence
  Description of Artificial Sequence: Synthetic oligonucleotide
uggcagugccaccagcuua

SEQ ID NO: 2138607 - RNA, 19 nt, Artificial Sequence
  Description of Artificial Sequence: Synthetic oligonucleotide
aacucagagaaagcucaua

SEQ ID NO: 2138608 - RNA, 19 nt, Artificial Sequence
  Description of Artificial Sequence: Synthetic oligonucleotide
auacaacaugugauuacga

SEQ ID NO: 2138609 - RNA, 19 nt, Artificial Sequence
  Description of Artificial Sequence: Synthetic oligonucleotide
accugguugguaccuuugu

SEQ ID NO: 2138610 - RNA, 19 nt, Artificial Sequence
  Description of Artificial Sequence: Synthetic oligonucleotide
uggaggcuuguuucagaga

SEQ ID NO: 2138611 - RNA, 19 nt, Artificial Sequence
  Description of Artificial Sequence: Synthetic oligonucleotide
gaugcccaugaauggagua

SEQ ID NO: 2138612 - RNA, 19 nt, Artificial Sequence
  Description of Artificial Sequence: Synthetic oligonucleotide
uacuuuugcuacgcaagua

SEQ ID NO: 2138613 - RNA, 19 nt, Artificial Sequence
  Description of Artificial Sequence: Synthetic oligonucleotide
agacuuucacaaauauuaa

SEQ ID NO: 2138614 - RNA, 19 nt, Artificial Sequence
  Description of Artificial Sequence: Synthetic oligonucleotide
auucgagagucuggcagug

SEQ ID NO: 2138615 - RNA, 19 nt, Artificial Sequence
  Description of Artificial Sequence: Synthetic oligonucleotide
auguuugcagggacaucac

SEQ ID NO: 2138616 - RNA, 19 nt, Artificial Sequence
  Description of Artificial Sequence: Synthetic oligonucleotide
aucaauggcgggguucugu

SEQ ID NO: 2138617 - RNA, 19 nt, Artificial Sequence
  Description of Artificial Sequence: Synthetic oligonucleotide
caauaauaccauuuuccau

SEQ ID NO: 2138618 - RNA, 19 nt, Artificial Sequence
  Description of Artificial Sequence: Synthetic oligonucleotide
cuuuagcaccucagaggug

SEQ ID NO: 2138619 - RNA, 19 nt, Artificial Sequence
  Description of Artificial Sequence: Synthetic oligonucleotide
uguguucaguggugccgcc

SEQ ID NO: 2138620 - RNA, 19 nt, Artificial Sequence
  Description of Artificial Sequence: Synthetic oligonucleotide
uguuuaaacccuggcccua

SEQ ID NO: 2138621 - RNA, 19 nt, Artificial Sequence
  Description of Artificial Sequence: Synthetic oligonucleotide
aguaucugaccugguacaa

SEQ ID NO: 2138622 - RNA, 19 nt, Artificial Sequence
  Description of Artificial Sequence: Synthetic oligonucleotide
aucucacaucucaacauau

SEQ ID NO: 2138623 - RNA, 19 nt, Artificial Sequence
  Description of Artificial Sequence: Synthetic oligonucleotide
gggcuagccauuuauauau

SEQ ID NO: 2138624 - RNA, 19 nt, Artificial Sequence
  Description of Artificial Sequence: Synthetic oligonucleotide
cagugaccagcauggauga

SEQ ID NO: 2138625 - RNA, 19 nt, Artificial Sequence
  Description of Artificial Sequence: Synthetic oligonucleotide
caucucacaucucaacaua

SEQ ID NO: 2138626 - RNA, 19 nt, Artificial Sequence
  Description of Artificial Sequence: Synthetic oligonucleotide
cucauacaaauggccuagc

SEQ ID NO: 2138627 - RNA, 19 nt, Artificial Sequence
  Description of Artificial Sequence: Synthetic oligonucleotide
cauacaaauggccuagcuu

SEQ ID NO: 2138628 - RNA, 19 nt, Artificial Sequence
  Description of Artificial Sequence: Synthetic oligonucleotide
ggaacaaacgcugagucau

SEQ ID NO: 2138629 - RNA, 19 nt, Artificial Sequence
  Description of Artificial Sequence: Synthetic oligonucleotide
uaauaccauuuuccauaua

SEQ ID NO: 2138630 - RNA, 19 nt, Artificial Sequence
  Description of Artificial Sequence: Synthetic oligonucleotide
guccugaggacuucuggaa

SEQ ID NO: 2138631 - RNA, 19 nt, Artificial Sequence
  Description of Artificial Sequence: Synthetic oligonucleotide
aucuuccaauaauaccauu

SEQ ID NO: 2138632 - RNA, 19 nt, Artificial Sequence
  Description of Artificial Sequence: Synthetic oligonucleotide
ugcccaugaauggaguauu

SEQ ID NO: 2138633 - RNA, 19 nt, Artificial Sequence
  Description of Artificial Sequence: Synthetic oligonucleotide
cugaccugguacaaucaaa

SEQ ID NO: 2138634 - RNA, 19 nt, Artificial Sequence
  Description of Artificial Sequence: Synthetic oligonucleotide
ugguaccuuugucuuugau

SEQ ID NO: 2138635 - RNA, 19 nt, Artificial Sequence
  Description of Artificial Sequence: Synthetic oligonucleotide
cccaguucuagaaaauaca

SEQ ID NO: 2138636 - RNA, 19 nt, Artificial Sequence
  Description of Artificial Sequence: Synthetic oligonucleotide
augcccaugaauggaguau

SEQ ID NO: 2138637 - RNA, 19 nt, Artificial Sequence
  Description of Artificial Sequence: Synthetic oligonucleotide
cuucucucaaaccagcauu

SEQ ID NO: 2138638 - RNA, 19 nt, Artificial Sequence
  Description of Artificial Sequence: Synthetic oligonucleotide
cagaucaauggcgggguuc

SEQ ID NO: 2138639 - RNA, 19 nt, Artificial Sequence
  Description of Artificial Sequence: Synthetic oligonucleotide
caaugagauaaagugcugu

SEQ ID NO: 2138640 - RNA, 19 nt, Artificial Sequence
  Description of Artificial Sequence: Synthetic oligonucleotide
gguauacuguuaacaugcc

SEQ ID NO: 2138641 - RNA, 19 nt, Artificial Sequence
  Description of Artificial Sequence: Synthetic oligonucleotide
cacuucucucaaaccagca

SEQ ID NO: 2138642 - RNA, 19 nt, Artificial Sequence
  Description of Artificial Sequence: Synthetic oligonucleotide
gcuacgcaaguaucugacc

SEQ ID NO: 2138643 - RNA, 19 nt, Artificial Sequence
  Description of Artificial Sequence: Synthetic oligonucleotide
ccaguuagagauaauugua

SEQ ID NO: 2138644 - RNA, 19 nt, Artificial Sequence
  Description of Artificial Sequence: Synthetic oligonucleotide
caauggcgggguucuguug

SEQ ID NO: 2138645 - RNA, 19 nt, Artificial Sequence
  Description of Artificial Sequence: Synthetic oligonucleotide
caccugguugguaccuuug

SEQ ID NO: 2138646 - RNA, 19 nt, Artificial Sequence
  Description of Artificial Sequence: Synthetic oligonucleotide
guacaguaguugugcagaa

SEQ ID NO: 2138647 - RNA, 19 nt, Artificial Sequence
  Description of Artificial Sequence: Synthetic oligonucleotide
gguguucauacaaugagau

SEQ ID NO: 2138648 - RNA, 19 nt, Artificial Sequence
  Description of Artificial Sequence: Synthetic oligonucleotide
uucgagagucuggcagugc

SEQ ID NO: 2138649 - RNA, 19 nt, Artificial Sequence
  Description of Artificial Sequence: Synthetic oligonucleotide
cuguuuaaacccuggcccu

SEQ ID NO: 2138650 - RNA, 19 nt, Artificial Sequence
  Description of Artificial Sequence: Synthetic oligonucleotide
gacaucacggcuauucauu

SEQ ID NO: 2138651 - RNA, 19 nt, Artificial Sequence
  Description of Artificial Sequence: Synthetic oligonucleotide
guguucauacaaugagaua

SEQ ID NO: 2138652 - RNA, 19 nt, Artificial Sequence
  Description of Artificial Sequence: Synthetic oligonucleotide
cacgcuacacacacaggaa

SEQ ID NO: 2138653 - RNA, 19 nt, Artificial Sequence
  Description of Artificial Sequence: Synthetic oligonucleotide
uugguaccuuugucuuuga

SEQ ID NO: 2138654 - RNA, 19 nt, Artificial Sequence
  Description of Artificial Sequence: Synthetic oligonucleotide
cuagauagccucuucccuu

SEQ ID NO: 2138655 - RNA, 19 nt, Artificial Sequence
  Description of Artificial Sequence: Synthetic oligonucleotide
ccaugagaacgcauuguuc

SEQ ID NO: 2138656 - RNA, 19 nt, Artificial Sequence
  Description of Artificial Sequence: Synthetic oligonucleotide
agauaauuguaggcaccau

SEQ ID NO: 2138657 - RNA, 19 nt, Artificial Sequence
  Description of Artificial Sequence: Synthetic oligonucleotide
guuugucuuuagauuaacu

SEQ ID NO: 2138658 - RNA, 19 nt, Artificial Sequence
  Description of Artificial Sequence: Synthetic oligonucleotide
aucugaccugguacaauca

SEQ ID NO: 2138659 - RNA, 19 nt, Artificial Sequence
  Description of Artificial Sequence: Synthetic oligonucleotide
gaguauugcggggccugug

SEQ ID NO: 2138660 - RNA, 19 nt, Artificial Sequence
  Description of Artificial Sequence: Synthetic oligonucleotide
gguaccuuugucuuugauu

SEQ ID NO: 2138661 - RNA, 19 nt, Artificial Sequence
  Description of Artificial Sequence: Synthetic oligonucleotide
gcauuguucagugcaguga

SEQ ID NO: 2138662 - RNA, 19 nt, Artificial Sequence
  Description of Artificial Sequence: Synthetic oligonucleotide
agcacgcuacacacacagg

SEQ ID NO: 2138663 - RNA, 19 nt, Artificial Sequence
  Description of Artificial Sequence: Synthetic oligonucleotide
ggcccuagaggacauugga

SEQ ID NO: 2138664 - RNA, 19 nt, Artificial Sequence
  Description of Artificial Sequence: Synthetic oligonucleotide
cugggcuagccauuuauau

SEQ ID NO: 2138665 - RNA, 19 nt, Artificial Sequence
  Description of Artificial Sequence: Synthetic oligonucleotide
gaagaccuggcagucuugu

SEQ ID NO: 2138666 - RNA, 19 nt, Artificial Sequence
  Description of Artificial Sequence: Synthetic oligonucleotide
acgcauuguucagugcagu

SEQ ID NO: 2138667 - RNA, 19 nt, Artificial Sequence
  Description of Artificial Sequence: Synthetic oligonucleotide
cccaugaauggaguauugc

SEQ ID NO: 2138668 - RNA, 19 nt, Artificial Sequence
  Description of Artificial Sequence: Synthetic oligonucleotide
gcaaguaucugaccuggua

SEQ ID NO: 2138669 - RNA, 19 nt, Artificial Sequence
  Description of Artificial Sequence: Synthetic oligonucleotide
gaccugguacaaucaaaau

SEQ ID NO: 2138670 - RNA, 19 nt, Artificial Sequence
  Description of Artificial Sequence: Synthetic oligonucleotide
gcuguuacggguauacugu

SEQ ID NO: 2138671 - RNA, 19 nt, Artificial Sequence
  Description of Artificial Sequence: Synthetic oligonucleotide
caucuuccaauaauaccau

SEQ ID NO: 2138672 - RNA, 19 nt, Artificial Sequence
  Description of Artificial Sequence: Synthetic oligonucleotide
agcauggaugaagcuuaca

SEQ ID NO: 2138673 - RNA, 19 nt, Artificial Sequence
  Description of Artificial Sequence: Synthetic oligonucleotide
aggguccuguuuaaacccu

SEQ ID NO: 2138674 - RNA, 19 nt, Artificial Sequence
  Description of Artificial Sequence: Synthetic oligonucleotide
guguucaguggugccgccc

SEQ ID NO: 2138675 - RNA, 19 nt, Artificial Sequence
  Description of Artificial Sequence: Synthetic oligonucleotide
cugcugaagaccuggcagu

SEQ ID NO: 2138676 - RNA, 19 nt, Artificial Sequence
  Description of Artificial Sequence: Synthetic oligonucleotide
uuagcaccucagagguguu

SEQ ID NO: 2138677 - RNA, 19 nt, Artificial Sequence
  Description of Artificial Sequence: Synthetic oligonucleotide
cggguauacuguuaacaug

SEQ ID NO: 2138678 - RNA, 19 nt, Artificial Sequence
  Description of Artificial Sequence: Synthetic oligonucleotide
gcccuagaggacauuggag

SEQ ID NO: 2138679 - RNA, 19 nt, Artificial Sequence
  Description of Artificial Sequence: Synthetic oligonucleotide
ccccacuucucucaaacca

SEQ ID NO: 2138680 - RNA, 19 nt, Artificial Sequence
  Description of Artificial Sequence: Synthetic oligonucleotide
auacugcaagguuccuauu

SEQ ID NO: 2138681 - RNA, 19 nt, Artificial Sequence
  Description of Artificial Sequence: Synthetic oligonucleotide
guucaguggugccgcccug

SEQ ID NO: 2138682 - RNA, 19 nt, Artificial Sequence
  Description of Artificial Sequence: Synthetic oligonucleotide
auggaguauugcggggccu

SEQ ID NO: 2138683 - RNA, 19 nt, Artificial Sequence
  Description of Artificial Sequence: Synthetic oligonucleotide
acugggcuagccauuuaua

SEQ ID NO: 2138684 - RNA, 19 nt, Artificial Sequence
  Description of Artificial Sequence: Synthetic oligonucleotide
aggacauuggaggcuuguu

SEQ ID NO: 2138685 - RNA, 19 nt, Artificial Sequence
  Description of Artificial Sequence: Synthetic oligonucleotide
ugcggggccuguguucagu

SEQ ID NO: 2138686 - RNA, 19 nt, Artificial Sequence
  Description of Artificial Sequence: Synthetic oligonucleotide
gaacaaacgcugagucaua

SEQ ID NO: 2138687 - RNA, 19 nt, Artificial Sequence
  Description of Artificial Sequence: Synthetic oligonucleotide
cugagucauacugcaaggu

SEQ ID NO: 2138688 - RNA, 19 nt, Artificial Sequence
  Description of Artificial Sequence: Synthetic oligonucleotide
gccgcccugcaccugguug

SEQ ID NO: 2138689 - RNA, 19 nt, Artificial Sequence
  Description of Artificial Sequence: Synthetic oligonucleotide
gaggacauuggaggcuugu

SEQ ID NO: 2138690 - RNA, 19 nt, Artificial Sequence
  Description of Artificial Sequence: Synthetic oligonucleotide
cgcauuguucagugcagug

SEQ ID NO: 2138691 - RNA, 19 nt, Artificial Sequence
  Description of Artificial Sequence: Synthetic oligonucleotide
uugcggggccuguguucag

SEQ ID NO: 2138692 - RNA, 19 nt, Artificial Sequence
  Description of Artificial Sequence: Synthetic oligonucleotide
aagugcuguuacggguaua

SEQ ID NO: 2138693 - RNA, 19 nt, Artificial Sequence
  Description of Artificial Sequence: Synthetic oligonucleotide
cugcaagguuccuauucgu

SEQ ID NO: 2138694 - RNA, 19 nt, Artificial Sequence
  Description of Artificial Sequence: Synthetic oligonucleotide
caucaagagugcuucucuu

SEQ ID NO: 2138695 - RNA, 19 nt, Artificial Sequence
  Description of Artificial Sequence: Synthetic oligonucleotide
gaccagcauggaugaagcu

SEQ ID NO: 2138696 - RNA, 19 nt, Artificial Sequence
  Description of Artificial Sequence: Synthetic oligonucleotide
ggccuguguucaguggugc

SEQ ID NO: 2138697 - RNA, 19 nt, Artificial Sequence
  Description of Artificial Sequence: Synthetic oligonucleotide
aggcaccaucaagagugcu

SEQ ID NO: 2138698 - RNA, 19 nt, Artificial Sequence
  Description of Artificial Sequence: Synthetic oligonucleotide
caguggugccgcccugcac

SEQ ID NO: 2138699 - RNA, 19 nt, Artificial Sequence
  Description of Artificial Sequence: Synthetic oligonucleotide
agaggacauuggaggcuug

SEQ ID NO: 2138700 - RNA, 19 nt, Artificial Sequence
  Description of Artificial Sequence: Synthetic oligonucleotide
ugcaccugguugguaccuu

SEQ ID NO: 2138701 - RNA, 19 nt, Artificial Sequence
  Description of Artificial Sequence: Synthetic oligonucleotide
ggacaucacggcuauucau

SEQ ID NO: 2138702 - RNA, 19 nt, Artificial Sequence
  Description of Artificial Sequence: Synthetic oligonucleotide
gaggcuuguuucagagacu

SEQ ID NO: 2138703 - RNA, 19 nt, Artificial Sequence
  Description of Artificial Sequence: Synthetic oligonucleotide
gccaugagaacgcauuguu

SEQ ID NO: 2138704 - RNA, 19 nt, Artificial Sequence
  Description of Artificial Sequence: Synthetic oligonucleotide
gcccaugaauggaguauug

SEQ ID NO: 2138705 - RNA, 19 nt, Artificial Sequence
  Description of Artificial Sequence: Synthetic oligonucleotide
gggguucuguuguuugucu

SEQ ID NO: 2138706 - RNA, 19 nt, Artificial Sequence
  Description of Artificial Sequence: Synthetic oligonucleotide
guaucugaccugguacaau

SEQ ID NO: 2138707 - RNA, 19 nt, Artificial Sequence
  Description of Artificial Sequence: Synthetic oligonucleotide
gcggggccuguguucagug

SEQ ID NO: 2138708 - RNA, 19 nt, Artificial Sequence
  Description of Artificial Sequence: Synthetic oligonucleotide
guauugcggggccuguguu

SEQ ID NO: 2138709 - RNA, 19 nt, Artificial Sequence
  Description of Artificial Sequence: Synthetic oligonucleotide
cuguuacggguauacuguu

SEQ ID NO: 2138710 - RNA, 19 nt, Artificial Sequence
  Description of Artificial Sequence: Synthetic oligonucleotide
caagagugcuucucuuauu

SEQ ID NO: 2138711 - RNA, 19 nt, Artificial Sequence
  Description of Artificial Sequence: Synthetic oligonucleotide
ccucagagguguucauaca

SEQ ID NO: 2138712 - RNA, 19 nt, Artificial Sequence
  Description of Artificial Sequence: Synthetic oligonucleotide
caccucagagguguucaua

SEQ ID NO: 2138713 - RNA, 19 nt, Artificial Sequence
  Description of Artificial Sequence: Synthetic oligonucleotide
caucacggcuauucauuuu

SEQ ID NO: 2138714 - RNA, 19 nt, Artificial Sequence
  Description of Artificial Sequence: Synthetic oligonucleotide
acgcugagucauacugcaa

SEQ ID NO: 2138715 - RNA, 19 nt, Artificial Sequence
  Description of Artificial Sequence: Synthetic oligonucleotide
gguugguaccuuugucuuu

SEQ ID NO: 2138716 - RNA, 19 nt, Artificial Sequence
  Description of Artificial Sequence: Synthetic oligonucleotide
guggugccgcccugcaccu

SEQ ID NO: 2138717 - RNA, 19 nt, Artificial Sequence
  Description of Artificial Sequence: Synthetic oligonucleotide
ugccgcccugcaccugguu

SEQ ID NO: 2138718 - RNA, 19 nt, Artificial Sequence
  Description of Artificial Sequence: Synthetic oligonucleotide
ggcaccaucaagagugcuu

SEQ ID NO: 2138719 - RNA, 19 nt, Artificial Sequence
  Description of Artificial Sequence: Synthetic oligonucleotide
ggguucuguuguuugucuu

SEQ ID NO: 2138720 - RNA, 19 nt, Artificial Sequence
  Description of Artificial Sequence: Synthetic oligonucleotide
gugcuguuacggguauacu

SEQ ID NO: 2138721 - RNA, 19 nt, Artificial Sequence
  Description of Artificial Sequence: Synthetic oligonucleotide
ccucaaggguccuguuuaa

SEQ ID NO: 2138722 - RNA, 19 nt, Artificial Sequence
  Description of Artificial Sequence: Synthetic oligonucleotide
ggcuagccauuuauauaua

SEQ ID NO: 2138723 - RNA, 19 nt, Artificial Sequence
  Description of Artificial Sequence: Synthetic oligonucleotide
ggaguauugcggggccugu

SEQ ID NO: 2138724 - RNA, 19 nt, Artificial Sequence
  Description of Artificial Sequence: Synthetic oligonucleotide
ggaaccaguuagagauaau

SEQ ID NO: 2138725 - RNA, 19 nt, Artificial Sequence
  Description of Artificial Sequence: Synthetic oligonucleotide
gcagaucaauggcgggguu

SEQ ID NO: 2138726 - RNA, 19 nt, Artificial Sequence
  Description of Artificial Sequence: Synthetic oligonucleotide
cgcaaguaucugaccuggu

SEQ ID NO: 2138727 - RNA, 19 nt, Artificial Sequence
  Description of Artificial Sequence: Synthetic oligonucleotide
gaaacagacauccuaagag

SEQ ID NO: 2138728 - RNA, 19 nt, Artificial Sequence
  Description of Artificial Sequence: Synthetic oligonucleotide
aaucagguugucuuguagc

SEQ ID NO: 2138729 - RNA, 19 nt, Artificial Sequence
  Description of Artificial Sequence: Synthetic oligonucleotide
aaguauuucccgcagcagc

SEQ ID NO: 2138730 - RNA, 19 nt, Artificial Sequence
  Description of Artificial Sequence: Synthetic oligonucleotide
cuugaugucacucaugagg

SEQ ID NO: 2138731 - RNA, 19 nt, Artificial Sequence
  Description of Artificial Sequence: Synthetic oligonucleotide
aagaccaauauuccugagc

SEQ ID NO: 2138732 - RNA, 19 nt, Artificial Sequence
  Description of Artificial Sequence: Synthetic oligonucleotide
aaaagggcaccccacagcg

SEQ ID NO: 2138733 - RNA, 19 nt, Artificial Sequence
  Description of Artificial Sequence: Synthetic oligonucleotide
gaugccaaauaucuggagg

SEQ ID NO: 2138734 - RNA, 19 nt, Artificial Sequence
  Description of Artificial Sequence: Synthetic oligonucleotide
aagagauugagcuggucuc

SEQ ID NO: 2138735 - RNA, 19 nt, Artificial Sequence
  Description of Artificial Sequence: Synthetic oligonucleotide
aauguugaagccaaacagg

SEQ ID NO: 2138736 - RNA, 19 nt, Artificial Sequence
  Description of Artificial Sequence: Synthetic oligonucleotide
aaaacuugagcagaaaggu

SEQ ID NO: 2138737 - RNA, 19 nt, Artificial Sequence
  Description of Artificial Sequence: Synthetic oligonucleotide
aaacaggaaguauuucccg

SEQ ID NO: 2138738 - RNA, 19 nt, Artificial Sequence
  Description of Artificial Sequence: Synthetic oligonucleotide
aaagguguuuucccggagg

SEQ ID NO: 2138739 - RNA, 19 nt, Artificial Sequence
  Description of Artificial Sequence: Synthetic oligonucleotide
caauguugaagccaaacag

SEQ ID NO: 2138740 - RNA, 19 nt, Artificial Sequence
  Description of Artificial Sequence: Synthetic oligonucleotide
aucagguugucuuguagcc

SEQ ID NO: 2138741 - RNA, 19 nt, Artificial Sequence
  Description of Artificial Sequence: Synthetic oligonucleotide
agcaaagucgauaagguuc

SEQ ID NO: 2138742 - RNA, 19 nt, Artificial Sequence
  Description of Artificial Sequence: Synthetic oligonucleotide
uuugagucggaugucauag

SEQ ID NO: 2138743 - RNA, 19 nt, Artificial Sequence
  Description of Artificial Sequence: Synthetic oligonucleotide
agaccaauauuccugagca

SEQ ID NO: 2138744 - RNA, 19 nt, Artificial Sequence
  Description of Artificial Sequence: Synthetic oligonucleotide
ucaauaucaucccgguagg

SEQ ID NO: 2138745 - RNA, 19 nt, Artificial Sequence
  Description of Artificial Sequence: Synthetic oligonucleotide
ugagauguuggagagaaca

SEQ ID NO: 2138746 - RNA, 19 nt, Artificial Sequence
  Description of Artificial Sequence: Synthetic oligonucleotide
aagguguuuucccggaggg

SEQ ID NO: 2138747 - RNA, 19 nt, Artificial Sequence
  Description of Artificial Sequence: Synthetic oligonucleotide
gaagacaaaggccaggauc

SEQ ID NO: 2138748 - RNA, 19 nt, Artificial Sequence
  Description of Artificial Sequence: Synthetic oligonucleotide
uugugagcgaaacagacau

SEQ ID NO: 2138749 - RNA, 19 nt, Artificial Sequence
  Description of Artificial Sequence: Synthetic oligonucleotide
ugagcaaagucgauaaggu

SEQ ID NO: 2138750 - RNA, 19 nt, Artificial Sequence
  Description of Artificial Sequence: Synthetic oligonucleotide
auugagcuggucucgaauc

SEQ ID NO: 2138751 - RNA, 19 nt, Artificial Sequence
  Description of Artificial Sequence: Synthetic oligonucleotide
uccaauacagccagcgaag

SEQ ID NO: 2138752 - RNA, 19 nt, Artificial Sequence
  Description of Artificial Sequence: Synthetic oligonucleotide
gaagaugaggccaaggaac

SEQ ID NO: 2138753 - RNA, 19 nt, Artificial Sequence
  Description of Artificial Sequence: Synthetic oligonucleotide
uugcuguugaugaagagau

SEQ ID NO: 2138754 - RNA, 19 nt, Artificial Sequence
  Description of Artificial Sequence: Synthetic oligonucleotide
aaguagauauugagguucc

SEQ ID NO: 2138755 - RNA, 19 nt, Artificial Sequence
  Description of Artificial Sequence: Synthetic oligonucleotide
ggagagaacacccuucucg

SEQ ID NO: 2138756 - RNA, 19 nt, Artificial Sequence
  Description of Artificial Sequence: Synthetic oligonucleotide
caaacuggcccacacagcc

SEQ ID NO: 2138757 - RNA, 19 nt, Artificial Sequence
  Description of Artificial Sequence: Synthetic oligonucleotide
ugagucggaugucauagcc

SEQ ID NO: 2138758 - RNA, 19 nt, Artificial Sequence
  Description of Artificial Sequence: Synthetic oligonucleotide
aaugcuggugcuugccggg

SEQ ID NO: 2138759 - RNA, 19 nt, Artificial Sequence
  Description of Artificial Sequence: Synthetic oligonucleotide
gauguuggagagaacaccc

SEQ ID NO: 2138760 - RNA, 19 nt, Artificial Sequence
  Description of Artificial Sequence: Synthetic oligonucleotide
gaaguagauauugagguuc

SEQ ID NO: 2138761 - RNA, 19 nt, Artificial Sequence
  Description of Artificial Sequence: Synthetic oligonucleotide
uccuaagagguccucagca

SEQ ID NO: 2138762 - RNA, 19 nt, Artificial Sequence
  Description of Artificial Sequence: Synthetic oligonucleotide
auugaggacaucuuccgca

SEQ ID NO: 2138763 - RNA, 19 nt, Artificial Sequence
  Description of Artificial Sequence: Synthetic oligonucleotide
uagauauugagguuccagu

SEQ ID NO: 2138764 - RNA, 19 nt, Artificial Sequence
  Description of Artificial Sequence: Synthetic oligonucleotide
aauaucaucccgguaggcu

SEQ ID NO: 2138765 - RNA, 19 nt, Artificial Sequence
  Description of Artificial Sequence: Synthetic oligonucleotide
ugaaggucaauaucauccc

SEQ ID NO: 2138766 - RNA, 19 nt, Artificial Sequence
  Description of Artificial Sequence: Synthetic oligonucleotide
uugucuuguagccacuucu

SEQ ID NO: 2138767 - RNA, 19 nt, Artificial Sequence
  Description of Artificial Sequence: Synthetic oligonucleotide
gaaggucaauaucaucccg

SEQ ID NO: 2138768 - RNA, 19 nt, Artificial Sequence
  Description of Artificial Sequence: Synthetic oligonucleotide
agagguccucagcagaggc

SEQ ID NO: 2138769 - RNA, 19 nt, Artificial Sequence
  Description of Artificial Sequence: Synthetic oligonucleotide
aaauaucuggaggagggca

SEQ ID NO: 2138770 - RNA, 19 nt, Artificial Sequence
  Description of Artificial Sequence: Synthetic oligonucleotide
gauauugagguuccaguca

SEQ ID NO: 2138771 - RNA, 19 nt, Artificial Sequence
  Description of Artificial Sequence: Synthetic oligonucleotide
guagccacuucucaaacug

SEQ ID NO: 2138772 - RNA, 19 nt, Artificial Sequence
  Description of Artificial Sequence: Synthetic oligonucleotide
cuuggguucaagucagugc

SEQ ID NO: 2138773 - RNA, 19 nt, Artificial Sequence
  Description of Artificial Sequence: Synthetic oligonucleotide
uuugaagacaaaggccagg

SEQ ID NO: 2138774 - RNA, 19 nt, Artificial Sequence
  Description of Artificial Sequence: Synthetic oligonucleotide
gagagaacacccuucucgc

SEQ ID NO: 2138775 - RNA, 19 nt, Artificial Sequence
  Description of Artificial Sequence: Synthetic oligonucleotide
ucgaauccagucuuugaag

SEQ ID NO: 2138776 - RNA, 19 nt, Artificial Sequence
  Description of Artificial Sequence: Synthetic oligonucleotide
gagaacacccuucucgccc

SEQ ID NO: 2138777 - RNA, 19 nt, Artificial Sequence
  Description of Artificial Sequence: Synthetic oligonucleotide
uugaagccaaacaggaagu

SEQ ID NO: 2138778 - RNA, 19 nt, Artificial Sequence
  Description of Artificial Sequence: Synthetic oligonucleotide
accuagaucugucagugcu

SEQ ID NO: 2138779 - RNA, 19 nt, Artificial Sequence
  Description of Artificial Sequence: Synthetic oligonucleotide
ccaaauaucuggaggaggg

SEQ ID NO: 2138780 - RNA, 19 nt, Artificial Sequence
  Description of Artificial Sequence: Synthetic oligonucleotide
gaaaagggcaccccacagc

SEQ ID NO: 2138781 - RNA, 19 nt, Artificial Sequence
  Description of Artificial Sequence: Synthetic oligonucleotide
gauaagguucugaagguca

SEQ ID NO: 2138782 - RNA, 19 nt, Artificial Sequence
  Description of Artificial Sequence: Synthetic oligonucleotide
accaguuggccuucacugc

SEQ ID NO: 2138783 - RNA, 19 nt, Artificial Sequence
  Description of Artificial Sequence: Synthetic oligonucleotide
acugccgccgcuucaugcc

SEQ ID NO: 2138784 - RNA, 19 nt, Artificial Sequence
  Description of Artificial Sequence: Synthetic oligonucleotide
aggaaguauuucccgcagc

SEQ ID NO: 2138785 - RNA, 19 nt, Artificial Sequence
  Description of Artificial Sequence: Synthetic oligonucleotide
agguuccagucauugggcc

SEQ ID NO: 2138786 - RNA, 19 nt, Artificial Sequence
  Description of Artificial Sequence: Synthetic oligonucleotide
aacagacauccuaagaggu

SEQ ID NO: 2138787 - RNA, 19 nt, Artificial Sequence
  Description of Artificial Sequence: Synthetic oligonucleotide
agagaacacccuucucgcc

SEQ ID NO: 2138788 - RNA, 19 nt, Artificial Sequence
  Description of Artificial Sequence: Synthetic oligonucleotide
uuggagagaacacccuucu

SEQ ID NO: 2138789 - RNA, 19 nt, Artificial Sequence
  Description of Artificial Sequence: Synthetic oligonucleotide
uugagcuggucucgaaucc

SEQ ID NO: 2138790 - RNA, 19 nt, Artificial Sequence
  Description of Artificial Sequence: Synthetic oligonucleotide
auugcuguugaugaagaga

SEQ ID NO: 2138791 - RNA, 19 nt, Artificial Sequence
  Description of Artificial Sequence: Synthetic oligonucleotide
auccuaagagguccucagc

SEQ ID NO: 2138792 - RNA, 19 nt, Artificial Sequence
  Description of Artificial Sequence: Synthetic oligonucleotide
uccugagcaaagucgauaa

SEQ ID NO: 2138793 - RNA, 19 nt, Artificial Sequence
  Description of Artificial Sequence: Synthetic oligonucleotide
ugaguggucacccgccgcc

SEQ ID NO: 2138794 - RNA, 19 nt, Artificial Sequence
  Description of Artificial Sequence: Synthetic oligonucleotide
agggcuccaauacagccag

SEQ ID NO: 2138795 - RNA, 19 nt, Artificial Sequence
  Description of Artificial Sequence: Synthetic oligonucleotide
ucgauaagguucugaaggu

SEQ ID NO: 2138796 - RNA, 19 nt, Artificial Sequence
  Description of Artificial Sequence: Synthetic oligonucleotide
auugagguuccagucauug

SEQ ID NO: 2138797 - RNA, 19 nt, Artificial Sequence
  Description of Artificial Sequence: Synthetic oligonucleotide
caccaguuggccuucacug

SEQ ID NO: 2138798 - RNA, 19 nt, Artificial Sequence
  Description of Artificial Sequence: Synthetic oligonucleotide
gcagcagccgacuucaggg

SEQ ID NO: 2138799 - RNA, 19 nt, Artificial Sequence
  Description of Artificial Sequence: Synthetic oligonucleotide
aaagucgauaagguucuga

SEQ ID NO: 2138800 - RNA, 19 nt, Artificial Sequence
  Description of Artificial Sequence: Synthetic oligonucleotide
aggcccagaggccaauggc

SEQ ID NO: 2138801 - RNA, 19 nt, Artificial Sequence
  Description of Artificial Sequence: Synthetic oligonucleotide
acggcuuggguucaaguca

SEQ ID NO: 2138802 - RNA, 19 nt, Artificial Sequence
  Description of Artificial Sequence: Synthetic oligonucleotide
gguauugaggacaucuucc

SEQ ID NO: 2138803 - RNA, 19 nt, Artificial Sequence
  Description of Artificial Sequence: Synthetic oligonucleotide
agagauugagcuggucucg

SEQ ID NO: 2138804 - RNA, 19 nt, Artificial Sequence
  Description of Artificial Sequence: Synthetic oligonucleotide
accaauauuccugagcaaa

SEQ ID NO: 2138805 - RNA, 19 nt, Artificial Sequence
  Description of Artificial Sequence: Synthetic oligonucleotide
ucggaugucauagccacac

SEQ ID NO: 2138806 - RNA, 19 nt, Artificial Sequence
  Description of Artificial Sequence: Synthetic oligonucleotide
cacccagaagacaauguug

SEQ ID NO: 2138807 - RNA, 19 nt, Artificial Sequence
  Description of Artificial Sequence: Synthetic oligonucleotide
gcagaaagguguuuucccg

SEQ ID NO: 2138808 - RNA, 19 nt, Artificial Sequence
  Description of Artificial Sequence: Synthetic oligonucleotide
auaucaucccgguaggcuu

SEQ ID NO: 2138809 - RNA, 19 nt, Artificial Sequence
  Description of Artificial Sequence: Synthetic oligonucleotide
caaucagguugucuuguag

SEQ ID NO: 2138810 - RNA, 19 nt, Artificial Sequence
  Description of Artificial Sequence: Synthetic oligonucleotide
ucccgguaggcuuugacau

SEQ ID NO: 2138811 - RNA, 19 nt, Artificial Sequence
  Description of Artificial Sequence: Synthetic oligonucleotide
ucaccaguuggccuucacu

SEQ ID NO: 2138812 - RNA, 19 nt, Artificial Sequence
  Description of Artificial Sequence: Synthetic oligonucleotide
uguuggagagaacacccuu

SEQ ID NO: 2138813 - RNA, 19 nt, Artificial Sequence
  Description of Artificial Sequence: Synthetic oligonucleotide
aagccaaacaggaaguauu

SEQ ID NO: 2138814 - RNA, 19 nt, Artificial Sequence
  Description of Artificial Sequence: Synthetic oligonucleotide
ucucgaauccagucuuuga

SEQ ID NO: 2138815 - RNA, 19 nt, Artificial Sequence
  Description of Artificial Sequence: Synthetic oligonucleotide
uguagccacuucucaaacu

SEQ ID NO: 2138816 - RNA, 19 nt, Artificial Sequence
  Description of Artificial Sequence: Synthetic oligonucleotide
gaaguauuucccgcagcag

SEQ ID NO: 2138817 - RNA, 19 nt, Artificial Sequence
  Description of Artificial Sequence: Synthetic oligonucleotide
agcgaagcccagcaccgac

SEQ ID NO: 2138818 - RNA, 19 nt, Artificial Sequence
  Description of Artificial Sequence: Synthetic oligonucleotide
cagccacacaggaucaagg

SEQ ID NO: 2138819 - RNA, 19 nt, Artificial Sequence
  Description of Artificial Sequence: Synthetic oligonucleotide
uccgcagggucccuaacac

SEQ ID NO: 2138820 - RNA, 19 nt, Artificial Sequence
  Description of Artificial Sequence: Synthetic oligonucleotide
aauaucuggaggagggcaa

SEQ ID NO: 2138821 - RNA, 19 nt, Artificial Sequence
  Description of Artificial Sequence: Synthetic oligonucleotide
aggucaauaucaucccggu

SEQ ID NO: 2138822 - RNA, 19 nt, Artificial Sequence
  Description of Artificial Sequence: Synthetic oligonucleotide
gacuucaggguccuggaaa

SEQ ID NO: 2138823 - RNA, 19 nt, Artificial Sequence
  Description of Artificial Sequence: Synthetic oligonucleotide
agccacacuggguauugag

SEQ ID NO: 2138824 - RNA, 19 nt, Artificial Sequence
  Description of Artificial Sequence: Synthetic oligonucleotide
cugcucaagcuccaguuug

SEQ ID NO: 2138825 - RNA, 19 nt, Artificial Sequence
  Description of Artificial Sequence: Synthetic oligonucleotide
gggucccuaacacagcagg

SEQ ID NO: 2138826 - RNA, 19 nt, Artificial Sequence
  Description of Artificial Sequence: Synthetic oligonucleotide
caccccacagcgcucacgg

SEQ ID NO: 2138827 - RNA, 19 nt, Artificial Sequence
  Description of Artificial Sequence: Synthetic oligonucleotide
aggcccaucaggccaggcg

SEQ ID NO: 2138828 - RNA, 19 nt, Artificial Sequence
  Description of Artificial Sequence: Synthetic oligonucleotide
ugccaaauaucuggaggag

SEQ ID NO: 2138829 - RNA, 19 nt, Artificial Sequence
  Description of Artificial Sequence: Synthetic oligonucleotide
acagacauccuaagagguc

SEQ ID NO: 2138830 - RNA, 19 nt, Artificial Sequence
  Description of Artificial Sequence: Synthetic oligonucleotide
uauuucccgcagcagccga

SEQ ID NO: 2138831 - RNA, 19 nt, Artificial Sequence
  Description of Artificial Sequence: Synthetic oligonucleotide
ggaaguauuucccgcagca

SEQ ID NO: 2138832 - RNA, 19 nt, Artificial Sequence
  Description of Artificial Sequence: Synthetic oligonucleotide
agcagccgacuucaggguc

SEQ ID NO: 2138833 - RNA, 19 nt, Artificial Sequence
  Description of Artificial Sequence: Synthetic oligonucleotide
ugcuugccgggcaugguga

SEQ ID NO: 2138834 - RNA, 19 nt, Artificial Sequence
  Description of Artificial Sequence: Synthetic oligonucleotide
gagauguuggagagaacac

SEQ ID NO: 2138835 - RNA, 19 nt, Artificial Sequence
  Description of Artificial Sequence: Synthetic oligonucleotide
uggccgucaccccuggcag

SEQ ID NO: 2138836 - RNA, 19 nt, Artificial Sequence
  Description of Artificial Sequence: Synthetic oligonucleotide
cuggaaaugcuggugcuug

SEQ ID NO: 2138837 - RNA, 19 nt, Artificial Sequence
  Description of Artificial Sequence: Synthetic oligonucleotide
uggguucaagucagugcag

SEQ ID NO: 2138838 - RNA, 19 nt, Artificial Sequence
  Description of Artificial Sequence: Synthetic oligonucleotide
aaagggcaccccacagcgc

SEQ ID NO: 2138839 - RNA, 19 nt, Artificial Sequence
  Description of Artificial Sequence: Synthetic oligonucleotide
cagucauugggcccucggg

SEQ ID NO: 2138840 - RNA, 19 nt, Artificial Sequence
  Description of Artificial Sequence: Synthetic oligonucleotide
aguggucacccgccgcccc

SEQ ID NO: 2138841 - RNA, 19 nt, Artificial Sequence
  Description of Artificial Sequence: Synthetic oligonucleotide
agguucugaaggucaauau

SEQ ID NO: 2138842 - RNA, 19 nt, Artificial Sequence
  Description of Artificial Sequence: Synthetic oligonucleotide
ugagcgaaacagacauccu

SEQ ID NO: 2138843 - RNA, 19 nt, Artificial Sequence
  Description of Artificial Sequence: Synthetic oligonucleotide
cuccaauacagccagcgaa

SEQ ID NO: 2138844 - RNA, 19 nt, Artificial Sequence
  Description of Artificial Sequence: Synthetic oligonucleotide
cacggcuuggguucaaguc

SEQ ID NO: 2138845 - RNA, 19 nt, Artificial Sequence
  Description of Artificial Sequence: Synthetic oligonucleotide
ucccggagggcuccaauac

SEQ ID NO: 2138846 - RNA, 19 nt, Artificial Sequence
  Description of Artificial Sequence: Synthetic oligonucleotide
ggagggcuccaauacagcc

SEQ ID NO: 2138847 - RNA, 19 nt, Artificial Sequence
  Description of Artificial Sequence: Synthetic oligonucleotide
gagcgaaacagacauccua

SEQ ID NO: 2138848 - RNA, 19 nt, Artificial Sequence
  Description of Artificial Sequence: Synthetic oligonucleotide
caaauaucuggaggagggc

SEQ ID NO: 2138849 - RNA, 19 nt, Artificial Sequence
  Description of Artificial Sequence: Synthetic oligonucleotide
cucgaauccagucuuugaa

SEQ ID NO: 2138850 - RNA, 19 nt, Artificial Sequence
  Description of Artificial Sequence: Synthetic oligonucleotide
uugccgggcauggugagug

SEQ ID NO: 2138851 - RNA, 19 nt, Artificial Sequence
  Description of Artificial Sequence: Synthetic oligonucleotide
ucgggcaccacagcaagac

SEQ ID NO: 2138852 - RNA, 19 nt, Artificial Sequence
  Description of Artificial Sequence: Synthetic oligonucleotide
ccaauauuccugagcaaag

SEQ ID NO: 2138853 - RNA, 19 nt, Artificial Sequence
  Description of Artificial Sequence: Synthetic oligonucleotide
gaucugucagugcugagau

SEQ ID NO: 2138854 - RNA, 19 nt, Artificial Sequence
  Description of Artificial Sequence: Synthetic oligonucleotide
agcgaaacagacauccuaa

SEQ ID NO: 2138855 - RNA, 19 nt, Artificial Sequence
  Description of Artificial Sequence: Synthetic oligonucleotide
ccacuucucaaacuggccc

SEQ ID NO: 2138856 - RNA, 19 nt, Artificial Sequence
  Description of Artificial Sequence: Synthetic oligonucleotide
gacugccgccgcuucaugc

SEQ ID NO: 2138857 - RNA, 19 nt, Artificial Sequence
  Description of Artificial Sequence: Synthetic oligonucleotide
caucaggccaggcgugugg

SEQ ID NO: 2138858 - RNA, 19 nt, Artificial Sequence
  Description of Artificial Sequence: Synthetic oligonucleotide
agguguuuucccggagggc

SEQ ID NO: 2138859 - RNA, 19 nt, Artificial Sequence
  Description of Artificial Sequence: Synthetic oligonucleotide
caagaccaauauuccugag

SEQ ID NO: 2138860 - RNA, 19 nt, Artificial Sequence
  Description of Artificial Sequence: Synthetic oligonucleotide
ucauugggcccucgggcac

SEQ ID NO: 2138861 - RNA, 19 nt, Artificial Sequence
  Description of Artificial Sequence: Synthetic oligonucleotide
uucaugcccaaggccaccc

SEQ ID NO: 2138862 - RNA, 19 nt, Artificial Sequence
  Description of Artificial Sequence: Synthetic oligonucleotide
ugagcuggucucgaaucca

SEQ ID NO: 2138863 - RNA, 19 nt, Artificial Sequence
  Description of Artificial Sequence: Synthetic oligonucleotide
guauuucccgcagcagccg

SEQ ID NO: 2138864 - RNA, 19 nt, Artificial Sequence
  Description of Artificial Sequence: Synthetic oligonucleotide
uaucaucccgguaggcuuu

SEQ ID NO: 2138865 - RNA, 19 nt, Artificial Sequence
  Description of Artificial Sequence: Synthetic oligonucleotide
guuggagagaacacccuuc

SEQ ID NO: 2138866 - RNA, 19 nt, Artificial Sequence
  Description of Artificial Sequence: Synthetic oligonucleotide
cacuucucaaacuggccca

SEQ ID NO: 2138867 - RNA, 19 nt, Artificial Sequence
  Description of Artificial Sequence: Synthetic oligonucleotide
ucucgccccaggcccagag

SEQ ID NO: 2138868 - RNA, 19 nt, Artificial Sequence
  Description of Artificial Sequence: Synthetic oligonucleotide
ugugagcgaaacagacauc

SEQ ID NO: 2138869 - RNA, 19 nt, Artificial Sequence
  Description of Artificial Sequence: Synthetic oligonucleotide
caugcccaaggccacccag

SEQ ID NO: 2138870 - RNA, 19 nt, Artificial Sequence
  Description of Artificial Sequence: Synthetic oligonucleotide
cagaugccaaauaucugga

SEQ ID NO: 2138871 - RNA, 19 nt, Artificial Sequence
  Description of Artificial Sequence: Synthetic oligonucleotide
augcccaaggccacccagc

SEQ ID NO: 2138872 - RNA, 19 nt, Artificial Sequence
  Description of Artificial Sequence: Synthetic oligonucleotide
uggugcuugccgggcaugg

SEQ ID NO: 2138873 - RNA, 19 nt, Artificial Sequence
  Description of Artificial Sequence: Synthetic oligonucleotide
gucacucaugagguucugg

SEQ ID NO: 2138874 - RNA, 19 nt, Artificial Sequence
  Description of Artificial Sequence: Synthetic oligonucleotide
cucagcagaggcccaucag

SEQ ID NO: 2138875 - RNA, 19 nt, Artificial Sequence
  Description of Artificial Sequence: Synthetic oligonucleotide
cuagaucugucagugcuga

SEQ ID NO: 2138876 - RNA, 19 nt, Artificial Sequence
  Description of Artificial Sequence: Synthetic oligonucleotide
caauaucaucccgguaggc

SEQ ID NO: 2138877 - RNA, 19 nt, Artificial Sequence
  Description of Artificial Sequence: Synthetic oligonucleotide
gguuccagucauugggccc

SEQ ID NO: 2138878 - RNA, 19 nt, Artificial Sequence
  Description of Artificial Sequence: Synthetic oligonucleotide
acauccuaagagguccuca

SEQ ID NO: 2138879 - RNA, 19 nt, Artificial Sequence
  Description of Artificial Sequence: Synthetic oligonucleotide
gagcuggucucgaauccag

SEQ ID NO: 2138880 - RNA, 19 nt, Artificial Sequence
  Description of Artificial Sequence: Synthetic oligonucleotide
gaaccggagccggggaccg

SEQ ID NO: 2138881 - RNA, 19 nt, Artificial Sequence
  Description of Artificial Sequence: Synthetic oligonucleotide
uggagagaacacccuucuc

SEQ ID NO: 2138882 - RNA, 19 nt, Artificial Sequence
  Description of Artificial Sequence: Synthetic oligonucleotide
agcgcucacggcuuggguu

SEQ ID NO: 2138883 - RNA, 19 nt, Artificial Sequence
  Description of Artificial Sequence: Synthetic oligonucleotide
ccagcgaagcccagcaccg

SEQ ID NO: 2138884 - RNA, 19 nt, Artificial Sequence
  Description of Artificial Sequence: Synthetic oligonucleotide
gagggcuccaauacagcca

SEQ ID NO: 2138885 - RNA, 19 nt, Artificial Sequence
  Description of Artificial Sequence: Synthetic oligonucleotide
caagaccccagccaccaca

SEQ ID NO: 2138886 - RNA, 19 nt, Artificial Sequence
  Description of Artificial Sequence: Synthetic oligonucleotide
ggugaguggucacccgccg

SEQ ID NO: 2138887 - RNA, 19 nt, Artificial Sequence
  Description of Artificial Sequence: Synthetic oligonucleotide
gcgaaacagacauccuaag

SEQ ID NO: 2138888 - RNA, 19 nt, Artificial Sequence
  Description of Artificial Sequence: Synthetic oligonucleotide
gcuuugacauugcuguuga

SEQ ID NO: 2138889 - RNA, 19 nt, Artificial Sequence
  Description of Artificial Sequence: Synthetic oligonucleotide
ggcuuugacauugcuguug

SEQ ID NO: 2138890 - RNA, 19 nt, Artificial Sequence
  Description of Artificial Sequence: Synthetic oligonucleotide
gagucggaugucauagcca

SEQ ID NO: 2138891 - RNA, 19 nt, Artificial Sequence
  Description of Artificial Sequence: Synthetic oligonucleotide
gucucgaauccagucuuug

SEQ ID NO: 2138892 - RNA, 19 nt, Artificial Sequence
  Description of Artificial Sequence: Synthetic oligonucleotide
cuggguauugaggacaucu

SEQ ID NO: 2138893 - RNA, 19 nt, Artificial Sequence
  Description of Artificial Sequence: Synthetic oligonucleotide
guggccgucaccccuggca

SEQ ID NO: 2138894 - RNA, 19 nt, Artificial Sequence
  Description of Artificial Sequence: Synthetic oligonucleotide
aaacuggcccacacagccu

SEQ ID NO: 2138895 - RNA, 19 nt, Artificial Sequence
  Description of Artificial Sequence: Synthetic oligonucleotide
auuucccgcagcagccgac

SEQ ID NO: 2138896 - RNA, 19 nt, Artificial Sequence
  Description of Artificial Sequence: Synthetic oligonucleotide
ccaguuggccuucacugcc

SEQ ID NO: 2138897 - RNA, 19 nt, Artificial Sequence
  Description of Artificial Sequence: Synthetic oligonucleotide
agccucaccaguuggccuu

SEQ ID NO: 2138898 - RNA, 19 nt, Artificial Sequence
  Description of Artificial Sequence: Synthetic oligonucleotide
caccuagaucugucagugc

SEQ ID NO: 2138899 - RNA, 19 nt, Artificial Sequence
  Description of Artificial Sequence: Synthetic oligonucleotide
gaccaauauuccugagcaa

SEQ ID NO: 2138900 - RNA, 19 nt, Artificial Sequence
  Description of Artificial Sequence: Synthetic oligonucleotide
caucccgguaggcuuugac

SEQ ID NO: 2138901 - RNA, 19 nt, Artificial Sequence
  Description of Artificial Sequence: Synthetic oligonucleotide
acagcgcucacggcuuggg

SEQ ID NO: 2138902 - RNA, 19 nt, Artificial Sequence
  Description of Artificial Sequence: Synthetic oligonucleotide
agcacccagaagacaaugu

SEQ ID NO: 2138903 - RNA, 19 nt, Artificial Sequence
  Description of Artificial Sequence: Synthetic oligonucleotide
ugaugucacucaugagguu

SEQ ID NO: 2138904 - RNA, 19 nt, Artificial Sequence
  Description of Artificial Sequence: Synthetic oligonucleotide
gccgacuucaggguccugg

SEQ ID NO: 2138905 - RNA, 19 nt, Artificial Sequence
  Description of Artificial Sequence: Synthetic oligonucleotide
gugaguggucacccgccgc

SEQ ID NO: 2138906 - RNA, 19 nt, Artificial Sequence
  Description of Artificial Sequence: Synthetic oligonucleotide
ccggagggcuccaauacag

SEQ ID NO: 2138907 - RNA, 19 nt, Artificial Sequence
  Description of Artificial Sequence: Synthetic oligonucleotide
gagauugagcuggucucga

SEQ ID NO: 2138908 - RNA, 19 nt, Artificial Sequence
  Description of Artificial Sequence: Synthetic oligonucleotide
uuucccgcagcagccgacu

SEQ ID NO: 2138909 - RNA, 19 nt, Artificial Sequence
  Description of Artificial Sequence: Synthetic oligonucleotide
agccaaacaggaaguauuu

SEQ ID NO: 2138910 - RNA, 19 nt, Artificial Sequence
  Description of Artificial Sequence: Synthetic oligonucleotide
guggucacccgccgccccg

SEQ ID NO: 2138911 - RNA, 19 nt, Artificial Sequence
  Description of Artificial Sequence: Synthetic oligonucleotide
ugcuguugaugaagagauu

SEQ ID NO: 2138912 - RNA, 19 nt, Artificial Sequence
  Description of Artificial Sequence: Synthetic oligonucleotide
aggccaccuagaucuguca

SEQ ID NO: 2138913 - RNA, 19 nt, Artificial Sequence
  Description of Artificial Sequence: Synthetic oligonucleotide
aacacccuucucgccccag

SEQ ID NO: 2138914 - RNA, 19 nt, Artificial Sequence
  Description of Artificial Sequence: Synthetic oligonucleotide
ccuagaucugucagugcug

SEQ ID NO: 2138915 - RNA, 19 nt, Artificial Sequence
  Description of Artificial Sequence: Synthetic oligonucleotide
cugagauguuggagagaac

SEQ ID NO: 2138916 - RNA, 19 nt, Artificial Sequence
  Description of Artificial Sequence: Synthetic oligonucleotide
caguuugagucggauguca

SEQ ID NO: 2138917 - RNA, 19 nt, Artificial Sequence
  Description of Artificial Sequence: Synthetic oligonucleotide
ccaccuagaucugucagug

SEQ ID NO: 2138918 - RNA, 19 nt, Artificial Sequence
  Description of Artificial Sequence: Synthetic oligonucleotide
auguuggagagaacacccu

SEQ ID NO: 2138919 - RNA, 19 nt, Artificial Sequence
  Description of Artificial Sequence: Synthetic oligonucleotide
gccgcuucaugcccaaggc

SEQ ID NO: 2138920 - RNA, 19 nt, Artificial Sequence
  Description of Artificial Sequence: Synthetic oligonucleotide
auaucuggaggagggcaau

SEQ ID NO: 2138921 - RNA, 19 nt, Artificial Sequence
  Description of Artificial Sequence: Synthetic oligonucleotide
aguuugagucggaugucau

SEQ ID NO: 2138922 - RNA, 19 nt, Artificial Sequence
  Description of Artificial Sequence: Synthetic oligonucleotide
ggcccagaggccaauggcc

SEQ ID NO: 2138923 - RNA, 19 nt, Artificial Sequence
  Description of Artificial Sequence: Synthetic oligonucleotide
ccaccaagaccccagccac

SEQ ID NO: 2138924 - RNA, 19 nt, Artificial Sequence
  Description of Artificial Sequence: Synthetic oligonucleotide
gagcaaagucgauaagguu

SEQ ID NO: 2138925 - RNA, 19 nt, Artificial Sequence
  Description of Artificial Sequence: Synthetic oligonucleotide
ggacaucuuccgcaggguc

SEQ ID NO: 2138926 - RNA, 19 nt, Artificial Sequence
  Description of Artificial Sequence: Synthetic oligonucleotide
gguguuuucccggagggcu

SEQ ID NO: 2138927 - RNA, 19 nt, Artificial Sequence
  Description of Artificial Sequence: Synthetic oligonucleotide
cagcaccgacaugacaccc

SEQ ID NO: 2138928 - RNA, 19 nt, Artificial Sequence
  Description of Artificial Sequence: Synthetic oligonucleotide
gaccggcucagcccuccgc

SEQ ID NO: 2138929 - RNA, 19 nt, Artificial Sequence
  Description of Artificial Sequence: Synthetic oligonucleotide
aggacaucuuccgcagggu

SEQ ID NO: 2138930 - RNA, 19 nt, Artificial Sequence
  Description of Artificial Sequence: Synthetic oligonucleotide
cgaauccagucuuugaaga

SEQ ID NO: 2138931 - RNA, 19 nt, Artificial Sequence
  Description of Artificial Sequence: Synthetic oligonucleotide
cuggucucgaauccagucu

SEQ ID NO: 2138932 - RNA, 19 nt, Artificial Sequence
  Description of Artificial Sequence: Synthetic oligonucleotide
uccagucauugggcccucg

SEQ ID NO: 2138933 - RNA, 19 nt, Artificial Sequence
  Description of Artificial Sequence: Synthetic oligonucleotide
ccaauacagccagcgaagc

SEQ ID NO: 2138934 - RNA, 19 nt, Artificial Sequence
  Description of Artificial Sequence: Synthetic oligonucleotide
gcauggugaguggucaccc

SEQ ID NO: 2138935 - RNA, 19 nt, Artificial Sequence
  Description of Artificial Sequence: Synthetic oligonucleotide
cauugggcccucgggcacc

SEQ ID NO: 2138936 - RNA, 19 nt, Artificial Sequence
  Description of Artificial Sequence: Synthetic oligonucleotide
guuccagucauugggcccu

SEQ ID NO: 2138937 - RNA, 19 nt, Artificial Sequence
  Description of Artificial Sequence: Synthetic oligonucleotide
cucgccccaggcccagagg

SEQ ID NO: 2138938 - RNA, 19 nt, Artificial Sequence
  Description of Artificial Sequence: Synthetic oligonucleotide
agacauccuaagagguccu

SEQ ID NO: 2138939 - RNA, 19 nt, Artificial Sequence
  Description of Artificial Sequence: Synthetic oligonucleotide
cagccagcgaagcccagca

SEQ ID NO: 2138940 - RNA, 19 nt, Artificial Sequence
  Description of Artificial Sequence: Synthetic oligonucleotide
cucaccaguuggccuucac

SEQ ID NO: 2138941 - RNA, 19 nt, Artificial Sequence
  Description of Artificial Sequence: Synthetic oligonucleotide
gaguggucacccgccgccc

SEQ ID NO: 2138942 - RNA, 19 nt, Artificial Sequence
  Description of Artificial Sequence: Synthetic oligonucleotide
uggucacccgccgccccgg

SEQ ID NO: 2138943 - RNA, 19 nt, Artificial Sequence
  Description of Artificial Sequence: Synthetic oligonucleotide
cagcaagaccaauauuccu

SEQ ID NO: 2138944 - RNA, 19 nt, Artificial Sequence
  Description of Artificial Sequence: Synthetic oligonucleotide
gcaaagucgauaagguucu

SEQ ID NO: 2138945 - RNA, 19 nt, Artificial Sequence
  Description of Artificial Sequence: Synthetic oligonucleotide
uguggccgucaccccuggc

SEQ ID NO: 2138946 - RNA, 19 nt, Artificial Sequence
  Description of Artificial Sequence: Synthetic oligonucleotide
ccagucauugggcccucgg

SEQ ID NO: 2138947 - RNA, 19 nt, Artificial Sequence
  Description of Artificial Sequence: Synthetic oligonucleotide
ggaaccggagccggggacc

SEQ ID NO: 2138948 - RNA, 19 nt, Artificial Sequence
  Description of Artificial Sequence: Synthetic oligonucleotide
cgcuucaugcccaaggcca

SEQ ID NO: 2138949 - RNA, 19 nt, Artificial Sequence
  Description of Artificial Sequence: Synthetic oligonucleotide
agggucccuaacacagcag

SEQ ID NO: 2138950 - RNA, 19 nt, Artificial Sequence
  Description of Artificial Sequence: Synthetic oligonucleotide
ccgguaggcuuugacauug

SEQ ID NO: 2138951 - RNA, 19 nt, Artificial Sequence
  Description of Artificial Sequence: Synthetic oligonucleotide
cucacggcuuggguucaag

SEQ ID NO: 2138952 - RNA, 19 nt, Artificial Sequence
  Description of Artificial Sequence: Synthetic oligonucleotide
guguggccgucaccccugg

SEQ ID NO: 2138953 - RNA, 19 nt, Artificial Sequence
  Description of Artificial Sequence: Synthetic oligonucleotide
gcagccgacuucagggucc

SEQ ID NO: 2138954 - RNA, 19 nt, Artificial Sequence
  Description of Artificial Sequence: Synthetic oligonucleotide
caggcguguggccgucacc

SEQ ID NO: 2138955 - RNA, 19 nt, Artificial Sequence
  Description of Artificial Sequence: Synthetic oligonucleotide
caaagucgauaagguucug

SEQ ID NO: 2138956 - RNA, 19 nt, Artificial Sequence
  Description of Artificial Sequence: Synthetic oligonucleotide
cgaaacagacauccuaaga

SEQ ID NO: 2138957 - RNA, 19 nt, Artificial Sequence
  Description of Artificial Sequence: Synthetic oligonucleotide
gccgcccaggccuggagcc

SEQ ID NO: 2138958 - RNA, 19 nt, Artificial Sequence
  Description of Artificial Sequence: Synthetic oligonucleotide
cacagcgcucacggcuugg

SEQ ID NO: 2138959 - RNA, 19 nt, Artificial Sequence
  Description of Artificial Sequence: Synthetic oligonucleotide
gcgcucacggcuuggguuc

SEQ ID NO: 2138960 - RNA, 19 nt, Artificial Sequence
  Description of Artificial Sequence: Synthetic oligonucleotide
aaccggagccggggaccgg

SEQ ID NO: 2138961 - RNA, 19 nt, Artificial Sequence
  Description of Artificial Sequence: Synthetic oligonucleotide
aggccaggcguguggccgu

SEQ ID NO: 2138962 - RNA, 19 nt, Artificial Sequence
  Description of Artificial Sequence: Synthetic oligonucleotide
gcuugccgggcauggugag

SEQ ID NO: 2138963 - RNA, 19 nt, Artificial Sequence
  Description of Artificial Sequence: Synthetic oligonucleotide
gaacacccuucucgcccca

SEQ ID NO: 2138964 - RNA, 19 nt, Artificial Sequence
  Description of Artificial Sequence: Synthetic oligonucleotide
uucccgcagcagccgacuu

SEQ ID NO: 2138965 - RNA, 19 nt, Artificial Sequence
  Description of Artificial Sequence: Synthetic oligonucleotide
gccaaacaggaaguauuuc

SEQ ID NO: 2138966 - RNA, 19 nt, Artificial Sequence
  Description of Artificial Sequence: Synthetic oligonucleotide
ccuagcccggcgacugccg

SEQ ID NO: 2138967 - RNA, 19 nt, Artificial Sequence
  Description of Artificial Sequence: Synthetic oligonucleotide
gggaaccggagccggggac

SEQ ID NO: 2138968 - RNA, 19 nt, Artificial Sequence
  Description of Artificial Sequence: Synthetic oligonucleotide
gcuucaugcccaaggccac

SEQ ID NO: 2138969 - RNA, 19 nt, Artificial Sequence
  Description of Artificial Sequence: Synthetic oligonucleotide
ccggggaccggcucagccc

SEQ ID NO: 2138970 - RNA, 19 nt, Artificial Sequence
  Description of Artificial Sequence: Synthetic oligonucleotide
agccuuugguguagaugga

SEQ ID NO: 2138971 - RNA, 19 nt, Artificial Sequence
  Description of Artificial Sequence: Synthetic oligonucleotide
cuucucgccccaggcccag

SEQ ID NO: 2138972 - RNA, 19 nt, Artificial Sequence
  Description of Artificial Sequence: Synthetic oligonucleotide
gccgucaccccuggcagcc

SEQ ID NO: 2138973 - RNA, 19 nt, Artificial Sequence
  Description of Artificial Sequence: Synthetic oligonucleotide
gccggggaccggcucagcc

SEQ ID NO: 2138974 - RNA, 19 nt, Artificial Sequence
  Description of Artificial Sequence: Synthetic oligonucleotide
cucgggcaccacagcaaga

SEQ ID NO: 2138975 - RNA, 19 nt, Artificial Sequence
  Description of Artificial Sequence: Synthetic oligonucleotide
agaggccaauggccaggaa

SEQ ID NO: 2138976 - RNA, 19 nt, Artificial Sequence
  Description of Artificial Sequence: Synthetic oligonucleotide
cuccgcgggccgcccaggc

SEQ ID NO: 2138977 - RNA, 19 nt, Artificial Sequence
  Description of Artificial Sequence: Synthetic oligonucleotide
agacaauguugaagccaaa

SEQ ID NO: 2138978 - RNA, 19 nt, Artificial Sequence
  Description of Artificial Sequence: Synthetic oligonucleotide
gccaccuagaucugucagu

SEQ ID NO: 2138979 - RNA, 19 nt, Artificial Sequence
  Description of Artificial Sequence: Synthetic oligonucleotide
cgauaagguucugaagguc

SEQ ID NO: 2138980 - RNA, 19 nt, Artificial Sequence
  Description of Artificial Sequence: Synthetic oligonucleotide
agggcaccccacagcgcuc

SEQ ID NO: 2138981 - RNA, 19 nt, Artificial Sequence
  Description of Artificial Sequence: Synthetic oligonucleotide
gggccuagcccggcgacug

SEQ ID NO: 2138982 - RNA, 19 nt, Artificial Sequence
  Description of Artificial Sequence: Synthetic oligonucleotide
gucggaugucauagccaca

SEQ ID NO: 2138983 - RNA, 19 nt, Artificial Sequence
  Description of Artificial Sequence: Synthetic oligonucleotide
gggcauggugaguggucac

SEQ ID NO: 2138984 - RNA, 19 nt, Artificial Sequence
  Description of Artificial Sequence: Synthetic oligonucleotide
cagaggccaauggccagga

SEQ ID NO: 2138985 - RNA, 19 nt, Artificial Sequence
  Description of Artificial Sequence: Synthetic oligonucleotide
gcagggucccuaacacagc

SEQ ID NO: 2138986 - RNA, 19 nt, Artificial Sequence
  Description of Artificial Sequence: Synthetic oligonucleotide
ggaccggcucagcccuccg

SEQ ID NO: 2138987 - RNA, 19 nt, Artificial Sequence
  Description of Artificial Sequence: Synthetic oligonucleotide
ccgggaaccggagccgggg

SEQ ID NO: 2138988 - RNA, 19 nt, Artificial Sequence
  Description of Artificial Sequence: Synthetic oligonucleotide
ggccgucaccccuggcagc

SEQ ID NO: 2138989 - RNA, 19 nt, Artificial Sequence
  Description of Artificial Sequence: Synthetic oligonucleotide
ccggcucagcccuccgcgg

SEQ ID NO: 2138990 - RNA, 19 nt, Artificial Sequence
  Description of Artificial Sequence: Synthetic oligonucleotide
agccggggaccggcucagc

SEQ ID NO: 2138991 - RNA, 19 nt, Artificial Sequence
  Description of Artificial Sequence: Synthetic oligonucleotide
cgccccgggaaccggagcc

SEQ ID NO: 2138992 - RNA, 19 nt, Artificial Sequence
  Description of Artificial Sequence: Synthetic oligonucleotide
cagugcaguugaaguagau

SEQ ID NO: 2138993 - RNA, 19 nt, Artificial Sequence
  Description of Artificial Sequence: Synthetic oligonucleotide
ccgacuucaggguccugga

SEQ ID NO: 2138994 - RNA, 19 nt, Artificial Sequence
  Description of Artificial Sequence: Synthetic oligonucleotide
ccgggcauggugagugguc

SEQ ID NO: 2138995 - RNA, 19 nt, Artificial Sequence
  Description of Artificial Sequence: Synthetic oligonucleotide
agcccuccgcgggccgccc

SEQ ID NO: 2138996 - RNA, 19 nt, Artificial Sequence
  Description of Artificial Sequence: Synthetic oligonucleotide
cagcagccgacuucagggu

SEQ ID NO: 2138997 - RNA, 19 nt, Artificial Sequence
  Description of Artificial Sequence: Synthetic oligonucleotide
cguguggccgucaccccug

SEQ ID NO: 2138998 - RNA, 19 nt, Artificial Sequence
  Description of Artificial Sequence: Synthetic oligonucleotide
gccuagcccggcgacugcc

SEQ ID NO: 2138999 - RNA, 19 nt, Artificial Sequence
  Description of Artificial Sequence: Synthetic oligonucleotide
aucuuccgcagggucccua

SEQ ID NO: 2139000 - RNA, 19 nt, Artificial Sequence
  Description of Artificial Sequence: Synthetic oligonucleotide
gccgccccgggccuagccc

SEQ ID NO: 2139001 - RNA, 19 nt, Artificial Sequence
  Description of Artificial Sequence: Synthetic oligonucleotide
ccucagcagaggcccauca

SEQ ID NO: 2139002 - RNA, 19 nt, Artificial Sequence
  Description of Artificial Sequence: Synthetic oligonucleotide
gggaccggcucagcccucc

SEQ ID NO: 2139003 - RNA, 19 nt, Artificial Sequence
  Description of Artificial Sequence: Synthetic oligonucleotide
guuuucccggagggcucca

SEQ ID NO: 2139004 - RNA, 19 nt, Artificial Sequence
  Description of Artificial Sequence: Synthetic oligonucleotide
ucccugccgccagcuccag

SEQ ID NO: 2139005 - RNA, 19 nt, Artificial Sequence
  Description of Artificial Sequence: Synthetic oligonucleotide
uucucgccccaggcccaga

SEQ ID NO: 2139006 - RNA, 19 nt, Artificial Sequence
  Description of Artificial Sequence: Synthetic oligonucleotide
ccaggcguguggccgucac

SEQ ID NO: 2139007 - RNA, 19 nt, Artificial Sequence
  Description of Artificial Sequence: Synthetic oligonucleotide
cuugagcagaaagguguuu

SEQ ID NO: 2139008 - RNA, 19 nt, Artificial Sequence
  Description of Artificial Sequence: Synthetic oligonucleotide
gucacccgccgccccggga

SEQ ID NO: 2139009 - RNA, 19 nt, Artificial Sequence
  Description of Artificial Sequence: Synthetic oligonucleotide
ggcgacugccgccgcuuca

SEQ ID NO: 2139010 - RNA, 19 nt, Artificial Sequence
  Description of Artificial Sequence: Synthetic oligonucleotide
ggccuagcccggcgacugc

SEQ ID NO: 2139011 - RNA, 19 nt, Artificial Sequence
  Description of Artificial Sequence: Synthetic oligonucleotide
cccggagggcuccaauaca

SEQ ID NO: 2139012 - RNA, 19 nt, Artificial Sequence
  Description of Artificial Sequence: Synthetic oligonucleotide
ccaagaccccagccaccac

SEQ ID NO: 2139013 - RNA, 19 nt, Artificial Sequence
  Description of Artificial Sequence: Synthetic oligonucleotide
cagcgaagcccagcaccga

SEQ ID NO: 2139014 - RNA, 19 nt, Artificial Sequence
  Description of Artificial Sequence: Synthetic oligonucleotide
ccaucaggccaggcgugug

SEQ ID NO: 2139015 - RNA, 19 nt, Artificial Sequence
  Description of Artificial Sequence: Synthetic oligonucleotide
gggcaccccacagcgcuca

SEQ ID NO: 2139016 - RNA, 19 nt, Artificial Sequence
  Description of Artificial Sequence: Synthetic oligonucleotide
gcccaaggccacccagcuc

SEQ ID NO: 2139017 - RNA, 19 nt, Artificial Sequence
  Description of Artificial Sequence: Synthetic oligonucleotide
ccccgggaaccggagccgg

SEQ ID NO: 2139018 - RNA, 19 nt, Artificial Sequence
  Description of Artificial Sequence: Synthetic oligonucleotide
gcguguggccgucaccccu

SEQ ID NO: 2139019 - RNA, 19 nt, Artificial Sequence
  Description of Artificial Sequence: Synthetic oligonucleotide
ccgcagggucccuaacaca

SEQ ID NO: 2139020 - RNA, 19 nt, Artificial Sequence
  Description of Artificial Sequence: Synthetic oligonucleotide
ccacagcgcucacggcuug

SEQ ID NO: 2139021 - RNA, 19 nt, Artificial Sequence
  Description of Artificial Sequence: Synthetic oligonucleotide
cuugccgggcauggugagu

SEQ ID NO: 2139022 - RNA, 19 nt, Artificial Sequence
  Description of Artificial Sequence: Synthetic oligonucleotide
ccgggccuagcccggcgac

SEQ ID NO: 2139023 - RNA, 19 nt, Artificial Sequence
  Description of Artificial Sequence: Synthetic oligonucleotide
cagcgcucacggcuugggu

SEQ ID NO: 2139024 - RNA, 19 nt, Artificial Sequence
  Description of Artificial Sequence: Synthetic oligonucleotide
ccaggcccagaggccaaug

SEQ ID NO: 2139025 - RNA, 19 nt, Artificial Sequence
  Description of Artificial Sequence: Synthetic oligonucleotide
agccgacuucaggguccug

SEQ ID NO: 2139026 - RNA, 19 nt, Artificial Sequence
  Description of Artificial Sequence: Synthetic oligonucleotide
gcuccaguuugagucggau

SEQ ID NO: 2139027 - RNA, 19 nt, Artificial Sequence
  Description of Artificial Sequence: Synthetic oligonucleotide
ccgcccaggccuggagccg

SEQ ID NO: 2139028 - RNA, 19 nt, Artificial Sequence
  Description of Artificial Sequence: Synthetic oligonucleotide
gccucaccaguuggccuuc

SEQ ID NO: 2139029 - RNA, 19 nt, Artificial Sequence
  Description of Artificial Sequence: Synthetic oligonucleotide
uugggcccucgggcaccac

SEQ ID NO: 2139030 - RNA, 19 nt, Artificial Sequence
  Description of Artificial Sequence: Synthetic oligonucleotide
ccgccccgggaaccggagc

SEQ ID NO: 2139031 - RNA, 19 nt, Artificial Sequence
  Description of Artificial Sequence: Synthetic oligonucleotide
ggugcuugccgggcauggu

SEQ ID NO: 2139032 - RNA, 19 nt, Artificial Sequence
  Description of Artificial Sequence: Synthetic oligonucleotide
cagccgacuucaggguccu

SEQ ID NO: 2139033 - RNA, 19 nt, Artificial Sequence
  Description of Artificial Sequence: Synthetic oligonucleotide
ggucucgaauccagucuuu

SEQ ID NO: 2139034 - RNA, 19 nt, Artificial Sequence
  Description of Artificial Sequence: Synthetic oligonucleotide
ccagcacccagaagacaau

SEQ ID NO: 2139035 - RNA, 19 nt, Artificial Sequence
  Description of Artificial Sequence: Synthetic oligonucleotide
cgacuucaggguccuggaa

SEQ ID NO: 2139036 - RNA, 19 nt, Artificial Sequence
  Description of Artificial Sequence: Synthetic oligonucleotide
cccacagcgcucacggcuu

SEQ ID NO: 2139037 - RNA, 19 nt, Artificial Sequence
  Description of Artificial Sequence: Synthetic oligonucleotide
gcgacugccgccgcuucau

SEQ ID NO: 2139038 - RNA, 19 nt, Artificial Sequence
  Description of Artificial Sequence: Synthetic oligonucleotide
cgccccgggccuagcccgg

SEQ ID NO: 2139039 - RNA, 19 nt, Artificial Sequence
  Description of Artificial Sequence: Synthetic oligonucleotide
ggccaggcguguggccguc

SEQ ID NO: 2139040 - RNA, 19 nt, Artificial Sequence
  Description of Artificial Sequence: Synthetic oligonucleotide
caucuuccgcagggucccu

SEQ ID NO: 2139041 - RNA, 19 nt, Artificial Sequence
  Description of Artificial Sequence: Synthetic oligonucleotide
cgggaaccggagccgggga

SEQ ID NO: 2139042 - RNA, 19 nt, Artificial Sequence
  Description of Artificial Sequence: Synthetic oligonucleotide
cggggaccggcucagcccu

SEQ ID NO: 2139043 - RNA, 19 nt, Artificial Sequence
  Description of Artificial Sequence: Synthetic oligonucleotide
gcgggccgcccaggccugg

SEQ ID NO: 2139044 - RNA, 19 nt, Artificial Sequence
  Description of Artificial Sequence: Synthetic oligonucleotide
gcccggcgacugccgccgc

SEQ ID NO: 2139045 - RNA, 19 nt, Artificial Sequence
  Description of Artificial Sequence: Synthetic oligonucleotide
gcucacggcuuggguucaa

SEQ ID NO: 2139046 - RNA, 19 nt, Artificial Sequence
  Description of Artificial Sequence: Synthetic oligonucleotide
cgcgggccgcccaggccug

SEQ ID NO: 2139047 - RNA, 19 nt, Artificial Sequence
  Description of Artificial Sequence: Synthetic oligonucleotide
ccucaccaguuggccuuca

SEQ ID NO: 2139048 - RNA, 19 nt, Artificial Sequence
  Description of Artificial Sequence: Synthetic oligonucleotide
cggaugucauagccacacu

SEQ ID NO: 2139049 - RNA, 19 nt, Artificial Sequence
  Description of Artificial Sequence: Synthetic oligonucleotide
cggcgacugccgccgcuuc

SEQ ID NO: 2139050 - RNA, 19 nt, Artificial Sequence
  Description of Artificial Sequence: Synthetic oligonucleotide
cgcucacggcuuggguuca

SEQ ID NO: 2139051 - RNA, 19 nt, Artificial Sequence
  Description of Artificial Sequence: Synthetic oligonucleotide
cccggcgacugccgccgcu

SEQ ID NO: 2139052 - RNA, 19 nt, Artificial Sequence
  Description of Artificial Sequence: Synthetic oligonucleotide
ccggcgacugccgccgcuu

SEQ ID NO: 2139053 - RNA, 19 nt, Artificial Sequence
  Description of Artificial Sequence: Synthetic oligonucleotide
cgggccuagcccggcgacu

SEQ ID NO: 2139054 - RNA, 19 nt, Artificial Sequence
  Description of Artificial Sequence: Synthetic oligonucleotide
ccgucaccccuggcagccu

SEQ ID NO: 2139055 - RNA, 19 nt, Artificial Sequence
  Description of Artificial Sequence: Synthetic oligonucleotide
cgggccgcccaggccugga

SEQ ID NO: 2139056 - RNA, 19 nt, Artificial Sequence
  Description of Artificial Sequence: Synthetic oligonucleotide
aaggaguccaauuucuccc

SEQ ID NO: 2139057 - RNA, 19 nt, Artificial Sequence
  Description of Artificial Sequence: Synthetic oligonucleotide
uauucagucagaucuaggg

SEQ ID NO: 2139058 - RNA, 19 nt, Artificial Sequence
  Description of Artificial Sequence: Synthetic oligonucleotide
uagaacagccgcaagaccg

SEQ ID NO: 2139059 - RNA, 19 nt, Artificial Sequence
  Description of Artificial Sequence: Synthetic oligonucleotide
aaugcaauauucaauuagg

SEQ ID NO: 2139060 - RNA, 19 nt, Artificial Sequence
  Description of Artificial Sequence: Synthetic oligonucleotide
ugccuauucagucagaucu

SEQ ID NO: 2139061 - RNA, 19 nt, Artificial Sequence
  Description of Artificial Sequence: Synthetic oligonucleotide
acuauuguggcuuaguccu

SEQ ID NO: 2139062 - RNA, 19 nt, Artificial Sequence
  Description of Artificial Sequence: Synthetic oligonucleotide
aaggguaucgagcagucag

SEQ ID NO: 2139063 - RNA, 19 nt, Artificial Sequence
  Description of Artificial Sequence: Synthetic oligonucleotide
aacuuguugacaggcaugc

SEQ ID NO: 2139064 - RNA, 19 nt, Artificial Sequence
  Description of Artificial Sequence: Synthetic oligonucleotide
ugcaauauucaauuaggcc

SEQ ID NO: 2139065 - RNA, 19 nt, Artificial Sequence
  Description of Artificial Sequence: Synthetic oligonucleotide
auucagucagaucuagggc

SEQ ID NO: 2139066 - RNA, 19 nt, Artificial Sequence
  Description of Artificial Sequence: Synthetic oligonucleotide
uguaccacgguguagcugc

SEQ ID NO: 2139067 - RNA, 19 nt, Artificial Sequence
  Description of Artificial Sequence: Synthetic oligonucleotide
uccagaugcacucuccugg

SEQ ID NO: 2139068 - RNA, 19 nt, Artificial Sequence
  Description of Artificial Sequence: Synthetic oligonucleotide
aacacaugcuucucccugc

SEQ ID NO: 2139069 - RNA, 19 nt, Artificial Sequence
  Description of Artificial Sequence: Synthetic oligonucleotide
ugaagaaggacguggugcg

SEQ ID NO: 2139070 - RNA, 19 nt, Artificial Sequence
  Description of Artificial Sequence: Synthetic oligonucleotide
uuugcguccgccucgaugc

SEQ ID NO: 2139071 - RNA, 19 nt, Artificial Sequence
  Description of Artificial Sequence: Synthetic oligonucleotide
uucagucagaucuagggca

SEQ ID NO: 2139072 - RNA, 19 nt, Artificial Sequence
  Description of Artificial Sequence: Synthetic oligonucleotide
aagacagcuccugaaagcg

SEQ ID NO: 2139073 - RNA, 19 nt, Artificial Sequence
  Description of Artificial Sequence: Synthetic oligonucleotide
ucaccaucaaacucuagcc

SEQ ID NO: 2139074 - RNA, 19 nt, Artificial Sequence
  Description of Artificial Sequence: Synthetic oligonucleotide
aucuagggcacccagaugu

SEQ ID NO: 2139075 - RNA, 19 nt, Artificial Sequence
  Description of Artificial Sequence: Synthetic oligonucleotide
gcaauauucaauuaggcca

SEQ ID NO: 2139076 - RNA, 19 nt, Artificial Sequence
  Description of Artificial Sequence: Synthetic oligonucleotide
ucauagaacagccgcaaga

SEQ ID NO: 2139077 - RNA, 19 nt, Artificial Sequence
  Description of Artificial Sequence: Synthetic oligonucleotide
uauucaauuaggccacuca

SEQ ID NO: 2139078 - RNA, 19 nt, Artificial Sequence
  Description of Artificial Sequence: Synthetic oligonucleotide
cugauaaggcccaagcugc

SEQ ID NO: 2139079 - RNA, 19 nt, Artificial Sequence
  Description of Artificial Sequence: Synthetic oligonucleotide
aaacucuagccacaggaca

SEQ ID NO: 2139080 - RNA, 19 nt, Artificial Sequence
  Description of Artificial Sequence: Synthetic oligonucleotide
aaagcgcaggcccaacaac

SEQ ID NO: 2139081 - RNA, 19 nt, Artificial Sequence
  Description of Artificial Sequence: Synthetic oligonucleotide
cuuguugacaggcaugccc

SEQ ID NO: 2139082 - RNA, 19 nt, Artificial Sequence
  Description of Artificial Sequence: Synthetic oligonucleotide
caauauucaauuaggccac

SEQ ID NO: 2139083 - RNA, 19 nt, Artificial Sequence
  Description of Artificial Sequence: Synthetic oligonucleotide
caauuucucccucagagug

SEQ ID NO: 2139084 - RNA, 19 nt, Artificial Sequence
  Description of Artificial Sequence: Synthetic oligonucleotide
gaaggaguccaauuucucc

SEQ ID NO: 2139085 - RNA, 19 nt, Artificial Sequence
  Description of Artificial Sequence: Synthetic oligonucleotide
gacuauuguggcuuagucc

SEQ ID NO: 2139086 - RNA, 19 nt, Artificial Sequence
  Description of Artificial Sequence: Synthetic oligonucleotide
gguuucacccucuugaucc

SEQ ID NO: 2139087 - RNA, 19 nt, Artificial Sequence
  Description of Artificial Sequence: Synthetic oligonucleotide
gaugcaagaagcccugggc

SEQ ID NO: 2139088 - RNA, 19 nt, Artificial Sequence
  Description of Artificial Sequence: Synthetic oligonucleotide
uuggaguagauccucagua

SEQ ID NO: 2139089 - RNA, 19 nt, Artificial Sequence
  Description of Artificial Sequence: Synthetic oligonucleotide
aggcugauaaggcccaagc

SEQ ID NO: 2139090 - RNA, 19 nt, Artificial Sequence
  Description of Artificial Sequence: Synthetic oligonucleotide
aauccggcuacacaccaca

SEQ ID NO: 2139091 - RNA, 19 nt, Artificial Sequence
  Description of Artificial Sequence: Synthetic oligonucleotide
augcaauauucaauuaggc

SEQ ID NO: 2139092 - RNA, 19 nt, Artificial Sequence
  Description of Artificial Sequence: Synthetic oligonucleotide
agaugcugaauccggcuac

SEQ ID NO: 2139093 - RNA, 19 nt, Artificial Sequence
  Description of Artificial Sequence: Synthetic oligonucleotide
agucuuggacccucggccc

SEQ ID NO: 2139094 - RNA, 19 nt, Artificial Sequence
  Description of Artificial Sequence: Synthetic oligonucleotide
ucaguaacuuguugacagg

SEQ ID NO: 2139095 - RNA, 19 nt, Artificial Sequence
  Description of Artificial Sequence: Synthetic oligonucleotide
cugaagaaggacguggugc

SEQ ID NO: 2139096 - RNA, 19 nt, Artificial Sequence
  Description of Artificial Sequence: Synthetic oligonucleotide
aacucuagccacaggacag

SEQ ID NO: 2139097 - RNA, 19 nt, Artificial Sequence
  Description of Artificial Sequence: Synthetic oligonucleotide
guaucgagcagucagcaca

SEQ ID NO: 2139098 - RNA, 19 nt, Artificial Sequence
  Description of Artificial Sequence: Synthetic oligonucleotide
cugucgaugacaugcacac

SEQ ID NO: 2139099 - RNA, 19 nt, Artificial Sequence
  Description of Artificial Sequence: Synthetic oligonucleotide
uaggccacucaucagcuca

SEQ ID NO: 2139100 - RNA, 19 nt, Artificial Sequence
  Description of Artificial Sequence: Synthetic oligonucleotide
uccgccucgaugcaagaag

SEQ ID NO: 2139101 - RNA, 19 nt, Artificial Sequence
  Description of Artificial Sequence: Synthetic oligonucleotide
uagacccacagccucuggg

SEQ ID NO: 2139102 - RNA, 19 nt, Artificial Sequence
  Description of Artificial Sequence: Synthetic oligonucleotide
caagacagcuccugaaagc

SEQ ID NO: 2139103 - RNA, 19 nt, Artificial Sequence
  Description of Artificial Sequence: Synthetic oligonucleotide
gaggccauggccucguuug

SEQ ID NO: 2139104 - RNA, 19 nt, Artificial Sequence
  Description of Artificial Sequence: Synthetic oligonucleotide
ugacaugcacaccuuccag

SEQ ID NO: 2139105 - RNA, 19 nt, Artificial Sequence
  Description of Artificial Sequence: Synthetic oligonucleotide
ugccggcugaagaaggacg

SEQ ID NO: 2139106 - RNA, 19 nt, Artificial Sequence
  Description of Artificial Sequence: Synthetic oligonucleotide
ucuugauccccuuaccauc

SEQ ID NO: 2139107 - RNA, 19 nt, Artificial Sequence
  Description of Artificial Sequence: Synthetic oligonucleotide
ucgagcagucagcacauug

SEQ ID NO: 2139108 - RNA, 19 nt, Artificial Sequence
  Description of Artificial Sequence: Synthetic oligonucleotide
cauagaacagccgcaagac

SEQ ID NO: 2139109 - RNA, 19 nt, Artificial Sequence
  Description of Artificial Sequence: Synthetic oligonucleotide
cagucuuggacccucggcc

SEQ ID NO: 2139110 - RNA, 19 nt, Artificial Sequence
  Description of Artificial Sequence: Synthetic oligonucleotide
uggcuuguccucaugcuca

SEQ ID NO: 2139111 - RNA, 19 nt, Artificial Sequence
  Description of Artificial Sequence: Synthetic oligonucleotide
gcugauaaggcccaagcug

SEQ ID NO: 2139112 - RNA, 19 nt, Artificial Sequence
  Description of Artificial Sequence: Synthetic oligonucleotide
ugaauccggcuacacacca

SEQ ID NO: 2139113 - RNA, 19 nt, Artificial Sequence
  Description of Artificial Sequence: Synthetic oligonucleotide
ugcacacggcacacgaggg

SEQ ID NO: 2139114 - RNA, 19 nt, Artificial Sequence
  Description of Artificial Sequence: Synthetic oligonucleotide
uccucaguaacuuguugac

SEQ ID NO: 2139115 - RNA, 19 nt, Artificial Sequence
  Description of Artificial Sequence: Synthetic oligonucleotide
acugguuugcguccgccuc

SEQ ID NO: 2139116 - RNA, 19 nt, Artificial Sequence
  Description of Artificial Sequence: Synthetic oligonucleotide
acuacccugccuccgcagc

SEQ ID NO: 2139117 - RNA, 19 nt, Artificial Sequence
  Description of Artificial Sequence: Synthetic oligonucleotide
agcucaaugcaauauucaa

SEQ ID NO: 2139118 - RNA, 19 nt, Artificial Sequence
  Description of Artificial Sequence: Synthetic oligonucleotide
cuuaguccugccuagggca

SEQ ID NO: 2139119 - RNA, 19 nt, Artificial Sequence
  Description of Artificial Sequence: Synthetic oligonucleotide
gcugaauccggcuacacac

SEQ ID NO: 2139120 - RNA, 19 nt, Artificial Sequence
  Description of Artificial Sequence: Synthetic oligonucleotide
agaucuagggcacccagau

SEQ ID NO: 2139121 - RNA, 19 nt, Artificial Sequence
  Description of Artificial Sequence: Synthetic oligonucleotide
uuuaccuggcgguaggcau

SEQ ID NO: 2139122 - RNA, 19 nt, Artificial Sequence
  Description of Artificial Sequence: Synthetic oligonucleotide
caaacucuagccacaggac

SEQ ID NO: 2139123 - RNA, 19 nt, Artificial Sequence
  Description of Artificial Sequence: Synthetic oligonucleotide
accuuccagacugauggcc

SEQ ID NO: 2139124 - RNA, 19 nt, Artificial Sequence
  Description of Artificial Sequence: Synthetic oligonucleotide
cacgagggcacccagcacc

SEQ ID NO: 2139125 - RNA, 19 nt, Artificial Sequence
  Description of Artificial Sequence: Synthetic oligonucleotide
uuaguccugccuagggcag

SEQ ID NO: 2139126 - RNA, 19 nt, Artificial Sequence
  Description of Artificial Sequence: Synthetic oligonucleotide
acccucuugauccccuuac

SEQ ID NO: 2139127 - RNA, 19 nt, Artificial Sequence
  Description of Artificial Sequence: Synthetic oligonucleotide
cuccugaaagcgcaggccc

SEQ ID NO: 2139128 - RNA, 19 nt, Artificial Sequence
  Description of Artificial Sequence: Synthetic oligonucleotide
cauagucaaugguggagag

SEQ ID NO: 2139129 - RNA, 19 nt, Artificial Sequence
  Description of Artificial Sequence: Synthetic oligonucleotide
aagaccgccucaucgugga

SEQ ID NO: 2139130 - RNA, 19 nt, Artificial Sequence
  Description of Artificial Sequence: Synthetic oligonucleotide
accacacuacccugccucc

SEQ ID NO: 2139131 - RNA, 19 nt, Artificial Sequence
  Description of Artificial Sequence: Synthetic oligonucleotide
caacaacacaugcuucucc

SEQ ID NO: 2139132 - RNA, 19 nt, Artificial Sequence
  Description of Artificial Sequence: Synthetic oligonucleotide
caguaacuuguugacaggc

SEQ ID NO: 2139133 - RNA, 19 nt, Artificial Sequence
  Description of Artificial Sequence: Synthetic oligonucleotide
agagaugcugaauccggcu

SEQ ID NO: 2139134 - RNA, 19 nt, Artificial Sequence
  Description of Artificial Sequence: Synthetic oligonucleotide
ugaaagcgcaggcccaaca

SEQ ID NO: 2139135 - RNA, 19 nt, Artificial Sequence
  Description of Artificial Sequence: Synthetic oligonucleotide
ugcgcuuugguuucacccu

SEQ ID NO: 2139136 - RNA, 19 nt, Artificial Sequence
  Description of Artificial Sequence: Synthetic oligonucleotide
gugcgcuuugguuucaccc

SEQ ID NO: 2139137 - RNA, 19 nt, Artificial Sequence
  Description of Artificial Sequence: Synthetic oligonucleotide
uggaguagauccucaguaa

SEQ ID NO: 2139138 - RNA, 19 nt, Artificial Sequence
  Description of Artificial Sequence: Synthetic oligonucleotide
acccugaacagcacggccc

SEQ ID NO: 2139139 - RNA, 19 nt, Artificial Sequence
  Description of Artificial Sequence: Synthetic oligonucleotide
cauucagcagaccuugcuc

SEQ ID NO: 2139140 - RNA, 19 nt, Artificial Sequence
  Description of Artificial Sequence: Synthetic oligonucleotide
uacacaccacacuacccug

SEQ ID NO: 2139141 - RNA, 19 nt, Artificial Sequence
  Description of Artificial Sequence: Synthetic oligonucleotide
caugcucacugucacugcc

SEQ ID NO: 2139142 - RNA, 19 nt, Artificial Sequence
  Description of Artificial Sequence: Synthetic oligonucleotide
guggagagaugcugaaucc

SEQ ID NO: 2139143 - RNA, 19 nt, Artificial Sequence
  Description of Artificial Sequence: Synthetic oligonucleotide
uauuguggcuuaguccugc

SEQ ID NO: 2139144 - RNA, 19 nt, Artificial Sequence
  Description of Artificial Sequence: Synthetic oligonucleotide
aagaaggacguggugcgcu

SEQ ID NO: 2139145 - RNA, 19 nt, Artificial Sequence
  Description of Artificial Sequence: Synthetic oligonucleotide
auauucaauuaggccacuc

SEQ ID NO: 2139146 - RNA, 19 nt, Artificial Sequence
  Description of Artificial Sequence: Synthetic oligonucleotide
caacacaugcuucucccug

SEQ ID NO: 2139147 - RNA, 19 nt, Artificial Sequence
  Description of Artificial Sequence: Synthetic oligonucleotide
gaccuugcucuccuggccc

SEQ ID NO: 2139148 - RNA, 19 nt, Artificial Sequence
  Description of Artificial Sequence: Synthetic oligonucleotide
agcucagccugcuuggagu

SEQ ID NO: 2139149 - RNA, 19 nt, Artificial Sequence
  Description of Artificial Sequence: Synthetic oligonucleotide
cugaauccggcuacacacc

SEQ ID NO: 2139150 - RNA, 19 nt, Artificial Sequence
  Description of Artificial Sequence: Synthetic oligonucleotide
uaucgagcagucagcacau

SEQ ID NO: 2139151 - RNA, 19 nt, Artificial Sequence
  Description of Artificial Sequence: Synthetic oligonucleotide
aaggacguggugcgcuuug

SEQ ID NO: 2139152 - RNA, 19 nt, Artificial Sequence
  Description of Artificial Sequence: Synthetic oligonucleotide
caagaccgccucaucgugg

SEQ ID NO: 2139153 - RNA, 19 nt, Artificial Sequence
  Description of Artificial Sequence: Synthetic oligonucleotide
ugauaaggcccaagcugca

SEQ ID NO: 2139154 - RNA, 19 nt, Artificial Sequence
  Description of Artificial Sequence: Synthetic oligonucleotide
aggguaucgagcagucagc

SEQ ID NO: 2139155 - RNA, 19 nt, Artificial Sequence
  Description of Artificial Sequence: Synthetic oligonucleotide
gaugcacucuccuggggca

SEQ ID NO: 2139156 - RNA, 19 nt, Artificial Sequence
  Description of Artificial Sequence: Synthetic oligonucleotide
agcagucagcacauugccc

SEQ ID NO: 2139157 - RNA, 19 nt, Artificial Sequence
  Description of Artificial Sequence: Synthetic oligonucleotide
ucacaaggguaucgagcag

SEQ ID NO: 2139158 - RNA, 19 nt, Artificial Sequence
  Description of Artificial Sequence: Synthetic oligonucleotide
uccccuuaccaucuuccac

SEQ ID NO: 2139159 - RNA, 19 nt, Artificial Sequence
  Description of Artificial Sequence: Synthetic oligonucleotide
guuugcguccgccucgaug

SEQ ID NO: 2139160 - RNA, 19 nt, Artificial Sequence
  Description of Artificial Sequence: Synthetic oligonucleotide
aauauucaauuaggccacu

SEQ ID NO: 2139161 - RNA, 19 nt, Artificial Sequence
  Description of Artificial Sequence: Synthetic oligonucleotide
auuucucccucagagugca

SEQ ID NO: 2139162 - RNA, 19 nt, Artificial Sequence
  Description of Artificial Sequence: Synthetic oligonucleotide
uccugccuagggcagugcc

SEQ ID NO: 2139163 - RNA, 19 nt, Artificial Sequence
  Description of Artificial Sequence: Synthetic oligonucleotide
ggaguagauccucaguaac

SEQ ID NO: 2139164 - RNA, 19 nt, Artificial Sequence
  Description of Artificial Sequence: Synthetic oligonucleotide
gaagcccugggcuggcuug

SEQ ID NO: 2139165 - RNA, 19 nt, Artificial Sequence
  Description of Artificial Sequence: Synthetic oligonucleotide
uccugaaagcgcaggccca

SEQ ID NO: 2139166 - RNA, 19 nt, Artificial Sequence
  Description of Artificial Sequence: Synthetic oligonucleotide
ucuagccacaggacaggcu

SEQ ID NO: 2139167 - RNA, 19 nt, Artificial Sequence
  Description of Artificial Sequence: Synthetic oligonucleotide
cugguuugcguccgccucg

SEQ ID NO: 2139168 - RNA, 19 nt, Artificial Sequence
  Description of Artificial Sequence: Synthetic oligonucleotide
aggucacaaggguaucgag

SEQ ID NO: 2139169 - RNA, 19 nt, Artificial Sequence
  Description of Artificial Sequence: Synthetic oligonucleotide
cucgaugcaagaagcccug

SEQ ID NO: 2139170 - RNA, 19 nt, Artificial Sequence
  Description of Artificial Sequence: Synthetic oligonucleotide
gagagaugcugaauccggc

SEQ ID NO: 2139171 - RNA, 19 nt, Artificial Sequence
  Description of Artificial Sequence: Synthetic oligonucleotide
guggcuuaguccugccuag

SEQ ID NO: 2139172 - RNA, 19 nt, Artificial Sequence
  Description of Artificial Sequence: Synthetic oligonucleotide
gaaagcgcaggcccaacaa

SEQ ID NO: 2139173 - RNA, 19 nt, Artificial Sequence
  Description of Artificial Sequence: Synthetic oligonucleotide
caucaaacucuagccacag

SEQ ID NO: 2139174 - RNA, 19 nt, Artificial Sequence
  Description of Artificial Sequence: Synthetic oligonucleotide
aggcauucagcagaccuug

SEQ ID NO: 2139175 - RNA, 19 nt, Artificial Sequence
  Description of Artificial Sequence: Synthetic oligonucleotide
acaaggguaucgagcaguc

SEQ ID NO: 2139176 - RNA, 19 nt, Artificial Sequence
  Description of Artificial Sequence: Synthetic oligonucleotide
acuuguugacaggcaugcc

SEQ ID NO: 2139177 - RNA, 19 nt, Artificial Sequence
  Description of Artificial Sequence: Synthetic oligonucleotide
augucaggcauggcuuccc

SEQ ID NO: 2139178 - RNA, 19 nt, Artificial Sequence
  Description of Artificial Sequence: Synthetic oligonucleotide
ugccuccgcagcuuggggc

SEQ ID NO: 2139179 - RNA, 19 nt, Artificial Sequence
  Description of Artificial Sequence: Synthetic oligonucleotide
uuccuuuaccuggcgguag

SEQ ID NO: 2139180 - RNA, 19 nt, Artificial Sequence
  Description of Artificial Sequence: Synthetic oligonucleotide
aggccauggccucguuugc

SEQ ID NO: 2139181 - RNA, 19 nt, Artificial Sequence
  Description of Artificial Sequence: Synthetic oligonucleotide
cagcuuggggcgcugagug

SEQ ID NO: 2139182 - RNA, 19 nt, Artificial Sequence
  Description of Artificial Sequence: Synthetic oligonucleotide
acguggugcgcuuugguuu

SEQ ID NO: 2139183 - RNA, 19 nt, Artificial Sequence
  Description of Artificial Sequence: Synthetic oligonucleotide
ugaacagcacggcccuaga

SEQ ID NO: 2139184 - RNA, 19 nt, Artificial Sequence
  Description of Artificial Sequence: Synthetic oligonucleotide
aguaacuuguugacaggca

SEQ ID NO: 2139185 - RNA, 19 nt, Artificial Sequence
  Description of Artificial Sequence: Synthetic oligonucleotide
gaucuagggcacccagaug

SEQ ID NO: 2139186 - RNA, 19 nt, Artificial Sequence
  Description of Artificial Sequence: Synthetic oligonucleotide
ggugguggagaggagcugg

SEQ ID NO: 2139187 - RNA, 19 nt, Artificial Sequence
  Description of Artificial Sequence: Synthetic oligonucleotide
ugauccccuuaccaucuuc

SEQ ID NO: 2139188 - RNA, 19 nt, Artificial Sequence
  Description of Artificial Sequence: Synthetic oligonucleotide
gccucguuugcagaggugg

SEQ ID NO: 2139189 - RNA, 19 nt, Artificial Sequence
  Description of Artificial Sequence: Synthetic oligonucleotide
agggcacccagaugucagg

SEQ ID NO: 2139190 - RNA, 19 nt, Artificial Sequence
  Description of Artificial Sequence: Synthetic oligonucleotide
ucccaagacagcuccugaa

SEQ ID NO: 2139191 - RNA, 19 nt, Artificial Sequence
  Description of Artificial Sequence: Synthetic oligonucleotide
agugccuauucagucagau

SEQ ID NO: 2139192 - RNA, 19 nt, Artificial Sequence
  Description of Artificial Sequence: Synthetic oligonucleotide
ggcuuaguccugccuaggg

SEQ ID NO: 2139193 - RNA, 19 nt, Artificial Sequence
  Description of Artificial Sequence: Synthetic oligonucleotide
cugaacagcacggcccuag

SEQ ID NO: 2139194 - RNA, 19 nt, Artificial Sequence
  Description of Artificial Sequence: Synthetic oligonucleotide
acggcccuagacccacagc

SEQ ID NO: 2139195 - RNA, 19 nt, Artificial Sequence
  Description of Artificial Sequence: Synthetic oligonucleotide
cacacuacccugccuccgc

SEQ ID NO: 2139196 - RNA, 19 nt, Artificial Sequence
  Description of Artificial Sequence: Synthetic oligonucleotide
gagaugcugaauccggcua

SEQ ID NO: 2139197 - RNA, 19 nt, Artificial Sequence
  Description of Artificial Sequence: Synthetic oligonucleotide
gcagacccugaacagcacg

SEQ ID NO: 2139198 - RNA, 19 nt, Artificial Sequence
  Description of Artificial Sequence: Synthetic oligonucleotide
ucuuggacccucggccccg

SEQ ID NO: 2139199 - RNA, 19 nt, Artificial Sequence
  Description of Artificial Sequence: Synthetic oligonucleotide
ccaagacagcuccugaaag

SEQ ID NO: 2139200 - RNA, 19 nt, Artificial Sequence
  Description of Artificial Sequence: Synthetic oligonucleotide
gauaaggcccaagcugcac

SEQ ID NO: 2139201 - RNA, 19 nt, Artificial Sequence
  Description of Artificial Sequence: Synthetic oligonucleotide
ucuagggcacccagauguc

SEQ ID NO: 2139202 - RNA, 19 nt, Artificial Sequence
  Description of Artificial Sequence: Synthetic oligonucleotide
cucguuugcagaggugggc

SEQ ID NO: 2139203 - RNA, 19 nt, Artificial Sequence
  Description of Artificial Sequence: Synthetic oligonucleotide
cagcagacccugaacagca

SEQ ID NO: 2139204 - RNA, 19 nt, Artificial Sequence
  Description of Artificial Sequence: Synthetic oligonucleotide
gacccucggccccggaagg

SEQ ID NO: 2139205 - RNA, 19 nt, Artificial Sequence
  Description of Artificial Sequence: Synthetic oligonucleotide
cuauuguggcuuaguccug

SEQ ID NO: 2139206 - RNA, 19 nt, Artificial Sequence
  Description of Artificial Sequence: Synthetic oligonucleotide
ggacuauuguggcuuaguc

SEQ ID NO: 2139207 - RNA, 19 nt, Artificial Sequence
  Description of Artificial Sequence: Synthetic oligonucleotide
aaggcccaagcugcacacg

SEQ ID NO: 2139208 - RNA, 19 nt, Artificial Sequence
  Description of Artificial Sequence: Synthetic oligonucleotide
uuaccuggcgguaggcauu

SEQ ID NO: 2139209 - RNA, 19 nt, Artificial Sequence
  Description of Artificial Sequence: Synthetic oligonucleotide
caccaucaaacucuagcca

SEQ ID NO: 2139210 - RNA, 19 nt, Artificial Sequence
  Description of Artificial Sequence: Synthetic oligonucleotide
gcuuaguccugccuagggc

SEQ ID NO: 2139211 - RNA, 19 nt, Artificial Sequence
  Description of Artificial Sequence: Synthetic oligonucleotide
uggccucguuugcagaggu

SEQ ID NO: 2139212 - RNA, 19 nt, Artificial Sequence
  Description of Artificial Sequence: Synthetic oligonucleotide
acgguguagcugcccuggc

SEQ ID NO: 2139213 - RNA, 19 nt, Artificial Sequence
  Description of Artificial Sequence: Synthetic oligonucleotide
auagucaaugguggagaga

SEQ ID NO: 2139214 - RNA, 19 nt, Artificial Sequence
  Description of Artificial Sequence: Synthetic oligonucleotide
cuacacaccacacuacccu

SEQ ID NO: 2139215 - RNA, 19 nt, Artificial Sequence
  Description of Artificial Sequence: Synthetic oligonucleotide
uccucaggggaaguguggu

SEQ ID NO: 2139216 - RNA, 19 nt, Artificial Sequence
  Description of Artificial Sequence: Synthetic oligonucleotide
agcuuggggcgcugagugg

SEQ ID NO: 2139217 - RNA, 19 nt, Artificial Sequence
  Description of Artificial Sequence: Synthetic oligonucleotide
agcgcaggcccaacaacac

SEQ ID NO: 2139218 - RNA, 19 nt, Artificial Sequence
  Description of Artificial Sequence: Synthetic oligonucleotide
ucccugcugucgaugacau

SEQ ID NO: 2139219 - RNA, 19 nt, Artificial Sequence
  Description of Artificial Sequence: Synthetic oligonucleotide
caggcaugcccucacuguc

SEQ ID NO: 2139220 - RNA, 19 nt, Artificial Sequence
  Description of Artificial Sequence: Synthetic oligonucleotide
ucgaugcaagaagcccugg

SEQ ID NO: 2139221 - RNA, 19 nt, Artificial Sequence
  Description of Artificial Sequence: Synthetic oligonucleotide
ugggcuguaccacggugua

SEQ ID NO: 2139222 - RNA, 19 nt, Artificial Sequence
  Description of Artificial Sequence: Synthetic oligonucleotide
auccccuuaccaucuucca

SEQ ID NO: 2139223 - RNA, 19 nt, Artificial Sequence
  Description of Artificial Sequence: Synthetic oligonucleotide
cagaugcacucuccugggg

SEQ ID NO: 2139224 - RNA, 19 nt, Artificial Sequence
  Description of Artificial Sequence: Synthetic oligonucleotide
gcuuggaguagauccucag

SEQ ID NO: 2139225 - RNA, 19 nt, Artificial Sequence
  Description of Artificial Sequence: Synthetic oligonucleotide
ucacugguuugcguccgcc

SEQ ID NO: 2139226 - RNA, 19 nt, Artificial Sequence
  Description of Artificial Sequence: Synthetic oligonucleotide
ugacaggcaugcccucacu

SEQ ID NO: 2139227 - RNA, 19 nt, Artificial Sequence
  Description of Artificial Sequence: Synthetic oligonucleotide
gcccuuggcuuccucauag

SEQ ID NO: 2139228 - RNA, 19 nt, Artificial Sequence
  Description of Artificial Sequence: Synthetic oligonucleotide
caagcugcacacggcacac

SEQ ID NO: 2139229 - RNA, 19 nt, Artificial Sequence
  Description of Artificial Sequence: Synthetic oligonucleotide
auggccucguuugcagagg

SEQ ID NO: 2139230 - RNA, 19 nt, Artificial Sequence
  Description of Artificial Sequence: Synthetic oligonucleotide
gaugcugaauccggcuaca

SEQ ID NO: 2139231 - RNA, 19 nt, Artificial Sequence
  Description of Artificial Sequence: Synthetic oligonucleotide
aagcugcacacggcacacg

SEQ ID NO: 2139232 - RNA, 19 nt, Artificial Sequence
  Description of Artificial Sequence: Synthetic oligonucleotide
ccagaugcacucuccuggg

SEQ ID NO: 2139233 - RNA, 19 nt, Artificial Sequence
  Description of Artificial Sequence: Synthetic oligonucleotide
gucuuggacccucggcccc

SEQ ID NO: 2139234 - RNA, 19 nt, Artificial Sequence
  Description of Artificial Sequence: Synthetic oligonucleotide
cuagacccacagccucugg

SEQ ID NO: 2139235 - RNA, 19 nt, Artificial Sequence
  Description of Artificial Sequence: Synthetic oligonucleotide
gagcugccggcugaagaag

SEQ ID NO: 2139236 - RNA, 19 nt, Artificial Sequence
  Description of Artificial Sequence: Synthetic oligonucleotide
ucucccugcugucgaugac

SEQ ID NO: 2139237 - RNA, 19 nt, Artificial Sequence
  Description of Artificial Sequence: Synthetic oligonucleotide
cuguggcuuccuuuaccug

SEQ ID NO: 2139238 - RNA, 19 nt, Artificial Sequence
  Description of Artificial Sequence: Synthetic oligonucleotide
ugggacuauuguggcuuag

SEQ ID NO: 2139239 - RNA, 19 nt, Artificial Sequence
  Description of Artificial Sequence: Synthetic oligonucleotide
cacccagaugucaggcaug

SEQ ID NO: 2139240 - RNA, 19 nt, Artificial Sequence
  Description of Artificial Sequence: Synthetic oligonucleotide
gugccuauucagucagauc

SEQ ID NO: 2139241 - RNA, 19 nt, Artificial Sequence
  Description of Artificial Sequence: Synthetic oligonucleotide
caccuuccagacugauggc

SEQ ID NO: 2139242 - RNA, 19 nt, Artificial Sequence
  Description of Artificial Sequence: Synthetic oligonucleotide
ccuauucagucagaucuag

SEQ ID NO: 2139243 - RNA, 19 nt, Artificial Sequence
  Description of Artificial Sequence: Synthetic oligonucleotide
uuucucccucagagugcag

SEQ ID NO: 2139244 - RNA, 19 nt, Artificial Sequence
  Description of Artificial Sequence: Synthetic oligonucleotide
uguagcugcccuggcugga

SEQ ID NO: 2139245 - RNA, 19 nt, Artificial Sequence
  Description of Artificial Sequence: Synthetic oligonucleotide
gaccgccucaucguggauc

SEQ ID NO: 2139246 - RNA, 19 nt, Artificial Sequence
  Description of Artificial Sequence: Synthetic oligonucleotide
uugcucuccuggcccaguc

SEQ ID NO: 2139247 - RNA, 19 nt, Artificial Sequence
  Description of Artificial Sequence: Synthetic oligonucleotide
ugccuguggcuuccuuuac

SEQ ID NO: 2139248 - RNA, 19 nt, Artificial Sequence
  Description of Artificial Sequence: Synthetic oligonucleotide
acacuacccugccuccgca

SEQ ID NO: 2139249 - RNA, 19 nt, Artificial Sequence
  Description of Artificial Sequence: Synthetic oligonucleotide
aggacguggugcgcuuugg

SEQ ID NO: 2139250 - RNA, 19 nt, Artificial Sequence
  Description of Artificial Sequence: Synthetic oligonucleotide
gcaagaccgccucaucgug

SEQ ID NO: 2139251 - RNA, 19 nt, Artificial Sequence
  Description of Artificial Sequence: Synthetic oligonucleotide
cacuacccugccuccgcag

SEQ ID NO: 2139252 - RNA, 19 nt, Artificial Sequence
  Description of Artificial Sequence: Synthetic oligonucleotide
cccggaaggcagcaaagag

SEQ ID NO: 2139253 - RNA, 19 nt, Artificial Sequence
  Description of Artificial Sequence: Synthetic oligonucleotide
ggcgcugaguggguggugg

SEQ ID NO: 2139254 - RNA, 19 nt, Artificial Sequence
  Description of Artificial Sequence: Synthetic oligonucleotide
agaaggacguggugcgcuu

SEQ ID NO: 2139255 - RNA, 19 nt, Artificial Sequence
  Description of Artificial Sequence: Synthetic oligonucleotide
uggacccucggccccggaa

SEQ ID NO: 2139256 - RNA, 19 nt, Artificial Sequence
  Description of Artificial Sequence: Synthetic oligonucleotide
gguaucgagcagucagcac

SEQ ID NO: 2139257 - RNA, 19 nt, Artificial Sequence
  Description of Artificial Sequence: Synthetic oligonucleotide
cucuugauccccuuaccau

SEQ ID NO: 2139258 - RNA, 19 nt, Artificial Sequence
  Description of Artificial Sequence: Synthetic oligonucleotide
guagcugcccuggcuggag

SEQ ID NO: 2139259 - RNA, 19 nt, Artificial Sequence
  Description of Artificial Sequence: Synthetic oligonucleotide
cacggcccuagacccacag

SEQ ID NO: 2139260 - RNA, 19 nt, Artificial Sequence
  Description of Artificial Sequence: Synthetic oligonucleotide
gccucgaugcaagaagccc

SEQ ID NO: 2139261 - RNA, 19 nt, Artificial Sequence
  Description of Artificial Sequence: Synthetic oligonucleotide
ccucguuugcagagguggg

SEQ ID NO: 2139262 - RNA, 19 nt, Artificial Sequence
  Description of Artificial Sequence: Synthetic oligonucleotide
cuuuaccuggcgguaggca

SEQ ID NO: 2139263 - RNA, 19 nt, Artificial Sequence
  Description of Artificial Sequence: Synthetic oligonucleotide
auccggcuacacaccacac

SEQ ID NO: 2139264 - RNA, 19 nt, Artificial Sequence
  Description of Artificial Sequence: Synthetic oligonucleotide
ccucugggacuauuguggc

SEQ ID NO: 2139265 - RNA, 19 nt, Artificial Sequence
  Description of Artificial Sequence: Synthetic oligonucleotide
cucagagugcaggcagcag

SEQ ID NO: 2139266 - RNA, 19 nt, Artificial Sequence
  Description of Artificial Sequence: Synthetic oligonucleotide
agcagacccugaacagcac

SEQ ID NO: 2139267 - RNA, 19 nt, Artificial Sequence
  Description of Artificial Sequence: Synthetic oligonucleotide
cuuccacauagucaauggu

SEQ ID NO: 2139268 - RNA, 19 nt, Artificial Sequence
  Description of Artificial Sequence: Synthetic oligonucleotide
ccagucuuggacccucggc

SEQ ID NO: 2139269 - RNA, 19 nt, Artificial Sequence
  Description of Artificial Sequence: Synthetic oligonucleotide
ggaggaaggaguccaauuu

SEQ ID NO: 2139270 - RNA, 19 nt, Artificial Sequence
  Description of Artificial Sequence: Synthetic oligonucleotide
gucccaagacagcuccuga

SEQ ID NO: 2139271 - RNA, 19 nt, Artificial Sequence
  Description of Artificial Sequence: Synthetic oligonucleotide
aggcugucgucagugggcu

SEQ ID NO: 2139272 - RNA, 19 nt, Artificial Sequence
  Description of Artificial Sequence: Synthetic oligonucleotide
cuguaccacgguguagcug

SEQ ID NO: 2139273 - RNA, 19 nt, Artificial Sequence
  Description of Artificial Sequence: Synthetic oligonucleotide
ggucacugguuugcguccg

SEQ ID NO: 2139274 - RNA, 19 nt, Artificial Sequence
  Description of Artificial Sequence: Synthetic oligonucleotide
ugguuugcguccgccucga

SEQ ID NO: 2139275 - RNA, 19 nt, Artificial Sequence
  Description of Artificial Sequence: Synthetic oligonucleotide
ccgccucgaugcaagaagc

SEQ ID NO: 2139276 - RNA, 19 nt, Artificial Sequence
  Description of Artificial Sequence: Synthetic oligonucleotide
gggaaguguggucccaaga

SEQ ID NO: 2139277 - RNA, 19 nt, Artificial Sequence
  Description of Artificial Sequence: Synthetic oligonucleotide
cugggagcuuccugagguc

SEQ ID NO: 2139278 - RNA, 19 nt, Artificial Sequence
  Description of Artificial Sequence: Synthetic oligonucleotide
ccaggucacaaggguaucg

SEQ ID NO: 2139279 - RNA, 19 nt, Artificial Sequence
  Description of Artificial Sequence: Synthetic oligonucleotide
gggcagugccuauucaguc

SEQ ID NO: 2139280 - RNA, 19 nt, Artificial Sequence
  Description of Artificial Sequence: Synthetic oligonucleotide
cagcacauugcccuuggcu

SEQ ID NO: 2139281 - RNA, 19 nt, Artificial Sequence
  Description of Artificial Sequence: Synthetic oligonucleotide
gucacugguuugcguccgc

SEQ ID NO: 2139282 - RNA, 19 nt, Artificial Sequence
  Description of Artificial Sequence: Synthetic oligonucleotide
agccugcuuggaguagauc

SEQ ID NO: 2139283 - RNA, 19 nt, Artificial Sequence
  Description of Artificial Sequence: Synthetic oligonucleotide
gcuccugaaagcgcaggcc

SEQ ID NO: 2139284 - RNA, 19 nt, Artificial Sequence
  Description of Artificial Sequence: Synthetic oligonucleotide
cuccaggucacaaggguau

SEQ ID NO: 2139285 - RNA, 19 nt, Artificial Sequence
  Description of Artificial Sequence: Synthetic oligonucleotide
cugccuguggcuuccuuua

SEQ ID NO: 2139286 - RNA, 19 nt, Artificial Sequence
  Description of Artificial Sequence: Synthetic oligonucleotide
gcugucgaugacaugcaca

SEQ ID NO: 2139287 - RNA, 19 nt, Artificial Sequence
  Description of Artificial Sequence: Synthetic oligonucleotide
cacaugcuucucccugcug

SEQ ID NO: 2139288 - RNA, 19 nt, Artificial Sequence
  Description of Artificial Sequence: Synthetic oligonucleotide
ggggaaguguggucccaag

SEQ ID NO: 2139289 - RNA, 19 nt, Artificial Sequence
  Description of Artificial Sequence: Synthetic oligonucleotide
cuagggcagugccuauuca

SEQ ID NO: 2139290 - RNA, 19 nt, Artificial Sequence
  Description of Artificial Sequence: Synthetic oligonucleotide
ugcccuuggcuuccucaua

SEQ ID NO: 2139291 - RNA, 19 nt, Artificial Sequence
  Description of Artificial Sequence: Synthetic oligonucleotide
uccaggucacaaggguauc

SEQ ID NO: 2139292 - RNA, 19 nt, Artificial Sequence
  Description of Artificial Sequence: Synthetic oligonucleotide
cugccggcugaagaaggac

SEQ ID NO: 2139293 - RNA, 19 nt, Artificial Sequence
  Description of Artificial Sequence: Synthetic oligonucleotide
uugcguccgccucgaugca

SEQ ID NO: 2139294 - RNA, 19 nt, Artificial Sequence
  Description of Artificial Sequence: Synthetic oligonucleotide
ccuggcucagcucaaugca

SEQ ID NO: 2139295 - RNA, 19 nt, Artificial Sequence
  Description of Artificial Sequence: Synthetic oligonucleotide
uugauccccuuaccaucuu

SEQ ID NO: 2139296 - RNA, 19 nt, Artificial Sequence
  Description of Artificial Sequence: Synthetic oligonucleotide
gacguggugcgcuuugguu

SEQ ID NO: 2139297 - RNA, 19 nt, Artificial Sequence
  Description of Artificial Sequence: Synthetic oligonucleotide
ccuagggcagugccuauuc

SEQ ID NO: 2139298 - RNA, 19 nt, Artificial Sequence
  Description of Artificial Sequence: Synthetic oligonucleotide
ccucuugauccccuuacca

SEQ ID NO: 2139299 - RNA, 19 nt, Artificial Sequence
  Description of Artificial Sequence: Synthetic oligonucleotide
uuggggcgcugagugggug

SEQ ID NO: 2139300 - RNA, 19 nt, Artificial Sequence
  Description of Artificial Sequence: Synthetic oligonucleotide
cucggccccggaaggcagc

SEQ ID NO: 2139301 - RNA, 19 nt, Artificial Sequence
  Description of Artificial Sequence: Synthetic oligonucleotide
aggcaugcccucacuguca

SEQ ID NO: 2139302 - RNA, 19 nt, Artificial Sequence
  Description of Artificial Sequence: Synthetic oligonucleotide
cucagcucaaugcaauauu

SEQ ID NO: 2139303 - RNA, 19 nt, Artificial Sequence
  Description of Artificial Sequence: Synthetic oligonucleotide
ggcacacgagggcacccag

SEQ ID NO: 2139304 - RNA, 19 nt, Artificial Sequence
  Description of Artificial Sequence: Synthetic oligonucleotide
guguggucccaagacagcu

SEQ ID NO: 2139305 - RNA, 19 nt, Artificial Sequence
  Description of Artificial Sequence: Synthetic oligonucleotide
ggcccaacaacacaugcuu

SEQ ID NO: 2139306 - RNA, 19 nt, Artificial Sequence
  Description of Artificial Sequence: Synthetic oligonucleotide
ggguaucgagcagucagca

SEQ ID NO: 2139307 - RNA, 19 nt, Artificial Sequence
  Description of Artificial Sequence: Synthetic oligonucleotide
ggaguccaauuucucccuc

SEQ ID NO: 2139308 - RNA, 19 nt, Artificial Sequence
  Description of Artificial Sequence: Synthetic oligonucleotide
acgagggcacccagcaccu

SEQ ID NO: 2139309 - RNA, 19 nt, Artificial Sequence
  Description of Artificial Sequence: Synthetic oligonucleotide
cugaaagcgcaggcccaac

SEQ ID NO: 2139310 - RNA, 19 nt, Artificial Sequence
  Description of Artificial Sequence: Synthetic oligonucleotide
auggccacggucacugguu

SEQ ID NO: 2139311 - RNA, 19 nt, Artificial Sequence
  Description of Artificial Sequence: Synthetic oligonucleotide
ucacccucuugauccccuu

SEQ ID NO: 2139312 - RNA, 19 nt, Artificial Sequence
  Description of Artificial Sequence: Synthetic oligonucleotide
gcccaagcugcacacggca

SEQ ID NO: 2139313 - RNA, 19 nt, Artificial Sequence
  Description of Artificial Sequence: Synthetic oligonucleotide
cccucuugauccccuuacc

SEQ ID NO: 2139314 - RNA, 19 nt, Artificial Sequence
  Description of Artificial Sequence: Synthetic oligonucleotide
cuuccuuuaccuggcggua

SEQ ID NO: 2139315 - RNA, 19 nt, Artificial Sequence
  Description of Artificial Sequence: Synthetic oligonucleotide
ccggcuacacaccacacua

SEQ ID NO: 2139316 - RNA, 19 nt, Artificial Sequence
  Description of Artificial Sequence: Synthetic oligonucleotide
cuuggacccucggccccgg

SEQ ID NO: 2139317 - RNA, 19 nt, Artificial Sequence
  Description of Artificial Sequence: Synthetic oligonucleotide
agccgcaagaccgccucau

SEQ ID NO: 2139318 - RNA, 19 nt, Artificial Sequence
  Description of Artificial Sequence: Synthetic oligonucleotide
gugggcuguaccacggugu

SEQ ID NO: 2139319 - RNA, 19 nt, Artificial Sequence
  Description of Artificial Sequence: Synthetic oligonucleotide
cugccuagggcagugccua

SEQ ID NO: 2139320 - RNA, 19 nt, Artificial Sequence
  Description of Artificial Sequence: Synthetic oligonucleotide
gguccagaugcacucuccu

SEQ ID NO: 2139321 - RNA, 19 nt, Artificial Sequence
  Description of Artificial Sequence: Synthetic oligonucleotide
ugcguccgccucgaugcaa

SEQ ID NO: 2139322 - RNA, 19 nt, Artificial Sequence
  Description of Artificial Sequence: Synthetic oligonucleotide
ccacauagucaauggugga

SEQ ID NO: 2139323 - RNA, 19 nt, Artificial Sequence
  Description of Artificial Sequence: Synthetic oligonucleotide
caaggguaucgagcaguca

SEQ ID NO: 2139324 - RNA, 19 nt, Artificial Sequence
  Description of Artificial Sequence: Synthetic oligonucleotide
ccucgaugcaagaagcccu

SEQ ID NO: 2139325 - RNA, 19 nt, Artificial Sequence
  Description of Artificial Sequence: Synthetic oligonucleotide
cguggugcgcuuugguuuc

SEQ ID NO: 2139326 - RNA, 19 nt, Artificial Sequence
  Description of Artificial Sequence: Synthetic oligonucleotide
cggucacugguuugcgucc

SEQ ID NO: 2139327 - RNA, 19 nt, Artificial Sequence
  Description of Artificial Sequence: Synthetic oligonucleotide
ugccuagggcagugccuau

SEQ ID NO: 2139328 - RNA, 19 nt, Artificial Sequence
  Description of Artificial Sequence: Synthetic oligonucleotide
gcugcacacggcacacgag

SEQ ID NO: 2139329 - RNA, 19 nt, Artificial Sequence
  Description of Artificial Sequence: Synthetic oligonucleotide
guaccacgguguagcugcc

SEQ ID NO: 2139330 - RNA, 19 nt, Artificial Sequence
  Description of Artificial Sequence: Synthetic oligonucleotide
cccaagacagcuccugaaa

SEQ ID NO: 2139331 - RNA, 19 nt, Artificial Sequence
  Description of Artificial Sequence: Synthetic oligonucleotide
cccagucuuggacccucgg

SEQ ID NO: 2139332 - RNA, 19 nt, Artificial Sequence
  Description of Artificial Sequence: Synthetic oligonucleotide
caugcacaccuuccagacu

SEQ ID NO: 2139333 - RNA, 19 nt, Artificial Sequence
  Description of Artificial Sequence: Synthetic oligonucleotide
gcaggggaggaaggagucc

SEQ ID NO: 2139334 - RNA, 19 nt, Artificial Sequence
  Description of Artificial Sequence: Synthetic oligonucleotide
ccuuuaccuggcgguaggc

SEQ ID NO: 2139335 - RNA, 19 nt, Artificial Sequence
  Description of Artificial Sequence: Synthetic oligonucleotide
uuggacccucggccccgga

SEQ ID NO: 2139336 - RNA, 19 nt, Artificial Sequence
  Description of Artificial Sequence: Synthetic oligonucleotide
cugggcuggcuuguccuca

SEQ ID NO: 2139337 - RNA, 19 nt, Artificial Sequence
  Description of Artificial Sequence: Synthetic oligonucleotide
gcguccgccucgaugcaag

SEQ ID NO: 2139338 - RNA, 19 nt, Artificial Sequence
  Description of Artificial Sequence: Synthetic oligonucleotide
ccaauuucucccucagagu

SEQ ID NO: 2139339 - RNA, 19 nt, Artificial Sequence
  Description of Artificial Sequence: Synthetic oligonucleotide
ggccacggucacugguuug

SEQ ID NO: 2139340 - RNA, 19 nt, Artificial Sequence
  Description of Artificial Sequence: Synthetic oligonucleotide
cucccucagagugcaggca

SEQ ID NO: 2139341 - RNA, 19 nt, Artificial Sequence
  Description of Artificial Sequence: Synthetic oligonucleotide
cacugguuugcguccgccu

SEQ ID NO: 2139342 - RNA, 19 nt, Artificial Sequence
  Description of Artificial Sequence: Synthetic oligonucleotide
ccacacuacccugccuccg

SEQ ID NO: 2139343 - RNA, 19 nt, Artificial Sequence
  Description of Artificial Sequence: Synthetic oligonucleotide
cgccucgaugcaagaagcc

SEQ ID NO: 2139344 - RNA, 19 nt, Artificial Sequence
  Description of Artificial Sequence: Synthetic oligonucleotide
ccucaggggaagugugguc

SEQ ID NO: 2139345 - RNA, 19 nt, Artificial Sequence
  Description of Artificial Sequence: Synthetic oligonucleotide
cagugccuauucagucaga

SEQ ID NO: 2139346 - RNA, 19 nt, Artificial Sequence
  Description of Artificial Sequence: Synthetic oligonucleotide
ccuagacccacagccucug

SEQ ID NO: 2139347 - RNA, 19 nt, Artificial Sequence
  Description of Artificial Sequence: Synthetic oligonucleotide
aggcagcaaagaggccaug

SEQ ID NO: 2139348 - RNA, 19 nt, Artificial Sequence
  Description of Artificial Sequence: Synthetic oligonucleotide
ccucaguaacuuguugaca

SEQ ID NO: 2139349 - RNA, 19 nt, Artificial Sequence
  Description of Artificial Sequence: Synthetic oligonucleotide
ggccccggaaggcagcaaa

SEQ ID NO: 2139350 - RNA, 19 nt, Artificial Sequence
  Description of Artificial Sequence: Synthetic oligonucleotide
agaccgccucaucguggau

SEQ ID NO: 2139351 - RNA, 19 nt, Artificial Sequence
  Description of Artificial Sequence: Synthetic oligonucleotide
gcugucgucagugggcugu

SEQ ID NO: 2139352 - RNA, 19 nt, Artificial Sequence
  Description of Artificial Sequence: Synthetic oligonucleotide
ggcccaagcugcacacggc

SEQ ID NO: 2139353 - RNA, 19 nt, Artificial Sequence
  Description of Artificial Sequence: Synthetic oligonucleotide
ggcugaagaaggacguggu

SEQ ID NO: 2139354 - RNA, 19 nt, Artificial Sequence
  Description of Artificial Sequence: Synthetic oligonucleotide
gggcuguaccacgguguag

SEQ ID NO: 2139355 - RNA, 19 nt, Artificial Sequence
  Description of Artificial Sequence: Synthetic oligonucleotide
gcgcaggcccaacaacaca

SEQ ID NO: 2139356 - RNA, 19 nt, Artificial Sequence
  Description of Artificial Sequence: Synthetic oligonucleotide
ccacggucacugguuugcg

SEQ ID NO: 2139357 - RNA, 19 nt, Artificial Sequence
  Description of Artificial Sequence: Synthetic oligonucleotide
guccugccuagggcagugc

SEQ ID NO: 2139358 - RNA, 19 nt, Artificial Sequence
  Description of Artificial Sequence: Synthetic oligonucleotide
gggacuauuguggcuuagu

SEQ ID NO: 2139359 - RNA, 19 nt, Artificial Sequence
  Description of Artificial Sequence: Synthetic oligonucleotide
guccgccucgaugcaagaa

SEQ ID NO: 2139360 - RNA, 19 nt, Artificial Sequence
  Description of Artificial Sequence: Synthetic oligonucleotide
cacccucuugauccccuua

SEQ ID NO: 2139361 - RNA, 19 nt, Artificial Sequence
  Description of Artificial Sequence: Synthetic oligonucleotide
cggcuacacaccacacuac

SEQ ID NO: 2139362 - RNA, 19 nt, Artificial Sequence
  Description of Artificial Sequence: Synthetic oligonucleotide
gcugccggcugaagaagga

SEQ ID NO: 2139363 - RNA, 19 nt, Artificial Sequence
  Description of Artificial Sequence: Synthetic oligonucleotide
gccuauucagucagaucua

SEQ ID NO: 2139364 - RNA, 19 nt, Artificial Sequence
  Description of Artificial Sequence: Synthetic oligonucleotide
ggcugucgucagugggcug

SEQ ID NO: 2139365 - RNA, 19 nt, Artificial Sequence
  Description of Artificial Sequence: Synthetic oligonucleotide
cuuggggcgcugagugggu

SEQ ID NO: 2139366 - RNA, 19 nt, Artificial Sequence
  Description of Artificial Sequence: Synthetic oligonucleotide
gccgcaagaccgccucauc

SEQ ID NO: 2139367 - RNA, 19 nt, Artificial Sequence
  Description of Artificial Sequence: Synthetic oligonucleotide
ggacguggugcgcuuuggu

SEQ ID NO: 2139368 - RNA, 19 nt, Artificial Sequence
  Description of Artificial Sequence: Synthetic oligonucleotide
ccucagagugcaggcagca

SEQ ID NO: 2139369 - RNA, 19 nt, Artificial Sequence
  Description of Artificial Sequence: Synthetic oligonucleotide
ggccucguuugcagaggug

SEQ ID NO: 2139370 - RNA, 19 nt, Artificial Sequence
  Description of Artificial Sequence: Synthetic oligonucleotide
aucgagcagucagcacauu

SEQ ID NO: 2139371 - RNA, 19 nt, Artificial Sequence
  Description of Artificial Sequence: Synthetic oligonucleotide
gaaggacguggugcgcuuu

SEQ ID NO: 2139372 - RNA, 19 nt, Artificial Sequence
  Description of Artificial Sequence: Synthetic oligonucleotide
cagccgcaagaccgccuca

SEQ ID NO: 2139373 - RNA, 19 nt, Artificial Sequence
  Description of Artificial Sequence: Synthetic oligonucleotide
guggugcgcuuugguuuca

SEQ ID NO: 2139374 - RNA, 19 nt, Artificial Sequence
  Description of Artificial Sequence: Synthetic oligonucleotide
cgcagcuuggggcgcugag

SEQ ID NO: 2139375 - RNA, 19 nt, Artificial Sequence
  Description of Artificial Sequence: Synthetic oligonucleotide
cagucagcacauugcccuu

SEQ ID NO: 2139376 - RNA, 19 nt, Artificial Sequence
  Description of Artificial Sequence: Synthetic oligonucleotide
ccugaaagcgcaggcccaa

SEQ ID NO: 2139377 - RNA, 19 nt, Artificial Sequence
  Description of Artificial Sequence: Synthetic oligonucleotide
cgcaggcccaacaacacau

SEQ ID NO: 2139378 - RNA, 19 nt, Artificial Sequence
  Description of Artificial Sequence: Synthetic oligonucleotide
cgcaagaccgccucaucgu

SEQ ID NO: 2139379 - RNA, 19 nt, Artificial Sequence
  Description of Artificial Sequence: Synthetic oligonucleotide
cccugaacagcacggcccu

SEQ ID NO: 2139380 - RNA, 19 nt, Artificial Sequence
  Description of Artificial Sequence: Synthetic oligonucleotide
gcagcuuggggcgcugagu

SEQ ID NO: 2139381 - RNA, 19 nt, Artificial Sequence
  Description of Artificial Sequence: Synthetic oligonucleotide
ggcccuagacccacagccu

SEQ ID NO: 2139382 - RNA, 19 nt, Artificial Sequence
  Description of Artificial Sequence: Synthetic oligonucleotide
ccccggaaggcagcaaaga

SEQ ID NO: 2139383 - RNA, 19 nt, Artificial Sequence
  Description of Artificial Sequence: Synthetic oligonucleotide
cccuagacccacagccucu

SEQ ID NO: 2139384 - RNA, 19 nt, Artificial Sequence
  Description of Artificial Sequence: Synthetic oligonucleotide
ccucaugcucacugucacu

SEQ ID NO: 2139385 - RNA, 19 nt, Artificial Sequence
  Description of Artificial Sequence: Synthetic oligonucleotide
cacagccucugggacuauu

SEQ ID NO: 2139386 - RNA, 19 nt, Artificial Sequence
  Description of Artificial Sequence: Synthetic oligonucleotide
cacugccuguggcuuccuu

SEQ ID NO: 2139387 - RNA, 19 nt, Artificial Sequence
  Description of Artificial Sequence: Synthetic oligonucleotide
gcacaccuuccagacugau

SEQ ID NO: 2139388 - RNA, 19 nt, Artificial Sequence
  Description of Artificial Sequence: Synthetic oligonucleotide
cacucuccuggggcagagu

SEQ ID NO: 2139389 - RNA, 19 nt, Artificial Sequence
  Description of Artificial Sequence: Synthetic oligonucleotide
cguccgccucgaugcaaga

SEQ ID NO: 2139390 - RNA, 19 nt, Artificial Sequence
  Description of Artificial Sequence: Synthetic oligonucleotide
cgguguagcugcccuggcu

SEQ ID NO: 2139391 - RNA, 19 nt, Artificial Sequence
  Description of Artificial Sequence: Synthetic oligonucleotide
gccuagggcagugccuauu

SEQ ID NO: 2139392 - RNA, 19 nt, Artificial Sequence
  Description of Artificial Sequence: Synthetic oligonucleotide
gguuugcguccgccucgau

SEQ ID NO: 2139393 - RNA, 19 nt, Artificial Sequence
  Description of Artificial Sequence: Synthetic oligonucleotide
ccugaacagcacggcccua

SEQ ID NO: 2139394 - RNA, 19 nt, Artificial Sequence
  Description of Artificial Sequence: Synthetic oligonucleotide
ccgcagcuuggggcgcuga

SEQ ID NO: 2139395 - RNA, 19 nt, Artificial Sequence
  Description of Artificial Sequence: Synthetic oligonucleotide
auaaauccaagauagagcc

SEQ ID NO: 2139396 - RNA, 19 nt, Artificial Sequence
  Description of Artificial Sequence: Synthetic oligonucleotide
aaaggcauaauacaagagg

SEQ ID NO: 2139397 - RNA, 19 nt, Artificial Sequence
  Description of Artificial Sequence: Synthetic oligonucleotide
aauaucgacagccauuggc

SEQ ID NO: 2139398 - RNA, 19 nt, Artificial Sequence
  Description of Artificial Sequence: Synthetic oligonucleotide
aauaauagggucuucccac

SEQ ID NO: 2139399 - RNA, 19 nt, Artificial Sequence
  Description of Artificial Sequence: Synthetic oligonucleotide
aacacgaugguguauagcg

SEQ ID NO: 2139400 - RNA, 19 nt, Artificial Sequence
  Description of Artificial Sequence: Synthetic oligonucleotide
aauacaagaggccuccacc

SEQ ID NO: 2139401 - RNA, 19 nt, Artificial Sequence
  Description of Artificial Sequence: Synthetic oligonucleotide
aacaagaggaagcaucgcc

SEQ ID NO: 2139402 - RNA, 19 nt, Artificial Sequence
  Description of Artificial Sequence: Synthetic oligonucleotide
gauagagccagucauaaag

SEQ ID NO: 2139403 - RNA, 19 nt, Artificial Sequence
  Description of Artificial Sequence: Synthetic oligonucleotide
aacacuaauauaauguagg

SEQ ID NO: 2139404 - RNA, 19 nt, Artificial Sequence
  Description of Artificial Sequence: Synthetic oligonucleotide
auagauuucauuugagccg

SEQ ID NO: 2139405 - RNA, 19 nt, Artificial Sequence
  Description of Artificial Sequence: Synthetic oligonucleotide
cauagauuucauuugagcc

SEQ ID NO: 2139406 - RNA, 19 nt, Artificial Sequence
  Description of Artificial Sequence: Synthetic oligonucleotide
uauaauguagggaaaggca

SEQ ID NO: 2139407 - RNA, 19 nt, Artificial Sequence
  Description of Artificial Sequence: Synthetic oligonucleotide
gaagcaucgccauaaaucc

SEQ ID NO: 2139408 - RNA, 19 nt, Artificial Sequence
  Description of Artificial Sequence: Synthetic oligonucleotide
aauacaguccaaggcaugc

SEQ ID NO: 2139409 - RNA, 19 nt, Artificial Sequence
  Description of Artificial Sequence: Synthetic oligonucleotide
aauccgaaagcaucaguac

SEQ ID NO: 2139410 - RNA, 19 nt, Artificial Sequence
  Description of Artificial Sequence: Synthetic oligonucleotide
aaauccaagauagagccag

SEQ ID NO: 2139411 - RNA, 19 nt, Artificial Sequence
  Description of Artificial Sequence: Synthetic oligonucleotide
uuuugaaccgcucagacuu

SEQ ID NO: 2139412 - RNA, 19 nt, Artificial Sequence
  Description of Artificial Sequence: Synthetic oligonucleotide
acaaguagaacagagcugg

SEQ ID NO: 2139413 - RNA, 19 nt, Artificial Sequence
  Description of Artificial Sequence: Synthetic oligonucleotide
aauauaauguagggaaagg

SEQ ID NO: 2139414 - RNA, 19 nt, Artificial Sequence
  Description of Artificial Sequence: Synthetic oligonucleotide
cauaaauccaagauagagc

SEQ ID NO: 2139415 - RNA, 19 nt, Artificial Sequence
  Description of Artificial Sequence: Synthetic oligonucleotide
ucguguaccaauccgaaag

SEQ ID NO: 2139416 - RNA, 19 nt, Artificial Sequence
  Description of Artificial Sequence: Synthetic oligonucleotide
auauaauguagggaaaggc

SEQ ID NO: 2139417 - RNA, 19 nt, Artificial Sequence
  Description of Artificial Sequence: Synthetic oligonucleotide
aaauuuugcagugaacaag

SEQ ID NO: 2139418 - RNA, 19 nt, Artificial Sequence
  Description of Artificial Sequence: Synthetic oligonucleotide
aggcguaauaaacaaacac

SEQ ID NO: 2139419 - RNA, 19 nt, Artificial Sequence
  Description of Artificial Sequence: Synthetic oligonucleotide
uuaaauaauagggucuucc

SEQ ID NO: 2139420 - RNA, 19 nt, Artificial Sequence
  Description of Artificial Sequence: Synthetic oligonucleotide
uuuugcagugaacaaguag

SEQ ID NO: 2139421 - RNA, 19 nt, Artificial Sequence
  Description of Artificial Sequence: Synthetic oligonucleotide
ucacucaccagcaagguga

SEQ ID NO: 2139422 - RNA, 19 nt, Artificial Sequence
  Description of Artificial Sequence: Synthetic oligonucleotide
cuagguucuccaaagaagc

SEQ ID NO: 2139423 - RNA, 19 nt, Artificial Sequence
  Description of Artificial Sequence: Synthetic oligonucleotide
uuauauucaguguccauug

SEQ ID NO: 2139424 - RNA, 19 nt, Artificial Sequence
  Description of Artificial Sequence: Synthetic oligonucleotide
gaugggaaagaaguaaagg

SEQ ID NO: 2139425 - RNA, 19 nt, Artificial Sequence
  Description of Artificial Sequence: Synthetic oligonucleotide
aaagcaucaguacucggca

SEQ ID NO: 2139426 - RNA, 19 nt, Artificial Sequence
  Description of Artificial Sequence: Synthetic oligonucleotide
acacuaauauaauguaggg

SEQ ID NO: 2139427 - RNA, 19 nt, Artificial Sequence
  Description of Artificial Sequence: Synthetic oligonucleotide
acggauguaaaggacaccc

SEQ ID NO: 2139428 - RNA, 19 nt, Artificial Sequence
  Description of Artificial Sequence: Synthetic oligonucleotide
uucugaagcagacauguac

SEQ ID NO: 2139429 - RNA, 19 nt, Artificial Sequence
  Description of Artificial Sequence: Synthetic oligonucleotide
uucaguaaauuuugcagug

SEQ ID NO: 2139430 - RNA, 19 nt, Artificial Sequence
  Description of Artificial Sequence: Synthetic oligonucleotide
ugaacaaguagaacagagc

SEQ ID NO: 2139431 - RNA, 19 nt, Artificial Sequence
  Description of Artificial Sequence: Synthetic oligonucleotide
ucaguacucggcaggaacg

SEQ ID NO: 2139432 - RNA, 19 nt, Artificial Sequence
  Description of Artificial Sequence: Synthetic oligonucleotide
ugugguaacguaaucugga

SEQ ID NO: 2139433 - RNA, 19 nt, Artificial Sequence
  Description of Artificial Sequence: Synthetic oligonucleotide
auaucgacagccauuggcc

SEQ ID NO: 2139434 - RNA, 19 nt, Artificial Sequence
  Description of Artificial Sequence: Synthetic oligonucleotide
guaaauuuugcagugaaca

SEQ ID NO: 2139435 - RNA, 19 nt, Artificial Sequence
  Description of Artificial Sequence: Synthetic oligonucleotide
ugaauaucgacagccauug

SEQ ID NO: 2139436 - RNA, 19 nt, Artificial Sequence
  Description of Artificial Sequence: Synthetic oligonucleotide
ugguguagguaccaaagcc

SEQ ID NO: 2139437 - RNA, 19 nt, Artificial Sequence
  Description of Artificial Sequence: Synthetic oligonucleotide
auucaguguccauuggccc

SEQ ID NO: 2139438 - RNA, 19 nt, Artificial Sequence
  Description of Artificial Sequence: Synthetic oligonucleotide
gaaggcguaauaaacaaac

SEQ ID NO: 2139439 - RNA, 19 nt, Artificial Sequence
  Description of Artificial Sequence: Synthetic oligonucleotide
aguagaacagagcuggugu

SEQ ID NO: 2139440 - RNA, 19 nt, Artificial Sequence
  Description of Artificial Sequence: Synthetic oligonucleotide
guguauagcggguagacug

SEQ ID NO: 2139441 - RNA, 19 nt, Artificial Sequence
  Description of Artificial Sequence: Synthetic oligonucleotide
gguucaguaaauuuugcag

SEQ ID NO: 2139442 - RNA, 19 nt, Artificial Sequence
  Description of Artificial Sequence: Synthetic oligonucleotide
uuguaaagcaucguguacc

SEQ ID NO: 2139443 - RNA, 19 nt, Artificial Sequence
  Description of Artificial Sequence: Synthetic oligonucleotide
aaggacacccacuggauca

SEQ ID NO: 2139444 - RNA, 19 nt, Artificial Sequence
  Description of Artificial Sequence: Synthetic oligonucleotide
ucaaacagugcagugaugu

SEQ ID NO: 2139445 - RNA, 19 nt, Artificial Sequence
  Description of Artificial Sequence: Synthetic oligonucleotide
cauagaugcuuuugaaccg

SEQ ID NO: 2139446 - RNA, 19 nt, Artificial Sequence
  Description of Artificial Sequence: Synthetic oligonucleotide
gaaguaaagggcagcauag

SEQ ID NO: 2139447 - RNA, 19 nt, Artificial Sequence
  Description of Artificial Sequence: Synthetic oligonucleotide
auaggcauggagcagccag

SEQ ID NO: 2139448 - RNA, 19 nt, Artificial Sequence
  Description of Artificial Sequence: Synthetic oligonucleotide
gcauagaugcuuuugaacc

SEQ ID NO: 2139449 - RNA, 19 nt, Artificial Sequence
  Description of Artificial Sequence: Synthetic oligonucleotide
ugguugaauaucgacagcc

SEQ ID NO: 2139450 - RNA, 19 nt, Artificial Sequence
  Description of Artificial Sequence: Synthetic oligonucleotide
uauauucaguguccauugg

SEQ ID NO: 2139451 - RNA, 19 nt, Artificial Sequence
  Description of Artificial Sequence: Synthetic oligonucleotide
uucucuauuucugaagcag

SEQ ID NO: 2139452 - RNA, 19 nt, Artificial Sequence
  Description of Artificial Sequence: Synthetic oligonucleotide
ugaugguucaguaaauuuu

SEQ ID NO: 2139453 - RNA, 19 nt, Artificial Sequence
  Description of Artificial Sequence: Synthetic oligonucleotide
uguaaaggacacccacugg

SEQ ID NO: 2139454 - RNA, 19 nt, Artificial Sequence
  Description of Artificial Sequence: Synthetic oligonucleotide
aagcaucguguaccaaucc

SEQ ID NO: 2139455 - RNA, 19 nt, Artificial Sequence
  Description of Artificial Sequence: Synthetic oligonucleotide
uuuugguauuuuauauuca

SEQ ID NO: 2139456 - RNA, 19 nt, Artificial Sequence
  Description of Artificial Sequence: Synthetic oligonucleotide
uguagaacaagaggaagca

SEQ ID NO: 2139457 - RNA, 19 nt, Artificial Sequence
  Description of Artificial Sequence: Synthetic oligonucleotide
acugugguaacguaaucug

SEQ ID NO: 2139458 - RNA, 19 nt, Artificial Sequence
  Description of Artificial Sequence: Synthetic oligonucleotide
uggagacuaucccauaggc

SEQ ID NO: 2139459 - RNA, 19 nt, Artificial Sequence
  Description of Artificial Sequence: Synthetic oligonucleotide
aaagaaguaaagggcagca

SEQ ID NO: 2139460 - RNA, 19 nt, Artificial Sequence
  Description of Artificial Sequence: Synthetic oligonucleotide
aguauuucugugcauuugu

SEQ ID NO: 2139461 - RNA, 19 nt, Artificial Sequence
  Description of Artificial Sequence: Synthetic oligonucleotide
gaaagcaucaguacucggc

SEQ ID NO: 2139462 - RNA, 19 nt, Artificial Sequence
  Description of Artificial Sequence: Synthetic oligonucleotide
uucaugagugcaaugcacu

SEQ ID NO: 2139463 - RNA, 19 nt, Artificial Sequence
  Description of Artificial Sequence: Synthetic oligonucleotide
aaagcaucguguaccaauc

SEQ ID NO: 2139464 - RNA, 19 nt, Artificial Sequence
  Description of Artificial Sequence: Synthetic oligonucleotide
acugcacucaaacagugca

SEQ ID NO: 2139465 - RNA, 19 nt, Artificial Sequence
  Description of Artificial Sequence: Synthetic oligonucleotide
uaccaaagccaaaagcggc

SEQ ID NO: 2139466 - RNA, 19 nt, Artificial Sequence
  Description of Artificial Sequence: Synthetic oligonucleotide
cugagaagcaucaucaaca

SEQ ID NO: 2139467 - RNA, 19 nt, Artificial Sequence
  Description of Artificial Sequence: Synthetic oligonucleotide
uaaagcaucguguaccaau

SEQ ID NO: 2139468 - RNA, 19 nt, Artificial Sequence
  Description of Artificial Sequence: Synthetic oligonucleotide
cacuggaucacucaccagc

SEQ ID NO: 2139469 - RNA, 19 nt, Artificial Sequence
  Description of Artificial Sequence: Synthetic oligonucleotide
auagaugcuuuugaaccgc

SEQ ID NO: 2139470 - RNA, 19 nt, Artificial Sequence
  Description of Artificial Sequence: Synthetic oligonucleotide
uccgugaugguucaguaaa

SEQ ID NO: 2139471 - RNA, 19 nt, Artificial Sequence
  Description of Artificial Sequence: Synthetic oligonucleotide
uuuauauucaguguccauu

SEQ ID NO: 2139472 - RNA, 19 nt, Artificial Sequence
  Description of Artificial Sequence: Synthetic oligonucleotide
ugccauacugcacucaaac

SEQ ID NO: 2139473 - RNA, 19 nt, Artificial Sequence
  Description of Artificial Sequence: Synthetic oligonucleotide
aaacacgaugguguauagc

SEQ ID NO: 2139474 - RNA, 19 nt, Artificial Sequence
  Description of Artificial Sequence: Synthetic oligonucleotide
auaaacaaacacgauggug

SEQ ID NO: 2139475 - RNA, 19 nt, Artificial Sequence
  Description of Artificial Sequence: Synthetic oligonucleotide
auagcggguagacugcuuc

SEQ ID NO: 2139476 - RNA, 19 nt, Artificial Sequence
  Description of Artificial Sequence: Synthetic oligonucleotide
agcaucguguaccaauccg

SEQ ID NO: 2139477 - RNA, 19 nt, Artificial Sequence
  Description of Artificial Sequence: Synthetic oligonucleotide
uccauagauuucauuugag

SEQ ID NO: 2139478 - RNA, 19 nt, Artificial Sequence
  Description of Artificial Sequence: Synthetic oligonucleotide
guaaucuggacucggguug

SEQ ID NO: 2139479 - RNA, 19 nt, Artificial Sequence
  Description of Artificial Sequence: Synthetic oligonucleotide
uguauagcggguagacugc

SEQ ID NO: 2139480 - RNA, 19 nt, Artificial Sequence
  Description of Artificial Sequence: Synthetic oligonucleotide
uucuucaccagcagaggcc

SEQ ID NO: 2139481 - RNA, 19 nt, Artificial Sequence
  Description of Artificial Sequence: Synthetic oligonucleotide
cacgaugguguauagcggg

SEQ ID NO: 2139482 - RNA, 19 nt, Artificial Sequence
  Description of Artificial Sequence: Synthetic oligonucleotide
uguaaagcaucguguacca

SEQ ID NO: 2139483 - RNA, 19 nt, Artificial Sequence
  Description of Artificial Sequence: Synthetic oligonucleotide
aaagccaaaagcggcaggu

SEQ ID NO: 2139484 - RNA, 19 nt, Artificial Sequence
  Description of Artificial Sequence: Synthetic oligonucleotide
aucgccauaaauccaagau

SEQ ID NO: 2139485 - RNA, 19 nt, Artificial Sequence
  Description of Artificial Sequence: Synthetic oligonucleotide
agcaucaguacucggcagg

SEQ ID NO: 2139486 - RNA, 19 nt, Artificial Sequence
  Description of Artificial Sequence: Synthetic oligonucleotide
agagucaccaaggauaaca

SEQ ID NO: 2139487 - RNA, 19 nt, Artificial Sequence
  Description of Artificial Sequence: Synthetic oligonucleotide
uccaagauagagccaguca

SEQ ID NO: 2139488 - RNA, 19 nt, Artificial Sequence
  Description of Artificial Sequence: Synthetic oligonucleotide
uccgaaagcaucaguacuc

SEQ ID NO: 2139489 - RNA, 19 nt, Artificial Sequence
  Description of Artificial Sequence: Synthetic oligonucleotide
uugguauuuuauauucagu

SEQ ID NO: 2139490 - RNA, 19 nt, Artificial Sequence
  Description of Artificial Sequence: Synthetic oligonucleotide
ugugcuggaacagagcacu

SEQ ID NO: 2139491 - RNA, 19 nt, Artificial Sequence
  Description of Artificial Sequence: Synthetic oligonucleotide
uauuucugaagcagacaug

SEQ ID NO: 2139492 - RNA, 19 nt, Artificial Sequence
  Description of Artificial Sequence: Synthetic oligonucleotide
ucugagaguauccgugaug

SEQ ID NO: 2139493 - RNA, 19 nt, Artificial Sequence
  Description of Artificial Sequence: Synthetic oligonucleotide
agaaguaaagggcagcaua

SEQ ID NO: 2139494 - RNA, 19 nt, Artificial Sequence
  Description of Artificial Sequence: Synthetic oligonucleotide
uaccaauccgaaagcauca

SEQ ID NO: 2139495 - RNA, 19 nt, Artificial Sequence
  Description of Artificial Sequence: Synthetic oligonucleotide
cacaauacaguccaaggca

SEQ ID NO: 2139496 - RNA, 19 nt, Artificial Sequence
  Description of Artificial Sequence: Synthetic oligonucleotide
augcugguugaauaucgac

SEQ ID NO: 2139497 - RNA, 19 nt, Artificial Sequence
  Description of Artificial Sequence: Synthetic oligonucleotide
uucaguguccauuggcccc

SEQ ID NO: 2139498 - RNA, 19 nt, Artificial Sequence
  Description of Artificial Sequence: Synthetic oligonucleotide
aguaaauuuugcagugaac

SEQ ID NO: 2139499 - RNA, 19 nt, Artificial Sequence
  Description of Artificial Sequence: Synthetic oligonucleotide
aacaaguagaacagagcug

SEQ ID NO: 2139500 - RNA, 19 nt, Artificial Sequence
  Description of Artificial Sequence: Synthetic oligonucleotide
aaccaauguagaacaagag

SEQ ID NO: 2139501 - RNA, 19 nt, Artificial Sequence
  Description of Artificial Sequence: Synthetic oligonucleotide
agaaccaauguagaacaag

SEQ ID NO: 2139502 - RNA, 19 nt, Artificial Sequence
  Description of Artificial Sequence: Synthetic oligonucleotide
auacaagaggccuccacca

SEQ ID NO: 2139503 - RNA, 19 nt, Artificial Sequence
  Description of Artificial Sequence: Synthetic oligonucleotide
uugaauaucgacagccauu

SEQ ID NO: 2139504 - RNA, 19 nt, Artificial Sequence
  Description of Artificial Sequence: Synthetic oligonucleotide
guagacugcuucaugagug

SEQ ID NO: 2139505 - RNA, 19 nt, Artificial Sequence
  Description of Artificial Sequence: Synthetic oligonucleotide
aacggauguaaaggacacc

SEQ ID NO: 2139506 - RNA, 19 nt, Artificial Sequence
  Description of Artificial Sequence: Synthetic oligonucleotide
ccagucauaaaguucgggg

SEQ ID NO: 2139507 - RNA, 19 nt, Artificial Sequence
  Description of Artificial Sequence: Synthetic oligonucleotide
uuuuccccgaguaccauuc

SEQ ID NO: 2139508 - RNA, 19 nt, Artificial Sequence
  Description of Artificial Sequence: Synthetic oligonucleotide
cugugguaacguaaucugg

SEQ ID NO: 2139509 - RNA, 19 nt, Artificial Sequence
  Description of Artificial Sequence: Synthetic oligonucleotide
aaguagaacagagcuggug

SEQ ID NO: 2139510 - RNA, 19 nt, Artificial Sequence
  Description of Artificial Sequence: Synthetic oligonucleotide
acucaaacagugcagugau

SEQ ID NO: 2139511 - RNA, 19 nt, Artificial Sequence
  Description of Artificial Sequence: Synthetic oligonucleotide
ugguaacguaaucuggacu

SEQ ID NO: 2139512 - RNA, 19 nt, Artificial Sequence
  Description of Artificial Sequence: Synthetic oligonucleotide
cucggguuguaaagcaucg

SEQ ID NO: 2139513 - RNA, 19 nt, Artificial Sequence
  Description of Artificial Sequence: Synthetic oligonucleotide
accaacugccugcagcacg

SEQ ID NO: 2139514 - RNA, 19 nt, Artificial Sequence
  Description of Artificial Sequence: Synthetic oligonucleotide
ugcagugaugugcuggaac

SEQ ID NO: 2139515 - RNA, 19 nt, Artificial Sequence
  Description of Artificial Sequence: Synthetic oligonucleotide
auucaaugaagaaccaaug

SEQ ID NO: 2139516 - RNA, 19 nt, Artificial Sequence
  Description of Artificial Sequence: Synthetic oligonucleotide
auccgaaagcaucaguacu

SEQ ID NO: 2139517 - RNA, 19 nt, Artificial Sequence
  Description of Artificial Sequence: Synthetic oligonucleotide
ucgccauaaauccaagaua

SEQ ID NO: 2139518 - RNA, 19 nt, Artificial Sequence
  Description of Artificial Sequence: Synthetic oligonucleotide
aucgacagccauuggccac

SEQ ID NO: 2139519 - RNA, 19 nt, Artificial Sequence
  Description of Artificial Sequence: Synthetic oligonucleotide
uaaauccaagauagagcca

SEQ ID NO: 2139520 - RNA, 19 nt, Artificial Sequence
  Description of Artificial Sequence: Synthetic oligonucleotide
aacguaaucuggacucggg

SEQ ID NO: 2139521 - RNA, 19 nt, Artificial Sequence
  Description of Artificial Sequence: Synthetic oligonucleotide
aaggcuggcaguauuucug

SEQ ID NO: 2139522 - RNA, 19 nt, Artificial Sequence
  Description of Artificial Sequence: Synthetic oligonucleotide
aagcaucaguacucggcag

SEQ ID NO: 2139523 - RNA, 19 nt, Artificial Sequence
  Description of Artificial Sequence: Synthetic oligonucleotide
guuguaaagcaucguguac

SEQ ID NO: 2139524 - RNA, 19 nt, Artificial Sequence
  Description of Artificial Sequence: Synthetic oligonucleotide
ugcacugugguaacguaau

SEQ ID NO: 2139525 - RNA, 19 nt, Artificial Sequence
  Description of Artificial Sequence: Synthetic oligonucleotide
cacgcuagguucuccaaag

SEQ ID NO: 2139526 - RNA, 19 nt, Artificial Sequence
  Description of Artificial Sequence: Synthetic oligonucleotide
aauagggucuucccacaau

SEQ ID NO: 2139527 - RNA, 19 nt, Artificial Sequence
  Description of Artificial Sequence: Synthetic oligonucleotide
uaacguaaucuggacucgg

SEQ ID NO: 2139528 - RNA, 19 nt, Artificial Sequence
  Description of Artificial Sequence: Synthetic oligonucleotide
gugaugauagcugccauac

SEQ ID NO: 2139529 - RNA, 19 nt, Artificial Sequence
  Description of Artificial Sequence: Synthetic oligonucleotide
auaauagggucuucccaca

SEQ ID NO: 2139530 - RNA, 19 nt, Artificial Sequence
  Description of Artificial Sequence: Synthetic oligonucleotide
ggaagcaucgccauaaauc

SEQ ID NO: 2139531 - RNA, 19 nt, Artificial Sequence
  Description of Artificial Sequence: Synthetic oligonucleotide
cgccauaaauccaagauag

SEQ ID NO: 2139532 - RNA, 19 nt, Artificial Sequence
  Description of Artificial Sequence: Synthetic oligonucleotide
agcaguucucuauuucuga

SEQ ID NO: 2139533 - RNA, 19 nt, Artificial Sequence
  Description of Artificial Sequence: Synthetic oligonucleotide
cucagacuuccccagcccg

SEQ ID NO: 2139534 - RNA, 19 nt, Artificial Sequence
  Description of Artificial Sequence: Synthetic oligonucleotide
cuggacucggguuguaaag

SEQ ID NO: 2139535 - RNA, 19 nt, Artificial Sequence
  Description of Artificial Sequence: Synthetic oligonucleotide
cauguucaagccugucugc

SEQ ID NO: 2139536 - RNA, 19 nt, Artificial Sequence
  Description of Artificial Sequence: Synthetic oligonucleotide
uccaaagaagcccggggau

SEQ ID NO: 2139537 - RNA, 19 nt, Artificial Sequence
  Description of Artificial Sequence: Synthetic oligonucleotide
ugagucuuuucuuccugac

SEQ ID NO: 2139538 - RNA, 19 nt, Artificial Sequence
  Description of Artificial Sequence: Synthetic oligonucleotide
cauagcaguucucuauuuc

SEQ ID NO: 2139539 - RNA, 19 nt, Artificial Sequence
  Description of Artificial Sequence: Synthetic oligonucleotide
aaugcacugugguaacgua

SEQ ID NO: 2139540 - RNA, 19 nt, Artificial Sequence
  Description of Artificial Sequence: Synthetic oligonucleotide
uaucgacagccauuggcca

SEQ ID NO: 2139541 - RNA, 19 nt, Artificial Sequence
  Description of Artificial Sequence: Synthetic oligonucleotide
ucagacuuccccagcccgc

SEQ ID NO: 2139542 - RNA, 19 nt, Artificial Sequence
  Description of Artificial Sequence: Synthetic oligonucleotide
gaacggauguaaaggacac

SEQ ID NO: 2139543 - RNA, 19 nt, Artificial Sequence
  Description of Artificial Sequence: Synthetic oligonucleotide
ugcuggaacagagcacugg

SEQ ID NO: 2139544 - RNA, 19 nt, Artificial Sequence
  Description of Artificial Sequence: Synthetic oligonucleotide
auagggucuucccacaaua

SEQ ID NO: 2139545 - RNA, 19 nt, Artificial Sequence
  Description of Artificial Sequence: Synthetic oligonucleotide
ugcacucaaacagugcagu

SEQ ID NO: 2139546 - RNA, 19 nt, Artificial Sequence
  Description of Artificial Sequence: Synthetic oligonucleotide
gaauaucgacagccauugg

SEQ ID NO: 2139547 - RNA, 19 nt, Artificial Sequence
  Description of Artificial Sequence: Synthetic oligonucleotide
guaacguaaucuggacucg

SEQ ID NO: 2139548 - RNA, 19 nt, Artificial Sequence
  Description of Artificial Sequence: Synthetic oligonucleotide
ggauguaaaggacacccac

SEQ ID NO: 2139549 - RNA, 19 nt, Artificial Sequence
  Description of Artificial Sequence: Synthetic oligonucleotide
caauccgaaagcaucagua

SEQ ID NO: 2139550 - RNA, 19 nt, Artificial Sequence
  Description of Artificial Sequence: Synthetic oligonucleotide
agaagcccggggaucagcc

SEQ ID NO: 2139551 - RNA, 19 nt, Artificial Sequence
  Description of Artificial Sequence: Synthetic oligonucleotide
cauucaaugaagaaccaau

SEQ ID NO: 2139552 - RNA, 19 nt, Artificial Sequence
  Description of Artificial Sequence: Synthetic oligonucleotide
uacucggcaggaacggaug

SEQ ID NO: 2139553 - RNA, 19 nt, Artificial Sequence
  Description of Artificial Sequence: Synthetic oligonucleotide
agggucuucccacaauaca

SEQ ID NO: 2139554 - RNA, 19 nt, Artificial Sequence
  Description of Artificial Sequence: Synthetic oligonucleotide
agaggaagcaucgccauaa

SEQ ID NO: 2139555 - RNA, 19 nt, Artificial Sequence
  Description of Artificial Sequence: Synthetic oligonucleotide
gaucauagcaguucucuau

SEQ ID NO: 2139556 - RNA, 19 nt, Artificial Sequence
  Description of Artificial Sequence: Synthetic oligonucleotide
augagucuuuucuuccuga

SEQ ID NO: 2139557 - RNA, 19 nt, Artificial Sequence
  Description of Artificial Sequence: Synthetic oligonucleotide
aaggcguaauaaacaaaca

SEQ ID NO: 2139558 - RNA, 19 nt, Artificial Sequence
  Description of Artificial Sequence: Synthetic oligonucleotide
uguacacagccagagucac

SEQ ID NO: 2139559 - RNA, 19 nt, Artificial Sequence
  Description of Artificial Sequence: Synthetic oligonucleotide
acaaacacgaugguguaua

SEQ ID NO: 2139560 - RNA, 19 nt, Artificial Sequence
  Description of Artificial Sequence: Synthetic oligonucleotide
aagccaaaagcggcagguc

SEQ ID NO: 2139561 - RNA, 19 nt, Artificial Sequence
  Description of Artificial Sequence: Synthetic oligonucleotide
cuaucccauaggcauggag

SEQ ID NO: 2139562 - RNA, 19 nt, Artificial Sequence
  Description of Artificial Sequence: Synthetic oligonucleotide
aaaagcggcaggucauguu

SEQ ID NO: 2139563 - RNA, 19 nt, Artificial Sequence
  Description of Artificial Sequence: Synthetic oligonucleotide
ucuggacucggguuguaaa

SEQ ID NO: 2139564 - RNA, 19 nt, Artificial Sequence
  Description of Artificial Sequence: Synthetic oligonucleotide
aaguaaagggcagcauaga

SEQ ID NO: 2139565 - RNA, 19 nt, Artificial Sequence
  Description of Artificial Sequence: Synthetic oligonucleotide
uuuaaauaauagggucuuc

SEQ ID NO: 2139566 - RNA, 19 nt, Artificial Sequence
  Description of Artificial Sequence: Synthetic oligonucleotide
acucggguuguaaagcauc

SEQ ID NO: 2139567 - RNA, 19 nt, Artificial Sequence
  Description of Artificial Sequence: Synthetic oligonucleotide
auccaagauagagccaguc

SEQ ID NO: 2139568 - RNA, 19 nt, Artificial Sequence
  Description of Artificial Sequence: Synthetic oligonucleotide
gcaaggugaugauagcugc

SEQ ID NO: 2139569 - RNA, 19 nt, Artificial Sequence
  Description of Artificial Sequence: Synthetic oligonucleotide
gcuagguucuccaaagaag

SEQ ID NO: 2139570 - RNA, 19 nt, Artificial Sequence
  Description of Artificial Sequence: Synthetic oligonucleotide
gacuuccccagcccgcagg

SEQ ID NO: 2139571 - RNA, 19 nt, Artificial Sequence
  Description of Artificial Sequence: Synthetic oligonucleotide
acguaaucuggacucgggu

SEQ ID NO: 2139572 - RNA, 19 nt, Artificial Sequence
  Description of Artificial Sequence: Synthetic oligonucleotide
caaacacgaugguguauag

SEQ ID NO: 2139573 - RNA, 19 nt, Artificial Sequence
  Description of Artificial Sequence: Synthetic oligonucleotide
ugguguauagcggguagac

SEQ ID NO: 2139574 - RNA, 19 nt, Artificial Sequence
  Description of Artificial Sequence: Synthetic oligonucleotide
cugcacucaaacagugcag

SEQ ID NO: 2139575 - RNA, 19 nt, Artificial Sequence
  Description of Artificial Sequence: Synthetic oligonucleotide
cagaaggcguaauaaacaa

SEQ ID NO: 2139576 - RNA, 19 nt, Artificial Sequence
  Description of Artificial Sequence: Synthetic oligonucleotide
uagagccagucauaaaguu

SEQ ID NO: 2139577 - RNA, 19 nt, Artificial Sequence
  Description of Artificial Sequence: Synthetic oligonucleotide
caaagccaaaagcggcagg

SEQ ID NO: 2139578 - RNA, 19 nt, Artificial Sequence
  Description of Artificial Sequence: Synthetic oligonucleotide
caauacaguccaaggcaug

SEQ ID NO: 2139579 - RNA, 19 nt, Artificial Sequence
  Description of Artificial Sequence: Synthetic oligonucleotide
caaacagugcagugaugug

SEQ ID NO: 2139580 - RNA, 19 nt, Artificial Sequence
  Description of Artificial Sequence: Synthetic oligonucleotide
gguauuuuauauucagugu

SEQ ID NO: 2139581 - RNA, 19 nt, Artificial Sequence
  Description of Artificial Sequence: Synthetic oligonucleotide
gugguaacguaaucuggac

SEQ ID NO: 2139582 - RNA, 19 nt, Artificial Sequence
  Description of Artificial Sequence: Synthetic oligonucleotide
cauuggccacgcuagguuc

SEQ ID NO: 2139583 - RNA, 19 nt, Artificial Sequence
  Description of Artificial Sequence: Synthetic oligonucleotide
cacuaauauaauguaggga

SEQ ID NO: 2139584 - RNA, 19 nt, Artificial Sequence
  Description of Artificial Sequence: Synthetic oligonucleotide
gggaaaggcauaauacaag

SEQ ID NO: 2139585 - RNA, 19 nt, Artificial Sequence
  Description of Artificial Sequence: Synthetic oligonucleotide
caggaacggauguaaagga

SEQ ID NO: 2139586 - RNA, 19 nt, Artificial Sequence
  Description of Artificial Sequence: Synthetic oligonucleotide
gagaucauagcaguucucu

SEQ ID NO: 2139587 - RNA, 19 nt, Artificial Sequence
  Description of Artificial Sequence: Synthetic oligonucleotide
uauccgugaugguucagua

SEQ ID NO: 2139588 - RNA, 19 nt, Artificial Sequence
  Description of Artificial Sequence: Synthetic oligonucleotide
uucugagaguauccgugau

SEQ ID NO: 2139589 - RNA, 19 nt, Artificial Sequence
  Description of Artificial Sequence: Synthetic oligonucleotide
agugaugugcuggaacaga

SEQ ID NO: 2139590 - RNA, 19 nt, Artificial Sequence
  Description of Artificial Sequence: Synthetic oligonucleotide
gaggacaaugagucuuuuc

SEQ ID NO: 2139591 - RNA, 19 nt, Artificial Sequence
  Description of Artificial Sequence: Synthetic oligonucleotide
uccccgaguaccauucaau

SEQ ID NO: 2139592 - RNA, 19 nt, Artificial Sequence
  Description of Artificial Sequence: Synthetic oligonucleotide
caguaaauuuugcagugaa

SEQ ID NO: 2139593 - RNA, 19 nt, Artificial Sequence
  Description of Artificial Sequence: Synthetic oligonucleotide
auacugcacucaaacagug

SEQ ID NO: 2139594 - RNA, 19 nt, Artificial Sequence
  Description of Artificial Sequence: Synthetic oligonucleotide
agugaacaaguagaacaga

SEQ ID NO: 2139595 - RNA, 19 nt, Artificial Sequence
  Description of Artificial Sequence: Synthetic oligonucleotide
gcaugcugguugaauaucg

SEQ ID NO: 2139596 - RNA, 19 nt, Artificial Sequence
  Description of Artificial Sequence: Synthetic oligonucleotide
ucauagcaguucucuauuu

SEQ ID NO: 2139597 - RNA, 19 nt, Artificial Sequence
  Description of Artificial Sequence: Synthetic oligonucleotide
agaucauagcaguucucua

SEQ ID NO: 2139598 - RNA, 19 nt, Artificial Sequence
  Description of Artificial Sequence: Synthetic oligonucleotide
acacgaugguguauagcgg

SEQ ID NO: 2139599 - RNA, 19 nt, Artificial Sequence
  Description of Artificial Sequence: Synthetic oligonucleotide
aacaaacacgaugguguau

SEQ ID NO: 2139600 - RNA, 19 nt, Artificial Sequence
  Description of Artificial Sequence: Synthetic oligonucleotide
agccggucggaacgcagcg

SEQ ID NO: 2139601 - RNA, 19 nt, Artificial Sequence
  Description of Artificial Sequence: Synthetic oligonucleotide
cauacugcacucaaacagu

SEQ ID NO: 2139602 - RNA, 19 nt, Artificial Sequence
  Description of Artificial Sequence: Synthetic oligonucleotide
gcugguguagguaccaaag

SEQ ID NO: 2139603 - RNA, 19 nt, Artificial Sequence
  Description of Artificial Sequence: Synthetic oligonucleotide
uuugaaccgcucagacuuc

SEQ ID NO: 2139604 - RNA, 19 nt, Artificial Sequence
  Description of Artificial Sequence: Synthetic oligonucleotide
gaguaccauucaaugaaga

SEQ ID NO: 2139605 - RNA, 19 nt, Artificial Sequence
  Description of Artificial Sequence: Synthetic oligonucleotide
acccacuggaucacucacc

SEQ ID NO: 2139606 - RNA, 19 nt, Artificial Sequence
  Description of Artificial Sequence: Synthetic oligonucleotide
ucuggagauggagacuauc

SEQ ID NO: 2139607 - RNA, 19 nt, Artificial Sequence
  Description of Artificial Sequence: Synthetic oligonucleotide
aggauaacacuaauauaau

SEQ ID NO: 2139608 - RNA, 19 nt, Artificial Sequence
  Description of Artificial Sequence: Synthetic oligonucleotide
caguacucggcaggaacgg

SEQ ID NO: 2139609 - RNA, 19 nt, Artificial Sequence
  Description of Artificial Sequence: Synthetic oligonucleotide
agcaucgccauaaauccaa

SEQ ID NO: 2139610 - RNA, 19 nt, Artificial Sequence
  Description of Artificial Sequence: Synthetic oligonucleotide
auguacacagccagaguca

SEQ ID NO: 2139611 - RNA, 19 nt, Artificial Sequence
  Description of Artificial Sequence: Synthetic oligonucleotide
gguuguaaagcaucgugua

SEQ ID NO: 2139612 - RNA, 19 nt, Artificial Sequence
  Description of Artificial Sequence: Synthetic oligonucleotide
aggcaugcugguugaauau

SEQ ID NO: 2139613 - RNA, 19 nt, Artificial Sequence
  Description of Artificial Sequence: Synthetic oligonucleotide
aggaagcaucgccauaaau

SEQ ID NO: 2139614 - RNA, 19 nt, Artificial Sequence
  Description of Artificial Sequence: Synthetic oligonucleotide
uaaucuggacucggguugu

SEQ ID NO: 2139615 - RNA, 19 nt, Artificial Sequence
  Description of Artificial Sequence: Synthetic oligonucleotide
ggaacggauguaaaggaca

SEQ ID NO: 2139616 - RNA, 19 nt, Artificial Sequence
  Description of Artificial Sequence: Synthetic oligonucleotide
cuccaaagaagcccgggga

SEQ ID NO: 2139617 - RNA, 19 nt, Artificial Sequence
  Description of Artificial Sequence: Synthetic oligonucleotide
acacccacuggaucacuca

SEQ ID NO: 2139618 - RNA, 19 nt, Artificial Sequence
  Description of Artificial Sequence: Synthetic oligonucleotide
uuccccgaguaccauucaa

SEQ ID NO: 2139619 - RNA, 19 nt, Artificial Sequence
  Description of Artificial Sequence: Synthetic oligonucleotide
gagugcaaugcacuguggu

SEQ ID NO: 2139620 - RNA, 19 nt, Artificial Sequence
  Description of Artificial Sequence: Synthetic oligonucleotide
uuucugaagcagacaugua

SEQ ID NO: 2139621 - RNA, 19 nt, Artificial Sequence
  Description of Artificial Sequence: Synthetic oligonucleotide
ggguagacugcuucaugag

SEQ ID NO: 2139622 - RNA, 19 nt, Artificial Sequence
  Description of Artificial Sequence: Synthetic oligonucleotide
ccugagaagcaucaucaac

SEQ ID NO: 2139623 - RNA, 19 nt, Artificial Sequence
  Description of Artificial Sequence: Synthetic oligonucleotide
guugaauaucgacagccau

SEQ ID NO: 2139624 - RNA, 19 nt, Artificial Sequence
  Description of Artificial Sequence: Synthetic oligonucleotide
accaauccgaaagcaucag

SEQ ID NO: 2139625 - RNA, 19 nt, Artificial Sequence
  Description of Artificial Sequence: Synthetic oligonucleotide
ugagaguauccgugauggu

SEQ ID NO: 2139626 - RNA, 19 nt, Artificial Sequence
  Description of Artificial Sequence: Synthetic oligonucleotide
uuuccccgaguaccauuca

SEQ ID NO: 2139627 - RNA, 19 nt, Artificial Sequence
  Description of Artificial Sequence: Synthetic oligonucleotide
agauagagccagucauaaa

SEQ ID NO: 2139628 - RNA, 19 nt, Artificial Sequence
  Description of Artificial Sequence: Synthetic oligonucleotide
caaagaagcccggggauca

SEQ ID NO: 2139629 - RNA, 19 nt, Artificial Sequence
  Description of Artificial Sequence: Synthetic oligonucleotide
ccaaggauaacacuaauau

SEQ ID NO: 2139630 - RNA, 19 nt, Artificial Sequence
  Description of Artificial Sequence: Synthetic oligonucleotide
aagcaucgccauaaaucca

SEQ ID NO: 2139631 - RNA, 19 nt, Artificial Sequence
  Description of Artificial Sequence: Synthetic oligonucleotide
caagauagagccagucaua

SEQ ID NO: 2139632 - RNA, 19 nt, Artificial Sequence
  Description of Artificial Sequence: Synthetic oligonucleotide
aauccaagauagagccagu

SEQ ID NO: 2139633 - RNA, 19 nt, Artificial Sequence
  Description of Artificial Sequence: Synthetic oligonucleotide
ccugaccaggagaucauag

SEQ ID NO: 2139634 - RNA, 19 nt, Artificial Sequence
  Description of Artificial Sequence: Synthetic oligonucleotide
acucggcaggaacggaugu

SEQ ID NO: 2139635 - RNA, 19 nt, Artificial Sequence
  Description of Artificial Sequence: Synthetic oligonucleotide
agcugguguagguaccaaa

SEQ ID NO: 2139636 - RNA, 19 nt, Artificial Sequence
  Description of Artificial Sequence: Synthetic oligonucleotide
caugcugguugaauaucga

SEQ ID NO: 2139637 - RNA, 19 nt, Artificial Sequence
  Description of Artificial Sequence: Synthetic oligonucleotide
aucguguaccaauccgaaa

SEQ ID NO: 2139638 - RNA, 19 nt, Artificial Sequence
  Description of Artificial Sequence: Synthetic oligonucleotide
gcagaaggcguaauaaaca

SEQ ID NO: 2139639 - RNA, 19 nt, Artificial Sequence
  Description of Artificial Sequence: Synthetic oligonucleotide
aagaaccaauguagaacaa

SEQ ID NO: 2139640 - RNA, 19 nt, Artificial Sequence
  Description of Artificial Sequence: Synthetic oligonucleotide
caucguguaccaauccgaa

SEQ ID NO: 2139641 - RNA, 19 nt, Artificial Sequence
  Description of Artificial Sequence: Synthetic oligonucleotide
agacuaucccauaggcaug

SEQ ID NO: 2139642 - RNA, 19 nt, Artificial Sequence
  Description of Artificial Sequence: Synthetic oligonucleotide
gagaguauccgugaugguu

SEQ ID NO: 2139643 - RNA, 19 nt, Artificial Sequence
  Description of Artificial Sequence: Synthetic oligonucleotide
auacaguccaaggcaugcu

SEQ ID NO: 2139644 - RNA, 19 nt, Artificial Sequence
  Description of Artificial Sequence: Synthetic oligonucleotide
gcuucaugagugcaaugca

SEQ ID NO: 2139645 - RNA, 19 nt, Artificial Sequence
  Description of Artificial Sequence: Synthetic oligonucleotide
cagcauagaugcuuuugaa

SEQ ID NO: 2139646 - RNA, 19 nt, Artificial Sequence
  Description of Artificial Sequence: Synthetic oligonucleotide
uauagcggguagacugcuu

SEQ ID NO: 2139647 - RNA, 19 nt, Artificial Sequence
  Description of Artificial Sequence: Synthetic oligonucleotide
caucgccauaaauccaaga

SEQ ID NO: 2139648 - RNA, 19 nt, Artificial Sequence
  Description of Artificial Sequence: Synthetic oligonucleotide
gggacucugugcaaggcug

SEQ ID NO: 2139649 - RNA, 19 nt, Artificial Sequence
  Description of Artificial Sequence: Synthetic oligonucleotide
cagcccgcaggcaaucuuc

SEQ ID NO: 2139650 - RNA, 19 nt, Artificial Sequence
  Description of Artificial Sequence: Synthetic oligonucleotide
guguaccaauccgaaagca

SEQ ID NO: 2139651 - RNA, 19 nt, Artificial Sequence
  Description of Artificial Sequence: Synthetic oligonucleotide
ccgaguaccauucaaugaa

SEQ ID NO: 2139652 - RNA, 19 nt, Artificial Sequence
  Description of Artificial Sequence: Synthetic oligonucleotide
ggcagcauagaugcuuuug

SEQ ID NO: 2139653 - RNA, 19 nt, Artificial Sequence
  Description of Artificial Sequence: Synthetic oligonucleotide
acgcuagguucuccaaaga

SEQ ID NO: 2139654 - RNA, 19 nt, Artificial Sequence
  Description of Artificial Sequence: Synthetic oligonucleotide
gaucagccggucggaacgc

SEQ ID NO: 2139655 - RNA, 19 nt, Artificial Sequence
  Description of Artificial Sequence: Synthetic oligonucleotide
augguguauagcggguaga

SEQ ID NO: 2139656 - RNA, 19 nt, Artificial Sequence
  Description of Artificial Sequence: Synthetic oligonucleotide
ucggguuguaaagcaucgu

SEQ ID NO: 2139657 - RNA, 19 nt, Artificial Sequence
  Description of Artificial Sequence: Synthetic oligonucleotide
cagaggccugagaagcauc

SEQ ID NO: 2139658 - RNA, 19 nt, Artificial Sequence
  Description of Artificial Sequence: Synthetic oligonucleotide
ggacucggguuguaaagca

SEQ ID NO: 2139659 - RNA, 19 nt, Artificial Sequence
  Description of Artificial Sequence: Synthetic oligonucleotide
cugcuucaugagugcaaug

SEQ ID NO: 2139660 - RNA, 19 nt, Artificial Sequence
  Description of Artificial Sequence: Synthetic oligonucleotide
acagugcagugaugugcug

SEQ ID NO: 2139661 - RNA, 19 nt, Artificial Sequence
  Description of Artificial Sequence: Synthetic oligonucleotide
ccgaaagcaucaguacucg

SEQ ID NO: 2139662 - RNA, 19 nt, Artificial Sequence
  Description of Artificial Sequence: Synthetic oligonucleotide
gccagucauaaaguucggg

SEQ ID NO: 2139663 - RNA, 19 nt, Artificial Sequence
  Description of Artificial Sequence: Synthetic oligonucleotide
aguguccauuggccccuuc

SEQ ID NO: 2139664 - RNA, 19 nt, Artificial Sequence
  Description of Artificial Sequence: Synthetic oligonucleotide
gguugaauaucgacagcca

SEQ ID NO: 2139665 - RNA, 19 nt, Artificial Sequence
  Description of Artificial Sequence: Synthetic oligonucleotide
ccccgaguaccauucaaug

SEQ ID NO: 2139666 - RNA, 19 nt, Artificial Sequence
  Description of Artificial Sequence: Synthetic oligonucleotide
augcacugugguaacguaa

SEQ ID NO: 2139667 - RNA, 19 nt, Artificial Sequence
  Description of Artificial Sequence: Synthetic oligonucleotide
cacugugguaacguaaucu

SEQ ID NO: 2139668 - RNA, 19 nt, Artificial Sequence
  Description of Artificial Sequence: Synthetic oligonucleotide
aguacucggcaggaacgga

SEQ ID NO: 2139669 - RNA, 19 nt, Artificial Sequence
  Description of Artificial Sequence: Synthetic oligonucleotide
ggagacuaucccauaggca

SEQ ID NO: 2139670 - RNA, 19 nt, Artificial Sequence
  Description of Artificial Sequence: Synthetic oligonucleotide
cgaguaccauucaaugaag

SEQ ID NO: 2139671 - RNA, 19 nt, Artificial Sequence
  Description of Artificial Sequence: Synthetic oligonucleotide
agacuuccccagcccgcag

SEQ ID NO: 2139672 - RNA, 19 nt, Artificial Sequence
  Description of Artificial Sequence: Synthetic oligonucleotide
gguagacugcuucaugagu

SEQ ID NO: 2139673 - RNA, 19 nt, Artificial Sequence
  Description of Artificial Sequence: Synthetic oligonucleotide
auggagcagccaguggcug

SEQ ID NO: 2139674 - RNA, 19 nt, Artificial Sequence
  Description of Artificial Sequence: Synthetic oligonucleotide
cggguuguaaagcaucgug

SEQ ID NO: 2139675 - RNA, 19 nt, Artificial Sequence
  Description of Artificial Sequence: Synthetic oligonucleotide
ccggggaucagccggucgg

SEQ ID NO: 2139676 - RNA, 19 nt, Artificial Sequence
  Description of Artificial Sequence: Synthetic oligonucleotide
aguauccgugaugguucag

SEQ ID NO: 2139677 - RNA, 19 nt, Artificial Sequence
  Description of Artificial Sequence: Synthetic oligonucleotide
gcaucguguaccaauccga

SEQ ID NO: 2139678 - RNA, 19 nt, Artificial Sequence
  Description of Artificial Sequence: Synthetic oligonucleotide
gcaaugcacugugguaacg

SEQ ID NO: 2139679 - RNA, 19 nt, Artificial Sequence
  Description of Artificial Sequence: Synthetic oligonucleotide
uggcaguauuucugugcau

SEQ ID NO: 2139680 - RNA, 19 nt, Artificial Sequence
  Description of Artificial Sequence: Synthetic oligonucleotide
guauccgugaugguucagu

SEQ ID NO: 2139681 - RNA, 19 nt, Artificial Sequence
  Description of Artificial Sequence: Synthetic oligonucleotide
acgaugguguauagcgggu

SEQ ID NO: 2139682 - RNA, 19 nt, Artificial Sequence
  Description of Artificial Sequence: Synthetic oligonucleotide
guacacagccagagucacc

SEQ ID NO: 2139683 - RNA, 19 nt, Artificial Sequence
  Description of Artificial Sequence: Synthetic oligonucleotide
uucccacaauacaguccaa

SEQ ID NO: 2139684 - RNA, 19 nt, Artificial Sequence
  Description of Artificial Sequence: Synthetic oligonucleotide
ccaagauagagccagucau

SEQ ID NO: 2139685 - RNA, 19 nt, Artificial Sequence
  Description of Artificial Sequence: Synthetic oligonucleotide
cccgcaggcaaucuucuuc

SEQ ID NO: 2139686 - RNA, 19 nt, Artificial Sequence
  Description of Artificial Sequence: Synthetic oligonucleotide
auuuugcagugaacaagua

SEQ ID NO: 2139687 - RNA, 19 nt, Artificial Sequence
  Description of Artificial Sequence: Synthetic oligonucleotide
gggaucagccggucggaac

SEQ ID NO: 2139688 - RNA, 19 nt, Artificial Sequence
  Description of Artificial Sequence: Synthetic oligonucleotide
gauuucauuugagccguuu

SEQ ID NO: 2139689 - RNA, 19 nt, Artificial Sequence
  Description of Artificial Sequence: Synthetic oligonucleotide
agcggguagacugcuucau

SEQ ID NO: 2139690 - RNA, 19 nt, Artificial Sequence
  Description of Artificial Sequence: Synthetic oligonucleotide
caaugcacugugguaacgu

SEQ ID NO: 2139691 - RNA, 19 nt, Artificial Sequence
  Description of Artificial Sequence: Synthetic oligonucleotide
cccacuggaucacucacca

SEQ ID NO: 2139692 - RNA, 19 nt, Artificial Sequence
  Description of Artificial Sequence: Synthetic oligonucleotide
ggguuguaaagcaucgugu

SEQ ID NO: 2139693 - RNA, 19 nt, Artificial Sequence
  Description of Artificial Sequence: Synthetic oligonucleotide
cccgaguaccauucaauga

SEQ ID NO: 2139694 - RNA, 19 nt, Artificial Sequence
  Description of Artificial Sequence: Synthetic oligonucleotide
aucuggacucggguuguaa

SEQ ID NO: 2139695 - RNA, 19 nt, Artificial Sequence
  Description of Artificial Sequence: Synthetic oligonucleotide
gcggguagacugcuucaug

SEQ ID NO: 2139696 - RNA, 19 nt, Artificial Sequence
  Description of Artificial Sequence: Synthetic oligonucleotide
cagcaaggugaugauagcu

SEQ ID NO: 2139697 - RNA, 19 nt, Artificial Sequence
  Description of Artificial Sequence: Synthetic oligonucleotide
agaggacaaugagucuuuu

SEQ ID NO: 2139698 - RNA, 19 nt, Artificial Sequence
  Description of Artificial Sequence: Synthetic oligonucleotide
aaucuggacucggguugua

SEQ ID NO: 2139699 - RNA, 19 nt, Artificial Sequence
  Description of Artificial Sequence: Synthetic oligonucleotide
uuggccacgcuagguucuc

SEQ ID NO: 2139700 - RNA, 19 nt, Artificial Sequence
  Description of Artificial Sequence: Synthetic oligonucleotide
ccaaagaagcccggggauc

SEQ ID NO: 2139701 - RNA, 19 nt, Artificial Sequence
  Description of Artificial Sequence: Synthetic oligonucleotide
ccccuucugagaguauccg

SEQ ID NO: 2139702 - RNA, 19 nt, Artificial Sequence
  Description of Artificial Sequence: Synthetic oligonucleotide
guagaacaagaggaagcau

SEQ ID NO: 2139703 - RNA, 19 nt, Artificial Sequence
  Description of Artificial Sequence: Synthetic oligonucleotide
ccgcaggcaaucuucuuca

SEQ ID NO: 2139704 - RNA, 19 nt, Artificial Sequence
  Description of Artificial Sequence: Synthetic oligonucleotide
ggacaaugagucuuuucuu

SEQ ID NO: 2139705 - RNA, 19 nt, Artificial Sequence
  Description of Artificial Sequence: Synthetic oligonucleotide
ggagaucauagcaguucuc

SEQ ID NO: 2139706 - RNA, 19 nt, Artificial Sequence
  Description of Artificial Sequence: Synthetic oligonucleotide
gcaucaguacucggcagga

SEQ ID NO: 2139707 - RNA, 19 nt, Artificial Sequence
  Description of Artificial Sequence: Synthetic oligonucleotide
gcaucgccauaaauccaag

SEQ ID NO: 2139708 - RNA, 19 nt, Artificial Sequence
  Description of Artificial Sequence: Synthetic oligonucleotide
cugccauacugcacucaaa

SEQ ID NO: 2139709 - RNA, 19 nt, Artificial Sequence
  Description of Artificial Sequence: Synthetic oligonucleotide
cagacuuccccagcccgca

SEQ ID NO: 2139710 - RNA, 19 nt, Artificial Sequence
  Description of Artificial Sequence: Synthetic oligonucleotide
acuaucccauaggcaugga

SEQ ID NO: 2139711 - RNA, 19 nt, Artificial Sequence
  Description of Artificial Sequence: Synthetic oligonucleotide
uggccacgcuagguucucc

SEQ ID NO: 2139712 - RNA, 19 nt, Artificial Sequence
  Description of Artificial Sequence: Synthetic oligonucleotide
ccaaaagcggcaggucaug

SEQ ID NO: 2139713 - RNA, 19 nt, Artificial Sequence
  Description of Artificial Sequence: Synthetic oligonucleotide
ggccacgcuagguucucca

SEQ ID NO: 2139714 - RNA, 19 nt, Artificial Sequence
  Description of Artificial Sequence: Synthetic oligonucleotide
caaguagaacagagcuggu

SEQ ID NO: 2139715 - RNA, 19 nt, Artificial Sequence
  Description of Artificial Sequence: Synthetic oligonucleotide
guauagcggguagacugcu

SEQ ID NO: 2139716 - RNA, 19 nt, Artificial Sequence
  Description of Artificial Sequence: Synthetic oligonucleotide
cagagucaccaaggauaac

SEQ ID NO: 2139717 - RNA, 19 nt, Artificial Sequence
  Description of Artificial Sequence: Synthetic oligonucleotide
gccauaaauccaagauaga

SEQ ID NO: 2139718 - RNA, 19 nt, Artificial Sequence
  Description of Artificial Sequence: Synthetic oligonucleotide
ggccccuucugagaguauc

SEQ ID NO: 2139719 - RNA, 19 nt, Artificial Sequence
  Description of Artificial Sequence: Synthetic oligonucleotide
aucagccggucggaacgca

SEQ ID NO: 2139720 - RNA, 19 nt, Artificial Sequence
  Description of Artificial Sequence: Synthetic oligonucleotide
ggucuucccacaauacagu

SEQ ID NO: 2139721 - RNA, 19 nt, Artificial Sequence
  Description of Artificial Sequence: Synthetic oligonucleotide
gacucggguuguaaagcau

SEQ ID NO: 2139722 - RNA, 19 nt, Artificial Sequence
  Description of Artificial Sequence: Synthetic oligonucleotide
acucaccagcaaggugaug

SEQ ID NO: 2139723 - RNA, 19 nt, Artificial Sequence
  Description of Artificial Sequence: Synthetic oligonucleotide
ggggacucugugcaaggcu

SEQ ID NO: 2139724 - RNA, 19 nt, Artificial Sequence
  Description of Artificial Sequence: Synthetic oligonucleotide
caaaagcggcaggucaugu

SEQ ID NO: 2139725 - RNA, 19 nt, Artificial Sequence
  Description of Artificial Sequence: Synthetic oligonucleotide
cauaggcauggagcagcca

SEQ ID NO: 2139726 - RNA, 19 nt, Artificial Sequence
  Description of Artificial Sequence: Synthetic oligonucleotide
gguguauagcggguagacu

SEQ ID NO: 2139727 - RNA, 19 nt, Artificial Sequence
  Description of Artificial Sequence: Synthetic oligonucleotide
caaggcaugcugguugaau

SEQ ID NO: 2139728 - RNA, 19 nt, Artificial Sequence
  Description of Artificial Sequence: Synthetic oligonucleotide
cguaauaaacaaacacgau

SEQ ID NO: 2139729 - RNA, 19 nt, Artificial Sequence
  Description of Artificial Sequence: Synthetic oligonucleotide
caucaguacucggcaggaa

SEQ ID NO: 2139730 - RNA, 19 nt, Artificial Sequence
  Description of Artificial Sequence: Synthetic oligonucleotide
cgcuagguucuccaaagaa

SEQ ID NO: 2139731 - RNA, 19 nt, Artificial Sequence
  Description of Artificial Sequence: Synthetic oligonucleotide
gugcaaggcuggcaguauu

SEQ ID NO: 2139732 - RNA, 19 nt, Artificial Sequence
  Description of Artificial Sequence: Synthetic oligonucleotide
cccggggaucagccggucg

SEQ ID NO: 2139733 - RNA, 19 nt, Artificial Sequence
  Description of Artificial Sequence: Synthetic oligonucleotide
cucggcaggaacggaugua

SEQ ID NO: 2139734 - RNA, 19 nt, Artificial Sequence
  Description of Artificial Sequence: Synthetic oligonucleotide
agcccggggaucagccggu

SEQ ID NO: 2139735 - RNA, 19 nt, Artificial Sequence
  Description of Artificial Sequence: Synthetic oligonucleotide
agauuucauuugagccguu

SEQ ID NO: 2139736 - RNA, 19 nt, Artificial Sequence
  Description of Artificial Sequence: Synthetic oligonucleotide
gccacgcuagguucuccaa

SEQ ID NO: 2139737 - RNA, 19 nt, Artificial Sequence
  Description of Artificial Sequence: Synthetic oligonucleotide
ccacgcuagguucuccaaa

SEQ ID NO: 2139738 - RNA, 19 nt, Artificial Sequence
  Description of Artificial Sequence: Synthetic oligonucleotide
ccaauccgaaagcaucagu

SEQ ID NO: 2139739 - RNA, 19 nt, Artificial Sequence
  Description of Artificial Sequence: Synthetic oligonucleotide
cguaaucuggacucggguu

SEQ ID NO: 2139740 - RNA, 19 nt, Artificial Sequence
  Description of Artificial Sequence: Synthetic oligonucleotide
gccugucugcucuggagau

SEQ ID NO: 2139741 - RNA, 19 nt, Artificial Sequence
  Description of Artificial Sequence: Synthetic oligonucleotide
gccaaaagcggcaggucau

SEQ ID NO: 2139742 - RNA, 19 nt, Artificial Sequence
  Description of Artificial Sequence: Synthetic oligonucleotide
ccauuggccacgcuagguu

SEQ ID NO: 2139743 - RNA, 19 nt, Artificial Sequence
  Description of Artificial Sequence: Synthetic oligonucleotide
cggucggaacgcagcgccc

SEQ ID NO: 2139744 - RNA, 19 nt, Artificial Sequence
  Description of Artificial Sequence: Synthetic oligonucleotide
ggggaucagccggucggaa

SEQ ID NO: 2139745 - RNA, 19 nt, Artificial Sequence
  Description of Artificial Sequence: Synthetic oligonucleotide
cgugaugguucaguaaauu

SEQ ID NO: 2139746 - RNA, 19 nt, Artificial Sequence
  Description of Artificial Sequence: Synthetic oligonucleotide
cgacagccauuggccacgc

SEQ ID NO: 2139747 - RNA, 19 nt, Artificial Sequence
  Description of Artificial Sequence: Synthetic oligonucleotide
cggcaggaacggauguaaa

SEQ ID NO: 2139748 - RNA, 19 nt, Artificial Sequence
  Description of Artificial Sequence: Synthetic oligonucleotide
ccaaggcaugcugguugaa

SEQ ID NO: 2139749 - RNA, 19 nt, Artificial Sequence
  Description of Artificial Sequence: Synthetic oligonucleotide
gcccggggaucagccgguc

SEQ ID NO: 2139750 - RNA, 19 nt, Artificial Sequence
  Description of Artificial Sequence: Synthetic oligonucleotide
cccagcccgcaggcaaucu

SEQ ID NO: 2139751 - RNA, 19 nt, Artificial Sequence
  Description of Artificial Sequence: Synthetic oligonucleotide
aaaucuuuggcccaggcgc

SEQ ID NO: 2139752 - RNA, 19 nt, Artificial Sequence
  Description of Artificial Sequence: Synthetic oligonucleotide
acuaauguacaccagcuuc

SEQ ID NO: 2139753 - RNA, 19 nt, Artificial Sequence
  Description of Artificial Sequence: Synthetic oligonucleotide
aauaacauauguguuuguc

SEQ ID NO: 2139754 - RNA, 19 nt, Artificial Sequence
  Description of Artificial Sequence: Synthetic oligonucleotide
auuaacacaagcuucuugu

SEQ ID NO: 2139755 - RNA, 19 nt, Artificial Sequence
  Description of Artificial Sequence: Synthetic oligonucleotide
aucaaagggaucaaucucc

SEQ ID NO: 2139756 - RNA, 19 nt, Artificial Sequence
  Description of Artificial Sequence: Synthetic oligonucleotide
aacggauucccgcagcgcg

SEQ ID NO: 2139757 - RNA, 19 nt, Artificial Sequence
  Description of Artificial Sequence: Synthetic oligonucleotide
accgccaaaucuuuggccc

SEQ ID NO: 2139758 - RNA, 19 nt, Artificial Sequence
  Description of Artificial Sequence: Synthetic oligonucleotide
ugucucuaccucuugagag

SEQ ID NO: 2139759 - RNA, 19 nt, Artificial Sequence
  Description of Artificial Sequence: Synthetic oligonucleotide
aagggugucucauccaguc

SEQ ID NO: 2139760 - RNA, 19 nt, Artificial Sequence
  Description of Artificial Sequence: Synthetic oligonucleotide
ucaauaacauauguguuug

SEQ ID NO: 2139761 - RNA, 19 nt, Artificial Sequence
  Description of Artificial Sequence: Synthetic oligonucleotide
uaguuuacaggguuggcag

SEQ ID NO: 2139762 - RNA, 19 nt, Artificial Sequence
  Description of Artificial Sequence: Synthetic oligonucleotide
cuacaaugcagaaagccgc

SEQ ID NO: 2139763 - RNA, 19 nt, Artificial Sequence
  Description of Artificial Sequence: Synthetic oligonucleotide
acauauguguuugucaaac

SEQ ID NO: 2139764 - RNA, 19 nt, Artificial Sequence
  Description of Artificial Sequence: Synthetic oligonucleotide
aaggcagcgccgcagggcc

SEQ ID NO: 2139765 - RNA, 19 nt, Artificial Sequence
  Description of Artificial Sequence: Synthetic oligonucleotide
aaacucucgcccugagucc

SEQ ID NO: 2139766 - RNA, 19 nt, Artificial Sequence
  Description of Artificial Sequence: Synthetic oligonucleotide
ucuggacuaauguacacca

SEQ ID NO: 2139767 - RNA, 19 nt, Artificial Sequence
  Description of Artificial Sequence: Synthetic oligonucleotide
uggacuaauguacaccagc

SEQ ID NO: 2139768 - RNA, 19 nt, Artificial Sequence
  Description of Artificial Sequence: Synthetic oligonucleotide
caaacuucagucucucugg

SEQ ID NO: 2139769 - RNA, 19 nt, Artificial Sequence
  Description of Artificial Sequence: Synthetic oligonucleotide
auaacauauguguuuguca

SEQ ID NO: 2139770 - RNA, 19 nt, Artificial Sequence
  Description of Artificial Sequence: Synthetic oligonucleotide
ugagguuugcaaacucucg

SEQ ID NO: 2139771 - RNA, 19 nt, Artificial Sequence
  Description of Artificial Sequence: Synthetic oligonucleotide
uauguguuugucaaacuuc

SEQ ID NO: 2139772 - RNA, 19 nt, Artificial Sequence
  Description of Artificial Sequence: Synthetic oligonucleotide
uuguuccucacccucauca

SEQ ID NO: 2139773 - RNA, 19 nt, Artificial Sequence
  Description of Artificial Sequence: Synthetic oligonucleotide
agaaagccgcagcaaaagc

SEQ ID NO: 2139774 - RNA, 19 nt, Artificial Sequence
  Description of Artificial Sequence: Synthetic oligonucleotide
uccuccauuaacacaagcu

SEQ ID NO: 2139775 - RNA, 19 nt, Artificial Sequence
  Description of Artificial Sequence: Synthetic oligonucleotide
uuaaacuucugaagcaaaa

SEQ ID NO: 2139776 - RNA, 19 nt, Artificial Sequence
  Description of Artificial Sequence: Synthetic oligonucleotide
uggccaagcucccacauag

SEQ ID NO: 2139777 - RNA, 19 nt, Artificial Sequence
  Description of Artificial Sequence: Synthetic oligonucleotide
gacagcaaggucugaaaag

SEQ ID NO: 2139778 - RNA, 19 nt, Artificial Sequence
  Description of Artificial Sequence: Synthetic oligonucleotide
cagucuaugacagcgaccc

SEQ ID NO: 2139779 - RNA, 19 nt, Artificial Sequence
  Description of Artificial Sequence: Synthetic oligonucleotide
caaacucucgcccugaguc

SEQ ID NO: 2139780 - RNA, 19 nt, Artificial Sequence
  Description of Artificial Sequence: Synthetic oligonucleotide
uucauuccagaguucagug

SEQ ID NO: 2139781 - RNA, 19 nt, Artificial Sequence
  Description of Artificial Sequence: Synthetic oligonucleotide
ucagggguguccuuggugc

SEQ ID NO: 2139782 - RNA, 19 nt, Artificial Sequence
  Description of Artificial Sequence: Synthetic oligonucleotide
aguucaguggagucuuugg

SEQ ID NO: 2139783 - RNA, 19 nt, Artificial Sequence
  Description of Artificial Sequence: Synthetic oligonucleotide
ugaacggauucccgcagcg

SEQ ID NO: 2139784 - RNA, 19 nt, Artificial Sequence
  Description of Artificial Sequence: Synthetic oligonucleotide
aagcaaaaugacagcaagg

SEQ ID NO: 2139785 - RNA, 19 nt, Artificial Sequence
  Description of Artificial Sequence: Synthetic oligonucleotide
agcaaaaugacagcaaggu

SEQ ID NO: 2139786 - RNA, 19 nt, Artificial Sequence
  Description of Artificial Sequence: Synthetic oligonucleotide
agccaaguaccccuguucg

SEQ ID NO: 2139787 - RNA, 19 nt, Artificial Sequence
  Description of Artificial Sequence: Synthetic oligonucleotide
uuggugcuagccaaguacc

SEQ ID NO: 2139788 - RNA, 19 nt, Artificial Sequence
  Description of Artificial Sequence: Synthetic oligonucleotide
aguuuacaggguuggcagc

SEQ ID NO: 2139789 - RNA, 19 nt, Artificial Sequence
  Description of Artificial Sequence: Synthetic oligonucleotide
guacugagugccuacgggg

SEQ ID NO: 2139790 - RNA, 19 nt, Artificial Sequence
  Description of Artificial Sequence: Synthetic oligonucleotide
agcacgaccgcucucgguc

SEQ ID NO: 2139791 - RNA, 19 nt, Artificial Sequence
  Description of Artificial Sequence: Synthetic oligonucleotide
cucacuguggucuucggac

SEQ ID NO: 2139792 - RNA, 19 nt, Artificial Sequence
  Description of Artificial Sequence: Synthetic oligonucleotide
agcagucuaugacagcgac

SEQ ID NO: 2139793 - RNA, 19 nt, Artificial Sequence
  Description of Artificial Sequence: Synthetic oligonucleotide
ggcgaaggcauccagagag

SEQ ID NO: 2139794 - RNA, 19 nt, Artificial Sequence
  Description of Artificial Sequence: Synthetic oligonucleotide
uguacaccagcuucaauaa

SEQ ID NO: 2139795 - RNA, 19 nt, Artificial Sequence
  Description of Artificial Sequence: Synthetic oligonucleotide
aagggaucaaucuccuccu

SEQ ID NO: 2139796 - RNA, 19 nt, Artificial Sequence
  Description of Artificial Sequence: Synthetic oligonucleotide
uuccucacccucaucacug

SEQ ID NO: 2139797 - RNA, 19 nt, Artificial Sequence
  Description of Artificial Sequence: Synthetic oligonucleotide
ugaagcaaaaugacagcaa

SEQ ID NO: 2139798 - RNA, 19 nt, Artificial Sequence
  Description of Artificial Sequence: Synthetic oligonucleotide
auauguguuugucaaacuu

SEQ ID NO: 2139799 - RNA, 19 nt, Artificial Sequence
  Description of Artificial Sequence: Synthetic oligonucleotide
acugcggcaggcugcauac

SEQ ID NO: 2139800 - RNA, 19 nt, Artificial Sequence
  Description of Artificial Sequence: Synthetic oligonucleotide
caaaucuuuggcccaggcg

SEQ ID NO: 2139801 - RNA, 19 nt, Artificial Sequence
  Description of Artificial Sequence: Synthetic oligonucleotide
uccaggaagcccuugcccc

SEQ ID NO: 2139802 - RNA, 19 nt, Artificial Sequence
  Description of Artificial Sequence: Synthetic oligonucleotide
agaauccucacuguggucu

SEQ ID NO: 2139803 - RNA, 19 nt, Artificial Sequence
  Description of Artificial Sequence: Synthetic oligonucleotide
ccuacaaugcagaaagccg

SEQ ID NO: 2139804 - RNA, 19 nt, Artificial Sequence
  Description of Artificial Sequence: Synthetic oligonucleotide
uugagguuugcaaacucuc

SEQ ID NO: 2139805 - RNA, 19 nt, Artificial Sequence
  Description of Artificial Sequence: Synthetic oligonucleotide
ucggcgaaggcauccagag

SEQ ID NO: 2139806 - RNA, 19 nt, Artificial Sequence
  Description of Artificial Sequence: Synthetic oligonucleotide
aggcugaacggauucccgc

SEQ ID NO: 2139807 - RNA, 19 nt, Artificial Sequence
  Description of Artificial Sequence: Synthetic oligonucleotide
ucuaugacagcgaccccug

SEQ ID NO: 2139808 - RNA, 19 nt, Artificial Sequence
  Description of Artificial Sequence: Synthetic oligonucleotide
acgcaggaaagucugcagg

SEQ ID NO: 2139809 - RNA, 19 nt, Artificial Sequence
  Description of Artificial Sequence: Synthetic oligonucleotide
ucaaagggaucaaucuccu

SEQ ID NO: 2139810 - RNA, 19 nt, Artificial Sequence
  Description of Artificial Sequence: Synthetic oligonucleotide
ggagcagucuaugacagcg

SEQ ID NO: 2139811 - RNA, 19 nt, Artificial Sequence
  Description of Artificial Sequence: Synthetic oligonucleotide
uacaaugcagaaagccgca

SEQ ID NO: 2139812 - RNA, 19 nt, Artificial Sequence
  Description of Artificial Sequence: Synthetic oligonucleotide
uguugucuccuccauuaac

SEQ ID NO: 2139813 - RNA, 19 nt, Artificial Sequence
  Description of Artificial Sequence: Synthetic oligonucleotide
uguguuugucaaacuucag

SEQ ID NO: 2139814 - RNA, 19 nt, Artificial Sequence
  Description of Artificial Sequence: Synthetic oligonucleotide
uuccacgcaggaaagucug

SEQ ID NO: 2139815 - RNA, 19 nt, Artificial Sequence
  Description of Artificial Sequence: Synthetic oligonucleotide
aggagguaaggcaggagcc

SEQ ID NO: 2139816 - RNA, 19 nt, Artificial Sequence
  Description of Artificial Sequence: Synthetic oligonucleotide
ucuaggagcugucgguuca

SEQ ID NO: 2139817 - RNA, 19 nt, Artificial Sequence
  Description of Artificial Sequence: Synthetic oligonucleotide
aaugacagcaaggucugaa

SEQ ID NO: 2139818 - RNA, 19 nt, Artificial Sequence
  Description of Artificial Sequence: Synthetic oligonucleotide
aaacuucagucucucuggu

SEQ ID NO: 2139819 - RNA, 19 nt, Artificial Sequence
  Description of Artificial Sequence: Synthetic oligonucleotide
caucaaagggaucaaucuc

SEQ ID NO: 2139820 - RNA, 19 nt, Artificial Sequence
  Description of Artificial Sequence: Synthetic oligonucleotide
uaugacagcgaccccugac

SEQ ID NO: 2139821 - RNA, 19 nt, Artificial Sequence
  Description of Artificial Sequence: Synthetic oligonucleotide
ccacuuaaacuucugaagc

SEQ ID NO: 2139822 - RNA, 19 nt, Artificial Sequence
  Description of Artificial Sequence: Synthetic oligonucleotide
cuucucuaggagcugucgg

SEQ ID NO: 2139823 - RNA, 19 nt, Artificial Sequence
  Description of Artificial Sequence: Synthetic oligonucleotide
gucgcaguggccaagcucc

SEQ ID NO: 2139824 - RNA, 19 nt, Artificial Sequence
  Description of Artificial Sequence: Synthetic oligonucleotide
cauuaacacaagcuucuug

SEQ ID NO: 2139825 - RNA, 19 nt, Artificial Sequence
  Description of Artificial Sequence: Synthetic oligonucleotide
aacuucagucucucuggug

SEQ ID NO: 2139826 - RNA, 19 nt, Artificial Sequence
  Description of Artificial Sequence: Synthetic oligonucleotide
aacauauguguuugucaaa

SEQ ID NO: 2139827 - RNA, 19 nt, Artificial Sequence
  Description of Artificial Sequence: Synthetic oligonucleotide
gcagcaaaagcuuccacgc

SEQ ID NO: 2139828 - RNA, 19 nt, Artificial Sequence
  Description of Artificial Sequence: Synthetic oligonucleotide
ugcagggucggccauaguu

SEQ ID NO: 2139829 - RNA, 19 nt, Artificial Sequence
  Description of Artificial Sequence: Synthetic oligonucleotide
aggcgggccaguuuacggc

SEQ ID NO: 2139830 - RNA, 19 nt, Artificial Sequence
  Description of Artificial Sequence: Synthetic oligonucleotide
ucuaccucuugagagcagc

SEQ ID NO: 2139831 - RNA, 19 nt, Artificial Sequence
  Description of Artificial Sequence: Synthetic oligonucleotide
aggagccgcaaauggcucc

SEQ ID NO: 2139832 - RNA, 19 nt, Artificial Sequence
  Description of Artificial Sequence: Synthetic oligonucleotide
aagucugcagggucggcca

SEQ ID NO: 2139833 - RNA, 19 nt, Artificial Sequence
  Description of Artificial Sequence: Synthetic oligonucleotide
gugucucuugauuucauuc

SEQ ID NO: 2139834 - RNA, 19 nt, Artificial Sequence
  Description of Artificial Sequence: Synthetic oligonucleotide
cauuccagaguucagugga

SEQ ID NO: 2139835 - RNA, 19 nt, Artificial Sequence
  Description of Artificial Sequence: Synthetic oligonucleotide
cugcauacuucucuaggag

SEQ ID NO: 2139836 - RNA, 19 nt, Artificial Sequence
  Description of Artificial Sequence: Synthetic oligonucleotide
aggcaggagccgcaaaugg

SEQ ID NO: 2139837 - RNA, 19 nt, Artificial Sequence
  Description of Artificial Sequence: Synthetic oligonucleotide
gagacacguacugagugcc

SEQ ID NO: 2139838 - RNA, 19 nt, Artificial Sequence
  Description of Artificial Sequence: Synthetic oligonucleotide
uguccuuggugcuagccaa

SEQ ID NO: 2139839 - RNA, 19 nt, Artificial Sequence
  Description of Artificial Sequence: Synthetic oligonucleotide
augacagcgaccccugacu

SEQ ID NO: 2139840 - RNA, 19 nt, Artificial Sequence
  Description of Artificial Sequence: Synthetic oligonucleotide
acacguacugagugccuac

SEQ ID NO: 2139841 - RNA, 19 nt, Artificial Sequence
  Description of Artificial Sequence: Synthetic oligonucleotide
cagcguaccagacccaggc

SEQ ID NO: 2139842 - RNA, 19 nt, Artificial Sequence
  Description of Artificial Sequence: Synthetic oligonucleotide
agcuucaauaacauaugug

SEQ ID NO: 2139843 - RNA, 19 nt, Artificial Sequence
  Description of Artificial Sequence: Synthetic oligonucleotide
uggucuucggacucagugu

SEQ ID NO: 2139844 - RNA, 19 nt, Artificial Sequence
  Description of Artificial Sequence: Synthetic oligonucleotide
guuuacggcccgugcagcg

SEQ ID NO: 2139845 - RNA, 19 nt, Artificial Sequence
  Description of Artificial Sequence: Synthetic oligonucleotide
uugucuccuccauuaacac

SEQ ID NO: 2139846 - RNA, 19 nt, Artificial Sequence
  Description of Artificial Sequence: Synthetic oligonucleotide
ugacagcgaccccugacug

SEQ ID NO: 2139847 - RNA, 19 nt, Artificial Sequence
  Description of Artificial Sequence: Synthetic oligonucleotide
guugucuccuccauuaaca

SEQ ID NO: 2139848 - RNA, 19 nt, Artificial Sequence
  Description of Artificial Sequence: Synthetic oligonucleotide
cauagccagggcacaaggc

SEQ ID NO: 2139849 - RNA, 19 nt, Artificial Sequence
  Description of Artificial Sequence: Synthetic oligonucleotide
acuuaaacuucugaagcaa

SEQ ID NO: 2139850 - RNA, 19 nt, Artificial Sequence
  Description of Artificial Sequence: Synthetic oligonucleotide
uuacaggguuggcagccag

SEQ ID NO: 2139851 - RNA, 19 nt, Artificial Sequence
  Description of Artificial Sequence: Synthetic oligonucleotide
ucugucugcgggagacacg

SEQ ID NO: 2139852 - RNA, 19 nt, Artificial Sequence
  Description of Artificial Sequence: Synthetic oligonucleotide
acguacugagugccuacgg

SEQ ID NO: 2139853 - RNA, 19 nt, Artificial Sequence
  Description of Artificial Sequence: Synthetic oligonucleotide
cacuuaaacuucugaagca

SEQ ID NO: 2139854 - RNA, 19 nt, Artificial Sequence
  Description of Artificial Sequence: Synthetic oligonucleotide
agcgaccccugacugugcc

SEQ ID NO: 2139855 - RNA, 19 nt, Artificial Sequence
  Description of Artificial Sequence: Synthetic oligonucleotide
gaccgccaaaucuuuggcc

SEQ ID NO: 2139856 - RNA, 19 nt, Artificial Sequence
  Description of Artificial Sequence: Synthetic oligonucleotide
aguuuacggcccgugcagc

SEQ ID NO: 2139857 - RNA, 19 nt, Artificial Sequence
  Description of Artificial Sequence: Synthetic oligonucleotide
auucccgcagcgcggcgcc

SEQ ID NO: 2139858 - RNA, 19 nt, Artificial Sequence
  Description of Artificial Sequence: Synthetic oligonucleotide
uggugcuagccaaguaccc

SEQ ID NO: 2139859 - RNA, 19 nt, Artificial Sequence
  Description of Artificial Sequence: Synthetic oligonucleotide
acuucucuaggagcugucg

SEQ ID NO: 2139860 - RNA, 19 nt, Artificial Sequence
  Description of Artificial Sequence: Synthetic oligonucleotide
ucugcgggagacacguacu

SEQ ID NO: 2139861 - RNA, 19 nt, Artificial Sequence
  Description of Artificial Sequence: Synthetic oligonucleotide
aaagccgcagcaaaagcuu

SEQ ID NO: 2139862 - RNA, 19 nt, Artificial Sequence
  Description of Artificial Sequence: Synthetic oligonucleotide
gguuugcaaacucucgccc

SEQ ID NO: 2139863 - RNA, 19 nt, Artificial Sequence
  Description of Artificial Sequence: Synthetic oligonucleotide
cugaagcaaaaugacagca

SEQ ID NO: 2139864 - RNA, 19 nt, Artificial Sequence
  Description of Artificial Sequence: Synthetic oligonucleotide
caguuuacggcccgugcag

SEQ ID NO: 2139865 - RNA, 19 nt, Artificial Sequence
  Description of Artificial Sequence: Synthetic oligonucleotide
gucggccauaguuuacagg

SEQ ID NO: 2139866 - RNA, 19 nt, Artificial Sequence
  Description of Artificial Sequence: Synthetic oligonucleotide
uguucggccugcagcaccu

SEQ ID NO: 2139867 - RNA, 19 nt, Artificial Sequence
  Description of Artificial Sequence: Synthetic oligonucleotide
ggcugcauacuucucuagg

SEQ ID NO: 2139868 - RNA, 19 nt, Artificial Sequence
  Description of Artificial Sequence: Synthetic oligonucleotide
uccagaguucaguggaguc

SEQ ID NO: 2139869 - RNA, 19 nt, Artificial Sequence
  Description of Artificial Sequence: Synthetic oligonucleotide
gucucuugauuucauucca

SEQ ID NO: 2139870 - RNA, 19 nt, Artificial Sequence
  Description of Artificial Sequence: Synthetic oligonucleotide
aaguaccccuguucggccu

SEQ ID NO: 2139871 - RNA, 19 nt, Artificial Sequence
  Description of Artificial Sequence: Synthetic oligonucleotide
gugccuacggggcugagca

SEQ ID NO: 2139872 - RNA, 19 nt, Artificial Sequence
  Description of Artificial Sequence: Synthetic oligonucleotide
auggcucccucgcaucuuc

SEQ ID NO: 2139873 - RNA, 19 nt, Artificial Sequence
  Description of Artificial Sequence: Synthetic oligonucleotide
uuacggcccgugcagcgcc

SEQ ID NO: 2139874 - RNA, 19 nt, Artificial Sequence
  Description of Artificial Sequence: Synthetic oligonucleotide
ucgcaucuucccaaagggu

SEQ ID NO: 2139875 - RNA, 19 nt, Artificial Sequence
  Description of Artificial Sequence: Synthetic oligonucleotide
caagcuucuuguuccucac

SEQ ID NO: 2139876 - RNA, 19 nt, Artificial Sequence
  Description of Artificial Sequence: Synthetic oligonucleotide
ccaggugcuggcaacaggc

SEQ ID NO: 2139877 - RNA, 19 nt, Artificial Sequence
  Description of Artificial Sequence: Synthetic oligonucleotide
gacucagugucauccaugu

SEQ ID NO: 2139878 - RNA, 19 nt, Artificial Sequence
  Description of Artificial Sequence: Synthetic oligonucleotide
caggcugaacggauucccg

SEQ ID NO: 2139879 - RNA, 19 nt, Artificial Sequence
  Description of Artificial Sequence: Synthetic oligonucleotide
guguuugucaaacuucagu

SEQ ID NO: 2139880 - RNA, 19 nt, Artificial Sequence
  Description of Artificial Sequence: Synthetic oligonucleotide
cuugccccacuuaaacuuc

SEQ ID NO: 2139881 - RNA, 19 nt, Artificial Sequence
  Description of Artificial Sequence: Synthetic oligonucleotide
agcguaccagacccaggcg

SEQ ID NO: 2139882 - RNA, 19 nt, Artificial Sequence
  Description of Artificial Sequence: Synthetic oligonucleotide
gucugcgggagacacguac

SEQ ID NO: 2139883 - RNA, 19 nt, Artificial Sequence
  Description of Artificial Sequence: Synthetic oligonucleotide
caggcgggccaguuuacgg

SEQ ID NO: 2139884 - RNA, 19 nt, Artificial Sequence
  Description of Artificial Sequence: Synthetic oligonucleotide
cauaguuuacaggguuggc

SEQ ID NO: 2139885 - RNA, 19 nt, Artificial Sequence
  Description of Artificial Sequence: Synthetic oligonucleotide
cacgcaggaaagucugcag

SEQ ID NO: 2139886 - RNA, 19 nt, Artificial Sequence
  Description of Artificial Sequence: Synthetic oligonucleotide
agugccuacggggcugagc

SEQ ID NO: 2139887 - RNA, 19 nt, Artificial Sequence
  Description of Artificial Sequence: Synthetic oligonucleotide
gccuacaaugcagaaagcc

SEQ ID NO: 2139888 - RNA, 19 nt, Artificial Sequence
  Description of Artificial Sequence: Synthetic oligonucleotide
ggagacacguacugagugc

SEQ ID NO: 2139889 - RNA, 19 nt, Artificial Sequence
  Description of Artificial Sequence: Synthetic oligonucleotide
ucugcagggucggccauag

SEQ ID NO: 2139890 - RNA, 19 nt, Artificial Sequence
  Description of Artificial Sequence: Synthetic oligonucleotide
acagcgaccccugacugug

SEQ ID NO: 2139891 - RNA, 19 nt, Artificial Sequence
  Description of Artificial Sequence: Synthetic oligonucleotide
gcguaccagacccaggcgg

SEQ ID NO: 2139892 - RNA, 19 nt, Artificial Sequence
  Description of Artificial Sequence: Synthetic oligonucleotide
cuggacuaauguacaccag

SEQ ID NO: 2139893 - RNA, 19 nt, Artificial Sequence
  Description of Artificial Sequence: Synthetic oligonucleotide
agccgcagcaaaagcuucc

SEQ ID NO: 2139894 - RNA, 19 nt, Artificial Sequence
  Description of Artificial Sequence: Synthetic oligonucleotide
cuggacugcggcaggcugc

SEQ ID NO: 2139895 - RNA, 19 nt, Artificial Sequence
  Description of Artificial Sequence: Synthetic oligonucleotide
cgcagcaaaagcuuccacg

SEQ ID NO: 2139896 - RNA, 19 nt, Artificial Sequence
  Description of Artificial Sequence: Synthetic oligonucleotide
ugcuagccaaguaccccug

SEQ ID NO: 2139897 - RNA, 19 nt, Artificial Sequence
  Description of Artificial Sequence: Synthetic oligonucleotide
gggaucaaucuccuccucc

SEQ ID NO: 2139898 - RNA, 19 nt, Artificial Sequence
  Description of Artificial Sequence: Synthetic oligonucleotide
uuuacggcccgugcagcgc

SEQ ID NO: 2139899 - RNA, 19 nt, Artificial Sequence
  Description of Artificial Sequence: Synthetic oligonucleotide
agggaucaaucuccuccuc

SEQ ID NO: 2139900 - RNA, 19 nt, Artificial Sequence
  Description of Artificial Sequence: Synthetic oligonucleotide
cauguccacagguggccag

SEQ ID NO: 2139901 - RNA, 19 nt, Artificial Sequence
  Description of Artificial Sequence: Synthetic oligonucleotide
cugaacggauucccgcagc

SEQ ID NO: 2139902 - RNA, 19 nt, Artificial Sequence
  Description of Artificial Sequence: Synthetic oligonucleotide
acaaugcagaaagccgcag

SEQ ID NO: 2139903 - RNA, 19 nt, Artificial Sequence
  Description of Artificial Sequence: Synthetic oligonucleotide
uugccccacuuaaacuucu

SEQ ID NO: 2139904 - RNA, 19 nt, Artificial Sequence
  Description of Artificial Sequence: Synthetic oligonucleotide
uccacgcaggaaagucugc

SEQ ID NO: 2139905 - RNA, 19 nt, Artificial Sequence
  Description of Artificial Sequence: Synthetic oligonucleotide
agcucccacauagccaggg

SEQ ID NO: 2139906 - RNA, 19 nt, Artificial Sequence
  Description of Artificial Sequence: Synthetic oligonucleotide
ccauaguuuacaggguugg

SEQ ID NO: 2139907 - RNA, 19 nt, Artificial Sequence
  Description of Artificial Sequence: Synthetic oligonucleotide
uuuacaggguuggcagcca

SEQ ID NO: 2139908 - RNA, 19 nt, Artificial Sequence
  Description of Artificial Sequence: Synthetic oligonucleotide
aggagcugucgguucaggu

SEQ ID NO: 2139909 - RNA, 19 nt, Artificial Sequence
  Description of Artificial Sequence: Synthetic oligonucleotide
cuguucggccugcagcacc

SEQ ID NO: 2139910 - RNA, 19 nt, Artificial Sequence
  Description of Artificial Sequence: Synthetic oligonucleotide
ucggacucagugucaucca

SEQ ID NO: 2139911 - RNA, 19 nt, Artificial Sequence
  Description of Artificial Sequence: Synthetic oligonucleotide
gcgggagacacguacugag

SEQ ID NO: 2139912 - RNA, 19 nt, Artificial Sequence
  Description of Artificial Sequence: Synthetic oligonucleotide
uacggggcugagcaccaga

SEQ ID NO: 2139913 - RNA, 19 nt, Artificial Sequence
  Description of Artificial Sequence: Synthetic oligonucleotide
ugcggcaggcugcauacuu

SEQ ID NO: 2139914 - RNA, 19 nt, Artificial Sequence
  Description of Artificial Sequence: Synthetic oligonucleotide
aggcugcauacuucucuag

SEQ ID NO: 2139915 - RNA, 19 nt, Artificial Sequence
  Description of Artificial Sequence: Synthetic oligonucleotide
gcaaaaugacagcaagguc

SEQ ID NO: 2139916 - RNA, 19 nt, Artificial Sequence
  Description of Artificial Sequence: Synthetic oligonucleotide
cuuuggcccaggcgcaggc

SEQ ID NO: 2139917 - RNA, 19 nt, Artificial Sequence
  Description of Artificial Sequence: Synthetic oligonucleotide
uuggccugaaccucuucuu

SEQ ID NO: 2139918 - RNA, 19 nt, Artificial Sequence
  Description of Artificial Sequence: Synthetic oligonucleotide
acacaagcuucuuguuccu

SEQ ID NO: 2139919 - RNA, 19 nt, Artificial Sequence
  Description of Artificial Sequence: Synthetic oligonucleotide
uacuucucuaggagcuguc

SEQ ID NO: 2139920 - RNA, 19 nt, Artificial Sequence
  Description of Artificial Sequence: Synthetic oligonucleotide
gccgcaaauggcucccucg

SEQ ID NO: 2139921 - RNA, 19 nt, Artificial Sequence
  Description of Artificial Sequence: Synthetic oligonucleotide
ggagcugucgguucagguc

SEQ ID NO: 2139922 - RNA, 19 nt, Artificial Sequence
  Description of Artificial Sequence: Synthetic oligonucleotide
cacguacugagugccuacg

SEQ ID NO: 2139923 - RNA, 19 nt, Artificial Sequence
  Description of Artificial Sequence: Synthetic oligonucleotide
caggugcuggcaacaggcc

SEQ ID NO: 2139924 - RNA, 19 nt, Artificial Sequence
  Description of Artificial Sequence: Synthetic oligonucleotide
ugccccacuuaaacuucug

SEQ ID NO: 2139925 - RNA, 19 nt, Artificial Sequence
  Description of Artificial Sequence: Synthetic oligonucleotide
cucuaggagcugucgguuc

SEQ ID NO: 2139926 - RNA, 19 nt, Artificial Sequence
  Description of Artificial Sequence: Synthetic oligonucleotide
aguggccaagcucccacau

SEQ ID NO: 2139927 - RNA, 19 nt, Artificial Sequence
  Description of Artificial Sequence: Synthetic oligonucleotide
agccuacaaugcagaaagc

SEQ ID NO: 2139928 - RNA, 19 nt, Artificial Sequence
  Description of Artificial Sequence: Synthetic oligonucleotide
cgcaucuucccaaagggug

SEQ ID NO: 2139929 - RNA, 19 nt, Artificial Sequence
  Description of Artificial Sequence: Synthetic oligonucleotide
uguccuccccagaauccuc

SEQ ID NO: 2139930 - RNA, 19 nt, Artificial Sequence
  Description of Artificial Sequence: Synthetic oligonucleotide
agccgcaaauggcucccuc

SEQ ID NO: 2139931 - RNA, 19 nt, Artificial Sequence
  Description of Artificial Sequence: Synthetic oligonucleotide
accagcugucugucugcgg

SEQ ID NO: 2139932 - RNA, 19 nt, Artificial Sequence
  Description of Artificial Sequence: Synthetic oligonucleotide
acggggcugagcaccagac

SEQ ID NO: 2139933 - RNA, 19 nt, Artificial Sequence
  Description of Artificial Sequence: Synthetic oligonucleotide
gauucccgcagcgcggcgc

SEQ ID NO: 2139934 - RNA, 19 nt, Artificial Sequence
  Description of Artificial Sequence: Synthetic oligonucleotide
guuugcaaacucucgcccu

SEQ ID NO: 2139935 - RNA, 19 nt, Artificial Sequence
  Description of Artificial Sequence: Synthetic oligonucleotide
cucuugagagcagcuguug

SEQ ID NO: 2139936 - RNA, 19 nt, Artificial Sequence
  Description of Artificial Sequence: Synthetic oligonucleotide
gaacggauucccgcagcgc

SEQ ID NO: 2139937 - RNA, 19 nt, Artificial Sequence
  Description of Artificial Sequence: Synthetic oligonucleotide
cauccagagagcggccggg

SEQ ID NO: 2139938 - RNA, 19 nt, Artificial Sequence
  Description of Artificial Sequence: Synthetic oligonucleotide
gacugugccaccagcuguc

SEQ ID NO: 2139939 - RNA, 19 nt, Artificial Sequence
  Description of Artificial Sequence: Synthetic oligonucleotide
caaagggaucaaucuccuc

SEQ ID NO: 2139940 - RNA, 19 nt, Artificial Sequence
  Description of Artificial Sequence: Synthetic oligonucleotide
ggugcuagccaaguacccc

SEQ ID NO: 2139941 - RNA, 19 nt, Artificial Sequence
  Description of Artificial Sequence: Synthetic oligonucleotide
cgcaggaaagucugcaggg

SEQ ID NO: 2139942 - RNA, 19 nt, Artificial Sequence
  Description of Artificial Sequence: Synthetic oligonucleotide
ucucuaggagcugucgguu

SEQ ID NO: 2139943 - RNA, 19 nt, Artificial Sequence
  Description of Artificial Sequence: Synthetic oligonucleotide
ugccaccucuggacuaaug

SEQ ID NO: 2139944 - RNA, 19 nt, Artificial Sequence
  Description of Artificial Sequence: Synthetic oligonucleotide
uggugucucuugauuucau

SEQ ID NO: 2139945 - RNA, 19 nt, Artificial Sequence
  Description of Artificial Sequence: Synthetic oligonucleotide
cugcgggagacacguacug

SEQ ID NO: 2139946 - RNA, 19 nt, Artificial Sequence
  Description of Artificial Sequence: Synthetic oligonucleotide
agggugucucauccagucu

SEQ ID NO: 2139947 - RNA, 19 nt, Artificial Sequence
  Description of Artificial Sequence: Synthetic oligonucleotide
cugucucuaccucuugaga

SEQ ID NO: 2139948 - RNA, 19 nt, Artificial Sequence
  Description of Artificial Sequence: Synthetic oligonucleotide
ggugucucauccagucugg

SEQ ID NO: 2139949 - RNA, 19 nt, Artificial Sequence
  Description of Artificial Sequence: Synthetic oligonucleotide
cacauagccagggcacaag

SEQ ID NO: 2139950 - RNA, 19 nt, Artificial Sequence
  Description of Artificial Sequence: Synthetic oligonucleotide
ugcgggagacacguacuga

SEQ ID NO: 2139951 - RNA, 19 nt, Artificial Sequence
  Description of Artificial Sequence: Synthetic oligonucleotide
uccuuggugcuagccaagu

SEQ ID NO: 2139952 - RNA, 19 nt, Artificial Sequence
  Description of Artificial Sequence: Synthetic oligonucleotide
guugagguuugcaaacucu

SEQ ID NO: 2139953 - RNA, 19 nt, Artificial Sequence
  Description of Artificial Sequence: Synthetic oligonucleotide
acaccagcuucaauaacau

SEQ ID NO: 2139954 - RNA, 19 nt, Artificial Sequence
  Description of Artificial Sequence: Synthetic oligonucleotide
cguacugagugccuacggg

SEQ ID NO: 2139955 - RNA, 19 nt, Artificial Sequence
  Description of Artificial Sequence: Synthetic oligonucleotide
ugagcaccagaccgccaaa

SEQ ID NO: 2139956 - RNA, 19 nt, Artificial Sequence
  Description of Artificial Sequence: Synthetic oligonucleotide
gucugucugcgggagacac

SEQ ID NO: 2139957 - RNA, 19 nt, Artificial Sequence
  Description of Artificial Sequence: Synthetic oligonucleotide
uggcccaggagcagucuau

SEQ ID NO: 2139958 - RNA, 19 nt, Artificial Sequence
  Description of Artificial Sequence: Synthetic oligonucleotide
gccgccucaggcugaacgg

SEQ ID NO: 2139959 - RNA, 19 nt, Artificial Sequence
  Description of Artificial Sequence: Synthetic oligonucleotide
aguggagucuuuggccuga

SEQ ID NO: 2139960 - RNA, 19 nt, Artificial Sequence
  Description of Artificial Sequence: Synthetic oligonucleotide
gcugaacggauucccgcag

SEQ ID NO: 2139961 - RNA, 19 nt, Artificial Sequence
  Description of Artificial Sequence: Synthetic oligonucleotide
cugagcaccagaccgccaa

SEQ ID NO: 2139962 - RNA, 19 nt, Artificial Sequence
  Description of Artificial Sequence: Synthetic oligonucleotide
gguccaggaagcccuugcc

SEQ ID NO: 2139963 - RNA, 19 nt, Artificial Sequence
  Description of Artificial Sequence: Synthetic oligonucleotide
acccaggcgggccaguuua

SEQ ID NO: 2139964 - RNA, 19 nt, Artificial Sequence
  Description of Artificial Sequence: Synthetic oligonucleotide
uggacugcggcaggcugca

SEQ ID NO: 2139965 - RNA, 19 nt, Artificial Sequence
  Description of Artificial Sequence: Synthetic oligonucleotide
acggauucccgcagcgcgg

SEQ ID NO: 2139966 - RNA, 19 nt, Artificial Sequence
  Description of Artificial Sequence: Synthetic oligonucleotide
caguggagucuuuggccug

SEQ ID NO: 2139967 - RNA, 19 nt, Artificial Sequence
  Description of Artificial Sequence: Synthetic oligonucleotide
cucuaccucuugagagcag

SEQ ID NO: 2139968 - RNA, 19 nt, Artificial Sequence
  Description of Artificial Sequence: Synthetic oligonucleotide
auccagagagcggccgggg

SEQ ID NO: 2139969 - RNA, 19 nt, Artificial Sequence
  Description of Artificial Sequence: Synthetic oligonucleotide
caggagccgcaaauggcuc

SEQ ID NO: 2139970 - RNA, 19 nt, Artificial Sequence
  Description of Artificial Sequence: Synthetic oligonucleotide
uacggcccgugcagcgccg

SEQ ID NO: 2139971 - RNA, 19 nt, Artificial Sequence
  Description of Artificial Sequence: Synthetic oligonucleotide
ggucggccauaguuuacag

SEQ ID NO: 2139972 - RNA, 19 nt, Artificial Sequence
  Description of Artificial Sequence: Synthetic oligonucleotide
cagaauccucacugugguc

SEQ ID NO: 2139973 - RNA, 19 nt, Artificial Sequence
  Description of Artificial Sequence: Synthetic oligonucleotide
gacuaauguacaccagcuu

SEQ ID NO: 2139974 - RNA, 19 nt, Artificial Sequence
  Description of Artificial Sequence: Synthetic oligonucleotide
gccauaguuuacaggguug

SEQ ID NO: 2139975 - RNA, 19 nt, Artificial Sequence
  Description of Artificial Sequence: Synthetic oligonucleotide
cauccagucuggcccagga

SEQ ID NO: 2139976 - RNA, 19 nt, Artificial Sequence
  Description of Artificial Sequence: Synthetic oligonucleotide
ucgcaguggccaagcuccc

SEQ ID NO: 2139977 - RNA, 19 nt, Artificial Sequence
  Description of Artificial Sequence: Synthetic oligonucleotide
gccgucguggcccucggcc

SEQ ID NO: 2139978 - RNA, 19 nt, Artificial Sequence
  Description of Artificial Sequence: Synthetic oligonucleotide
cugagugccuacggggcug

SEQ ID NO: 2139979 - RNA, 19 nt, Artificial Sequence
  Description of Artificial Sequence: Synthetic oligonucleotide
gacacguacugagugccua

SEQ ID NO: 2139980 - RNA, 19 nt, Artificial Sequence
  Description of Artificial Sequence: Synthetic oligonucleotide
cuuccacgcaggaaagucu

SEQ ID NO: 2139981 - RNA, 19 nt, Artificial Sequence
  Description of Artificial Sequence: Synthetic oligonucleotide
cucggcgaaggcauccaga

SEQ ID NO: 2139982 - RNA, 19 nt, Artificial Sequence
  Description of Artificial Sequence: Synthetic oligonucleotide
ggcugaacggauucccgca

SEQ ID NO: 2139983 - RNA, 19 nt, Artificial Sequence
  Description of Artificial Sequence: Synthetic oligonucleotide
gacugcggcaggcugcaua

SEQ ID NO: 2139984 - RNA, 19 nt, Artificial Sequence
  Description of Artificial Sequence: Synthetic oligonucleotide
gcaggcagcguaccagacc

SEQ ID NO: 2139985 - RNA, 19 nt, Artificial Sequence
  Description of Artificial Sequence: Synthetic oligonucleotide
aauggcucccucgcaucuu

SEQ ID NO: 2139986 - RNA, 19 nt, Artificial Sequence
  Description of Artificial Sequence: Synthetic oligonucleotide
cugucgguucagguccagg

SEQ ID NO: 2139987 - RNA, 19 nt, Artificial Sequence
  Description of Artificial Sequence: Synthetic oligonucleotide
cuccucggcgaaggcaucc

SEQ ID NO: 2139988 - RNA, 19 nt, Artificial Sequence
  Description of Artificial Sequence: Synthetic oligonucleotide
ugagugccuacggggcuga

SEQ ID NO: 2139989 - RNA, 19 nt, Artificial Sequence
  Description of Artificial Sequence: Synthetic oligonucleotide
agggucggccauaguuuac

SEQ ID NO: 2139990 - RNA, 19 nt, Artificial Sequence
  Description of Artificial Sequence: Synthetic oligonucleotide
gccuguugagguuugcaaa

SEQ ID NO: 2139991 - RNA, 19 nt, Artificial Sequence
  Description of Artificial Sequence: Synthetic oligonucleotide
gccaguuuacggcccgugc

SEQ ID NO: 2139992 - RNA, 19 nt, Artificial Sequence
  Description of Artificial Sequence: Synthetic oligonucleotide
gcuuccacgcaggaaaguc

SEQ ID NO: 2139993 - RNA, 19 nt, Artificial Sequence
  Description of Artificial Sequence: Synthetic oligonucleotide
cagcuucaauaacauaugu

SEQ ID NO: 2139994 - RNA, 19 nt, Artificial Sequence
  Description of Artificial Sequence: Synthetic oligonucleotide
ugucugucugcgggagaca

SEQ ID NO: 2139995 - RNA, 19 nt, Artificial Sequence
  Description of Artificial Sequence: Synthetic oligonucleotide
ucgguccuggggccgcgca

SEQ ID NO: 2139996 - RNA, 19 nt, Artificial Sequence
  Description of Artificial Sequence: Synthetic oligonucleotide
ggucugaaaagccuacaau

SEQ ID NO: 2139997 - RNA, 19 nt, Artificial Sequence
  Description of Artificial Sequence: Synthetic oligonucleotide
ggacuaauguacaccagcu

SEQ ID NO: 2139998 - RNA, 19 nt, Artificial Sequence
  Description of Artificial Sequence: Synthetic oligonucleotide
gccaggugcuggcaacagg

SEQ ID NO: 2139999 - RNA, 19 nt, Artificial Sequence
  Description of Artificial Sequence: Synthetic oligonucleotide
ggcagcguaccagacccag

SEQ ID NO: 2140000 - RNA, 19 nt, Artificial Sequence
  Description of Artificial Sequence: Synthetic oligonucleotide
ggucgcaguggccaagcuc

SEQ ID NO: 2140001 - RNA, 19 nt, Artificial Sequence
  Description of Artificial Sequence: Synthetic oligonucleotide
caggcugcauacuucucua

SEQ ID NO: 2140002 - RNA, 19 nt, Artificial Sequence
  Description of Artificial Sequence: Synthetic oligonucleotide
ccgcaaauggcucccucgc

SEQ ID NO: 2140003 - RNA, 19 nt, Artificial Sequence
  Description of Artificial Sequence: Synthetic oligonucleotide
ggggcgccgagcacgaccg

SEQ ID NO: 2140004 - RNA, 19 nt, Artificial Sequence
  Description of Artificial Sequence: Synthetic oligonucleotide
ucccucgcaucuucccaaa

SEQ ID NO: 2140005 - RNA, 19 nt, Artificial Sequence
  Description of Artificial Sequence: Synthetic oligonucleotide
aggccuguugagguuugca

SEQ ID NO: 2140006 - RNA, 19 nt, Artificial Sequence
  Description of Artificial Sequence: Synthetic oligonucleotide
caauaacauauguguuugu

SEQ ID NO: 2140007 - RNA, 19 nt, Artificial Sequence
  Description of Artificial Sequence: Synthetic oligonucleotide
ggccuguugagguuugcaa

SEQ ID NO: 2140008 - RNA, 19 nt, Artificial Sequence
  Description of Artificial Sequence: Synthetic oligonucleotide
ccgagcacgaccgcucucg

SEQ ID NO: 2140009 - RNA, 19 nt, Artificial Sequence
  Description of Artificial Sequence: Synthetic oligonucleotide
guccuuggugcuagccaag

SEQ ID NO: 2140010 - RNA, 19 nt, Artificial Sequence
  Description of Artificial Sequence: Synthetic oligonucleotide
gcaccagaccgccaaaucu

SEQ ID NO: 2140011 - RNA, 19 nt, Artificial Sequence
  Description of Artificial Sequence: Synthetic oligonucleotide
agggcacaaggcagcgccg

SEQ ID NO: 2140012 - RNA, 19 nt, Artificial Sequence
  Description of Artificial Sequence: Synthetic oligonucleotide
gccuacggggcugagcacc

SEQ ID NO: 2140013 - RNA, 19 nt, Artificial Sequence
  Description of Artificial Sequence: Synthetic oligonucleotide
cacagccuucuugcggccc

SEQ ID NO: 2140014 - RNA, 19 nt, Artificial Sequence
  Description of Artificial Sequence: Synthetic oligonucleotide
uggggccgcgcacagccuu

SEQ ID NO: 2140015 - RNA, 19 nt, Artificial Sequence
  Description of Artificial Sequence: Synthetic oligonucleotide
cacaagcuucuuguuccuc

SEQ ID NO: 2140016 - RNA, 19 nt, Artificial Sequence
  Description of Artificial Sequence: Synthetic oligonucleotide
cucccucgcaucuucccaa

SEQ ID NO: 2140017 - RNA, 19 nt, Artificial Sequence
  Description of Artificial Sequence: Synthetic oligonucleotide
accccugacugugccacca

SEQ ID NO: 2140018 - RNA, 19 nt, Artificial Sequence
  Description of Artificial Sequence: Synthetic oligonucleotide
cugucugcgggagacacgu

SEQ ID NO: 2140019 - RNA, 19 nt, Artificial Sequence
  Description of Artificial Sequence: Synthetic oligonucleotide
ccaguuuacggcccgugca

SEQ ID NO: 2140020 - RNA, 19 nt, Artificial Sequence
  Description of Artificial Sequence: Synthetic oligonucleotide
caccuccucuggacugcgg

SEQ ID NO: 2140021 - RNA, 19 nt, Artificial Sequence
  Description of Artificial Sequence: Synthetic oligonucleotide
agucucucuggugucucuu

SEQ ID NO: 2140022 - RNA, 19 nt, Artificial Sequence
  Description of Artificial Sequence: Synthetic oligonucleotide
gggguguccuuggugcuag

SEQ ID NO: 2140023 - RNA, 19 nt, Artificial Sequence
  Description of Artificial Sequence: Synthetic oligonucleotide
cagggucggccauaguuua

SEQ ID NO: 2140024 - RNA, 19 nt, Artificial Sequence
  Description of Artificial Sequence: Synthetic oligonucleotide
ccgcucucgguccuggggc

SEQ ID NO: 2140025 - RNA, 19 nt, Artificial Sequence
  Description of Artificial Sequence: Synthetic oligonucleotide
agguaaggcaggagccgca

SEQ ID NO: 2140026 - RNA, 19 nt, Artificial Sequence
  Description of Artificial Sequence: Synthetic oligonucleotide
ggcugagcaccagaccgcc

SEQ ID NO: 2140027 - RNA, 19 nt, Artificial Sequence
  Description of Artificial Sequence: Synthetic oligonucleotide
agacacguacugagugccu

SEQ ID NO: 2140028 - RNA, 19 nt, Artificial Sequence
  Description of Artificial Sequence: Synthetic oligonucleotide
gccgcgcacagccuucuug

SEQ ID NO: 2140029 - RNA, 19 nt, Artificial Sequence
  Description of Artificial Sequence: Synthetic oligonucleotide
ugccuacggggcugagcac

SEQ ID NO: 2140030 - RNA, 19 nt, Artificial Sequence
  Description of Artificial Sequence: Synthetic oligonucleotide
caccagaccgccaaaucuu

SEQ ID NO: 2140031 - RNA, 19 nt, Artificial Sequence
  Description of Artificial Sequence: Synthetic oligonucleotide
acucucgcccugaguccac

SEQ ID NO: 2140032 - RNA, 19 nt, Artificial Sequence
  Description of Artificial Sequence: Synthetic oligonucleotide
cuaccucuugagagcagcu

SEQ ID NO: 2140033 - RNA, 19 nt, Artificial Sequence
  Description of Artificial Sequence: Synthetic oligonucleotide
cagucuggcccaggagcag

SEQ ID NO: 2140034 - RNA, 19 nt, Artificial Sequence
  Description of Artificial Sequence: Synthetic oligonucleotide
gcacgaccgcucucggucc

SEQ ID NO: 2140035 - RNA, 19 nt, Artificial Sequence
  Description of Artificial Sequence: Synthetic oligonucleotide
cccuguucggccugcagca

SEQ ID NO: 2140036 - RNA, 19 nt, Artificial Sequence
  Description of Artificial Sequence: Synthetic oligonucleotide
gccccacuuaaacuucuga

SEQ ID NO: 2140037 - RNA, 19 nt, Artificial Sequence
  Description of Artificial Sequence: Synthetic oligonucleotide
gcaaauggcucccucgcau

SEQ ID NO: 2140038 - RNA, 19 nt, Artificial Sequence
  Description of Artificial Sequence: Synthetic oligonucleotide
cuaugacagcgaccccuga

SEQ ID NO: 2140039 - RNA, 19 nt, Artificial Sequence
  Description of Artificial Sequence: Synthetic oligonucleotide
ccgucguggcccucggccg

SEQ ID NO: 2140040 - RNA, 19 nt, Artificial Sequence
  Description of Artificial Sequence: Synthetic oligonucleotide
gggucggccauaguuuaca

SEQ ID NO: 2140041 - RNA, 19 nt, Artificial Sequence
  Description of Artificial Sequence: Synthetic oligonucleotide
caggcgcaggcagcguacc

SEQ ID NO: 2140042 - RNA, 19 nt, Artificial Sequence
  Description of Artificial Sequence: Synthetic oligonucleotide
cagcgaccccugacugugc

SEQ ID NO: 2140043 - RNA, 19 nt, Artificial Sequence
  Description of Artificial Sequence: Synthetic oligonucleotide
ccagaccgccaaaucuuug

SEQ ID NO: 2140044 - RNA, 19 nt, Artificial Sequence
  Description of Artificial Sequence: Synthetic oligonucleotide
gccaaaucuuuggcccagg

SEQ ID NO: 2140045 - RNA, 19 nt, Artificial Sequence
  Description of Artificial Sequence: Synthetic oligonucleotide
ggccugaaccucuucuucu

SEQ ID NO: 2140046 - RNA, 19 nt, Artificial Sequence
  Description of Artificial Sequence: Synthetic oligonucleotide
gucuucggacucaguguca

SEQ ID NO: 2140047 - RNA, 19 nt, Artificial Sequence
  Description of Artificial Sequence: Synthetic oligonucleotide
gcggcgcccaccuccucgg

SEQ ID NO: 2140048 - RNA, 19 nt, Artificial Sequence
  Description of Artificial Sequence: Synthetic oligonucleotide
gcagcguaccagacccagg

SEQ ID NO: 2140049 - RNA, 19 nt, Artificial Sequence
  Description of Artificial Sequence: Synthetic oligonucleotide
ugucugcgggagacacgua

SEQ ID NO: 2140050 - RNA, 19 nt, Artificial Sequence
  Description of Artificial Sequence: Synthetic oligonucleotide
cccugacugugccaccagc

SEQ ID NO: 2140051 - RNA, 19 nt, Artificial Sequence
  Description of Artificial Sequence: Synthetic oligonucleotide
gggcacaaggcagcgccgc

SEQ ID NO: 2140052 - RNA, 19 nt, Artificial Sequence
  Description of Artificial Sequence: Synthetic oligonucleotide
gggcugagcaccagaccgc

SEQ ID NO: 2140053 - RNA, 19 nt, Artificial Sequence
  Description of Artificial Sequence: Synthetic oligonucleotide
ggauucccgcagcgcggcg

SEQ ID NO: 2140054 - RNA, 19 nt, Artificial Sequence
  Description of Artificial Sequence: Synthetic oligonucleotide
caccagcuucaauaacaua

SEQ ID NO: 2140055 - RNA, 19 nt, Artificial Sequence
  Description of Artificial Sequence: Synthetic oligonucleotide
cagaguucaguggagucuu

SEQ ID NO: 2140056 - RNA, 19 nt, Artificial Sequence
  Description of Artificial Sequence: Synthetic oligonucleotide
ccuugccccacuuaaacuu

SEQ ID NO: 2140057 - RNA, 19 nt, Artificial Sequence
  Description of Artificial Sequence: Synthetic oligonucleotide
caccuccucggcgaaggca

SEQ ID NO: 2140058 - RNA, 19 nt, Artificial Sequence
  Description of Artificial Sequence: Synthetic oligonucleotide
agggguguccuuggugcua

SEQ ID NO: 2140059 - RNA, 19 nt, Artificial Sequence
  Description of Artificial Sequence: Synthetic oligonucleotide
cacccucaucacuguccuc

SEQ ID NO: 2140060 - RNA, 19 nt, Artificial Sequence
  Description of Artificial Sequence: Synthetic oligonucleotide
gagcacgaccgcucucggu

SEQ ID NO: 2140061 - RNA, 19 nt, Artificial Sequence
  Description of Artificial Sequence: Synthetic oligonucleotide
ggcccgugcagcgccgggg

SEQ ID NO: 2140062 - RNA, 19 nt, Artificial Sequence
  Description of Artificial Sequence: Synthetic oligonucleotide
agcccuugccccacuuaaa

SEQ ID NO: 2140063 - RNA, 19 nt, Artificial Sequence
  Description of Artificial Sequence: Synthetic oligonucleotide
cuacggggcugagcaccag

SEQ ID NO: 2140064 - RNA, 19 nt, Artificial Sequence
  Description of Artificial Sequence: Synthetic oligonucleotide
ggccaguuuacggcccgug

SEQ ID NO: 2140065 - RNA, 19 nt, Artificial Sequence
  Description of Artificial Sequence: Synthetic oligonucleotide
ggccaggugcuggcaacag

SEQ ID NO: 2140066 - RNA, 19 nt, Artificial Sequence
  Description of Artificial Sequence: Synthetic oligonucleotide
acggcccgugcagcgccgg

SEQ ID NO: 2140067 - RNA, 19 nt, Artificial Sequence
  Description of Artificial Sequence: Synthetic oligonucleotide
gucguggcccucggccgcc

SEQ ID NO: 2140068 - RNA, 19 nt, Artificial Sequence
  Description of Artificial Sequence: Synthetic oligonucleotide
gagcaccagaccgccaaau

SEQ ID NO: 2140069 - RNA, 19 nt, Artificial Sequence
  Description of Artificial Sequence: Synthetic oligonucleotide
ccucggccgccucaggcug

SEQ ID NO: 2140070 - RNA, 19 nt, Artificial Sequence
  Description of Artificial Sequence: Synthetic oligonucleotide
acgaccgcucucgguccug

SEQ ID NO: 2140071 - RNA, 19 nt, Artificial Sequence
  Description of Artificial Sequence: Synthetic oligonucleotide
gagugccuacggggcugag

SEQ ID NO: 2140072 - RNA, 19 nt, Artificial Sequence
  Description of Artificial Sequence: Synthetic oligonucleotide
agaguucaguggagucuuu

SEQ ID NO: 2140073 - RNA, 19 nt, Artificial Sequence
  Description of Artificial Sequence: Synthetic oligonucleotide
agacccaggcgggccaguu

SEQ ID NO: 2140074 - RNA, 19 nt, Artificial Sequence
  Description of Artificial Sequence: Synthetic oligonucleotide
gcaaacucucgcccugagu

SEQ ID NO: 2140075 - RNA, 19 nt, Artificial Sequence
  Description of Artificial Sequence: Synthetic oligonucleotide
ccacgcaggaaagucugca

SEQ ID NO: 2140076 - RNA, 19 nt, Artificial Sequence
  Description of Artificial Sequence: Synthetic oligonucleotide
ucggccgccucaggcugaa

SEQ ID NO: 2140077 - RNA, 19 nt, Artificial Sequence
  Description of Artificial Sequence: Synthetic oligonucleotide
ccucuggacugcggcaggc

SEQ ID NO: 2140078 - RNA, 19 nt, Artificial Sequence
  Description of Artificial Sequence: Synthetic oligonucleotide
cccucgcaucuucccaaag

SEQ ID NO: 2140079 - RNA, 19 nt, Artificial Sequence
  Description of Artificial Sequence: Synthetic oligonucleotide
ccuacggggcugagcacca

SEQ ID NO: 2140080 - RNA, 19 nt, Artificial Sequence
  Description of Artificial Sequence: Synthetic oligonucleotide
ccgcagcaaaagcuuccac

SEQ ID NO: 2140081 - RNA, 19 nt, Artificial Sequence
  Description of Artificial Sequence: Synthetic oligonucleotide
gcggcaggcugcauacuuc

SEQ ID NO: 2140082 - RNA, 19 nt, Artificial Sequence
  Description of Artificial Sequence: Synthetic oligonucleotide
ccgccaaaucuuuggccca

SEQ ID NO: 2140083 - RNA, 19 nt, Artificial Sequence
  Description of Artificial Sequence: Synthetic oligonucleotide
cagggguguccuuggugcu

SEQ ID NO: 2140084 - RNA, 19 nt, Artificial Sequence
  Description of Artificial Sequence: Synthetic oligonucleotide
uucccgcagcgcggcgccc

SEQ ID NO: 2140085 - RNA, 19 nt, Artificial Sequence
  Description of Artificial Sequence: Synthetic oligonucleotide
cgagcacgaccgcucucgg

SEQ ID NO: 2140086 - RNA, 19 nt, Artificial Sequence
  Description of Artificial Sequence: Synthetic oligonucleotide
gggccgucguggcccucgg

SEQ ID NO: 2140087 - RNA, 19 nt, Artificial Sequence
  Description of Artificial Sequence: Synthetic oligonucleotide
aggcagcguaccagaccca

SEQ ID NO: 2140088 - RNA, 19 nt, Artificial Sequence
  Description of Artificial Sequence: Synthetic oligonucleotide
caacaggccuguugagguu

SEQ ID NO: 2140089 - RNA, 19 nt, Artificial Sequence
  Description of Artificial Sequence: Synthetic oligonucleotide
cucucgcccugaguccaca

SEQ ID NO: 2140090 - RNA, 19 nt, Artificial Sequence
  Description of Artificial Sequence: Synthetic oligonucleotide
gcugucgguucagguccag

SEQ ID NO: 2140091 - RNA, 19 nt, Artificial Sequence
  Description of Artificial Sequence: Synthetic oligonucleotide
gcagggucggccauaguuu

SEQ ID NO: 2140092 - RNA, 19 nt, Artificial Sequence
  Description of Artificial Sequence: Synthetic oligonucleotide
cgcaggcagcguaccagac

SEQ ID NO: 2140093 - RNA, 19 nt, Artificial Sequence
  Description of Artificial Sequence: Synthetic oligonucleotide
cgucguggcccucggccgc

SEQ ID NO: 2140094 - RNA, 19 nt, Artificial Sequence
  Description of Artificial Sequence: Synthetic oligonucleotide
ccccugacugugccaccag

SEQ ID NO: 2140095 - RNA, 19 nt, Artificial Sequence
  Description of Artificial Sequence: Synthetic oligonucleotide
gacccaggcgggccaguuu

SEQ ID NO: 2140096 - RNA, 19 nt, Artificial Sequence
  Description of Artificial Sequence: Synthetic oligonucleotide
gcgaccccugacugugcca

SEQ ID NO: 2140097 - RNA, 19 nt, Artificial Sequence
  Description of Artificial Sequence: Synthetic oligonucleotide
gcgggccaguuuacggccc

SEQ ID NO: 2140098 - RNA, 19 nt, Artificial Sequence
  Description of Artificial Sequence: Synthetic oligonucleotide
guggagucuuuggccugaa

SEQ ID NO: 2140099 - RNA, 19 nt, Artificial Sequence
  Description of Artificial Sequence: Synthetic oligonucleotide
cggauucccgcagcgcggc

SEQ ID NO: 2140100 - RNA, 19 nt, Artificial Sequence
  Description of Artificial Sequence: Synthetic oligonucleotide
cccuugccccacuuaaacu

SEQ ID NO: 2140101 - RNA, 19 nt, Artificial Sequence
  Description of Artificial Sequence: Synthetic oligonucleotide
ccuguucggccugcagcac

SEQ ID NO: 2140102 - RNA, 19 nt, Artificial Sequence
  Description of Artificial Sequence: Synthetic oligonucleotide
ccagacccaggcgggccag

SEQ ID NO: 2140103 - RNA, 19 nt, Artificial Sequence
  Description of Artificial Sequence: Synthetic oligonucleotide
cgcaaauggcucccucgca

SEQ ID NO: 2140104 - RNA, 19 nt, Artificial Sequence
  Description of Artificial Sequence: Synthetic oligonucleotide
ccuuggugcuagccaagua

SEQ ID NO: 2140105 - RNA, 19 nt, Artificial Sequence
  Description of Artificial Sequence: Synthetic oligonucleotide
ggccgucguggcccucggc

SEQ ID NO: 2140106 - RNA, 19 nt, Artificial Sequence
  Description of Artificial Sequence: Synthetic oligonucleotide
gcgccgagcacgaccgcuc

SEQ ID NO: 2140107 - RNA, 19 nt, Artificial Sequence
  Description of Artificial Sequence: Synthetic oligonucleotide
cacgaccgcucucgguccu

SEQ ID NO: 2140108 - RNA, 19 nt, Artificial Sequence
  Description of Artificial Sequence: Synthetic oligonucleotide
gccgagcacgaccgcucuc

SEQ ID NO: 2140109 - RNA, 19 nt, Artificial Sequence
  Description of Artificial Sequence: Synthetic oligonucleotide
cgaccgcucucgguccugg

SEQ ID NO: 2140110 - RNA, 19 nt, Artificial Sequence
  Description of Artificial Sequence: Synthetic oligonucleotide
gagccgcaaauggcucccu

SEQ ID NO: 2140111 - RNA, 19 nt, Artificial Sequence
  Description of Artificial Sequence: Synthetic oligonucleotide
ugcuggcaacaggccuguu

SEQ ID NO: 2140112 - RNA, 19 nt, Artificial Sequence
  Description of Artificial Sequence: Synthetic oligonucleotide
cgggccgucguggcccucg

SEQ ID NO: 2140113 - RNA, 19 nt, Artificial Sequence
  Description of Artificial Sequence: Synthetic oligonucleotide
ggcgccgagcacgaccgcu

SEQ ID NO: 2140114 - RNA, 19 nt, Artificial Sequence
  Description of Artificial Sequence: Synthetic oligonucleotide
ggggccgcgcacagccuuc

SEQ ID NO: 2140115 - RNA, 19 nt, Artificial Sequence
  Description of Artificial Sequence: Synthetic oligonucleotide
ccgccucaggcugaacgga

SEQ ID NO: 2140116 - RNA, 19 nt, Artificial Sequence
  Description of Artificial Sequence: Synthetic oligonucleotide
gggcgccgagcacgaccgc

SEQ ID NO: 2140117 - RNA, 19 nt, Artificial Sequence
  Description of Artificial Sequence: Synthetic oligonucleotide
cuggggccgcgcacagccu

SEQ ID NO: 2140118 - RNA, 19 nt, Artificial Sequence
  Description of Artificial Sequence: Synthetic oligonucleotide
cgggagacacguacugagu

SEQ ID NO: 2140119 - RNA, 19 nt, Artificial Sequence
  Description of Artificial Sequence: Synthetic oligonucleotide
ccauuaacacaagcuucuu

SEQ ID NO: 2140120 - RNA, 19 nt, Artificial Sequence
  Description of Artificial Sequence: Synthetic oligonucleotide
cgcccugaguccacaucaa

SEQ ID NO: 2140121 - RNA, 19 nt, Artificial Sequence
  Description of Artificial Sequence: Synthetic oligonucleotide
cggccauaguuuacagggu

SEQ ID NO: 2140122 - RNA, 19 nt, Artificial Sequence
  Description of Artificial Sequence: Synthetic oligonucleotide
gggccgcgcacagccuucu

SEQ ID NO: 2140123 - RNA, 19 nt, Artificial Sequence
  Description of Artificial Sequence: Synthetic oligonucleotide
cgccgagcacgaccgcucu

SEQ ID NO: 2140124 - RNA, 19 nt, Artificial Sequence
  Description of Artificial Sequence: Synthetic oligonucleotide
ggccgcgcacagccuucuu

SEQ ID NO: 2140125 - RNA, 19 nt, Artificial Sequence
  Description of Artificial Sequence: Synthetic oligonucleotide
gcccaggcgcaggcagcgu

SEQ ID NO: 2140126 - RNA, 19 nt, Artificial Sequence
  Description of Artificial Sequence: Synthetic oligonucleotide
cgcccaccuccucggcgaa

SEQ ID NO: 2140127 - RNA, 19 nt, Artificial Sequence
  Description of Artificial Sequence: Synthetic oligonucleotide
cccgggccgucguggcccu

SEQ ID NO: 2140128 - RNA, 19 nt, Artificial Sequence
  Description of Artificial Sequence: Synthetic oligonucleotide
ccgcagggcccgggccguc

SEQ ID NO: 2140129 - RNA, 19 nt, Artificial Sequence
  Description of Artificial Sequence: Synthetic oligonucleotide
ggacugcggcaggcugcau

SEQ ID NO: 2140130 - RNA, 19 nt, Artificial Sequence
  Description of Artificial Sequence: Synthetic oligonucleotide
cggccgccucaggcugaac

SEQ ID NO: 2140131 - RNA, 19 nt, Artificial Sequence
  Description of Artificial Sequence: Synthetic oligonucleotide
ccgggccgucguggcccuc

SEQ ID NO: 2140132 - RNA, 19 nt, Artificial Sequence
  Description of Artificial Sequence: Synthetic oligonucleotide
aaguaggucaggcagcucc

SEQ ID NO: 2140133 - RNA, 19 nt, Artificial Sequence
  Description of Artificial Sequence: Synthetic oligonucleotide
uuuaggacaaggcauaagc

SEQ ID NO: 2140134 - RNA, 19 nt, Artificial Sequence
  Description of Artificial Sequence: Synthetic oligonucleotide
auaagcaccaaguagguca

SEQ ID NO: 2140135 - RNA, 19 nt, Artificial Sequence
  Description of Artificial Sequence: Synthetic oligonucleotide
uuauuuuaggacaaggcau

SEQ ID NO: 2140136 - RNA, 19 nt, Artificial Sequence
  Description of Artificial Sequence: Synthetic oligonucleotide
uguaccuucugcaagccag

SEQ ID NO: 2140137 - RNA, 19 nt, Artificial Sequence
  Description of Artificial Sequence: Synthetic oligonucleotide
uaaggauuuauuuuaggac

SEQ ID NO: 2140138 - RNA, 19 nt, Artificial Sequence
  Description of Artificial Sequence: Synthetic oligonucleotide
gacauaggguaccagacgg

SEQ ID NO: 2140139 - RNA, 19 nt, Artificial Sequence
  Description of Artificial Sequence: Synthetic oligonucleotide
ucuuucggaggacauaggg

SEQ ID NO: 2140140 - RNA, 19 nt, Artificial Sequence
  Description of Artificial Sequence: Synthetic oligonucleotide
ugggauuucagucuccucc

SEQ ID NO: 2140141 - RNA, 19 nt, Artificial Sequence
  Description of Artificial Sequence: Synthetic oligonucleotide
uuuaaggauuuauuuuagg

SEQ ID NO: 2140142 - RNA, 19 nt, Artificial Sequence
  Description of Artificial Sequence: Synthetic oligonucleotide
uccuauuugauccucuggc

SEQ ID NO: 2140143 - RNA, 19 nt, Artificial Sequence
  Description of Artificial Sequence: Synthetic oligonucleotide
aaggucaccacggugacgg

SEQ ID NO: 2140144 - RNA, 19 nt, Artificial Sequence
  Description of Artificial Sequence: Synthetic oligonucleotide
gauuuauuuuaggacaagg

SEQ ID NO: 2140145 - RNA, 19 nt, Artificial Sequence
  Description of Artificial Sequence: Synthetic oligonucleotide
agugcugcacgcuuuaagg

SEQ ID NO: 2140146 - RNA, 19 nt, Artificial Sequence
  Description of Artificial Sequence: Synthetic oligonucleotide
uuauuuggguguaagugcu

SEQ ID NO: 2140147 - RNA, 19 nt, Artificial Sequence
  Description of Artificial Sequence: Synthetic oligonucleotide
ugcacucucuauuugaaga

SEQ ID NO: 2140148 - RNA, 19 nt, Artificial Sequence
  Description of Artificial Sequence: Synthetic oligonucleotide
cucuauuugaagagcaggc

SEQ ID NO: 2140149 - RNA, 19 nt, Artificial Sequence
  Description of Artificial Sequence: Synthetic oligonucleotide
aacucucuccuauuugauc

SEQ ID NO: 2140150 - RNA, 19 nt, Artificial Sequence
  Description of Artificial Sequence: Synthetic oligonucleotide
uauuugauccucuggcugc

SEQ ID NO: 2140151 - RNA, 19 nt, Artificial Sequence
  Description of Artificial Sequence: Synthetic oligonucleotide
cuuuguaccuucugcaagc

SEQ ID NO: 2140152 - RNA, 19 nt, Artificial Sequence
  Description of Artificial Sequence: Synthetic oligonucleotide
aucugaugggccuucagag

SEQ ID NO: 2140153 - RNA, 19 nt, Artificial Sequence
  Description of Artificial Sequence: Synthetic oligonucleotide
gccuaaauuaggcugaagg

SEQ ID NO: 2140154 - RNA, 19 nt, Artificial Sequence
  Description of Artificial Sequence: Synthetic oligonucleotide
uaaauuaggcugaaggcuu

SEQ ID NO: 2140155 - RNA, 19 nt, Artificial Sequence
  Description of Artificial Sequence: Synthetic oligonucleotide
uauuuuaggacaaggcaua

SEQ ID NO: 2140156 - RNA, 19 nt, Artificial Sequence
  Description of Artificial Sequence: Synthetic oligonucleotide
gaugcuuucuggaaggcgc

SEQ ID NO: 2140157 - RNA, 19 nt, Artificial Sequence
  Description of Artificial Sequence: Synthetic oligonucleotide
ugagccuaaauuaggcuga

SEQ ID NO: 2140158 - RNA, 19 nt, Artificial Sequence
  Description of Artificial Sequence: Synthetic oligonucleotide
uaggguaccagacgggaag

SEQ ID NO: 2140159 - RNA, 19 nt, Artificial Sequence
  Description of Artificial Sequence: Synthetic oligonucleotide
aagccagugcgucgcagcc

SEQ ID NO: 2140160 - RNA, 19 nt, Artificial Sequence
  Description of Artificial Sequence: Synthetic oligonucleotide
uaggacaaggcauaagcac

SEQ ID NO: 2140161 - RNA, 19 nt, Artificial Sequence
  Description of Artificial Sequence: Synthetic oligonucleotide
ucucuuucggaggacauag

SEQ ID NO: 2140162 - RNA, 19 nt, Artificial Sequence
  Description of Artificial Sequence: Synthetic oligonucleotide
auuuggguguaagugcugc

SEQ ID NO: 2140163 - RNA, 19 nt, Artificial Sequence
  Description of Artificial Sequence: Synthetic oligonucleotide
uccuugaagagcaggacgu

SEQ ID NO: 2140164 - RNA, 19 nt, Artificial Sequence
  Description of Artificial Sequence: Synthetic oligonucleotide
uauuugaagagcaggccuc

SEQ ID NO: 2140165 - RNA, 19 nt, Artificial Sequence
  Description of Artificial Sequence: Synthetic oligonucleotide
aggcauaagcaccaaguag

SEQ ID NO: 2140166 - RNA, 19 nt, Artificial Sequence
  Description of Artificial Sequence: Synthetic oligonucleotide
uggacugugcugcuuuacg

SEQ ID NO: 2140167 - RNA, 19 nt, Artificial Sequence
  Description of Artificial Sequence: Synthetic oligonucleotide
gugagccuaaauuaggcug

SEQ ID NO: 2140168 - RNA, 19 nt, Artificial Sequence
  Description of Artificial Sequence: Synthetic oligonucleotide
accgauuggucaucggggc

SEQ ID NO: 2140169 - RNA, 19 nt, Artificial Sequence
  Description of Artificial Sequence: Synthetic oligonucleotide
ucuauuugaagagcaggcc

SEQ ID NO: 2140170 - RNA, 19 nt, Artificial Sequence
  Description of Artificial Sequence: Synthetic oligonucleotide
aagugcugcacgcuuuaag

SEQ ID NO: 2140171 - RNA, 19 nt, Artificial Sequence
  Description of Artificial Sequence: Synthetic oligonucleotide
uggguguaagugcugcacg

SEQ ID NO: 2140172 - RNA, 19 nt, Artificial Sequence
  Description of Artificial Sequence: Synthetic oligonucleotide
uggugagccuaaauuaggc

SEQ ID NO: 2140173 - RNA, 19 nt, Artificial Sequence
  Description of Artificial Sequence: Synthetic oligonucleotide
ugaucucugacaacucuga

SEQ ID NO: 2140174 - RNA, 19 nt, Artificial Sequence
  Description of Artificial Sequence: Synthetic oligonucleotide
acugguauggacugugcug

SEQ ID NO: 2140175 - RNA, 19 nt, Artificial Sequence
  Description of Artificial Sequence: Synthetic oligonucleotide
uucagucuccuccuugaag

SEQ ID NO: 2140176 - RNA, 19 nt, Artificial Sequence
  Description of Artificial Sequence: Synthetic oligonucleotide
aguucugaugcuuucugga

SEQ ID NO: 2140177 - RNA, 19 nt, Artificial Sequence
  Description of Artificial Sequence: Synthetic oligonucleotide
ucauugguagccugaggag

SEQ ID NO: 2140178 - RNA, 19 nt, Artificial Sequence
  Description of Artificial Sequence: Synthetic oligonucleotide
uguauugcugguggugucg

SEQ ID NO: 2140179 - RNA, 19 nt, Artificial Sequence
  Description of Artificial Sequence: Synthetic oligonucleotide
agguucuagcuccagagca

SEQ ID NO: 2140180 - RNA, 19 nt, Artificial Sequence
  Description of Artificial Sequence: Synthetic oligonucleotide
cuauuugauccucuggcug

SEQ ID NO: 2140181 - RNA, 19 nt, Artificial Sequence
  Description of Artificial Sequence: Synthetic oligonucleotide
cuccuugaagagcaggacg

SEQ ID NO: 2140182 - RNA, 19 nt, Artificial Sequence
  Description of Artificial Sequence: Synthetic oligonucleotide
ccuaaauuaggcugaaggc

SEQ ID NO: 2140183 - RNA, 19 nt, Artificial Sequence
  Description of Artificial Sequence: Synthetic oligonucleotide
aucucugacaacucugacu

SEQ ID NO: 2140184 - RNA, 19 nt, Artificial Sequence
  Description of Artificial Sequence: Synthetic oligonucleotide
gacgggaaggccaggaagg

SEQ ID NO: 2140185 - RNA, 19 nt, Artificial Sequence
  Description of Artificial Sequence: Synthetic oligonucleotide
caccaaguaggucaggcag

SEQ ID NO: 2140186 - RNA, 19 nt, Artificial Sequence
  Description of Artificial Sequence: Synthetic oligonucleotide
agccugaggagguucuagc

SEQ ID NO: 2140187 - RNA, 19 nt, Artificial Sequence
  Description of Artificial Sequence: Synthetic oligonucleotide
uuaggcugaaggcuucucu

SEQ ID NO: 2140188 - RNA, 19 nt, Artificial Sequence
  Description of Artificial Sequence: Synthetic oligonucleotide
aaggcauaagcaccaagua

SEQ ID NO: 2140189 - RNA, 19 nt, Artificial Sequence
  Description of Artificial Sequence: Synthetic oligonucleotide
auuucagucuccuccuuga

SEQ ID NO: 2140190 - RNA, 19 nt, Artificial Sequence
  Description of Artificial Sequence: Synthetic oligonucleotide
uuuauugcuggugagccua

SEQ ID NO: 2140191 - RNA, 19 nt, Artificial Sequence
  Description of Artificial Sequence: Synthetic oligonucleotide
cauugguagccugaggagg

SEQ ID NO: 2140192 - RNA, 19 nt, Artificial Sequence
  Description of Artificial Sequence: Synthetic oligonucleotide
agaguucugaugcuuucug

SEQ ID NO: 2140193 - RNA, 19 nt, Artificial Sequence
  Description of Artificial Sequence: Synthetic oligonucleotide
aggacauaggguaccagac

SEQ ID NO: 2140194 - RNA, 19 nt, Artificial Sequence
  Description of Artificial Sequence: Synthetic oligonucleotide
cuggugagccuaaauuagg

SEQ ID NO: 2140195 - RNA, 19 nt, Artificial Sequence
  Description of Artificial Sequence: Synthetic oligonucleotide
caccgauuggucaucgggg

SEQ ID NO: 2140196 - RNA, 19 nt, Artificial Sequence
  Description of Artificial Sequence: Synthetic oligonucleotide
cugguauggacugugcugc

SEQ ID NO: 2140197 - RNA, 19 nt, Artificial Sequence
  Description of Artificial Sequence: Synthetic oligonucleotide
ugcuggugagccuaaauua

SEQ ID NO: 2140198 - RNA, 19 nt, Artificial Sequence
  Description of Artificial Sequence: Synthetic oligonucleotide
uuucuccuuauuugggugu

SEQ ID NO: 2140199 - RNA, 19 nt, Artificial Sequence
  Description of Artificial Sequence: Synthetic oligonucleotide
agcgccuccagcauggugg

SEQ ID NO: 2140200 - RNA, 19 nt, Artificial Sequence
  Description of Artificial Sequence: Synthetic oligonucleotide
uuaggcuuuguaccuucug

SEQ ID NO: 2140201 - RNA, 19 nt, Artificial Sequence
  Description of Artificial Sequence: Synthetic oligonucleotide
ugaugcuuucuggaaggcg

SEQ ID NO: 2140202 - RNA, 19 nt, Artificial Sequence
  Description of Artificial Sequence: Synthetic oligonucleotide
ggagguucuagcuccagag

SEQ ID NO: 2140203 - RNA, 19 nt, Artificial Sequence
  Description of Artificial Sequence: Synthetic oligonucleotide
ucaucggggcccaagaguu

SEQ ID NO: 2140204 - RNA, 19 nt, Artificial Sequence
  Description of Artificial Sequence: Synthetic oligonucleotide
ucuucauugguagccugag

SEQ ID NO: 2140205 - RNA, 19 nt, Artificial Sequence
  Description of Artificial Sequence: Synthetic oligonucleotide
ggcccaagaguucugaugc

SEQ ID NO: 2140206 - RNA, 19 nt, Artificial Sequence
  Description of Artificial Sequence: Synthetic oligonucleotide
cuagcuccagagcagacuc

SEQ ID NO: 2140207 - RNA, 19 nt, Artificial Sequence
  Description of Artificial Sequence: Synthetic oligonucleotide
uuuuaggacaaggcauaag

SEQ ID NO: 2140208 - RNA, 19 nt, Artificial Sequence
  Description of Artificial Sequence: Synthetic oligonucleotide
ugcgacucagugcacccag

SEQ ID NO: 2140209 - RNA, 19 nt, Artificial Sequence
  Description of Artificial Sequence: Synthetic oligonucleotide
ucuccuauuugauccucug

SEQ ID NO: 2140210 - RNA, 19 nt, Artificial Sequence
  Description of Artificial Sequence: Synthetic oligonucleotide
uugcuggugagccuaaauu

SEQ ID NO: 2140211 - RNA, 19 nt, Artificial Sequence
  Description of Artificial Sequence: Synthetic oligonucleotide
gacugugcugcuuuacgac

SEQ ID NO: 2140212 - RNA, 19 nt, Artificial Sequence
  Description of Artificial Sequence: Synthetic oligonucleotide
uccggacaggcccuaggcg

SEQ ID NO: 2140213 - RNA, 19 nt, Artificial Sequence
  Description of Artificial Sequence: Synthetic oligonucleotide
acgcuuuaaggauuuauuu

SEQ ID NO: 2140214 - RNA, 19 nt, Artificial Sequence
  Description of Artificial Sequence: Synthetic oligonucleotide
augggaacugagcagugga

SEQ ID NO: 2140215 - RNA, 19 nt, Artificial Sequence
  Description of Artificial Sequence: Synthetic oligonucleotide
ucucgcagcgccuccagca

SEQ ID NO: 2140216 - RNA, 19 nt, Artificial Sequence
  Description of Artificial Sequence: Synthetic oligonucleotide
gaugggaacugagcagugg

SEQ ID NO: 2140217 - RNA, 19 nt, Artificial Sequence
  Description of Artificial Sequence: Synthetic oligonucleotide
aacucugacugcucucccu

SEQ ID NO: 2140218 - RNA, 19 nt, Artificial Sequence
  Description of Artificial Sequence: Synthetic oligonucleotide
uuuuauugcuggugagccu

SEQ ID NO: 2140219 - RNA, 19 nt, Artificial Sequence
  Description of Artificial Sequence: Synthetic oligonucleotide
cucucuauuugaagagcag

SEQ ID NO: 2140220 - RNA, 19 nt, Artificial Sequence
  Description of Artificial Sequence: Synthetic oligonucleotide
uccuuauuuggguguaagu

SEQ ID NO: 2140221 - RNA, 19 nt, Artificial Sequence
  Description of Artificial Sequence: Synthetic oligonucleotide
cuccuauuugauccucugg

SEQ ID NO: 2140222 - RNA, 19 nt, Artificial Sequence
  Description of Artificial Sequence: Synthetic oligonucleotide
uugacugguauggacugug

SEQ ID NO: 2140223 - RNA, 19 nt, Artificial Sequence
  Description of Artificial Sequence: Synthetic oligonucleotide
acugugcugcuuuacgacu

SEQ ID NO: 2140224 - RNA, 19 nt, Artificial Sequence
  Description of Artificial Sequence: Synthetic oligonucleotide
cugaaggcuucucuuucgg

SEQ ID NO: 2140225 - RNA, 19 nt, Artificial Sequence
  Description of Artificial Sequence: Synthetic oligonucleotide
agcaaggucaccacgguga

SEQ ID NO: 2140226 - RNA, 19 nt, Artificial Sequence
  Description of Artificial Sequence: Synthetic oligonucleotide
gaucuucauugguagccug

SEQ ID NO: 2140227 - RNA, 19 nt, Artificial Sequence
  Description of Artificial Sequence: Synthetic oligonucleotide
uucagagcuccggacaggc

SEQ ID NO: 2140228 - RNA, 19 nt, Artificial Sequence
  Description of Artificial Sequence: Synthetic oligonucleotide
uaccagacgggaaggccag

SEQ ID NO: 2140229 - RNA, 19 nt, Artificial Sequence
  Description of Artificial Sequence: Synthetic oligonucleotide
gccaguguauugcuggugg

SEQ ID NO: 2140230 - RNA, 19 nt, Artificial Sequence
  Description of Artificial Sequence: Synthetic oligonucleotide
cuaaauuaggcugaaggcu

SEQ ID NO: 2140231 - RNA, 19 nt, Artificial Sequence
  Description of Artificial Sequence: Synthetic oligonucleotide
uguaagugcugcacgcuuu

SEQ ID NO: 2140232 - RNA, 19 nt, Artificial Sequence
  Description of Artificial Sequence: Synthetic oligonucleotide
ugcugcacgcuuuaaggau

SEQ ID NO: 2140233 - RNA, 19 nt, Artificial Sequence
  Description of Artificial Sequence: Synthetic oligonucleotide
ggacauaggguaccagacg

SEQ ID NO: 2140234 - RNA, 19 nt, Artificial Sequence
  Description of Artificial Sequence: Synthetic oligonucleotide
gacucagugcacccaggcc

SEQ ID NO: 2140235 - RNA, 19 nt, Artificial Sequence
  Description of Artificial Sequence: Synthetic oligonucleotide
ggaggaugggaacugagca

SEQ ID NO: 2140236 - RNA, 19 nt, Artificial Sequence
  Description of Artificial Sequence: Synthetic oligonucleotide
uguaccugagcagcgcggc

SEQ ID NO: 2140237 - RNA, 19 nt, Artificial Sequence
  Description of Artificial Sequence: Synthetic oligonucleotide
agugcgucgcagccgcugg

SEQ ID NO: 2140238 - RNA, 19 nt, Artificial Sequence
  Description of Artificial Sequence: Synthetic oligonucleotide
uucggaggacauaggguac

SEQ ID NO: 2140239 - RNA, 19 nt, Artificial Sequence
  Description of Artificial Sequence: Synthetic oligonucleotide
acuccagcgcgcucucccc

SEQ ID NO: 2140240 - RNA, 19 nt, Artificial Sequence
  Description of Artificial Sequence: Synthetic oligonucleotide
acucucuauuugaagagca

SEQ ID NO: 2140241 - RNA, 19 nt, Artificial Sequence
  Description of Artificial Sequence: Synthetic oligonucleotide
ugacugguauggacugugc

SEQ ID NO: 2140242 - RNA, 19 nt, Artificial Sequence
  Description of Artificial Sequence: Synthetic oligonucleotide
ugcagacuggacaucugau

SEQ ID NO: 2140243 - RNA, 19 nt, Artificial Sequence
  Description of Artificial Sequence: Synthetic oligonucleotide
gcuuuguaccuucugcaag

SEQ ID NO: 2140244 - RNA, 19 nt, Artificial Sequence
  Description of Artificial Sequence: Synthetic oligonucleotide
gaucucugacaacucugac

SEQ ID NO: 2140245 - RNA, 19 nt, Artificial Sequence
  Description of Artificial Sequence: Synthetic oligonucleotide
aguggaugcaggauuuucu

SEQ ID NO: 2140246 - RNA, 19 nt, Artificial Sequence
  Description of Artificial Sequence: Synthetic oligonucleotide
gcaccgauuggucaucggg

SEQ ID NO: 2140247 - RNA, 19 nt, Artificial Sequence
  Description of Artificial Sequence: Synthetic oligonucleotide
cugugcugcuuuacgacug

SEQ ID NO: 2140248 - RNA, 19 nt, Artificial Sequence
  Description of Artificial Sequence: Synthetic oligonucleotide
uuggguguaagugcugcac

SEQ ID NO: 2140249 - RNA, 19 nt, Artificial Sequence
  Description of Artificial Sequence: Synthetic oligonucleotide
uggucaucggggcccaaga

SEQ ID NO: 2140250 - RNA, 19 nt, Artificial Sequence
  Description of Artificial Sequence: Synthetic oligonucleotide
acuggacaucugaugggcc

SEQ ID NO: 2140251 - RNA, 19 nt, Artificial Sequence
  Description of Artificial Sequence: Synthetic oligonucleotide
cuggaugcggcgcaccgag

SEQ ID NO: 2140252 - RNA, 19 nt, Artificial Sequence
  Description of Artificial Sequence: Synthetic oligonucleotide
cuauuugaagagcaggccu

SEQ ID NO: 2140253 - RNA, 19 nt, Artificial Sequence
  Description of Artificial Sequence: Synthetic oligonucleotide
guggaugcaggauuuucuc

SEQ ID NO: 2140254 - RNA, 19 nt, Artificial Sequence
  Description of Artificial Sequence: Synthetic oligonucleotide
ugcugcuuuacgacuggaa

SEQ ID NO: 2140255 - RNA, 19 nt, Artificial Sequence
  Description of Artificial Sequence: Synthetic oligonucleotide
auugcuggugagccuaaau

SEQ ID NO: 2140256 - RNA, 19 nt, Artificial Sequence
  Description of Artificial Sequence: Synthetic oligonucleotide
cuguaccugagcagcgcgg

SEQ ID NO: 2140257 - RNA, 19 nt, Artificial Sequence
  Description of Artificial Sequence: Synthetic oligonucleotide
uuguaccuucugcaagcca

SEQ ID NO: 2140258 - RNA, 19 nt, Artificial Sequence
  Description of Artificial Sequence: Synthetic oligonucleotide
auugguagccugaggaggu

SEQ ID NO: 2140259 - RNA, 19 nt, Artificial Sequence
  Description of Artificial Sequence: Synthetic oligonucleotide
aguaggucaggcagcuccg

SEQ ID NO: 2140260 - RNA, 19 nt, Artificial Sequence
  Description of Artificial Sequence: Synthetic oligonucleotide
aggauuuauuuuaggacaa

SEQ ID NO: 2140261 - RNA, 19 nt, Artificial Sequence
  Description of Artificial Sequence: Synthetic oligonucleotide
acgugcagcuucccgcgcg

SEQ ID NO: 2140262 - RNA, 19 nt, Artificial Sequence
  Description of Artificial Sequence: Synthetic oligonucleotide
cugcuuuacgacuggaaaa

SEQ ID NO: 2140263 - RNA, 19 nt, Artificial Sequence
  Description of Artificial Sequence: Synthetic oligonucleotide
ucguggcugcgacucagug

SEQ ID NO: 2140264 - RNA, 19 nt, Artificial Sequence
  Description of Artificial Sequence: Synthetic oligonucleotide
agcaggacgugcagcuucc

SEQ ID NO: 2140265 - RNA, 19 nt, Artificial Sequence
  Description of Artificial Sequence: Synthetic oligonucleotide
cuccuuauuuggguguaag

SEQ ID NO: 2140266 - RNA, 19 nt, Artificial Sequence
  Description of Artificial Sequence: Synthetic oligonucleotide
uccucgucggaacucucuc

SEQ ID NO: 2140267 - RNA, 19 nt, Artificial Sequence
  Description of Artificial Sequence: Synthetic oligonucleotide
aggcccuaggcguggcggc

SEQ ID NO: 2140268 - RNA, 19 nt, Artificial Sequence
  Description of Artificial Sequence: Synthetic oligonucleotide
acggugacggcgugcacug

SEQ ID NO: 2140269 - RNA, 19 nt, Artificial Sequence
  Description of Artificial Sequence: Synthetic oligonucleotide
ucggaggacauaggguacc

SEQ ID NO: 2140270 - RNA, 19 nt, Artificial Sequence
  Description of Artificial Sequence: Synthetic oligonucleotide
gaugggccuucagagcucc

SEQ ID NO: 2140271 - RNA, 19 nt, Artificial Sequence
  Description of Artificial Sequence: Synthetic oligonucleotide
auuaggcugaaggcuucuc

SEQ ID NO: 2140272 - RNA, 19 nt, Artificial Sequence
  Description of Artificial Sequence: Synthetic oligonucleotide
cucuuucggaggacauagg

SEQ ID NO: 2140273 - RNA, 19 nt, Artificial Sequence
  Description of Artificial Sequence: Synthetic oligonucleotide
ggugacggcgugcacuggg

SEQ ID NO: 2140274 - RNA, 19 nt, Artificial Sequence
  Description of Artificial Sequence: Synthetic oligonucleotide
caccgagcccgccaggccg

SEQ ID NO: 2140275 - RNA, 19 nt, Artificial Sequence
  Description of Artificial Sequence: Synthetic oligonucleotide
ugacggcgugcacugggcc

SEQ ID NO: 2140276 - RNA, 19 nt, Artificial Sequence
  Description of Artificial Sequence: Synthetic oligonucleotide
ugggaacugagcaguggau

SEQ ID NO: 2140277 - RNA, 19 nt, Artificial Sequence
  Description of Artificial Sequence: Synthetic oligonucleotide
ucccaggaucuucauuggu

SEQ ID NO: 2140278 - RNA, 19 nt, Artificial Sequence
  Description of Artificial Sequence: Synthetic oligonucleotide
auggacugugcugcuuuac

SEQ ID NO: 2140279 - RNA, 19 nt, Artificial Sequence
  Description of Artificial Sequence: Synthetic oligonucleotide
ucggcgugagagcccacgc

SEQ ID NO: 2140280 - RNA, 19 nt, Artificial Sequence
  Description of Artificial Sequence: Synthetic oligonucleotide
aggagguucuagcuccaga

SEQ ID NO: 2140281 - RNA, 19 nt, Artificial Sequence
  Description of Artificial Sequence: Synthetic oligonucleotide
uaccugagcagcgcggcgc

SEQ ID NO: 2140282 - RNA, 19 nt, Artificial Sequence
  Description of Artificial Sequence: Synthetic oligonucleotide
aggguaccagacgggaagg

SEQ ID NO: 2140283 - RNA, 19 nt, Artificial Sequence
  Description of Artificial Sequence: Synthetic oligonucleotide
gacucuagggaggacucca

SEQ ID NO: 2140284 - RNA, 19 nt, Artificial Sequence
  Description of Artificial Sequence: Synthetic oligonucleotide
uucugcaagccagugcguc

SEQ ID NO: 2140285 - RNA, 19 nt, Artificial Sequence
  Description of Artificial Sequence: Synthetic oligonucleotide
caggacgugcagcuucccg

SEQ ID NO: 2140286 - RNA, 19 nt, Artificial Sequence
  Description of Artificial Sequence: Synthetic oligonucleotide
ugcuuucuggaaggcgcgg

SEQ ID NO: 2140287 - RNA, 19 nt, Artificial Sequence
  Description of Artificial Sequence: Synthetic oligonucleotide
uuauugcuggugagccuaa

SEQ ID NO: 2140288 - RNA, 19 nt, Artificial Sequence
  Description of Artificial Sequence: Synthetic oligonucleotide
gaugcggcgcaccgagccc

SEQ ID NO: 2140289 - RNA, 19 nt, Artificial Sequence
  Description of Artificial Sequence: Synthetic oligonucleotide
gcuguaccugagcagcgcg

SEQ ID NO: 2140290 - RNA, 19 nt, Artificial Sequence
  Description of Artificial Sequence: Synthetic oligonucleotide
cccuucuuaggcuuuguac

SEQ ID NO: 2140291 - RNA, 19 nt, Artificial Sequence
  Description of Artificial Sequence: Synthetic oligonucleotide
ggcgugagagcccacgcgc

SEQ ID NO: 2140292 - RNA, 19 nt, Artificial Sequence
  Description of Artificial Sequence: Synthetic oligonucleotide
guaccagacgggaaggcca

SEQ ID NO: 2140293 - RNA, 19 nt, Artificial Sequence
  Description of Artificial Sequence: Synthetic oligonucleotide
ggaugcggcgcaccgagcc

SEQ ID NO: 2140294 - RNA, 19 nt, Artificial Sequence
  Description of Artificial Sequence: Synthetic oligonucleotide
agcaccgauuggucaucgg

SEQ ID NO: 2140295 - RNA, 19 nt, Artificial Sequence
  Description of Artificial Sequence: Synthetic oligonucleotide
cugacaacucugacugcuc

SEQ ID NO: 2140296 - RNA, 19 nt, Artificial Sequence
  Description of Artificial Sequence: Synthetic oligonucleotide
uauugcugguggugucgug

SEQ ID NO: 2140297 - RNA, 19 nt, Artificial Sequence
  Description of Artificial Sequence: Synthetic oligonucleotide
gcugcuuuacgacuggaaa

SEQ ID NO: 2140298 - RNA, 19 nt, Artificial Sequence
  Description of Artificial Sequence: Synthetic oligonucleotide
cauaggguaccagacggga

SEQ ID NO: 2140299 - RNA, 19 nt, Artificial Sequence
  Description of Artificial Sequence: Synthetic oligonucleotide
gugcugcacgcuuuaagga

SEQ ID NO: 2140300 - RNA, 19 nt, Artificial Sequence
  Description of Artificial Sequence: Synthetic oligonucleotide
guaccugagcagcgcggcg

SEQ ID NO: 2140301 - RNA, 19 nt, Artificial Sequence
  Description of Artificial Sequence: Synthetic oligonucleotide
ugccucucagccaggccac

SEQ ID NO: 2140302 - RNA, 19 nt, Artificial Sequence
  Description of Artificial Sequence: Synthetic oligonucleotide
agugcacccaggccacucu

SEQ ID NO: 2140303 - RNA, 19 nt, Artificial Sequence
  Description of Artificial Sequence: Synthetic oligonucleotide
cugaugggccuucagagcu

SEQ ID NO: 2140304 - RNA, 19 nt, Artificial Sequence
  Description of Artificial Sequence: Synthetic oligonucleotide
cuucccgcgcgccaccagc

SEQ ID NO: 2140305 - RNA, 19 nt, Artificial Sequence
  Description of Artificial Sequence: Synthetic oligonucleotide
auuugauccucuggcugcu

SEQ ID NO: 2140306 - RNA, 19 nt, Artificial Sequence
  Description of Artificial Sequence: Synthetic oligonucleotide
cuuucggaggacauagggu

SEQ ID NO: 2140307 - RNA, 19 nt, Artificial Sequence
  Description of Artificial Sequence: Synthetic oligonucleotide
gguucuagcuccagagcag

SEQ ID NO: 2140308 - RNA, 19 nt, Artificial Sequence
  Description of Artificial Sequence: Synthetic oligonucleotide
caacucugacugcucuccc

SEQ ID NO: 2140309 - RNA, 19 nt, Artificial Sequence
  Description of Artificial Sequence: Synthetic oligonucleotide
ucuggcugagcugcagacu

SEQ ID NO: 2140310 - RNA, 19 nt, Artificial Sequence
  Description of Artificial Sequence: Synthetic oligonucleotide
aucuucauugguagccuga

SEQ ID NO: 2140311 - RNA, 19 nt, Artificial Sequence
  Description of Artificial Sequence: Synthetic oligonucleotide
ggcugcgucggcgugagag

SEQ ID NO: 2140312 - RNA, 19 nt, Artificial Sequence
  Description of Artificial Sequence: Synthetic oligonucleotide
cugagcaguggaugcagga

SEQ ID NO: 2140313 - RNA, 19 nt, Artificial Sequence
  Description of Artificial Sequence: Synthetic oligonucleotide
uauggacugugcugcuuua

SEQ ID NO: 2140314 - RNA, 19 nt, Artificial Sequence
  Description of Artificial Sequence: Synthetic oligonucleotide
gugaucaggcugcacucuc

SEQ ID NO: 2140315 - RNA, 19 nt, Artificial Sequence
  Description of Artificial Sequence: Synthetic oligonucleotide
gacugguauggacugugcu

SEQ ID NO: 2140316 - RNA, 19 nt, Artificial Sequence
  Description of Artificial Sequence: Synthetic oligonucleotide
cauaagcaccaaguagguc

SEQ ID NO: 2140317 - RNA, 19 nt, Artificial Sequence
  Description of Artificial Sequence: Synthetic oligonucleotide
cucugacaacucugacugc

SEQ ID NO: 2140318 - RNA, 19 nt, Artificial Sequence
  Description of Artificial Sequence: Synthetic oligonucleotide
uuggccuccagccgcugua

SEQ ID NO: 2140319 - RNA, 19 nt, Artificial Sequence
  Description of Artificial Sequence: Synthetic oligonucleotide
aagcccuucuuaggcuuug

SEQ ID NO: 2140320 - RNA, 19 nt, Artificial Sequence
  Description of Artificial Sequence: Synthetic oligonucleotide
uaggcguggcggcuugacu

SEQ ID NO: 2140321 - RNA, 19 nt, Artificial Sequence
  Description of Artificial Sequence: Synthetic oligonucleotide
ugccaguguauugcuggug

SEQ ID NO: 2140322 - RNA, 19 nt, Artificial Sequence
  Description of Artificial Sequence: Synthetic oligonucleotide
uaccuucugcaagccagug

SEQ ID NO: 2140323 - RNA, 19 nt, Artificial Sequence
  Description of Artificial Sequence: Synthetic oligonucleotide
gguaccagacgggaaggcc

SEQ ID NO: 2140324 - RNA, 19 nt, Artificial Sequence
  Description of Artificial Sequence: Synthetic oligonucleotide
aucggggcccaagaguucu

SEQ ID NO: 2140325 - RNA, 19 nt, Artificial Sequence
  Description of Artificial Sequence: Synthetic oligonucleotide
uucucuuucggaggacaua

SEQ ID NO: 2140326 - RNA, 19 nt, Artificial Sequence
  Description of Artificial Sequence: Synthetic oligonucleotide
gucgcagccgcugggcccg

SEQ ID NO: 2140327 - RNA, 19 nt, Artificial Sequence
  Description of Artificial Sequence: Synthetic oligonucleotide
uucuccuuauuugggugua

SEQ ID NO: 2140328 - RNA, 19 nt, Artificial Sequence
  Description of Artificial Sequence: Synthetic oligonucleotide
augcggcgcaccgagcccg

SEQ ID NO: 2140329 - RNA, 19 nt, Artificial Sequence
  Description of Artificial Sequence: Synthetic oligonucleotide
gucggcgugagagcccacg

SEQ ID NO: 2140330 - RNA, 19 nt, Artificial Sequence
  Description of Artificial Sequence: Synthetic oligonucleotide
caggccacucuggaugcgg

SEQ ID NO: 2140331 - RNA, 19 nt, Artificial Sequence
  Description of Artificial Sequence: Synthetic oligonucleotide
ugcgucggcgugagagccc

SEQ ID NO: 2140332 - RNA, 19 nt, Artificial Sequence
  Description of Artificial Sequence: Synthetic oligonucleotide
acaggcccuaggcguggcg

SEQ ID NO: 2140333 - RNA, 19 nt, Artificial Sequence
  Description of Artificial Sequence: Synthetic oligonucleotide
aggcugcacucucuauuug

SEQ ID NO: 2140334 - RNA, 19 nt, Artificial Sequence
  Description of Artificial Sequence: Synthetic oligonucleotide
cagcaaggucaccacggug

SEQ ID NO: 2140335 - RNA, 19 nt, Artificial Sequence
  Description of Artificial Sequence: Synthetic oligonucleotide
caggcccuaggcguggcgg

SEQ ID NO: 2140336 - RNA, 19 nt, Artificial Sequence
  Description of Artificial Sequence: Synthetic oligonucleotide
ucucuccuauuugauccuc

SEQ ID NO: 2140337 - RNA, 19 nt, Artificial Sequence
  Description of Artificial Sequence: Synthetic oligonucleotide
guaggucaggcagcuccgg

SEQ ID NO: 2140338 - RNA, 19 nt, Artificial Sequence
  Description of Artificial Sequence: Synthetic oligonucleotide
cugcgucggcgugagagcc

SEQ ID NO: 2140339 - RNA, 19 nt, Artificial Sequence
  Description of Artificial Sequence: Synthetic oligonucleotide
ugguauggacugugcugcu

SEQ ID NO: 2140340 - RNA, 19 nt, Artificial Sequence
  Description of Artificial Sequence: Synthetic oligonucleotide
acccugccgcucucgcagc

SEQ ID NO: 2140341 - RNA, 19 nt, Artificial Sequence
  Description of Artificial Sequence: Synthetic oligonucleotide
accacggugacggcgugca

SEQ ID NO: 2140342 - RNA, 19 nt, Artificial Sequence
  Description of Artificial Sequence: Synthetic oligonucleotide
caguggaugcaggauuuuc

SEQ ID NO: 2140343 - RNA, 19 nt, Artificial Sequence
  Description of Artificial Sequence: Synthetic oligonucleotide
ucuggaugcggcgcaccga

SEQ ID NO: 2140344 - RNA, 19 nt, Artificial Sequence
  Description of Artificial Sequence: Synthetic oligonucleotide
ggugucguggcugcgacuc

SEQ ID NO: 2140345 - RNA, 19 nt, Artificial Sequence
  Description of Artificial Sequence: Synthetic oligonucleotide
guaagugcugcacgcuuua

SEQ ID NO: 2140346 - RNA, 19 nt, Artificial Sequence
  Description of Artificial Sequence: Synthetic oligonucleotide
ggucaucggggcccaagag

SEQ ID NO: 2140347 - RNA, 19 nt, Artificial Sequence
  Description of Artificial Sequence: Synthetic oligonucleotide
ugggcccgggacuccacug

SEQ ID NO: 2140348 - RNA, 19 nt, Artificial Sequence
  Description of Artificial Sequence: Synthetic oligonucleotide
ggcugcacucucuauuuga

SEQ ID NO: 2140349 - RNA, 19 nt, Artificial Sequence
  Description of Artificial Sequence: Synthetic oligonucleotide
ggcguggcggcuugacugg

SEQ ID NO: 2140350 - RNA, 19 nt, Artificial Sequence
  Description of Artificial Sequence: Synthetic oligonucleotide
gucaucggggcccaagagu

SEQ ID NO: 2140351 - RNA, 19 nt, Artificial Sequence
  Description of Artificial Sequence: Synthetic oligonucleotide
caaggucaccacggugacg

SEQ ID NO: 2140352 - RNA, 19 nt, Artificial Sequence
  Description of Artificial Sequence: Synthetic oligonucleotide
acucuagggaggacuccag

SEQ ID NO: 2140353 - RNA, 19 nt, Artificial Sequence
  Description of Artificial Sequence: Synthetic oligonucleotide
aucaggcugcacucucuau

SEQ ID NO: 2140354 - RNA, 19 nt, Artificial Sequence
  Description of Artificial Sequence: Synthetic oligonucleotide
gcugcgacucagugcaccc

SEQ ID NO: 2140355 - RNA, 19 nt, Artificial Sequence
  Description of Artificial Sequence: Synthetic oligonucleotide
gccagugcgucgcagccgc

SEQ ID NO: 2140356 - RNA, 19 nt, Artificial Sequence
  Description of Artificial Sequence: Synthetic oligonucleotide
cacgcuuuaaggauuuauu

SEQ ID NO: 2140357 - RNA, 19 nt, Artificial Sequence
  Description of Artificial Sequence: Synthetic oligonucleotide
ggucaggcagcuccgguga

SEQ ID NO: 2140358 - RNA, 19 nt, Artificial Sequence
  Description of Artificial Sequence: Synthetic oligonucleotide
cugggauuucagucuccuc

SEQ ID NO: 2140359 - RNA, 19 nt, Artificial Sequence
  Description of Artificial Sequence: Synthetic oligonucleotide
cagggcaucuggcugagcu

SEQ ID NO: 2140360 - RNA, 19 nt, Artificial Sequence
  Description of Artificial Sequence: Synthetic oligonucleotide
gagcagacucuagggagga

SEQ ID NO: 2140361 - RNA, 19 nt, Artificial Sequence
  Description of Artificial Sequence: Synthetic oligonucleotide
ggacaaggcauaagcacca

SEQ ID NO: 2140362 - RNA, 19 nt, Artificial Sequence
  Description of Artificial Sequence: Synthetic oligonucleotide
caggccccgacuccagcgc

SEQ ID NO: 2140363 - RNA, 19 nt, Artificial Sequence
  Description of Artificial Sequence: Synthetic oligonucleotide
ugggcugcgucggcgugag

SEQ ID NO: 2140364 - RNA, 19 nt, Artificial Sequence
  Description of Artificial Sequence: Synthetic oligonucleotide
gacgugcagcuucccgcgc

SEQ ID NO: 2140365 - RNA, 19 nt, Artificial Sequence
  Description of Artificial Sequence: Synthetic oligonucleotide
agccagugcgucgcagccg

SEQ ID NO: 2140366 - RNA, 19 nt, Artificial Sequence
  Description of Artificial Sequence: Synthetic oligonucleotide
uggaugcggcgcaccgagc

SEQ ID NO: 2140367 - RNA, 19 nt, Artificial Sequence
  Description of Artificial Sequence: Synthetic oligonucleotide
ucuccuuauuuggguguaa

SEQ ID NO: 2140368 - RNA, 19 nt, Artificial Sequence
  Description of Artificial Sequence: Synthetic oligonucleotide
uggacaucugaugggccuu

SEQ ID NO: 2140369 - RNA, 19 nt, Artificial Sequence
  Description of Artificial Sequence: Synthetic oligonucleotide
uaagugcugcacgcuuuaa

SEQ ID NO: 2140370 - RNA, 19 nt, Artificial Sequence
  Description of Artificial Sequence: Synthetic oligonucleotide
gcuccggugaucaggcugc

SEQ ID NO: 2140371 - RNA, 19 nt, Artificial Sequence
  Description of Artificial Sequence: Synthetic oligonucleotide
guauggacugugcugcuuu

SEQ ID NO: 2140372 - RNA, 19 nt, Artificial Sequence
  Description of Artificial Sequence: Synthetic oligonucleotide
gcagcuccggugaucaggc

SEQ ID NO: 2140373 - RNA, 19 nt, Artificial Sequence
  Description of Artificial Sequence: Synthetic oligonucleotide
ggugagccuaaauuaggcu

SEQ ID NO: 2140374 - RNA, 19 nt, Artificial Sequence
  Description of Artificial Sequence: Synthetic oligonucleotide
ggcuuuguaccuucugcaa

SEQ ID NO: 2140375 - RNA, 19 nt, Artificial Sequence
  Description of Artificial Sequence: Synthetic oligonucleotide
uggcggcuugacugguaug

SEQ ID NO: 2140376 - RNA, 19 nt, Artificial Sequence
  Description of Artificial Sequence: Synthetic oligonucleotide
cagcaccgauuggucaucg

SEQ ID NO: 2140377 - RNA, 19 nt, Artificial Sequence
  Description of Artificial Sequence: Synthetic oligonucleotide
ggccacucuggaugcggcg

SEQ ID NO: 2140378 - RNA, 19 nt, Artificial Sequence
  Description of Artificial Sequence: Synthetic oligonucleotide
uauugcuggugagccuaaa

SEQ ID NO: 2140379 - RNA, 19 nt, Artificial Sequence
  Description of Artificial Sequence: Synthetic oligonucleotide
aaggcgcgggcugggauuu

SEQ ID NO: 2140380 - RNA, 19 nt, Artificial Sequence
  Description of Artificial Sequence: Synthetic oligonucleotide
agagcuccggacaggcccu

SEQ ID NO: 2140381 - RNA, 19 nt, Artificial Sequence
  Description of Artificial Sequence: Synthetic oligonucleotide
cucgucggaacucucuccu

SEQ ID NO: 2140382 - RNA, 19 nt, Artificial Sequence
  Description of Artificial Sequence: Synthetic oligonucleotide
gugacggcgugcacugggc

SEQ ID NO: 2140383 - RNA, 19 nt, Artificial Sequence
  Description of Artificial Sequence: Synthetic oligonucleotide
cuaggcguggcggcuugac

SEQ ID NO: 2140384 - RNA, 19 nt, Artificial Sequence
  Description of Artificial Sequence: Synthetic oligonucleotide
gugcgucgcagccgcuggg

SEQ ID NO: 2140385 - RNA, 19 nt, Artificial Sequence
  Description of Artificial Sequence: Synthetic oligonucleotide
ucgucggaacucucuccua

SEQ ID NO: 2140386 - RNA, 19 nt, Artificial Sequence
  Description of Artificial Sequence: Synthetic oligonucleotide
ccucgucggaacucucucc

SEQ ID NO: 2140387 - RNA, 19 nt, Artificial Sequence
  Description of Artificial Sequence: Synthetic oligonucleotide
gggcccgggacuccacugg

SEQ ID NO: 2140388 - RNA, 19 nt, Artificial Sequence
  Description of Artificial Sequence: Synthetic oligonucleotide
gcugcgucggcgugagagc

SEQ ID NO: 2140389 - RNA, 19 nt, Artificial Sequence
  Description of Artificial Sequence: Synthetic oligonucleotide
caucggggcccaagaguuc

SEQ ID NO: 2140390 - RNA, 19 nt, Artificial Sequence
  Description of Artificial Sequence: Synthetic oligonucleotide
gcuccggacaggcccuagg

SEQ ID NO: 2140391 - RNA, 19 nt, Artificial Sequence
  Description of Artificial Sequence: Synthetic oligonucleotide
cuggaaggcgcgggcuggg

SEQ ID NO: 2140392 - RNA, 19 nt, Artificial Sequence
  Description of Artificial Sequence: Synthetic oligonucleotide
cgauuggucaucggggccc

SEQ ID NO: 2140393 - RNA, 19 nt, Artificial Sequence
  Description of Artificial Sequence: Synthetic oligonucleotide
ccgauuggucaucggggcc

SEQ ID NO: 2140394 - RNA, 19 nt, Artificial Sequence
  Description of Artificial Sequence: Synthetic oligonucleotide
gcuucucuuucggaggaca

SEQ ID NO: 2140395 - RNA, 19 nt, Artificial Sequence
  Description of Artificial Sequence: Synthetic oligonucleotide
gagccuaaauuaggcugaa

SEQ ID NO: 2140396 - RNA, 19 nt, Artificial Sequence
  Description of Artificial Sequence: Synthetic oligonucleotide
cuuaggcuuuguaccuucu

SEQ ID NO: 2140397 - RNA, 19 nt, Artificial Sequence
  Description of Artificial Sequence: Synthetic oligonucleotide
cucuccuauuugauccucu

SEQ ID NO: 2140398 - RNA, 19 nt, Artificial Sequence
  Description of Artificial Sequence: Synthetic oligonucleotide
guguaagugcugcacgcuu

SEQ ID NO: 2140399 - RNA, 19 nt, Artificial Sequence
  Description of Artificial Sequence: Synthetic oligonucleotide
ggcuugacugguauggacu

SEQ ID NO: 2140400 - RNA, 19 nt, Artificial Sequence
  Description of Artificial Sequence: Synthetic oligonucleotide
cagugcgucgcagccgcug

SEQ ID NO: 2140401 - RNA, 19 nt, Artificial Sequence
  Description of Artificial Sequence: Synthetic oligonucleotide
gaaggcgcgggcugggauu

SEQ ID NO: 2140402 - RNA, 19 nt, Artificial Sequence
  Description of Artificial Sequence: Synthetic oligonucleotide
cagcccgugguuggccucc

SEQ ID NO: 2140403 - RNA, 19 nt, Artificial Sequence
  Description of Artificial Sequence: Synthetic oligonucleotide
accagacgggaaggccagg

SEQ ID NO: 2140404 - RNA, 19 nt, Artificial Sequence
  Description of Artificial Sequence: Synthetic oligonucleotide
agcagcugugccaguguau

SEQ ID NO: 2140405 - RNA, 19 nt, Artificial Sequence
  Description of Artificial Sequence: Synthetic oligonucleotide
ggaugggaacugagcagug

SEQ ID NO: 2140406 - RNA, 19 nt, Artificial Sequence
  Description of Artificial Sequence: Synthetic oligonucleotide
cuucucuuucggaggacau

SEQ ID NO: 2140407 - RNA, 19 nt, Artificial Sequence
  Description of Artificial Sequence: Synthetic oligonucleotide
cgacucagugcacccaggc

SEQ ID NO: 2140408 - RNA, 19 nt, Artificial Sequence
  Description of Artificial Sequence: Synthetic oligonucleotide
ccuauuugauccucuggcu

SEQ ID NO: 2140409 - RNA, 19 nt, Artificial Sequence
  Description of Artificial Sequence: Synthetic oligonucleotide
gggcugggauuucagucuc

SEQ ID NO: 2140410 - RNA, 19 nt, Artificial Sequence
  Description of Artificial Sequence: Synthetic oligonucleotide
uggaaggcgcgggcuggga

SEQ ID NO: 2140411 - RNA, 19 nt, Artificial Sequence
  Description of Artificial Sequence: Synthetic oligonucleotide
cagcgccuccagcauggug

SEQ ID NO: 2140412 - RNA, 19 nt, Artificial Sequence
  Description of Artificial Sequence: Synthetic oligonucleotide
cccgugguuggccuccagc

SEQ ID NO: 2140413 - RNA, 19 nt, Artificial Sequence
  Description of Artificial Sequence: Synthetic oligonucleotide
uugguagccugaggagguu

SEQ ID NO: 2140414 - RNA, 19 nt, Artificial Sequence
  Description of Artificial Sequence: Synthetic oligonucleotide
cagugcacccaggccacuc

SEQ ID NO: 2140415 - RNA, 19 nt, Artificial Sequence
  Description of Artificial Sequence: Synthetic oligonucleotide
cggaacucucuccuauuug

SEQ ID NO: 2140416 - RNA, 19 nt, Artificial Sequence
  Description of Artificial Sequence: Synthetic oligonucleotide
ggacuccagggcaucuggc

SEQ ID NO: 2140417 - RNA, 19 nt, Artificial Sequence
  Description of Artificial Sequence: Synthetic oligonucleotide
ucagugcacccaggccacu

SEQ ID NO: 2140418 - RNA, 19 nt, Artificial Sequence
  Description of Artificial Sequence: Synthetic oligonucleotide
cacucuggaugcggcgcac

SEQ ID NO: 2140419 - RNA, 19 nt, Artificial Sequence
  Description of Artificial Sequence: Synthetic oligonucleotide
ccuugaagagcaggacgug

SEQ ID NO: 2140420 - RNA, 19 nt, Artificial Sequence
  Description of Artificial Sequence: Synthetic oligonucleotide
guggcggcuugacugguau

SEQ ID NO: 2140421 - RNA, 19 nt, Artificial Sequence
  Description of Artificial Sequence: Synthetic oligonucleotide
cuccucgucggaacucucu

SEQ ID NO: 2140422 - RNA, 19 nt, Artificial Sequence
  Description of Artificial Sequence: Synthetic oligonucleotide
agcccuucuuaggcuuugu

SEQ ID NO: 2140423 - RNA, 19 nt, Artificial Sequence
  Description of Artificial Sequence: Synthetic oligonucleotide
ggcugagcugcagacugga

SEQ ID NO: 2140424 - RNA, 19 nt, Artificial Sequence
  Description of Artificial Sequence: Synthetic oligonucleotide
uggcugcgacucagugcac

SEQ ID NO: 2140425 - RNA, 19 nt, Artificial Sequence
  Description of Artificial Sequence: Synthetic oligonucleotide
gagcccacgcgcuccgccu

SEQ ID NO: 2140426 - RNA, 19 nt, Artificial Sequence
  Description of Artificial Sequence: Synthetic oligonucleotide
guaccuucugcaagccagu

SEQ ID NO: 2140427 - RNA, 19 nt, Artificial Sequence
  Description of Artificial Sequence: Synthetic oligonucleotide
ugcacgcuuuaaggauuua

SEQ ID NO: 2140428 - RNA, 19 nt, Artificial Sequence
  Description of Artificial Sequence: Synthetic oligonucleotide
cacggugacggcgugcacu

SEQ ID NO: 2140429 - RNA, 19 nt, Artificial Sequence
  Description of Artificial Sequence: Synthetic oligonucleotide
gcauaagcaccaaguaggu

SEQ ID NO: 2140430 - RNA, 19 nt, Artificial Sequence
  Description of Artificial Sequence: Synthetic oligonucleotide
gccugaggagguucuagcu

SEQ ID NO: 2140431 - RNA, 19 nt, Artificial Sequence
  Description of Artificial Sequence: Synthetic oligonucleotide
cggcuugacugguauggac

SEQ ID NO: 2140432 - RNA, 19 nt, Artificial Sequence
  Description of Artificial Sequence: Synthetic oligonucleotide
gcgacucagugcacccagg

SEQ ID NO: 2140433 - RNA, 19 nt, Artificial Sequence
  Description of Artificial Sequence: Synthetic oligonucleotide
cacccggcgccccgggcac

SEQ ID NO: 2140434 - RNA, 19 nt, Artificial Sequence
  Description of Artificial Sequence: Synthetic oligonucleotide
agcuccggacaggcccuag

SEQ ID NO: 2140435 - RNA, 19 nt, Artificial Sequence
  Description of Artificial Sequence: Synthetic oligonucleotide
gguguaagugcugcacgcu

SEQ ID NO: 2140436 - RNA, 19 nt, Artificial Sequence
  Description of Artificial Sequence: Synthetic oligonucleotide
gcugcagacuggacaucug

SEQ ID NO: 2140437 - RNA, 19 nt, Artificial Sequence
  Description of Artificial Sequence: Synthetic oligonucleotide
cugcucucccuguggccga

SEQ ID NO: 2140438 - RNA, 19 nt, Artificial Sequence
  Description of Artificial Sequence: Synthetic oligonucleotide
gagagcccacgcgcuccgc

SEQ ID NO: 2140439 - RNA, 19 nt, Artificial Sequence
  Description of Artificial Sequence: Synthetic oligonucleotide
gucggaacucucuccuauu

SEQ ID NO: 2140440 - RNA, 19 nt, Artificial Sequence
  Description of Artificial Sequence: Synthetic oligonucleotide
gagcccgccaggccgcccu

SEQ ID NO: 2140441 - RNA, 19 nt, Artificial Sequence
  Description of Artificial Sequence: Synthetic oligonucleotide
gguagccugaggagguucu

SEQ ID NO: 2140442 - RNA, 19 nt, Artificial Sequence
  Description of Artificial Sequence: Synthetic oligonucleotide
cuggcuccucgucggaacu

SEQ ID NO: 2140443 - RNA, 19 nt, Artificial Sequence
  Description of Artificial Sequence: Synthetic oligonucleotide
cugcgacucagugcaccca

SEQ ID NO: 2140444 - RNA, 19 nt, Artificial Sequence
  Description of Artificial Sequence: Synthetic oligonucleotide
cgucgcagccgcugggccc

SEQ ID NO: 2140445 - RNA, 19 nt, Artificial Sequence
  Description of Artificial Sequence: Synthetic oligonucleotide
ccgcuccugggcugcgucg

SEQ ID NO: 2140446 - RNA, 19 nt, Artificial Sequence
  Description of Artificial Sequence: Synthetic oligonucleotide
guagccugaggagguucua

SEQ ID NO: 2140447 - RNA, 19 nt, Artificial Sequence
  Description of Artificial Sequence: Synthetic oligonucleotide
cugggcugcgucggcguga

SEQ ID NO: 2140448 - RNA, 19 nt, Artificial Sequence
  Description of Artificial Sequence: Synthetic oligonucleotide
cccgcgcgccaccagcagc

SEQ ID NO: 2140449 - RNA, 19 nt, Artificial Sequence
  Description of Artificial Sequence: Synthetic oligonucleotide
gcacgcuuuaaggauuuau

SEQ ID NO: 2140450 - RNA, 19 nt, Artificial Sequence
  Description of Artificial Sequence: Synthetic oligonucleotide
ccagacgggaaggccagga

SEQ ID NO: 2140451 - RNA, 19 nt, Artificial Sequence
  Description of Artificial Sequence: Synthetic oligonucleotide
ccaaguaggucaggcagcu

SEQ ID NO: 2140452 - RNA, 19 nt, Artificial Sequence
  Description of Artificial Sequence: Synthetic oligonucleotide
gggaggacuccagggcauc

SEQ ID NO: 2140453 - RNA, 19 nt, Artificial Sequence
  Description of Artificial Sequence: Synthetic oligonucleotide
cacuggcuccucgucggaa

SEQ ID NO: 2140454 - RNA, 19 nt, Artificial Sequence
  Description of Artificial Sequence: Synthetic oligonucleotide
cucgcagcgccuccagcau

SEQ ID NO: 2140455 - RNA, 19 nt, Artificial Sequence
  Description of Artificial Sequence: Synthetic oligonucleotide
ggccacccugccgcucucg

SEQ ID NO: 2140456 - RNA, 19 nt, Artificial Sequence
  Description of Artificial Sequence: Synthetic oligonucleotide
gcgucggcgugagagccca

SEQ ID NO: 2140457 - RNA, 19 nt, Artificial Sequence
  Description of Artificial Sequence: Synthetic oligonucleotide
gcugcacgcuuuaaggauu

SEQ ID NO: 2140458 - RNA, 19 nt, Artificial Sequence
  Description of Artificial Sequence: Synthetic oligonucleotide
gcaggacgugcagcuuccc

SEQ ID NO: 2140459 - RNA, 19 nt, Artificial Sequence
  Description of Artificial Sequence: Synthetic oligonucleotide
cgcaccgagcccgccaggc

SEQ ID NO: 2140460 - RNA, 19 nt, Artificial Sequence
  Description of Artificial Sequence: Synthetic oligonucleotide
ccugggcugcgucggcgug

SEQ ID NO: 2140461 - RNA, 19 nt, Artificial Sequence
  Description of Artificial Sequence: Synthetic oligonucleotide
ggaaggcgcgggcugggau

SEQ ID NO: 2140462 - RNA, 19 nt, Artificial Sequence
  Description of Artificial Sequence: Synthetic oligonucleotide
aggcgcgggcugggauuuc

SEQ ID NO: 2140463 - RNA, 19 nt, Artificial Sequence
  Description of Artificial Sequence: Synthetic oligonucleotide
cccagcaccgauuggucau

SEQ ID NO: 2140464 - RNA, 19 nt, Artificial Sequence
  Description of Artificial Sequence: Synthetic oligonucleotide
ggcuccucgucggaacucu

SEQ ID NO: 2140465 - RNA, 19 nt, Artificial Sequence
  Description of Artificial Sequence: Synthetic oligonucleotide
ggccccgacuccagcgcgc

SEQ ID NO: 2140466 - RNA, 19 nt, Artificial Sequence
  Description of Artificial Sequence: Synthetic oligonucleotide
ggcgcgggcugggauuuca

SEQ ID NO: 2140467 - RNA, 19 nt, Artificial Sequence
  Description of Artificial Sequence: Synthetic oligonucleotide
ccaguguauugcugguggu

SEQ ID NO: 2140468 - RNA, 19 nt, Artificial Sequence
  Description of Artificial Sequence: Synthetic oligonucleotide
cccuaggcguggcggcuug

SEQ ID NO: 2140469 - RNA, 19 nt, Artificial Sequence
  Description of Artificial Sequence: Synthetic oligonucleotide
cgggcugggauuucagucu

SEQ ID NO: 2140470 - RNA, 19 nt, Artificial Sequence
  Description of Artificial Sequence: Synthetic oligonucleotide
ggcaucuggcugagcugca

SEQ ID NO: 2140471 - RNA, 19 nt, Artificial Sequence
  Description of Artificial Sequence: Synthetic oligonucleotide
gcgcaccgagcccgccagg

SEQ ID NO: 2140472 - RNA, 19 nt, Artificial Sequence
  Description of Artificial Sequence: Synthetic oligonucleotide
gcccacgcgcuccgccuug

SEQ ID NO: 2140473 - RNA, 19 nt, Artificial Sequence
  Description of Artificial Sequence: Synthetic oligonucleotide
cacccaggccacucuggau

SEQ ID NO: 2140474 - RNA, 19 nt, Artificial Sequence
  Description of Artificial Sequence: Synthetic oligonucleotide
cccgcuccugggcugcguc

SEQ ID NO: 2140475 - RNA, 19 nt, Artificial Sequence
  Description of Artificial Sequence: Synthetic oligonucleotide
agcccgugguuggccucca

SEQ ID NO: 2140476 - RNA, 19 nt, Artificial Sequence
  Description of Artificial Sequence: Synthetic oligonucleotide
gucguggcugcgacucagu

SEQ ID NO: 2140477 - RNA, 19 nt, Artificial Sequence
  Description of Artificial Sequence: Synthetic oligonucleotide
gguauggacugugcugcuu

SEQ ID NO: 2140478 - RNA, 19 nt, Artificial Sequence
  Description of Artificial Sequence: Synthetic oligonucleotide
cugggcccgggacuccacu

SEQ ID NO: 2140479 - RNA, 19 nt, Artificial Sequence
  Description of Artificial Sequence: Synthetic oligonucleotide
gcgcgggcugggauuucag

SEQ ID NO: 2140480 - RNA, 19 nt, Artificial Sequence
  Description of Artificial Sequence: Synthetic oligonucleotide
cuccggugaucaggcugca

SEQ ID NO: 2140481 - RNA, 19 nt, Artificial Sequence
  Description of Artificial Sequence: Synthetic oligonucleotide
cccacgcgcuccgccuugg

SEQ ID NO: 2140482 - RNA, 19 nt, Artificial Sequence
  Description of Artificial Sequence: Synthetic oligonucleotide
gcccgugguuggccuccag

SEQ ID NO: 2140483 - RNA, 19 nt, Artificial Sequence
  Description of Artificial Sequence: Synthetic oligonucleotide
ccgacuccagcgcgcucuc

SEQ ID NO: 2140484 - RNA, 19 nt, Artificial Sequence
  Description of Artificial Sequence: Synthetic oligonucleotide
cagcgcccgcuccugggcu

SEQ ID NO: 2140485 - RNA, 19 nt, Artificial Sequence
  Description of Artificial Sequence: Synthetic oligonucleotide
ccgcucucgcagcgccucc

SEQ ID NO: 2140486 - RNA, 19 nt, Artificial Sequence
  Description of Artificial Sequence: Synthetic oligonucleotide
ccacgcgcuccgccuuggc

SEQ ID NO: 2140487 - RNA, 19 nt, Artificial Sequence
  Description of Artificial Sequence: Synthetic oligonucleotide
cggcgccccgggcacaggc

SEQ ID NO: 2140488 - RNA, 19 nt, Artificial Sequence
  Description of Artificial Sequence: Synthetic oligonucleotide
cgucggaacucucuccuau

SEQ ID NO: 2140489 - RNA, 19 nt, Artificial Sequence
  Description of Artificial Sequence: Synthetic oligonucleotide
ccacggugacggcgugcac

SEQ ID NO: 2140490 - RNA, 19 nt, Artificial Sequence
  Description of Artificial Sequence: Synthetic oligonucleotide
cccacccggcgccccgggc

SEQ ID NO: 2140491 - RNA, 19 nt, Artificial Sequence
  Description of Artificial Sequence: Synthetic oligonucleotide
gcgcccgcuccugggcugc

SEQ ID NO: 2140492 - RNA, 19 nt, Artificial Sequence
  Description of Artificial Sequence: Synthetic oligonucleotide
gccucccaggaucuucauu

SEQ ID NO: 2140493 - RNA, 19 nt, Artificial Sequence
  Description of Artificial Sequence: Synthetic oligonucleotide
cagcuccggugaucaggcu

SEQ ID NO: 2140494 - RNA, 19 nt, Artificial Sequence
  Description of Artificial Sequence: Synthetic oligonucleotide
gcagcgcggcgcagcgccc

SEQ ID NO: 2140495 - RNA, 19 nt, Artificial Sequence
  Description of Artificial Sequence: Synthetic oligonucleotide
cccgggcacaggccccgac

SEQ ID NO: 2140496 - RNA, 19 nt, Artificial Sequence
  Description of Artificial Sequence: Synthetic oligonucleotide
ccccacccggcgccccggg

SEQ ID NO: 2140497 - RNA, 19 nt, Artificial Sequence
  Description of Artificial Sequence: Synthetic oligonucleotide
gcgccaccagcagcccgug

SEQ ID NO: 2140498 - RNA, 19 nt, Artificial Sequence
  Description of Artificial Sequence: Synthetic oligonucleotide
ccgggcacaggccccgacu

SEQ ID NO: 2140499 - RNA, 19 nt, Artificial Sequence
  Description of Artificial Sequence: Synthetic oligonucleotide
ggcccuaggcguggcggcu

SEQ ID NO: 2140500 - RNA, 19 nt, Artificial Sequence
  Description of Artificial Sequence: Synthetic oligonucleotide
cgcgccaccagcagcccgu

SEQ ID NO: 2140501 - RNA, 19 nt, Artificial Sequence
  Description of Artificial Sequence: Synthetic oligonucleotide
cgacuccagcgcgcucucc

SEQ ID NO: 2140502 - RNA, 19 nt, Artificial Sequence
  Description of Artificial Sequence: Synthetic oligonucleotide
gcccgccaggccgcccugc

SEQ ID NO: 2140503 - RNA, 19 nt, Artificial Sequence
  Description of Artificial Sequence: Synthetic oligonucleotide
ggccucccaggaucuucau

SEQ ID NO: 2140504 - RNA, 19 nt, Artificial Sequence
  Description of Artificial Sequence: Synthetic oligonucleotide
cggggcccaagaguucuga

SEQ ID NO: 2140505 - RNA, 19 nt, Artificial Sequence
  Description of Artificial Sequence: Synthetic oligonucleotide
ccgagcccgccaggccgcc

SEQ ID NO: 2140506 - RNA, 19 nt, Artificial Sequence
  Description of Artificial Sequence: Synthetic oligonucleotide
cgcgggcugggauuucagu

SEQ ID NO: 2140507 - RNA, 19 nt, Artificial Sequence
  Description of Artificial Sequence: Synthetic oligonucleotide
cguggcggcuugacuggua

SEQ ID NO: 2140508 - RNA, 19 nt, Artificial Sequence
  Description of Artificial Sequence: Synthetic oligonucleotide
gccccgacuccagcgcgcu

SEQ ID NO: 2140509 - RNA, 19 nt, Artificial Sequence
  Description of Artificial Sequence: Synthetic oligonucleotide
cgucggcgugagagcccac

SEQ ID NO: 2140510 - RNA, 19 nt, Artificial Sequence
  Description of Artificial Sequence: Synthetic oligonucleotide
gcguggcggcuugacuggu

SEQ ID NO: 2140511 - RNA, 19 nt, Artificial Sequence
  Description of Artificial Sequence: Synthetic oligonucleotide
gggcugcgucggcgugaga

SEQ ID NO: 2140512 - RNA, 19 nt, Artificial Sequence
  Description of Artificial Sequence: Synthetic oligonucleotide
ccagugcgucgcagccgcu

SEQ ID NO: 2140513 - RNA, 19 nt, Artificial Sequence
  Description of Artificial Sequence: Synthetic oligonucleotide
gcccuaggcguggcggcuu

SEQ ID NO: 2140514 - RNA, 19 nt, Artificial Sequence
  Description of Artificial Sequence: Synthetic oligonucleotide
cgcccgcuccugggcugcg

SEQ ID NO: 2140515 - RNA, 19 nt, Artificial Sequence
  Description of Artificial Sequence: Synthetic oligonucleotide
ccgccaggccgcccugccu

SEQ ID NO: 2140516 - RNA, 19 nt, Artificial Sequence
  Description of Artificial Sequence: Synthetic oligonucleotide
gcccgcuccugggcugcgu

SEQ ID NO: 2140517 - RNA, 19 nt, Artificial Sequence
  Description of Artificial Sequence: Synthetic oligonucleotide
ccccgggcacaggccccga

SEQ ID NO: 2140518 - RNA, 19 nt, Artificial Sequence
  Description of Artificial Sequence: Synthetic oligonucleotide
uauacaaagauaauggaag

SEQ ID NO: 2140519 - RNA, 19 nt, Artificial Sequence
  Description of Artificial Sequence: Synthetic oligonucleotide
augaagauccuucacaccc

SEQ ID NO: 2140520 - RNA, 19 nt, Artificial Sequence
  Description of Artificial Sequence: Synthetic oligonucleotide
aacacuuuucuccugcuac

SEQ ID NO: 2140521 - RNA, 19 nt, Artificial Sequence
  Description of Artificial Sequence: Synthetic oligonucleotide
aaggucauauauuacaucu

SEQ ID NO: 2140522 - RNA, 19 nt, Artificial Sequence
  Description of Artificial Sequence: Synthetic oligonucleotide
gaaaaggccaaccaaaccc

SEQ ID NO: 2140523 - RNA, 19 nt, Artificial Sequence
  Description of Artificial Sequence: Synthetic oligonucleotide
aacccaaaggccuuuggcc

SEQ ID NO: 2140524 - RNA, 19 nt, Artificial Sequence
  Description of Artificial Sequence: Synthetic oligonucleotide
ucuccugcuaccaugauag

SEQ ID NO: 2140525 - RNA, 19 nt, Artificial Sequence
  Description of Artificial Sequence: Synthetic oligonucleotide
aauauacaaagauaaugga

SEQ ID NO: 2140526 - RNA, 19 nt, Artificial Sequence
  Description of Artificial Sequence: Synthetic oligonucleotide
uugugaaacaccaugcugc

SEQ ID NO: 2140527 - RNA, 19 nt, Artificial Sequence
  Description of Artificial Sequence: Synthetic oligonucleotide
ucuagugucaaguaaagaa

SEQ ID NO: 2140528 - RNA, 19 nt, Artificial Sequence
  Description of Artificial Sequence: Synthetic oligonucleotide
cuucugacuguaaagaacg

SEQ ID NO: 2140529 - RNA, 19 nt, Artificial Sequence
  Description of Artificial Sequence: Synthetic oligonucleotide
ucaaguaaagaagagagcu

SEQ ID NO: 2140530 - RNA, 19 nt, Artificial Sequence
  Description of Artificial Sequence: Synthetic oligonucleotide
agagacugaguccuuaacc

SEQ ID NO: 2140531 - RNA, 19 nt, Artificial Sequence
  Description of Artificial Sequence: Synthetic oligonucleotide
acugcauucgcaucagucc

SEQ ID NO: 2140532 - RNA, 19 nt, Artificial Sequence
  Description of Artificial Sequence: Synthetic oligonucleotide
agaaacacuuuucuccugc

SEQ ID NO: 2140533 - RNA, 19 nt, Artificial Sequence
  Description of Artificial Sequence: Synthetic oligonucleotide
ugauugaauauacaaagau

SEQ ID NO: 2140534 - RNA, 19 nt, Artificial Sequence
  Description of Artificial Sequence: Synthetic oligonucleotide
aguaguguauucuucugac

SEQ ID NO: 2140535 - RNA, 19 nt, Artificial Sequence
  Description of Artificial Sequence: Synthetic oligonucleotide
uccaauauggcuagcagca

SEQ ID NO: 2140536 - RNA, 19 nt, Artificial Sequence
  Description of Artificial Sequence: Synthetic oligonucleotide
uaguguauucuucugacug

SEQ ID NO: 2140537 - RNA, 19 nt, Artificial Sequence
  Description of Artificial Sequence: Synthetic oligonucleotide
uggaauaugucaaaaucca

SEQ ID NO: 2140538 - RNA, 19 nt, Artificial Sequence
  Description of Artificial Sequence: Synthetic oligonucleotide
ucaagcaugugacaauucc

SEQ ID NO: 2140539 - RNA, 19 nt, Artificial Sequence
  Description of Artificial Sequence: Synthetic oligonucleotide
uucaaauaguccucuagag

SEQ ID NO: 2140540 - RNA, 19 nt, Artificial Sequence
  Description of Artificial Sequence: Synthetic oligonucleotide
aacauccaugggcagaaac

SEQ ID NO: 2140541 - RNA, 19 nt, Artificial Sequence
  Description of Artificial Sequence: Synthetic oligonucleotide
acaaagauaauggaaguag

SEQ ID NO: 2140542 - RNA, 19 nt, Artificial Sequence
  Description of Artificial Sequence: Synthetic oligonucleotide
acacaaguaacuuucauaa

SEQ ID NO: 2140543 - RNA, 19 nt, Artificial Sequence
  Description of Artificial Sequence: Synthetic oligonucleotide
auggucugcaugaagaucc

SEQ ID NO: 2140544 - RNA, 19 nt, Artificial Sequence
  Description of Artificial Sequence: Synthetic oligonucleotide
cuagugucaaguaaagaag

SEQ ID NO: 2140545 - RNA, 19 nt, Artificial Sequence
  Description of Artificial Sequence: Synthetic oligonucleotide
ucaaaagccaucuuuuagu

SEQ ID NO: 2140546 - RNA, 19 nt, Artificial Sequence
  Description of Artificial Sequence: Synthetic oligonucleotide
caaauaguccucuagagca

SEQ ID NO: 2140547 - RNA, 19 nt, Artificial Sequence
  Description of Artificial Sequence: Synthetic oligonucleotide
gucaaaauccacucgcugg

SEQ ID NO: 2140548 - RNA, 19 nt, Artificial Sequence
  Description of Artificial Sequence: Synthetic oligonucleotide
aaguaaagaagagagcucu

SEQ ID NO: 2140549 - RNA, 19 nt, Artificial Sequence
  Description of Artificial Sequence: Synthetic oligonucleotide
aaagaagagagcucugagu

SEQ ID NO: 2140550 - RNA, 19 nt, Artificial Sequence
  Description of Artificial Sequence: Synthetic oligonucleotide
ugcacacaaacauccaugg

SEQ ID NO: 2140551 - RNA, 19 nt, Artificial Sequence
  Description of Artificial Sequence: Synthetic oligonucleotide
ccaucuuuuaguuagauug

SEQ ID NO: 2140552 - RNA, 19 nt, Artificial Sequence
  Description of Artificial Sequence: Synthetic oligonucleotide
gaaccaagcauggaggucg

SEQ ID NO: 2140553 - RNA, 19 nt, Artificial Sequence
  Description of Artificial Sequence: Synthetic oligonucleotide
uaaagaagagagcucugag

SEQ ID NO: 2140554 - RNA, 19 nt, Artificial Sequence
  Description of Artificial Sequence: Synthetic oligonucleotide
guaacuuucauaaucccgc

SEQ ID NO: 2140555 - RNA, 19 nt, Artificial Sequence
  Description of Artificial Sequence: Synthetic oligonucleotide
auauauuacaucucucaca

SEQ ID NO: 2140556 - RNA, 19 nt, Artificial Sequence
  Description of Artificial Sequence: Synthetic oligonucleotide
uuuaguuagauugugucuc

SEQ ID NO: 2140557 - RNA, 19 nt, Artificial Sequence
  Description of Artificial Sequence: Synthetic oligonucleotide
agaguuuucggcauccugc

SEQ ID NO: 2140558 - RNA, 19 nt, Artificial Sequence
  Description of Artificial Sequence: Synthetic oligonucleotide
gacugaaccaagcauggag

SEQ ID NO: 2140559 - RNA, 19 nt, Artificial Sequence
  Description of Artificial Sequence: Synthetic oligonucleotide
aaaugcaggaagugcuuuc

SEQ ID NO: 2140560 - RNA, 19 nt, Artificial Sequence
  Description of Artificial Sequence: Synthetic oligonucleotide
uuuuaguuagauugugucu

SEQ ID NO: 2140561 - RNA, 19 nt, Artificial Sequence
  Description of Artificial Sequence: Synthetic oligonucleotide
auugugucucuugacagcc

SEQ ID NO: 2140562 - RNA, 19 nt, Artificial Sequence
  Description of Artificial Sequence: Synthetic oligonucleotide
agcguaauucucaagcucc

SEQ ID NO: 2140563 - RNA, 19 nt, Artificial Sequence
  Description of Artificial Sequence: Synthetic oligonucleotide
aaagauaauggaaguagug

SEQ ID NO: 2140564 - RNA, 19 nt, Artificial Sequence
  Description of Artificial Sequence: Synthetic oligonucleotide
aacagaguuuucggcaucc

SEQ ID NO: 2140565 - RNA, 19 nt, Artificial Sequence
  Description of Artificial Sequence: Synthetic oligonucleotide
aacacaaguaacuuucaua

SEQ ID NO: 2140566 - RNA, 19 nt, Artificial Sequence
  Description of Artificial Sequence: Synthetic oligonucleotide
aacacuucuguggaaggac

SEQ ID NO: 2140567 - RNA, 19 nt, Artificial Sequence
  Description of Artificial Sequence: Synthetic oligonucleotide
uuuuaucuugguuccuccg

SEQ ID NO: 2140568 - RNA, 19 nt, Artificial Sequence
  Description of Artificial Sequence: Synthetic oligonucleotide
aaugcaggaagugcuuucg

SEQ ID NO: 2140569 - RNA, 19 nt, Artificial Sequence
  Description of Artificial Sequence: Synthetic oligonucleotide
cuccaggcaauaauggucg

SEQ ID NO: 2140570 - RNA, 19 nt, Artificial Sequence
  Description of Artificial Sequence: Synthetic oligonucleotide
ugcuuuaggugcaagugug

SEQ ID NO: 2140571 - RNA, 19 nt, Artificial Sequence
  Description of Artificial Sequence: Synthetic oligonucleotide
acugugauaugcuuuguca

SEQ ID NO: 2140572 - RNA, 19 nt, Artificial Sequence
  Description of Artificial Sequence: Synthetic oligonucleotide
gccaguuccacguugaagg

SEQ ID NO: 2140573 - RNA, 19 nt, Artificial Sequence
  Description of Artificial Sequence: Synthetic oligonucleotide
uuuucggcauccugcaggg

SEQ ID NO: 2140574 - RNA, 19 nt, Artificial Sequence
  Description of Artificial Sequence: Synthetic oligonucleotide
guggaauaugucaaaaucc

SEQ ID NO: 2140575 - RNA, 19 nt, Artificial Sequence
  Description of Artificial Sequence: Synthetic oligonucleotide
auggaggucgccaugacac

SEQ ID NO: 2140576 - RNA, 19 nt, Artificial Sequence
  Description of Artificial Sequence: Synthetic oligonucleotide
uaugcuuugucauccagau

SEQ ID NO: 2140577 - RNA, 19 nt, Artificial Sequence
  Description of Artificial Sequence: Synthetic oligonucleotide
ucuuuuaguuagauugugu

SEQ ID NO: 2140578 - RNA, 19 nt, Artificial Sequence
  Description of Artificial Sequence: Synthetic oligonucleotide
uuuaucuugguuccuccgu

SEQ ID NO: 2140579 - RNA, 19 nt, Artificial Sequence
  Description of Artificial Sequence: Synthetic oligonucleotide
aguuccacguugaaggccc

SEQ ID NO: 2140580 - RNA, 19 nt, Artificial Sequence
  Description of Artificial Sequence: Synthetic oligonucleotide
aacugcauucgcaucaguc

SEQ ID NO: 2140581 - RNA, 19 nt, Artificial Sequence
  Description of Artificial Sequence: Synthetic oligonucleotide
uagaaaguccucuugugaa

SEQ ID NO: 2140582 - RNA, 19 nt, Artificial Sequence
  Description of Artificial Sequence: Synthetic oligonucleotide
aauaauggucggaacccgg

SEQ ID NO: 2140583 - RNA, 19 nt, Artificial Sequence
  Description of Artificial Sequence: Synthetic oligonucleotide
ugucaaaauccacucgcug

SEQ ID NO: 2140584 - RNA, 19 nt, Artificial Sequence
  Description of Artificial Sequence: Synthetic oligonucleotide
uugacagccuuccagaguu

SEQ ID NO: 2140585 - RNA, 19 nt, Artificial Sequence
  Description of Artificial Sequence: Synthetic oligonucleotide
uugaaggcccuucagugca

SEQ ID NO: 2140586 - RNA, 19 nt, Artificial Sequence
  Description of Artificial Sequence: Synthetic oligonucleotide
ucauaaucccgcuuccuca

SEQ ID NO: 2140587 - RNA, 19 nt, Artificial Sequence
  Description of Artificial Sequence: Synthetic oligonucleotide
agugcuuucgcaggaacac

SEQ ID NO: 2140588 - RNA, 19 nt, Artificial Sequence
  Description of Artificial Sequence: Synthetic oligonucleotide
ugacuguaaagaacgggug

SEQ ID NO: 2140589 - RNA, 19 nt, Artificial Sequence
  Description of Artificial Sequence: Synthetic oligonucleotide
acccagaacuucuaguguc

SEQ ID NO: 2140590 - RNA, 19 nt, Artificial Sequence
  Description of Artificial Sequence: Synthetic oligonucleotide
uuaggugcaagugugccug

SEQ ID NO: 2140591 - RNA, 19 nt, Artificial Sequence
  Description of Artificial Sequence: Synthetic oligonucleotide
ugugccuuuccaauauggc

SEQ ID NO: 2140592 - RNA, 19 nt, Artificial Sequence
  Description of Artificial Sequence: Synthetic oligonucleotide
aacuucuagugucaaguaa

SEQ ID NO: 2140593 - RNA, 19 nt, Artificial Sequence
  Description of Artificial Sequence: Synthetic oligonucleotide
aaacagaguuuucggcauc

SEQ ID NO: 2140594 - RNA, 19 nt, Artificial Sequence
  Description of Artificial Sequence: Synthetic oligonucleotide
ucuugugaaacaccaugcu

SEQ ID NO: 2140595 - RNA, 19 nt, Artificial Sequence
  Description of Artificial Sequence: Synthetic oligonucleotide
aaauccacucgcuggauuu

SEQ ID NO: 2140596 - RNA, 19 nt, Artificial Sequence
  Description of Artificial Sequence: Synthetic oligonucleotide
uugguuccuccguagaaag

SEQ ID NO: 2140597 - RNA, 19 nt, Artificial Sequence
  Description of Artificial Sequence: Synthetic oligonucleotide
gauugugucucuugacagc

SEQ ID NO: 2140598 - RNA, 19 nt, Artificial Sequence
  Description of Artificial Sequence: Synthetic oligonucleotide
uaauucucaagcuccugga

SEQ ID NO: 2140599 - RNA, 19 nt, Artificial Sequence
  Description of Artificial Sequence: Synthetic oligonucleotide
uuuggccgcggacugaacc

SEQ ID NO: 2140600 - RNA, 19 nt, Artificial Sequence
  Description of Artificial Sequence: Synthetic oligonucleotide
cuugugaaacaccaugcug

SEQ ID NO: 2140601 - RNA, 19 nt, Artificial Sequence
  Description of Artificial Sequence: Synthetic oligonucleotide
acugaaccaagcauggagg

SEQ ID NO: 2140602 - RNA, 19 nt, Artificial Sequence
  Description of Artificial Sequence: Synthetic oligonucleotide
gaaguaguguauucuucug

SEQ ID NO: 2140603 - RNA, 19 nt, Artificial Sequence
  Description of Artificial Sequence: Synthetic oligonucleotide
uucgcaggaacacuucugu

SEQ ID NO: 2140604 - RNA, 19 nt, Artificial Sequence
  Description of Artificial Sequence: Synthetic oligonucleotide
guacauaucuuccacagcu

SEQ ID NO: 2140605 - RNA, 19 nt, Artificial Sequence
  Description of Artificial Sequence: Synthetic oligonucleotide
ugugauaugcuuugucauc

SEQ ID NO: 2140606 - RNA, 19 nt, Artificial Sequence
  Description of Artificial Sequence: Synthetic oligonucleotide
ugauucucaaaagccaucu

SEQ ID NO: 2140607 - RNA, 19 nt, Artificial Sequence
  Description of Artificial Sequence: Synthetic oligonucleotide
aggccaaccaaacccaaag

SEQ ID NO: 2140608 - RNA, 19 nt, Artificial Sequence
  Description of Artificial Sequence: Synthetic oligonucleotide
uccugcuaccaugauaggg

SEQ ID NO: 2140609 - RNA, 19 nt, Artificial Sequence
  Description of Artificial Sequence: Synthetic oligonucleotide
gaguucgauggccacaggc

SEQ ID NO: 2140610 - RNA, 19 nt, Artificial Sequence
  Description of Artificial Sequence: Synthetic oligonucleotide
uuagauugugucucuugac

SEQ ID NO: 2140611 - RNA, 19 nt, Artificial Sequence
  Description of Artificial Sequence: Synthetic oligonucleotide
ugugaaacaccaugcugca

SEQ ID NO: 2140612 - RNA, 19 nt, Artificial Sequence
  Description of Artificial Sequence: Synthetic oligonucleotide
uccauugauugaauauaca

SEQ ID NO: 2140613 - RNA, 19 nt, Artificial Sequence
  Description of Artificial Sequence: Synthetic oligonucleotide
ucagcguaauucucaagcu

SEQ ID NO: 2140614 - RNA, 19 nt, Artificial Sequence
  Description of Artificial Sequence: Synthetic oligonucleotide
agagcaaccgucugaagaa

SEQ ID NO: 2140615 - RNA, 19 nt, Artificial Sequence
  Description of Artificial Sequence: Synthetic oligonucleotide
uccaugggcagaaacacuu

SEQ ID NO: 2140616 - RNA, 19 nt, Artificial Sequence
  Description of Artificial Sequence: Synthetic oligonucleotide
uuucgcaggaacacuucug

SEQ ID NO: 2140617 - RNA, 19 nt, Artificial Sequence
  Description of Artificial Sequence: Synthetic oligonucleotide
caugugacaauuccuugug

SEQ ID NO: 2140618 - RNA, 19 nt, Artificial Sequence
  Description of Artificial Sequence: Synthetic oligonucleotide
cacgcucccacacaucucg

SEQ ID NO: 2140619 - RNA, 19 nt, Artificial Sequence
  Description of Artificial Sequence: Synthetic oligonucleotide
ugaagauccuucacaccca

SEQ ID NO: 2140620 - RNA, 19 nt, Artificial Sequence
  Description of Artificial Sequence: Synthetic oligonucleotide
gaagauccuucacacccag

SEQ ID NO: 2140621 - RNA, 19 nt, Artificial Sequence
  Description of Artificial Sequence: Synthetic oligonucleotide
uaaagaacggguggaauau

SEQ ID NO: 2140622 - RNA, 19 nt, Artificial Sequence
  Description of Artificial Sequence: Synthetic oligonucleotide
cuuucauaaucccgcuucc

SEQ ID NO: 2140623 - RNA, 19 nt, Artificial Sequence
  Description of Artificial Sequence: Synthetic oligonucleotide
uuuaggugcaagugugccu

SEQ ID NO: 2140624 - RNA, 19 nt, Artificial Sequence
  Description of Artificial Sequence: Synthetic oligonucleotide
cauaaucccgcuuccucag

SEQ ID NO: 2140625 - RNA, 19 nt, Artificial Sequence
  Description of Artificial Sequence: Synthetic oligonucleotide
uuaguuagauugugucucu

SEQ ID NO: 2140626 - RNA, 19 nt, Artificial Sequence
  Description of Artificial Sequence: Synthetic oligonucleotide
caugcuuuaggugcaagug

SEQ ID NO: 2140627 - RNA, 19 nt, Artificial Sequence
  Description of Artificial Sequence: Synthetic oligonucleotide
aauggucggaacccgggau

SEQ ID NO: 2140628 - RNA, 19 nt, Artificial Sequence
  Description of Artificial Sequence: Synthetic oligonucleotide
uucggcauccugcagggaa

SEQ ID NO: 2140629 - RNA, 19 nt, Artificial Sequence
  Description of Artificial Sequence: Synthetic oligonucleotide
guagaaaguccucuuguga

SEQ ID NO: 2140630 - RNA, 19 nt, Artificial Sequence
  Description of Artificial Sequence: Synthetic oligonucleotide
ucgcucucaagcaugugac

SEQ ID NO: 2140631 - RNA, 19 nt, Artificial Sequence
  Description of Artificial Sequence: Synthetic oligonucleotide
cuuuaggugcaagugugcc

SEQ ID NO: 2140632 - RNA, 19 nt, Artificial Sequence
  Description of Artificial Sequence: Synthetic oligonucleotide
ucuagagcaaccgucugaa

SEQ ID NO: 2140633 - RNA, 19 nt, Artificial Sequence
  Description of Artificial Sequence: Synthetic oligonucleotide
caugaagauccuucacacc

SEQ ID NO: 2140634 - RNA, 19 nt, Artificial Sequence
  Description of Artificial Sequence: Synthetic oligonucleotide
ucugaguguucucagcgua

SEQ ID NO: 2140635 - RNA, 19 nt, Artificial Sequence
  Description of Artificial Sequence: Synthetic oligonucleotide
ugcaggaagugcuuucgca

SEQ ID NO: 2140636 - RNA, 19 nt, Artificial Sequence
  Description of Artificial Sequence: Synthetic oligonucleotide
aauuguuuucucagagacu

SEQ ID NO: 2140637 - RNA, 19 nt, Artificial Sequence
  Description of Artificial Sequence: Synthetic oligonucleotide
gagacugaguccuuaaccu

SEQ ID NO: 2140638 - RNA, 19 nt, Artificial Sequence
  Description of Artificial Sequence: Synthetic oligonucleotide
auaaucccgcuuccucagc

SEQ ID NO: 2140639 - RNA, 19 nt, Artificial Sequence
  Description of Artificial Sequence: Synthetic oligonucleotide
aagaacggguggaauaugu

SEQ ID NO: 2140640 - RNA, 19 nt, Artificial Sequence
  Description of Artificial Sequence: Synthetic oligonucleotide
uuaucuugguuccuccgua

SEQ ID NO: 2140641 - RNA, 19 nt, Artificial Sequence
  Description of Artificial Sequence: Synthetic oligonucleotide
uaaucccgcuuccucagca

SEQ ID NO: 2140642 - RNA, 19 nt, Artificial Sequence
  Description of Artificial Sequence: Synthetic oligonucleotide
augcuuuaggugcaagugu

SEQ ID NO: 2140643 - RNA, 19 nt, Artificial Sequence
  Description of Artificial Sequence: Synthetic oligonucleotide
caaccgucugaagaaaugc

SEQ ID NO: 2140644 - RNA, 19 nt, Artificial Sequence
  Description of Artificial Sequence: Synthetic oligonucleotide
ugagccaguuccacguuga

SEQ ID NO: 2140645 - RNA, 19 nt, Artificial Sequence
  Description of Artificial Sequence: Synthetic oligonucleotide
aaaauccacucgcuggauu

SEQ ID NO: 2140646 - RNA, 19 nt, Artificial Sequence
  Description of Artificial Sequence: Synthetic oligonucleotide
ccaaccaaacccaaaggcc

SEQ ID NO: 2140647 - RNA, 19 nt, Artificial Sequence
  Description of Artificial Sequence: Synthetic oligonucleotide
ucccacacaucucgaggcg

SEQ ID NO: 2140648 - RNA, 19 nt, Artificial Sequence
  Description of Artificial Sequence: Synthetic oligonucleotide
ggcaaggucauauauuaca

SEQ ID NO: 2140649 - RNA, 19 nt, Artificial Sequence
  Description of Artificial Sequence: Synthetic oligonucleotide
ucuugguuccuccguagaa

SEQ ID NO: 2140650 - RNA, 19 nt, Artificial Sequence
  Description of Artificial Sequence: Synthetic oligonucleotide
agcaugugacaauuccuug

SEQ ID NO: 2140651 - RNA, 19 nt, Artificial Sequence
  Description of Artificial Sequence: Synthetic oligonucleotide
uacugugauaugcuuuguc

SEQ ID NO: 2140652 - RNA, 19 nt, Artificial Sequence
  Description of Artificial Sequence: Synthetic oligonucleotide
uaacuuucauaaucccgcu

SEQ ID NO: 2140653 - RNA, 19 nt, Artificial Sequence
  Description of Artificial Sequence: Synthetic oligonucleotide
guaaagaacggguggaaua

SEQ ID NO: 2140654 - RNA, 19 nt, Artificial Sequence
  Description of Artificial Sequence: Synthetic oligonucleotide
agacugaguccuuaaccug

SEQ ID NO: 2140655 - RNA, 19 nt, Artificial Sequence
  Description of Artificial Sequence: Synthetic oligonucleotide
acuucuagugucaaguaaa

SEQ ID NO: 2140656 - RNA, 19 nt, Artificial Sequence
  Description of Artificial Sequence: Synthetic oligonucleotide
auaauggucggaacccggg

SEQ ID NO: 2140657 - RNA, 19 nt, Artificial Sequence
  Description of Artificial Sequence: Synthetic oligonucleotide
uacaaagauaauggaagua

SEQ ID NO: 2140658 - RNA, 19 nt, Artificial Sequence
  Description of Artificial Sequence: Synthetic oligonucleotide
uguucucagcguaauucuc

SEQ ID NO: 2140659 - RNA, 19 nt, Artificial Sequence
  Description of Artificial Sequence: Synthetic oligonucleotide
gcucugaguguucucagcg

SEQ ID NO: 2140660 - RNA, 19 nt, Artificial Sequence
  Description of Artificial Sequence: Synthetic oligonucleotide
uaauggucggaacccggga

SEQ ID NO: 2140661 - RNA, 19 nt, Artificial Sequence
  Description of Artificial Sequence: Synthetic oligonucleotide
caauaauggucggaacccg

SEQ ID NO: 2140662 - RNA, 19 nt, Artificial Sequence
  Description of Artificial Sequence: Synthetic oligonucleotide
caaggucauauauuacauc

SEQ ID NO: 2140663 - RNA, 19 nt, Artificial Sequence
  Description of Artificial Sequence: Synthetic oligonucleotide
agcauggucugcaugaaga

SEQ ID NO: 2140664 - RNA, 19 nt, Artificial Sequence
  Description of Artificial Sequence: Synthetic oligonucleotide
ucggaacccgggaugccgg

SEQ ID NO: 2140665 - RNA, 19 nt, Artificial Sequence
  Description of Artificial Sequence: Synthetic oligonucleotide
aacggguggaauaugucaa

SEQ ID NO: 2140666 - RNA, 19 nt, Artificial Sequence
  Description of Artificial Sequence: Synthetic oligonucleotide
gucaaguaaagaagagagc

SEQ ID NO: 2140667 - RNA, 19 nt, Artificial Sequence
  Description of Artificial Sequence: Synthetic oligonucleotide
guggaaggaccuugcaugc

SEQ ID NO: 2140668 - RNA, 19 nt, Artificial Sequence
  Description of Artificial Sequence: Synthetic oligonucleotide
aaagaacggguggaauaug

SEQ ID NO: 2140669 - RNA, 19 nt, Artificial Sequence
  Description of Artificial Sequence: Synthetic oligonucleotide
aacccgggaugccgggccc

SEQ ID NO: 2140670 - RNA, 19 nt, Artificial Sequence
  Description of Artificial Sequence: Synthetic oligonucleotide
cauccugcagggaacagca

SEQ ID NO: 2140671 - RNA, 19 nt, Artificial Sequence
  Description of Artificial Sequence: Synthetic oligonucleotide
cuggcaaggucauauauua

SEQ ID NO: 2140672 - RNA, 19 nt, Artificial Sequence
  Description of Artificial Sequence: Synthetic oligonucleotide
ggaccuugcaugcuuuagg

SEQ ID NO: 2140673 - RNA, 19 nt, Artificial Sequence
  Description of Artificial Sequence: Synthetic oligonucleotide
gaguuuucggcauccugca

SEQ ID NO: 2140674 - RNA, 19 nt, Artificial Sequence
  Description of Artificial Sequence: Synthetic oligonucleotide
acguugaaggcccuucagu

SEQ ID NO: 2140675 - RNA, 19 nt, Artificial Sequence
  Description of Artificial Sequence: Synthetic oligonucleotide
aagugugccuggcuggcaa

SEQ ID NO: 2140676 - RNA, 19 nt, Artificial Sequence
  Description of Artificial Sequence: Synthetic oligonucleotide
accgucugaagaaaugcag

SEQ ID NO: 2140677 - RNA, 19 nt, Artificial Sequence
  Description of Artificial Sequence: Synthetic oligonucleotide
ugauaugcuuugucaucca

SEQ ID NO: 2140678 - RNA, 19 nt, Artificial Sequence
  Description of Artificial Sequence: Synthetic oligonucleotide
uuccuugugccuuuccaau

SEQ ID NO: 2140679 - RNA, 19 nt, Artificial Sequence
  Description of Artificial Sequence: Synthetic oligonucleotide
uaccaugauagggugucgc

SEQ ID NO: 2140680 - RNA, 19 nt, Artificial Sequence
  Description of Artificial Sequence: Synthetic oligonucleotide
uucuagugucaaguaaaga

SEQ ID NO: 2140681 - RNA, 19 nt, Artificial Sequence
  Description of Artificial Sequence: Synthetic oligonucleotide
aggucauauauuacaucuc

SEQ ID NO: 2140682 - RNA, 19 nt, Artificial Sequence
  Description of Artificial Sequence: Synthetic oligonucleotide
acauccaugggcagaaaca

SEQ ID NO: 2140683 - RNA, 19 nt, Artificial Sequence
  Description of Artificial Sequence: Synthetic oligonucleotide
gucgcucucaagcauguga

SEQ ID NO: 2140684 - RNA, 19 nt, Artificial Sequence
  Description of Artificial Sequence: Synthetic oligonucleotide
uucuccugcuaccaugaua

SEQ ID NO: 2140685 - RNA, 19 nt, Artificial Sequence
  Description of Artificial Sequence: Synthetic oligonucleotide
ucagagacugaguccuuaa

SEQ ID NO: 2140686 - RNA, 19 nt, Artificial Sequence
  Description of Artificial Sequence: Synthetic oligonucleotide
aaccgucugaagaaaugca

SEQ ID NO: 2140687 - RNA, 19 nt, Artificial Sequence
  Description of Artificial Sequence: Synthetic oligonucleotide
gacugaguccuuaaccuga

SEQ ID NO: 2140688 - RNA, 19 nt, Artificial Sequence
  Description of Artificial Sequence: Synthetic oligonucleotide
uuggccgcggacugaacca

SEQ ID NO: 2140689 - RNA, 19 nt, Artificial Sequence
  Description of Artificial Sequence: Synthetic oligonucleotide
augugguggguugucacag

SEQ ID NO: 2140690 - RNA, 19 nt, Artificial Sequence
  Description of Artificial Sequence: Synthetic oligonucleotide
aagugcuuucgcaggaaca

SEQ ID NO: 2140691 - RNA, 19 nt, Artificial Sequence
  Description of Artificial Sequence: Synthetic oligonucleotide
ucucaagcaugugacaauu

SEQ ID NO: 2140692 - RNA, 19 nt, Artificial Sequence
  Description of Artificial Sequence: Synthetic oligonucleotide
cagaguucgauggccacag

SEQ ID NO: 2140693 - RNA, 19 nt, Artificial Sequence
  Description of Artificial Sequence: Synthetic oligonucleotide
uggguugucacaguacaua

SEQ ID NO: 2140694 - RNA, 19 nt, Artificial Sequence
  Description of Artificial Sequence: Synthetic oligonucleotide
auaugcuuugucauccaga

SEQ ID NO: 2140695 - RNA, 19 nt, Artificial Sequence
  Description of Artificial Sequence: Synthetic oligonucleotide
ugcgccggacugccgaggg

SEQ ID NO: 2140696 - RNA, 19 nt, Artificial Sequence
  Description of Artificial Sequence: Synthetic oligonucleotide
uacauaucuuccacagcuu

SEQ ID NO: 2140697 - RNA, 19 nt, Artificial Sequence
  Description of Artificial Sequence: Synthetic oligonucleotide
gugucaaguaaagaagaga

SEQ ID NO: 2140698 - RNA, 19 nt, Artificial Sequence
  Description of Artificial Sequence: Synthetic oligonucleotide
gaaacagaguuuucggcau

SEQ ID NO: 2140699 - RNA, 19 nt, Artificial Sequence
  Description of Artificial Sequence: Synthetic oligonucleotide
agcagcuccaggcaauaau

SEQ ID NO: 2140700 - RNA, 19 nt, Artificial Sequence
  Description of Artificial Sequence: Synthetic oligonucleotide
cagaacuucuagugucaag

SEQ ID NO: 2140701 - RNA, 19 nt, Artificial Sequence
  Description of Artificial Sequence: Synthetic oligonucleotide
accaugauagggugucgcu

SEQ ID NO: 2140702 - RNA, 19 nt, Artificial Sequence
  Description of Artificial Sequence: Synthetic oligonucleotide
uccaggcaauaauggucgg

SEQ ID NO: 2140703 - RNA, 19 nt, Artificial Sequence
  Description of Artificial Sequence: Synthetic oligonucleotide
uggcaaggucauauauuac

SEQ ID NO: 2140704 - RNA, 19 nt, Artificial Sequence
  Description of Artificial Sequence: Synthetic oligonucleotide
aguuuucggcauccugcag

SEQ ID NO: 2140705 - RNA, 19 nt, Artificial Sequence
  Description of Artificial Sequence: Synthetic oligonucleotide
agggaacacaaguaacuuu

SEQ ID NO: 2140706 - RNA, 19 nt, Artificial Sequence
  Description of Artificial Sequence: Synthetic oligonucleotide
ugguggguugucacaguac

SEQ ID NO: 2140707 - RNA, 19 nt, Artificial Sequence
  Description of Artificial Sequence: Synthetic oligonucleotide
cagcguaauucucaagcuc

SEQ ID NO: 2140708 - RNA, 19 nt, Artificial Sequence
  Description of Artificial Sequence: Synthetic oligonucleotide
agaacugcauucgcaucag

SEQ ID NO: 2140709 - RNA, 19 nt, Artificial Sequence
  Description of Artificial Sequence: Synthetic oligonucleotide
augauagggugucgcucuc

SEQ ID NO: 2140710 - RNA, 19 nt, Artificial Sequence
  Description of Artificial Sequence: Synthetic oligonucleotide
cagaguuuucggcauccug

SEQ ID NO: 2140711 - RNA, 19 nt, Artificial Sequence
  Description of Artificial Sequence: Synthetic oligonucleotide
cuggucgccgccacgcugc

SEQ ID NO: 2140712 - RNA, 19 nt, Artificial Sequence
  Description of Artificial Sequence: Synthetic oligonucleotide
cuugcaugcuuuaggugca

SEQ ID NO: 2140713 - RNA, 19 nt, Artificial Sequence
  Description of Artificial Sequence: Synthetic oligonucleotide
ugcuaccaugauagggugu

SEQ ID NO: 2140714 - RNA, 19 nt, Artificial Sequence
  Description of Artificial Sequence: Synthetic oligonucleotide
gauagggugucgcucucaa

SEQ ID NO: 2140715 - RNA, 19 nt, Artificial Sequence
  Description of Artificial Sequence: Synthetic oligonucleotide
gaccuugcaugcuuuaggu

SEQ ID NO: 2140716 - RNA, 19 nt, Artificial Sequence
  Description of Artificial Sequence: Synthetic oligonucleotide
cugcauucgcaucagucca

SEQ ID NO: 2140717 - RNA, 19 nt, Artificial Sequence
  Description of Artificial Sequence: Synthetic oligonucleotide
gaacuucuagugucaagua

SEQ ID NO: 2140718 - RNA, 19 nt, Artificial Sequence
  Description of Artificial Sequence: Synthetic oligonucleotide
ugcauucgcaucaguccaa

SEQ ID NO: 2140719 - RNA, 19 nt, Artificial Sequence
  Description of Artificial Sequence: Synthetic oligonucleotide
aucuugguuccuccguaga

SEQ ID NO: 2140720 - RNA, 19 nt, Artificial Sequence
  Description of Artificial Sequence: Synthetic oligonucleotide
uccuggauacugugauaug

SEQ ID NO: 2140721 - RNA, 19 nt, Artificial Sequence
  Description of Artificial Sequence: Synthetic oligonucleotide
ggccaaccaaacccaaagg

SEQ ID NO: 2140722 - RNA, 19 nt, Artificial Sequence
  Description of Artificial Sequence: Synthetic oligonucleotide
uccagaguucgauggccac

SEQ ID NO: 2140723 - RNA, 19 nt, Artificial Sequence
  Description of Artificial Sequence: Synthetic oligonucleotide
ugccgagggucccggaagc

SEQ ID NO: 2140724 - RNA, 19 nt, Artificial Sequence
  Description of Artificial Sequence: Synthetic oligonucleotide
ggaaguaguguauucuucu

SEQ ID NO: 2140725 - RNA, 19 nt, Artificial Sequence
  Description of Artificial Sequence: Synthetic oligonucleotide
auagggugucgcucucaag

SEQ ID NO: 2140726 - RNA, 19 nt, Artificial Sequence
  Description of Artificial Sequence: Synthetic oligonucleotide
uccacucgcuggauuuucu

SEQ ID NO: 2140727 - RNA, 19 nt, Artificial Sequence
  Description of Artificial Sequence: Synthetic oligonucleotide
cagagacugaguccuuaac

SEQ ID NO: 2140728 - RNA, 19 nt, Artificial Sequence
  Description of Artificial Sequence: Synthetic oligonucleotide
gucggaacccgggaugccg

SEQ ID NO: 2140729 - RNA, 19 nt, Artificial Sequence
  Description of Artificial Sequence: Synthetic oligonucleotide
cacguugaaggcccuucag

SEQ ID NO: 2140730 - RNA, 19 nt, Artificial Sequence
  Description of Artificial Sequence: Synthetic oligonucleotide
cucaagcaugugacaauuc

SEQ ID NO: 2140731 - RNA, 19 nt, Artificial Sequence
  Description of Artificial Sequence: Synthetic oligonucleotide
gguuccuccguagaaaguc

SEQ ID NO: 2140732 - RNA, 19 nt, Artificial Sequence
  Description of Artificial Sequence: Synthetic oligonucleotide
uggucggaacccgggaugc

SEQ ID NO: 2140733 - RNA, 19 nt, Artificial Sequence
  Description of Artificial Sequence: Synthetic oligonucleotide
caugauagggugucgcucu

SEQ ID NO: 2140734 - RNA, 19 nt, Artificial Sequence
  Description of Artificial Sequence: Synthetic oligonucleotide
uccuugugccuuuccaaua

SEQ ID NO: 2140735 - RNA, 19 nt, Artificial Sequence
  Description of Artificial Sequence: Synthetic oligonucleotide
cagaaacacuuuucuccug

SEQ ID NO: 2140736 - RNA, 19 nt, Artificial Sequence
  Description of Artificial Sequence: Synthetic oligonucleotide
guuccuccguagaaagucc

SEQ ID NO: 2140737 - RNA, 19 nt, Artificial Sequence
  Description of Artificial Sequence: Synthetic oligonucleotide
ugaguguucucagcguaau

SEQ ID NO: 2140738 - RNA, 19 nt, Artificial Sequence
  Description of Artificial Sequence: Synthetic oligonucleotide
ugguuccuccguagaaagu

SEQ ID NO: 2140739 - RNA, 19 nt, Artificial Sequence
  Description of Artificial Sequence: Synthetic oligonucleotide
agugugccuggcuggcaag

SEQ ID NO: 2140740 - RNA, 19 nt, Artificial Sequence
  Description of Artificial Sequence: Synthetic oligonucleotide
augucaaaauccacucgcu

SEQ ID NO: 2140741 - RNA, 19 nt, Artificial Sequence
  Description of Artificial Sequence: Synthetic oligonucleotide
acugaguccuuaaccugag

SEQ ID NO: 2140742 - RNA, 19 nt, Artificial Sequence
  Description of Artificial Sequence: Synthetic oligonucleotide
cuagagcaaccgucugaag

SEQ ID NO: 2140743 - RNA, 19 nt, Artificial Sequence
  Description of Artificial Sequence: Synthetic oligonucleotide
uugugucucuugacagccu

SEQ ID NO: 2140744 - RNA, 19 nt, Artificial Sequence
  Description of Artificial Sequence: Synthetic oligonucleotide
cucuagagcaaccgucuga

SEQ ID NO: 2140745 - RNA, 19 nt, Artificial Sequence
  Description of Artificial Sequence: Synthetic oligonucleotide
aaggaccuugcaugcuuua

SEQ ID NO: 2140746 - RNA, 19 nt, Artificial Sequence
  Description of Artificial Sequence: Synthetic oligonucleotide
caaacauccaugggcagaa

SEQ ID NO: 2140747 - RNA, 19 nt, Artificial Sequence
  Description of Artificial Sequence: Synthetic oligonucleotide
auccacucgcuggauuuuc

SEQ ID NO: 2140748 - RNA, 19 nt, Artificial Sequence
  Description of Artificial Sequence: Synthetic oligonucleotide
agaguucgauggccacagg

SEQ ID NO: 2140749 - RNA, 19 nt, Artificial Sequence
  Description of Artificial Sequence: Synthetic oligonucleotide
gcggacugaaccaagcaug

SEQ ID NO: 2140750 - RNA, 19 nt, Artificial Sequence
  Description of Artificial Sequence: Synthetic oligonucleotide
gaaacacuuuucuccugcu

SEQ ID NO: 2140751 - RNA, 19 nt, Artificial Sequence
  Description of Artificial Sequence: Synthetic oligonucleotide
caggcaauaauggucggaa

SEQ ID NO: 2140752 - RNA, 19 nt, Artificial Sequence
  Description of Artificial Sequence: Synthetic oligonucleotide
ugauagggugucgcucuca

SEQ ID NO: 2140753 - RNA, 19 nt, Artificial Sequence
  Description of Artificial Sequence: Synthetic oligonucleotide
aaaggccaaccaaacccaa

SEQ ID NO: 2140754 - RNA, 19 nt, Artificial Sequence
  Description of Artificial Sequence: Synthetic oligonucleotide
gcuaccaugauaggguguc

SEQ ID NO: 2140755 - RNA, 19 nt, Artificial Sequence
  Description of Artificial Sequence: Synthetic oligonucleotide
cuaccaugauagggugucg

SEQ ID NO: 2140756 - RNA, 19 nt, Artificial Sequence
  Description of Artificial Sequence: Synthetic oligonucleotide
cuucacacccagaacuucu

SEQ ID NO: 2140757 - RNA, 19 nt, Artificial Sequence
  Description of Artificial Sequence: Synthetic oligonucleotide
ucucgaggcggccggcgac

SEQ ID NO: 2140758 - RNA, 19 nt, Artificial Sequence
  Description of Artificial Sequence: Synthetic oligonucleotide
cuggauacugugauaugcu

SEQ ID NO: 2140759 - RNA, 19 nt, Artificial Sequence
  Description of Artificial Sequence: Synthetic oligonucleotide
acggguggaauaugucaaa

SEQ ID NO: 2140760 - RNA, 19 nt, Artificial Sequence
  Description of Artificial Sequence: Synthetic oligonucleotide
cauggaggucgccaugaca

SEQ ID NO: 2140761 - RNA, 19 nt, Artificial Sequence
  Description of Artificial Sequence: Synthetic oligonucleotide
cugaguccuuaaccugagc

SEQ ID NO: 2140762 - RNA, 19 nt, Artificial Sequence
  Description of Artificial Sequence: Synthetic oligonucleotide
aauccacucgcuggauuuu

SEQ ID NO: 2140763 - RNA, 19 nt, Artificial Sequence
  Description of Artificial Sequence: Synthetic oligonucleotide
ggugucgcucucaagcaug

SEQ ID NO: 2140764 - RNA, 19 nt, Artificial Sequence
  Description of Artificial Sequence: Synthetic oligonucleotide
acugccgagggucccggaa

SEQ ID NO: 2140765 - RNA, 19 nt, Artificial Sequence
  Description of Artificial Sequence: Synthetic oligonucleotide
aaggccaaccaaacccaaa

SEQ ID NO: 2140766 - RNA, 19 nt, Artificial Sequence
  Description of Artificial Sequence: Synthetic oligonucleotide
cguagaaaguccucuugug

SEQ ID NO: 2140767 - RNA, 19 nt, Artificial Sequence
  Description of Artificial Sequence: Synthetic oligonucleotide
acaucucgaggcggccggc

SEQ ID NO: 2140768 - RNA, 19 nt, Artificial Sequence
  Description of Artificial Sequence: Synthetic oligonucleotide
cuccugcuaccaugauagg

SEQ ID NO: 2140769 - RNA, 19 nt, Artificial Sequence
  Description of Artificial Sequence: Synthetic oligonucleotide
gugugccuggcuggcaagg

SEQ ID NO: 2140770 - RNA, 19 nt, Artificial Sequence
  Description of Artificial Sequence: Synthetic oligonucleotide
cugaguguucucagcguaa

SEQ ID NO: 2140771 - RNA, 19 nt, Artificial Sequence
  Description of Artificial Sequence: Synthetic oligonucleotide
accaagcauggaggucgcc

SEQ ID NO: 2140772 - RNA, 19 nt, Artificial Sequence
  Description of Artificial Sequence: Synthetic oligonucleotide
aucucgaggcggccggcga

SEQ ID NO: 2140773 - RNA, 19 nt, Artificial Sequence
  Description of Artificial Sequence: Synthetic oligonucleotide
uaguuagauugugucucuu

SEQ ID NO: 2140774 - RNA, 19 nt, Artificial Sequence
  Description of Artificial Sequence: Synthetic oligonucleotide
cuuucgcaggaacacuucu

SEQ ID NO: 2140775 - RNA, 19 nt, Artificial Sequence
  Description of Artificial Sequence: Synthetic oligonucleotide
uggucgccgccacgcugcg

SEQ ID NO: 2140776 - RNA, 19 nt, Artificial Sequence
  Description of Artificial Sequence: Synthetic oligonucleotide
cacacaucucgaggcggcc

SEQ ID NO: 2140777 - RNA, 19 nt, Artificial Sequence
  Description of Artificial Sequence: Synthetic oligonucleotide
agcaaccgucugaagaaau

SEQ ID NO: 2140778 - RNA, 19 nt, Artificial Sequence
  Description of Artificial Sequence: Synthetic oligonucleotide
gugguggguugucacagua

SEQ ID NO: 2140779 - RNA, 19 nt, Artificial Sequence
  Description of Artificial Sequence: Synthetic oligonucleotide
cucgaggcggccggcgacg

SEQ ID NO: 2140780 - RNA, 19 nt, Artificial Sequence
  Description of Artificial Sequence: Synthetic oligonucleotide
acagaguuuucggcauccu

SEQ ID NO: 2140781 - RNA, 19 nt, Artificial Sequence
  Description of Artificial Sequence: Synthetic oligonucleotide
gcuuuaggugcaagugugc

SEQ ID NO: 2140782 - RNA, 19 nt, Artificial Sequence
  Description of Artificial Sequence: Synthetic oligonucleotide
ccggcgacggaaaaggcca

SEQ ID NO: 2140783 - RNA, 19 nt, Artificial Sequence
  Description of Artificial Sequence: Synthetic oligonucleotide
aaacauccaugggcagaaa

SEQ ID NO: 2140784 - RNA, 19 nt, Artificial Sequence
  Description of Artificial Sequence: Synthetic oligonucleotide
ugucgcucucaagcaugug

SEQ ID NO: 2140785 - RNA, 19 nt, Artificial Sequence
  Description of Artificial Sequence: Synthetic oligonucleotide
gcgacggaaaaggccaacc

SEQ ID NO: 2140786 - RNA, 19 nt, Artificial Sequence
  Description of Artificial Sequence: Synthetic oligonucleotide
gggaugccgggcccgcugg

SEQ ID NO: 2140787 - RNA, 19 nt, Artificial Sequence
  Description of Artificial Sequence: Synthetic oligonucleotide
cacuucuguggaaggaccu

SEQ ID NO: 2140788 - RNA, 19 nt, Artificial Sequence
  Description of Artificial Sequence: Synthetic oligonucleotide
gagcaaccgucugaagaaa

SEQ ID NO: 2140789 - RNA, 19 nt, Artificial Sequence
  Description of Artificial Sequence: Synthetic oligonucleotide
cuuuggccgcggacugaac

SEQ ID NO: 2140790 - RNA, 19 nt, Artificial Sequence
  Description of Artificial Sequence: Synthetic oligonucleotide
cacaaguaacuuucauaau

SEQ ID NO: 2140791 - RNA, 19 nt, Artificial Sequence
  Description of Artificial Sequence: Synthetic oligonucleotide
gaggcggccggcgacggaa

SEQ ID NO: 2140792 - RNA, 19 nt, Artificial Sequence
  Description of Artificial Sequence: Synthetic oligonucleotide
ccaugauagggugucgcuc

SEQ ID NO: 2140793 - RNA, 19 nt, Artificial Sequence
  Description of Artificial Sequence: Synthetic oligonucleotide
gccggcgacggaaaaggcc

SEQ ID NO: 2140794 - RNA, 19 nt, Artificial Sequence
  Description of Artificial Sequence: Synthetic oligonucleotide
cucucaagcaugugacaau

SEQ ID NO: 2140795 - RNA, 19 nt, Artificial Sequence
  Description of Artificial Sequence: Synthetic oligonucleotide
gcaaggucauauauuacau

SEQ ID NO: 2140796 - RNA, 19 nt, Artificial Sequence
  Description of Artificial Sequence: Synthetic oligonucleotide
cccagaacuucuaguguca

SEQ ID NO: 2140797 - RNA, 19 nt, Artificial Sequence
  Description of Artificial Sequence: Synthetic oligonucleotide
uuucggcauccugcaggga

SEQ ID NO: 2140798 - RNA, 19 nt, Artificial Sequence
  Description of Artificial Sequence: Synthetic oligonucleotide
gugucucuugacagccuuc

SEQ ID NO: 2140799 - RNA, 19 nt, Artificial Sequence
  Description of Artificial Sequence: Synthetic oligonucleotide
ucgccgccacgcugcgccg

SEQ ID NO: 2140800 - RNA, 19 nt, Artificial Sequence
  Description of Artificial Sequence: Synthetic oligonucleotide
agggucccggaagccgccg

SEQ ID NO: 2140801 - RNA, 19 nt, Artificial Sequence
  Description of Artificial Sequence: Synthetic oligonucleotide
uggccgcggacugaaccaa

SEQ ID NO: 2140802 - RNA, 19 nt, Artificial Sequence
  Description of Artificial Sequence: Synthetic oligonucleotide
gcuggucgccgccacgcug

SEQ ID NO: 2140803 - RNA, 19 nt, Artificial Sequence
  Description of Artificial Sequence: Synthetic oligonucleotide
cucagagacugaguccuua

SEQ ID NO: 2140804 - RNA, 19 nt, Artificial Sequence
  Description of Artificial Sequence: Synthetic oligonucleotide
ccaaaggccuuuggccgcg

SEQ ID NO: 2140805 - RNA, 19 nt, Artificial Sequence
  Description of Artificial Sequence: Synthetic oligonucleotide
cgagggucccggaagccgc

SEQ ID NO: 2140806 - RNA, 19 nt, Artificial Sequence
  Description of Artificial Sequence: Synthetic oligonucleotide
gccgcacacgcucccacac

SEQ ID NO: 2140807 - RNA, 19 nt, Artificial Sequence
  Description of Artificial Sequence: Synthetic oligonucleotide
ccucuagagcaaccgucug

SEQ ID NO: 2140808 - RNA, 19 nt, Artificial Sequence
  Description of Artificial Sequence: Synthetic oligonucleotide
ggaaggaccuugcaugcuu

SEQ ID NO: 2140809 - RNA, 19 nt, Artificial Sequence
  Description of Artificial Sequence: Synthetic oligonucleotide
ggauacugugauaugcuuu

SEQ ID NO: 2140810 - RNA, 19 nt, Artificial Sequence
  Description of Artificial Sequence: Synthetic oligonucleotide
gaguguucucagcguaauu

SEQ ID NO: 2140811 - RNA, 19 nt, Artificial Sequence
  Description of Artificial Sequence: Synthetic oligonucleotide
gaaggaccuugcaugcuuu

SEQ ID NO: 2140812 - RNA, 19 nt, Artificial Sequence
  Description of Artificial Sequence: Synthetic oligonucleotide
ccgagggucccggaagccg

SEQ ID NO: 2140813 - RNA, 19 nt, Artificial Sequence
  Description of Artificial Sequence: Synthetic oligonucleotide
ggcuggcaaggucauauau

SEQ ID NO: 2140814 - RNA, 19 nt, Artificial Sequence
  Description of Artificial Sequence: Synthetic oligonucleotide
cugcgccggacugccgagg

SEQ ID NO: 2140815 - RNA, 19 nt, Artificial Sequence
  Description of Artificial Sequence: Synthetic oligonucleotide
gcugcgccggacugccgag

SEQ ID NO: 2140816 - RNA, 19 nt, Artificial Sequence
  Description of Artificial Sequence: Synthetic oligonucleotide
ggacugccgagggucccgg

SEQ ID NO: 2140817 - RNA, 19 nt, Artificial Sequence
  Description of Artificial Sequence: Synthetic oligonucleotide
uuccacguugaaggcccuu

SEQ ID NO: 2140818 - RNA, 19 nt, Artificial Sequence
  Description of Artificial Sequence: Synthetic oligonucleotide
cggccggcgacggaaaagg

SEQ ID NO: 2140819 - RNA, 19 nt, Artificial Sequence
  Description of Artificial Sequence: Synthetic oligonucleotide
ccuuaaccugagccaguuc

SEQ ID NO: 2140820 - RNA, 19 nt, Artificial Sequence
  Description of Artificial Sequence: Synthetic oligonucleotide
ccguagaaaguccucuugu

SEQ ID NO: 2140821 - RNA, 19 nt, Artificial Sequence
  Description of Artificial Sequence: Synthetic oligonucleotide
caagugugccuggcuggca

SEQ ID NO: 2140822 - RNA, 19 nt, Artificial Sequence
  Description of Artificial Sequence: Synthetic oligonucleotide
ccggaagccgccgcacacg

SEQ ID NO: 2140823 - RNA, 19 nt, Artificial Sequence
  Description of Artificial Sequence: Synthetic oligonucleotide
gacugccgagggucccgga

SEQ ID NO: 2140824 - RNA, 19 nt, Artificial Sequence
  Description of Artificial Sequence: Synthetic oligonucleotide
ggacugaaccaagcaugga

SEQ ID NO: 2140825 - RNA, 19 nt, Artificial Sequence
  Description of Artificial Sequence: Synthetic oligonucleotide
gugucgcucucaagcaugu

SEQ ID NO: 2140826 - RNA, 19 nt, Artificial Sequence
  Description of Artificial Sequence: Synthetic oligonucleotide
gugcuuucgcaggaacacu

SEQ ID NO: 2140827 - RNA, 19 nt, Artificial Sequence
  Description of Artificial Sequence: Synthetic oligonucleotide
cggaagccgccgcacacgc

SEQ ID NO: 2140828 - RNA, 19 nt, Artificial Sequence
  Description of Artificial Sequence: Synthetic oligonucleotide
ggcgacggaaaaggccaac

SEQ ID NO: 2140829 - RNA, 19 nt, Artificial Sequence
  Description of Artificial Sequence: Synthetic oligonucleotide
ccacguugaaggcccuuca

SEQ ID NO: 2140830 - RNA, 19 nt, Artificial Sequence
  Description of Artificial Sequence: Synthetic oligonucleotide
ggucggaacccgggaugcc

SEQ ID NO: 2140831 - RNA, 19 nt, Artificial Sequence
  Description of Artificial Sequence: Synthetic oligonucleotide
gcggccggcgacggaaaag

SEQ ID NO: 2140832 - RNA, 19 nt, Artificial Sequence
  Description of Artificial Sequence: Synthetic oligonucleotide
ccagaguucgauggccaca

SEQ ID NO: 2140833 - RNA, 19 nt, Artificial Sequence
  Description of Artificial Sequence: Synthetic oligonucleotide
gcuggcaaggucauauauu

SEQ ID NO: 2140834 - RNA, 19 nt, Artificial Sequence
  Description of Artificial Sequence: Synthetic oligonucleotide
ccaggcaauaauggucgga

SEQ ID NO: 2140835 - RNA, 19 nt, Artificial Sequence
  Description of Artificial Sequence: Synthetic oligonucleotide
guggguugucacaguacau

SEQ ID NO: 2140836 - RNA, 19 nt, Artificial Sequence
  Description of Artificial Sequence: Synthetic oligonucleotide
ccgcuggucgccgccacgc

SEQ ID NO: 2140837 - RNA, 19 nt, Artificial Sequence
  Description of Artificial Sequence: Synthetic oligonucleotide
acgcucccacacaucucga

SEQ ID NO: 2140838 - RNA, 19 nt, Artificial Sequence
  Description of Artificial Sequence: Synthetic oligonucleotide
ggccgcggacugaaccaag

SEQ ID NO: 2140839 - RNA, 19 nt, Artificial Sequence
  Description of Artificial Sequence: Synthetic oligonucleotide
cauucgcaucaguccaauu

SEQ ID NO: 2140840 - RNA, 19 nt, Artificial Sequence
  Description of Artificial Sequence: Synthetic oligonucleotide
gccggacugccgagggucc

SEQ ID NO: 2140841 - RNA, 19 nt, Artificial Sequence
  Description of Artificial Sequence: Synthetic oligonucleotide
ggccggcgacggaaaaggc

SEQ ID NO: 2140842 - RNA, 19 nt, Artificial Sequence
  Description of Artificial Sequence: Synthetic oligonucleotide
gccgagggucccggaagcc

SEQ ID NO: 2140843 - RNA, 19 nt, Artificial Sequence
  Description of Artificial Sequence: Synthetic oligonucleotide
ccgcggacugaaccaagca

SEQ ID NO: 2140844 - RNA, 19 nt, Artificial Sequence
  Description of Artificial Sequence: Synthetic oligonucleotide
ccagaacuucuagugucaa

SEQ ID NO: 2140845 - RNA, 19 nt, Artificial Sequence
  Description of Artificial Sequence: Synthetic oligonucleotide
cccgcuggucgccgccacg

SEQ ID NO: 2140846 - RNA, 19 nt, Artificial Sequence
  Description of Artificial Sequence: Synthetic oligonucleotide
ccuuuggccgcggacugaa

SEQ ID NO: 2140847 - RNA, 19 nt, Artificial Sequence
  Description of Artificial Sequence: Synthetic oligonucleotide
gggcccgcuggucgccgcc

SEQ ID NO: 2140848 - RNA, 19 nt, Artificial Sequence
  Description of Artificial Sequence: Synthetic oligonucleotide
cgccggacugccgaggguc

SEQ ID NO: 2140849 - RNA, 19 nt, Artificial Sequence
  Description of Artificial Sequence: Synthetic oligonucleotide
ggcugaugugguggguugu

SEQ ID NO: 2140850 - RNA, 19 nt, Artificial Sequence
  Description of Artificial Sequence: Synthetic oligonucleotide
ccgccgcacacgcucccac

SEQ ID NO: 2140851 - RNA, 19 nt, Artificial Sequence
  Description of Artificial Sequence: Synthetic oligonucleotide
ccggacugccgaggguccc

SEQ ID NO: 2140852 - RNA, 19 nt, Artificial Sequence
  Description of Artificial Sequence: Synthetic oligonucleotide
guuccacguugaaggcccu

SEQ ID NO: 2140853 - RNA, 19 nt, Artificial Sequence
  Description of Artificial Sequence: Synthetic oligonucleotide
aggcggccggcgacggaaa

SEQ ID NO: 2140854 - RNA, 19 nt, Artificial Sequence
  Description of Artificial Sequence: Synthetic oligonucleotide
cgcugcgccggacugccga

SEQ ID NO: 2140855 - RNA, 19 nt, Artificial Sequence
  Description of Artificial Sequence: Synthetic oligonucleotide
ggcggccggcgacggaaaa

SEQ ID NO: 2140856 - RNA, 19 nt, Artificial Sequence
  Description of Artificial Sequence: Synthetic oligonucleotide
cgcggacugaaccaagcau

SEQ ID NO: 2140857 - RNA, 19 nt, Artificial Sequence
  Description of Artificial Sequence: Synthetic oligonucleotide
gcccgcuggucgccgccac

SEQ ID NO: 2140858 - RNA, 19 nt, Artificial Sequence
  Description of Artificial Sequence: Synthetic oligonucleotide
ggucgccgccacgcugcgc

SEQ ID NO: 2140859 - RNA, 19 nt, Artificial Sequence
  Description of Artificial Sequence: Synthetic oligonucleotide
ccaugggcagaaacacuuu

SEQ ID NO: 2140860 - RNA, 19 nt, Artificial Sequence
  Description of Artificial Sequence: Synthetic oligonucleotide
cccgggaugccgggcccgc

SEQ ID NO: 2140861 - RNA, 19 nt, Artificial Sequence
  Description of Artificial Sequence: Synthetic oligonucleotide
ccacucgcuggauuuucuu

SEQ ID NO: 2140862 - RNA, 19 nt, Artificial Sequence
  Description of Artificial Sequence: Synthetic oligonucleotide
gccgccgcacacgcuccca

SEQ ID NO: 2140863 - RNA, 19 nt, Artificial Sequence
  Description of Artificial Sequence: Synthetic oligonucleotide
ggaagccgccgcacacgcu

SEQ ID NO: 2140864 - RNA, 19 nt, Artificial Sequence
  Description of Artificial Sequence: Synthetic oligonucleotide
cgccgccacgcugcgccgg

SEQ ID NO: 2140865 - RNA, 19 nt, Artificial Sequence
  Description of Artificial Sequence: Synthetic oligonucleotide
cggcgacggaaaaggccaa

SEQ ID NO: 2140866 - RNA, 19 nt, Artificial Sequence
  Description of Artificial Sequence: Synthetic oligonucleotide
gcgccggacugccgagggu

SEQ ID NO: 2140867 - RNA, 19 nt, Artificial Sequence
  Description of Artificial Sequence: Synthetic oligonucleotide
cgccacgcugcgccggacu

SEQ ID NO: 2140868 - RNA, 19 nt, Artificial Sequence
  Description of Artificial Sequence: Synthetic oligonucleotide
cgcuggucgccgccacgcu

SEQ ID NO: 2140869 - RNA, 19 nt, Artificial Sequence
  Description of Artificial Sequence: Synthetic oligonucleotide
ccgggaugccgggcccgcu

SEQ ID NO: 2140870 - RNA, 19 nt, Artificial Sequence
  Description of Artificial Sequence: Synthetic oligonucleotide
gaauagauuaacuagagca

SEQ ID NO: 2140871 - RNA, 19 nt, Artificial Sequence
  Description of Artificial Sequence: Synthetic oligonucleotide
uugagauugauguaugugg

SEQ ID NO: 2140872 - RNA, 19 nt, Artificial Sequence
  Description of Artificial Sequence: Synthetic oligonucleotide
uguuccacagaacagguag

SEQ ID NO: 2140873 - RNA, 19 nt, Artificial Sequence
  Description of Artificial Sequence: Synthetic oligonucleotide
aaggacauagagaagggac

SEQ ID NO: 2140874 - RNA, 19 nt, Artificial Sequence
  Description of Artificial Sequence: Synthetic oligonucleotide
uguucaugaaggcagcucc

SEQ ID NO: 2140875 - RNA, 19 nt, Artificial Sequence
  Description of Artificial Sequence: Synthetic oligonucleotide
agaauagauuaacuagagc

SEQ ID NO: 2140876 - RNA, 19 nt, Artificial Sequence
  Description of Artificial Sequence: Synthetic oligonucleotide
aacuagagcaaggacauag

SEQ ID NO: 2140877 - RNA, 19 nt, Artificial Sequence
  Description of Artificial Sequence: Synthetic oligonucleotide
uagauuaacuagagcaagg

SEQ ID NO: 2140878 - RNA, 19 nt, Artificial Sequence
  Description of Artificial Sequence: Synthetic oligonucleotide
aaccgcuccccuuuggugc

SEQ ID NO: 2140879 - RNA, 19 nt, Artificial Sequence
  Description of Artificial Sequence: Synthetic oligonucleotide
uuaacuagagcaaggacau

SEQ ID NO: 2140880 - RNA, 19 nt, Artificial Sequence
  Description of Artificial Sequence: Synthetic oligonucleotide
uuccguacgucuuugaacc

SEQ ID NO: 2140881 - RNA, 19 nt, Artificial Sequence
  Description of Artificial Sequence: Synthetic oligonucleotide
caaaguucucgucugaggg

SEQ ID NO: 2140882 - RNA, 19 nt, Artificial Sequence
  Description of Artificial Sequence: Synthetic oligonucleotide
uuuggugcucacuacuugg

SEQ ID NO: 2140883 - RNA, 19 nt, Artificial Sequence
  Description of Artificial Sequence: Synthetic oligonucleotide
auaagccuccaucaucucc

SEQ ID NO: 2140884 - RNA, 19 nt, Artificial Sequence
  Description of Artificial Sequence: Synthetic oligonucleotide
aaguucucgucugaggggc

SEQ ID NO: 2140885 - RNA, 19 nt, Artificial Sequence
  Description of Artificial Sequence: Synthetic oligonucleotide
auccauaucaaaguucucg

SEQ ID NO: 2140886 - RNA, 19 nt, Artificial Sequence
  Description of Artificial Sequence: Synthetic oligonucleotide
gauguaucggaucagcuuc

SEQ ID NO: 2140887 - RNA, 19 nt, Artificial Sequence
  Description of Artificial Sequence: Synthetic oligonucleotide
agggaauaccuccaagagc

SEQ ID NO: 2140888 - RNA, 19 nt, Artificial Sequence
  Description of Artificial Sequence: Synthetic oligonucleotide
uuggccaacgcccacuggg

SEQ ID NO: 2140889 - RNA, 19 nt, Artificial Sequence
  Description of Artificial Sequence: Synthetic oligonucleotide
ucaaaguucucgucugagg

SEQ ID NO: 2140890 - RNA, 19 nt, Artificial Sequence
  Description of Artificial Sequence: Synthetic oligonucleotide
uugucgauguaucggauca

SEQ ID NO: 2140891 - RNA, 19 nt, Artificial Sequence
  Description of Artificial Sequence: Synthetic oligonucleotide
ugaacugacgauccucucc

SEQ ID NO: 2140892 - RNA, 19 nt, Artificial Sequence
  Description of Artificial Sequence: Synthetic oligonucleotide
aauagauuaacuagagcaa

SEQ ID NO: 2140893 - RNA, 19 nt, Artificial Sequence
  Description of Artificial Sequence: Synthetic oligonucleotide
acugcuucuuccaaguccc

SEQ ID NO: 2140894 - RNA, 19 nt, Artificial Sequence
  Description of Artificial Sequence: Synthetic oligonucleotide
acuauccaccaucauguac

SEQ ID NO: 2140895 - RNA, 19 nt, Artificial Sequence
  Description of Artificial Sequence: Synthetic oligonucleotide
ugaaggaugaaggacuuca

SEQ ID NO: 2140896 - RNA, 19 nt, Artificial Sequence
  Description of Artificial Sequence: Synthetic oligonucleotide
caagaauagauuaacuaga

SEQ ID NO: 2140897 - RNA, 19 nt, Artificial Sequence
  Description of Artificial Sequence: Synthetic oligonucleotide
auagauuaacuagagcaag

SEQ ID NO: 2140898 - RNA, 19 nt, Artificial Sequence
  Description of Artificial Sequence: Synthetic oligonucleotide
uuuucagguugccucgggg

SEQ ID NO: 2140899 - RNA, 19 nt, Artificial Sequence
  Description of Artificial Sequence: Synthetic oligonucleotide
gaugaaggacuucaguuca

SEQ ID NO: 2140900 - RNA, 19 nt, Artificial Sequence
  Description of Artificial Sequence: Synthetic oligonucleotide
uccccuaucaugccucugg

SEQ ID NO: 2140901 - RNA, 19 nt, Artificial Sequence
  Description of Artificial Sequence: Synthetic oligonucleotide
ucaguucauccuuuugggg

SEQ ID NO: 2140902 - RNA, 19 nt, Artificial Sequence
  Description of Artificial Sequence: Synthetic oligonucleotide
cuuuacuguguucaugaag

SEQ ID NO: 2140903 - RNA, 19 nt, Artificial Sequence
  Description of Artificial Sequence: Synthetic oligonucleotide
gauuaacuagagcaaggac

SEQ ID NO: 2140904 - RNA, 19 nt, Artificial Sequence
  Description of Artificial Sequence: Synthetic oligonucleotide
ucuggacaaaggcaaggag

SEQ ID NO: 2140905 - RNA, 19 nt, Artificial Sequence
  Description of Artificial Sequence: Synthetic oligonucleotide
uugguugucgauguaucgg

SEQ ID NO: 2140906 - RNA, 19 nt, Artificial Sequence
  Description of Artificial Sequence: Synthetic oligonucleotide
agaacagguagggaauacc

SEQ ID NO: 2140907 - RNA, 19 nt, Artificial Sequence
  Description of Artificial Sequence: Synthetic oligonucleotide
gaugaccucauccaagcca

SEQ ID NO: 2140908 - RNA, 19 nt, Artificial Sequence
  Description of Artificial Sequence: Synthetic oligonucleotide
aggcacauaagccuccauc

SEQ ID NO: 2140909 - RNA, 19 nt, Artificial Sequence
  Description of Artificial Sequence: Synthetic oligonucleotide
cuugguugucgauguaucg

SEQ ID NO: 2140910 - RNA, 19 nt, Artificial Sequence
  Description of Artificial Sequence: Synthetic oligonucleotide
ucggugaaccuucuggucu

SEQ ID NO: 2140911 - RNA, 19 nt, Artificial Sequence
  Description of Artificial Sequence: Synthetic oligonucleotide
agcuuuucagguugccucg

SEQ ID NO: 2140912 - RNA, 19 nt, Artificial Sequence
  Description of Artificial Sequence: Synthetic oligonucleotide
cuagagcaaggacauagag

SEQ ID NO: 2140913 - RNA, 19 nt, Artificial Sequence
  Description of Artificial Sequence: Synthetic oligonucleotide
uacgucuuugaaccgcucc

SEQ ID NO: 2140914 - RNA, 19 nt, Artificial Sequence
  Description of Artificial Sequence: Synthetic oligonucleotide
gaagaugaccucauccaag

SEQ ID NO: 2140915 - RNA, 19 nt, Artificial Sequence
  Description of Artificial Sequence: Synthetic oligonucleotide
gacaguaggguggacgggg

SEQ ID NO: 2140916 - RNA, 19 nt, Artificial Sequence
  Description of Artificial Sequence: Synthetic oligonucleotide
agaagggacaguagggugg

SEQ ID NO: 2140917 - RNA, 19 nt, Artificial Sequence
  Description of Artificial Sequence: Synthetic oligonucleotide
agaugaccucauccaagcc

SEQ ID NO: 2140918 - RNA, 19 nt, Artificial Sequence
  Description of Artificial Sequence: Synthetic oligonucleotide
aucuacuccuggcagaagu

SEQ ID NO: 2140919 - RNA, 19 nt, Artificial Sequence
  Description of Artificial Sequence: Synthetic oligonucleotide
guagggaauaccuccaaga

SEQ ID NO: 2140920 - RNA, 19 nt, Artificial Sequence
  Description of Artificial Sequence: Synthetic oligonucleotide
augaccucauccaagccac

SEQ ID NO: 2140921 - RNA, 19 nt, Artificial Sequence
  Description of Artificial Sequence: Synthetic oligonucleotide
aagcgguacuuucuggcug

SEQ ID NO: 2140922 - RNA, 19 nt, Artificial Sequence
  Description of Artificial Sequence: Synthetic oligonucleotide
aacagguagggaauaccuc

SEQ ID NO: 2140923 - RNA, 19 nt, Artificial Sequence
  Description of Artificial Sequence: Synthetic oligonucleotide
ugagguccgccucugggag

SEQ ID NO: 2140924 - RNA, 19 nt, Artificial Sequence
  Description of Artificial Sequence: Synthetic oligonucleotide
guauguggccuucaucucc

SEQ ID NO: 2140925 - RNA, 19 nt, Artificial Sequence
  Description of Artificial Sequence: Synthetic oligonucleotide
acugagguccgccucuggg

SEQ ID NO: 2140926 - RNA, 19 nt, Artificial Sequence
  Description of Artificial Sequence: Synthetic oligonucleotide
gaacugacgauccucucca

SEQ ID NO: 2140927 - RNA, 19 nt, Artificial Sequence
  Description of Artificial Sequence: Synthetic oligonucleotide
agauugauguauguggccu

SEQ ID NO: 2140928 - RNA, 19 nt, Artificial Sequence
  Description of Artificial Sequence: Synthetic oligonucleotide
gagaagggacaguagggug

SEQ ID NO: 2140929 - RNA, 19 nt, Artificial Sequence
  Description of Artificial Sequence: Synthetic oligonucleotide
gaaccuucuggucuuccgc

SEQ ID NO: 2140930 - RNA, 19 nt, Artificial Sequence
  Description of Artificial Sequence: Synthetic oligonucleotide
cuugagauugauguaugug

SEQ ID NO: 2140931 - RNA, 19 nt, Artificial Sequence
  Description of Artificial Sequence: Synthetic oligonucleotide
caucuguacugcuucuucc

SEQ ID NO: 2140932 - RNA, 19 nt, Artificial Sequence
  Description of Artificial Sequence: Synthetic oligonucleotide
aaccuucuggucuuccgca

SEQ ID NO: 2140933 - RNA, 19 nt, Artificial Sequence
  Description of Artificial Sequence: Synthetic oligonucleotide
agcgguacuuucuggcugg

SEQ ID NO: 2140934 - RNA, 19 nt, Artificial Sequence
  Description of Artificial Sequence: Synthetic oligonucleotide
cauagagaagggacaguag

SEQ ID NO: 2140935 - RNA, 19 nt, Artificial Sequence
  Description of Artificial Sequence: Synthetic oligonucleotide
acauaagccuccaucaucu

SEQ ID NO: 2140936 - RNA, 19 nt, Artificial Sequence
  Description of Artificial Sequence: Synthetic oligonucleotide
aaggcaaggagggcugaac

SEQ ID NO: 2140937 - RNA, 19 nt, Artificial Sequence
  Description of Artificial Sequence: Synthetic oligonucleotide
uccgugaaggcauccauau

SEQ ID NO: 2140938 - RNA, 19 nt, Artificial Sequence
  Description of Artificial Sequence: Synthetic oligonucleotide
ucuaggaccccaagcacau

SEQ ID NO: 2140939 - RNA, 19 nt, Artificial Sequence
  Description of Artificial Sequence: Synthetic oligonucleotide
agggcugaacugacgaucc

SEQ ID NO: 2140940 - RNA, 19 nt, Artificial Sequence
  Description of Artificial Sequence: Synthetic oligonucleotide
accaucauguacuucugaa

SEQ ID NO: 2140941 - RNA, 19 nt, Artificial Sequence
  Description of Artificial Sequence: Synthetic oligonucleotide
caugaaggcagcuccaaga

SEQ ID NO: 2140942 - RNA, 19 nt, Artificial Sequence
  Description of Artificial Sequence: Synthetic oligonucleotide
ucgauguaucggaucagcu

SEQ ID NO: 2140943 - RNA, 19 nt, Artificial Sequence
  Description of Artificial Sequence: Synthetic oligonucleotide
cuauccaccaucauguacu

SEQ ID NO: 2140944 - RNA, 19 nt, Artificial Sequence
  Description of Artificial Sequence: Synthetic oligonucleotide
guuccguacgucuuugaac

SEQ ID NO: 2140945 - RNA, 19 nt, Artificial Sequence
  Description of Artificial Sequence: Synthetic oligonucleotide
gauguauguggccuucauc

SEQ ID NO: 2140946 - RNA, 19 nt, Artificial Sequence
  Description of Artificial Sequence: Synthetic oligonucleotide
uggaagcgguacuuucugg

SEQ ID NO: 2140947 - RNA, 19 nt, Artificial Sequence
  Description of Artificial Sequence: Synthetic oligonucleotide
cacauaggagaagaugacc

SEQ ID NO: 2140948 - RNA, 19 nt, Artificial Sequence
  Description of Artificial Sequence: Synthetic oligonucleotide
agccaugggucggugaacc

SEQ ID NO: 2140949 - RNA, 19 nt, Artificial Sequence
  Description of Artificial Sequence: Synthetic oligonucleotide
aggagggcugaacugacga

SEQ ID NO: 2140950 - RNA, 19 nt, Artificial Sequence
  Description of Artificial Sequence: Synthetic oligonucleotide
uggcagaaguucuuccuca

SEQ ID NO: 2140951 - RNA, 19 nt, Artificial Sequence
  Description of Artificial Sequence: Synthetic oligonucleotide
uuccgcacuauccaccauc

SEQ ID NO: 2140952 - RNA, 19 nt, Artificial Sequence
  Description of Artificial Sequence: Synthetic oligonucleotide
uuugggccgucccagccug

SEQ ID NO: 2140953 - RNA, 19 nt, Artificial Sequence
  Description of Artificial Sequence: Synthetic oligonucleotide
cauaggagaagaugaccuc

SEQ ID NO: 2140954 - RNA, 19 nt, Artificial Sequence
  Description of Artificial Sequence: Synthetic oligonucleotide
augaaggcagcuccaagaa

SEQ ID NO: 2140955 - RNA, 19 nt, Artificial Sequence
  Description of Artificial Sequence: Synthetic oligonucleotide
cacauaagccuccaucauc

SEQ ID NO: 2140956 - RNA, 19 nt, Artificial Sequence
  Description of Artificial Sequence: Synthetic oligonucleotide
gagcacaucuacuccuggc

SEQ ID NO: 2140957 - RNA, 19 nt, Artificial Sequence
  Description of Artificial Sequence: Synthetic oligonucleotide
acuugguugucgauguauc

SEQ ID NO: 2140958 - RNA, 19 nt, Artificial Sequence
  Description of Artificial Sequence: Synthetic oligonucleotide
gggacaguaggguggacgg

SEQ ID NO: 2140959 - RNA, 19 nt, Artificial Sequence
  Description of Artificial Sequence: Synthetic oligonucleotide
gacgauccucuccaacucc

SEQ ID NO: 2140960 - RNA, 19 nt, Artificial Sequence
  Description of Artificial Sequence: Synthetic oligonucleotide
agggacaguaggguggacg

SEQ ID NO: 2140961 - RNA, 19 nt, Artificial Sequence
  Description of Artificial Sequence: Synthetic oligonucleotide
guacuuucuggcuggcuug

SEQ ID NO: 2140962 - RNA, 19 nt, Artificial Sequence
  Description of Artificial Sequence: Synthetic oligonucleotide
ugacgauccucuccaacuc

SEQ ID NO: 2140963 - RNA, 19 nt, Artificial Sequence
  Description of Artificial Sequence: Synthetic oligonucleotide
ugaaccgcuccccuuuggu

SEQ ID NO: 2140964 - RNA, 19 nt, Artificial Sequence
  Description of Artificial Sequence: Synthetic oligonucleotide
uaccuccaagagcacaucu

SEQ ID NO: 2140965 - RNA, 19 nt, Artificial Sequence
  Description of Artificial Sequence: Synthetic oligonucleotide
uuugaaccgcuccccuuug

SEQ ID NO: 2140966 - RNA, 19 nt, Artificial Sequence
  Description of Artificial Sequence: Synthetic oligonucleotide
aaggcagcuccaagaauag

SEQ ID NO: 2140967 - RNA, 19 nt, Artificial Sequence
  Description of Artificial Sequence: Synthetic oligonucleotide
uucagguugccucgggguc

SEQ ID NO: 2140968 - RNA, 19 nt, Artificial Sequence
  Description of Artificial Sequence: Synthetic oligonucleotide
acauagagaagggacagua

SEQ ID NO: 2140969 - RNA, 19 nt, Artificial Sequence
  Description of Artificial Sequence: Synthetic oligonucleotide
ggaagcgguacuuucuggc

SEQ ID NO: 2140970 - RNA, 19 nt, Artificial Sequence
  Description of Artificial Sequence: Synthetic oligonucleotide
uugaaccgcuccccuuugg

SEQ ID NO: 2140971 - RNA, 19 nt, Artificial Sequence
  Description of Artificial Sequence: Synthetic oligonucleotide
ucgucugaggggccugagg

SEQ ID NO: 2140972 - RNA, 19 nt, Artificial Sequence
  Description of Artificial Sequence: Synthetic oligonucleotide
uggcuugagauugauguau

SEQ ID NO: 2140973 - RNA, 19 nt, Artificial Sequence
  Description of Artificial Sequence: Synthetic oligonucleotide
gaaggcucagcagagucca

SEQ ID NO: 2140974 - RNA, 19 nt, Artificial Sequence
  Description of Artificial Sequence: Synthetic oligonucleotide
ggcacauaagccuccauca

SEQ ID NO: 2140975 - RNA, 19 nt, Artificial Sequence
  Description of Artificial Sequence: Synthetic oligonucleotide
guugccucggggucucugg

SEQ ID NO: 2140976 - RNA, 19 nt, Artificial Sequence
  Description of Artificial Sequence: Synthetic oligonucleotide
aggagaagaugaccucauc

SEQ ID NO: 2140977 - RNA, 19 nt, Artificial Sequence
  Description of Artificial Sequence: Synthetic oligonucleotide
cuuuggugcucacuacuug

SEQ ID NO: 2140978 - RNA, 19 nt, Artificial Sequence
  Description of Artificial Sequence: Synthetic oligonucleotide
uaucaugccucuggggaug

SEQ ID NO: 2140979 - RNA, 19 nt, Artificial Sequence
  Description of Artificial Sequence: Synthetic oligonucleotide
uuuggccaacgcccacugg

SEQ ID NO: 2140980 - RNA, 19 nt, Artificial Sequence
  Description of Artificial Sequence: Synthetic oligonucleotide
caugggucggugaaccuuc

SEQ ID NO: 2140981 - RNA, 19 nt, Artificial Sequence
  Description of Artificial Sequence: Synthetic oligonucleotide
gaaccgcuccccuuuggug

SEQ ID NO: 2140982 - RNA, 19 nt, Artificial Sequence
  Description of Artificial Sequence: Synthetic oligonucleotide
cucacuacuugguugucga

SEQ ID NO: 2140983 - RNA, 19 nt, Artificial Sequence
  Description of Artificial Sequence: Synthetic oligonucleotide
ugagcuuuucagguugccu

SEQ ID NO: 2140984 - RNA, 19 nt, Artificial Sequence
  Description of Artificial Sequence: Synthetic oligonucleotide
uccguacgucuuugaaccg

SEQ ID NO: 2140985 - RNA, 19 nt, Artificial Sequence
  Description of Artificial Sequence: Synthetic oligonucleotide
uuucugcaucccucugggg

SEQ ID NO: 2140986 - RNA, 19 nt, Artificial Sequence
  Description of Artificial Sequence: Synthetic oligonucleotide
cuguguucaugaaggcagc

SEQ ID NO: 2140987 - RNA, 19 nt, Artificial Sequence
  Description of Artificial Sequence: Synthetic oligonucleotide
ucuuugagcuuuucagguu

SEQ ID NO: 2140988 - RNA, 19 nt, Artificial Sequence
  Description of Artificial Sequence: Synthetic oligonucleotide
guugucgauguaucggauc

SEQ ID NO: 2140989 - RNA, 19 nt, Artificial Sequence
  Description of Artificial Sequence: Synthetic oligonucleotide
cuuuucagguugccucggg

SEQ ID NO: 2140990 - RNA, 19 nt, Artificial Sequence
  Description of Artificial Sequence: Synthetic oligonucleotide
aggacauagagaagggaca

SEQ ID NO: 2140991 - RNA, 19 nt, Artificial Sequence
  Description of Artificial Sequence: Synthetic oligonucleotide
guuccacagaacagguagg

SEQ ID NO: 2140992 - RNA, 19 nt, Artificial Sequence
  Description of Artificial Sequence: Synthetic oligonucleotide
ucuaaggcgccugggcaag

SEQ ID NO: 2140993 - RNA, 19 nt, Artificial Sequence
  Description of Artificial Sequence: Synthetic oligonucleotide
cacuacuugguugucgaug

SEQ ID NO: 2140994 - RNA, 19 nt, Artificial Sequence
  Description of Artificial Sequence: Synthetic oligonucleotide
ucacucagcuguguggaga

SEQ ID NO: 2140995 - RNA, 19 nt, Artificial Sequence
  Description of Artificial Sequence: Synthetic oligonucleotide
uacuugguugucgauguau

SEQ ID NO: 2140996 - RNA, 19 nt, Artificial Sequence
  Description of Artificial Sequence: Synthetic oligonucleotide
ucuacuccuggcagaaguu

SEQ ID NO: 2140997 - RNA, 19 nt, Artificial Sequence
  Description of Artificial Sequence: Synthetic oligonucleotide
ugggugcagguucucuuug

SEQ ID NO: 2140998 - RNA, 19 nt, Artificial Sequence
  Description of Artificial Sequence: Synthetic oligonucleotide
ucuccgugaaggcauccau

SEQ ID NO: 2140999 - RNA, 19 nt, Artificial Sequence
  Description of Artificial Sequence: Synthetic oligonucleotide
uuguuccuggcaucacuca

SEQ ID NO: 2141000 - RNA, 19 nt, Artificial Sequence
  Description of Artificial Sequence: Synthetic oligonucleotide
ggacauagagaagggacag

SEQ ID NO: 2141001 - RNA, 19 nt, Artificial Sequence
  Description of Artificial Sequence: Synthetic oligonucleotide
cucuaggaccccaagcaca

SEQ ID NO: 2141002 - RNA, 19 nt, Artificial Sequence
  Description of Artificial Sequence: Synthetic oligonucleotide
gccuuuacuguguucauga

SEQ ID NO: 2141003 - RNA, 19 nt, Artificial Sequence
  Description of Artificial Sequence: Synthetic oligonucleotide
gucgauguaucggaucagc

SEQ ID NO: 2141004 - RNA, 19 nt, Artificial Sequence
  Description of Artificial Sequence: Synthetic oligonucleotide
gguagggaauaccuccaag

SEQ ID NO: 2141005 - RNA, 19 nt, Artificial Sequence
  Description of Artificial Sequence: Synthetic oligonucleotide
uggccaacgcccacugggc

SEQ ID NO: 2141006 - RNA, 19 nt, Artificial Sequence
  Description of Artificial Sequence: Synthetic oligonucleotide
aaggagggcugaacugacg

SEQ ID NO: 2141007 - RNA, 19 nt, Artificial Sequence
  Description of Artificial Sequence: Synthetic oligonucleotide
cugggcaaguccugguuug

SEQ ID NO: 2141008 - RNA, 19 nt, Artificial Sequence
  Description of Artificial Sequence: Synthetic oligonucleotide
aagccacugagguccgccu

SEQ ID NO: 2141009 - RNA, 19 nt, Artificial Sequence
  Description of Artificial Sequence: Synthetic oligonucleotide
gaacagguagggaauaccu

SEQ ID NO: 2141010 - RNA, 19 nt, Artificial Sequence
  Description of Artificial Sequence: Synthetic oligonucleotide
cuggcagaaguucuuccuc

SEQ ID NO: 2141011 - RNA, 19 nt, Artificial Sequence
  Description of Artificial Sequence: Synthetic oligonucleotide
uccugguuugggccguccc

SEQ ID NO: 2141012 - RNA, 19 nt, Artificial Sequence
  Description of Artificial Sequence: Synthetic oligonucleotide
ugugggugcagguucucuu

SEQ ID NO: 2141013 - RNA, 19 nt, Artificial Sequence
  Description of Artificial Sequence: Synthetic oligonucleotide
uguguucaugaaggcagcu

SEQ ID NO: 2141014 - RNA, 19 nt, Artificial Sequence
  Description of Artificial Sequence: Synthetic oligonucleotide
guaucggaucagcuucuug

SEQ ID NO: 2141015 - RNA, 19 nt, Artificial Sequence
  Description of Artificial Sequence: Synthetic oligonucleotide
gaccucauccaagccacug

SEQ ID NO: 2141016 - RNA, 19 nt, Artificial Sequence
  Description of Artificial Sequence: Synthetic oligonucleotide
ugucgauguaucggaucag

SEQ ID NO: 2141017 - RNA, 19 nt, Artificial Sequence
  Description of Artificial Sequence: Synthetic oligonucleotide
cuuuggccaacgcccacug

SEQ ID NO: 2141018 - RNA, 19 nt, Artificial Sequence
  Description of Artificial Sequence: Synthetic oligonucleotide
ccuaucaugccucugggga

SEQ ID NO: 2141019 - RNA, 19 nt, Artificial Sequence
  Description of Artificial Sequence: Synthetic oligonucleotide
agccucgggguuccguacg

SEQ ID NO: 2141020 - RNA, 19 nt, Artificial Sequence
  Description of Artificial Sequence: Synthetic oligonucleotide
agggccucaguggaagcgg

SEQ ID NO: 2141021 - RNA, 19 nt, Artificial Sequence
  Description of Artificial Sequence: Synthetic oligonucleotide
ugggcaaguccugguuugg

SEQ ID NO: 2141022 - RNA, 19 nt, Artificial Sequence
  Description of Artificial Sequence: Synthetic oligonucleotide
caguggaagcgguacuuuc

SEQ ID NO: 2141023 - RNA, 19 nt, Artificial Sequence
  Description of Artificial Sequence: Synthetic oligonucleotide
ugggcaccugaccuuggac

SEQ ID NO: 2141024 - RNA, 19 nt, Artificial Sequence
  Description of Artificial Sequence: Synthetic oligonucleotide
ucuccaacuccaugcuguc

SEQ ID NO: 2141025 - RNA, 19 nt, Artificial Sequence
  Description of Artificial Sequence: Synthetic oligonucleotide
gaagcgguacuuucuggcu

SEQ ID NO: 2141026 - RNA, 19 nt, Artificial Sequence
  Description of Artificial Sequence: Synthetic oligonucleotide
gggccuguuccacagaaca

SEQ ID NO: 2141027 - RNA, 19 nt, Artificial Sequence
  Description of Artificial Sequence: Synthetic oligonucleotide
cugguuugggccgucccag

SEQ ID NO: 2141028 - RNA, 19 nt, Artificial Sequence
  Description of Artificial Sequence: Synthetic oligonucleotide
acuagagcaaggacauaga

SEQ ID NO: 2141029 - RNA, 19 nt, Artificial Sequence
  Description of Artificial Sequence: Synthetic oligonucleotide
ccuccaagagcacaucuac

SEQ ID NO: 2141030 - RNA, 19 nt, Artificial Sequence
  Description of Artificial Sequence: Synthetic oligonucleotide
caagagcacaucuacuccu

SEQ ID NO: 2141031 - RNA, 19 nt, Artificial Sequence
  Description of Artificial Sequence: Synthetic oligonucleotide
auaccuccaagagcacauc

SEQ ID NO: 2141032 - RNA, 19 nt, Artificial Sequence
  Description of Artificial Sequence: Synthetic oligonucleotide
gucuuccgcacuauccacc

SEQ ID NO: 2141033 - RNA, 19 nt, Artificial Sequence
  Description of Artificial Sequence: Synthetic oligonucleotide
gagguccgccucugggagg

SEQ ID NO: 2141034 - RNA, 19 nt, Artificial Sequence
  Description of Artificial Sequence: Synthetic oligonucleotide
agccuuuacuguguucaug

SEQ ID NO: 2141035 - RNA, 19 nt, Artificial Sequence
  Description of Artificial Sequence: Synthetic oligonucleotide
cuacuccuggcagaaguuc

SEQ ID NO: 2141036 - RNA, 19 nt, Artificial Sequence
  Description of Artificial Sequence: Synthetic oligonucleotide
gucggugaaccuucugguc

SEQ ID NO: 2141037 - RNA, 19 nt, Artificial Sequence
  Description of Artificial Sequence: Synthetic oligonucleotide
aaaggcaaggagggcugaa

SEQ ID NO: 2141038 - RNA, 19 nt, Artificial Sequence
  Description of Artificial Sequence: Synthetic oligonucleotide
aggccccucuuccuugcuc

SEQ ID NO: 2141039 - RNA, 19 nt, Artificial Sequence
  Description of Artificial Sequence: Synthetic oligonucleotide
uuccuuggacagccuuuac

SEQ ID NO: 2141040 - RNA, 19 nt, Artificial Sequence
  Description of Artificial Sequence: Synthetic oligonucleotide
cagguagggaauaccucca

SEQ ID NO: 2141041 - RNA, 19 nt, Artificial Sequence
  Description of Artificial Sequence: Synthetic oligonucleotide
cgcacuauccaccaucaug

SEQ ID NO: 2141042 - RNA, 19 nt, Artificial Sequence
  Description of Artificial Sequence: Synthetic oligonucleotide
aacugacgauccucuccaa

SEQ ID NO: 2141043 - RNA, 19 nt, Artificial Sequence
  Description of Artificial Sequence: Synthetic oligonucleotide
cugaacugacgauccucuc

SEQ ID NO: 2141044 - RNA, 19 nt, Artificial Sequence
  Description of Artificial Sequence: Synthetic oligonucleotide
ugguuugggccgucccagc

SEQ ID NO: 2141045 - RNA, 19 nt, Artificial Sequence
  Description of Artificial Sequence: Synthetic oligonucleotide
gguucucuuuguuccuggc

SEQ ID NO: 2141046 - RNA, 19 nt, Artificial Sequence
  Description of Artificial Sequence: Synthetic oligonucleotide
ugggccuguuccacagaac

SEQ ID NO: 2141047 - RNA, 19 nt, Artificial Sequence
  Description of Artificial Sequence: Synthetic oligonucleotide
cugagguccgccucuggga

SEQ ID NO: 2141048 - RNA, 19 nt, Artificial Sequence
  Description of Artificial Sequence: Synthetic oligonucleotide
gcacuauccaccaucaugu

SEQ ID NO: 2141049 - RNA, 19 nt, Artificial Sequence
  Description of Artificial Sequence: Synthetic oligonucleotide
gguuugggccgucccagcc

SEQ ID NO: 2141050 - RNA, 19 nt, Artificial Sequence
  Description of Artificial Sequence: Synthetic oligonucleotide
cauaagccuccaucaucuc

SEQ ID NO: 2141051 - RNA, 19 nt, Artificial Sequence
  Description of Artificial Sequence: Synthetic oligonucleotide
ugggucggugaaccuucug

SEQ ID NO: 2141052 - RNA, 19 nt, Artificial Sequence
  Description of Artificial Sequence: Synthetic oligonucleotide
guguucaugaaggcagcuc

SEQ ID NO: 2141053 - RNA, 19 nt, Artificial Sequence
  Description of Artificial Sequence: Synthetic oligonucleotide
agguagggaauaccuccaa

SEQ ID NO: 2141054 - RNA, 19 nt, Artificial Sequence
  Description of Artificial Sequence: Synthetic oligonucleotide
cuccaagaauagauuaacu

SEQ ID NO: 2141055 - RNA, 19 nt, Artificial Sequence
  Description of Artificial Sequence: Synthetic oligonucleotide
caaggacauagagaaggga

SEQ ID NO: 2141056 - RNA, 19 nt, Artificial Sequence
  Description of Artificial Sequence: Synthetic oligonucleotide
ucacuacuugguugucgau

SEQ ID NO: 2141057 - RNA, 19 nt, Artificial Sequence
  Description of Artificial Sequence: Synthetic oligonucleotide
augggcaccugaccuugga

SEQ ID NO: 2141058 - RNA, 19 nt, Artificial Sequence
  Description of Artificial Sequence: Synthetic oligonucleotide
cagccggagaccugguguc

SEQ ID NO: 2141059 - RNA, 19 nt, Artificial Sequence
  Description of Artificial Sequence: Synthetic oligonucleotide
ccauaucaaaguucucguc

SEQ ID NO: 2141060 - RNA, 19 nt, Artificial Sequence
  Description of Artificial Sequence: Synthetic oligonucleotide
cucuaaggcgccugggcaa

SEQ ID NO: 2141061 - RNA, 19 nt, Artificial Sequence
  Description of Artificial Sequence: Synthetic oligonucleotide
ggcauccauaucaaaguuc

SEQ ID NO: 2141062 - RNA, 19 nt, Artificial Sequence
  Description of Artificial Sequence: Synthetic oligonucleotide
gugucuggacaaaggcaag

SEQ ID NO: 2141063 - RNA, 19 nt, Artificial Sequence
  Description of Artificial Sequence: Synthetic oligonucleotide
acgcccacugggccuguuc

SEQ ID NO: 2141064 - RNA, 19 nt, Artificial Sequence
  Description of Artificial Sequence: Synthetic oligonucleotide
gauugauguauguggccuu

SEQ ID NO: 2141065 - RNA, 19 nt, Artificial Sequence
  Description of Artificial Sequence: Synthetic oligonucleotide
ggugguuucugcaucccuc

SEQ ID NO: 2141066 - RNA, 19 nt, Artificial Sequence
  Description of Artificial Sequence: Synthetic oligonucleotide
ucgggguuccguacgucuu

SEQ ID NO: 2141067 - RNA, 19 nt, Artificial Sequence
  Description of Artificial Sequence: Synthetic oligonucleotide
cuuuguuccuggcaucacu

SEQ ID NO: 2141068 - RNA, 19 nt, Artificial Sequence
  Description of Artificial Sequence: Synthetic oligonucleotide
auguaucggaucagcuucu

SEQ ID NO: 2141069 - RNA, 19 nt, Artificial Sequence
  Description of Artificial Sequence: Synthetic oligonucleotide
guacugcuucuuccaaguc

SEQ ID NO: 2141070 - RNA, 19 nt, Artificial Sequence
  Description of Artificial Sequence: Synthetic oligonucleotide
ggucuuccgcacuauccac

SEQ ID NO: 2141071 - RNA, 19 nt, Artificial Sequence
  Description of Artificial Sequence: Synthetic oligonucleotide
ugaccucauccaagccacu

SEQ ID NO: 2141072 - RNA, 19 nt, Artificial Sequence
  Description of Artificial Sequence: Synthetic oligonucleotide
gcaaggagggcugaacuga

SEQ ID NO: 2141073 - RNA, 19 nt, Artificial Sequence
  Description of Artificial Sequence: Synthetic oligonucleotide
aucuccgugaaggcaucca

SEQ ID NO: 2141074 - RNA, 19 nt, Artificial Sequence
  Description of Artificial Sequence: Synthetic oligonucleotide
gugguuucugcaucccucu

SEQ ID NO: 2141075 - RNA, 19 nt, Artificial Sequence
  Description of Artificial Sequence: Synthetic oligonucleotide
gccucuaaggcgccugggc

SEQ ID NO: 2141076 - RNA, 19 nt, Artificial Sequence
  Description of Artificial Sequence: Synthetic oligonucleotide
ccaagcacauaggagaaga

SEQ ID NO: 2141077 - RNA, 19 nt, Artificial Sequence
  Description of Artificial Sequence: Synthetic oligonucleotide
gcucugugggugcagguuc

SEQ ID NO: 2141078 - RNA, 19 nt, Artificial Sequence
  Description of Artificial Sequence: Synthetic oligonucleotide
gguacuuucuggcuggcuu

SEQ ID NO: 2141079 - RNA, 19 nt, Artificial Sequence
  Description of Artificial Sequence: Synthetic oligonucleotide
ggagccaugggucggugaa

SEQ ID NO: 2141080 - RNA, 19 nt, Artificial Sequence
  Description of Artificial Sequence: Synthetic oligonucleotide
gguuccguacgucuuugaa

SEQ ID NO: 2141081 - RNA, 19 nt, Artificial Sequence
  Description of Artificial Sequence: Synthetic oligonucleotide
uugggccgucccagccugg

SEQ ID NO: 2141082 - RNA, 19 nt, Artificial Sequence
  Description of Artificial Sequence: Synthetic oligonucleotide
uucucgucugaggggccug

SEQ ID NO: 2141083 - RNA, 19 nt, Artificial Sequence
  Description of Artificial Sequence: Synthetic oligonucleotide
gcacauaggagaagaugac

SEQ ID NO: 2141084 - RNA, 19 nt, Artificial Sequence
  Description of Artificial Sequence: Synthetic oligonucleotide
agguccgccucugggaggu

SEQ ID NO: 2141085 - RNA, 19 nt, Artificial Sequence
  Description of Artificial Sequence: Synthetic oligonucleotide
caucuccgugaaggcaucc

SEQ ID NO: 2141086 - RNA, 19 nt, Artificial Sequence
  Description of Artificial Sequence: Synthetic oligonucleotide
ugccucauuuugggugccc

SEQ ID NO: 2141087 - RNA, 19 nt, Artificial Sequence
  Description of Artificial Sequence: Synthetic oligonucleotide
ucucgucugaggggccuga

SEQ ID NO: 2141088 - RNA, 19 nt, Artificial Sequence
  Description of Artificial Sequence: Synthetic oligonucleotide
cacugagguccgccucugg

SEQ ID NO: 2141089 - RNA, 19 nt, Artificial Sequence
  Description of Artificial Sequence: Synthetic oligonucleotide
uugggagccaugggucggu

SEQ ID NO: 2141090 - RNA, 19 nt, Artificial Sequence
  Description of Artificial Sequence: Synthetic oligonucleotide
ugccucggggucucuggaa

SEQ ID NO: 2141091 - RNA, 19 nt, Artificial Sequence
  Description of Artificial Sequence: Synthetic oligonucleotide
cuuugaaccgcuccccuuu

SEQ ID NO: 2141092 - RNA, 19 nt, Artificial Sequence
  Description of Artificial Sequence: Synthetic oligonucleotide
gcuuuucagguugccucgg

SEQ ID NO: 2141093 - RNA, 19 nt, Artificial Sequence
  Description of Artificial Sequence: Synthetic oligonucleotide
cuaucaugccucuggggau

SEQ ID NO: 2141094 - RNA, 19 nt, Artificial Sequence
  Description of Artificial Sequence: Synthetic oligonucleotide
ggccuguuccacagaacag

SEQ ID NO: 2141095 - RNA, 19 nt, Artificial Sequence
  Description of Artificial Sequence: Synthetic oligonucleotide
gaccuuggacacaggagcu

SEQ ID NO: 2141096 - RNA, 19 nt, Artificial Sequence
  Description of Artificial Sequence: Synthetic oligonucleotide
gacauagagaagggacagu

SEQ ID NO: 2141097 - RNA, 19 nt, Artificial Sequence
  Description of Artificial Sequence: Synthetic oligonucleotide
cagccucgggguuccguac

SEQ ID NO: 2141098 - RNA, 19 nt, Artificial Sequence
  Description of Artificial Sequence: Synthetic oligonucleotide
ggucggugaaccuucuggu

SEQ ID NO: 2141099 - RNA, 19 nt, Artificial Sequence
  Description of Artificial Sequence: Synthetic oligonucleotide
gucuuugaaccgcuccccu

SEQ ID NO: 2141100 - RNA, 19 nt, Artificial Sequence
  Description of Artificial Sequence: Synthetic oligonucleotide
ggacaguaggguggacggg

SEQ ID NO: 2141101 - RNA, 19 nt, Artificial Sequence
  Description of Artificial Sequence: Synthetic oligonucleotide
cuccgugaaggcauccaua

SEQ ID NO: 2141102 - RNA, 19 nt, Artificial Sequence
  Description of Artificial Sequence: Synthetic oligonucleotide
gggaggugugucuggacaa

SEQ ID NO: 2141103 - RNA, 19 nt, Artificial Sequence
  Description of Artificial Sequence: Synthetic oligonucleotide
uaacuagagcaaggacaua

SEQ ID NO: 2141104 - RNA, 19 nt, Artificial Sequence
  Description of Artificial Sequence: Synthetic oligonucleotide
caucuacuccuggcagaag

SEQ ID NO: 2141105 - RNA, 19 nt, Artificial Sequence
  Description of Artificial Sequence: Synthetic oligonucleotide
gagccaugggucggugaac

SEQ ID NO: 2141106 - RNA, 19 nt, Artificial Sequence
  Description of Artificial Sequence: Synthetic oligonucleotide
guuugggccgucccagccu

SEQ ID NO: 2141107 - RNA, 19 nt, Artificial Sequence
  Description of Artificial Sequence: Synthetic oligonucleotide
ggccaacgcccacugggcc

SEQ ID NO: 2141108 - RNA, 19 nt, Artificial Sequence
  Description of Artificial Sequence: Synthetic oligonucleotide
uucuggucuuccgcacuau

SEQ ID NO: 2141109 - RNA, 19 nt, Artificial Sequence
  Description of Artificial Sequence: Synthetic oligonucleotide
gggccucuaaggcgccugg

SEQ ID NO: 2141110 - RNA, 19 nt, Artificial Sequence
  Description of Artificial Sequence: Synthetic oligonucleotide
cugcaucauguccccuauc

SEQ ID NO: 2141111 - RNA, 19 nt, Artificial Sequence
  Description of Artificial Sequence: Synthetic oligonucleotide
ccucuaaggcgccugggca

SEQ ID NO: 2141112 - RNA, 19 nt, Artificial Sequence
  Description of Artificial Sequence: Synthetic oligonucleotide
gccucauuuugggugcccc

SEQ ID NO: 2141113 - RNA, 19 nt, Artificial Sequence
  Description of Artificial Sequence: Synthetic oligonucleotide
cuguuccacagaacaggua

SEQ ID NO: 2141114 - RNA, 19 nt, Artificial Sequence
  Description of Artificial Sequence: Synthetic oligonucleotide
caagcacauaggagaagau

SEQ ID NO: 2141115 - RNA, 19 nt, Artificial Sequence
  Description of Artificial Sequence: Synthetic oligonucleotide
gcugaacugacgauccucu

SEQ ID NO: 2141116 - RNA, 19 nt, Artificial Sequence
  Description of Artificial Sequence: Synthetic oligonucleotide
ugggagccaugggucggug

SEQ ID NO: 2141117 - RNA, 19 nt, Artificial Sequence
  Description of Artificial Sequence: Synthetic oligonucleotide
gcagccggagaccuggugu

SEQ ID NO: 2141118 - RNA, 19 nt, Artificial Sequence
  Description of Artificial Sequence: Synthetic oligonucleotide
cucgucugaggggccugag

SEQ ID NO: 2141119 - RNA, 19 nt, Artificial Sequence
  Description of Artificial Sequence: Synthetic oligonucleotide
caaaggcaaggagggcuga

SEQ ID NO: 2141120 - RNA, 19 nt, Artificial Sequence
  Description of Artificial Sequence: Synthetic oligonucleotide
cgucuuugaaccgcucccc

SEQ ID NO: 2141121 - RNA, 19 nt, Artificial Sequence
  Description of Artificial Sequence: Synthetic oligonucleotide
uggcuggcuugagauugau

SEQ ID NO: 2141122 - RNA, 19 nt, Artificial Sequence
  Description of Artificial Sequence: Synthetic oligonucleotide
cacuauccaccaucaugua

SEQ ID NO: 2141123 - RNA, 19 nt, Artificial Sequence
  Description of Artificial Sequence: Synthetic oligonucleotide
uggcagccggagaccuggu

SEQ ID NO: 2141124 - RNA, 19 nt, Artificial Sequence
  Description of Artificial Sequence: Synthetic oligonucleotide
guacgucuuugaaccgcuc

SEQ ID NO: 2141125 - RNA, 19 nt, Artificial Sequence
  Description of Artificial Sequence: Synthetic oligonucleotide
agccggagaccuggugucu

SEQ ID NO: 2141126 - RNA, 19 nt, Artificial Sequence
  Description of Artificial Sequence: Synthetic oligonucleotide
ggcagccggagaccuggug

SEQ ID NO: 2141127 - RNA, 19 nt, Artificial Sequence
  Description of Artificial Sequence: Synthetic oligonucleotide
gggguuccguacgucuuug

SEQ ID NO: 2141128 - RNA, 19 nt, Artificial Sequence
  Description of Artificial Sequence: Synthetic oligonucleotide
ggccucuaaggcgccuggg

SEQ ID NO: 2141129 - RNA, 19 nt, Artificial Sequence
  Description of Artificial Sequence: Synthetic oligonucleotide
cagguugccucggggucuc

SEQ ID NO: 2141130 - RNA, 19 nt, Artificial Sequence
  Description of Artificial Sequence: Synthetic oligonucleotide
ggcuggcuugagauugaug

SEQ ID NO: 2141131 - RNA, 19 nt, Artificial Sequence
  Description of Artificial Sequence: Synthetic oligonucleotide
ccugguuugggccguccca

SEQ ID NO: 2141132 - RNA, 19 nt, Artificial Sequence
  Description of Artificial Sequence: Synthetic oligonucleotide
ccccuuuggugcucacuac

SEQ ID NO: 2141133 - RNA, 19 nt, Artificial Sequence
  Description of Artificial Sequence: Synthetic oligonucleotide
guccccuaucaugccucug

SEQ ID NO: 2141134 - RNA, 19 nt, Artificial Sequence
  Description of Artificial Sequence: Synthetic oligonucleotide
ggcuuuggccaacgcccac

SEQ ID NO: 2141135 - RNA, 19 nt, Artificial Sequence
  Description of Artificial Sequence: Synthetic oligonucleotide
ggggugguuucugcauccc

SEQ ID NO: 2141136 - RNA, 19 nt, Artificial Sequence
  Description of Artificial Sequence: Synthetic oligonucleotide
gguugccucggggucucug

SEQ ID NO: 2141137 - RNA, 19 nt, Artificial Sequence
  Description of Artificial Sequence: Synthetic oligonucleotide
ccucugggaggugugucug

SEQ ID NO: 2141138 - RNA, 19 nt, Artificial Sequence
  Description of Artificial Sequence: Synthetic oligonucleotide
agguccucuaggaccccaa

SEQ ID NO: 2141139 - RNA, 19 nt, Artificial Sequence
  Description of Artificial Sequence: Synthetic oligonucleotide
augggucggugaaccuucu

SEQ ID NO: 2141140 - RNA, 19 nt, Artificial Sequence
  Description of Artificial Sequence: Synthetic oligonucleotide
cuacuugguugucgaugua

SEQ ID NO: 2141141 - RNA, 19 nt, Artificial Sequence
  Description of Artificial Sequence: Synthetic oligonucleotide
cucaguggaagcgguacuu

SEQ ID NO: 2141142 - RNA, 19 nt, Artificial Sequence
  Description of Artificial Sequence: Synthetic oligonucleotide
gcacauaagccuccaucau

SEQ ID NO: 2141143 - RNA, 19 nt, Artificial Sequence
  Description of Artificial Sequence: Synthetic oligonucleotide
ccccaagcacauaggagaa

SEQ ID NO: 2141144 - RNA, 19 nt, Artificial Sequence
  Description of Artificial Sequence: Synthetic oligonucleotide
ccaacgcccacugggccug

SEQ ID NO: 2141145 - RNA, 19 nt, Artificial Sequence
  Description of Artificial Sequence: Synthetic oligonucleotide
ggugcagguucucuuuguu

SEQ ID NO: 2141146 - RNA, 19 nt, Artificial Sequence
  Description of Artificial Sequence: Synthetic oligonucleotide
ggguuccguacgucuuuga

SEQ ID NO: 2141147 - RNA, 19 nt, Artificial Sequence
  Description of Artificial Sequence: Synthetic oligonucleotide
ccgugaaggcauccauauc

SEQ ID NO: 2141148 - RNA, 19 nt, Artificial Sequence
  Description of Artificial Sequence: Synthetic oligonucleotide
ggugaaccuucuggucuuc

SEQ ID NO: 2141149 - RNA, 19 nt, Artificial Sequence
  Description of Artificial Sequence: Synthetic oligonucleotide
ccggagaccuggugucuuc

SEQ ID NO: 2141150 - RNA, 19 nt, Artificial Sequence
  Description of Artificial Sequence: Synthetic oligonucleotide
gccaacgcccacugggccu

SEQ ID NO: 2141151 - RNA, 19 nt, Artificial Sequence
  Description of Artificial Sequence: Synthetic oligonucleotide
gcagcuccaagaauagauu

SEQ ID NO: 2141152 - RNA, 19 nt, Artificial Sequence
  Description of Artificial Sequence: Synthetic oligonucleotide
gcaucccucuggggucugg

SEQ ID NO: 2141153 - RNA, 19 nt, Artificial Sequence
  Description of Artificial Sequence: Synthetic oligonucleotide
cagccuuuacuguguucau

SEQ ID NO: 2141154 - RNA, 19 nt, Artificial Sequence
  Description of Artificial Sequence: Synthetic oligonucleotide
gguugucgauguaucggau

SEQ ID NO: 2141155 - RNA, 19 nt, Artificial Sequence
  Description of Artificial Sequence: Synthetic oligonucleotide
aacgcccacugggccuguu

SEQ ID NO: 2141156 - RNA, 19 nt, Artificial Sequence
  Description of Artificial Sequence: Synthetic oligonucleotide
cguacgucuuugaaccgcu

SEQ ID NO: 2141157 - RNA, 19 nt, Artificial Sequence
  Description of Artificial Sequence: Synthetic oligonucleotide
gcgguacuuucuggcuggc

SEQ ID NO: 2141158 - RNA, 19 nt, Artificial Sequence
  Description of Artificial Sequence: Synthetic oligonucleotide
cugcaucccucuggggucu

SEQ ID NO: 2141159 - RNA, 19 nt, Artificial Sequence
  Description of Artificial Sequence: Synthetic oligonucleotide
ccucggggucucuggaaaa

SEQ ID NO: 2141160 - RNA, 19 nt, Artificial Sequence
  Description of Artificial Sequence: Synthetic oligonucleotide
ccacugagguccgccucug

SEQ ID NO: 2141161 - RNA, 19 nt, Artificial Sequence
  Description of Artificial Sequence: Synthetic oligonucleotide
cuccccuuuggugcucacu

SEQ ID NO: 2141162 - RNA, 19 nt, Artificial Sequence
  Description of Artificial Sequence: Synthetic oligonucleotide
ccuucuggucuuccgcacu

SEQ ID NO: 2141163 - RNA, 19 nt, Artificial Sequence
  Description of Artificial Sequence: Synthetic oligonucleotide
ccaggcacauaagccucca

SEQ ID NO: 2141164 - RNA, 19 nt, Artificial Sequence
  Description of Artificial Sequence: Synthetic oligonucleotide
ccucaguggaagcgguacu

SEQ ID NO: 2141165 - RNA, 19 nt, Artificial Sequence
  Description of Artificial Sequence: Synthetic oligonucleotide
gggcugaacugacgauccu

SEQ ID NO: 2141166 - RNA, 19 nt, Artificial Sequence
  Description of Artificial Sequence: Synthetic oligonucleotide
ggacagccuuuacuguguu

SEQ ID NO: 2141167 - RNA, 19 nt, Artificial Sequence
  Description of Artificial Sequence: Synthetic oligonucleotide
cuuccgcacuauccaccau

SEQ ID NO: 2141168 - RNA, 19 nt, Artificial Sequence
  Description of Artificial Sequence: Synthetic oligonucleotide
caggcacauaagccuccau

SEQ ID NO: 2141169 - RNA, 19 nt, Artificial Sequence
  Description of Artificial Sequence: Synthetic oligonucleotide
ccaagccacugagguccgc

SEQ ID NO: 2141170 - RNA, 19 nt, Artificial Sequence
  Description of Artificial Sequence: Synthetic oligonucleotide
gccaugggucggugaaccu

SEQ ID NO: 2141171 - RNA, 19 nt, Artificial Sequence
  Description of Artificial Sequence: Synthetic oligonucleotide
agguugccucggggucucu

SEQ ID NO: 2141172 - RNA, 19 nt, Artificial Sequence
  Description of Artificial Sequence: Synthetic oligonucleotide
cuaaggcgccugggcaagu

SEQ ID NO: 2141173 - RNA, 19 nt, Artificial Sequence
  Description of Artificial Sequence: Synthetic oligonucleotide
ccccgggcuuuggccaacg

SEQ ID NO: 2141174 - RNA, 19 nt, Artificial Sequence
  Description of Artificial Sequence: Synthetic oligonucleotide
ccucgggguuccguacguc

SEQ ID NO: 2141175 - RNA, 19 nt, Artificial Sequence
  Description of Artificial Sequence: Synthetic oligonucleotide
ggccucaguggaagcggua

SEQ ID NO: 2141176 - RNA, 19 nt, Artificial Sequence
  Description of Artificial Sequence: Synthetic oligonucleotide
ccaugggucggugaaccuu

SEQ ID NO: 2141177 - RNA, 19 nt, Artificial Sequence
  Description of Artificial Sequence: Synthetic oligonucleotide
ccccaguggcagccggaga

SEQ ID NO: 2141178 - RNA, 19 nt, Artificial Sequence
  Description of Artificial Sequence: Synthetic oligonucleotide
gguccgccucugggaggug

SEQ ID NO: 2141179 - RNA, 19 nt, Artificial Sequence
  Description of Artificial Sequence: Synthetic oligonucleotide
gccggagaccuggugucuu

SEQ ID NO: 2141180 - RNA, 19 nt, Artificial Sequence
  Description of Artificial Sequence: Synthetic oligonucleotide
cgggguuccguacgucuuu

SEQ ID NO: 2141181 - RNA, 19 nt, Artificial Sequence
  Description of Artificial Sequence: Synthetic oligonucleotide
caacgcccacugggccugu

SEQ ID NO: 2141182 - RNA, 19 nt, Artificial Sequence
  Description of Artificial Sequence: Synthetic oligonucleotide
ccgcuccccuuuggugcuc

SEQ ID NO: 2141183 - RNA, 19 nt, Artificial Sequence
  Description of Artificial Sequence: Synthetic oligonucleotide
ccgcacuauccaccaucau

SEQ ID NO: 2141184 - RNA, 19 nt, Artificial Sequence
  Description of Artificial Sequence: Synthetic oligonucleotide
cgguacuuucuggcuggcu

SEQ ID NO: 2141185 - RNA, 19 nt, Artificial Sequence
  Description of Artificial Sequence: Synthetic oligonucleotide
ugaaaucucuucaagaaca

SEQ ID NO: 2141186 - RNA, 19 nt, Artificial Sequence
  Description of Artificial Sequence: Synthetic oligonucleotide
aaucauugcucucuuuggc

SEQ ID NO: 2141187 - RNA, 19 nt, Artificial Sequence
  Description of Artificial Sequence: Synthetic oligonucleotide
aaucucuucaagaacaggg

SEQ ID NO: 2141188 - RNA, 19 nt, Artificial Sequence
  Description of Artificial Sequence: Synthetic oligonucleotide
aauagguucugggagaagg

SEQ ID NO: 2141189 - RNA, 19 nt, Artificial Sequence
  Description of Artificial Sequence: Synthetic oligonucleotide
gguaauuucauuuaggguc

SEQ ID NO: 2141190 - RNA, 19 nt, Artificial Sequence
  Description of Artificial Sequence: Synthetic oligonucleotide
ucaaccuuggucuuauagg

SEQ ID NO: 2141191 - RNA, 19 nt, Artificial Sequence
  Description of Artificial Sequence: Synthetic oligonucleotide
agaucaugcgcagagaggc

SEQ ID NO: 2141192 - RNA, 19 nt, Artificial Sequence
  Description of Artificial Sequence: Synthetic oligonucleotide
ugugguaauuucauuuagg

SEQ ID NO: 2141193 - RNA, 19 nt, Artificial Sequence
  Description of Artificial Sequence: Synthetic oligonucleotide
uguaaaacuggaccagggg

SEQ ID NO: 2141194 - RNA, 19 nt, Artificial Sequence
  Description of Artificial Sequence: Synthetic oligonucleotide
gguaguuucacucuugucc

SEQ ID NO: 2141195 - RNA, 19 nt, Artificial Sequence
  Description of Artificial Sequence: Synthetic oligonucleotide
aauacuguggcuaggggag

SEQ ID NO: 2141196 - RNA, 19 nt, Artificial Sequence
  Description of Artificial Sequence: Synthetic oligonucleotide
ucauuuaggguccugggcu

SEQ ID NO: 2141197 - RNA, 19 nt, Artificial Sequence
  Description of Artificial Sequence: Synthetic oligonucleotide
aguuguuaccuguuccugc

SEQ ID NO: 2141198 - RNA, 19 nt, Artificial Sequence
  Description of Artificial Sequence: Synthetic oligonucleotide
guuccugccucacagaagg

SEQ ID NO: 2141199 - RNA, 19 nt, Artificial Sequence
  Description of Artificial Sequence: Synthetic oligonucleotide
acuucugaccuuaagcucc

SEQ ID NO: 2141200 - RNA, 19 nt, Artificial Sequence
  Description of Artificial Sequence: Synthetic oligonucleotide
gaaucauugcucucuuugg

SEQ ID NO: 2141201 - RNA, 19 nt, Artificial Sequence
  Description of Artificial Sequence: Synthetic oligonucleotide
uaccucauugggcugaggg

SEQ ID NO: 2141202 - RNA, 19 nt, Artificial Sequence
  Description of Artificial Sequence: Synthetic oligonucleotide
guaaaacuggaccaggggc

SEQ ID NO: 2141203 - RNA, 19 nt, Artificial Sequence
  Description of Artificial Sequence: Synthetic oligonucleotide
agaucugaaaucgagggag

SEQ ID NO: 2141204 - RNA, 19 nt, Artificial Sequence
  Description of Artificial Sequence: Synthetic oligonucleotide
aauuugugcucgccucucc

SEQ ID NO: 2141205 - RNA, 19 nt, Artificial Sequence
  Description of Artificial Sequence: Synthetic oligonucleotide
agagugggagaucaugcgc

SEQ ID NO: 2141206 - RNA, 19 nt, Artificial Sequence
  Description of Artificial Sequence: Synthetic oligonucleotide
agacuguuaggccugggac

SEQ ID NO: 2141207 - RNA, 19 nt, Artificial Sequence
  Description of Artificial Sequence: Synthetic oligonucleotide
ucuggugauagucugcaga

SEQ ID NO: 2141208 - RNA, 19 nt, Artificial Sequence
  Description of Artificial Sequence: Synthetic oligonucleotide
uuucauuuaggguccuggg

SEQ ID NO: 2141209 - RNA, 19 nt, Artificial Sequence
  Description of Artificial Sequence: Synthetic oligonucleotide
aacagaaucauugcucucu

SEQ ID NO: 2141210 - RNA, 19 nt, Artificial Sequence
  Description of Artificial Sequence: Synthetic oligonucleotide
uucacucuuguccugguca

SEQ ID NO: 2141211 - RNA, 19 nt, Artificial Sequence
  Description of Artificial Sequence: Synthetic oligonucleotide
aaggggaguccucagaaga

SEQ ID NO: 2141212 - RNA, 19 nt, Artificial Sequence
  Description of Artificial Sequence: Synthetic oligonucleotide
guugacugccuuuuguggg

SEQ ID NO: 2141213 - RNA, 19 nt, Artificial Sequence
  Description of Artificial Sequence: Synthetic oligonucleotide
aaguuucccucucagccag

SEQ ID NO: 2141214 - RNA, 19 nt, Artificial Sequence
  Description of Artificial Sequence: Synthetic oligonucleotide
uccaacagaaucauugcuc

SEQ ID NO: 2141215 - RNA, 19 nt, Artificial Sequence
  Description of Artificial Sequence: Synthetic oligonucleotide
aaaucgagggagcugacuu

SEQ ID NO: 2141216 - RNA, 19 nt, Artificial Sequence
  Description of Artificial Sequence: Synthetic oligonucleotide
uucauuuaggguccugggc

SEQ ID NO: 2141217 - RNA, 19 nt, Artificial Sequence
  Description of Artificial Sequence: Synthetic oligonucleotide
ugucugauguaaaacugga

SEQ ID NO: 2141218 - RNA, 19 nt, Artificial Sequence
  Description of Artificial Sequence: Synthetic oligonucleotide
gauguaaaacuggaccagg

SEQ ID NO: 2141219 - RNA, 19 nt, Artificial Sequence
  Description of Artificial Sequence: Synthetic oligonucleotide
accuuggucuuauaggcuc

SEQ ID NO: 2141220 - RNA, 19 nt, Artificial Sequence
  Description of Artificial Sequence: Synthetic oligonucleotide
caugucugauguaaaacug

SEQ ID NO: 2141221 - RNA, 19 nt, Artificial Sequence
  Description of Artificial Sequence: Synthetic oligonucleotide
gcagaucugaaaucgaggg

SEQ ID NO: 2141222 - RNA, 19 nt, Artificial Sequence
  Description of Artificial Sequence: Synthetic oligonucleotide
ucuacuccuggcuugguga

SEQ ID NO: 2141223 - RNA, 19 nt, Artificial Sequence
  Description of Artificial Sequence: Synthetic oligonucleotide
gagagugggagaucaugcg

SEQ ID NO: 2141224 - RNA, 19 nt, Artificial Sequence
  Description of Artificial Sequence: Synthetic oligonucleotide
ugauguaaaacuggaccag

SEQ ID NO: 2141225 - RNA, 19 nt, Artificial Sequence
  Description of Artificial Sequence: Synthetic oligonucleotide
ucuuauaggcuccacccuc

SEQ ID NO: 2141226 - RNA, 19 nt, Artificial Sequence
  Description of Artificial Sequence: Synthetic oligonucleotide
cuuggugagaagccaaagc

SEQ ID NO: 2141227 - RNA, 19 nt, Artificial Sequence
  Description of Artificial Sequence: Synthetic oligonucleotide
ucguggacaucccuggucc

SEQ ID NO: 2141228 - RNA, 19 nt, Artificial Sequence
  Description of Artificial Sequence: Synthetic oligonucleotide
uggugcuucguccuugaag

SEQ ID NO: 2141229 - RNA, 19 nt, Artificial Sequence
  Description of Artificial Sequence: Synthetic oligonucleotide
aaguugggcaccacaauag

SEQ ID NO: 2141230 - RNA, 19 nt, Artificial Sequence
  Description of Artificial Sequence: Synthetic oligonucleotide
ugucacugugguaauuuca

SEQ ID NO: 2141231 - RNA, 19 nt, Artificial Sequence
  Description of Artificial Sequence: Synthetic oligonucleotide
ugguaauuucauuuagggu

SEQ ID NO: 2141232 - RNA, 19 nt, Artificial Sequence
  Description of Artificial Sequence: Synthetic oligonucleotide
gucugcagaucugaaaucg

SEQ ID NO: 2141233 - RNA, 19 nt, Artificial Sequence
  Description of Artificial Sequence: Synthetic oligonucleotide
ugugagucucuggugauag

SEQ ID NO: 2141234 - RNA, 19 nt, Artificial Sequence
  Description of Artificial Sequence: Synthetic oligonucleotide
guuguuaccuguuccugcc

SEQ ID NO: 2141235 - RNA, 19 nt, Artificial Sequence
  Description of Artificial Sequence: Synthetic oligonucleotide
accacaauagguucuggga

SEQ ID NO: 2141236 - RNA, 19 nt, Artificial Sequence
  Description of Artificial Sequence: Synthetic oligonucleotide
gcuacuucugaccuuaagc

SEQ ID NO: 2141237 - RNA, 19 nt, Artificial Sequence
  Description of Artificial Sequence: Synthetic oligonucleotide
ugugggcuacuucugaccu

SEQ ID NO: 2141238 - RNA, 19 nt, Artificial Sequence
  Description of Artificial Sequence: Synthetic oligonucleotide
uuuugugggcuacuucuga

SEQ ID NO: 2141239 - RNA, 19 nt, Artificial Sequence
  Description of Artificial Sequence: Synthetic oligonucleotide
ggucuuauaggcuccaccc

SEQ ID NO: 2141240 - RNA, 19 nt, Artificial Sequence
  Description of Artificial Sequence: Synthetic oligonucleotide
uggucuuauaggcuccacc

SEQ ID NO: 2141241 - RNA, 19 nt, Artificial Sequence
  Description of Artificial Sequence: Synthetic oligonucleotide
aguugggcaccacaauagg

SEQ ID NO: 2141242 - RNA, 19 nt, Artificial Sequence
  Description of Artificial Sequence: Synthetic oligonucleotide
augaccucaccacucaugu

SEQ ID NO: 2141243 - RNA, 19 nt, Artificial Sequence
  Description of Artificial Sequence: Synthetic oligonucleotide
uucaagaacaggggcaggc

SEQ ID NO: 2141244 - RNA, 19 nt, Artificial Sequence
  Description of Artificial Sequence: Synthetic oligonucleotide
acucauggagcaguccucc

SEQ ID NO: 2141245 - RNA, 19 nt, Artificial Sequence
  Description of Artificial Sequence: Synthetic oligonucleotide
gauggguacugcaugcucc

SEQ ID NO: 2141246 - RNA, 19 nt, Artificial Sequence
  Description of Artificial Sequence: Synthetic oligonucleotide
accuuaagcuccucucugg

SEQ ID NO: 2141247 - RNA, 19 nt, Artificial Sequence
  Description of Artificial Sequence: Synthetic oligonucleotide
aagaacaggggcaggcagg

SEQ ID NO: 2141248 - RNA, 19 nt, Artificial Sequence
  Description of Artificial Sequence: Synthetic oligonucleotide
uugggcugagggcugauga

SEQ ID NO: 2141249 - RNA, 19 nt, Artificial Sequence
  Description of Artificial Sequence: Synthetic oligonucleotide
cuuaagcuccucucugggg

SEQ ID NO: 2141250 - RNA, 19 nt, Artificial Sequence
  Description of Artificial Sequence: Synthetic oligonucleotide
ugaccuuaagcuccucucu

SEQ ID NO: 2141251 - RNA, 19 nt, Artificial Sequence
  Description of Artificial Sequence: Synthetic oligonucleotide
gucaucacuccucugcacc

SEQ ID NO: 2141252 - RNA, 19 nt, Artificial Sequence
  Description of Artificial Sequence: Synthetic oligonucleotide
cauagucuucaucacugag

SEQ ID NO: 2141253 - RNA, 19 nt, Artificial Sequence
  Description of Artificial Sequence: Synthetic oligonucleotide
uacugcaugcuccaccaac

SEQ ID NO: 2141254 - RNA, 19 nt, Artificial Sequence
  Description of Artificial Sequence: Synthetic oligonucleotide
ucccucugaaaucucuuca

SEQ ID NO: 2141255 - RNA, 19 nt, Artificial Sequence
  Description of Artificial Sequence: Synthetic oligonucleotide
uugggcaccacaauagguu

SEQ ID NO: 2141256 - RNA, 19 nt, Artificial Sequence
  Description of Artificial Sequence: Synthetic oligonucleotide
uccuggucaguuguggccg

SEQ ID NO: 2141257 - RNA, 19 nt, Artificial Sequence
  Description of Artificial Sequence: Synthetic oligonucleotide
aguuucacucuuguccugg

SEQ ID NO: 2141258 - RNA, 19 nt, Artificial Sequence
  Description of Artificial Sequence: Synthetic oligonucleotide
caccacaauagguucuggg

SEQ ID NO: 2141259 - RNA, 19 nt, Artificial Sequence
  Description of Artificial Sequence: Synthetic oligonucleotide
ucauugcucucuuuggcuc

SEQ ID NO: 2141260 - RNA, 19 nt, Artificial Sequence
  Description of Artificial Sequence: Synthetic oligonucleotide
uggcaugggucucuugucc

SEQ ID NO: 2141261 - RNA, 19 nt, Artificial Sequence
  Description of Artificial Sequence: Synthetic oligonucleotide
ucugcagaucugaaaucga

SEQ ID NO: 2141262 - RNA, 19 nt, Artificial Sequence
  Description of Artificial Sequence: Synthetic oligonucleotide
uuugugcucgccucuccag

SEQ ID NO: 2141263 - RNA, 19 nt, Artificial Sequence
  Description of Artificial Sequence: Synthetic oligonucleotide
aaaagaaguugggcaccac

SEQ ID NO: 2141264 - RNA, 19 nt, Artificial Sequence
  Description of Artificial Sequence: Synthetic oligonucleotide
ggagccuucccuuuguacc

SEQ ID NO: 2141265 - RNA, 19 nt, Artificial Sequence
  Description of Artificial Sequence: Synthetic oligonucleotide
auguaaaacuggaccaggg

SEQ ID NO: 2141266 - RNA, 19 nt, Artificial Sequence
  Description of Artificial Sequence: Synthetic oligonucleotide
uguuccugccucacagaag

SEQ ID NO: 2141267 - RNA, 19 nt, Artificial Sequence
  Description of Artificial Sequence: Synthetic oligonucleotide
uugugggcuacuucugacc

SEQ ID NO: 2141268 - RNA, 19 nt, Artificial Sequence
  Description of Artificial Sequence: Synthetic oligonucleotide
ugagucucuggugauaguc

SEQ ID NO: 2141269 - RNA, 19 nt, Artificial Sequence
  Description of Artificial Sequence: Synthetic oligonucleotide
uggaccaggggcuaguuuu

SEQ ID NO: 2141270 - RNA, 19 nt, Artificial Sequence
  Description of Artificial Sequence: Synthetic oligonucleotide
acugaguucuggguccacc

SEQ ID NO: 2141271 - RNA, 19 nt, Artificial Sequence
  Description of Artificial Sequence: Synthetic oligonucleotide
gagaucaugcgcagagagg

SEQ ID NO: 2141272 - RNA, 19 nt, Artificial Sequence
  Description of Artificial Sequence: Synthetic oligonucleotide
gaccuuaagcuccucucug

SEQ ID NO: 2141273 - RNA, 19 nt, Artificial Sequence
  Description of Artificial Sequence: Synthetic oligonucleotide
gaaguugggcaccacaaua

SEQ ID NO: 2141274 - RNA, 19 nt, Artificial Sequence
  Description of Artificial Sequence: Synthetic oligonucleotide
caauacuguggcuagggga

SEQ ID NO: 2141275 - RNA, 19 nt, Artificial Sequence
  Description of Artificial Sequence: Synthetic oligonucleotide
ugcaugcuccaccaacuca

SEQ ID NO: 2141276 - RNA, 19 nt, Artificial Sequence
  Description of Artificial Sequence: Synthetic oligonucleotide
ucugaaaucgagggagcug

SEQ ID NO: 2141277 - RNA, 19 nt, Artificial Sequence
  Description of Artificial Sequence: Synthetic oligonucleotide
cucaugucugauguaaaac

SEQ ID NO: 2141278 - RNA, 19 nt, Artificial Sequence
  Description of Artificial Sequence: Synthetic oligonucleotide
auagucuucaucacugagu

SEQ ID NO: 2141279 - RNA, 19 nt, Artificial Sequence
  Description of Artificial Sequence: Synthetic oligonucleotide
uucuacuccuggcuuggug

SEQ ID NO: 2141280 - RNA, 19 nt, Artificial Sequence
  Description of Artificial Sequence: Synthetic oligonucleotide
aacucauggagcaguccuc

SEQ ID NO: 2141281 - RNA, 19 nt, Artificial Sequence
  Description of Artificial Sequence: Synthetic oligonucleotide
ucauagucuucaucacuga

SEQ ID NO: 2141282 - RNA, 19 nt, Artificial Sequence
  Description of Artificial Sequence: Synthetic oligonucleotide
uccccugguaguuucacuc

SEQ ID NO: 2141283 - RNA, 19 nt, Artificial Sequence
  Description of Artificial Sequence: Synthetic oligonucleotide
uguuaccuguuccugccuc

SEQ ID NO: 2141284 - RNA, 19 nt, Artificial Sequence
  Description of Artificial Sequence: Synthetic oligonucleotide
ucuggaguggugcuucguc

SEQ ID NO: 2141285 - RNA, 19 nt, Artificial Sequence
  Description of Artificial Sequence: Synthetic oligonucleotide
cucuucaagaacaggggca

SEQ ID NO: 2141286 - RNA, 19 nt, Artificial Sequence
  Description of Artificial Sequence: Synthetic oligonucleotide
cuacuucugaccuuaagcu

SEQ ID NO: 2141287 - RNA, 19 nt, Artificial Sequence
  Description of Artificial Sequence: Synthetic oligonucleotide
ugcuucuacuccuggcuug

SEQ ID NO: 2141288 - RNA, 19 nt, Artificial Sequence
  Description of Artificial Sequence: Synthetic oligonucleotide
cugaccuuaagcuccucuc

SEQ ID NO: 2141289 - RNA, 19 nt, Artificial Sequence
  Description of Artificial Sequence: Synthetic oligonucleotide
caggcaauacuguggcuag

SEQ ID NO: 2141290 - RNA, 19 nt, Artificial Sequence
  Description of Artificial Sequence: Synthetic oligonucleotide
agggaauuugugcucgccu

SEQ ID NO: 2141291 - RNA, 19 nt, Artificial Sequence
  Description of Artificial Sequence: Synthetic oligonucleotide
gaugaccucaccacucaug

SEQ ID NO: 2141292 - RNA, 19 nt, Artificial Sequence
  Description of Artificial Sequence: Synthetic oligonucleotide
gaagccaaagcugcuugug

SEQ ID NO: 2141293 - RNA, 19 nt, Artificial Sequence
  Description of Artificial Sequence: Synthetic oligonucleotide
ugaacucacuggagaaagu

SEQ ID NO: 2141294 - RNA, 19 nt, Artificial Sequence
  Description of Artificial Sequence: Synthetic oligonucleotide
ugauggguacugcaugcuc

SEQ ID NO: 2141295 - RNA, 19 nt, Artificial Sequence
  Description of Artificial Sequence: Synthetic oligonucleotide
agugggagaucaugcgcag

SEQ ID NO: 2141296 - RNA, 19 nt, Artificial Sequence
  Description of Artificial Sequence: Synthetic oligonucleotide
ugcuucguccuugaagggc

SEQ ID NO: 2141297 - RNA, 19 nt, Artificial Sequence
  Description of Artificial Sequence: Synthetic oligonucleotide
ggcgacaaggccuuugggc

SEQ ID NO: 2141298 - RNA, 19 nt, Artificial Sequence
  Description of Artificial Sequence: Synthetic oligonucleotide
uguggcuaggggagccccg

SEQ ID NO: 2141299 - RNA, 19 nt, Artificial Sequence
  Description of Artificial Sequence: Synthetic oligonucleotide
cugaaaucgagggagcuga

SEQ ID NO: 2141300 - RNA, 19 nt, Artificial Sequence
  Description of Artificial Sequence: Synthetic oligonucleotide
cacaauagguucugggaga

SEQ ID NO: 2141301 - RNA, 19 nt, Artificial Sequence
  Description of Artificial Sequence: Synthetic oligonucleotide
uggagaaaguuucccucuc

SEQ ID NO: 2141302 - RNA, 19 nt, Artificial Sequence
  Description of Artificial Sequence: Synthetic oligonucleotide
gagacuguuaggccuggga

SEQ ID NO: 2141303 - RNA, 19 nt, Artificial Sequence
  Description of Artificial Sequence: Synthetic oligonucleotide
uggaguggugcuucguccu

SEQ ID NO: 2141304 - RNA, 19 nt, Artificial Sequence
  Description of Artificial Sequence: Synthetic oligonucleotide
ugggcaccacaauagguuc

SEQ ID NO: 2141305 - RNA, 19 nt, Artificial Sequence
  Description of Artificial Sequence: Synthetic oligonucleotide
uggcaaagccggagagugg

SEQ ID NO: 2141306 - RNA, 19 nt, Artificial Sequence
  Description of Artificial Sequence: Synthetic oligonucleotide
acccucacaggcaauacug

SEQ ID NO: 2141307 - RNA, 19 nt, Artificial Sequence
  Description of Artificial Sequence: Synthetic oligonucleotide
ggcaaagccggagaguggg

SEQ ID NO: 2141308 - RNA, 19 nt, Artificial Sequence
  Description of Artificial Sequence: Synthetic oligonucleotide
ccacaauagguucugggag

SEQ ID NO: 2141309 - RNA, 19 nt, Artificial Sequence
  Description of Artificial Sequence: Synthetic oligonucleotide
ggugauagucugcagaucu

SEQ ID NO: 2141310 - RNA, 19 nt, Artificial Sequence
  Description of Artificial Sequence: Synthetic oligonucleotide
aggcagggaauuugugcuc

SEQ ID NO: 2141311 - RNA, 19 nt, Artificial Sequence
  Description of Artificial Sequence: Synthetic oligonucleotide
uccucucuggggaaagguc

SEQ ID NO: 2141312 - RNA, 19 nt, Artificial Sequence
  Description of Artificial Sequence: Synthetic oligonucleotide
uccucccucugaaaucucu

SEQ ID NO: 2141313 - RNA, 19 nt, Artificial Sequence
  Description of Artificial Sequence: Synthetic oligonucleotide
gagugggagaucaugcgca

SEQ ID NO: 2141314 - RNA, 19 nt, Artificial Sequence
  Description of Artificial Sequence: Synthetic oligonucleotide
ugugcucgccucuccagcu

SEQ ID NO: 2141315 - RNA, 19 nt, Artificial Sequence
  Description of Artificial Sequence: Synthetic oligonucleotide
cauuuaggguccugggcuc

SEQ ID NO: 2141316 - RNA, 19 nt, Artificial Sequence
  Description of Artificial Sequence: Synthetic oligonucleotide
ucuucaaccuuggucuuau

SEQ ID NO: 2141317 - RNA, 19 nt, Artificial Sequence
  Description of Artificial Sequence: Synthetic oligonucleotide
cagaagagucacugaacuc

SEQ ID NO: 2141318 - RNA, 19 nt, Artificial Sequence
  Description of Artificial Sequence: Synthetic oligonucleotide
cuacuccuggcuuggugag

SEQ ID NO: 2141319 - RNA, 19 nt, Artificial Sequence
  Description of Artificial Sequence: Synthetic oligonucleotide
uuauaggcuccacccucac

SEQ ID NO: 2141320 - RNA, 19 nt, Artificial Sequence
  Description of Artificial Sequence: Synthetic oligonucleotide
ucccugguccaguuguuac

SEQ ID NO: 2141321 - RNA, 19 nt, Artificial Sequence
  Description of Artificial Sequence: Synthetic oligonucleotide
ggagagugggagaucaugc

SEQ ID NO: 2141322 - RNA, 19 nt, Artificial Sequence
  Description of Artificial Sequence: Synthetic oligonucleotide
accaggggcuaguuuuguc

SEQ ID NO: 2141323 - RNA, 19 nt, Artificial Sequence
  Description of Artificial Sequence: Synthetic oligonucleotide
uguuaggccugggacuagc

SEQ ID NO: 2141324 - RNA, 19 nt, Artificial Sequence
  Description of Artificial Sequence: Synthetic oligonucleotide
ugcacccucgugaugggua

SEQ ID NO: 2141325 - RNA, 19 nt, Artificial Sequence
  Description of Artificial Sequence: Synthetic oligonucleotide
caggggcuaguuuugucug

SEQ ID NO: 2141326 - RNA, 19 nt, Artificial Sequence
  Description of Artificial Sequence: Synthetic oligonucleotide
ucugcacccucgugauggg

SEQ ID NO: 2141327 - RNA, 19 nt, Artificial Sequence
  Description of Artificial Sequence: Synthetic oligonucleotide
caaagccggagagugggag

SEQ ID NO: 2141328 - RNA, 19 nt, Artificial Sequence
  Description of Artificial Sequence: Synthetic oligonucleotide
aaagguccgggaggacagg

SEQ ID NO: 2141329 - RNA, 19 nt, Artificial Sequence
  Description of Artificial Sequence: Synthetic oligonucleotide
aacucacuggagaaaguuu

SEQ ID NO: 2141330 - RNA, 19 nt, Artificial Sequence
  Description of Artificial Sequence: Synthetic oligonucleotide
ccuuuguaccucauugggc

SEQ ID NO: 2141331 - RNA, 19 nt, Artificial Sequence
  Description of Artificial Sequence: Synthetic oligonucleotide
gcuugugagucucugguga

SEQ ID NO: 2141332 - RNA, 19 nt, Artificial Sequence
  Description of Artificial Sequence: Synthetic oligonucleotide
aucaugcgcagagaggccu

SEQ ID NO: 2141333 - RNA, 19 nt, Artificial Sequence
  Description of Artificial Sequence: Synthetic oligonucleotide
acugcaugcuccaccaacu

SEQ ID NO: 2141334 - RNA, 19 nt, Artificial Sequence
  Description of Artificial Sequence: Synthetic oligonucleotide
ggguugacugccuuuugug

SEQ ID NO: 2141335 - RNA, 19 nt, Artificial Sequence
  Description of Artificial Sequence: Synthetic oligonucleotide
uuguuaccuguuccugccu

SEQ ID NO: 2141336 - RNA, 19 nt, Artificial Sequence
  Description of Artificial Sequence: Synthetic oligonucleotide
cugccucacagaaggggag

SEQ ID NO: 2141337 - RNA, 19 nt, Artificial Sequence
  Description of Artificial Sequence: Synthetic oligonucleotide
aucugaaaucgagggagcu

SEQ ID NO: 2141338 - RNA, 19 nt, Artificial Sequence
  Description of Artificial Sequence: Synthetic oligonucleotide
ggucaguuguggccggugg

SEQ ID NO: 2141339 - RNA, 19 nt, Artificial Sequence
  Description of Artificial Sequence: Synthetic oligonucleotide
ugggcuacuucugaccuua

SEQ ID NO: 2141340 - RNA, 19 nt, Artificial Sequence
  Description of Artificial Sequence: Synthetic oligonucleotide
acuguggcuaggggagccc

SEQ ID NO: 2141341 - RNA, 19 nt, Artificial Sequence
  Description of Artificial Sequence: Synthetic oligonucleotide
ugguaguuucacucuuguc

SEQ ID NO: 2141342 - RNA, 19 nt, Artificial Sequence
  Description of Artificial Sequence: Synthetic oligonucleotide
aagccggagagugggagau

SEQ ID NO: 2141343 - RNA, 19 nt, Artificial Sequence
  Description of Artificial Sequence: Synthetic oligonucleotide
aggaggagccuucccuuug

SEQ ID NO: 2141344 - RNA, 19 nt, Artificial Sequence
  Description of Artificial Sequence: Synthetic oligonucleotide
acaauagguucugggagaa

SEQ ID NO: 2141345 - RNA, 19 nt, Artificial Sequence
  Description of Artificial Sequence: Synthetic oligonucleotide
uaguuuugucugucacugu

SEQ ID NO: 2141346 - RNA, 19 nt, Artificial Sequence
  Description of Artificial Sequence: Synthetic oligonucleotide
cugucacugugguaauuuc

SEQ ID NO: 2141347 - RNA, 19 nt, Artificial Sequence
  Description of Artificial Sequence: Synthetic oligonucleotide
gcaagggcuccccugguag

SEQ ID NO: 2141348 - RNA, 19 nt, Artificial Sequence
  Description of Artificial Sequence: Synthetic oligonucleotide
acuguuaggccugggacua

SEQ ID NO: 2141349 - RNA, 19 nt, Artificial Sequence
  Description of Artificial Sequence: Synthetic oligonucleotide
gcgacaaggccuuugggca

SEQ ID NO: 2141350 - RNA, 19 nt, Artificial Sequence
  Description of Artificial Sequence: Synthetic oligonucleotide
cugggacuagcagaggcug

SEQ ID NO: 2141351 - RNA, 19 nt, Artificial Sequence
  Description of Artificial Sequence: Synthetic oligonucleotide
ggcagggaauuugugcucg

SEQ ID NO: 2141352 - RNA, 19 nt, Artificial Sequence
  Description of Artificial Sequence: Synthetic oligonucleotide
ccggugguggcaaagccgg

SEQ ID NO: 2141353 - RNA, 19 nt, Artificial Sequence
  Description of Artificial Sequence: Synthetic oligonucleotide
uguaccucauugggcugag

SEQ ID NO: 2141354 - RNA, 19 nt, Artificial Sequence
  Description of Artificial Sequence: Synthetic oligonucleotide
ugcucgccucuccagcucu

SEQ ID NO: 2141355 - RNA, 19 nt, Artificial Sequence
  Description of Artificial Sequence: Synthetic oligonucleotide
aguggugcuucguccuuga

SEQ ID NO: 2141356 - RNA, 19 nt, Artificial Sequence
  Description of Artificial Sequence: Synthetic oligonucleotide
guuaccuguuccugccuca

SEQ ID NO: 2141357 - RNA, 19 nt, Artificial Sequence
  Description of Artificial Sequence: Synthetic oligonucleotide
gggaauuugugcucgccuc

SEQ ID NO: 2141358 - RNA, 19 nt, Artificial Sequence
  Description of Artificial Sequence: Synthetic oligonucleotide
gaucaugcgcagagaggcc

SEQ ID NO: 2141359 - RNA, 19 nt, Artificial Sequence
  Description of Artificial Sequence: Synthetic oligonucleotide
ccuuaagcuccucucuggg

SEQ ID NO: 2141360 - RNA, 19 nt, Artificial Sequence
  Description of Artificial Sequence: Synthetic oligonucleotide
gaauuugugcucgccucuc

SEQ ID NO: 2141361 - RNA, 19 nt, Artificial Sequence
  Description of Artificial Sequence: Synthetic oligonucleotide
cucguggacaucccugguc

SEQ ID NO: 2141362 - RNA, 19 nt, Artificial Sequence
  Description of Artificial Sequence: Synthetic oligonucleotide
auagguucugggagaagga

SEQ ID NO: 2141363 - RNA, 19 nt, Artificial Sequence
  Description of Artificial Sequence: Synthetic oligonucleotide
cacugaacucacuggagaa

SEQ ID NO: 2141364 - RNA, 19 nt, Artificial Sequence
  Description of Artificial Sequence: Synthetic oligonucleotide
accaacucauggagcaguc

SEQ ID NO: 2141365 - RNA, 19 nt, Artificial Sequence
  Description of Artificial Sequence: Synthetic oligonucleotide
aggcagauucuucaaccuu

SEQ ID NO: 2141366 - RNA, 19 nt, Artificial Sequence
  Description of Artificial Sequence: Synthetic oligonucleotide
cagaucugaaaucgaggga

SEQ ID NO: 2141367 - RNA, 19 nt, Artificial Sequence
  Description of Artificial Sequence: Synthetic oligonucleotide
cucuuguccuggucaguug

SEQ ID NO: 2141368 - RNA, 19 nt, Artificial Sequence
  Description of Artificial Sequence: Synthetic oligonucleotide
caguuguggccgguggugg

SEQ ID NO: 2141369 - RNA, 19 nt, Artificial Sequence
  Description of Artificial Sequence: Synthetic oligonucleotide
caguuguuaccuguuccug

SEQ ID NO: 2141370 - RNA, 19 nt, Artificial Sequence
  Description of Artificial Sequence: Synthetic oligonucleotide
gauagucugcagaucugaa

SEQ ID NO: 2141371 - RNA, 19 nt, Artificial Sequence
  Description of Artificial Sequence: Synthetic oligonucleotide
cuggcaugggucucuuguc

SEQ ID NO: 2141372 - RNA, 19 nt, Artificial Sequence
  Description of Artificial Sequence: Synthetic oligonucleotide
caacucauggagcaguccu

SEQ ID NO: 2141373 - RNA, 19 nt, Artificial Sequence
  Description of Artificial Sequence: Synthetic oligonucleotide
ugagacuguuaggccuggg

SEQ ID NO: 2141374 - RNA, 19 nt, Artificial Sequence
  Description of Artificial Sequence: Synthetic oligonucleotide
gcuucguccuugaagggcc

SEQ ID NO: 2141375 - RNA, 19 nt, Artificial Sequence
  Description of Artificial Sequence: Synthetic oligonucleotide
ucuugccaguggcuccucu

SEQ ID NO: 2141376 - RNA, 19 nt, Artificial Sequence
  Description of Artificial Sequence: Synthetic oligonucleotide
cugaugaccucaccacuca

SEQ ID NO: 2141377 - RNA, 19 nt, Artificial Sequence
  Description of Artificial Sequence: Synthetic oligonucleotide
uaccuguuccugccucaca

SEQ ID NO: 2141378 - RNA, 19 nt, Artificial Sequence
  Description of Artificial Sequence: Synthetic oligonucleotide
gccucguggacaucccugg

SEQ ID NO: 2141379 - RNA, 19 nt, Artificial Sequence
  Description of Artificial Sequence: Synthetic oligonucleotide
uaggguccugggcucaaua

SEQ ID NO: 2141380 - RNA, 19 nt, Artificial Sequence
  Description of Artificial Sequence: Synthetic oligonucleotide
cagggaauuugugcucgcc

SEQ ID NO: 2141381 - RNA, 19 nt, Artificial Sequence
  Description of Artificial Sequence: Synthetic oligonucleotide
acucuuguccuggucaguu

SEQ ID NO: 2141382 - RNA, 19 nt, Artificial Sequence
  Description of Artificial Sequence: Synthetic oligonucleotide
aggggcuaguuuugucugu

SEQ ID NO: 2141383 - RNA, 19 nt, Artificial Sequence
  Description of Artificial Sequence: Synthetic oligonucleotide
gaguggugcuucguccuug

SEQ ID NO: 2141384 - RNA, 19 nt, Artificial Sequence
  Description of Artificial Sequence: Synthetic oligonucleotide
ugucugucacugugguaau

SEQ ID NO: 2141385 - RNA, 19 nt, Artificial Sequence
  Description of Artificial Sequence: Synthetic oligonucleotide
cuguuccugccucacagaa

SEQ ID NO: 2141386 - RNA, 19 nt, Artificial Sequence
  Description of Artificial Sequence: Synthetic oligonucleotide
ggcuccugagacuguuagg

SEQ ID NO: 2141387 - RNA, 19 nt, Artificial Sequence
  Description of Artificial Sequence: Synthetic oligonucleotide
ggcuacuucugaccuuaag

SEQ ID NO: 2141388 - RNA, 19 nt, Artificial Sequence
  Description of Artificial Sequence: Synthetic oligonucleotide
gcuucuacuccuggcuugg

SEQ ID NO: 2141389 - RNA, 19 nt, Artificial Sequence
  Description of Artificial Sequence: Synthetic oligonucleotide
uccacccucacaggcaaua

SEQ ID NO: 2141390 - RNA, 19 nt, Artificial Sequence
  Description of Artificial Sequence: Synthetic oligonucleotide
auuuaggguccugggcuca

SEQ ID NO: 2141391 - RNA, 19 nt, Artificial Sequence
  Description of Artificial Sequence: Synthetic oligonucleotide
cuggagaaaguuucccucu

SEQ ID NO: 2141392 - RNA, 19 nt, Artificial Sequence
  Description of Artificial Sequence: Synthetic oligonucleotide
cuuugggcaagggcucccc

SEQ ID NO: 2141393 - RNA, 19 nt, Artificial Sequence
  Description of Artificial Sequence: Synthetic oligonucleotide
ggagaaaguuucccucuca

SEQ ID NO: 2141394 - RNA, 19 nt, Artificial Sequence
  Description of Artificial Sequence: Synthetic oligonucleotide
caccacucaugucugaugu

SEQ ID NO: 2141395 - RNA, 19 nt, Artificial Sequence
  Description of Artificial Sequence: Synthetic oligonucleotide
aggcaauacuguggcuagg

SEQ ID NO: 2141396 - RNA, 19 nt, Artificial Sequence
  Description of Artificial Sequence: Synthetic oligonucleotide
ugaccucaccacucauguc

SEQ ID NO: 2141397 - RNA, 19 nt, Artificial Sequence
  Description of Artificial Sequence: Synthetic oligonucleotide
ccuuggucuuauaggcucc

SEQ ID NO: 2141398 - RNA, 19 nt, Artificial Sequence
  Description of Artificial Sequence: Synthetic oligonucleotide
ugacugccuuuugugggcu

SEQ ID NO: 2141399 - RNA, 19 nt, Artificial Sequence
  Description of Artificial Sequence: Synthetic oligonucleotide
uggugauagucugcagauc

SEQ ID NO: 2141400 - RNA, 19 nt, Artificial Sequence
  Description of Artificial Sequence: Synthetic oligonucleotide
ggagcaguccuccucccuc

SEQ ID NO: 2141401 - RNA, 19 nt, Artificial Sequence
  Description of Artificial Sequence: Synthetic oligonucleotide
ccuuuugugggcuacuucu

SEQ ID NO: 2141402 - RNA, 19 nt, Artificial Sequence
  Description of Artificial Sequence: Synthetic oligonucleotide
uggucaguuguggccggug

SEQ ID NO: 2141403 - RNA, 19 nt, Artificial Sequence
  Description of Artificial Sequence: Synthetic oligonucleotide
uuggcuccugagacuguua

SEQ ID NO: 2141404 - RNA, 19 nt, Artificial Sequence
  Description of Artificial Sequence: Synthetic oligonucleotide
gucacugugguaauuucau

SEQ ID NO: 2141405 - RNA, 19 nt, Artificial Sequence
  Description of Artificial Sequence: Synthetic oligonucleotide
cugagacuguuaggccugg

SEQ ID NO: 2141406 - RNA, 19 nt, Artificial Sequence
  Description of Artificial Sequence: Synthetic oligonucleotide
gucuuauaggcuccacccu

SEQ ID NO: 2141407 - RNA, 19 nt, Artificial Sequence
  Description of Artificial Sequence: Synthetic oligonucleotide
ccaaagcugcuugugaguc

SEQ ID NO: 2141408 - RNA, 19 nt, Artificial Sequence
  Description of Artificial Sequence: Synthetic oligonucleotide
uuggucuuauaggcuccac

SEQ ID NO: 2141409 - RNA, 19 nt, Artificial Sequence
  Description of Artificial Sequence: Synthetic oligonucleotide
cuaggggagccccguccag

SEQ ID NO: 2141410 - RNA, 19 nt, Artificial Sequence
  Description of Artificial Sequence: Synthetic oligonucleotide
ggcuaggggagccccgucc

SEQ ID NO: 2141411 - RNA, 19 nt, Artificial Sequence
  Description of Artificial Sequence: Synthetic oligonucleotide
agcuccucucuggggaaag

SEQ ID NO: 2141412 - RNA, 19 nt, Artificial Sequence
  Description of Artificial Sequence: Synthetic oligonucleotide
cacuggagaaaguuucccu

SEQ ID NO: 2141413 - RNA, 19 nt, Artificial Sequence
  Description of Artificial Sequence: Synthetic oligonucleotide
caauagguucugggagaag

SEQ ID NO: 2141414 - RNA, 19 nt, Artificial Sequence
  Description of Artificial Sequence: Synthetic oligonucleotide
aagggcuccccugguaguu

SEQ ID NO: 2141415 - RNA, 19 nt, Artificial Sequence
  Description of Artificial Sequence: Synthetic oligonucleotide
ccaacagaaucauugcucu

SEQ ID NO: 2141416 - RNA, 19 nt, Artificial Sequence
  Description of Artificial Sequence: Synthetic oligonucleotide
gaaaucgagggagcugacu

SEQ ID NO: 2141417 - RNA, 19 nt, Artificial Sequence
  Description of Artificial Sequence: Synthetic oligonucleotide
ccugguaguuucacucuug

SEQ ID NO: 2141418 - RNA, 19 nt, Artificial Sequence
  Description of Artificial Sequence: Synthetic oligonucleotide
cuguggcuaggggagcccc

SEQ ID NO: 2141419 - RNA, 19 nt, Artificial Sequence
  Description of Artificial Sequence: Synthetic oligonucleotide
acccucgugauggguacug

SEQ ID NO: 2141420 - RNA, 19 nt, Artificial Sequence
  Description of Artificial Sequence: Synthetic oligonucleotide
uuuaggguccugggcucaa

SEQ ID NO: 2141421 - RNA, 19 nt, Artificial Sequence
  Description of Artificial Sequence: Synthetic oligonucleotide
agccuucccuuuguaccuc

SEQ ID NO: 2141422 - RNA, 19 nt, Artificial Sequence
  Description of Artificial Sequence: Synthetic oligonucleotide
ggcaccacaauagguucug

SEQ ID NO: 2141423 - RNA, 19 nt, Artificial Sequence
  Description of Artificial Sequence: Synthetic oligonucleotide
cacucaugucugauguaaa

SEQ ID NO: 2141424 - RNA, 19 nt, Artificial Sequence
  Description of Artificial Sequence: Synthetic oligonucleotide
cugaguucuggguccaccu

SEQ ID NO: 2141425 - RNA, 19 nt, Artificial Sequence
  Description of Artificial Sequence: Synthetic oligonucleotide
guugggcaccacaauaggu

SEQ ID NO: 2141426 - RNA, 19 nt, Artificial Sequence
  Description of Artificial Sequence: Synthetic oligonucleotide
cccugguccaguuguuacc

SEQ ID NO: 2141427 - RNA, 19 nt, Artificial Sequence
  Description of Artificial Sequence: Synthetic oligonucleotide
cugguaguuucacucuugu

SEQ ID NO: 2141428 - RNA, 19 nt, Artificial Sequence
  Description of Artificial Sequence: Synthetic oligonucleotide
accacucaugucugaugua

SEQ ID NO: 2141429 - RNA, 19 nt, Artificial Sequence
  Description of Artificial Sequence: Synthetic oligonucleotide
ggaauuugugcucgccucu

SEQ ID NO: 2141430 - RNA, 19 nt, Artificial Sequence
  Description of Artificial Sequence: Synthetic oligonucleotide
gggagccccguccagccug

SEQ ID NO: 2141431 - RNA, 19 nt, Artificial Sequence
  Description of Artificial Sequence: Synthetic oligonucleotide
gaucucuggcaugggucuc

SEQ ID NO: 2141432 - RNA, 19 nt, Artificial Sequence
  Description of Artificial Sequence: Synthetic oligonucleotide
cgggaggacaggaggagcc

SEQ ID NO: 2141433 - RNA, 19 nt, Artificial Sequence
  Description of Artificial Sequence: Synthetic oligonucleotide
gggcgacaaggccuuuggg

SEQ ID NO: 2141434 - RNA, 19 nt, Artificial Sequence
  Description of Artificial Sequence: Synthetic oligonucleotide
cucgugauggguacugcau

SEQ ID NO: 2141435 - RNA, 19 nt, Artificial Sequence
  Description of Artificial Sequence: Synthetic oligonucleotide
aguuucccucucagccagg

SEQ ID NO: 2141436 - RNA, 19 nt, Artificial Sequence
  Description of Artificial Sequence: Synthetic oligonucleotide
uccaguuguuggggaggca

SEQ ID NO: 2141437 - RNA, 19 nt, Artificial Sequence
  Description of Artificial Sequence: Synthetic oligonucleotide
guuaggccugggacuagca

SEQ ID NO: 2141438 - RNA, 19 nt, Artificial Sequence
  Description of Artificial Sequence: Synthetic oligonucleotide
gagcaguccuccucccucu

SEQ ID NO: 2141439 - RNA, 19 nt, Artificial Sequence
  Description of Artificial Sequence: Synthetic oligonucleotide
guuguggccggugguggca

SEQ ID NO: 2141440 - RNA, 19 nt, Artificial Sequence
  Description of Artificial Sequence: Synthetic oligonucleotide
caguuguuggggaggcaaa

SEQ ID NO: 2141441 - RNA, 19 nt, Artificial Sequence
  Description of Artificial Sequence: Synthetic oligonucleotide
gucaguuguggccgguggu

SEQ ID NO: 2141442 - RNA, 19 nt, Artificial Sequence
  Description of Artificial Sequence: Synthetic oligonucleotide
aucugggaggguggugacu

SEQ ID NO: 2141443 - RNA, 19 nt, Artificial Sequence
  Description of Artificial Sequence: Synthetic oligonucleotide
guuucacucuuguccuggu

SEQ ID NO: 2141444 - RNA, 19 nt, Artificial Sequence
  Description of Artificial Sequence: Synthetic oligonucleotide
ugggaggguggugacuguu

SEQ ID NO: 2141445 - RNA, 19 nt, Artificial Sequence
  Description of Artificial Sequence: Synthetic oligonucleotide
gcacccucgugauggguac

SEQ ID NO: 2141446 - RNA, 19 nt, Artificial Sequence
  Description of Artificial Sequence: Synthetic oligonucleotide
cuucugaccuuaagcuccu

SEQ ID NO: 2141447 - RNA, 19 nt, Artificial Sequence
  Description of Artificial Sequence: Synthetic oligonucleotide
uuguggccggugguggcaa

SEQ ID NO: 2141448 - RNA, 19 nt, Artificial Sequence
  Description of Artificial Sequence: Synthetic oligonucleotide
cuugugagucucuggugau

SEQ ID NO: 2141449 - RNA, 19 nt, Artificial Sequence
  Description of Artificial Sequence: Synthetic oligonucleotide
guaccucauugggcugagg

SEQ ID NO: 2141450 - RNA, 19 nt, Artificial Sequence
  Description of Artificial Sequence: Synthetic oligonucleotide
gcagggaauuugugcucgc

SEQ ID NO: 2141451 - RNA, 19 nt, Artificial Sequence
  Description of Artificial Sequence: Synthetic oligonucleotide
gccuuuugugggcuacuuc

SEQ ID NO: 2141452 - RNA, 19 nt, Artificial Sequence
  Description of Artificial Sequence: Synthetic oligonucleotide
ccaacucauggagcagucc

SEQ ID NO: 2141453 - RNA, 19 nt, Artificial Sequence
  Description of Artificial Sequence: Synthetic oligonucleotide
ccuggucaguuguggccgg

SEQ ID NO: 2141454 - RNA, 19 nt, Artificial Sequence
  Description of Artificial Sequence: Synthetic oligonucleotide
agccggagagugggagauc

SEQ ID NO: 2141455 - RNA, 19 nt, Artificial Sequence
  Description of Artificial Sequence: Synthetic oligonucleotide
cuguuaggccugggacuag

SEQ ID NO: 2141456 - RNA, 19 nt, Artificial Sequence
  Description of Artificial Sequence: Synthetic oligonucleotide
ccacucaugucugauguaa

SEQ ID NO: 2141457 - RNA, 19 nt, Artificial Sequence
  Description of Artificial Sequence: Synthetic oligonucleotide
cucgccucuccagcucuug

SEQ ID NO: 2141458 - RNA, 19 nt, Artificial Sequence
  Description of Artificial Sequence: Synthetic oligonucleotide
aucccugguccaguuguua

SEQ ID NO: 2141459 - RNA, 19 nt, Artificial Sequence
  Description of Artificial Sequence: Synthetic oligonucleotide
ggggcuaguuuugucuguc

SEQ ID NO: 2141460 - RNA, 19 nt, Artificial Sequence
  Description of Artificial Sequence: Synthetic oligonucleotide
gcaccacaauagguucugg

SEQ ID NO: 2141461 - RNA, 19 nt, Artificial Sequence
  Description of Artificial Sequence: Synthetic oligonucleotide
gggguugacugccuuuugu

SEQ ID NO: 2141462 - RNA, 19 nt, Artificial Sequence
  Description of Artificial Sequence: Synthetic oligonucleotide
ggcugaugaccucaccacu

SEQ ID NO: 2141463 - RNA, 19 nt, Artificial Sequence
  Description of Artificial Sequence: Synthetic oligonucleotide
cccucugaaaucucuucaa

SEQ ID NO: 2141464 - RNA, 19 nt, Artificial Sequence
  Description of Artificial Sequence: Synthetic oligonucleotide
agagaggccuccaguuguu

SEQ ID NO: 2141465 - RNA, 19 nt, Artificial Sequence
  Description of Artificial Sequence: Synthetic oligonucleotide
gcuccacccucacaggcaa

SEQ ID NO: 2141466 - RNA, 19 nt, Artificial Sequence
  Description of Artificial Sequence: Synthetic oligonucleotide
uguggccggugguggcaaa

SEQ ID NO: 2141467 - RNA, 19 nt, Artificial Sequence
  Description of Artificial Sequence: Synthetic oligonucleotide
ccucuggaguggugcuucg

SEQ ID NO: 2141468 - RNA, 19 nt, Artificial Sequence
  Description of Artificial Sequence: Synthetic oligonucleotide
caccaacucauggagcagu

SEQ ID NO: 2141469 - RNA, 19 nt, Artificial Sequence
  Description of Artificial Sequence: Synthetic oligonucleotide
ccucgugauggguacugca

SEQ ID NO: 2141470 - RNA, 19 nt, Artificial Sequence
  Description of Artificial Sequence: Synthetic oligonucleotide
gcaugcuccaccaacucau

SEQ ID NO: 2141471 - RNA, 19 nt, Artificial Sequence
  Description of Artificial Sequence: Synthetic oligonucleotide
ggcaugggucucuuguccu

SEQ ID NO: 2141472 - RNA, 19 nt, Artificial Sequence
  Description of Artificial Sequence: Synthetic oligonucleotide
acuggaccaggggcuaguu

SEQ ID NO: 2141473 - RNA, 19 nt, Artificial Sequence
  Description of Artificial Sequence: Synthetic oligonucleotide
gacugccuuuugugggcua

SEQ ID NO: 2141474 - RNA, 19 nt, Artificial Sequence
  Description of Artificial Sequence: Synthetic oligonucleotide
ccaguuguuggggaggcaa

SEQ ID NO: 2141475 - RNA, 19 nt, Artificial Sequence
  Description of Artificial Sequence: Synthetic oligonucleotide
uucugaccuuaagcuccuc

SEQ ID NO: 2141476 - RNA, 19 nt, Artificial Sequence
  Description of Artificial Sequence: Synthetic oligonucleotide
cggagagugggagaucaug

SEQ ID NO: 2141477 - RNA, 19 nt, Artificial Sequence
  Description of Artificial Sequence: Synthetic oligonucleotide
gaacaggggcaggcaggga

SEQ ID NO: 2141478 - RNA, 19 nt, Artificial Sequence
  Description of Artificial Sequence: Synthetic oligonucleotide
ggccuuugggcaagggcuc

SEQ ID NO: 2141479 - RNA, 19 nt, Artificial Sequence
  Description of Artificial Sequence: Synthetic oligonucleotide
ggagccccguccagccugg

SEQ ID NO: 2141480 - RNA, 19 nt, Artificial Sequence
  Description of Artificial Sequence: Synthetic oligonucleotide
cacugaguucuggguccac

SEQ ID NO: 2141481 - RNA, 19 nt, Artificial Sequence
  Description of Artificial Sequence: Synthetic oligonucleotide
gccuuugggcaagggcucc

SEQ ID NO: 2141482 - RNA, 19 nt, Artificial Sequence
  Description of Artificial Sequence: Synthetic oligonucleotide
cucaccacucaugucugau

SEQ ID NO: 2141483 - RNA, 19 nt, Artificial Sequence
  Description of Artificial Sequence: Synthetic oligonucleotide
caagggcuccccugguagu

SEQ ID NO: 2141484 - RNA, 19 nt, Artificial Sequence
  Description of Artificial Sequence: Synthetic oligonucleotide
gggagaucaugcgcagaga

SEQ ID NO: 2141485 - RNA, 19 nt, Artificial Sequence
  Description of Artificial Sequence: Synthetic oligonucleotide
gggcuccccugguaguuuc

SEQ ID NO: 2141486 - RNA, 19 nt, Artificial Sequence
  Description of Artificial Sequence: Synthetic oligonucleotide
gaccaggggcuaguuuugu

SEQ ID NO: 2141487 - RNA, 19 nt, Artificial Sequence
  Description of Artificial Sequence: Synthetic oligonucleotide
gggucucuuguccugcuuu

SEQ ID NO: 2141488 - RNA, 19 nt, Artificial Sequence
  Description of Artificial Sequence: Synthetic oligonucleotide
ccuuugggcaagggcuccc

SEQ ID NO: 2141489 - RNA, 19 nt, Artificial Sequence
  Description of Artificial Sequence: Synthetic oligonucleotide
cugcuucuacuccuggcuu

SEQ ID NO: 2141490 - RNA, 19 nt, Artificial Sequence
  Description of Artificial Sequence: Synthetic oligonucleotide
aggggcaggcagggaauuu

SEQ ID NO: 2141491 - RNA, 19 nt, Artificial Sequence
  Description of Artificial Sequence: Synthetic oligonucleotide
cuucguccuugaagggccu

SEQ ID NO: 2141492 - RNA, 19 nt, Artificial Sequence
  Description of Artificial Sequence: Synthetic oligonucleotide
agggcuccccugguaguuu

SEQ ID NO: 2141493 - RNA, 19 nt, Artificial Sequence
  Description of Artificial Sequence: Synthetic oligonucleotide
cacaggcaauacuguggcu

SEQ ID NO: 2141494 - RNA, 19 nt, Artificial Sequence
  Description of Artificial Sequence: Synthetic oligonucleotide
gguggcaaagccggagagu

SEQ ID NO: 2141495 - RNA, 19 nt, Artificial Sequence
  Description of Artificial Sequence: Synthetic oligonucleotide
cagaaucauugcucucuuu

SEQ ID NO: 2141496 - RNA, 19 nt, Artificial Sequence
  Description of Artificial Sequence: Synthetic oligonucleotide
ccacccucacaggcaauac

SEQ ID NO: 2141497 - RNA, 19 nt, Artificial Sequence
  Description of Artificial Sequence: Synthetic oligonucleotide
caucacuccucugcacccu

SEQ ID NO: 2141498 - RNA, 19 nt, Artificial Sequence
  Description of Artificial Sequence: Synthetic oligonucleotide
gagccccguccagccuggg

SEQ ID NO: 2141499 - RNA, 19 nt, Artificial Sequence
  Description of Artificial Sequence: Synthetic oligonucleotide
cccucgugauggguacugc

SEQ ID NO: 2141500 - RNA, 19 nt, Artificial Sequence
  Description of Artificial Sequence: Synthetic oligonucleotide
caggaggagccuucccuuu

SEQ ID NO: 2141501 - RNA, 19 nt, Artificial Sequence
  Description of Artificial Sequence: Synthetic oligonucleotide
ggguggugacuguucugcu

SEQ ID NO: 2141502 - RNA, 19 nt, Artificial Sequence
  Description of Artificial Sequence: Synthetic oligonucleotide
gcaaagccggagaguggga

SEQ ID NO: 2141503 - RNA, 19 nt, Artificial Sequence
  Description of Artificial Sequence: Synthetic oligonucleotide
gugggcuacuucugaccuu

SEQ ID NO: 2141504 - RNA, 19 nt, Artificial Sequence
  Description of Artificial Sequence: Synthetic oligonucleotide
guggcuccucuggaguggu

SEQ ID NO: 2141505 - RNA, 19 nt, Artificial Sequence
  Description of Artificial Sequence: Synthetic oligonucleotide
gcgcagagaggccuccagu

SEQ ID NO: 2141506 - RNA, 19 nt, Artificial Sequence
  Description of Artificial Sequence: Synthetic oligonucleotide
gggcaccacaauagguucu

SEQ ID NO: 2141507 - RNA, 19 nt, Artificial Sequence
  Description of Artificial Sequence: Synthetic oligonucleotide
cuggaccaggggcuaguuu

SEQ ID NO: 2141508 - RNA, 19 nt, Artificial Sequence
  Description of Artificial Sequence: Synthetic oligonucleotide
cucuggaguggugcuucgu

SEQ ID NO: 2141509 - RNA, 19 nt, Artificial Sequence
  Description of Artificial Sequence: Synthetic oligonucleotide
ggacaucccugguccaguu

SEQ ID NO: 2141510 - RNA, 19 nt, Artificial Sequence
  Description of Artificial Sequence: Synthetic oligonucleotide
ccccugguaguuucacucu

SEQ ID NO: 2141511 - RNA, 19 nt, Artificial Sequence
  Description of Artificial Sequence: Synthetic oligonucleotide
cuucuacuccuggcuuggu

SEQ ID NO: 2141512 - RNA, 19 nt, Artificial Sequence
  Description of Artificial Sequence: Synthetic oligonucleotide
ccucccucugaaaucucuu

SEQ ID NO: 2141513 - RNA, 19 nt, Artificial Sequence
  Description of Artificial Sequence: Synthetic oligonucleotide
cuggucaguuguggccggu

SEQ ID NO: 2141514 - RNA, 19 nt, Artificial Sequence
  Description of Artificial Sequence: Synthetic oligonucleotide
cugcacccucgugaugggu

SEQ ID NO: 2141515 - RNA, 19 nt, Artificial Sequence
  Description of Artificial Sequence: Synthetic oligonucleotide
cuccacccucacaggcaau

SEQ ID NO: 2141516 - RNA, 19 nt, Artificial Sequence
  Description of Artificial Sequence: Synthetic oligonucleotide
cccugguaguuucacucuu

SEQ ID NO: 2141517 - RNA, 19 nt, Artificial Sequence
  Description of Artificial Sequence: Synthetic oligonucleotide
cacccucgugauggguacu

SEQ ID NO: 2141518 - RNA, 19 nt, Artificial Sequence
  Description of Artificial Sequence: Synthetic oligonucleotide
cauugggcugagggcugau

SEQ ID NO: 2141519 - RNA, 19 nt, Artificial Sequence
  Description of Artificial Sequence: Synthetic oligonucleotide
gggcuacuucugaccuuaa

SEQ ID NO: 2141520 - RNA, 19 nt, Artificial Sequence
  Description of Artificial Sequence: Synthetic oligonucleotide
ccucguggacaucccuggu

SEQ ID NO: 2141521 - RNA, 19 nt, Artificial Sequence
  Description of Artificial Sequence: Synthetic oligonucleotide
ccggagagugggagaucau

SEQ ID NO: 2141522 - RNA, 19 nt, Artificial Sequence
  Description of Artificial Sequence: Synthetic oligonucleotide
gcucgccucuccagcucuu

SEQ ID NO: 2141523 - RNA, 19 nt, Artificial Sequence
  Description of Artificial Sequence: Synthetic oligonucleotide
ugugauuggauuaaaagag

SEQ ID NO: 2141524 - RNA, 19 nt, Artificial Sequence
  Description of Artificial Sequence: Synthetic oligonucleotide
uguuaaaucagcaggaaag

SEQ ID NO: 2141525 - RNA, 19 nt, Artificial Sequence
  Description of Artificial Sequence: Synthetic oligonucleotide
cuuauuauaggcuuguucc

SEQ ID NO: 2141526 - RNA, 19 nt, Artificial Sequence
  Description of Artificial Sequence: Synthetic oligonucleotide
aaaucuuuuaugucuuagc

SEQ ID NO: 2141527 - RNA, 19 nt, Artificial Sequence
  Description of Artificial Sequence: Synthetic oligonucleotide
aaucuaaaaucuuuuaugu

SEQ ID NO: 2141528 - RNA, 19 nt, Artificial Sequence
  Description of Artificial Sequence: Synthetic oligonucleotide
aaaagguagccauacuagc

SEQ ID NO: 2141529 - RNA, 19 nt, Artificial Sequence
  Description of Artificial Sequence: Synthetic oligonucleotide
gaugacaaaaucuaaaauc

SEQ ID NO: 2141530 - RNA, 19 nt, Artificial Sequence
  Description of Artificial Sequence: Synthetic oligonucleotide
ugugugauuaaauuggugc

SEQ ID NO: 2141531 - RNA, 19 nt, Artificial Sequence
  Description of Artificial Sequence: Synthetic oligonucleotide
uagugugugauuaaauugg

SEQ ID NO: 2141532 - RNA, 19 nt, Artificial Sequence
  Description of Artificial Sequence: Synthetic oligonucleotide
auuaaauuggugcugcccg

SEQ ID NO: 2141533 - RNA, 19 nt, Artificial Sequence
  Description of Artificial Sequence: Synthetic oligonucleotide
aaucagauggcguuucugg

SEQ ID NO: 2141534 - RNA, 19 nt, Artificial Sequence
  Description of Artificial Sequence: Synthetic oligonucleotide
aaaauccugauacuaaugu

SEQ ID NO: 2141535 - RNA, 19 nt, Artificial Sequence
  Description of Artificial Sequence: Synthetic oligonucleotide
aaucuuuuaugucuuagca

SEQ ID NO: 2141536 - RNA, 19 nt, Artificial Sequence
  Description of Artificial Sequence: Synthetic oligonucleotide
auuggauuaaaagagcuac

SEQ ID NO: 2141537 - RNA, 19 nt, Artificial Sequence
  Description of Artificial Sequence: Synthetic oligonucleotide
aucuuaaacugccucauac

SEQ ID NO: 2141538 - RNA, 19 nt, Artificial Sequence
  Description of Artificial Sequence: Synthetic oligonucleotide
aaagguagccauacuagcc

SEQ ID NO: 2141539 - RNA, 19 nt, Artificial Sequence
  Description of Artificial Sequence: Synthetic oligonucleotide
uacagaaugacacuugccu

SEQ ID NO: 2141540 - RNA, 19 nt, Artificial Sequence
  Description of Artificial Sequence: Synthetic oligonucleotide
aacugccucauacagaaug

SEQ ID NO: 2141541 - RNA, 19 nt, Artificial Sequence
  Description of Artificial Sequence: Synthetic oligonucleotide
agugccuuaucuuaaacug

SEQ ID NO: 2141542 - RNA, 19 nt, Artificial Sequence
  Description of Artificial Sequence: Synthetic oligonucleotide
aguucaguaguccuguuag

SEQ ID NO: 2141543 - RNA, 19 nt, Artificial Sequence
  Description of Artificial Sequence: Synthetic oligonucleotide
uuuuauucugauuagccau

SEQ ID NO: 2141544 - RNA, 19 nt, Artificial Sequence
  Description of Artificial Sequence: Synthetic oligonucleotide
aaaagagcuacugagaaua

SEQ ID NO: 2141545 - RNA, 19 nt, Artificial Sequence
  Description of Artificial Sequence: Synthetic oligonucleotide
aaaccuagggcgcuugggg

SEQ ID NO: 2141546 - RNA, 19 nt, Artificial Sequence
  Description of Artificial Sequence: Synthetic oligonucleotide
uucuccauagcacucucgg

SEQ ID NO: 2141547 - RNA, 19 nt, Artificial Sequence
  Description of Artificial Sequence: Synthetic oligonucleotide
uauucuucuucuugggagg

SEQ ID NO: 2141548 - RNA, 19 nt, Artificial Sequence
  Description of Artificial Sequence: Synthetic oligonucleotide
uuugugaucugaaucagau

SEQ ID NO: 2141549 - RNA, 19 nt, Artificial Sequence
  Description of Artificial Sequence: Synthetic oligonucleotide
aauaugcaucagucgacac

SEQ ID NO: 2141550 - RNA, 19 nt, Artificial Sequence
  Description of Artificial Sequence: Synthetic oligonucleotide
aaauccugauacuaaugug

SEQ ID NO: 2141551 - RNA, 19 nt, Artificial Sequence
  Description of Artificial Sequence: Synthetic oligonucleotide
ugauuggauuaaaagagcu

SEQ ID NO: 2141552 - RNA, 19 nt, Artificial Sequence
  Description of Artificial Sequence: Synthetic oligonucleotide
uuuacagagacccuuuaau

SEQ ID NO: 2141553 - RNA, 19 nt, Artificial Sequence
  Description of Artificial Sequence: Synthetic oligonucleotide
aauccugauacuaauguga

SEQ ID NO: 2141554 - RNA, 19 nt, Artificial Sequence
  Description of Artificial Sequence: Synthetic oligonucleotide
uaaaauccugauacuaaug

SEQ ID NO: 2141555 - RNA, 19 nt, Artificial Sequence
  Description of Artificial Sequence: Synthetic oligonucleotide
uucaguaguccuguuagcg

SEQ ID NO: 2141556 - RNA, 19 nt, Artificial Sequence
  Description of Artificial Sequence: Synthetic oligonucleotide
acuaugucgguucuucuuc

SEQ ID NO: 2141557 - RNA, 19 nt, Artificial Sequence
  Description of Artificial Sequence: Synthetic oligonucleotide
gaucaaucaucccuggcag

SEQ ID NO: 2141558 - RNA, 19 nt, Artificial Sequence
  Description of Artificial Sequence: Synthetic oligonucleotide
uaugcaucagucgacacug

SEQ ID NO: 2141559 - RNA, 19 nt, Artificial Sequence
  Description of Artificial Sequence: Synthetic oligonucleotide
ugccuuaucuuaaacugcc

SEQ ID NO: 2141560 - RNA, 19 nt, Artificial Sequence
  Description of Artificial Sequence: Synthetic oligonucleotide
agaucaaucaucccuggca

SEQ ID NO: 2141561 - RNA, 19 nt, Artificial Sequence
  Description of Artificial Sequence: Synthetic oligonucleotide
aauaaaauccugauacuaa

SEQ ID NO: 2141562 - RNA, 19 nt, Artificial Sequence
  Description of Artificial Sequence: Synthetic oligonucleotide
cugagcuccaaacagcgcg

SEQ ID NO: 2141563 - RNA, 19 nt, Artificial Sequence
  Description of Artificial Sequence: Synthetic oligonucleotide
gauacuaaugugaugacaa

SEQ ID NO: 2141564 - RNA, 19 nt, Artificial Sequence
  Description of Artificial Sequence: Synthetic oligonucleotide
acagaaugacacuugccuc

SEQ ID NO: 2141565 - RNA, 19 nt, Artificial Sequence
  Description of Artificial Sequence: Synthetic oligonucleotide
uagccagucuguuaaauca

SEQ ID NO: 2141566 - RNA, 19 nt, Artificial Sequence
  Description of Artificial Sequence: Synthetic oligonucleotide
ucagauggcguuucugggg

SEQ ID NO: 2141567 - RNA, 19 nt, Artificial Sequence
  Description of Artificial Sequence: Synthetic oligonucleotide
uccuuuuccguucaggauc

SEQ ID NO: 2141568 - RNA, 19 nt, Artificial Sequence
  Description of Artificial Sequence: Synthetic oligonucleotide
aauucuccauagcacucuc

SEQ ID NO: 2141569 - RNA, 19 nt, Artificial Sequence
  Description of Artificial Sequence: Synthetic oligonucleotide
agggagaucaaucaucccu

SEQ ID NO: 2141570 - RNA, 19 nt, Artificial Sequence
  Description of Artificial Sequence: Synthetic oligonucleotide
aggcccgaaaccuagggcg

SEQ ID NO: 2141571 - RNA, 19 nt, Artificial Sequence
  Description of Artificial Sequence: Synthetic oligonucleotide
uggauuaaaagagcuacug

SEQ ID NO: 2141572 - RNA, 19 nt, Artificial Sequence
  Description of Artificial Sequence: Synthetic oligonucleotide
aacgggccaguauggaggc

SEQ ID NO: 2141573 - RNA, 19 nt, Artificial Sequence
  Description of Artificial Sequence: Synthetic oligonucleotide
ucaaugagggagcggaggc

SEQ ID NO: 2141574 - RNA, 19 nt, Artificial Sequence
  Description of Artificial Sequence: Synthetic oligonucleotide
uggugggucagccugagcu

SEQ ID NO: 2141575 - RNA, 19 nt, Artificial Sequence
  Description of Artificial Sequence: Synthetic oligonucleotide
uguagugugugauuaaauu

SEQ ID NO: 2141576 - RNA, 19 nt, Artificial Sequence
  Description of Artificial Sequence: Synthetic oligonucleotide
cuugggaggcugaauaugc

SEQ ID NO: 2141577 - RNA, 19 nt, Artificial Sequence
  Description of Artificial Sequence: Synthetic oligonucleotide
uuaaacugccucauacaga

SEQ ID NO: 2141578 - RNA, 19 nt, Artificial Sequence
  Description of Artificial Sequence: Synthetic oligonucleotide
ucuuaaacugccucauaca

SEQ ID NO: 2141579 - RNA, 19 nt, Artificial Sequence
  Description of Artificial Sequence: Synthetic oligonucleotide
ugaauaugcaucagucgac

SEQ ID NO: 2141580 - RNA, 19 nt, Artificial Sequence
  Description of Artificial Sequence: Synthetic oligonucleotide
uuaaaucagcaggaaagcc

SEQ ID NO: 2141581 - RNA, 19 nt, Artificial Sequence
  Description of Artificial Sequence: Synthetic oligonucleotide
uuuaugcuugugcuuauuc

SEQ ID NO: 2141582 - RNA, 19 nt, Artificial Sequence
  Description of Artificial Sequence: Synthetic oligonucleotide
agccauacuagccagucug

SEQ ID NO: 2141583 - RNA, 19 nt, Artificial Sequence
  Description of Artificial Sequence: Synthetic oligonucleotide
ucauacagaaugacacuug

SEQ ID NO: 2141584 - RNA, 19 nt, Artificial Sequence
  Description of Artificial Sequence: Synthetic oligonucleotide
aaguuacuuagcuucuccu

SEQ ID NO: 2141585 - RNA, 19 nt, Artificial Sequence
  Description of Artificial Sequence: Synthetic oligonucleotide
uuuccguucaggauccucu

SEQ ID NO: 2141586 - RNA, 19 nt, Artificial Sequence
  Description of Artificial Sequence: Synthetic oligonucleotide
uuaugcuugugcuuauucu

SEQ ID NO: 2141587 - RNA, 19 nt, Artificial Sequence
  Description of Artificial Sequence: Synthetic oligonucleotide
gauuaaauuggugcugccc

SEQ ID NO: 2141588 - RNA, 19 nt, Artificial Sequence
  Description of Artificial Sequence: Synthetic oligonucleotide
uuagcagugccuuaucuua

SEQ ID NO: 2141589 - RNA, 19 nt, Artificial Sequence
  Description of Artificial Sequence: Synthetic oligonucleotide
gagaauaggaggcuucuca

SEQ ID NO: 2141590 - RNA, 19 nt, Artificial Sequence
  Description of Artificial Sequence: Synthetic oligonucleotide
cugaauaugcaucagucga

SEQ ID NO: 2141591 - RNA, 19 nt, Artificial Sequence
  Description of Artificial Sequence: Synthetic oligonucleotide
ugugauuaaauuggugcug

SEQ ID NO: 2141592 - RNA, 19 nt, Artificial Sequence
  Description of Artificial Sequence: Synthetic oligonucleotide
aaucaucccuggcagguca

SEQ ID NO: 2141593 - RNA, 19 nt, Artificial Sequence
  Description of Artificial Sequence: Synthetic oligonucleotide
uuuuaugucuuagcagugc

SEQ ID NO: 2141594 - RNA, 19 nt, Artificial Sequence
  Description of Artificial Sequence: Synthetic oligonucleotide
cuaaugugaugacaaaauc

SEQ ID NO: 2141595 - RNA, 19 nt, Artificial Sequence
  Description of Artificial Sequence: Synthetic oligonucleotide
caacgggccaguauggagg

SEQ ID NO: 2141596 - RNA, 19 nt, Artificial Sequence
  Description of Artificial Sequence: Synthetic oligonucleotide
aaacagcgcggugaaauuc

SEQ ID NO: 2141597 - RNA, 19 nt, Artificial Sequence
  Description of Artificial Sequence: Synthetic oligonucleotide
cuuaucuuaaacugccuca

SEQ ID NO: 2141598 - RNA, 19 nt, Artificial Sequence
  Description of Artificial Sequence: Synthetic oligonucleotide
gguggucuggacuaugucg

SEQ ID NO: 2141599 - RNA, 19 nt, Artificial Sequence
  Description of Artificial Sequence: Synthetic oligonucleotide
auacuagccagucuguuaa

SEQ ID NO: 2141600 - RNA, 19 nt, Artificial Sequence
  Description of Artificial Sequence: Synthetic oligonucleotide
aucagauggcguuucuggg

SEQ ID NO: 2141601 - RNA, 19 nt, Artificial Sequence
  Description of Artificial Sequence: Synthetic oligonucleotide
ugagcuccaaacagcgcgg

SEQ ID NO: 2141602 - RNA, 19 nt, Artificial Sequence
  Description of Artificial Sequence: Synthetic oligonucleotide
guuaaaucagcaggaaagc

SEQ ID NO: 2141603 - RNA, 19 nt, Artificial Sequence
  Description of Artificial Sequence: Synthetic oligonucleotide
aagagcuacugagaauagg

SEQ ID NO: 2141604 - RNA, 19 nt, Artificial Sequence
  Description of Artificial Sequence: Synthetic oligonucleotide
uuuuacagagacccuuuaa

SEQ ID NO: 2141605 - RNA, 19 nt, Artificial Sequence
  Description of Artificial Sequence: Synthetic oligonucleotide
caggcaggaaguuacuuag

SEQ ID NO: 2141606 - RNA, 19 nt, Artificial Sequence
  Description of Artificial Sequence: Synthetic oligonucleotide
uuuugugaucugaaucaga

SEQ ID NO: 2141607 - RNA, 19 nt, Artificial Sequence
  Description of Artificial Sequence: Synthetic oligonucleotide
ugcauuacccgggaucugg

SEQ ID NO: 2141608 - RNA, 19 nt, Artificial Sequence
  Description of Artificial Sequence: Synthetic oligonucleotide
uauggaggcggaaaccaga

SEQ ID NO: 2141609 - RNA, 19 nt, Artificial Sequence
  Description of Artificial Sequence: Synthetic oligonucleotide
auaugcaucagucgacacu

SEQ ID NO: 2141610 - RNA, 19 nt, Artificial Sequence
  Description of Artificial Sequence: Synthetic oligonucleotide
ucuuagcagugccuuaucu

SEQ ID NO: 2141611 - RNA, 19 nt, Artificial Sequence
  Description of Artificial Sequence: Synthetic oligonucleotide
ggaggcggaaaccagacag

SEQ ID NO: 2141612 - RNA, 19 nt, Artificial Sequence
  Description of Artificial Sequence: Synthetic oligonucleotide
uuacuuagcuucuccuuca

SEQ ID NO: 2141613 - RNA, 19 nt, Artificial Sequence
  Description of Artificial Sequence: Synthetic oligonucleotide
guugucaugggagccaggg

SEQ ID NO: 2141614 - RNA, 19 nt, Artificial Sequence
  Description of Artificial Sequence: Synthetic oligonucleotide
uuggauuaaaagagcuacu

SEQ ID NO: 2141615 - RNA, 19 nt, Artificial Sequence
  Description of Artificial Sequence: Synthetic oligonucleotide
gggaacuucccauaccugg

SEQ ID NO: 2141616 - RNA, 19 nt, Artificial Sequence
  Description of Artificial Sequence: Synthetic oligonucleotide
caauucccgcauaagguag

SEQ ID NO: 2141617 - RNA, 19 nt, Artificial Sequence
  Description of Artificial Sequence: Synthetic oligonucleotide
agagcuacugagaauagga

SEQ ID NO: 2141618 - RNA, 19 nt, Artificial Sequence
  Description of Artificial Sequence: Synthetic oligonucleotide
uuacagagacccuuuaauu

SEQ ID NO: 2141619 - RNA, 19 nt, Artificial Sequence
  Description of Artificial Sequence: Synthetic oligonucleotide
agaaggggccgcuuccagc

SEQ ID NO: 2141620 - RNA, 19 nt, Artificial Sequence
  Description of Artificial Sequence: Synthetic oligonucleotide
auaagguagaaggggccgc

SEQ ID NO: 2141621 - RNA, 19 nt, Artificial Sequence
  Description of Artificial Sequence: Synthetic oligonucleotide
ugauacuaaugugaugaca

SEQ ID NO: 2141622 - RNA, 19 nt, Artificial Sequence
  Description of Artificial Sequence: Synthetic oligonucleotide
agcauggucccugugauug

SEQ ID NO: 2141623 - RNA, 19 nt, Artificial Sequence
  Description of Artificial Sequence: Synthetic oligonucleotide
ucagucgacacugcucugg

SEQ ID NO: 2141624 - RNA, 19 nt, Artificial Sequence
  Description of Artificial Sequence: Synthetic oligonucleotide
uaggaggcuucucaaugag

SEQ ID NO: 2141625 - RNA, 19 nt, Artificial Sequence
  Description of Artificial Sequence: Synthetic oligonucleotide
auacagaaugacacuugcc

SEQ ID NO: 2141626 - RNA, 19 nt, Artificial Sequence
  Description of Artificial Sequence: Synthetic oligonucleotide
acuaaugugaugacaaaau

SEQ ID NO: 2141627 - RNA, 19 nt, Artificial Sequence
  Description of Artificial Sequence: Synthetic oligonucleotide
ccugugauuggauuaaaag

SEQ ID NO: 2141628 - RNA, 19 nt, Artificial Sequence
  Description of Artificial Sequence: Synthetic oligonucleotide
uguuagcggaggcugcugc

SEQ ID NO: 2141629 - RNA, 19 nt, Artificial Sequence
  Description of Artificial Sequence: Synthetic oligonucleotide
guggucuggacuaugucgg

SEQ ID NO: 2141630 - RNA, 19 nt, Artificial Sequence
  Description of Artificial Sequence: Synthetic oligonucleotide
cuuuuaugucuuagcagug

SEQ ID NO: 2141631 - RNA, 19 nt, Artificial Sequence
  Description of Artificial Sequence: Synthetic oligonucleotide
gcugaauaugcaucagucg

SEQ ID NO: 2141632 - RNA, 19 nt, Artificial Sequence
  Description of Artificial Sequence: Synthetic oligonucleotide
ucaaucaucccuggcaggu

SEQ ID NO: 2141633 - RNA, 19 nt, Artificial Sequence
  Description of Artificial Sequence: Synthetic oligonucleotide
gugauuaaauuggugcugc

SEQ ID NO: 2141634 - RNA, 19 nt, Artificial Sequence
  Description of Artificial Sequence: Synthetic oligonucleotide
auaggaggcuucucaauga

SEQ ID NO: 2141635 - RNA, 19 nt, Artificial Sequence
  Description of Artificial Sequence: Synthetic oligonucleotide
ucccacagaacuuauuaua

SEQ ID NO: 2141636 - RNA, 19 nt, Artificial Sequence
  Description of Artificial Sequence: Synthetic oligonucleotide
aaauuggugcugcccguca

SEQ ID NO: 2141637 - RNA, 19 nt, Artificial Sequence
  Description of Artificial Sequence: Synthetic oligonucleotide
cuugucugcgcccgcaggg

SEQ ID NO: 2141638 - RNA, 19 nt, Artificial Sequence
  Description of Artificial Sequence: Synthetic oligonucleotide
uuaaauuggugcugcccgu

SEQ ID NO: 2141639 - RNA, 19 nt, Artificial Sequence
  Description of Artificial Sequence: Synthetic oligonucleotide
cuggcaacgggccaguaug

SEQ ID NO: 2141640 - RNA, 19 nt, Artificial Sequence
  Description of Artificial Sequence: Synthetic oligonucleotide
uaaaagagcuacugagaau

SEQ ID NO: 2141641 - RNA, 19 nt, Artificial Sequence
  Description of Artificial Sequence: Synthetic oligonucleotide
uuaucuuaaacugccucau

SEQ ID NO: 2141642 - RNA, 19 nt, Artificial Sequence
  Description of Artificial Sequence: Synthetic oligonucleotide
aucaaucaucccuggcagg

SEQ ID NO: 2141643 - RNA, 19 nt, Artificial Sequence
  Description of Artificial Sequence: Synthetic oligonucleotide
aguauggaggcggaaacca

SEQ ID NO: 2141644 - RNA, 19 nt, Artificial Sequence
  Description of Artificial Sequence: Synthetic oligonucleotide
ugauuaaauuggugcugcc

SEQ ID NO: 2141645 - RNA, 19 nt, Artificial Sequence
  Description of Artificial Sequence: Synthetic oligonucleotide
agaauaggaggcuucucaa

SEQ ID NO: 2141646 - RNA, 19 nt, Artificial Sequence
  Description of Artificial Sequence: Synthetic oligonucleotide
cucggcuccugcauuaccc

SEQ ID NO: 2141647 - RNA, 19 nt, Artificial Sequence
  Description of Artificial Sequence: Synthetic oligonucleotide
aucugaaucagauggcguu

SEQ ID NO: 2141648 - RNA, 19 nt, Artificial Sequence
  Description of Artificial Sequence: Synthetic oligonucleotide
uuguagugugugauuaaau

SEQ ID NO: 2141649 - RNA, 19 nt, Artificial Sequence
  Description of Artificial Sequence: Synthetic oligonucleotide
agcgcggugaaauucucca

SEQ ID NO: 2141650 - RNA, 19 nt, Artificial Sequence
  Description of Artificial Sequence: Synthetic oligonucleotide
uugugaucugaaucagaug

SEQ ID NO: 2141651 - RNA, 19 nt, Artificial Sequence
  Description of Artificial Sequence: Synthetic oligonucleotide
gaaaccuagggcgcuuggg

SEQ ID NO: 2141652 - RNA, 19 nt, Artificial Sequence
  Description of Artificial Sequence: Synthetic oligonucleotide
auuacccgggaucuggcgu

SEQ ID NO: 2141653 - RNA, 19 nt, Artificial Sequence
  Description of Artificial Sequence: Synthetic oligonucleotide
gugauuggauuaaaagagc

SEQ ID NO: 2141654 - RNA, 19 nt, Artificial Sequence
  Description of Artificial Sequence: Synthetic oligonucleotide
acagaacuuauuauaggcu

SEQ ID NO: 2141655 - RNA, 19 nt, Artificial Sequence
  Description of Artificial Sequence: Synthetic oligonucleotide
uuccaggcccgaaaccuag

SEQ ID NO: 2141656 - RNA, 19 nt, Artificial Sequence
  Description of Artificial Sequence: Synthetic oligonucleotide
agaacuuauuauaggcuug

SEQ ID NO: 2141657 - RNA, 19 nt, Artificial Sequence
  Description of Artificial Sequence: Synthetic oligonucleotide
acugagaauaggaggcuuc

SEQ ID NO: 2141658 - RNA, 19 nt, Artificial Sequence
  Description of Artificial Sequence: Synthetic oligonucleotide
aguuacuuagcuucuccuu

SEQ ID NO: 2141659 - RNA, 19 nt, Artificial Sequence
  Description of Artificial Sequence: Synthetic oligonucleotide
cucaaugagggagcggagg

SEQ ID NO: 2141660 - RNA, 19 nt, Artificial Sequence
  Description of Artificial Sequence: Synthetic oligonucleotide
gaaggggccgcuuccagca

SEQ ID NO: 2141661 - RNA, 19 nt, Artificial Sequence
  Description of Artificial Sequence: Synthetic oligonucleotide
gagaucaaucaucccuggc

SEQ ID NO: 2141662 - RNA, 19 nt, Artificial Sequence
  Description of Artificial Sequence: Synthetic oligonucleotide
gcggaaaccagacagcaug

SEQ ID NO: 2141663 - RNA, 19 nt, Artificial Sequence
  Description of Artificial Sequence: Synthetic oligonucleotide
ugcaucagucgacacugcu

SEQ ID NO: 2141664 - RNA, 19 nt, Artificial Sequence
  Description of Artificial Sequence: Synthetic oligonucleotide
ccugauacuaaugugauga

SEQ ID NO: 2141665 - RNA, 19 nt, Artificial Sequence
  Description of Artificial Sequence: Synthetic oligonucleotide
ucggcuccugcauuacccg

SEQ ID NO: 2141666 - RNA, 19 nt, Artificial Sequence
  Description of Artificial Sequence: Synthetic oligonucleotide
ucucaaugagggagcggag

SEQ ID NO: 2141667 - RNA, 19 nt, Artificial Sequence
  Description of Artificial Sequence: Synthetic oligonucleotide
gagcuacugagaauaggag

SEQ ID NO: 2141668 - RNA, 19 nt, Artificial Sequence
  Description of Artificial Sequence: Synthetic oligonucleotide
uggcaacgggccaguaugg

SEQ ID NO: 2141669 - RNA, 19 nt, Artificial Sequence
  Description of Artificial Sequence: Synthetic oligonucleotide
cccacagaacuuauuauag

SEQ ID NO: 2141670 - RNA, 19 nt, Artificial Sequence
  Description of Artificial Sequence: Synthetic oligonucleotide
agguagccauacuagccag

SEQ ID NO: 2141671 - RNA, 19 nt, Artificial Sequence
  Description of Artificial Sequence: Synthetic oligonucleotide
ucuccauagcacucucggc

SEQ ID NO: 2141672 - RNA, 19 nt, Artificial Sequence
  Description of Artificial Sequence: Synthetic oligonucleotide
aacagcgcggugaaauucu

SEQ ID NO: 2141673 - RNA, 19 nt, Artificial Sequence
  Description of Artificial Sequence: Synthetic oligonucleotide
ugaaucagauggcguuucu

SEQ ID NO: 2141674 - RNA, 19 nt, Artificial Sequence
  Description of Artificial Sequence: Synthetic oligonucleotide
uccugauacuaaugugaug

SEQ ID NO: 2141675 - RNA, 19 nt, Artificial Sequence
  Description of Artificial Sequence: Synthetic oligonucleotide
cauuacccgggaucuggcg

SEQ ID NO: 2141676 - RNA, 19 nt, Artificial Sequence
  Description of Artificial Sequence: Synthetic oligonucleotide
uggacuaugucgguucuuc

SEQ ID NO: 2141677 - RNA, 19 nt, Artificial Sequence
  Description of Artificial Sequence: Synthetic oligonucleotide
cugauacuaaugugaugac

SEQ ID NO: 2141678 - RNA, 19 nt, Artificial Sequence
  Description of Artificial Sequence: Synthetic oligonucleotide
cuucccacagaacuuauua

SEQ ID NO: 2141679 - RNA, 19 nt, Artificial Sequence
  Description of Artificial Sequence: Synthetic oligonucleotide
cugcccgucagcucugugc

SEQ ID NO: 2141680 - RNA, 19 nt, Artificial Sequence
  Description of Artificial Sequence: Synthetic oligonucleotide
gccucauacagaaugacac

SEQ ID NO: 2141681 - RNA, 19 nt, Artificial Sequence
  Description of Artificial Sequence: Synthetic oligonucleotide
uccauagcacucucggcuc

SEQ ID NO: 2141682 - RNA, 19 nt, Artificial Sequence
  Description of Artificial Sequence: Synthetic oligonucleotide
auaccuggguggucuggac

SEQ ID NO: 2141683 - RNA, 19 nt, Artificial Sequence
  Description of Artificial Sequence: Synthetic oligonucleotide
auggaggcggaaaccagac

SEQ ID NO: 2141684 - RNA, 19 nt, Artificial Sequence
  Description of Artificial Sequence: Synthetic oligonucleotide
aggcugaauaugcaucagu

SEQ ID NO: 2141685 - RNA, 19 nt, Artificial Sequence
  Description of Artificial Sequence: Synthetic oligonucleotide
ugggaacuucccauaccug

SEQ ID NO: 2141686 - RNA, 19 nt, Artificial Sequence
  Description of Artificial Sequence: Synthetic oligonucleotide
uccuuggcagaguucagua

SEQ ID NO: 2141687 - RNA, 19 nt, Artificial Sequence
  Description of Artificial Sequence: Synthetic oligonucleotide
uuccuuuuccguucaggau

SEQ ID NO: 2141688 - RNA, 19 nt, Artificial Sequence
  Description of Artificial Sequence: Synthetic oligonucleotide
ugucuuagcagugccuuau

SEQ ID NO: 2141689 - RNA, 19 nt, Artificial Sequence
  Description of Artificial Sequence: Synthetic oligonucleotide
uuccagguuguagugugug

SEQ ID NO: 2141690 - RNA, 19 nt, Artificial Sequence
  Description of Artificial Sequence: Synthetic oligonucleotide
uucuugggaggcugaauau

SEQ ID NO: 2141691 - RNA, 19 nt, Artificial Sequence
  Description of Artificial Sequence: Synthetic oligonucleotide
ugggaggcugaauaugcau

SEQ ID NO: 2141692 - RNA, 19 nt, Artificial Sequence
  Description of Artificial Sequence: Synthetic oligonucleotide
gcucuguuuaugcuugugc

SEQ ID NO: 2141693 - RNA, 19 nt, Artificial Sequence
  Description of Artificial Sequence: Synthetic oligonucleotide
gucuggacuaugucgguuc

SEQ ID NO: 2141694 - RNA, 19 nt, Artificial Sequence
  Description of Artificial Sequence: Synthetic oligonucleotide
gucgacacugcucuggcaa

SEQ ID NO: 2141695 - RNA, 19 nt, Artificial Sequence
  Description of Artificial Sequence: Synthetic oligonucleotide
ggagaucaaucaucccugg

SEQ ID NO: 2141696 - RNA, 19 nt, Artificial Sequence
  Description of Artificial Sequence: Synthetic oligonucleotide
gauuggauuaaaagagcua

SEQ ID NO: 2141697 - RNA, 19 nt, Artificial Sequence
  Description of Artificial Sequence: Synthetic oligonucleotide
uaccuggguggucuggacu

SEQ ID NO: 2141698 - RNA, 19 nt, Artificial Sequence
  Description of Artificial Sequence: Synthetic oligonucleotide
cuucuugggaggcugaaua

SEQ ID NO: 2141699 - RNA, 19 nt, Artificial Sequence
  Description of Artificial Sequence: Synthetic oligonucleotide
ucuggcaacgggccaguau

SEQ ID NO: 2141700 - RNA, 19 nt, Artificial Sequence
  Description of Artificial Sequence: Synthetic oligonucleotide
aauucccgcauaagguaga

SEQ ID NO: 2141701 - RNA, 19 nt, Artificial Sequence
  Description of Artificial Sequence: Synthetic oligonucleotide
gcggugaaauucuccauag

SEQ ID NO: 2141702 - RNA, 19 nt, Artificial Sequence
  Description of Artificial Sequence: Synthetic oligonucleotide
agugugugauuaaauuggu

SEQ ID NO: 2141703 - RNA, 19 nt, Artificial Sequence
  Description of Artificial Sequence: Synthetic oligonucleotide
uuagcggaggcugcugcug

SEQ ID NO: 2141704 - RNA, 19 nt, Artificial Sequence
  Description of Artificial Sequence: Synthetic oligonucleotide
uguuuaugcuugugcuuau

SEQ ID NO: 2141705 - RNA, 19 nt, Artificial Sequence
  Description of Artificial Sequence: Synthetic oligonucleotide
gugaucugaaucagauggc

SEQ ID NO: 2141706 - RNA, 19 nt, Artificial Sequence
  Description of Artificial Sequence: Synthetic oligonucleotide
uauaggcuuguuccagguu

SEQ ID NO: 2141707 - RNA, 19 nt, Artificial Sequence
  Description of Artificial Sequence: Synthetic oligonucleotide
uaaauuggugcugcccguc

SEQ ID NO: 2141708 - RNA, 19 nt, Artificial Sequence
  Description of Artificial Sequence: Synthetic oligonucleotide
cucuguuuaugcuugugcu

SEQ ID NO: 2141709 - RNA, 19 nt, Artificial Sequence
  Description of Artificial Sequence: Synthetic oligonucleotide
uugucugcgcccgcagggg

SEQ ID NO: 2141710 - RNA, 19 nt, Artificial Sequence
  Description of Artificial Sequence: Synthetic oligonucleotide
cuguuaaaucagcaggaaa

SEQ ID NO: 2141711 - RNA, 19 nt, Artificial Sequence
  Description of Artificial Sequence: Synthetic oligonucleotide
agccgacuugucugcgccc

SEQ ID NO: 2141712 - RNA, 19 nt, Artificial Sequence
  Description of Artificial Sequence: Synthetic oligonucleotide
ccuuuuccguucaggaucc

SEQ ID NO: 2141713 - RNA, 19 nt, Artificial Sequence
  Description of Artificial Sequence: Synthetic oligonucleotide
uuuccaggcccgaaaccua

SEQ ID NO: 2141714 - RNA, 19 nt, Artificial Sequence
  Description of Artificial Sequence: Synthetic oligonucleotide
caucagucgacacugcucu

SEQ ID NO: 2141715 - RNA, 19 nt, Artificial Sequence
  Description of Artificial Sequence: Synthetic oligonucleotide
guagccauacuagccaguc

SEQ ID NO: 2141716 - RNA, 19 nt, Artificial Sequence
  Description of Artificial Sequence: Synthetic oligonucleotide
uagccauacuagccagucu

SEQ ID NO: 2141717 - RNA, 19 nt, Artificial Sequence
  Description of Artificial Sequence: Synthetic oligonucleotide
gggagaucaaucaucccug

SEQ ID NO: 2141718 - RNA, 19 nt, Artificial Sequence
  Description of Artificial Sequence: Synthetic oligonucleotide
gaacuuauuauaggcuugu

SEQ ID NO: 2141719 - RNA, 19 nt, Artificial Sequence
  Description of Artificial Sequence: Synthetic oligonucleotide
cagaaugacacuugccucu

SEQ ID NO: 2141720 - RNA, 19 nt, Artificial Sequence
  Description of Artificial Sequence: Synthetic oligonucleotide
ccuuaucuuaaacugccuc

SEQ ID NO: 2141721 - RNA, 19 nt, Artificial Sequence
  Description of Artificial Sequence: Synthetic oligonucleotide
ugucugcgcccgcaggggc

SEQ ID NO: 2141722 - RNA, 19 nt, Artificial Sequence
  Description of Artificial Sequence: Synthetic oligonucleotide
caguauggaggcggaaacc

SEQ ID NO: 2141723 - RNA, 19 nt, Artificial Sequence
  Description of Artificial Sequence: Synthetic oligonucleotide
guuguagugugugauuaaa

SEQ ID NO: 2141724 - RNA, 19 nt, Artificial Sequence
  Description of Artificial Sequence: Synthetic oligonucleotide
ggcugaauaugcaucaguc

SEQ ID NO: 2141725 - RNA, 19 nt, Artificial Sequence
  Description of Artificial Sequence: Synthetic oligonucleotide
gaguucaguaguccuguua

SEQ ID NO: 2141726 - RNA, 19 nt, Artificial Sequence
  Description of Artificial Sequence: Synthetic oligonucleotide
cuccauagcacucucggcu

SEQ ID NO: 2141727 - RNA, 19 nt, Artificial Sequence
  Description of Artificial Sequence: Synthetic oligonucleotide
aggcaggaaguuacuuagc

SEQ ID NO: 2141728 - RNA, 19 nt, Artificial Sequence
  Description of Artificial Sequence: Synthetic oligonucleotide
cagccgacuugucugcgcc

SEQ ID NO: 2141729 - RNA, 19 nt, Artificial Sequence
  Description of Artificial Sequence: Synthetic oligonucleotide
guccuguuagcggaggcug

SEQ ID NO: 2141730 - RNA, 19 nt, Artificial Sequence
  Description of Artificial Sequence: Synthetic oligonucleotide
gaggcggaaaccagacagc

SEQ ID NO: 2141731 - RNA, 19 nt, Artificial Sequence
  Description of Artificial Sequence: Synthetic oligonucleotide
cauacuagccagucuguua

SEQ ID NO: 2141732 - RNA, 19 nt, Artificial Sequence
  Description of Artificial Sequence: Synthetic oligonucleotide
cagaacuuauuauaggcuu

SEQ ID NO: 2141733 - RNA, 19 nt, Artificial Sequence
  Description of Artificial Sequence: Synthetic oligonucleotide
cagucgacacugcucuggc

SEQ ID NO: 2141734 - RNA, 19 nt, Artificial Sequence
  Description of Artificial Sequence: Synthetic oligonucleotide
ucgacacugcucuggcaac

SEQ ID NO: 2141735 - RNA, 19 nt, Artificial Sequence
  Description of Artificial Sequence: Synthetic oligonucleotide
uuuuccguucaggauccuc

SEQ ID NO: 2141736 - RNA, 19 nt, Artificial Sequence
  Description of Artificial Sequence: Synthetic oligonucleotide
guaguccuguuagcggagg

SEQ ID NO: 2141737 - RNA, 19 nt, Artificial Sequence
  Description of Artificial Sequence: Synthetic oligonucleotide
caggcccgaaaccuagggc

SEQ ID NO: 2141738 - RNA, 19 nt, Artificial Sequence
  Description of Artificial Sequence: Synthetic oligonucleotide
auccugauacuaaugugau

SEQ ID NO: 2141739 - RNA, 19 nt, Artificial Sequence
  Description of Artificial Sequence: Synthetic oligonucleotide
uggaggcggaaaccagaca

SEQ ID NO: 2141740 - RNA, 19 nt, Artificial Sequence
  Description of Artificial Sequence: Synthetic oligonucleotide
uccguucaggauccucuuc

SEQ ID NO: 2141741 - RNA, 19 nt, Artificial Sequence
  Description of Artificial Sequence: Synthetic oligonucleotide
aguaguccuguuagcggag

SEQ ID NO: 2141742 - RNA, 19 nt, Artificial Sequence
  Description of Artificial Sequence: Synthetic oligonucleotide
uuacccgggaucuggcguu

SEQ ID NO: 2141743 - RNA, 19 nt, Artificial Sequence
  Description of Artificial Sequence: Synthetic oligonucleotide
ugagaauaggaggcuucuc

SEQ ID NO: 2141744 - RNA, 19 nt, Artificial Sequence
  Description of Artificial Sequence: Synthetic oligonucleotide
gcaacgggccaguauggag

SEQ ID NO: 2141745 - RNA, 19 nt, Artificial Sequence
  Description of Artificial Sequence: Synthetic oligonucleotide
aguccuguuagcggaggcu

SEQ ID NO: 2141746 - RNA, 19 nt, Artificial Sequence
  Description of Artificial Sequence: Synthetic oligonucleotide
cugggaacuucccauaccu

SEQ ID NO: 2141747 - RNA, 19 nt, Artificial Sequence
  Description of Artificial Sequence: Synthetic oligonucleotide
acuagccagucuguuaaau

SEQ ID NO: 2141748 - RNA, 19 nt, Artificial Sequence
  Description of Artificial Sequence: Synthetic oligonucleotide
gaauaggaggcuucucaau

SEQ ID NO: 2141749 - RNA, 19 nt, Artificial Sequence
  Description of Artificial Sequence: Synthetic oligonucleotide
cagggagaucaaucauccc

SEQ ID NO: 2141750 - RNA, 19 nt, Artificial Sequence
  Description of Artificial Sequence: Synthetic oligonucleotide
aacuuauuauaggcuuguu

SEQ ID NO: 2141751 - RNA, 19 nt, Artificial Sequence
  Description of Artificial Sequence: Synthetic oligonucleotide
cugaaucagauggcguuuc

SEQ ID NO: 2141752 - RNA, 19 nt, Artificial Sequence
  Description of Artificial Sequence: Synthetic oligonucleotide
ucugcgcccgcaggggccg

SEQ ID NO: 2141753 - RNA, 19 nt, Artificial Sequence
  Description of Artificial Sequence: Synthetic oligonucleotide
aaggggccgcuuccagcag

SEQ ID NO: 2141754 - RNA, 19 nt, Artificial Sequence
  Description of Artificial Sequence: Synthetic oligonucleotide
cagcgcggugaaauucucc

SEQ ID NO: 2141755 - RNA, 19 nt, Artificial Sequence
  Description of Artificial Sequence: Synthetic oligonucleotide
ccgcauaagguagaagggg

SEQ ID NO: 2141756 - RNA, 19 nt, Artificial Sequence
  Description of Artificial Sequence: Synthetic oligonucleotide
augugaugacaaaaucuaa

SEQ ID NO: 2141757 - RNA, 19 nt, Artificial Sequence
  Description of Artificial Sequence: Synthetic oligonucleotide
agccagggagaucaaucau

SEQ ID NO: 2141758 - RNA, 19 nt, Artificial Sequence
  Description of Artificial Sequence: Synthetic oligonucleotide
uaugucgguucuucuucuu

SEQ ID NO: 2141759 - RNA, 19 nt, Artificial Sequence
  Description of Artificial Sequence: Synthetic oligonucleotide
aacuggauccuggguccug

SEQ ID NO: 2141760 - RNA, 19 nt, Artificial Sequence
  Description of Artificial Sequence: Synthetic oligonucleotide
cagugccuuaucuuaaacu

SEQ ID NO: 2141761 - RNA, 19 nt, Artificial Sequence
  Description of Artificial Sequence: Synthetic oligonucleotide
gcuuccagcagccgacuug

SEQ ID NO: 2141762 - RNA, 19 nt, Artificial Sequence
  Description of Artificial Sequence: Synthetic oligonucleotide
cugccucauacagaaugac

SEQ ID NO: 2141763 - RNA, 19 nt, Artificial Sequence
  Description of Artificial Sequence: Synthetic oligonucleotide
gcaauucccgcauaaggua

SEQ ID NO: 2141764 - RNA, 19 nt, Artificial Sequence
  Description of Artificial Sequence: Synthetic oligonucleotide
uucccgcauaagguagaag

SEQ ID NO: 2141765 - RNA, 19 nt, Artificial Sequence
  Description of Artificial Sequence: Synthetic oligonucleotide
gacuaugucgguucuucuu

SEQ ID NO: 2141766 - RNA, 19 nt, Artificial Sequence
  Description of Artificial Sequence: Synthetic oligonucleotide
gcuucucaaugagggagcg

SEQ ID NO: 2141767 - RNA, 19 nt, Artificial Sequence
  Description of Artificial Sequence: Synthetic oligonucleotide
aucagucgacacugcucug

SEQ ID NO: 2141768 - RNA, 19 nt, Artificial Sequence
  Description of Artificial Sequence: Synthetic oligonucleotide
gaucugaaucagauggcgu

SEQ ID NO: 2141769 - RNA, 19 nt, Artificial Sequence
  Description of Artificial Sequence: Synthetic oligonucleotide
agucgacacugcucuggca

SEQ ID NO: 2141770 - RNA, 19 nt, Artificial Sequence
  Description of Artificial Sequence: Synthetic oligonucleotide
uuccguucaggauccucuu

SEQ ID NO: 2141771 - RNA, 19 nt, Artificial Sequence
  Description of Artificial Sequence: Synthetic oligonucleotide
ggcuuuccaggcccgaaac

SEQ ID NO: 2141772 - RNA, 19 nt, Artificial Sequence
  Description of Artificial Sequence: Synthetic oligonucleotide
cuuagcagugccuuaucuu

SEQ ID NO: 2141773 - RNA, 19 nt, Artificial Sequence
  Description of Artificial Sequence: Synthetic oligonucleotide
ugccgggcaauucccgcau

SEQ ID NO: 2141774 - RNA, 19 nt, Artificial Sequence
  Description of Artificial Sequence: Synthetic oligonucleotide
agaaugacacuugccucuu

SEQ ID NO: 2141775 - RNA, 19 nt, Artificial Sequence
  Description of Artificial Sequence: Synthetic oligonucleotide
ggcuucucaaugagggagc

SEQ ID NO: 2141776 - RNA, 19 nt, Artificial Sequence
  Description of Artificial Sequence: Synthetic oligonucleotide
gucuuagcagugccuuauc

SEQ ID NO: 2141777 - RNA, 19 nt, Artificial Sequence
  Description of Artificial Sequence: Synthetic oligonucleotide
ggggcggcuuuccaggccc

SEQ ID NO: 2141778 - RNA, 19 nt, Artificial Sequence
  Description of Artificial Sequence: Synthetic oligonucleotide
acagcgcggugaaauucuc

SEQ ID NO: 2141779 - RNA, 19 nt, Artificial Sequence
  Description of Artificial Sequence: Synthetic oligonucleotide
ggcaauucccgcauaaggu

SEQ ID NO: 2141780 - RNA, 19 nt, Artificial Sequence
  Description of Artificial Sequence: Synthetic oligonucleotide
gcagugccuuaucuuaaac

SEQ ID NO: 2141781 - RNA, 19 nt, Artificial Sequence
  Description of Artificial Sequence: Synthetic oligonucleotide
cucauacagaaugacacuu

SEQ ID NO: 2141782 - RNA, 19 nt, Artificial Sequence
  Description of Artificial Sequence: Synthetic oligonucleotide
agcagccgacuugucugcg

SEQ ID NO: 2141783 - RNA, 19 nt, Artificial Sequence
  Description of Artificial Sequence: Synthetic oligonucleotide
ccaggcccgaaaccuaggg

SEQ ID NO: 2141784 - RNA, 19 nt, Artificial Sequence
  Description of Artificial Sequence: Synthetic oligonucleotide
gcauggucccugugauugg

SEQ ID NO: 2141785 - RNA, 19 nt, Artificial Sequence
  Description of Artificial Sequence: Synthetic oligonucleotide
gccagucuguuaaaucagc

SEQ ID NO: 2141786 - RNA, 19 nt, Artificial Sequence
  Description of Artificial Sequence: Synthetic oligonucleotide
uccuggguccugcucuguu

SEQ ID NO: 2141787 - RNA, 19 nt, Artificial Sequence
  Description of Artificial Sequence: Synthetic oligonucleotide
cccgcaggggccgaggucg

SEQ ID NO: 2141788 - RNA, 19 nt, Artificial Sequence
  Description of Artificial Sequence: Synthetic oligonucleotide
cauaccuggguggucugga

SEQ ID NO: 2141789 - RNA, 19 nt, Artificial Sequence
  Description of Artificial Sequence: Synthetic oligonucleotide
ggucccugugauuggauua

SEQ ID NO: 2141790 - RNA, 19 nt, Artificial Sequence
  Description of Artificial Sequence: Synthetic oligonucleotide
guagaaggggccgcuucca

SEQ ID NO: 2141791 - RNA, 19 nt, Artificial Sequence
  Description of Artificial Sequence: Synthetic oligonucleotide
agaguucaguaguccuguu

SEQ ID NO: 2141792 - RNA, 19 nt, Artificial Sequence
  Description of Artificial Sequence: Synthetic oligonucleotide
caaucaucccuggcagguc

SEQ ID NO: 2141793 - RNA, 19 nt, Artificial Sequence
  Description of Artificial Sequence: Synthetic oligonucleotide
auucccgcauaagguagaa

SEQ ID NO: 2141794 - RNA, 19 nt, Artificial Sequence
  Description of Artificial Sequence: Synthetic oligonucleotide
gccgacuugucugcgcccg

SEQ ID NO: 2141795 - RNA, 19 nt, Artificial Sequence
  Description of Artificial Sequence: Synthetic oligonucleotide
gucccugugauuggauuaa

SEQ ID NO: 2141796 - RNA, 19 nt, Artificial Sequence
  Description of Artificial Sequence: Synthetic oligonucleotide
cauggucccugugauugga

SEQ ID NO: 2141797 - RNA, 19 nt, Artificial Sequence
  Description of Artificial Sequence: Synthetic oligonucleotide
gcugccgggcaauucccgc

SEQ ID NO: 2141798 - RNA, 19 nt, Artificial Sequence
  Description of Artificial Sequence: Synthetic oligonucleotide
gcaucagucgacacugcuc

SEQ ID NO: 2141799 - RNA, 19 nt, Artificial Sequence
  Description of Artificial Sequence: Synthetic oligonucleotide
uggguccugcucuguuuau

SEQ ID NO: 2141800 - RNA, 19 nt, Artificial Sequence
  Description of Artificial Sequence: Synthetic oligonucleotide
cuguuagcggaggcugcug

SEQ ID NO: 2141801 - RNA, 19 nt, Artificial Sequence
  Description of Artificial Sequence: Synthetic oligonucleotide
guuagcggaggcugcugcu

SEQ ID NO: 2141802 - RNA, 19 nt, Artificial Sequence
  Description of Artificial Sequence: Synthetic oligonucleotide
cuggguccugcucuguuua

SEQ ID NO: 2141803 - RNA, 19 nt, Artificial Sequence
  Description of Artificial Sequence: Synthetic oligonucleotide
aaacugccucauacagaau

SEQ ID NO: 2141804 - RNA, 19 nt, Artificial Sequence
  Description of Artificial Sequence: Synthetic oligonucleotide
cugccgggcaauucccgca

SEQ ID NO: 2141805 - RNA, 19 nt, Artificial Sequence
  Description of Artificial Sequence: Synthetic oligonucleotide
ucccugugauuggauuaaa

SEQ ID NO: 2141806 - RNA, 19 nt, Artificial Sequence
  Description of Artificial Sequence: Synthetic oligonucleotide
cugagaauaggaggcuucu

SEQ ID NO: 2141807 - RNA, 19 nt, Artificial Sequence
  Description of Artificial Sequence: Synthetic oligonucleotide
gcagccgacuugucugcgc

SEQ ID NO: 2141808 - RNA, 19 nt, Artificial Sequence
  Description of Artificial Sequence: Synthetic oligonucleotide
uccaaacagcgcggugaaa

SEQ ID NO: 2141809 - RNA, 19 nt, Artificial Sequence
  Description of Artificial Sequence: Synthetic oligonucleotide
gucugcgcccgcaggggcc

SEQ ID NO: 2141810 - RNA, 19 nt, Artificial Sequence
  Description of Artificial Sequence: Synthetic oligonucleotide
gagcggaggcugcuguugu

SEQ ID NO: 2141811 - RNA, 19 nt, Artificial Sequence
  Description of Artificial Sequence: Synthetic oligonucleotide
cucucggcuccugcauuac

SEQ ID NO: 2141812 - RNA, 19 nt, Artificial Sequence
  Description of Artificial Sequence: Synthetic oligonucleotide
gcauuacccgggaucuggc

SEQ ID NO: 2141813 - RNA, 19 nt, Artificial Sequence
  Description of Artificial Sequence: Synthetic oligonucleotide
cuacugagaauaggaggcu

SEQ ID NO: 2141814 - RNA, 19 nt, Artificial Sequence
  Description of Artificial Sequence: Synthetic oligonucleotide
ggcccgaaaccuagggcgc

SEQ ID NO: 2141815 - RNA, 19 nt, Artificial Sequence
  Description of Artificial Sequence: Synthetic oligonucleotide
ggggccgaggucgccgucg

SEQ ID NO: 2141816 - RNA, 19 nt, Artificial Sequence
  Description of Artificial Sequence: Synthetic oligonucleotide
caaacagcgcggugaaauu

SEQ ID NO: 2141817 - RNA, 19 nt, Artificial Sequence
  Description of Artificial Sequence: Synthetic oligonucleotide
cugcauuacccgggaucug

SEQ ID NO: 2141818 - RNA, 19 nt, Artificial Sequence
  Description of Artificial Sequence: Synthetic oligonucleotide
aggggccgaggucgccguc

SEQ ID NO: 2141819 - RNA, 19 nt, Artificial Sequence
  Description of Artificial Sequence: Synthetic oligonucleotide
cuucccauaccuggguggu

SEQ ID NO: 2141820 - RNA, 19 nt, Artificial Sequence
  Description of Artificial Sequence: Synthetic oligonucleotide
caugggagccagggagauc

SEQ ID NO: 2141821 - RNA, 19 nt, Artificial Sequence
  Description of Artificial Sequence: Synthetic oligonucleotide
cggugaaauucuccauagc

SEQ ID NO: 2141822 - RNA, 19 nt, Artificial Sequence
  Description of Artificial Sequence: Synthetic oligonucleotide
acgggccaguauggaggcg

SEQ ID NO: 2141823 - RNA, 19 nt, Artificial Sequence
  Description of Artificial Sequence: Synthetic oligonucleotide
ggccgcuuccagcagccga

SEQ ID NO: 2141824 - RNA, 19 nt, Artificial Sequence
  Description of Artificial Sequence: Synthetic oligonucleotide
cgaaaccuagggcgcuugg

SEQ ID NO: 2141825 - RNA, 19 nt, Artificial Sequence
  Description of Artificial Sequence: Synthetic oligonucleotide
ccauaccuggguggucugg

SEQ ID NO: 2141826 - RNA, 19 nt, Artificial Sequence
  Description of Artificial Sequence: Synthetic oligonucleotide
cugcuggccugggaacuuc

SEQ ID NO: 2141827 - RNA, 19 nt, Artificial Sequence
  Description of Artificial Sequence: Synthetic oligonucleotide
ggacuaugucgguucuucu

SEQ ID NO: 2141828 - RNA, 19 nt, Artificial Sequence
  Description of Artificial Sequence: Synthetic oligonucleotide
ccugcauuacccgggaucu

SEQ ID NO: 2141829 - RNA, 19 nt, Artificial Sequence
  Description of Artificial Sequence: Synthetic oligonucleotide
ccuucacuuucuucccaca

SEQ ID NO: 2141830 - RNA, 19 nt, Artificial Sequence
  Description of Artificial Sequence: Synthetic oligonucleotide
cagacagcauggucccugu

SEQ ID NO: 2141831 - RNA, 19 nt, Artificial Sequence
  Description of Artificial Sequence: Synthetic oligonucleotide
ggggccgcuuccagcagcc

SEQ ID NO: 2141832 - RNA, 19 nt, Artificial Sequence
  Description of Artificial Sequence: Synthetic oligonucleotide
cccugugauuggauuaaaa

SEQ ID NO: 2141833 - RNA, 19 nt, Artificial Sequence
  Description of Artificial Sequence: Synthetic oligonucleotide
accagacagcauggucccu

SEQ ID NO: 2141834 - RNA, 19 nt, Artificial Sequence
  Description of Artificial Sequence: Synthetic oligonucleotide
caaugagggagcggaggcu

SEQ ID NO: 2141835 - RNA, 19 nt, Artificial Sequence
  Description of Artificial Sequence: Synthetic oligonucleotide
ggcaacgggccaguaugga

SEQ ID NO: 2141836 - RNA, 19 nt, Artificial Sequence
  Description of Artificial Sequence: Synthetic oligonucleotide
guuuaugcuugugcuuauu

SEQ ID NO: 2141837 - RNA, 19 nt, Artificial Sequence
  Description of Artificial Sequence: Synthetic oligonucleotide
auccuggguccugcucugu

SEQ ID NO: 2141838 - RNA, 19 nt, Artificial Sequence
  Description of Artificial Sequence: Synthetic oligonucleotide
ggaaaccagacagcauggu

SEQ ID NO: 2141839 - RNA, 19 nt, Artificial Sequence
  Description of Artificial Sequence: Synthetic oligonucleotide
gucaggcaggaaguuacuu

SEQ ID NO: 2141840 - RNA, 19 nt, Artificial Sequence
  Description of Artificial Sequence: Synthetic oligonucleotide
ugcgcccgcaggggccgag

SEQ ID NO: 2141841 - RNA, 19 nt, Artificial Sequence
  Description of Artificial Sequence: Synthetic oligonucleotide
gcggggccgugccugggcc

SEQ ID NO: 2141842 - RNA, 19 nt, Artificial Sequence
  Description of Artificial Sequence: Synthetic oligonucleotide
cauagcacucucggcuccu

SEQ ID NO: 2141843 - RNA, 19 nt, Artificial Sequence
  Description of Artificial Sequence: Synthetic oligonucleotide
ccgaaaccuagggcgcuug

SEQ ID NO: 2141844 - RNA, 19 nt, Artificial Sequence
  Description of Artificial Sequence: Synthetic oligonucleotide
cgcggugaaauucuccaua

SEQ ID NO: 2141845 - RNA, 19 nt, Artificial Sequence
  Description of Artificial Sequence: Synthetic oligonucleotide
gcugcccgucagcucugug

SEQ ID NO: 2141846 - RNA, 19 nt, Artificial Sequence
  Description of Artificial Sequence: Synthetic oligonucleotide
cgggcaauucccgcauaag

SEQ ID NO: 2141847 - RNA, 19 nt, Artificial Sequence
  Description of Artificial Sequence: Synthetic oligonucleotide
cuggauccuggguccugcu

SEQ ID NO: 2141848 - RNA, 19 nt, Artificial Sequence
  Description of Artificial Sequence: Synthetic oligonucleotide
ggucagccugagcuccaaa

SEQ ID NO: 2141849 - RNA, 19 nt, Artificial Sequence
  Description of Artificial Sequence: Synthetic oligonucleotide
ggccgaggucgccgucggg

SEQ ID NO: 2141850 - RNA, 19 nt, Artificial Sequence
  Description of Artificial Sequence: Synthetic oligonucleotide
ccgacuugucugcgcccgc

SEQ ID NO: 2141851 - RNA, 19 nt, Artificial Sequence
  Description of Artificial Sequence: Synthetic oligonucleotide
cugcucuguuuaugcuugu

SEQ ID NO: 2141852 - RNA, 19 nt, Artificial Sequence
  Description of Artificial Sequence: Synthetic oligonucleotide
ccgggcaauucccgcauaa

SEQ ID NO: 2141853 - RNA, 19 nt, Artificial Sequence
  Description of Artificial Sequence: Synthetic oligonucleotide
gccauacuagccagucugu

SEQ ID NO: 2141854 - RNA, 19 nt, Artificial Sequence
  Description of Artificial Sequence: Synthetic oligonucleotide
gggcggcuuuccaggcccg

SEQ ID NO: 2141855 - RNA, 19 nt, Artificial Sequence
  Description of Artificial Sequence: Synthetic oligonucleotide
ggggccgugccugggccac

SEQ ID NO: 2141856 - RNA, 19 nt, Artificial Sequence
  Description of Artificial Sequence: Synthetic oligonucleotide
cacucucggcuccugcauu

SEQ ID NO: 2141857 - RNA, 19 nt, Artificial Sequence
  Description of Artificial Sequence: Synthetic oligonucleotide
gccuuaucuuaaacugccu

SEQ ID NO: 2141858 - RNA, 19 nt, Artificial Sequence
  Description of Artificial Sequence: Synthetic oligonucleotide
ggucaggcaggaaguuacu

SEQ ID NO: 2141859 - RNA, 19 nt, Artificial Sequence
  Description of Artificial Sequence: Synthetic oligonucleotide
gcccgcaggggccgagguc

SEQ ID NO: 2141860 - RNA, 19 nt, Artificial Sequence
  Description of Artificial Sequence: Synthetic oligonucleotide
gcgcggugaaauucuccau

SEQ ID NO: 2141861 - RNA, 19 nt, Artificial Sequence
  Description of Artificial Sequence: Synthetic oligonucleotide
ccgcaggggccgaggucgc

SEQ ID NO: 2141862 - RNA, 19 nt, Artificial Sequence
  Description of Artificial Sequence: Synthetic oligonucleotide
ccuguuagcggaggcugcu

SEQ ID NO: 2141863 - RNA, 19 nt, Artificial Sequence
  Description of Artificial Sequence: Synthetic oligonucleotide
ggcggaaaccagacagcau

SEQ ID NO: 2141864 - RNA, 19 nt, Artificial Sequence
  Description of Artificial Sequence: Synthetic oligonucleotide
cuggacuaugucgguucuu

SEQ ID NO: 2141865 - RNA, 19 nt, Artificial Sequence
  Description of Artificial Sequence: Synthetic oligonucleotide
cuccugcauuacccgggau

SEQ ID NO: 2141866 - RNA, 19 nt, Artificial Sequence
  Description of Artificial Sequence: Synthetic oligonucleotide
ggcggcuuuccaggcccga

SEQ ID NO: 2141867 - RNA, 19 nt, Artificial Sequence
  Description of Artificial Sequence: Synthetic oligonucleotide
ggccaguauggaggcggaa

SEQ ID NO: 2141868 - RNA, 19 nt, Artificial Sequence
  Description of Artificial Sequence: Synthetic oligonucleotide
gcgcccgcaggggccgagg

SEQ ID NO: 2141869 - RNA, 19 nt, Artificial Sequence
  Description of Artificial Sequence: Synthetic oligonucleotide
ccuggguccugcucuguuu

SEQ ID NO: 2141870 - RNA, 19 nt, Artificial Sequence
  Description of Artificial Sequence: Synthetic oligonucleotide
cucuggcaacgggccagua

SEQ ID NO: 2141871 - RNA, 19 nt, Artificial Sequence
  Description of Artificial Sequence: Synthetic oligonucleotide
cggcuuuccaggcccgaaa

SEQ ID NO: 2141872 - RNA, 19 nt, Artificial Sequence
  Description of Artificial Sequence: Synthetic oligonucleotide
ccauacuagccagucuguu

SEQ ID NO: 2141873 - RNA, 19 nt, Artificial Sequence
  Description of Artificial Sequence: Synthetic oligonucleotide
gggagcggaggcugcuguu

SEQ ID NO: 2141874 - RNA, 19 nt, Artificial Sequence
  Description of Artificial Sequence: Synthetic oligonucleotide
gcccgaaaccuagggcgcu

SEQ ID NO: 2141875 - RNA, 19 nt, Artificial Sequence
  Description of Artificial Sequence: Synthetic oligonucleotide
gccgggcaauucccgcaua

SEQ ID NO: 2141876 - RNA, 19 nt, Artificial Sequence
  Description of Artificial Sequence: Synthetic oligonucleotide
gggccgugccugggccacc

SEQ ID NO: 2141877 - RNA, 19 nt, Artificial Sequence
  Description of Artificial Sequence: Synthetic oligonucleotide
ggccgugccugggccaccu

SEQ ID NO: 2141878 - RNA, 19 nt, Artificial Sequence
  Description of Artificial Sequence: Synthetic oligonucleotide
gccgugccugggccaccuc

SEQ ID NO: 2141879 - RNA, 19 nt, Artificial Sequence
  Description of Artificial Sequence: Synthetic oligonucleotide
cggggccgugccugggcca

SEQ ID NO: 2141880 - RNA, 19 nt, Artificial Sequence
  Description of Artificial Sequence: Synthetic oligonucleotide
cccgaaaccuagggcgcuu

SEQ ID NO: 2141881 - RNA, 19 nt, Artificial Sequence
  Description of Artificial Sequence: Synthetic oligonucleotide
ccgcuuccagcagccgacu

SEQ ID NO: 2141882 - RNA, 19 nt, Artificial Sequence
  Description of Artificial Sequence: Synthetic oligonucleotide
cgcccgcaggggccgaggu

SEQ ID NO: 2141883 - RNA, 19 nt, Artificial Sequence
  Description of Artificial Sequence: Synthetic oligonucleotide
aagaagaccugucugcccc

SEQ ID NO: 2141884 - RNA, 19 nt, Artificial Sequence
  Description of Artificial Sequence: Synthetic oligonucleotide
auucuaaaaucauggaggc

SEQ ID NO: 2141885 - RNA, 19 nt, Artificial Sequence
  Description of Artificial Sequence: Synthetic oligonucleotide
ucaucaauggacaaaauau

SEQ ID NO: 2141886 - RNA, 19 nt, Artificial Sequence
  Description of Artificial Sequence: Synthetic oligonucleotide
ucuaaaaucauggaggcug

SEQ ID NO: 2141887 - RNA, 19 nt, Artificial Sequence
  Description of Artificial Sequence: Synthetic oligonucleotide
gaggaugccagcuugaugc

SEQ ID NO: 2141888 - RNA, 19 nt, Artificial Sequence
  Description of Artificial Sequence: Synthetic oligonucleotide
ugaaaggucauuugugacg

SEQ ID NO: 2141889 - RNA, 19 nt, Artificial Sequence
  Description of Artificial Sequence: Synthetic oligonucleotide
auagggaucgucuggaaag

SEQ ID NO: 2141890 - RNA, 19 nt, Artificial Sequence
  Description of Artificial Sequence: Synthetic oligonucleotide
gaaggugaggaugugaggg

SEQ ID NO: 2141891 - RNA, 19 nt, Artificial Sequence
  Description of Artificial Sequence: Synthetic oligonucleotide
agugaaaugaguccccauc

SEQ ID NO: 2141892 - RNA, 19 nt, Artificial Sequence
  Description of Artificial Sequence: Synthetic oligonucleotide
aguaccaggucaucaaugg

SEQ ID NO: 2141893 - RNA, 19 nt, Artificial Sequence
  Description of Artificial Sequence: Synthetic oligonucleotide
ugugguagugaaaugaguc

SEQ ID NO: 2141894 - RNA, 19 nt, Artificial Sequence
  Description of Artificial Sequence: Synthetic oligonucleotide
ugauuucucuccaucagcc

SEQ ID NO: 2141895 - RNA, 19 nt, Artificial Sequence
  Description of Artificial Sequence: Synthetic oligonucleotide
ggagcugucagccagaugc

SEQ ID NO: 2141896 - RNA, 19 nt, Artificial Sequence
  Description of Artificial Sequence: Synthetic oligonucleotide
gaaaggucauuugugacgg

SEQ ID NO: 2141897 - RNA, 19 nt, Artificial Sequence
  Description of Artificial Sequence: Synthetic oligonucleotide
augacauggguggagagcc

SEQ ID NO: 2141898 - RNA, 19 nt, Artificial Sequence
  Description of Artificial Sequence: Synthetic oligonucleotide
ugcacugacaacgugacug

SEQ ID NO: 2141899 - RNA, 19 nt, Artificial Sequence
  Description of Artificial Sequence: Synthetic oligonucleotide
ucgucuggaaagaagaccu

SEQ ID NO: 2141900 - RNA, 19 nt, Artificial Sequence
  Description of Artificial Sequence: Synthetic oligonucleotide
aaaguguccuguguccugc

SEQ ID NO: 2141901 - RNA, 19 nt, Artificial Sequence
  Description of Artificial Sequence: Synthetic oligonucleotide
gacaaaggcagguaucaag

SEQ ID NO: 2141902 - RNA, 19 nt, Artificial Sequence
  Description of Artificial Sequence: Synthetic oligonucleotide
uggaaagaagaccugucug

SEQ ID NO: 2141903 - RNA, 19 nt, Artificial Sequence
  Description of Artificial Sequence: Synthetic oligonucleotide
agaauacugugacaaagug

SEQ ID NO: 2141904 - RNA, 19 nt, Artificial Sequence
  Description of Artificial Sequence: Synthetic oligonucleotide
agacugcacaguuucagcg

SEQ ID NO: 2141905 - RNA, 19 nt, Artificial Sequence
  Description of Artificial Sequence: Synthetic oligonucleotide
uggaagaauacugugacaa

SEQ ID NO: 2141906 - RNA, 19 nt, Artificial Sequence
  Description of Artificial Sequence: Synthetic oligonucleotide
cagcaugucauucagcgcc

SEQ ID NO: 2141907 - RNA, 19 nt, Artificial Sequence
  Description of Artificial Sequence: Synthetic oligonucleotide
aaaggcagguaucaagcgu

SEQ ID NO: 2141908 - RNA, 19 nt, Artificial Sequence
  Description of Artificial Sequence: Synthetic oligonucleotide
aacaccgcagggcuguagg

SEQ ID NO: 2141909 - RNA, 19 nt, Artificial Sequence
  Description of Artificial Sequence: Synthetic oligonucleotide
uauagcaucugcacugaca

SEQ ID NO: 2141910 - RNA, 19 nt, Artificial Sequence
  Description of Artificial Sequence: Synthetic oligonucleotide
cacugguagacaaaggcag

SEQ ID NO: 2141911 - RNA, 19 nt, Artificial Sequence
  Description of Artificial Sequence: Synthetic oligonucleotide
guaucaagcgucugcacag

SEQ ID NO: 2141912 - RNA, 19 nt, Artificial Sequence
  Description of Artificial Sequence: Synthetic oligonucleotide
gacaaaguguccugugucc

SEQ ID NO: 2141913 - RNA, 19 nt, Artificial Sequence
  Description of Artificial Sequence: Synthetic oligonucleotide
ugcugugucaggcucagcu

SEQ ID NO: 2141914 - RNA, 19 nt, Artificial Sequence
  Description of Artificial Sequence: Synthetic oligonucleotide
acucucgucaccccuuggc

SEQ ID NO: 2141915 - RNA, 19 nt, Artificial Sequence
  Description of Artificial Sequence: Synthetic oligonucleotide
gugaaaugaguccccaucc

SEQ ID NO: 2141916 - RNA, 19 nt, Artificial Sequence
  Description of Artificial Sequence: Synthetic oligonucleotide
ugucagggcuucuauagca

SEQ ID NO: 2141917 - RNA, 19 nt, Artificial Sequence
  Description of Artificial Sequence: Synthetic oligonucleotide
ugaguccccauccagggac

SEQ ID NO: 2141918 - RNA, 19 nt, Artificial Sequence
  Description of Artificial Sequence: Synthetic oligonucleotide
gacugcacaguuucagcgg

SEQ ID NO: 2141919 - RNA, 19 nt, Artificial Sequence
  Description of Artificial Sequence: Synthetic oligonucleotide
aagaauacugugacaaagu

SEQ ID NO: 2141920 - RNA, 19 nt, Artificial Sequence
  Description of Artificial Sequence: Synthetic oligonucleotide
ugguagugaaaugaguccc

SEQ ID NO: 2141921 - RNA, 19 nt, Artificial Sequence
  Description of Artificial Sequence: Synthetic oligonucleotide
cacauaggcgccuccaagg

SEQ ID NO: 2141922 - RNA, 19 nt, Artificial Sequence
  Description of Artificial Sequence: Synthetic oligonucleotide
uugaaaggucauuugugac

SEQ ID NO: 2141923 - RNA, 19 nt, Artificial Sequence
  Description of Artificial Sequence: Synthetic oligonucleotide
uccucaucagcaaccgcgg

SEQ ID NO: 2141924 - RNA, 19 nt, Artificial Sequence
  Description of Artificial Sequence: Synthetic oligonucleotide
gugguagugaaaugagucc

SEQ ID NO: 2141925 - RNA, 19 nt, Artificial Sequence
  Description of Artificial Sequence: Synthetic oligonucleotide
acuggcuccucugaagacc

SEQ ID NO: 2141926 - RNA, 19 nt, Artificial Sequence
  Description of Artificial Sequence: Synthetic oligonucleotide
ugucauucagcgccaacac

SEQ ID NO: 2141927 - RNA, 19 nt, Artificial Sequence
  Description of Artificial Sequence: Synthetic oligonucleotide
uucagcgccaacaccgcag

SEQ ID NO: 2141928 - RNA, 19 nt, Artificial Sequence
  Description of Artificial Sequence: Synthetic oligonucleotide
cucagaguaagcugggcug

SEQ ID NO: 2141929 - RNA, 19 nt, Artificial Sequence
  Description of Artificial Sequence: Synthetic oligonucleotide
caaaggcagguaucaagcg

SEQ ID NO: 2141930 - RNA, 19 nt, Artificial Sequence
  Description of Artificial Sequence: Synthetic oligonucleotide
cugacaucccuucccaucc

SEQ ID NO: 2141931 - RNA, 19 nt, Artificial Sequence
  Description of Artificial Sequence: Synthetic oligonucleotide
uccucgauagggaucgucu

SEQ ID NO: 2141932 - RNA, 19 nt, Artificial Sequence
  Description of Artificial Sequence: Synthetic oligonucleotide
uuugugacggaaggugagg

SEQ ID NO: 2141933 - RNA, 19 nt, Artificial Sequence
  Description of Artificial Sequence: Synthetic oligonucleotide
gacaugugcagauggcggc

SEQ ID NO: 2141934 - RNA, 19 nt, Artificial Sequence
  Description of Artificial Sequence: Synthetic oligonucleotide
ugugacaaaguguccugug

SEQ ID NO: 2141935 - RNA, 19 nt, Artificial Sequence
  Description of Artificial Sequence: Synthetic oligonucleotide
uucccauccagaaccuucc

SEQ ID NO: 2141936 - RNA, 19 nt, Artificial Sequence
  Description of Artificial Sequence: Synthetic oligonucleotide
caugcugugagacugcaca

SEQ ID NO: 2141937 - RNA, 19 nt, Artificial Sequence
  Description of Artificial Sequence: Synthetic oligonucleotide
aggggugcgggucugugac

SEQ ID NO: 2141938 - RNA, 19 nt, Artificial Sequence
  Description of Artificial Sequence: Synthetic oligonucleotide
guuucagcggagcugucag

SEQ ID NO: 2141939 - RNA, 19 nt, Artificial Sequence
  Description of Artificial Sequence: Synthetic oligonucleotide
uccagaaccuuccucuuuc

SEQ ID NO: 2141940 - RNA, 19 nt, Artificial Sequence
  Description of Artificial Sequence: Synthetic oligonucleotide
uucacgacucucgucaccc

SEQ ID NO: 2141941 - RNA, 19 nt, Artificial Sequence
  Description of Artificial Sequence: Synthetic oligonucleotide
uacugugacaaaguguccu

SEQ ID NO: 2141942 - RNA, 19 nt, Artificial Sequence
  Description of Artificial Sequence: Synthetic oligonucleotide
ucugagaccucaguggcga

SEQ ID NO: 2141943 - RNA, 19 nt, Artificial Sequence
  Description of Artificial Sequence: Synthetic oligonucleotide
aagggugggccaauggccg

SEQ ID NO: 2141944 - RNA, 19 nt, Artificial Sequence
  Description of Artificial Sequence: Synthetic oligonucleotide
uaggacuuaagcuccuccu

SEQ ID NO: 2141945 - RNA, 19 nt, Artificial Sequence
  Description of Artificial Sequence: Synthetic oligonucleotide
acuuaagcuccuccuucac

SEQ ID NO: 2141946 - RNA, 19 nt, Artificial Sequence
  Description of Artificial Sequence: Synthetic oligonucleotide
ugacggaaggugaggaugu

SEQ ID NO: 2141947 - RNA, 19 nt, Artificial Sequence
  Description of Artificial Sequence: Synthetic oligonucleotide
aaguguccuguguccugcc

SEQ ID NO: 2141948 - RNA, 19 nt, Artificial Sequence
  Description of Artificial Sequence: Synthetic oligonucleotide
aguggcgagacccuccuca

SEQ ID NO: 2141949 - RNA, 19 nt, Artificial Sequence
  Description of Artificial Sequence: Synthetic oligonucleotide
cucgauagggaucgucugg

SEQ ID NO: 2141950 - RNA, 19 nt, Artificial Sequence
  Description of Artificial Sequence: Synthetic oligonucleotide
uccaagggugggccaaugg

SEQ ID NO: 2141951 - RNA, 19 nt, Artificial Sequence
  Description of Artificial Sequence: Synthetic oligonucleotide
uuucuguuccacaucugau

SEQ ID NO: 2141952 - RNA, 19 nt, Artificial Sequence
  Description of Artificial Sequence: Synthetic oligonucleotide
gagacugcacaguuucagc

SEQ ID NO: 2141953 - RNA, 19 nt, Artificial Sequence
  Description of Artificial Sequence: Synthetic oligonucleotide
ucugaagaccuucccucgc

SEQ ID NO: 2141954 - RNA, 19 nt, Artificial Sequence
  Description of Artificial Sequence: Synthetic oligonucleotide
aggaucuagaggauggcuc

SEQ ID NO: 2141955 - RNA, 19 nt, Artificial Sequence
  Description of Artificial Sequence: Synthetic oligonucleotide
uucagcggagcugucagcc

SEQ ID NO: 2141956 - RNA, 19 nt, Artificial Sequence
  Description of Artificial Sequence: Synthetic oligonucleotide
gaugacauggguggagagc

SEQ ID NO: 2141957 - RNA, 19 nt, Artificial Sequence
  Description of Artificial Sequence: Synthetic oligonucleotide
agcuugaugcaccccaucu

SEQ ID NO: 2141958 - RNA, 19 nt, Artificial Sequence
  Description of Artificial Sequence: Synthetic oligonucleotide
cuucccucgcuccugcugg

SEQ ID NO: 2141959 - RNA, 19 nt, Artificial Sequence
  Description of Artificial Sequence: Synthetic oligonucleotide
ucaagcgucugcacagcug

SEQ ID NO: 2141960 - RNA, 19 nt, Artificial Sequence
  Description of Artificial Sequence: Synthetic oligonucleotide
ugcccucaagugcagagcu

SEQ ID NO: 2141961 - RNA, 19 nt, Artificial Sequence
  Description of Artificial Sequence: Synthetic oligonucleotide
auccagggacuguaggagg

SEQ ID NO: 2141962 - RNA, 19 nt, Artificial Sequence
  Description of Artificial Sequence: Synthetic oligonucleotide
aacgugacuggcgaugggu

SEQ ID NO: 2141963 - RNA, 19 nt, Artificial Sequence
  Description of Artificial Sequence: Synthetic oligonucleotide
caccugauguacucuuugg

SEQ ID NO: 2141964 - RNA, 19 nt, Artificial Sequence
  Description of Artificial Sequence: Synthetic oligonucleotide
acugacaacgugacuggcg

SEQ ID NO: 2141965 - RNA, 19 nt, Artificial Sequence
  Description of Artificial Sequence: Synthetic oligonucleotide
cuggccgugagggacaugc

SEQ ID NO: 2141966 - RNA, 19 nt, Artificial Sequence
  Description of Artificial Sequence: Synthetic oligonucleotide
uguccuguguccugccgag

SEQ ID NO: 2141967 - RNA, 19 nt, Artificial Sequence
  Description of Artificial Sequence: Synthetic oligonucleotide
gcuucuauagcaucugcac

SEQ ID NO: 2141968 - RNA, 19 nt, Artificial Sequence
  Description of Artificial Sequence: Synthetic oligonucleotide
acaacgugacuggcgaugg

SEQ ID NO: 2141969 - RNA, 19 nt, Artificial Sequence
  Description of Artificial Sequence: Synthetic oligonucleotide
cauggaggcugucaucagc

SEQ ID NO: 2141970 - RNA, 19 nt, Artificial Sequence
  Description of Artificial Sequence: Synthetic oligonucleotide
aaggucauuugugacggaa

SEQ ID NO: 2141971 - RNA, 19 nt, Artificial Sequence
  Description of Artificial Sequence: Synthetic oligonucleotide
gacaacgugacuggcgaug

SEQ ID NO: 2141972 - RNA, 19 nt, Artificial Sequence
  Description of Artificial Sequence: Synthetic oligonucleotide
ucgagaggaugacaugggu

SEQ ID NO: 2141973 - RNA, 19 nt, Artificial Sequence
  Description of Artificial Sequence: Synthetic oligonucleotide
gacuuaagcuccuccuuca

SEQ ID NO: 2141974 - RNA, 19 nt, Artificial Sequence
  Description of Artificial Sequence: Synthetic oligonucleotide
gaugccucugaggccaagg

SEQ ID NO: 2141975 - RNA, 19 nt, Artificial Sequence
  Description of Artificial Sequence: Synthetic oligonucleotide
ucuauagcaucugcacuga

SEQ ID NO: 2141976 - RNA, 19 nt, Artificial Sequence
  Description of Artificial Sequence: Synthetic oligonucleotide
agguaucaagcgucugcac

SEQ ID NO: 2141977 - RNA, 19 nt, Artificial Sequence
  Description of Artificial Sequence: Synthetic oligonucleotide
ucuccuucacgacucucgu

SEQ ID NO: 2141978 - RNA, 19 nt, Artificial Sequence
  Description of Artificial Sequence: Synthetic oligonucleotide
cuuccagucgagaggauga

SEQ ID NO: 2141979 - RNA, 19 nt, Artificial Sequence
  Description of Artificial Sequence: Synthetic oligonucleotide
auggguggagagccucugc

SEQ ID NO: 2141980 - RNA, 19 nt, Artificial Sequence
  Description of Artificial Sequence: Synthetic oligonucleotide
gauagggaucgucuggaaa

SEQ ID NO: 2141981 - RNA, 19 nt, Artificial Sequence
  Description of Artificial Sequence: Synthetic oligonucleotide
auuugugacggaaggugag

SEQ ID NO: 2141982 - RNA, 19 nt, Artificial Sequence
  Description of Artificial Sequence: Synthetic oligonucleotide
agagccucugccugacauc

SEQ ID NO: 2141983 - RNA, 19 nt, Artificial Sequence
  Description of Artificial Sequence: Synthetic oligonucleotide
uguguccucgauagggauc

SEQ ID NO: 2141984 - RNA, 19 nt, Artificial Sequence
  Description of Artificial Sequence: Synthetic oligonucleotide
acaccgcagggcuguaggc

SEQ ID NO: 2141985 - RNA, 19 nt, Artificial Sequence
  Description of Artificial Sequence: Synthetic oligonucleotide
ucgauagggaucgucugga

SEQ ID NO: 2141986 - RNA, 19 nt, Artificial Sequence
  Description of Artificial Sequence: Synthetic oligonucleotide
acugguagacaaaggcagg

SEQ ID NO: 2141987 - RNA, 19 nt, Artificial Sequence
  Description of Artificial Sequence: Synthetic oligonucleotide
auaggcgccuccaagggug

SEQ ID NO: 2141988 - RNA, 19 nt, Artificial Sequence
  Description of Artificial Sequence: Synthetic oligonucleotide
uggccgugcccucaagugc

SEQ ID NO: 2141989 - RNA, 19 nt, Artificial Sequence
  Description of Artificial Sequence: Synthetic oligonucleotide
gguaucaagcgucugcaca

SEQ ID NO: 2141990 - RNA, 19 nt, Artificial Sequence
  Description of Artificial Sequence: Synthetic oligonucleotide
ugagacuggcuccucugaa

SEQ ID NO: 2141991 - RNA, 19 nt, Artificial Sequence
  Description of Artificial Sequence: Synthetic oligonucleotide
cucucgucaccccuuggcc

SEQ ID NO: 2141992 - RNA, 19 nt, Artificial Sequence
  Description of Artificial Sequence: Synthetic oligonucleotide
gugaacugcugugucaggc

SEQ ID NO: 2141993 - RNA, 19 nt, Artificial Sequence
  Description of Artificial Sequence: Synthetic oligonucleotide
uugugacggaaggugagga

SEQ ID NO: 2141994 - RNA, 19 nt, Artificial Sequence
  Description of Artificial Sequence: Synthetic oligonucleotide
cugacaacgugacuggcga

SEQ ID NO: 2141995 - RNA, 19 nt, Artificial Sequence
  Description of Artificial Sequence: Synthetic oligonucleotide
cugaagggcagccuccaug

SEQ ID NO: 2141996 - RNA, 19 nt, Artificial Sequence
  Description of Artificial Sequence: Synthetic oligonucleotide
ucggugaacugcuguguca

SEQ ID NO: 2141997 - RNA, 19 nt, Artificial Sequence
  Description of Artificial Sequence: Synthetic oligonucleotide
ucaguggcgagacccuccu

SEQ ID NO: 2141998 - RNA, 19 nt, Artificial Sequence
  Description of Artificial Sequence: Synthetic oligonucleotide
cauucagcgccaacaccgc

SEQ ID NO: 2141999 - RNA, 19 nt, Artificial Sequence
  Description of Artificial Sequence: Synthetic oligonucleotide
aguaagcugggcuggccgu

SEQ ID NO: 2142000 - RNA, 19 nt, Artificial Sequence
  Description of Artificial Sequence: Synthetic oligonucleotide
gaauacugugacaaagugu

SEQ ID NO: 2142001 - RNA, 19 nt, Artificial Sequence
  Description of Artificial Sequence: Synthetic oligonucleotide
cucugagaccucaguggcg

SEQ ID NO: 2142002 - RNA, 19 nt, Artificial Sequence
  Description of Artificial Sequence: Synthetic oligonucleotide
gacuguaggagggacaugu

SEQ ID NO: 2142003 - RNA, 19 nt, Artificial Sequence
  Description of Artificial Sequence: Synthetic oligonucleotide
aucugcacugacaacguga

SEQ ID NO: 2142004 - RNA, 19 nt, Artificial Sequence
  Description of Artificial Sequence: Synthetic oligonucleotide
gaggaugacauggguggag

SEQ ID NO: 2142005 - RNA, 19 nt, Artificial Sequence
  Description of Artificial Sequence: Synthetic oligonucleotide
uucuaaaaucauggaggcu

SEQ ID NO: 2142006 - RNA, 19 nt, Artificial Sequence
  Description of Artificial Sequence: Synthetic oligonucleotide
cagcuguugcuucagcaug

SEQ ID NO: 2142007 - RNA, 19 nt, Artificial Sequence
  Description of Artificial Sequence: Synthetic oligonucleotide
gagugaugccucugaggcc

SEQ ID NO: 2142008 - RNA, 19 nt, Artificial Sequence
  Description of Artificial Sequence: Synthetic oligonucleotide
gcucaaaauccucagagua

SEQ ID NO: 2142009 - RNA, 19 nt, Artificial Sequence
  Description of Artificial Sequence: Synthetic oligonucleotide
ggacaugugcagauggcgg

SEQ ID NO: 2142010 - RNA, 19 nt, Artificial Sequence
  Description of Artificial Sequence: Synthetic oligonucleotide
gagggacaugcugugagac

SEQ ID NO: 2142011 - RNA, 19 nt, Artificial Sequence
  Description of Artificial Sequence: Synthetic oligonucleotide
gaucgucuggaaagaagac

SEQ ID NO: 2142012 - RNA, 19 nt, Artificial Sequence
  Description of Artificial Sequence: Synthetic oligonucleotide
cucaguggcgagacccucc

SEQ ID NO: 2142013 - RNA, 19 nt, Artificial Sequence
  Description of Artificial Sequence: Synthetic oligonucleotide
cacaguuucagcggagcug

SEQ ID NO: 2142014 - RNA, 19 nt, Artificial Sequence
  Description of Artificial Sequence: Synthetic oligonucleotide
aaccgcgguggccgugccc

SEQ ID NO: 2142015 - RNA, 19 nt, Artificial Sequence
  Description of Artificial Sequence: Synthetic oligonucleotide
gagaccucaguggcgagac

SEQ ID NO: 2142016 - RNA, 19 nt, Artificial Sequence
  Description of Artificial Sequence: Synthetic oligonucleotide
ggugugguagugaaaugag

SEQ ID NO: 2142017 - RNA, 19 nt, Artificial Sequence
  Description of Artificial Sequence: Synthetic oligonucleotide
gggacaugugcagauggcg

SEQ ID NO: 2142018 - RNA, 19 nt, Artificial Sequence
  Description of Artificial Sequence: Synthetic oligonucleotide
ugacaccugauguacucuu

SEQ ID NO: 2142019 - RNA, 19 nt, Artificial Sequence
  Description of Artificial Sequence: Synthetic oligonucleotide
aggugaggaugugagggag

SEQ ID NO: 2142020 - RNA, 19 nt, Artificial Sequence
  Description of Artificial Sequence: Synthetic oligonucleotide
ugccgagugaugccucuga

SEQ ID NO: 2142021 - RNA, 19 nt, Artificial Sequence
  Description of Artificial Sequence: Synthetic oligonucleotide
guagacaaaggcagguauc

SEQ ID NO: 2142022 - RNA, 19 nt, Artificial Sequence
  Description of Artificial Sequence: Synthetic oligonucleotide
augugcagauggcggcugg

SEQ ID NO: 2142023 - RNA, 19 nt, Artificial Sequence
  Description of Artificial Sequence: Synthetic oligonucleotide
guggccgugcccucaagug

SEQ ID NO: 2142024 - RNA, 19 nt, Artificial Sequence
  Description of Artificial Sequence: Synthetic oligonucleotide
aggagggacaugugcagau

SEQ ID NO: 2142025 - RNA, 19 nt, Artificial Sequence
  Description of Artificial Sequence: Synthetic oligonucleotide
uuucagcggagcugucagc

SEQ ID NO: 2142026 - RNA, 19 nt, Artificial Sequence
  Description of Artificial Sequence: Synthetic oligonucleotide
uaucaagcgucugcacagc

SEQ ID NO: 2142027 - RNA, 19 nt, Artificial Sequence
  Description of Artificial Sequence: Synthetic oligonucleotide
gcacugacaacgugacugg

SEQ ID NO: 2142028 - RNA, 19 nt, Artificial Sequence
  Description of Artificial Sequence: Synthetic oligonucleotide
aucaagcgucugcacagcu

SEQ ID NO: 2142029 - RNA, 19 nt, Artificial Sequence
  Description of Artificial Sequence: Synthetic oligonucleotide
gagacccuccucaucagca

SEQ ID NO: 2142030 - RNA, 19 nt, Artificial Sequence
  Description of Artificial Sequence: Synthetic oligonucleotide
ugugacggaaggugaggau

SEQ ID NO: 2142031 - RNA, 19 nt, Artificial Sequence
  Description of Artificial Sequence: Synthetic oligonucleotide
cuucacgacucucgucacc

SEQ ID NO: 2142032 - RNA, 19 nt, Artificial Sequence
  Description of Artificial Sequence: Synthetic oligonucleotide
uaggcgccuccaagggugg

SEQ ID NO: 2142033 - RNA, 19 nt, Artificial Sequence
  Description of Artificial Sequence: Synthetic oligonucleotide
uagggaucgucuggaaaga

SEQ ID NO: 2142034 - RNA, 19 nt, Artificial Sequence
  Description of Artificial Sequence: Synthetic oligonucleotide
caauggccgcccuccagcc

SEQ ID NO: 2142035 - RNA, 19 nt, Artificial Sequence
  Description of Artificial Sequence: Synthetic oligonucleotide
ugccucugaggccaaggau

SEQ ID NO: 2142036 - RNA, 19 nt, Artificial Sequence
  Description of Artificial Sequence: Synthetic oligonucleotide
gugaggaugugagggagac

SEQ ID NO: 2142037 - RNA, 19 nt, Artificial Sequence
  Description of Artificial Sequence: Synthetic oligonucleotide
caaggaucuagaggauggc

SEQ ID NO: 2142038 - RNA, 19 nt, Artificial Sequence
  Description of Artificial Sequence: Synthetic oligonucleotide
aggauggcucaaaauccuc

SEQ ID NO: 2142039 - RNA, 19 nt, Artificial Sequence
  Description of Artificial Sequence: Synthetic oligonucleotide
agggacaugcugugagacu

SEQ ID NO: 2142040 - RNA, 19 nt, Artificial Sequence
  Description of Artificial Sequence: Synthetic oligonucleotide
gugcuggguccacauaggc

SEQ ID NO: 2142041 - RNA, 19 nt, Artificial Sequence
  Description of Artificial Sequence: Synthetic oligonucleotide
agaccucaguggcgagacc

SEQ ID NO: 2142042 - RNA, 19 nt, Artificial Sequence
  Description of Artificial Sequence: Synthetic oligonucleotide
ggcgagacccuccucauca

SEQ ID NO: 2142043 - RNA, 19 nt, Artificial Sequence
  Description of Artificial Sequence: Synthetic oligonucleotide
ggacuuaagcuccuccuuc

SEQ ID NO: 2142044 - RNA, 19 nt, Artificial Sequence
  Description of Artificial Sequence: Synthetic oligonucleotide
gacuggcuccucugaagac

SEQ ID NO: 2142045 - RNA, 19 nt, Artificial Sequence
  Description of Artificial Sequence: Synthetic oligonucleotide
uguguccugccgagugaug

SEQ ID NO: 2142046 - RNA, 19 nt, Artificial Sequence
  Description of Artificial Sequence: Synthetic oligonucleotide
gacucucgucaccccuugg

SEQ ID NO: 2142047 - RNA, 19 nt, Artificial Sequence
  Description of Artificial Sequence: Synthetic oligonucleotide
acuggcgaugggugcuggg

SEQ ID NO: 2142048 - RNA, 19 nt, Artificial Sequence
  Description of Artificial Sequence: Synthetic oligonucleotide
cuccucugaagaccuuccc

SEQ ID NO: 2142049 - RNA, 19 nt, Artificial Sequence
  Description of Artificial Sequence: Synthetic oligonucleotide
agggugugguagugaaaug

SEQ ID NO: 2142050 - RNA, 19 nt, Artificial Sequence
  Description of Artificial Sequence: Synthetic oligonucleotide
ugcuccacugguagacaaa

SEQ ID NO: 2142051 - RNA, 19 nt, Artificial Sequence
  Description of Artificial Sequence: Synthetic oligonucleotide
caucaauggacaaaauauu

SEQ ID NO: 2142052 - RNA, 19 nt, Artificial Sequence
  Description of Artificial Sequence: Synthetic oligonucleotide
auggcggcuggccucggug

SEQ ID NO: 2142053 - RNA, 19 nt, Artificial Sequence
  Description of Artificial Sequence: Synthetic oligonucleotide
cucggugaacugcuguguc

SEQ ID NO: 2142054 - RNA, 19 nt, Artificial Sequence
  Description of Artificial Sequence: Synthetic oligonucleotide
cugauguacucuuugguuu

SEQ ID NO: 2142055 - RNA, 19 nt, Artificial Sequence
  Description of Artificial Sequence: Synthetic oligonucleotide
caucccuucccauccagaa

SEQ ID NO: 2142056 - RNA, 19 nt, Artificial Sequence
  Description of Artificial Sequence: Synthetic oligonucleotide
ucagcggagcugucagcca

SEQ ID NO: 2142057 - RNA, 19 nt, Artificial Sequence
  Description of Artificial Sequence: Synthetic oligonucleotide
guagugaaaugagucccca

SEQ ID NO: 2142058 - RNA, 19 nt, Artificial Sequence
  Description of Artificial Sequence: Synthetic oligonucleotide
cuguuccacaucugauuuc

SEQ ID NO: 2142059 - RNA, 19 nt, Artificial Sequence
  Description of Artificial Sequence: Synthetic oligonucleotide
caugucauucagcgccaac

SEQ ID NO: 2142060 - RNA, 19 nt, Artificial Sequence
  Description of Artificial Sequence: Synthetic oligonucleotide
uccagucgagaggaugaca

SEQ ID NO: 2142061 - RNA, 19 nt, Artificial Sequence
  Description of Artificial Sequence: Synthetic oligonucleotide
cuauagcaucugcacugac

SEQ ID NO: 2142062 - RNA, 19 nt, Artificial Sequence
  Description of Artificial Sequence: Synthetic oligonucleotide
ggaugacauggguggagag

SEQ ID NO: 2142063 - RNA, 19 nt, Artificial Sequence
  Description of Artificial Sequence: Synthetic oligonucleotide
cuaaaaucauggaggcugu

SEQ ID NO: 2142064 - RNA, 19 nt, Artificial Sequence
  Description of Artificial Sequence: Synthetic oligonucleotide
acuguguccucgauaggga

SEQ ID NO: 2142065 - RNA, 19 nt, Artificial Sequence
  Description of Artificial Sequence: Synthetic oligonucleotide
gacauggguggagagccuc

SEQ ID NO: 2142066 - RNA, 19 nt, Artificial Sequence
  Description of Artificial Sequence: Synthetic oligonucleotide
cagucgagaggaugacaug

SEQ ID NO: 2142067 - RNA, 19 nt, Artificial Sequence
  Description of Artificial Sequence: Synthetic oligonucleotide
cagguaucaagcgucugca

SEQ ID NO: 2142068 - RNA, 19 nt, Artificial Sequence
  Description of Artificial Sequence: Synthetic oligonucleotide
cuggaaagaagaccugucu

SEQ ID NO: 2142069 - RNA, 19 nt, Artificial Sequence
  Description of Artificial Sequence: Synthetic oligonucleotide
gggugugguagugaaauga

SEQ ID NO: 2142070 - RNA, 19 nt, Artificial Sequence
  Description of Artificial Sequence: Synthetic oligonucleotide
augaguccccauccaggga

SEQ ID NO: 2142071 - RNA, 19 nt, Artificial Sequence
  Description of Artificial Sequence: Synthetic oligonucleotide
agcuguugcuucagcaugu

SEQ ID NO: 2142072 - RNA, 19 nt, Artificial Sequence
  Description of Artificial Sequence: Synthetic oligonucleotide
ugguagacaaaggcaggua

SEQ ID NO: 2142073 - RNA, 19 nt, Artificial Sequence
  Description of Artificial Sequence: Synthetic oligonucleotide
acaugugcagauggcggcu

SEQ ID NO: 2142074 - RNA, 19 nt, Artificial Sequence
  Description of Artificial Sequence: Synthetic oligonucleotide
agcgucugcacagcugucu

SEQ ID NO: 2142075 - RNA, 19 nt, Artificial Sequence
  Description of Artificial Sequence: Synthetic oligonucleotide
gucugugacaccugaugua

SEQ ID NO: 2142076 - RNA, 19 nt, Artificial Sequence
  Description of Artificial Sequence: Synthetic oligonucleotide
caucugcacugacaacgug

SEQ ID NO: 2142077 - RNA, 19 nt, Artificial Sequence
  Description of Artificial Sequence: Synthetic oligonucleotide
ccgagugaugccucugagg

SEQ ID NO: 2142078 - RNA, 19 nt, Artificial Sequence
  Description of Artificial Sequence: Synthetic oligonucleotide
ccaauggccgcccuccagc

SEQ ID NO: 2142079 - RNA, 19 nt, Artificial Sequence
  Description of Artificial Sequence: Synthetic oligonucleotide
guguccuguguccugccga

SEQ ID NO: 2142080 - RNA, 19 nt, Artificial Sequence
  Description of Artificial Sequence: Synthetic oligonucleotide
uccugaagggcagccucca

SEQ ID NO: 2142081 - RNA, 19 nt, Artificial Sequence
  Description of Artificial Sequence: Synthetic oligonucleotide
ggaggaugccagcuugaug

SEQ ID NO: 2142082 - RNA, 19 nt, Artificial Sequence
  Description of Artificial Sequence: Synthetic oligonucleotide
gguagacaaaggcagguau

SEQ ID NO: 2142083 - RNA, 19 nt, Artificial Sequence
  Description of Artificial Sequence: Synthetic oligonucleotide
gaggauggcucaaaauccu

SEQ ID NO: 2142084 - RNA, 19 nt, Artificial Sequence
  Description of Artificial Sequence: Synthetic oligonucleotide
gacaugcugugagacugca

SEQ ID NO: 2142085 - RNA, 19 nt, Artificial Sequence
  Description of Artificial Sequence: Synthetic oligonucleotide
uggcggcuggccucgguga

SEQ ID NO: 2142086 - RNA, 19 nt, Artificial Sequence
  Description of Artificial Sequence: Synthetic oligonucleotide
caacgugacuggcgauggg

SEQ ID NO: 2142087 - RNA, 19 nt, Artificial Sequence
  Description of Artificial Sequence: Synthetic oligonucleotide
ugcgggucugugacaccug

SEQ ID NO: 2142088 - RNA, 19 nt, Artificial Sequence
  Description of Artificial Sequence: Synthetic oligonucleotide
acgugacuggcgaugggug

SEQ ID NO: 2142089 - RNA, 19 nt, Artificial Sequence
  Description of Artificial Sequence: Synthetic oligonucleotide
ggaagaauacugugacaaa

SEQ ID NO: 2142090 - RNA, 19 nt, Artificial Sequence
  Description of Artificial Sequence: Synthetic oligonucleotide
uuccagucgagaggaugac

SEQ ID NO: 2142091 - RNA, 19 nt, Artificial Sequence
  Description of Artificial Sequence: Synthetic oligonucleotide
ccugacaucccuucccauc

SEQ ID NO: 2142092 - RNA, 19 nt, Artificial Sequence
  Description of Artificial Sequence: Synthetic oligonucleotide
auggccgcccuccagccuu

SEQ ID NO: 2142093 - RNA, 19 nt, Artificial Sequence
  Description of Artificial Sequence: Synthetic oligonucleotide
agaggaugacaugggugga

SEQ ID NO: 2142094 - RNA, 19 nt, Artificial Sequence
  Description of Artificial Sequence: Synthetic oligonucleotide
gccucugaggccaaggauc

SEQ ID NO: 2142095 - RNA, 19 nt, Artificial Sequence
  Description of Artificial Sequence: Synthetic oligonucleotide
ugacaacgugacuggcgau

SEQ ID NO: 2142096 - RNA, 19 nt, Artificial Sequence
  Description of Artificial Sequence: Synthetic oligonucleotide
cacugacaacgugacuggc

SEQ ID NO: 2142097 - RNA, 19 nt, Artificial Sequence
  Description of Artificial Sequence: Synthetic oligonucleotide
guaagcugggcuggccgug

SEQ ID NO: 2142098 - RNA, 19 nt, Artificial Sequence
  Description of Artificial Sequence: Synthetic oligonucleotide
ccacugguagacaaaggca

SEQ ID NO: 2142099 - RNA, 19 nt, Artificial Sequence
  Description of Artificial Sequence: Synthetic oligonucleotide
ugacuggcgaugggugcug

SEQ ID NO: 2142100 - RNA, 19 nt, Artificial Sequence
  Description of Artificial Sequence: Synthetic oligonucleotide
agaugcucugagaccucag

SEQ ID NO: 2142101 - RNA, 19 nt, Artificial Sequence
  Description of Artificial Sequence: Synthetic oligonucleotide
cugagacuggcuccucuga

SEQ ID NO: 2142102 - RNA, 19 nt, Artificial Sequence
  Description of Artificial Sequence: Synthetic oligonucleotide
gccccuguucuuccagucg

SEQ ID NO: 2142103 - RNA, 19 nt, Artificial Sequence
  Description of Artificial Sequence: Synthetic oligonucleotide
uaggcugucagggcuucua

SEQ ID NO: 2142104 - RNA, 19 nt, Artificial Sequence
  Description of Artificial Sequence: Synthetic oligonucleotide
ugaggaugugagggagacu

SEQ ID NO: 2142105 - RNA, 19 nt, Artificial Sequence
  Description of Artificial Sequence: Synthetic oligonucleotide
uucucuccaucagccagua

SEQ ID NO: 2142106 - RNA, 19 nt, Artificial Sequence
  Description of Artificial Sequence: Synthetic oligonucleotide
ggcuucuauagcaucugca

SEQ ID NO: 2142107 - RNA, 19 nt, Artificial Sequence
  Description of Artificial Sequence: Synthetic oligonucleotide
ugggccaauggccgcccuc

SEQ ID NO: 2142108 - RNA, 19 nt, Artificial Sequence
  Description of Artificial Sequence: Synthetic oligonucleotide
auguacucuuugguuuccu

SEQ ID NO: 2142109 - RNA, 19 nt, Artificial Sequence
  Description of Artificial Sequence: Synthetic oligonucleotide
agacaaaggcagguaucaa

SEQ ID NO: 2142110 - RNA, 19 nt, Artificial Sequence
  Description of Artificial Sequence: Synthetic oligonucleotide
gacuggcgaugggugcugg

SEQ ID NO: 2142111 - RNA, 19 nt, Artificial Sequence
  Description of Artificial Sequence: Synthetic oligonucleotide
ccacauaggcgccuccaag

SEQ ID NO: 2142112 - RNA, 19 nt, Artificial Sequence
  Description of Artificial Sequence: Synthetic oligonucleotide
gucuggaaagaagaccugu

SEQ ID NO: 2142113 - RNA, 19 nt, Artificial Sequence
  Description of Artificial Sequence: Synthetic oligonucleotide
aucuagaggauggcucaaa

SEQ ID NO: 2142114 - RNA, 19 nt, Artificial Sequence
  Description of Artificial Sequence: Synthetic oligonucleotide
cugaggccaaggaucuaga

SEQ ID NO: 2142115 - RNA, 19 nt, Artificial Sequence
  Description of Artificial Sequence: Synthetic oligonucleotide
uccugccgagugaugccuc

SEQ ID NO: 2142116 - RNA, 19 nt, Artificial Sequence
  Description of Artificial Sequence: Synthetic oligonucleotide
uggccccacuguguccucg

SEQ ID NO: 2142117 - RNA, 19 nt, Artificial Sequence
  Description of Artificial Sequence: Synthetic oligonucleotide
gccaaggaucuagaggaug

SEQ ID NO: 2142118 - RNA, 19 nt, Artificial Sequence
  Description of Artificial Sequence: Synthetic oligonucleotide
gccucggugaacugcugug

SEQ ID NO: 2142119 - RNA, 19 nt, Artificial Sequence
  Description of Artificial Sequence: Synthetic oligonucleotide
cugagaccucaguggcgag

SEQ ID NO: 2142120 - RNA, 19 nt, Artificial Sequence
  Description of Artificial Sequence: Synthetic oligonucleotide
agaccuucccucgcuccug

SEQ ID NO: 2142121 - RNA, 19 nt, Artificial Sequence
  Description of Artificial Sequence: Synthetic oligonucleotide
ucucuccaucagccaguac

SEQ ID NO: 2142122 - RNA, 19 nt, Artificial Sequence
  Description of Artificial Sequence: Synthetic oligonucleotide
gaucuagaggauggcucaa

SEQ ID NO: 2142123 - RNA, 19 nt, Artificial Sequence
  Description of Artificial Sequence: Synthetic oligonucleotide
ccucgauagggaucgucug

SEQ ID NO: 2142124 - RNA, 19 nt, Artificial Sequence
  Description of Artificial Sequence: Synthetic oligonucleotide
uggcgagacccuccucauc

SEQ ID NO: 2142125 - RNA, 19 nt, Artificial Sequence
  Description of Artificial Sequence: Synthetic oligonucleotide
gucauuugugacggaaggu

SEQ ID NO: 2142126 - RNA, 19 nt, Artificial Sequence
  Description of Artificial Sequence: Synthetic oligonucleotide
cagggugugguagugaaau

SEQ ID NO: 2142127 - RNA, 19 nt, Artificial Sequence
  Description of Artificial Sequence: Synthetic oligonucleotide
gugucaggcucagcuguug

SEQ ID NO: 2142128 - RNA, 19 nt, Artificial Sequence
  Description of Artificial Sequence: Synthetic oligonucleotide
ugaugccucugaggccaag

SEQ ID NO: 2142129 - RNA, 19 nt, Artificial Sequence
  Description of Artificial Sequence: Synthetic oligonucleotide
ucccucgcuccugcugggg

SEQ ID NO: 2142130 - RNA, 19 nt, Artificial Sequence
  Description of Artificial Sequence: Synthetic oligonucleotide
gccgagugaugccucugag

SEQ ID NO: 2142131 - RNA, 19 nt, Artificial Sequence
  Description of Artificial Sequence: Synthetic oligonucleotide
agggacuguaggagggaca

SEQ ID NO: 2142132 - RNA, 19 nt, Artificial Sequence
  Description of Artificial Sequence: Synthetic oligonucleotide
cagcuugaugcaccccauc

SEQ ID NO: 2142133 - RNA, 19 nt, Artificial Sequence
  Description of Artificial Sequence: Synthetic oligonucleotide
gccaguaccaggucaucaa

SEQ ID NO: 2142134 - RNA, 19 nt, Artificial Sequence
  Description of Artificial Sequence: Synthetic oligonucleotide
uggccgugagggacaugcu

SEQ ID NO: 2142135 - RNA, 19 nt, Artificial Sequence
  Description of Artificial Sequence: Synthetic oligonucleotide
ggcucaaaauccucagagu

SEQ ID NO: 2142136 - RNA, 19 nt, Artificial Sequence
  Description of Artificial Sequence: Synthetic oligonucleotide
ugggugcuggguccacaua

SEQ ID NO: 2142137 - RNA, 19 nt, Artificial Sequence
  Description of Artificial Sequence: Synthetic oligonucleotide
gcagauggcggcuggccuc

SEQ ID NO: 2142138 - RNA, 19 nt, Artificial Sequence
  Description of Artificial Sequence: Synthetic oligonucleotide
gcuccucugaagaccuucc

SEQ ID NO: 2142139 - RNA, 19 nt, Artificial Sequence
  Description of Artificial Sequence: Synthetic oligonucleotide
cugguagacaaaggcaggu

SEQ ID NO: 2142140 - RNA, 19 nt, Artificial Sequence
  Description of Artificial Sequence: Synthetic oligonucleotide
uggguccacauaggcgccu

SEQ ID NO: 2142141 - RNA, 19 nt, Artificial Sequence
  Description of Artificial Sequence: Synthetic oligonucleotide
ggagggacaugugcagaug

SEQ ID NO: 2142142 - RNA, 19 nt, Artificial Sequence
  Description of Artificial Sequence: Synthetic oligonucleotide
agggaucgucuggaaagaa

SEQ ID NO: 2142143 - RNA, 19 nt, Artificial Sequence
  Description of Artificial Sequence: Synthetic oligonucleotide
gggccaauggccgcccucc

SEQ ID NO: 2142144 - RNA, 19 nt, Artificial Sequence
  Description of Artificial Sequence: Synthetic oligonucleotide
cagcgccaacaccgcaggg

SEQ ID NO: 2142145 - RNA, 19 nt, Artificial Sequence
  Description of Artificial Sequence: Synthetic oligonucleotide
caacaccgcagggcuguag

SEQ ID NO: 2142146 - RNA, 19 nt, Artificial Sequence
  Description of Artificial Sequence: Synthetic oligonucleotide
cuccauggucaggggugcg

SEQ ID NO: 2142147 - RNA, 19 nt, Artificial Sequence
  Description of Artificial Sequence: Synthetic oligonucleotide
gccaauggccgcccuccag

SEQ ID NO: 2142148 - RNA, 19 nt, Artificial Sequence
  Description of Artificial Sequence: Synthetic oligonucleotide
guccucgauagggaucguc

SEQ ID NO: 2142149 - RNA, 19 nt, Artificial Sequence
  Description of Artificial Sequence: Synthetic oligonucleotide
ccagucgagaggaugacau

SEQ ID NO: 2142150 - RNA, 19 nt, Artificial Sequence
  Description of Artificial Sequence: Synthetic oligonucleotide
gguccacauaggcgccucc

SEQ ID NO: 2142151 - RNA, 19 nt, Artificial Sequence
  Description of Artificial Sequence: Synthetic oligonucleotide
uggccgcccuccagccuug

SEQ ID NO: 2142152 - RNA, 19 nt, Artificial Sequence
  Description of Artificial Sequence: Synthetic oligonucleotide
gcgagacccuccucaucag

SEQ ID NO: 2142153 - RNA, 19 nt, Artificial Sequence
  Description of Artificial Sequence: Synthetic oligonucleotide
cauaggcgccuccaagggu

SEQ ID NO: 2142154 - RNA, 19 nt, Artificial Sequence
  Description of Artificial Sequence: Synthetic oligonucleotide
gcgucugcacagcugucuc

SEQ ID NO: 2142155 - RNA, 19 nt, Artificial Sequence
  Description of Artificial Sequence: Synthetic oligonucleotide
ggaugccagcuugaugcac

SEQ ID NO: 2142156 - RNA, 19 nt, Artificial Sequence
  Description of Artificial Sequence: Synthetic oligonucleotide
ccugauguacucuuugguu

SEQ ID NO: 2142157 - RNA, 19 nt, Artificial Sequence
  Description of Artificial Sequence: Synthetic oligonucleotide
cuucugagacuggcuccuc

SEQ ID NO: 2142158 - RNA, 19 nt, Artificial Sequence
  Description of Artificial Sequence: Synthetic oligonucleotide
cuguguccucgauagggau

SEQ ID NO: 2142159 - RNA, 19 nt, Artificial Sequence
  Description of Artificial Sequence: Synthetic oligonucleotide
gcugugagacugcacaguu

SEQ ID NO: 2142160 - RNA, 19 nt, Artificial Sequence
  Description of Artificial Sequence: Synthetic oligonucleotide
gugcgggucugugacaccu

SEQ ID NO: 2142161 - RNA, 19 nt, Artificial Sequence
  Description of Artificial Sequence: Synthetic oligonucleotide
cacgacucucgucaccccu

SEQ ID NO: 2142162 - RNA, 19 nt, Artificial Sequence
  Description of Artificial Sequence: Synthetic oligonucleotide
ccuuggccccacugugucc

SEQ ID NO: 2142163 - RNA, 19 nt, Artificial Sequence
  Description of Artificial Sequence: Synthetic oligonucleotide
cugugacaaaguguccugu

SEQ ID NO: 2142164 - RNA, 19 nt, Artificial Sequence
  Description of Artificial Sequence: Synthetic oligonucleotide
acgacucucgucaccccuu

SEQ ID NO: 2142165 - RNA, 19 nt, Artificial Sequence
  Description of Artificial Sequence: Synthetic oligonucleotide
ccccuguucuuccagucga

SEQ ID NO: 2142166 - RNA, 19 nt, Artificial Sequence
  Description of Artificial Sequence: Synthetic oligonucleotide
agcggagcugucagccaga

SEQ ID NO: 2142167 - RNA, 19 nt, Artificial Sequence
  Description of Artificial Sequence: Synthetic oligonucleotide
gcgggucugugacaccuga

SEQ ID NO: 2142168 - RNA, 19 nt, Artificial Sequence
  Description of Artificial Sequence: Synthetic oligonucleotide
gcaaccgcgguggccgugc

SEQ ID NO: 2142169 - RNA, 19 nt, Artificial Sequence
  Description of Artificial Sequence: Synthetic oligonucleotide
caaccgcgguggccgugcc

SEQ ID NO: 2142170 - RNA, 19 nt, Artificial Sequence
  Description of Artificial Sequence: Synthetic oligonucleotide
ccuccucaucagcaaccgc

SEQ ID NO: 2142171 - RNA, 19 nt, Artificial Sequence
  Description of Artificial Sequence: Synthetic oligonucleotide
gggacuguaggagggacau

SEQ ID NO: 2142172 - RNA, 19 nt, Artificial Sequence
  Description of Artificial Sequence: Synthetic oligonucleotide
gcugucagccagaugcucu

SEQ ID NO: 2142173 - RNA, 19 nt, Artificial Sequence
  Description of Artificial Sequence: Synthetic oligonucleotide
ggcgccuccaagggugggc

SEQ ID NO: 2142174 - RNA, 19 nt, Artificial Sequence
  Description of Artificial Sequence: Synthetic oligonucleotide
agcaaccgcgguggccgug

SEQ ID NO: 2142175 - RNA, 19 nt, Artificial Sequence
  Description of Artificial Sequence: Synthetic oligonucleotide
gcucuugugcugggaggcc

SEQ ID NO: 2142176 - RNA, 19 nt, Artificial Sequence
  Description of Artificial Sequence: Synthetic oligonucleotide
cagccaguaccaggucauc

SEQ ID NO: 2142177 - RNA, 19 nt, Artificial Sequence
  Description of Artificial Sequence: Synthetic oligonucleotide
gcacaguuucagcggagcu

SEQ ID NO: 2142178 - RNA, 19 nt, Artificial Sequence
  Description of Artificial Sequence: Synthetic oligonucleotide
uguccucgauagggaucgu

SEQ ID NO: 2142179 - RNA, 19 nt, Artificial Sequence
  Description of Artificial Sequence: Synthetic oligonucleotide
gguggccgugcccucaagu

SEQ ID NO: 2142180 - RNA, 19 nt, Artificial Sequence
  Description of Artificial Sequence: Synthetic oligonucleotide
cuggcgaugggugcugggu

SEQ ID NO: 2142181 - RNA, 19 nt, Artificial Sequence
  Description of Artificial Sequence: Synthetic oligonucleotide
cugugagacugcacaguuu

SEQ ID NO: 2142182 - RNA, 19 nt, Artificial Sequence
  Description of Artificial Sequence: Synthetic oligonucleotide
agauggcggcuggccucgg

SEQ ID NO: 2142183 - RNA, 19 nt, Artificial Sequence
  Description of Artificial Sequence: Synthetic oligonucleotide
gcuugaugcaccccaucuu

SEQ ID NO: 2142184 - RNA, 19 nt, Artificial Sequence
  Description of Artificial Sequence: Synthetic oligonucleotide
ggugggccaauggccgccc

SEQ ID NO: 2142185 - RNA, 19 nt, Artificial Sequence
  Description of Artificial Sequence: Synthetic oligonucleotide
guccugccgagugaugccu

SEQ ID NO: 2142186 - RNA, 19 nt, Artificial Sequence
  Description of Artificial Sequence: Synthetic oligonucleotide
ggacuguaggagggacaug

SEQ ID NO: 2142187 - RNA, 19 nt, Artificial Sequence
  Description of Artificial Sequence: Synthetic oligonucleotide
gauggcggcuggccucggu

SEQ ID NO: 2142188 - RNA, 19 nt, Artificial Sequence
  Description of Artificial Sequence: Synthetic oligonucleotide
guggcgagacccuccucau

SEQ ID NO: 2142189 - RNA, 19 nt, Artificial Sequence
  Description of Artificial Sequence: Synthetic oligonucleotide
cuguaggcugucagggcuu

SEQ ID NO: 2142190 - RNA, 19 nt, Artificial Sequence
  Description of Artificial Sequence: Synthetic oligonucleotide
gccuugcuccacugguaga

SEQ ID NO: 2142191 - RNA, 19 nt, Artificial Sequence
  Description of Artificial Sequence: Synthetic oligonucleotide
cccucaagugcagagcucu

SEQ ID NO: 2142192 - RNA, 19 nt, Artificial Sequence
  Description of Artificial Sequence: Synthetic oligonucleotide
cuguguccugccgagugau

SEQ ID NO: 2142193 - RNA, 19 nt, Artificial Sequence
  Description of Artificial Sequence: Synthetic oligonucleotide
ggccucggugaacugcugu

SEQ ID NO: 2142194 - RNA, 19 nt, Artificial Sequence
  Description of Artificial Sequence: Synthetic oligonucleotide
ggguccacauaggcgccuc

SEQ ID NO: 2142195 - RNA, 19 nt, Artificial Sequence
  Description of Artificial Sequence: Synthetic oligonucleotide
cugucuccuucacgacucu

SEQ ID NO: 2142196 - RNA, 19 nt, Artificial Sequence
  Description of Artificial Sequence: Synthetic oligonucleotide
ggccaauggccgcccucca

SEQ ID NO: 2142197 - RNA, 19 nt, Artificial Sequence
  Description of Artificial Sequence: Synthetic oligonucleotide
ggcggcuggccucggugaa

SEQ ID NO: 2142198 - RNA, 19 nt, Artificial Sequence
  Description of Artificial Sequence: Synthetic oligonucleotide
ccaguaccaggucaucaau

SEQ ID NO: 2142199 - RNA, 19 nt, Artificial Sequence
  Description of Artificial Sequence: Synthetic oligonucleotide
ggucaucaauggacaaaau

SEQ ID NO: 2142200 - RNA, 19 nt, Artificial Sequence
  Description of Artificial Sequence: Synthetic oligonucleotide
gccgugcccucaagugcag

SEQ ID NO: 2142201 - RNA, 19 nt, Artificial Sequence
  Description of Artificial Sequence: Synthetic oligonucleotide
gcccucaagugcagagcuc

SEQ ID NO: 2142202 - RNA, 19 nt, Artificial Sequence
  Description of Artificial Sequence: Synthetic oligonucleotide
gugaugccucugaggccaa

SEQ ID NO: 2142203 - RNA, 19 nt, Artificial Sequence
  Description of Artificial Sequence: Synthetic oligonucleotide
gggcuggccgugagggaca

SEQ ID NO: 2142204 - RNA, 19 nt, Artificial Sequence
  Description of Artificial Sequence: Synthetic oligonucleotide
gggaggaugccagcuugau

SEQ ID NO: 2142205 - RNA, 19 nt, Artificial Sequence
  Description of Artificial Sequence: Synthetic oligonucleotide
cucugaggccaaggaucua

SEQ ID NO: 2142206 - RNA, 19 nt, Artificial Sequence
  Description of Artificial Sequence: Synthetic oligonucleotide
cgauagggaucgucuggaa

SEQ ID NO: 2142207 - RNA, 19 nt, Artificial Sequence
  Description of Artificial Sequence: Synthetic oligonucleotide
gcggcuggccucggugaac

SEQ ID NO: 2142208 - RNA, 19 nt, Artificial Sequence
  Description of Artificial Sequence: Synthetic oligonucleotide
guccuguguccugccgagu

SEQ ID NO: 2142209 - RNA, 19 nt, Artificial Sequence
  Description of Artificial Sequence: Synthetic oligonucleotide
ccagcuugaugcaccccau

SEQ ID NO: 2142210 - RNA, 19 nt, Artificial Sequence
  Description of Artificial Sequence: Synthetic oligonucleotide
ccucggugaacugcugugu

SEQ ID NO: 2142211 - RNA, 19 nt, Artificial Sequence
  Description of Artificial Sequence: Synthetic oligonucleotide
gucaccccuuggccccacu

SEQ ID NO: 2142212 - RNA, 19 nt, Artificial Sequence
  Description of Artificial Sequence: Synthetic oligonucleotide
cgugagggacaugcuguga

SEQ ID NO: 2142213 - RNA, 19 nt, Artificial Sequence
  Description of Artificial Sequence: Synthetic oligonucleotide
gccugacaucccuucccau

SEQ ID NO: 2142214 - RNA, 19 nt, Artificial Sequence
  Description of Artificial Sequence: Synthetic oligonucleotide
gcgguggccgugcccucaa

SEQ ID NO: 2142215 - RNA, 19 nt, Artificial Sequence
  Description of Artificial Sequence: Synthetic oligonucleotide
gugcugggaggccccuguu

SEQ ID NO: 2142216 - RNA, 19 nt, Artificial Sequence
  Description of Artificial Sequence: Synthetic oligonucleotide
ggccaaggaucuagaggau

SEQ ID NO: 2142217 - RNA, 19 nt, Artificial Sequence
  Description of Artificial Sequence: Synthetic oligonucleotide
gcuggccgugagggacaug

SEQ ID NO: 2142218 - RNA, 19 nt, Artificial Sequence
  Description of Artificial Sequence: Synthetic oligonucleotide
ccucaagugcagagcucuu

SEQ ID NO: 2142219 - RNA, 19 nt, Artificial Sequence
  Description of Artificial Sequence: Synthetic oligonucleotide
gcggagcugucagccagau

SEQ ID NO: 2142220 - RNA, 19 nt, Artificial Sequence
  Description of Artificial Sequence: Synthetic oligonucleotide
cgguggccgugcccucaag

SEQ ID NO: 2142221 - RNA, 19 nt, Artificial Sequence
  Description of Artificial Sequence: Synthetic oligonucleotide
ccgugcccucaagugcaga

SEQ ID NO: 2142222 - RNA, 19 nt, Artificial Sequence
  Description of Artificial Sequence: Synthetic oligonucleotide
gccccacuguguccucgau

SEQ ID NO: 2142223 - RNA, 19 nt, Artificial Sequence
  Description of Artificial Sequence: Synthetic oligonucleotide
cgccuccaagggugggcca

SEQ ID NO: 2142224 - RNA, 19 nt, Artificial Sequence
  Description of Artificial Sequence: Synthetic oligonucleotide
ggcuggccgugagggacau

SEQ ID NO: 2142225 - RNA, 19 nt, Artificial Sequence
  Description of Artificial Sequence: Synthetic oligonucleotide
cgucaccccuuggccccac

SEQ ID NO: 2142226 - RNA, 19 nt, Artificial Sequence
  Description of Artificial Sequence: Synthetic oligonucleotide
ccaacaccgcagggcugua

SEQ ID NO: 2142227 - RNA, 19 nt, Artificial Sequence
  Description of Artificial Sequence: Synthetic oligonucleotide
aaaauaguuccauaauucc

SEQ ID NO: 2142228 - RNA, 19 nt, Artificial Sequence
  Description of Artificial Sequence: Synthetic oligonucleotide
acuaaaaccucacugaugc

SEQ ID NO: 2142229 - RNA, 19 nt, Artificial Sequence
  Description of Artificial Sequence: Synthetic oligonucleotide
aaaagaauccauuaagugu

SEQ ID NO: 2142230 - RNA, 19 nt, Artificial Sequence
  Description of Artificial Sequence: Synthetic oligonucleotide
ucuaucuagacuaaaacca

SEQ ID NO: 2142231 - RNA, 19 nt, Artificial Sequence
  Description of Artificial Sequence: Synthetic oligonucleotide
cuagacuaaaaccagaccg

SEQ ID NO: 2142232 - RNA, 19 nt, Artificial Sequence
  Description of Artificial Sequence: Synthetic oligonucleotide
  modified_base (13)..(13): a, c, u, g, unknown or other
aaagucacgaganaaacgg

SEQ ID NO: 2142233 - RNA, 19 nt, Artificial Sequence
  Description of Artificial Sequence: Synthetic oligonucleotide
aaagaauccauuaaguguc

SEQ ID NO: 2142234 - RNA, 19 nt, Artificial Sequence
  Description of Artificial Sequence: Synthetic oligonucleotide
agagaaaagaggaagaccc

SEQ ID NO: 2142235 - RNA, 19 nt, Artificial Sequence
  Description of Artificial Sequence: Synthetic oligonucleotide
aucuaucuagacuaaaacc

SEQ ID NO: 2142236 - RNA, 19 nt, Artificial Sequence
  Description of Artificial Sequence: Synthetic oligonucleotide
cuugcaagagguaacaucg

SEQ ID NO: 2142237 - RNA, 19 nt, Artificial Sequence
  Description of Artificial Sequence: Synthetic oligonucleotide
aauccauuaagugucaccg

SEQ ID NO: 2142238 - RNA, 19 nt, Artificial Sequence
  Description of Artificial Sequence: Synthetic oligonucleotide
aaccagaccgacuauaagg

SEQ ID NO: 2142239 - RNA, 19 nt, Artificial Sequence
  Description of Artificial Sequence: Synthetic oligonucleotide
aauaguaaaaccaguacag

SEQ ID NO: 2142240 - RNA, 19 nt, Artificial Sequence
  Description of Artificial Sequence: Synthetic oligonucleotide
ugcaaaauuaaacaagaug

SEQ ID NO: 2142241 - RNA, 19 nt, Artificial Sequence
  Description of Artificial Sequence: Synthetic oligonucleotide
uuccuaauagcuuagaaga

SEQ ID NO: 2142242 - RNA, 19 nt, Artificial Sequence
  Description of Artificial Sequence: Synthetic oligonucleotide
  modified_base (2)..(2): a, c, u, g, unknown or other
anaaacggggaaaucaagc

SEQ ID NO: 2142243 - RNA, 19 nt, Artificial Sequence
  Description of Artificial Sequence: Synthetic oligonucleotide
aaaugaggcaauugugccc

SEQ ID NO: 2142244 - RNA, 19 nt, Artificial Sequence
  Description of Artificial Sequence: Synthetic oligonucleotide
acaauaguaaaaccaguac

SEQ ID NO: 2142245 - RNA, 19 nt, Artificial Sequence
  Description of Artificial Sequence: Synthetic oligonucleotide
uuuauaaacaacagcaaua

SEQ ID NO: 2142246 - RNA, 19 nt, Artificial Sequence
  Description of Artificial Sequence: Synthetic oligonucleotide
uccauuaagugucaccgcg

SEQ ID NO: 2142247 - RNA, 19 nt, Artificial Sequence
  Description of Artificial Sequence: Synthetic oligonucleotide
aaagaaauugcaugcaaaa

SEQ ID NO: 2142248 - RNA, 19 nt, Artificial Sequence
  Description of Artificial Sequence: Synthetic oligonucleotide
auugcaugcaaaauuaaac

SEQ ID NO: 2142249 - RNA, 19 nt, Artificial Sequence
  Description of Artificial Sequence: Synthetic oligonucleotide
aaggcaaauagcuggagca

SEQ ID NO: 2142250 - RNA, 19 nt, Artificial Sequence
  Description of Artificial Sequence: Synthetic oligonucleotide
agagguaacaucgccaugc

SEQ ID NO: 2142251 - RNA, 19 nt, Artificial Sequence
  Description of Artificial Sequence: Synthetic oligonucleotide
  modified_base (14)..(14): a, c, u, g, unknown or other
caaagucacgaganaaacg

SEQ ID NO: 2142252 - RNA, 19 nt, Artificial Sequence
  Description of Artificial Sequence: Synthetic oligonucleotide
ugcccuucuguuaaaauag

SEQ ID NO: 2142253 - RNA, 19 nt, Artificial Sequence
  Description of Artificial Sequence: Synthetic oligonucleotide
ugccauucauauuuuauag

SEQ ID NO: 2142254 - RNA, 19 nt, Artificial Sequence
  Description of Artificial Sequence: Synthetic oligonucleotide
uugcaugcaaaauuaaaca

SEQ ID NO: 2142255 - RNA, 19 nt, Artificial Sequence
  Description of Artificial Sequence: Synthetic oligonucleotide
cuuccuaauagcuuagaag

SEQ ID NO: 2142256 - RNA, 19 nt, Artificial Sequence
  Description of Artificial Sequence: Synthetic oligonucleotide
aguuccauaauuccugaag

SEQ ID NO: 2142257 - RNA, 19 nt, Artificial Sequence
  Description of Artificial Sequence: Synthetic oligonucleotide
acagauacucagucgaagg

SEQ ID NO: 2142258 - RNA, 19 nt, Artificial Sequence
  Description of Artificial Sequence: Synthetic oligonucleotide
uggauuugcaagcugcugc

SEQ ID NO: 2142259 - RNA, 19 nt, Artificial Sequence
  Description of Artificial Sequence: Synthetic oligonucleotide
agcaauaucuaucuagacu

SEQ ID NO: 2142260 - RNA, 19 nt, Artificial Sequence
  Description of Artificial Sequence: Synthetic oligonucleotide
aagcaauccaggaugugcc

SEQ ID NO: 2142261 - RNA, 19 nt, Artificial Sequence
  Description of Artificial Sequence: Synthetic oligonucleotide
aaagucuuacuucuaguaa

SEQ ID NO: 2142262 - RNA, 19 nt, Artificial Sequence
  Description of Artificial Sequence: Synthetic oligonucleotide
acuaaaaccagaccgacua

SEQ ID NO: 2142263 - RNA, 19 nt, Artificial Sequence
  Description of Artificial Sequence: Synthetic oligonucleotide
uggagcacaacccacacuc

SEQ ID NO: 2142264 - RNA, 19 nt, Artificial Sequence
  Description of Artificial Sequence: Synthetic oligonucleotide
aaugucacuaaaaccucac

SEQ ID NO: 2142265 - RNA, 19 nt, Artificial Sequence
  Description of Artificial Sequence: Synthetic oligonucleotide
ugugugaccaggcuuugag

SEQ ID NO: 2142266 - RNA, 19 nt, Artificial Sequence
  Description of Artificial Sequence: Synthetic oligonucleotide
aacaucgccaugccgcgac

SEQ ID NO: 2142267 - RNA, 19 nt, Artificial Sequence
  Description of Artificial Sequence: Synthetic oligonucleotide
guuccauaauuccugaagc

SEQ ID NO: 2142268 - RNA, 19 nt, Artificial Sequence
  Description of Artificial Sequence: Synthetic oligonucleotide
aauugugcccuucuguuaa

SEQ ID NO: 2142269 - RNA, 19 nt, Artificial Sequence
  Description of Artificial Sequence: Synthetic oligonucleotide
uagacuaaaaccagaccga

SEQ ID NO: 2142270 - RNA, 19 nt, Artificial Sequence
  Description of Artificial Sequence: Synthetic oligonucleotide
ugugucuagagagaaaaga

SEQ ID NO: 2142271 - RNA, 19 nt, Artificial Sequence
  Description of Artificial Sequence: Synthetic oligonucleotide
ucuagacuaaaaccagacc

SEQ ID NO: 2142272 - RNA, 19 nt, Artificial Sequence
  Description of Artificial Sequence: Synthetic oligonucleotide
ggaauuuauaaacaacagc

SEQ ID NO: 2142273 - RNA, 19 nt, Artificial Sequence
  Description of Artificial Sequence: Synthetic oligonucleotide
cuaucuagacuaaaaccag

SEQ ID NO: 2142274 - RNA, 19 nt, Artificial Sequence
  Description of Artificial Sequence: Synthetic oligonucleotide
ucccugaacaacaaaggca

SEQ ID NO: 2142275 - RNA, 19 nt, Artificial Sequence
  Description of Artificial Sequence: Synthetic oligonucleotide
uuaacaauuccuugggaau

SEQ ID NO: 2142276 - RNA, 19 nt, Artificial Sequence
  Description of Artificial Sequence: Synthetic oligonucleotide
aaauaguuccauaauuccu

SEQ ID NO: 2142277 - RNA, 19 nt, Artificial Sequence
  Description of Artificial Sequence: Synthetic oligonucleotide
aaacggggaaaucaagcca

SEQ ID NO: 2142278 - RNA, 19 nt, Artificial Sequence
  Description of Artificial Sequence: Synthetic oligonucleotide
agagagaaaagaggaagac

SEQ ID NO: 2142279 - RNA, 19 nt, Artificial Sequence
  Description of Artificial Sequence: Synthetic oligonucleotide
agaggaagacccuagcaug

SEQ ID NO: 2142280 - RNA, 19 nt, Artificial Sequence
  Description of Artificial Sequence: Synthetic oligonucleotide
  modified_base (5)..(5): a, c, u, g, unknown or other
gaganaaacggggaaauca

SEQ ID NO: 2142281 - RNA, 19 nt, Artificial Sequence
  Description of Artificial Sequence: Synthetic oligonucleotide
cauauuuuauagcuaguuc

SEQ ID NO: 2142282 - RNA, 19 nt, Artificial Sequence
  Description of Artificial Sequence: Synthetic oligonucleotide
uaaaaccucacugaugcac

SEQ ID NO: 2142283 - RNA, 19 nt, Artificial Sequence
  Description of Artificial Sequence: Synthetic oligonucleotide
acgacaacagcucucugag

SEQ ID NO: 2142284 - RNA, 19 nt, Artificial Sequence
  Description of Artificial Sequence: Synthetic oligonucleotide
gaucugauugucucuggag

SEQ ID NO: 2142285 - RNA, 19 nt, Artificial Sequence
  Description of Artificial Sequence: Synthetic oligonucleotide
accagaccgacuauaaggc

SEQ ID NO: 2142286 - RNA, 19 nt, Artificial Sequence
  Description of Artificial Sequence: Synthetic oligonucleotide
ugcaagagguaacaucgcc

SEQ ID NO: 2142287 - RNA, 19 nt, Artificial Sequence
  Description of Artificial Sequence: Synthetic oligonucleotide
ugugaccaggcuuugagaa

SEQ ID NO: 2142288 - RNA, 19 nt, Artificial Sequence
  Description of Artificial Sequence: Synthetic oligonucleotide
uuaagugucaccgcguuaa

SEQ ID NO: 2142289 - RNA, 19 nt, Artificial Sequence
  Description of Artificial Sequence: Synthetic oligonucleotide
aucuagacuaaaaccagac

SEQ ID NO: 2142290 - RNA, 19 nt, Artificial Sequence
  Description of Artificial Sequence: Synthetic oligonucleotide
aacggggaaaucaagccag

SEQ ID NO: 2142291 - RNA, 19 nt, Artificial Sequence
  Description of Artificial Sequence: Synthetic oligonucleotide
gaaggcacgguucauagaa

SEQ ID NO: 2142292 - RNA, 19 nt, Artificial Sequence
  Description of Artificial Sequence: Synthetic oligonucleotide
aaaccagaccgacuauaag

SEQ ID NO: 2142293 - RNA, 19 nt, Artificial Sequence
  Description of Artificial Sequence: Synthetic oligonucleotide
aucaagccagaguccaugc

SEQ ID NO: 2142294 - RNA, 19 nt, Artificial Sequence
  Description of Artificial Sequence: Synthetic oligonucleotide
aagacccuagcauggcggg

SEQ ID NO: 2142295 - RNA, 19 nt, Artificial Sequence
  Description of Artificial Sequence: Synthetic oligonucleotide
gggaaaucaagccagaguc

SEQ ID NO: 2142296 - RNA, 19 nt, Artificial Sequence
  Description of Artificial Sequence: Synthetic oligonucleotide
uuuauagcuaguucuguuu

SEQ ID NO: 2142297 - RNA, 19 nt, Artificial Sequence
  Description of Artificial Sequence: Synthetic oligonucleotide
uaucuagacuaaaaccaga

SEQ ID NO: 2142298 - RNA, 19 nt, Artificial Sequence
  Description of Artificial Sequence: Synthetic oligonucleotide
aacaauaguaaaaccagua

SEQ ID NO: 2142299 - RNA, 19 nt, Artificial Sequence
  Description of Artificial Sequence: Synthetic oligonucleotide
uucucugacaagucaggag

SEQ ID NO: 2142300 - RNA, 19 nt, Artificial Sequence
  Description of Artificial Sequence: Synthetic oligonucleotide
  modified_base (11)..(11): a, c, u, g, unknown or other
agucacgaganaaacgggg

SEQ ID NO: 2142301 - RNA, 19 nt, Artificial Sequence
  Description of Artificial Sequence: Synthetic oligonucleotide
gaaaagaggaagacccuag

SEQ ID NO: 2142302 - RNA, 19 nt, Artificial Sequence
  Description of Artificial Sequence: Synthetic oligonucleotide
uuucauagguccgagcugu

SEQ ID NO: 2142303 - RNA, 19 nt, Artificial Sequence
  Description of Artificial Sequence: Synthetic oligonucleotide
gugucuagagagaaaagag

SEQ ID NO: 2142304 - RNA, 19 nt, Artificial Sequence
  Description of Artificial Sequence: Synthetic oligonucleotide
aguguugggugacaauguc

SEQ ID NO: 2142305 - RNA, 19 nt, Artificial Sequence
  Description of Artificial Sequence: Synthetic oligonucleotide
gagagaaaagaggaagacc

SEQ ID NO: 2142306 - RNA, 19 nt, Artificial Sequence
  Description of Artificial Sequence: Synthetic oligonucleotide
aaucaagccagaguccaug

SEQ ID NO: 2142307 - RNA, 19 nt, Artificial Sequence
  Description of Artificial Sequence: Synthetic oligonucleotide
aacccacacucggauaugc

SEQ ID NO: 2142308 - RNA, 19 nt, Artificial Sequence
  Description of Artificial Sequence: Synthetic oligonucleotide
ucuuccuaauagcuuagaa

SEQ ID NO: 2142309 - RNA, 19 nt, Artificial Sequence
  Description of Artificial Sequence: Synthetic oligonucleotide
cuguaggccguauagcgcc

SEQ ID NO: 2142310 - RNA, 19 nt, Artificial Sequence
  Description of Artificial Sequence: Synthetic oligonucleotide
uugcaaagucccuugugcc

SEQ ID NO: 2142311 - RNA, 19 nt, Artificial Sequence
  Description of Artificial Sequence: Synthetic oligonucleotide
auaaggccccuccggaagc

SEQ ID NO: 2142312 - RNA, 19 nt, Artificial Sequence
  Description of Artificial Sequence: Synthetic oligonucleotide
gacaggacaagcuugcaaa

SEQ ID NO: 2142313 - RNA, 19 nt, Artificial Sequence
  Description of Artificial Sequence: Synthetic oligonucleotide
uuauagcuaguucuguuuu

SEQ ID NO: 2142314 - RNA, 19 nt, Artificial Sequence
  Description of Artificial Sequence: Synthetic oligonucleotide
gaagacccuagcauggcgg

SEQ ID NO: 2142315 - RNA, 19 nt, Artificial Sequence
  Description of Artificial Sequence: Synthetic oligonucleotide
  modified_base (3)..(3): a, c, u, g, unknown or other
ganaaacggggaaaucaag

SEQ ID NO: 2142316 - RNA, 19 nt, Artificial Sequence
  Description of Artificial Sequence: Synthetic oligonucleotide
gguaacaucgccaugccgc

SEQ ID NO: 2142317 - RNA, 19 nt, Artificial Sequence
  Description of Artificial Sequence: Synthetic oligonucleotide
uuccauaauuccugaagcu

SEQ ID NO: 2142318 - RNA, 19 nt, Artificial Sequence
  Description of Artificial Sequence: Synthetic oligonucleotide
ucauauuuuauagcuaguu

SEQ ID NO: 2142319 - RNA, 19 nt, Artificial Sequence
  Description of Artificial Sequence: Synthetic oligonucleotide
gaaaucaagccagagucca

SEQ ID NO: 2142320 - RNA, 19 nt, Artificial Sequence
  Description of Artificial Sequence: Synthetic oligonucleotide
aagaaauugcaugcaaaau

SEQ ID NO: 2142321 - RNA, 19 nt, Artificial Sequence
  Description of Artificial Sequence: Synthetic oligonucleotide
uuuuauagcuaguucuguu

SEQ ID NO: 2142322 - RNA, 19 nt, Artificial Sequence
  Description of Artificial Sequence: Synthetic oligonucleotide
agacuaaaaccagaccgac

SEQ ID NO: 2142323 - RNA, 19 nt, Artificial Sequence
  Description of Artificial Sequence: Synthetic oligonucleotide
gagcacaacccacacucgg

SEQ ID NO: 2142324 - RNA, 19 nt, Artificial Sequence
  Description of Artificial Sequence: Synthetic oligonucleotide
cauagguccgagcugugcc

SEQ ID NO: 2142325 - RNA, 19 nt, Artificial Sequence
  Description of Artificial Sequence: Synthetic oligonucleotide
  modified_base (17)..(17): a, c, u, g, unknown or other
aaccaaagucacgaganaa

SEQ ID NO: 2142326 - RNA, 19 nt, Artificial Sequence
  Description of Artificial Sequence: Synthetic oligonucleotide
aggcuuugagaacuguguc

SEQ ID NO: 2142327 - RNA, 19 nt, Artificial Sequence
  Description of Artificial Sequence: Synthetic oligonucleotide
guaacaucgccaugccgcg

SEQ ID NO: 2142328 - RNA, 19 nt, Artificial Sequence
  Description of Artificial Sequence: Synthetic oligonucleotide
guacagaaaccaugaaggc

SEQ ID NO: 2142329 - RNA, 19 nt, Artificial Sequence
  Description of Artificial Sequence: Synthetic oligonucleotide
gaggaagacccuagcaugg

SEQ ID NO: 2142330 - RNA, 19 nt, Artificial Sequence
  Description of Artificial Sequence: Synthetic oligonucleotide
aaaaccucacugaugcacu

SEQ ID NO: 2142331 - RNA, 19 nt, Artificial Sequence
  Description of Artificial Sequence: Synthetic oligonucleotide
uuugagaacugugucuaga

SEQ ID NO: 2142332 - RNA, 19 nt, Artificial Sequence
  Description of Artificial Sequence: Synthetic oligonucleotide
ugauugucucuggagcugg

SEQ ID NO: 2142333 - RNA, 19 nt, Artificial Sequence
  Description of Artificial Sequence: Synthetic oligonucleotide
uacucagucgaaggcacgg

SEQ ID NO: 2142334 - RNA, 19 nt, Artificial Sequence
  Description of Artificial Sequence: Synthetic oligonucleotide
acugugucuagagagaaaa

SEQ ID NO: 2142335 - RNA, 19 nt, Artificial Sequence
  Description of Artificial Sequence: Synthetic oligonucleotide
cacauaaccaaagucacga

SEQ ID NO: 2142336 - RNA, 19 nt, Artificial Sequence
  Description of Artificial Sequence: Synthetic oligonucleotide
  modified_base (12)..(12): a, c, u, g, unknown or other
aagucacgaganaaacggg

SEQ ID NO: 2142337 - RNA, 19 nt, Artificial Sequence
  Description of Artificial Sequence: Synthetic oligonucleotide
cuaauagcuuagaagaucu

SEQ ID NO: 2142338 - RNA, 19 nt, Artificial Sequence
  Description of Artificial Sequence: Synthetic oligonucleotide
aauaucuaucuagacuaaa

SEQ ID NO: 2142339 - RNA, 19 nt, Artificial Sequence
  Description of Artificial Sequence: Synthetic oligonucleotide
acaacccacacucggauau

SEQ ID NO: 2142340 - RNA, 19 nt, Artificial Sequence
  Description of Artificial Sequence: Synthetic oligonucleotide
gauacucagucgaaggcac

SEQ ID NO: 2142341 - RNA, 19 nt, Artificial Sequence
  Description of Artificial Sequence: Synthetic oligonucleotide
ugcuuccaagcaauccagg

SEQ ID NO: 2142342 - RNA, 19 nt, Artificial Sequence
  Description of Artificial Sequence: Synthetic oligonucleotide
aaacaagaugugccauuca

SEQ ID NO: 2142343 - RNA, 19 nt, Artificial Sequence
  Description of Artificial Sequence: Synthetic oligonucleotide
uuuuccaacucuuccuaau

SEQ ID NO: 2142344 - RNA, 19 nt, Artificial Sequence
  Description of Artificial Sequence: Synthetic oligonucleotide
ugaccaggcuuugagaacu

SEQ ID NO: 2142345 - RNA, 19 nt, Artificial Sequence
  Description of Artificial Sequence: Synthetic oligonucleotide
uuugcaagcugcugcggga

SEQ ID NO: 2142346 - RNA, 19 nt, Artificial Sequence
  Description of Artificial Sequence: Synthetic oligonucleotide
ggauuugcaagcugcugcg

SEQ ID NO: 2142347 - RNA, 19 nt, Artificial Sequence
  Description of Artificial Sequence: Synthetic oligonucleotide
  modified_base (9)..(9): a, c, u, g, unknown or other
ucacgaganaaacggggaa

SEQ ID NO: 2142348 - RNA, 19 nt, Artificial Sequence
  Description of Artificial Sequence: Synthetic oligonucleotide
aaaaccagaccgacuauaa

SEQ ID NO: 2142349 - RNA, 19 nt, Artificial Sequence
  Description of Artificial Sequence: Synthetic oligonucleotide
gcaugcaaaauuaaacaag

SEQ ID NO: 2142350 - RNA, 19 nt, Artificial Sequence
  Description of Artificial Sequence: Synthetic oligonucleotide
uccuaauagcuuagaagau

SEQ ID NO: 2142351 - RNA, 19 nt, Artificial Sequence
  Description of Artificial Sequence: Synthetic oligonucleotide
uugggugacaaugucacua

SEQ ID NO: 2142352 - RNA, 19 nt, Artificial Sequence
  Description of Artificial Sequence: Synthetic oligonucleotide
agaccgacuauaaggcccc

SEQ ID NO: 2142353 - RNA, 19 nt, Artificial Sequence
  Description of Artificial Sequence: Synthetic oligonucleotide
acauaaccaaagucacgag

SEQ ID NO: 2142354 - RNA, 19 nt, Artificial Sequence
  Description of Artificial Sequence: Synthetic oligonucleotide
uccaagcaauccaggaugu

SEQ ID NO: 2142355 - RNA, 19 nt, Artificial Sequence
  Description of Artificial Sequence: Synthetic oligonucleotide
ucagucgaaggcacgguuc

SEQ ID NO: 2142356 - RNA, 19 nt, Artificial Sequence
  Description of Artificial Sequence: Synthetic oligonucleotide
aauuccuugggaauuuaua

SEQ ID NO: 2142357 - RNA, 19 nt, Artificial Sequence
  Description of Artificial Sequence: Synthetic oligonucleotide
agauacucagucgaaggca

SEQ ID NO: 2142358 - RNA, 19 nt, Artificial Sequence
  Description of Artificial Sequence: Synthetic oligonucleotide
acagcuugcaagagguaac

SEQ ID NO: 2142359 - RNA, 19 nt, Artificial Sequence
  Description of Artificial Sequence: Synthetic oligonucleotide
  modified_base (4)..(4): a, c, u, g, unknown or other
aganaaacggggaaaucaa

SEQ ID NO: 2142360 - RNA, 19 nt, Artificial Sequence
  Description of Artificial Sequence: Synthetic oligonucleotide
auuuuauagcuaguucugu

SEQ ID NO: 2142361 - RNA, 19 nt, Artificial Sequence
  Description of Artificial Sequence: Synthetic oligonucleotide
gggaauuuauaaacaacag

SEQ ID NO: 2142362 - RNA, 19 nt, Artificial Sequence
  Description of Artificial Sequence: Synthetic oligonucleotide
aagagguaacaucgccaug

SEQ ID NO: 2142363 - RNA, 19 nt, Artificial Sequence
  Description of Artificial Sequence: Synthetic oligonucleotide
auaucuaucuagacuaaaa

SEQ ID NO: 2142364 - RNA, 19 nt, Artificial Sequence
  Description of Artificial Sequence: Synthetic oligonucleotide
gccuguaggccguauagcg

SEQ ID NO: 2142365 - RNA, 19 nt, Artificial Sequence
  Description of Artificial Sequence: Synthetic oligonucleotide
agcugguggagcacaaccc

SEQ ID NO: 2142366 - RNA, 19 nt, Artificial Sequence
  Description of Artificial Sequence: Synthetic oligonucleotide
ugcugugugaccaggcuuu

SEQ ID NO: 2142367 - RNA, 19 nt, Artificial Sequence
  Description of Artificial Sequence: Synthetic oligonucleotide
ucccuugugccaauccgug

SEQ ID NO: 2142368 - RNA, 19 nt, Artificial Sequence
  Description of Artificial Sequence: Synthetic oligonucleotide
gacguucucugacaaguca

SEQ ID NO: 2142369 - RNA, 19 nt, Artificial Sequence
  Description of Artificial Sequence: Synthetic oligonucleotide
cuuucauagguccgagcug

SEQ ID NO: 2142370 - RNA, 19 nt, Artificial Sequence
  Description of Artificial Sequence: Synthetic oligonucleotide
uguaggccguauagcgccg

SEQ ID NO: 2142371 - RNA, 19 nt, Artificial Sequence
  Description of Artificial Sequence: Synthetic oligonucleotide
gacgcccuuggccuuagcc

SEQ ID NO: 2142372 - RNA, 19 nt, Artificial Sequence
  Description of Artificial Sequence: Synthetic oligonucleotide
uaaaaccagaccgacuaua

SEQ ID NO: 2142373 - RNA, 19 nt, Artificial Sequence
  Description of Artificial Sequence: Synthetic oligonucleotide
gcguuaacaauuccuuggg

SEQ ID NO: 2142374 - RNA, 19 nt, Artificial Sequence
  Description of Artificial Sequence: Synthetic oligonucleotide
aggcaaauagcuggagcac

SEQ ID NO: 2142375 - RNA, 19 nt, Artificial Sequence
  Description of Artificial Sequence: Synthetic oligonucleotide
gugccauccuggcaggacg

SEQ ID NO: 2142376 - RNA, 19 nt, Artificial Sequence
  Description of Artificial Sequence: Synthetic oligonucleotide
ugguggagcacaacccaca

SEQ ID NO: 2142377 - RNA, 19 nt, Artificial Sequence
  Description of Artificial Sequence: Synthetic oligonucleotide
auaauuccugaagcuuaac

SEQ ID NO: 2142378 - RNA, 19 nt, Artificial Sequence
  Description of Artificial Sequence: Synthetic oligonucleotide
caagaugugccauucauau

SEQ ID NO: 2142379 - RNA, 19 nt, Artificial Sequence
  Description of Artificial Sequence: Synthetic oligonucleotide
ugucaccgcguuaacaauu

SEQ ID NO: 2142380 - RNA, 19 nt, Artificial Sequence
  Description of Artificial Sequence: Synthetic oligonucleotide
uaacaauuccuugggaauu

SEQ ID NO: 2142381 - RNA, 19 nt, Artificial Sequence
  Description of Artificial Sequence: Synthetic oligonucleotide
cugccuguaggccguauag

SEQ ID NO: 2142382 - RNA, 19 nt, Artificial Sequence
  Description of Artificial Sequence: Synthetic oligonucleotide
gagguaacaucgccaugcc

SEQ ID NO: 2142383 - RNA, 19 nt, Artificial Sequence
  Description of Artificial Sequence: Synthetic oligonucleotide
  modified_base (7)..(7): a, c, u, g, unknown or other
acgaganaaacggggaaau

SEQ ID NO: 2142384 - RNA, 19 nt, Artificial Sequence
  Description of Artificial Sequence: Synthetic oligonucleotide
ucugacaagucaggagagc

SEQ ID NO: 2142385 - RNA, 19 nt, Artificial Sequence
  Description of Artificial Sequence: Synthetic oligonucleotide
aggaagacccuagcauggc

SEQ ID NO: 2142386 - RNA, 19 nt, Artificial Sequence
  Description of Artificial Sequence: Synthetic oligonucleotide
gauuugcaagcugcugcgg

SEQ ID NO: 2142387 - RNA, 19 nt, Artificial Sequence
  Description of Artificial Sequence: Synthetic oligonucleotide
ugggugacaaugucacuaa

SEQ ID NO: 2142388 - RNA, 19 nt, Artificial Sequence
  Description of Artificial Sequence: Synthetic oligonucleotide
aaagucccuugugccaauc

SEQ ID NO: 2142389 - RNA, 19 nt, Artificial Sequence
  Description of Artificial Sequence: Synthetic oligonucleotide
cagcaauaucuaucuagac

SEQ ID NO: 2142390 - RNA, 19 nt, Artificial Sequence
  Description of Artificial Sequence: Synthetic oligonucleotide
cugugucuagagagaaaag

SEQ ID NO: 2142391 - RNA, 19 nt, Artificial Sequence
  Description of Artificial Sequence: Synthetic oligonucleotide
gccauucauauuuuauagc

SEQ ID NO: 2142392 - RNA, 19 nt, Artificial Sequence
  Description of Artificial Sequence: Synthetic oligonucleotide
gugccaauccgugaggcgc

SEQ ID NO: 2142393 - RNA, 19 nt, Artificial Sequence
  Description of Artificial Sequence: Synthetic oligonucleotide
aguccaugcuuccaagcaa

SEQ ID NO: 2142394 - RNA, 19 nt, Artificial Sequence
  Description of Artificial Sequence: Synthetic oligonucleotide
  modified_base (16)..(16): a, c, u, g, unknown or other
accaaagucacgaganaaa

SEQ ID NO: 2142395 - RNA, 19 nt, Artificial Sequence
  Description of Artificial Sequence: Synthetic oligonucleotide
  modified_base (10)..(10): a, c, u, g, unknown or other
gucacgaganaaacgggga

SEQ ID NO: 2142396 - RNA, 19 nt, Artificial Sequence
  Description of Artificial Sequence: Synthetic oligonucleotide
aagaugugccauucauauu

SEQ ID NO: 2142397 - RNA, 19 nt, Artificial Sequence
  Description of Artificial Sequence: Synthetic oligonucleotide
uugugccaauccgugaggc

SEQ ID NO: 2142398 - RNA, 19 nt, Artificial Sequence
  Description of Artificial Sequence: Synthetic oligonucleotide
cugcugcgggaaaugaggc

SEQ ID NO: 2142399 - RNA, 19 nt, Artificial Sequence
  Description of Artificial Sequence: Synthetic oligonucleotide
aagugucaccgcguuaaca

SEQ ID NO: 2142400 - RNA, 19 nt, Artificial Sequence
  Description of Artificial Sequence: Synthetic oligonucleotide
auagguccgagcugugcca

SEQ ID NO: 2142401 - RNA, 19 nt, Artificial Sequence
  Description of Artificial Sequence: Synthetic oligonucleotide
caaugucacuaaaaccuca

SEQ ID NO: 2142402 - RNA, 19 nt, Artificial Sequence
  Description of Artificial Sequence: Synthetic oligonucleotide
cacgacaacagcucucuga

SEQ ID NO: 2142403 - RNA, 19 nt, Artificial Sequence
  Description of Artificial Sequence: Synthetic oligonucleotide
cauucauauuuuauagcua

SEQ ID NO: 2142404 - RNA, 19 nt, Artificial Sequence
  Description of Artificial Sequence: Synthetic oligonucleotide
ggaagacccuagcauggcg

SEQ ID NO: 2142405 - RNA, 19 nt, Artificial Sequence
  Description of Artificial Sequence: Synthetic oligonucleotide
cucacagcuugcaagaggu

SEQ ID NO: 2142406 - RNA, 19 nt, Artificial Sequence
  Description of Artificial Sequence: Synthetic oligonucleotide
ugugcccuucuguuaaaau

SEQ ID NO: 2142407 - RNA, 19 nt, Artificial Sequence
  Description of Artificial Sequence: Synthetic oligonucleotide
cucuuucauagguccgagc

SEQ ID NO: 2142408 - RNA, 19 nt, Artificial Sequence
  Description of Artificial Sequence: Synthetic oligonucleotide
ugacguucucugacaaguc

SEQ ID NO: 2142409 - RNA, 19 nt, Artificial Sequence
  Description of Artificial Sequence: Synthetic oligonucleotide
aucgccaugccgcgacagg

SEQ ID NO: 2142410 - RNA, 19 nt, Artificial Sequence
  Description of Artificial Sequence: Synthetic oligonucleotide
gacccuagcauggcggggc

SEQ ID NO: 2142411 - RNA, 19 nt, Artificial Sequence
  Description of Artificial Sequence: Synthetic oligonucleotide
uccgagcugugccauccug

SEQ ID NO: 2142412 - RNA, 19 nt, Artificial Sequence
  Description of Artificial Sequence: Synthetic oligonucleotide
ugccaauccgugaggcgca

SEQ ID NO: 2142413 - RNA, 19 nt, Artificial Sequence
  Description of Artificial Sequence: Synthetic oligonucleotide
ucaccgcguuaacaauucc

SEQ ID NO: 2142414 - RNA, 19 nt, Artificial Sequence
  Description of Artificial Sequence: Synthetic oligonucleotide
gcuugcaagagguaacauc

SEQ ID NO: 2142415 - RNA, 19 nt, Artificial Sequence
  Description of Artificial Sequence: Synthetic oligonucleotide
uaagugucaccgcguuaac

SEQ ID NO: 2142416 - RNA, 19 nt, Artificial Sequence
  Description of Artificial Sequence: Synthetic oligonucleotide
ccauucauauuuuauagcu

SEQ ID NO: 2142417 - RNA, 19 nt, Artificial Sequence
  Description of Artificial Sequence: Synthetic oligonucleotide
gaacugugucuagagagaa

SEQ ID NO: 2142418 - RNA, 19 nt, Artificial Sequence
  Description of Artificial Sequence: Synthetic oligonucleotide
cacgguucauagaaaggca

SEQ ID NO: 2142419 - RNA, 19 nt, Artificial Sequence
  Description of Artificial Sequence: Synthetic oligonucleotide
accucacugaugcacuaaa

SEQ ID NO: 2142420 - RNA, 19 nt, Artificial Sequence
  Description of Artificial Sequence: Synthetic oligonucleotide
ccuugugccaauccgugag

SEQ ID NO: 2142421 - RNA, 19 nt, Artificial Sequence
  Description of Artificial Sequence: Synthetic oligonucleotide
aggcauucccugaacaaca

SEQ ID NO: 2142422 - RNA, 19 nt, Artificial Sequence
  Description of Artificial Sequence: Synthetic oligonucleotide
ggaaaucaagccagagucc

SEQ ID NO: 2142423 - RNA, 19 nt, Artificial Sequence
  Description of Artificial Sequence: Synthetic oligonucleotide
aaggccccuccggaagccc

SEQ ID NO: 2142424 - RNA, 19 nt, Artificial Sequence
  Description of Artificial Sequence: Synthetic oligonucleotide
ugccgcgacaggacaagcu

SEQ ID NO: 2142425 - RNA, 19 nt, Artificial Sequence
  Description of Artificial Sequence: Synthetic oligonucleotide
auuaagugucaccgcguua

SEQ ID NO: 2142426 - RNA, 19 nt, Artificial Sequence
  Description of Artificial Sequence: Synthetic oligonucleotide
caccuuggaauuuccaaaa

SEQ ID NO: 2142427 - RNA, 19 nt, Artificial Sequence
  Description of Artificial Sequence: Synthetic oligonucleotide
ugaggcgcaggaugcugug

SEQ ID NO: 2142428 - RNA, 19 nt, Artificial Sequence
  Description of Artificial Sequence: Synthetic oligonucleotide
ccuaauagcuuagaagauc

SEQ ID NO: 2142429 - RNA, 19 nt, Artificial Sequence
  Description of Artificial Sequence: Synthetic oligonucleotide
guucauagaaaggcaaaua

SEQ ID NO: 2142430 - RNA, 19 nt, Artificial Sequence
  Description of Artificial Sequence: Synthetic oligonucleotide
cugaugaccacaggcucac

SEQ ID NO: 2142431 - RNA, 19 nt, Artificial Sequence
  Description of Artificial Sequence: Synthetic oligonucleotide
  modified_base (15)..(15): a, c, u, g, unknown or other
ccaaagucacgaganaaac

SEQ ID NO: 2142432 - RNA, 19 nt, Artificial Sequence
  Description of Artificial Sequence: Synthetic oligonucleotide
ugccuguaggccguauagc

SEQ ID NO: 2142433 - RNA, 19 nt, Artificial Sequence
  Description of Artificial Sequence: Synthetic oligonucleotide
ggcaaauagcuggagcacc

SEQ ID NO: 2142434 - RNA, 19 nt, Artificial Sequence
  Description of Artificial Sequence: Synthetic oligonucleotide
gugaccaggcuuugagaac

SEQ ID NO: 2142435 - RNA, 19 nt, Artificial Sequence
  Description of Artificial Sequence: Synthetic oligonucleotide
ggagagccaccaugaaggg

SEQ ID NO: 2142436 - RNA, 19 nt, Artificial Sequence
  Description of Artificial Sequence: Synthetic oligonucleotide
cccugaacaacaaaggcaa

SEQ ID NO: 2142437 - RNA, 19 nt, Artificial Sequence
  Description of Artificial Sequence: Synthetic oligonucleotide
ggacaagcuugcaaagucc

SEQ ID NO: 2142438 - RNA, 19 nt, Artificial Sequence
  Description of Artificial Sequence: Synthetic oligonucleotide
cucgcuguucccucugcuc

SEQ ID NO: 2142439 - RNA, 19 nt, Artificial Sequence
  Description of Artificial Sequence: Synthetic oligonucleotide
caauccgugaggcgcagga

SEQ ID NO: 2142440 - RNA, 19 nt, Artificial Sequence
  Description of Artificial Sequence: Synthetic oligonucleotide
auacucagucgaaggcacg

SEQ ID NO: 2142441 - RNA, 19 nt, Artificial Sequence
  Description of Artificial Sequence: Synthetic oligonucleotide
caauaucuaucuagacuaa

SEQ ID NO: 2142442 - RNA, 19 nt, Artificial Sequence
  Description of Artificial Sequence: Synthetic oligonucleotide
aggugacguucucugacaa

SEQ ID NO: 2142443 - RNA, 19 nt, Artificial Sequence
  Description of Artificial Sequence: Synthetic oligonucleotide
cuuagccgggcuuccacga

SEQ ID NO: 2142444 - RNA, 19 nt, Artificial Sequence
  Description of Artificial Sequence: Synthetic oligonucleotide
caggcuuugagaacugugu

SEQ ID NO: 2142445 - RNA, 19 nt, Artificial Sequence
  Description of Artificial Sequence: Synthetic oligonucleotide
aaaucaagccagaguccau

SEQ ID NO: 2142446 - RNA, 19 nt, Artificial Sequence
  Description of Artificial Sequence: Synthetic oligonucleotide
ucgccaugccgcgacagga

SEQ ID NO: 2142447 - RNA, 19 nt, Artificial Sequence
  Description of Artificial Sequence: Synthetic oligonucleotide
caagagguaacaucgccau

SEQ ID NO: 2142448 - RNA, 19 nt, Artificial Sequence
  Description of Artificial Sequence: Synthetic oligonucleotide
uuggccuuagccgggcuuc

SEQ ID NO: 2142449 - RNA, 19 nt, Artificial Sequence
  Description of Artificial Sequence: Synthetic oligonucleotide
acgguucauagaaaggcaa

SEQ ID NO: 2142450 - RNA, 19 nt, Artificial Sequence
  Description of Artificial Sequence: Synthetic oligonucleotide
ggcacgguucauagaaagg

SEQ ID NO: 2142451 - RNA, 19 nt, Artificial Sequence
  Description of Artificial Sequence: Synthetic oligonucleotide
acaagaugugccauucaua

SEQ ID NO: 2142452 - RNA, 19 nt, Artificial Sequence
  Description of Artificial Sequence: Synthetic oligonucleotide
guucucugacaagucagga

SEQ ID NO: 2142453 - RNA, 19 nt, Artificial Sequence
  Description of Artificial Sequence: Synthetic oligonucleotide
ccuguaggccguauagcgc

SEQ ID NO: 2142454 - RNA, 19 nt, Artificial Sequence
  Description of Artificial Sequence: Synthetic oligonucleotide
guguugggugacaauguca

SEQ ID NO: 2142455 - RNA, 19 nt, Artificial Sequence
  Description of Artificial Sequence: Synthetic oligonucleotide
accgcguuaacaauuccuu

SEQ ID NO: 2142456 - RNA, 19 nt, Artificial Sequence
  Description of Artificial Sequence: Synthetic oligonucleotide
aaccucacugaugcacuaa

SEQ ID NO: 2142457 - RNA, 19 nt, Artificial Sequence
  Description of Artificial Sequence: Synthetic oligonucleotide
acacucggauaugccuccc

SEQ ID NO: 2142458 - RNA, 19 nt, Artificial Sequence
  Description of Artificial Sequence: Synthetic oligonucleotide
aacugugucuagagagaaa

SEQ ID NO: 2142459 - RNA, 19 nt, Artificial Sequence
  Description of Artificial Sequence: Synthetic oligonucleotide
caugccgcgacaggacaag

SEQ ID NO: 2142460 - RNA, 19 nt, Artificial Sequence
  Description of Artificial Sequence: Synthetic oligonucleotide
ccuugggaauuuauaaaca

SEQ ID NO: 2142461 - RNA, 19 nt, Artificial Sequence
  Description of Artificial Sequence: Synthetic oligonucleotide
cuaaaaccucacugaugca

SEQ ID NO: 2142462 - RNA, 19 nt, Artificial Sequence
  Description of Artificial Sequence: Synthetic oligonucleotide
ggugacaaugucacuaaaa

SEQ ID NO: 2142463 - RNA, 19 nt, Artificial Sequence
  Description of Artificial Sequence: Synthetic oligonucleotide
gucaccgcguuaacaauuc

SEQ ID NO: 2142464 - RNA, 19 nt, Artificial Sequence
  Description of Artificial Sequence: Synthetic oligonucleotide
agcacaacccacacucgga

SEQ ID NO: 2142465 - RNA, 19 nt, Artificial Sequence
  Description of Artificial Sequence: Synthetic oligonucleotide
gcuuagaagaucugauugu

SEQ ID NO: 2142466 - RNA, 19 nt, Artificial Sequence
  Description of Artificial Sequence: Synthetic oligonucleotide
uaaggccccuccggaagcc

SEQ ID NO: 2142467 - RNA, 19 nt, Artificial Sequence
  Description of Artificial Sequence: Synthetic oligonucleotide
  modified_base (8)..(8): a, c, u, g, unknown or other
cacgaganaaacggggaaa

SEQ ID NO: 2142468 - RNA, 19 nt, Artificial Sequence
  Description of Artificial Sequence: Synthetic oligonucleotide
auggcggggcacgacaaca

SEQ ID NO: 2142469 - RNA, 19 nt, Artificial Sequence
  Description of Artificial Sequence: Synthetic oligonucleotide
cguucucugacaagucagg

SEQ ID NO: 2142470 - RNA, 19 nt, Artificial Sequence
  Description of Artificial Sequence: Synthetic oligonucleotide
gguggagcacaacccacac

SEQ ID NO: 2142471 - RNA, 19 nt, Artificial Sequence
  Description of Artificial Sequence: Synthetic oligonucleotide
cuuggauuugcaagcugcu

SEQ ID NO: 2142472 - RNA, 19 nt, Artificial Sequence
  Description of Artificial Sequence: Synthetic oligonucleotide
augccgcgacaggacaagc

SEQ ID NO: 2142473 - RNA, 19 nt, Artificial Sequence
  Description of Artificial Sequence: Synthetic oligonucleotide
caggugacguucucugaca

SEQ ID NO: 2142474 - RNA, 19 nt, Artificial Sequence
  Description of Artificial Sequence: Synthetic oligonucleotide
ccauaauuccugaagcuua

SEQ ID NO: 2142475 - RNA, 19 nt, Artificial Sequence
  Description of Artificial Sequence: Synthetic oligonucleotide
ccaggcuuugagaacugug

SEQ ID NO: 2142476 - RNA, 19 nt, Artificial Sequence
  Description of Artificial Sequence: Synthetic oligonucleotide
agacccuagcauggcgggg

SEQ ID NO: 2142477 - RNA, 19 nt, Artificial Sequence
  Description of Artificial Sequence: Synthetic oligonucleotide
accgacuauaaggccccuc

SEQ ID NO: 2142478 - RNA, 19 nt, Artificial Sequence
  Description of Artificial Sequence: Synthetic oligonucleotide
uggagcugguggagcacaa

SEQ ID NO: 2142479 - RNA, 19 nt, Artificial Sequence
  Description of Artificial Sequence: Synthetic oligonucleotide
ccuuagccgggcuuccacg

SEQ ID NO: 2142480 - RNA, 19 nt, Artificial Sequence
  Description of Artificial Sequence: Synthetic oligonucleotide
ucacagcuugcaagaggua

SEQ ID NO: 2142481 - RNA, 19 nt, Artificial Sequence
  Description of Artificial Sequence: Synthetic oligonucleotide
gcugguggagcacaaccca

SEQ ID NO: 2142482 - RNA, 19 nt, Artificial Sequence
  Description of Artificial Sequence: Synthetic oligonucleotide
uuccacgaccucgcccagg

SEQ ID NO: 2142483 - RNA, 19 nt, Artificial Sequence
  Description of Artificial Sequence: Synthetic oligonucleotide
ccgagcugugccauccugg

SEQ ID NO: 2142484 - RNA, 19 nt, Artificial Sequence
  Description of Artificial Sequence: Synthetic oligonucleotide
uugugcccuucuguuaaaa

SEQ ID NO: 2142485 - RNA, 19 nt, Artificial Sequence
  Description of Artificial Sequence: Synthetic oligonucleotide
ccagaccgacuauaaggcc

SEQ ID NO: 2142486 - RNA, 19 nt, Artificial Sequence
  Description of Artificial Sequence: Synthetic oligonucleotide
cuccggaagcccagcucgc

SEQ ID NO: 2142487 - RNA, 19 nt, Artificial Sequence
  Description of Artificial Sequence: Synthetic oligonucleotide
gacuaaaaccagaccgacu

SEQ ID NO: 2142488 - RNA, 19 nt, Artificial Sequence
  Description of Artificial Sequence: Synthetic oligonucleotide
gagagccaccaugaaggga

SEQ ID NO: 2142489 - RNA, 19 nt, Artificial Sequence
  Description of Artificial Sequence: Synthetic oligonucleotide
agguccgagcugugccauc

SEQ ID NO: 2142490 - RNA, 19 nt, Artificial Sequence
  Description of Artificial Sequence: Synthetic oligonucleotide
ggagcacaacccacacucg

SEQ ID NO: 2142491 - RNA, 19 nt, Artificial Sequence
  Description of Artificial Sequence: Synthetic oligonucleotide
ccuagcauggcggggcacg

SEQ ID NO: 2142492 - RNA, 19 nt, Artificial Sequence
  Description of Artificial Sequence: Synthetic oligonucleotide
caucgccaugccgcgacag

SEQ ID NO: 2142493 - RNA, 19 nt, Artificial Sequence
  Description of Artificial Sequence: Synthetic oligonucleotide
ggggaaaucaagccagagu

SEQ ID NO: 2142494 - RNA, 19 nt, Artificial Sequence
  Description of Artificial Sequence: Synthetic oligonucleotide
acucagucgaaggcacggu

SEQ ID NO: 2142495 - RNA, 19 nt, Artificial Sequence
  Description of Artificial Sequence: Synthetic oligonucleotide
caccgcguuaacaauuccu

SEQ ID NO: 2142496 - RNA, 19 nt, Artificial Sequence
  Description of Artificial Sequence: Synthetic oligonucleotide
uaacaucgccaugccgcga

SEQ ID NO: 2142497 - RNA, 19 nt, Artificial Sequence
  Description of Artificial Sequence: Synthetic oligonucleotide
cauggcggggcacgacaac

SEQ ID NO: 2142498 - RNA, 19 nt, Artificial Sequence
  Description of Artificial Sequence: Synthetic oligonucleotide
cagcuugcaagagguaaca

SEQ ID NO: 2142499 - RNA, 19 nt, Artificial Sequence
  Description of Artificial Sequence: Synthetic oligonucleotide
gcaauccaggaugugccug

SEQ ID NO: 2142500 - RNA, 19 nt, Artificial Sequence
  Description of Artificial Sequence: Synthetic oligonucleotide
ggcuuccacgaccucgccc

SEQ ID NO: 2142501 - RNA, 19 nt, Artificial Sequence
  Description of Artificial Sequence: Synthetic oligonucleotide
gaccaggcuuugagaacug

SEQ ID NO: 2142502 - RNA, 19 nt, Artificial Sequence
  Description of Artificial Sequence: Synthetic oligonucleotide
gcucuuucauagguccgag

SEQ ID NO: 2142503 - RNA, 19 nt, Artificial Sequence
  Description of Artificial Sequence: Synthetic oligonucleotide
uagguccgagcugugccau

SEQ ID NO: 2142504 - RNA, 19 nt, Artificial Sequence
  Description of Artificial Sequence: Synthetic oligonucleotide
agcgccgcuucagacucug

SEQ ID NO: 2142505 - RNA, 19 nt, Artificial Sequence
  Description of Artificial Sequence: Synthetic oligonucleotide
cauuaagugucaccgcguu

SEQ ID NO: 2142506 - RNA, 19 nt, Artificial Sequence
  Description of Artificial Sequence: Synthetic oligonucleotide
ugcgggaaaugaggcaauu

SEQ ID NO: 2142507 - RNA, 19 nt, Artificial Sequence
  Description of Artificial Sequence: Synthetic oligonucleotide
ccgcguuaacaauuccuug

SEQ ID NO: 2142508 - RNA, 19 nt, Artificial Sequence
  Description of Artificial Sequence: Synthetic oligonucleotide
gagcaccuuggaauuucca

SEQ ID NO: 2142509 - RNA, 19 nt, Artificial Sequence
  Description of Artificial Sequence: Synthetic oligonucleotide
gcaauugugcccuucuguu

SEQ ID NO: 2142510 - RNA, 19 nt, Artificial Sequence
  Description of Artificial Sequence: Synthetic oligonucleotide
ggagcaccuuggaauuucc

SEQ ID NO: 2142511 - RNA, 19 nt, Artificial Sequence
  Description of Artificial Sequence: Synthetic oligonucleotide
acaucgccaugccgcgaca

SEQ ID NO: 2142512 - RNA, 19 nt, Artificial Sequence
  Description of Artificial Sequence: Synthetic oligonucleotide
acccuagcauggcggggca

SEQ ID NO: 2142513 - RNA, 19 nt, Artificial Sequence
  Description of Artificial Sequence: Synthetic oligonucleotide
caacccacacucggauaug

SEQ ID NO: 2142514 - RNA, 19 nt, Artificial Sequence
  Description of Artificial Sequence: Synthetic oligonucleotide
caaaggcaaaguguugggu

SEQ ID NO: 2142515 - RNA, 19 nt, Artificial Sequence
  Description of Artificial Sequence: Synthetic oligonucleotide
guaggccguauagcgccgc

SEQ ID NO: 2142516 - RNA, 19 nt, Artificial Sequence
  Description of Artificial Sequence: Synthetic oligonucleotide
cuuccacgaccucgcccag

SEQ ID NO: 2142517 - RNA, 19 nt, Artificial Sequence
  Description of Artificial Sequence: Synthetic oligonucleotide
ggcggcgcucuuucauagg

SEQ ID NO: 2142518 - RNA, 19 nt, Artificial Sequence
  Description of Artificial Sequence: Synthetic oligonucleotide
gcaaagucccuugugccaa

SEQ ID NO: 2142519 - RNA, 19 nt, Artificial Sequence
  Description of Artificial Sequence: Synthetic oligonucleotide
gcgggaaaugaggcaauug

SEQ ID NO: 2142520 - RNA, 19 nt, Artificial Sequence
  Description of Artificial Sequence: Synthetic oligonucleotide
cgacuauaaggccccuccg

SEQ ID NO: 2142521 - RNA, 19 nt, Artificial Sequence
  Description of Artificial Sequence: Synthetic oligonucleotide
cuaaaaccagaccgacuau

SEQ ID NO: 2142522 - RNA, 19 nt, Artificial Sequence
  Description of Artificial Sequence: Synthetic oligonucleotide
ccgggcuuccacgaccucg

SEQ ID NO: 2142523 - RNA, 19 nt, Artificial Sequence
  Description of Artificial Sequence: Synthetic oligonucleotide
gcaaaguguugggugacaa

SEQ ID NO: 2142524 - RNA, 19 nt, Artificial Sequence
  Description of Artificial Sequence: Synthetic oligonucleotide
caaaguguugggugacaau

SEQ ID NO: 2142525 - RNA, 19 nt, Artificial Sequence
  Description of Artificial Sequence: Synthetic oligonucleotide
ccgcgacaggacaagcuug

SEQ ID NO: 2142526 - RNA, 19 nt, Artificial Sequence
  Description of Artificial Sequence: Synthetic oligonucleotide
cacaacccacacucggaua

SEQ ID NO: 2142527 - RNA, 19 nt, Artificial Sequence
  Description of Artificial Sequence: Synthetic oligonucleotide
guccaugcuuccaagcaau

SEQ ID NO: 2142528 - RNA, 19 nt, Artificial Sequence
  Description of Artificial Sequence: Synthetic oligonucleotide
gaugugccauucauauuuu

SEQ ID NO: 2142529 - RNA, 19 nt, Artificial Sequence
  Description of Artificial Sequence: Synthetic oligonucleotide
acggggaaaucaagccaga

SEQ ID NO: 2142530 - RNA, 19 nt, Artificial Sequence
  Description of Artificial Sequence: Synthetic oligonucleotide
gucccuugugccaauccgu

SEQ ID NO: 2142531 - RNA, 19 nt, Artificial Sequence
  Description of Artificial Sequence: Synthetic oligonucleotide
caccaugaagggacagaua

SEQ ID NO: 2142532 - RNA, 19 nt, Artificial Sequence
  Description of Artificial Sequence: Synthetic oligonucleotide
cgggcuuccacgaccucgc

SEQ ID NO: 2142533 - RNA, 19 nt, Artificial Sequence
  Description of Artificial Sequence: Synthetic oligonucleotide
agucgaaggcacgguucau

SEQ ID NO: 2142534 - RNA, 19 nt, Artificial Sequence
  Description of Artificial Sequence: Synthetic oligonucleotide
guggagcacaacccacacu

SEQ ID NO: 2142535 - RNA, 19 nt, Artificial Sequence
  Description of Artificial Sequence: Synthetic oligonucleotide
ggcacgacaacagcucucu

SEQ ID NO: 2142536 - RNA, 19 nt, Artificial Sequence
  Description of Artificial Sequence: Synthetic oligonucleotide
gugucaccgcguuaacaau

SEQ ID NO: 2142537 - RNA, 19 nt, Artificial Sequence
  Description of Artificial Sequence: Synthetic oligonucleotide
gcauucccugaacaacaaa

SEQ ID NO: 2142538 - RNA, 19 nt, Artificial Sequence
  Description of Artificial Sequence: Synthetic oligonucleotide
cucagucgaaggcacgguu

SEQ ID NO: 2142539 - RNA, 19 nt, Artificial Sequence
  Description of Artificial Sequence: Synthetic oligonucleotide
acgaccucgcccagggcuu

SEQ ID NO: 2142540 - RNA, 19 nt, Artificial Sequence
  Description of Artificial Sequence: Synthetic oligonucleotide
aggacgcccuuggccuuag

SEQ ID NO: 2142541 - RNA, 19 nt, Artificial Sequence
  Description of Artificial Sequence: Synthetic oligonucleotide
  modified_base (6)..(6): a, c, u, g, unknown or other
cgaganaaacggggaaauc

SEQ ID NO: 2142542 - RNA, 19 nt, Artificial Sequence
  Description of Artificial Sequence: Synthetic oligonucleotide
ggcauucccugaacaacaa

SEQ ID NO: 2142543 - RNA, 19 nt, Artificial Sequence
  Description of Artificial Sequence: Synthetic oligonucleotide
gugaggcgcaggaugcugu

SEQ ID NO: 2142544 - RNA, 19 nt, Artificial Sequence
  Description of Artificial Sequence: Synthetic oligonucleotide
gcggcgcucuuucauaggu

SEQ ID NO: 2142545 - RNA, 19 nt, Artificial Sequence
  Description of Artificial Sequence: Synthetic oligonucleotide
auccuggcaggacgcccuu

SEQ ID NO: 2142546 - RNA, 19 nt, Artificial Sequence
  Description of Artificial Sequence: Synthetic oligonucleotide
ccucacugaugcacuaaaa

SEQ ID NO: 2142547 - RNA, 19 nt, Artificial Sequence
  Description of Artificial Sequence: Synthetic oligonucleotide
cggggcacgacaacagcuc

SEQ ID NO: 2142548 - RNA, 19 nt, Artificial Sequence
  Description of Artificial Sequence: Synthetic oligonucleotide
gcgcaggaugcugugugac

SEQ ID NO: 2142549 - RNA, 19 nt, Artificial Sequence
  Description of Artificial Sequence: Synthetic oligonucleotide
augaggcaauugugcccuu

SEQ ID NO: 2142550 - RNA, 19 nt, Artificial Sequence
  Description of Artificial Sequence: Synthetic oligonucleotide
ggagcugguggagcacaac

SEQ ID NO: 2142551 - RNA, 19 nt, Artificial Sequence
  Description of Artificial Sequence: Synthetic oligonucleotide
gccguauagcgccgcuuca

SEQ ID NO: 2142552 - RNA, 19 nt, Artificial Sequence
  Description of Artificial Sequence: Synthetic oligonucleotide
ccauuaagugucaccgcgu

SEQ ID NO: 2142553 - RNA, 19 nt, Artificial Sequence
  Description of Artificial Sequence: Synthetic oligonucleotide
gcacgacaacagcucucug

SEQ ID NO: 2142554 - RNA, 19 nt, Artificial Sequence
  Description of Artificial Sequence: Synthetic oligonucleotide
aggccccuccggaagccca

SEQ ID NO: 2142555 - RNA, 19 nt, Artificial Sequence
  Description of Artificial Sequence: Synthetic oligonucleotide
cgguucauagaaaggcaaa

SEQ ID NO: 2142556 - RNA, 19 nt, Artificial Sequence
  Description of Artificial Sequence: Synthetic oligonucleotide
ggggcacgacaacagcucu

SEQ ID NO: 2142557 - RNA, 19 nt, Artificial Sequence
  Description of Artificial Sequence: Synthetic oligonucleotide
ccaguacagaaaccaugaa

SEQ ID NO: 2142558 - RNA, 19 nt, Artificial Sequence
  Description of Artificial Sequence: Synthetic oligonucleotide
aggccguauagcgccgcuu

SEQ ID NO: 2142559 - RNA, 19 nt, Artificial Sequence
  Description of Artificial Sequence: Synthetic oligonucleotide
cggggaaaucaagccagag

SEQ ID NO: 2142560 - RNA, 19 nt, Artificial Sequence
  Description of Artificial Sequence: Synthetic oligonucleotide
cuuggccuuagccgggcuu

SEQ ID NO: 2142561 - RNA, 19 nt, Artificial Sequence
  Description of Artificial Sequence: Synthetic oligonucleotide
gggcacgacaacagcucuc

SEQ ID NO: 2142562 - RNA, 19 nt, Artificial Sequence
  Description of Artificial Sequence: Synthetic oligonucleotide
cggcggcgcucuuucauag

SEQ ID NO: 2142563 - RNA, 19 nt, Artificial Sequence
  Description of Artificial Sequence: Synthetic oligonucleotide
gcggcggcggcgcucuuuc

SEQ ID NO: 2142564 - RNA, 19 nt, Artificial Sequence
  Description of Artificial Sequence: Synthetic oligonucleotide
cccuugugccaauccguga

SEQ ID NO: 2142565 - RNA, 19 nt, Artificial Sequence
  Description of Artificial Sequence: Synthetic oligonucleotide
gccgcgacaggacaagcuu

SEQ ID NO: 2142566 - RNA, 19 nt, Artificial Sequence
  Description of Artificial Sequence: Synthetic oligonucleotide
gccaauccgugaggcgcag

SEQ ID NO: 2142567 - RNA, 19 nt, Artificial Sequence
  Description of Artificial Sequence: Synthetic oligonucleotide
caaagucccuugugccaau

SEQ ID NO: 2142568 - RNA, 19 nt, Artificial Sequence
  Description of Artificial Sequence: Synthetic oligonucleotide
ccaauccgugaggcgcagg

SEQ ID NO: 2142569 - RNA, 19 nt, Artificial Sequence
  Description of Artificial Sequence: Synthetic oligonucleotide
cgacaggacaagcuugcaa

SEQ ID NO: 2142570 - RNA, 19 nt, Artificial Sequence
  Description of Artificial Sequence: Synthetic oligonucleotide
cugcgggaaaugaggcaau

SEQ ID NO: 2142571 - RNA, 19 nt, Artificial Sequence
  Description of Artificial Sequence: Synthetic oligonucleotide
cgugaggcgcaggaugcug

SEQ ID NO: 2142572 - RNA, 19 nt, Artificial Sequence
  Description of Artificial Sequence: Synthetic oligonucleotide
ccaugccgcgacaggacaa

SEQ ID NO: 2142573 - RNA, 19 nt, Artificial Sequence
  Description of Artificial Sequence: Synthetic oligonucleotide
gaccacaggcucacagcuu

SEQ ID NO: 2142574 - RNA, 19 nt, Artificial Sequence
  Description of Artificial Sequence: Synthetic oligonucleotide
cugugccauccuggcagga

SEQ ID NO: 2142575 - RNA, 19 nt, Artificial Sequence
  Description of Artificial Sequence: Synthetic oligonucleotide
gcggggcacgacaacagcu

SEQ ID NO: 2142576 - RNA, 19 nt, Artificial Sequence
  Description of Artificial Sequence: Synthetic oligonucleotide
cgcucuuucauagguccga

SEQ ID NO: 2142577 - RNA, 19 nt, Artificial Sequence
  Description of Artificial Sequence: Synthetic oligonucleotide
guccgagcugugccauccu

SEQ ID NO: 2142578 - RNA, 19 nt, Artificial Sequence
  Description of Artificial Sequence: Synthetic oligonucleotide
gcauggcggggcacgacaa

SEQ ID NO: 2142579 - RNA, 19 nt, Artificial Sequence
  Description of Artificial Sequence: Synthetic oligonucleotide
gcggcggcgcucuuucaua

SEQ ID NO: 2142580 - RNA, 19 nt, Artificial Sequence
  Description of Artificial Sequence: Synthetic oligonucleotide
gcucgcuguucccucugcu

SEQ ID NO: 2142581 - RNA, 19 nt, Artificial Sequence
  Description of Artificial Sequence: Synthetic oligonucleotide
gcgacaggacaagcuugca

SEQ ID NO: 2142582 - RNA, 19 nt, Artificial Sequence
  Description of Artificial Sequence: Synthetic oligonucleotide
cgaaggcacgguucauaga

SEQ ID NO: 2142583 - RNA, 19 nt, Artificial Sequence
  Description of Artificial Sequence: Synthetic oligonucleotide
cggcgcucuuucauagguc

SEQ ID NO: 2142584 - RNA, 19 nt, Artificial Sequence
  Description of Artificial Sequence: Synthetic oligonucleotide
gaccgacuauaaggccccu

SEQ ID NO: 2142585 - RNA, 19 nt, Artificial Sequence
  Description of Artificial Sequence: Synthetic oligonucleotide
ccccucccaggugacguuc

SEQ ID NO: 2142586 - RNA, 19 nt, Artificial Sequence
  Description of Artificial Sequence: Synthetic oligonucleotide
cccuagcauggcggggcac

SEQ ID NO: 2142587 - RNA, 19 nt, Artificial Sequence
  Description of Artificial Sequence: Synthetic oligonucleotide
gcgccgcuucagacucugc

SEQ ID NO: 2142588 - RNA, 19 nt, Artificial Sequence
  Description of Artificial Sequence: Synthetic oligonucleotide
cgaccucgcccagggcuuc

SEQ ID NO: 2142589 - RNA, 19 nt, Artificial Sequence
  Description of Artificial Sequence: Synthetic oligonucleotide
ccgugaggcgcaggaugcu

SEQ ID NO: 2142590 - RNA, 19 nt, Artificial Sequence
  Description of Artificial Sequence: Synthetic oligonucleotide
  modified_base (1)..(1): a, c, u, g, unknown or other
naaacggggaaaucaagcc

SEQ ID NO: 2142591 - RNA, 19 nt, Artificial Sequence
  Description of Artificial Sequence: Synthetic oligonucleotide
auagacauagcuuauauac

SEQ ID NO: 2142592 - RNA, 19 nt, Artificial Sequence
  Description of Artificial Sequence: Synthetic oligonucleotide
uuuaucguaaucaucagcg

SEQ ID NO: 2142593 - RNA, 19 nt, Artificial Sequence
  Description of Artificial Sequence: Synthetic oligonucleotide
aacauuaaaacugaaaggg

SEQ ID NO: 2142594 - RNA, 19 nt, Artificial Sequence
  Description of Artificial Sequence: Synthetic oligonucleotide
uuacauaacauuaaaacug

SEQ ID NO: 2142595 - RNA, 19 nt, Artificial Sequence
  Description of Artificial Sequence: Synthetic oligonucleotide
aaacccaugaaccuucagc

SEQ ID NO: 2142596 - RNA, 19 nt, Artificial Sequence
  Description of Artificial Sequence: Synthetic oligonucleotide
acuaguccaaguuaaaagc

SEQ ID NO: 2142597 - RNA, 19 nt, Artificial Sequence
  Description of Artificial Sequence: Synthetic oligonucleotide
aaccuuuacagcuagccac

SEQ ID NO: 2142598 - RNA, 19 nt, Artificial Sequence
  Description of Artificial Sequence: Synthetic oligonucleotide
aaugaguugaaaccuuuac

SEQ ID NO: 2142599 - RNA, 19 nt, Artificial Sequence
  Description of Artificial Sequence: Synthetic oligonucleotide
aauucuacucauugcaagg

SEQ ID NO: 2142600 - RNA, 19 nt, Artificial Sequence
  Description of Artificial Sequence: Synthetic oligonucleotide
uaacauuaaaacugaaagg

SEQ ID NO: 2142601 - RNA, 19 nt, Artificial Sequence
  Description of Artificial Sequence: Synthetic oligonucleotide
uuuacagcuagccacagug

SEQ ID NO: 2142602 - RNA, 19 nt, Artificial Sequence
  Description of Artificial Sequence: Synthetic oligonucleotide
aaauucuacucauugcaag

SEQ ID NO: 2142603 - RNA, 19 nt, Artificial Sequence
  Description of Artificial Sequence: Synthetic oligonucleotide
ugaccuguuuaaaugaggg

SEQ ID NO: 2142604 - RNA, 19 nt, Artificial Sequence
  Description of Artificial Sequence: Synthetic oligonucleotide
uaaaugagggacuucaaga

SEQ ID NO: 2142605 - RNA, 19 nt, Artificial Sequence
  Description of Artificial Sequence: Synthetic oligonucleotide
uuaaaugagggacuucaag

SEQ ID NO: 2142606 - RNA, 19 nt, Artificial Sequence
  Description of Artificial Sequence: Synthetic oligonucleotide
uucaagacuagacagcaug

SEQ ID NO: 2142607 - RNA, 19 nt, Artificial Sequence
  Description of Artificial Sequence: Synthetic oligonucleotide
cacuuaaaacccaugaacc

SEQ ID NO: 2142608 - RNA, 19 nt, Artificial Sequence
  Description of Artificial Sequence: Synthetic oligonucleotide
agucacaagcacuuaaaac

SEQ ID NO: 2142609 - RNA, 19 nt, Artificial Sequence
  Description of Artificial Sequence: Synthetic oligonucleotide
aacccaugaaccuucagcu

SEQ ID NO: 2142610 - RNA, 19 nt, Artificial Sequence
  Description of Artificial Sequence: Synthetic oligonucleotide
ucaauuacaguaccauugc

SEQ ID NO: 2142611 - RNA, 19 nt, Artificial Sequence
  Description of Artificial Sequence: Synthetic oligonucleotide
accuguuuaaaugagggac

SEQ ID NO: 2142612 - RNA, 19 nt, Artificial Sequence
  Description of Artificial Sequence: Synthetic oligonucleotide
ucaagacuagacagcaugg

SEQ ID NO: 2142613 - RNA, 19 nt, Artificial Sequence
  Description of Artificial Sequence: Synthetic oligonucleotide
uuuuaucguaaucaucagc

SEQ ID NO: 2142614 - RNA, 19 nt, Artificial Sequence
  Description of Artificial Sequence: Synthetic oligonucleotide
aaauccucacuuaagcuuc

SEQ ID NO: 2142615 - RNA, 19 nt, Artificial Sequence
  Description of Artificial Sequence: Synthetic oligonucleotide
cuaguccaaguuaaaagcg

SEQ ID NO: 2142616 - RNA, 19 nt, Artificial Sequence
  Description of Artificial Sequence: Synthetic oligonucleotide
aaggaguuacacuagucca

SEQ ID NO: 2142617 - RNA, 19 nt, Artificial Sequence
  Description of Artificial Sequence: Synthetic oligonucleotide
auacgauuccuuuuccucg

SEQ ID NO: 2142618 - RNA, 19 nt, Artificial Sequence
  Description of Artificial Sequence: Synthetic oligonucleotide
auuacuucuccauauucug

SEQ ID NO: 2142619 - RNA, 19 nt, Artificial Sequence
  Description of Artificial Sequence: Synthetic oligonucleotide
aagcacuuaaaacccauga

SEQ ID NO: 2142620 - RNA, 19 nt, Artificial Sequence
  Description of Artificial Sequence: Synthetic oligonucleotide
uuaagcuucagagagucac

SEQ ID NO: 2142621 - RNA, 19 nt, Artificial Sequence
  Description of Artificial Sequence: Synthetic oligonucleotide
ucuuaaacgccuucacuag

SEQ ID NO: 2142622 - RNA, 19 nt, Artificial Sequence
  Description of Artificial Sequence: Synthetic oligonucleotide
uucuuaaacgccuucacua

SEQ ID NO: 2142623 - RNA, 19 nt, Artificial Sequence
  Description of Artificial Sequence: Synthetic oligonucleotide
gaaaccuuuacagcuagcc

SEQ ID NO: 2142624 - RNA, 19 nt, Artificial Sequence
  Description of Artificial Sequence: Synthetic oligonucleotide
ugaaacauuguuauugcuu

SEQ ID NO: 2142625 - RNA, 19 nt, Artificial Sequence
  Description of Artificial Sequence: Synthetic oligonucleotide
uuuuccucgguggaaacgg

SEQ ID NO: 2142626 - RNA, 19 nt, Artificial Sequence
  Description of Artificial Sequence: Synthetic oligonucleotide
uugaccuguuuaaaugagg

SEQ ID NO: 2142627 - RNA, 19 nt, Artificial Sequence
  Description of Artificial Sequence: Synthetic oligonucleotide
aauuacuucuccauauucu

SEQ ID NO: 2142628 - RNA, 19 nt, Artificial Sequence
  Description of Artificial Sequence: Synthetic oligonucleotide
agggaaauucuacucauug

SEQ ID NO: 2142629 - RNA, 19 nt, Artificial Sequence
  Description of Artificial Sequence: Synthetic oligonucleotide
ucuuaaaacaaguuuuauu

SEQ ID NO: 2142630 - RNA, 19 nt, Artificial Sequence
  Description of Artificial Sequence: Synthetic oligonucleotide
aaugagggacuucaagacu

SEQ ID NO: 2142631 - RNA, 19 nt, Artificial Sequence
  Description of Artificial Sequence: Synthetic oligonucleotide
cacuaguccaaguuaaaag

SEQ ID NO: 2142632 - RNA, 19 nt, Artificial Sequence
  Description of Artificial Sequence: Synthetic oligonucleotide
uuggcugaaacauuguuau

SEQ ID NO: 2142633 - RNA, 19 nt, Artificial Sequence
  Description of Artificial Sequence: Synthetic oligonucleotide
aaacgccuucacuaguuuc

SEQ ID NO: 2142634 - RNA, 19 nt, Artificial Sequence
  Description of Artificial Sequence: Synthetic oligonucleotide
acuuaagcuucagagaguc

SEQ ID NO: 2142635 - RNA, 19 nt, Artificial Sequence
  Description of Artificial Sequence: Synthetic oligonucleotide
auauacuuggggcucuggg

SEQ ID NO: 2142636 - RNA, 19 nt, Artificial Sequence
  Description of Artificial Sequence: Synthetic oligonucleotide
uccauauucuggaugcuca

SEQ ID NO: 2142637 - RNA, 19 nt, Artificial Sequence
  Description of Artificial Sequence: Synthetic oligonucleotide
uuacacuaguccaaguuaa

SEQ ID NO: 2142638 - RNA, 19 nt, Artificial Sequence
  Description of Artificial Sequence: Synthetic oligonucleotide
ugcuugaccuguuuaaaug

SEQ ID NO: 2142639 - RNA, 19 nt, Artificial Sequence
  Description of Artificial Sequence: Synthetic oligonucleotide
gauacgauuccuuuuccuc

SEQ ID NO: 2142640 - RNA, 19 nt, Artificial Sequence
  Description of Artificial Sequence: Synthetic oligonucleotide
uugaaaccuuuacagcuag

SEQ ID NO: 2142641 - RNA, 19 nt, Artificial Sequence
  Description of Artificial Sequence: Synthetic oligonucleotide
acuuaaaacccaugaaccu

SEQ ID NO: 2142642 - RNA, 19 nt, Artificial Sequence
  Description of Artificial Sequence: Synthetic oligonucleotide
uuauugcuuuguuucaggc

SEQ ID NO: 2142643 - RNA, 19 nt, Artificial Sequence
  Description of Artificial Sequence: Synthetic oligonucleotide
aaaccuuuacagcuagcca

SEQ ID NO: 2142644 - RNA, 19 nt, Artificial Sequence
  Description of Artificial Sequence: Synthetic oligonucleotide
uacgauacgauuccuuuuc

SEQ ID NO: 2142645 - RNA, 19 nt, Artificial Sequence
  Description of Artificial Sequence: Synthetic oligonucleotide
auuauacaagcugugaggu

SEQ ID NO: 2142646 - RNA, 19 nt, Artificial Sequence
  Description of Artificial Sequence: Synthetic oligonucleotide
gcuacuaaugaguugaaac

SEQ ID NO: 2142647 - RNA, 19 nt, Artificial Sequence
  Description of Artificial Sequence: Synthetic oligonucleotide
cauagcuuauauacuuggg

SEQ ID NO: 2142648 - RNA, 19 nt, Artificial Sequence
  Description of Artificial Sequence: Synthetic oligonucleotide
uggaugcucaauuacagua

SEQ ID NO: 2142649 - RNA, 19 nt, Artificial Sequence
  Description of Artificial Sequence: Synthetic oligonucleotide
uacuaaugaguugaaaccu

SEQ ID NO: 2142650 - RNA, 19 nt, Artificial Sequence
  Description of Artificial Sequence: Synthetic oligonucleotide
aaccaguuuguuccuucac

SEQ ID NO: 2142651 - RNA, 19 nt, Artificial Sequence
  Description of Artificial Sequence: Synthetic oligonucleotide
uaucguaaucaucagcgau

SEQ ID NO: 2142652 - RNA, 19 nt, Artificial Sequence
  Description of Artificial Sequence: Synthetic oligonucleotide
acuggcauauguucuugcg

SEQ ID NO: 2142653 - RNA, 19 nt, Artificial Sequence
  Description of Artificial Sequence: Synthetic oligonucleotide
uggcauauguucuugcgcu

SEQ ID NO: 2142654 - RNA, 19 nt, Artificial Sequence
  Description of Artificial Sequence: Synthetic oligonucleotide
uagacauagcuuauauacu

SEQ ID NO: 2142655 - RNA, 19 nt, Artificial Sequence
  Description of Artificial Sequence: Synthetic oligonucleotide
aacauuguuauugcuuugu

SEQ ID NO: 2142656 - RNA, 19 nt, Artificial Sequence
  Description of Artificial Sequence: Synthetic oligonucleotide
agggcuuacugcuugaccu

SEQ ID NO: 2142657 - RNA, 19 nt, Artificial Sequence
  Description of Artificial Sequence: Synthetic oligonucleotide
uacgauuccuuuuccucgg

SEQ ID NO: 2142658 - RNA, 19 nt, Artificial Sequence
  Description of Artificial Sequence: Synthetic oligonucleotide
aaauaaggguuuaaauaca

SEQ ID NO: 2142659 - RNA, 19 nt, Artificial Sequence
  Description of Artificial Sequence: Synthetic oligonucleotide
guuuaaaugagggacuuca

SEQ ID NO: 2142660 - RNA, 19 nt, Artificial Sequence
  Description of Artificial Sequence: Synthetic oligonucleotide
uauacaagcugugagguuu

SEQ ID NO: 2142661 - RNA, 19 nt, Artificial Sequence
  Description of Artificial Sequence: Synthetic oligonucleotide
aauaaggguuuaaauacau

SEQ ID NO: 2142662 - RNA, 19 nt, Artificial Sequence
  Description of Artificial Sequence: Synthetic oligonucleotide
ucuacucauugcaaggaaa

SEQ ID NO: 2142663 - RNA, 19 nt, Artificial Sequence
  Description of Artificial Sequence: Synthetic oligonucleotide
agcuuauauacuuggggcu

SEQ ID NO: 2142664 - RNA, 19 nt, Artificial Sequence
  Description of Artificial Sequence: Synthetic oligonucleotide
auagcggacauacgauacg

SEQ ID NO: 2142665 - RNA, 19 nt, Artificial Sequence
  Description of Artificial Sequence: Synthetic oligonucleotide
aaacugaaagggaaaagaa

SEQ ID NO: 2142666 - RNA, 19 nt, Artificial Sequence
  Description of Artificial Sequence: Synthetic oligonucleotide
agacuagacagcauggcuc

SEQ ID NO: 2142667 - RNA, 19 nt, Artificial Sequence
  Description of Artificial Sequence: Synthetic oligonucleotide
aucguaaucaucagcgauc

SEQ ID NO: 2142668 - RNA, 19 nt, Artificial Sequence
  Description of Artificial Sequence: Synthetic oligonucleotide
caggggacucuguagaggg

SEQ ID NO: 2142669 - RNA, 19 nt, Artificial Sequence
  Description of Artificial Sequence: Synthetic oligonucleotide
auacuuggggcucugggcu

SEQ ID NO: 2142670 - RNA, 19 nt, Artificial Sequence
  Description of Artificial Sequence: Synthetic oligonucleotide
aguuacacuaguccaaguu

SEQ ID NO: 2142671 - RNA, 19 nt, Artificial Sequence
  Description of Artificial Sequence: Synthetic oligonucleotide
acgauacgauuccuuuucc

SEQ ID NO: 2142672 - RNA, 19 nt, Artificial Sequence
  Description of Artificial Sequence: Synthetic oligonucleotide
aaucucuaucaggaacugg

SEQ ID NO: 2142673 - RNA, 19 nt, Artificial Sequence
  Description of Artificial Sequence: Synthetic oligonucleotide
ucguaaucaucagcgaucc

SEQ ID NO: 2142674 - RNA, 19 nt, Artificial Sequence
  Description of Artificial Sequence: Synthetic oligonucleotide
agccaguccaaucucuauc

SEQ ID NO: 2142675 - RNA, 19 nt, Artificial Sequence
  Description of Artificial Sequence: Synthetic oligonucleotide
cacaguguuacccauucuc

SEQ ID NO: 2142676 - RNA, 19 nt, Artificial Sequence
  Description of Artificial Sequence: Synthetic oligonucleotide
uuuaaaugagggacuucaa

SEQ ID NO: 2142677 - RNA, 19 nt, Artificial Sequence
  Description of Artificial Sequence: Synthetic oligonucleotide
uuaaacgccuucacuaguu

SEQ ID NO: 2142678 - RNA, 19 nt, Artificial Sequence
  Description of Artificial Sequence: Synthetic oligonucleotide
uucuggauagacauagcuu

SEQ ID NO: 2142679 - RNA, 19 nt, Artificial Sequence
  Description of Artificial Sequence: Synthetic oligonucleotide
gcacuuaaaacccaugaac

SEQ ID NO: 2142680 - RNA, 19 nt, Artificial Sequence
  Description of Artificial Sequence: Synthetic oligonucleotide
agggacuucaagacuagac

SEQ ID NO: 2142681 - RNA, 19 nt, Artificial Sequence
  Description of Artificial Sequence: Synthetic oligonucleotide
caguccaaucucuaucagg

SEQ ID NO: 2142682 - RNA, 19 nt, Artificial Sequence
  Description of Artificial Sequence: Synthetic oligonucleotide
aaaacccaugaaccuucag

SEQ ID NO: 2142683 - RNA, 19 nt, Artificial Sequence
  Description of Artificial Sequence: Synthetic oligonucleotide
uuaucguaaucaucagcga

SEQ ID NO: 2142684 - RNA, 19 nt, Artificial Sequence
  Description of Artificial Sequence: Synthetic oligonucleotide
auauucuggaugcucaauu

SEQ ID NO: 2142685 - RNA, 19 nt, Artificial Sequence
  Description of Artificial Sequence: Synthetic oligonucleotide
ggcugaaacauuguuauug

SEQ ID NO: 2142686 - RNA, 19 nt, Artificial Sequence
  Description of Artificial Sequence: Synthetic oligonucleotide
gauagcggacauacgauac

SEQ ID NO: 2142687 - RNA, 19 nt, Artificial Sequence
  Description of Artificial Sequence: Synthetic oligonucleotide
ggcaaauuucuucuuaaac

SEQ ID NO: 2142688 - RNA, 19 nt, Artificial Sequence
  Description of Artificial Sequence: Synthetic oligonucleotide
uuucuccuagggcagggga

SEQ ID NO: 2142689 - RNA, 19 nt, Artificial Sequence
  Description of Artificial Sequence: Synthetic oligonucleotide
ugaauuacuucuccauauu

SEQ ID NO: 2142690 - RNA, 19 nt, Artificial Sequence
  Description of Artificial Sequence: Synthetic oligonucleotide
cuggauagcggacauacga

SEQ ID NO: 2142691 - RNA, 19 nt, Artificial Sequence
  Description of Artificial Sequence: Synthetic oligonucleotide
cuggcauauguucuugcgc

SEQ ID NO: 2142692 - RNA, 19 nt, Artificial Sequence
  Description of Artificial Sequence: Synthetic oligonucleotide
uacccggugacuuucuccu

SEQ ID NO: 2142693 - RNA, 19 nt, Artificial Sequence
  Description of Artificial Sequence: Synthetic oligonucleotide
uuacccggugacuuucucc

SEQ ID NO: 2142694 - RNA, 19 nt, Artificial Sequence
  Description of Artificial Sequence: Synthetic oligonucleotide
gacuucaagacuagacagc

SEQ ID NO: 2142695 - RNA, 19 nt, Artificial Sequence
  Description of Artificial Sequence: Synthetic oligonucleotide
gacauagcuuauauacuug

SEQ ID NO: 2142696 - RNA, 19 nt, Artificial Sequence
  Description of Artificial Sequence: Synthetic oligonucleotide
agcacuuaaaacccaugaa

SEQ ID NO: 2142697 - RNA, 19 nt, Artificial Sequence
  Description of Artificial Sequence: Synthetic oligonucleotide
ugagggacuucaagacuag

SEQ ID NO: 2142698 - RNA, 19 nt, Artificial Sequence
  Description of Artificial Sequence: Synthetic oligonucleotide
uucuacucauugcaaggaa

SEQ ID NO: 2142699 - RNA, 19 nt, Artificial Sequence
  Description of Artificial Sequence: Synthetic oligonucleotide
uacugcuugaccuguuuaa

SEQ ID NO: 2142700 - RNA, 19 nt, Artificial Sequence
  Description of Artificial Sequence: Synthetic oligonucleotide
uaaugaguugaaaccuuua

SEQ ID NO: 2142701 - RNA, 19 nt, Artificial Sequence
  Description of Artificial Sequence: Synthetic oligonucleotide
uggauagcggacauacgau

SEQ ID NO: 2142702 - RNA, 19 nt, Artificial Sequence
  Description of Artificial Sequence: Synthetic oligonucleotide
uauuuaaauaaggguuuaa

SEQ ID NO: 2142703 - RNA, 19 nt, Artificial Sequence
  Description of Artificial Sequence: Synthetic oligonucleotide
guuacacuaguccaaguua

SEQ ID NO: 2142704 - RNA, 19 nt, Artificial Sequence
  Description of Artificial Sequence: Synthetic oligonucleotide
ugcucaauuacaguaccau

SEQ ID NO: 2142705 - RNA, 19 nt, Artificial Sequence
  Description of Artificial Sequence: Synthetic oligonucleotide
ggacauacgauacgauucc

SEQ ID NO: 2142706 - RNA, 19 nt, Artificial Sequence
  Description of Artificial Sequence: Synthetic oligonucleotide
gauagacauagcuuauaua

SEQ ID NO: 2142707 - RNA, 19 nt, Artificial Sequence
  Description of Artificial Sequence: Synthetic oligonucleotide
uauauacuuggggcucugg

SEQ ID NO: 2142708 - RNA, 19 nt, Artificial Sequence
  Description of Artificial Sequence: Synthetic oligonucleotide
uuacagcuagccacagugu

SEQ ID NO: 2142709 - RNA, 19 nt, Artificial Sequence
  Description of Artificial Sequence: Synthetic oligonucleotide
gggaaauucuacucauugc

SEQ ID NO: 2142710 - RNA, 19 nt, Artificial Sequence
  Description of Artificial Sequence: Synthetic oligonucleotide
guaaucaucagcgaucccu

SEQ ID NO: 2142711 - RNA, 19 nt, Artificial Sequence
  Description of Artificial Sequence: Synthetic oligonucleotide
gacaggagggaaauucuac

SEQ ID NO: 2142712 - RNA, 19 nt, Artificial Sequence
  Description of Artificial Sequence: Synthetic oligonucleotide
ugaaaccuuuacagcuagc

SEQ ID NO: 2142713 - RNA, 19 nt, Artificial Sequence
  Description of Artificial Sequence: Synthetic oligonucleotide
auucuacucauugcaagga

SEQ ID NO: 2142714 - RNA, 19 nt, Artificial Sequence
  Description of Artificial Sequence: Synthetic oligonucleotide
cccaugaaccuucagcugg

SEQ ID NO: 2142715 - RNA, 19 nt, Artificial Sequence
  Description of Artificial Sequence: Synthetic oligonucleotide
uacccauucucuuguuuac

SEQ ID NO: 2142716 - RNA, 19 nt, Artificial Sequence
  Description of Artificial Sequence: Synthetic oligonucleotide
ucauugcaaggaaauccuc

SEQ ID NO: 2142717 - RNA, 19 nt, Artificial Sequence
  Description of Artificial Sequence: Synthetic oligonucleotide
uucucuuguuuacccggug

SEQ ID NO: 2142718 - RNA, 19 nt, Artificial Sequence
  Description of Artificial Sequence: Synthetic oligonucleotide
uuccucgguggaaacggcc

SEQ ID NO: 2142719 - RNA, 19 nt, Artificial Sequence
  Description of Artificial Sequence: Synthetic oligonucleotide
uccucacuuaagcuucaga

SEQ ID NO: 2142720 - RNA, 19 nt, Artificial Sequence
  Description of Artificial Sequence: Synthetic oligonucleotide
acccauucucuuguuuacc

SEQ ID NO: 2142721 - RNA, 19 nt, Artificial Sequence
  Description of Artificial Sequence: Synthetic oligonucleotide
gcugcuacuaaugaguuga

SEQ ID NO: 2142722 - RNA, 19 nt, Artificial Sequence
  Description of Artificial Sequence: Synthetic oligonucleotide
gaaauucuacucauugcaa

SEQ ID NO: 2142723 - RNA, 19 nt, Artificial Sequence
  Description of Artificial Sequence: Synthetic oligonucleotide
cuuuuccucgguggaaacg

SEQ ID NO: 2142724 - RNA, 19 nt, Artificial Sequence
  Description of Artificial Sequence: Synthetic oligonucleotide
cuuggcugaaacauuguua

SEQ ID NO: 2142725 - RNA, 19 nt, Artificial Sequence
  Description of Artificial Sequence: Synthetic oligonucleotide
uguucuugcgcuggucacc

SEQ ID NO: 2142726 - RNA, 19 nt, Artificial Sequence
  Description of Artificial Sequence: Synthetic oligonucleotide
caagcacuuaaaacccaug

SEQ ID NO: 2142727 - RNA, 19 nt, Artificial Sequence
  Description of Artificial Sequence: Synthetic oligonucleotide
gagagucacaagcacuuaa

SEQ ID NO: 2142728 - RNA, 19 nt, Artificial Sequence
  Description of Artificial Sequence: Synthetic oligonucleotide
gagucacaagcacuuaaaa

SEQ ID NO: 2142729 - RNA, 19 nt, Artificial Sequence
  Description of Artificial Sequence: Synthetic oligonucleotide
ggugacuuucuccuagggc

SEQ ID NO: 2142730 - RNA, 19 nt, Artificial Sequence
  Description of Artificial Sequence: Synthetic oligonucleotide
uagcggacauacgauacga

SEQ ID NO: 2142731 - RNA, 19 nt, Artificial Sequence
  Description of Artificial Sequence: Synthetic oligonucleotide
gaccuguuuaaaugaggga

SEQ ID NO: 2142732 - RNA, 19 nt, Artificial Sequence
  Description of Artificial Sequence: Synthetic oligonucleotide
aagcuucagagagucacaa

SEQ ID NO: 2142733 - RNA, 19 nt, Artificial Sequence
  Description of Artificial Sequence: Synthetic oligonucleotide
ucugggcuuggcugaaaca

SEQ ID NO: 2142734 - RNA, 19 nt, Artificial Sequence
  Description of Artificial Sequence: Synthetic oligonucleotide
auacgauacgauuccuuuu

SEQ ID NO: 2142735 - RNA, 19 nt, Artificial Sequence
  Description of Artificial Sequence: Synthetic oligonucleotide
cacccuguagcugaauuac

SEQ ID NO: 2142736 - RNA, 19 nt, Artificial Sequence
  Description of Artificial Sequence: Synthetic oligonucleotide
ucacccuguagcugaauua

SEQ ID NO: 2142737 - RNA, 19 nt, Artificial Sequence
  Description of Artificial Sequence: Synthetic oligonucleotide
uuauacaagcugugagguu

SEQ ID NO: 2142738 - RNA, 19 nt, Artificial Sequence
  Description of Artificial Sequence: Synthetic oligonucleotide
uguuuacccggugacuuuc

SEQ ID NO: 2142739 - RNA, 19 nt, Artificial Sequence
  Description of Artificial Sequence: Synthetic oligonucleotide
gacuagacagcauggcucu

SEQ ID NO: 2142740 - RNA, 19 nt, Artificial Sequence
  Description of Artificial Sequence: Synthetic oligonucleotide
gaaacggccugcggaaggc

SEQ ID NO: 2142741 - RNA, 19 nt, Artificial Sequence
  Description of Artificial Sequence: Synthetic oligonucleotide
aggaacuggcauauguucu

SEQ ID NO: 2142742 - RNA, 19 nt, Artificial Sequence
  Description of Artificial Sequence: Synthetic oligonucleotide
uaaacgccuucacuaguuu

SEQ ID NO: 2142743 - RNA, 19 nt, Artificial Sequence
  Description of Artificial Sequence: Synthetic oligonucleotide
gguggaaacggccugcgga

SEQ ID NO: 2142744 - RNA, 19 nt, Artificial Sequence
  Description of Artificial Sequence: Synthetic oligonucleotide
ugcgcuggucacccuguag

SEQ ID NO: 2142745 - RNA, 19 nt, Artificial Sequence
  Description of Artificial Sequence: Synthetic oligonucleotide
cagcuagccacaguguuac

SEQ ID NO: 2142746 - RNA, 19 nt, Artificial Sequence
  Description of Artificial Sequence: Synthetic oligonucleotide
aacggccugcggaaggcgg

SEQ ID NO: 2142747 - RNA, 19 nt, Artificial Sequence
  Description of Artificial Sequence: Synthetic oligonucleotide
gaacuggcauauguucuug

SEQ ID NO: 2142748 - RNA, 19 nt, Artificial Sequence
  Description of Artificial Sequence: Synthetic oligonucleotide
acuuucuccuagggcaggg

SEQ ID NO: 2142749 - RNA, 19 nt, Artificial Sequence
  Description of Artificial Sequence: Synthetic oligonucleotide
aaacggccugcggaaggcg

SEQ ID NO: 2142750 - RNA, 19 nt, Artificial Sequence
  Description of Artificial Sequence: Synthetic oligonucleotide
uuauauacuuggggcucug

SEQ ID NO: 2142751 - RNA, 19 nt, Artificial Sequence
  Description of Artificial Sequence: Synthetic oligonucleotide
agcugcuacuaaugaguug

SEQ ID NO: 2142752 - RNA, 19 nt, Artificial Sequence
  Description of Artificial Sequence: Synthetic oligonucleotide
cuucuggauagacauagcu

SEQ ID NO: 2142753 - RNA, 19 nt, Artificial Sequence
  Description of Artificial Sequence: Synthetic oligonucleotide
gcuugaccuguuuaaauga

SEQ ID NO: 2142754 - RNA, 19 nt, Artificial Sequence
  Description of Artificial Sequence: Synthetic oligonucleotide
ggaaacggccugcggaagg

SEQ ID NO: 2142755 - RNA, 19 nt, Artificial Sequence
  Description of Artificial Sequence: Synthetic oligonucleotide
uacucauugcaaggaaauc

SEQ ID NO: 2142756 - RNA, 19 nt, Artificial Sequence
  Description of Artificial Sequence: Synthetic oligonucleotide
augagggacuucaagacua

SEQ ID NO: 2142757 - RNA, 19 nt, Artificial Sequence
  Description of Artificial Sequence: Synthetic oligonucleotide
ggcagcugcuacuaaugag

SEQ ID NO: 2142758 - RNA, 19 nt, Artificial Sequence
  Description of Artificial Sequence: Synthetic oligonucleotide
acacuaguccaaguuaaaa

SEQ ID NO: 2142759 - RNA, 19 nt, Artificial Sequence
  Description of Artificial Sequence: Synthetic oligonucleotide
ggaguuacacuaguccaag

SEQ ID NO: 2142760 - RNA, 19 nt, Artificial Sequence
  Description of Artificial Sequence: Synthetic oligonucleotide
uuuacccggugacuuucuc

SEQ ID NO: 2142761 - RNA, 19 nt, Artificial Sequence
  Description of Artificial Sequence: Synthetic oligonucleotide
uguuuaaaugagggacuuc

SEQ ID NO: 2142762 - RNA, 19 nt, Artificial Sequence
  Description of Artificial Sequence: Synthetic oligonucleotide
cugaauuacuucuccauau

SEQ ID NO: 2142763 - RNA, 19 nt, Artificial Sequence
  Description of Artificial Sequence: Synthetic oligonucleotide
cagggcuuacugcuugacc

SEQ ID NO: 2142764 - RNA, 19 nt, Artificial Sequence
  Description of Artificial Sequence: Synthetic oligonucleotide
gucguccuuagccagucca

SEQ ID NO: 2142765 - RNA, 19 nt, Artificial Sequence
  Description of Artificial Sequence: Synthetic oligonucleotide
guucuugcgcuggucaccc

SEQ ID NO: 2142766 - RNA, 19 nt, Artificial Sequence
  Description of Artificial Sequence: Synthetic oligonucleotide
cuguagcugaauuacuucu

SEQ ID NO: 2142767 - RNA, 19 nt, Artificial Sequence
  Description of Artificial Sequence: Synthetic oligonucleotide
ucguccuuagccaguccaa

SEQ ID NO: 2142768 - RNA, 19 nt, Artificial Sequence
  Description of Artificial Sequence: Synthetic oligonucleotide
gcauauguucuugcgcugg

SEQ ID NO: 2142769 - RNA, 19 nt, Artificial Sequence
  Description of Artificial Sequence: Synthetic oligonucleotide
ccauucucuuguuuacccg

SEQ ID NO: 2142770 - RNA, 19 nt, Artificial Sequence
  Description of Artificial Sequence: Synthetic oligonucleotide
gacucuguagagggagagc

SEQ ID NO: 2142771 - RNA, 19 nt, Artificial Sequence
  Description of Artificial Sequence: Synthetic oligonucleotide
ucgguggaaacggccugcg

SEQ ID NO: 2142772 - RNA, 19 nt, Artificial Sequence
  Description of Artificial Sequence: Synthetic oligonucleotide
gcuagccacaguguuaccc

SEQ ID NO: 2142773 - RNA, 19 nt, Artificial Sequence
  Description of Artificial Sequence: Synthetic oligonucleotide
ugcuacuaaugaguugaaa

SEQ ID NO: 2142774 - RNA, 19 nt, Artificial Sequence
  Description of Artificial Sequence: Synthetic oligonucleotide
cuguagagggagagcugag

SEQ ID NO: 2142775 - RNA, 19 nt, Artificial Sequence
  Description of Artificial Sequence: Synthetic oligonucleotide
acaagcacuuaaaacccau

SEQ ID NO: 2142776 - RNA, 19 nt, Artificial Sequence
  Description of Artificial Sequence: Synthetic oligonucleotide
ggaugcucaauuacaguac

SEQ ID NO: 2142777 - RNA, 19 nt, Artificial Sequence
  Description of Artificial Sequence: Synthetic oligonucleotide
agcuagccacaguguuacc

SEQ ID NO: 2142778 - RNA, 19 nt, Artificial Sequence
  Description of Artificial Sequence: Synthetic oligonucleotide
accuuuacagcuagccaca

SEQ ID NO: 2142779 - RNA, 19 nt, Artificial Sequence
  Description of Artificial Sequence: Synthetic oligonucleotide
cuacucauugcaaggaaau

SEQ ID NO: 2142780 - RNA, 19 nt, Artificial Sequence
  Description of Artificial Sequence: Synthetic oligonucleotide
ugccguuucucuguugaau

SEQ ID NO: 2142781 - RNA, 19 nt, Artificial Sequence
  Description of Artificial Sequence: Synthetic oligonucleotide
cuuucuccuagggcagggg

SEQ ID NO: 2142782 - RNA, 19 nt, Artificial Sequence
  Description of Artificial Sequence: Synthetic oligonucleotide
aggaguuacacuaguccaa

SEQ ID NO: 2142783 - RNA, 19 nt, Artificial Sequence
  Description of Artificial Sequence: Synthetic oligonucleotide
cauacgauacgauuccuuu

SEQ ID NO: 2142784 - RNA, 19 nt, Artificial Sequence
  Description of Artificial Sequence: Synthetic oligonucleotide
acugcuugaccuguuuaaa

SEQ ID NO: 2142785 - RNA, 19 nt, Artificial Sequence
  Description of Artificial Sequence: Synthetic oligonucleotide
guugaaaccuuuacagcua

SEQ ID NO: 2142786 - RNA, 19 nt, Artificial Sequence
  Description of Artificial Sequence: Synthetic oligonucleotide
aauccucacuuaagcuuca

SEQ ID NO: 2142787 - RNA, 19 nt, Artificial Sequence
  Description of Artificial Sequence: Synthetic oligonucleotide
guggaaacggccugcggaa

SEQ ID NO: 2142788 - RNA, 19 nt, Artificial Sequence
  Description of Artificial Sequence: Synthetic oligonucleotide
gccaguccaaucucuauca

SEQ ID NO: 2142789 - RNA, 19 nt, Artificial Sequence
  Description of Artificial Sequence: Synthetic oligonucleotide
guccuuagccaguccaauc

SEQ ID NO: 2142790 - RNA, 19 nt, Artificial Sequence
  Description of Artificial Sequence: Synthetic oligonucleotide
agcgaucccuuggacagug

SEQ ID NO: 2142791 - RNA, 19 nt, Artificial Sequence
  Description of Artificial Sequence: Synthetic oligonucleotide
ugggcuuggcugaaacauu

SEQ ID NO: 2142792 - RNA, 19 nt, Artificial Sequence
  Description of Artificial Sequence: Synthetic oligonucleotide
cacaagcacuuaaaaccca

SEQ ID NO: 2142793 - RNA, 19 nt, Artificial Sequence
  Description of Artificial Sequence: Synthetic oligonucleotide
gagcgucgggaagcgaggg

SEQ ID NO: 2142794 - RNA, 19 nt, Artificial Sequence
  Description of Artificial Sequence: Synthetic oligonucleotide
auaaggguuuaaauacauu

SEQ ID NO: 2142795 - RNA, 19 nt, Artificial Sequence
  Description of Artificial Sequence: Synthetic oligonucleotide
gcuuauauacuuggggcuc

SEQ ID NO: 2142796 - RNA, 19 nt, Artificial Sequence
  Description of Artificial Sequence: Synthetic oligonucleotide
auucucuuguuuacccggu

SEQ ID NO: 2142797 - RNA, 19 nt, Artificial Sequence
  Description of Artificial Sequence: Synthetic oligonucleotide
gcuggucguccuuagccag

SEQ ID NO: 2142798 - RNA, 19 nt, Artificial Sequence
  Description of Artificial Sequence: Synthetic oligonucleotide
cucgguggaaacggccugc

SEQ ID NO: 2142799 - RNA, 19 nt, Artificial Sequence
  Description of Artificial Sequence: Synthetic oligonucleotide
cuuaagcuucagagaguca

SEQ ID NO: 2142800 - RNA, 19 nt, Artificial Sequence
  Description of Artificial Sequence: Synthetic oligonucleotide
acauaacauuaaaacugaa

SEQ ID NO: 2142801 - RNA, 19 nt, Artificial Sequence
  Description of Artificial Sequence: Synthetic oligonucleotide
guguuacccauucucuugu

SEQ ID NO: 2142802 - RNA, 19 nt, Artificial Sequence
  Description of Artificial Sequence: Synthetic oligonucleotide
caucagcgaucccuuggac

SEQ ID NO: 2142803 - RNA, 19 nt, Artificial Sequence
  Description of Artificial Sequence: Synthetic oligonucleotide
cuaaugaguugaaaccuuu

SEQ ID NO: 2142804 - RNA, 19 nt, Artificial Sequence
  Description of Artificial Sequence: Synthetic oligonucleotide
ggcauauguucuugcgcug

SEQ ID NO: 2142805 - RNA, 19 nt, Artificial Sequence
  Description of Artificial Sequence: Synthetic oligonucleotide
ggacucuguagagggagag

SEQ ID NO: 2142806 - RNA, 19 nt, Artificial Sequence
  Description of Artificial Sequence: Synthetic oligonucleotide
gcugaauuacuucuccaua

SEQ ID NO: 2142807 - RNA, 19 nt, Artificial Sequence
  Description of Artificial Sequence: Synthetic oligonucleotide
acauacgauacgauuccuu

SEQ ID NO: 2142808 - RNA, 19 nt, Artificial Sequence
  Description of Artificial Sequence: Synthetic oligonucleotide
gggcuuggcugaaacauug

SEQ ID NO: 2142809 - RNA, 19 nt, Artificial Sequence
  Description of Artificial Sequence: Synthetic oligonucleotide
ggggcuucuggauagacau

SEQ ID NO: 2142810 - RNA, 19 nt, Artificial Sequence
  Description of Artificial Sequence: Synthetic oligonucleotide
uguuacccauucucuuguu

SEQ ID NO: 2142811 - RNA, 19 nt, Artificial Sequence
  Description of Artificial Sequence: Synthetic oligonucleotide
cuuaaacgccuucacuagu

SEQ ID NO: 2142812 - RNA, 19 nt, Artificial Sequence
  Description of Artificial Sequence: Synthetic oligonucleotide
acggccugcggaaggcggc

SEQ ID NO: 2142813 - RNA, 19 nt, Artificial Sequence
  Description of Artificial Sequence: Synthetic oligonucleotide
cagagagucacaagcacuu

SEQ ID NO: 2142814 - RNA, 19 nt, Artificial Sequence
  Description of Artificial Sequence: Synthetic oligonucleotide
ggauagcggacauacgaua

SEQ ID NO: 2142815 - RNA, 19 nt, Artificial Sequence
  Description of Artificial Sequence: Synthetic oligonucleotide
acgauuccuuuuccucggu

SEQ ID NO: 2142816 - RNA, 19 nt, Artificial Sequence
  Description of Artificial Sequence: Synthetic oligonucleotide
uggcugaaacauuguuauu

SEQ ID NO: 2142817 - RNA, 19 nt, Artificial Sequence
  Description of Artificial Sequence: Synthetic oligonucleotide
cuuguuuacccggugacuu

SEQ ID NO: 2142818 - RNA, 19 nt, Artificial Sequence
  Description of Artificial Sequence: Synthetic oligonucleotide
aaggcggcugcgggagaag

SEQ ID NO: 2142819 - RNA, 19 nt, Artificial Sequence
  Description of Artificial Sequence: Synthetic oligonucleotide
ggguuuaaauacauuacau

SEQ ID NO: 2142820 - RNA, 19 nt, Artificial Sequence
  Description of Artificial Sequence: Synthetic oligonucleotide
gugagggucuuccugccgu

SEQ ID NO: 2142821 - RNA, 19 nt, Artificial Sequence
  Description of Artificial Sequence: Synthetic oligonucleotide
acagcuagccacaguguua

SEQ ID NO: 2142822 - RNA, 19 nt, Artificial Sequence
  Description of Artificial Sequence: Synthetic oligonucleotide
gaggggcuucuggauagac

SEQ ID NO: 2142823 - RNA, 19 nt, Artificial Sequence
  Description of Artificial Sequence: Synthetic oligonucleotide
gcggcugcgggagaaggcg

SEQ ID NO: 2142824 - RNA, 19 nt, Artificial Sequence
  Description of Artificial Sequence: Synthetic oligonucleotide
cuaucaggaacuggcauau

SEQ ID NO: 2142825 - RNA, 19 nt, Artificial Sequence
  Description of Artificial Sequence: Synthetic oligonucleotide
gaguuacacuaguccaagu

SEQ ID NO: 2142826 - RNA, 19 nt, Artificial Sequence
  Description of Artificial Sequence: Synthetic oligonucleotide
auccucacuuaagcuucag

SEQ ID NO: 2142827 - RNA, 19 nt, Artificial Sequence
  Description of Artificial Sequence: Synthetic oligonucleotide
aggggcuucuggauagaca

SEQ ID NO: 2142828 - RNA, 19 nt, Artificial Sequence
  Description of Artificial Sequence: Synthetic oligonucleotide
ugagggucuuccugccguu

SEQ ID NO: 2142829 - RNA, 19 nt, Artificial Sequence
  Description of Artificial Sequence: Synthetic oligonucleotide
cuuauauacuuggggcucu

SEQ ID NO: 2142830 - RNA, 19 nt, Artificial Sequence
  Description of Artificial Sequence: Synthetic oligonucleotide
cccggugacuuucuccuag

SEQ ID NO: 2142831 - RNA, 19 nt, Artificial Sequence
  Description of Artificial Sequence: Synthetic oligonucleotide
ggagggaaauucuacucau

SEQ ID NO: 2142832 - RNA, 19 nt, Artificial Sequence
  Description of Artificial Sequence: Synthetic oligonucleotide
cuggaugcucaauuacagu

SEQ ID NO: 2142833 - RNA, 19 nt, Artificial Sequence
  Description of Artificial Sequence: Synthetic oligonucleotide
gcaaggaaauccucacuua

SEQ ID NO: 2142834 - RNA, 19 nt, Artificial Sequence
  Description of Artificial Sequence: Synthetic oligonucleotide
gagggacuucaagacuaga

SEQ ID NO: 2142835 - RNA, 19 nt, Artificial Sequence
  Description of Artificial Sequence: Synthetic oligonucleotide
ccuguuuaaaugagggacu

SEQ ID NO: 2142836 - RNA, 19 nt, Artificial Sequence
  Description of Artificial Sequence: Synthetic oligonucleotide
ccugccguuucucuguuga

SEQ ID NO: 2142837 - RNA, 19 nt, Artificial Sequence
  Description of Artificial Sequence: Synthetic oligonucleotide
gacauacgauacgauuccu

SEQ ID NO: 2142838 - RNA, 19 nt, Artificial Sequence
  Description of Artificial Sequence: Synthetic oligonucleotide
uuccugccguuucucuguu

SEQ ID NO: 2142839 - RNA, 19 nt, Artificial Sequence
  Description of Artificial Sequence: Synthetic oligonucleotide
agagagucacaagcacuua

SEQ ID NO: 2142840 - RNA, 19 nt, Artificial Sequence
  Description of Artificial Sequence: Synthetic oligonucleotide
cacuuaagcuucagagagu

SEQ ID NO: 2142841 - RNA, 19 nt, Artificial Sequence
  Description of Artificial Sequence: Synthetic oligonucleotide
acccuguagcugaauuacu

SEQ ID NO: 2142842 - RNA, 19 nt, Artificial Sequence
  Description of Artificial Sequence: Synthetic oligonucleotide
ccaguccaaucucuaucag

SEQ ID NO: 2142843 - RNA, 19 nt, Artificial Sequence
  Description of Artificial Sequence: Synthetic oligonucleotide
ccggugacuuucuccuagg

SEQ ID NO: 2142844 - RNA, 19 nt, Artificial Sequence
  Description of Artificial Sequence: Synthetic oligonucleotide
cugcggaaggcggcugcgg

SEQ ID NO: 2142845 - RNA, 19 nt, Artificial Sequence
  Description of Artificial Sequence: Synthetic oligonucleotide
caugaaccuucagcugguc

SEQ ID NO: 2142846 - RNA, 19 nt, Artificial Sequence
  Description of Artificial Sequence: Synthetic oligonucleotide
ccuuagccaguccaaucuc

SEQ ID NO: 2142847 - RNA, 19 nt, Artificial Sequence
  Description of Artificial Sequence: Synthetic oligonucleotide
cauauguucuugcgcuggu

SEQ ID NO: 2142848 - RNA, 19 nt, Artificial Sequence
  Description of Artificial Sequence: Synthetic oligonucleotide
cuuggggcucugggcuugg

SEQ ID NO: 2142849 - RNA, 19 nt, Artificial Sequence
  Description of Artificial Sequence: Synthetic oligonucleotide
cuuuacagcuagccacagu

SEQ ID NO: 2142850 - RNA, 19 nt, Artificial Sequence
  Description of Artificial Sequence: Synthetic oligonucleotide
cuuacugcuugaccuguuu

SEQ ID NO: 2142851 - RNA, 19 nt, Artificial Sequence
  Description of Artificial Sequence: Synthetic oligonucleotide
agcggacauacgauacgau

SEQ ID NO: 2142852 - RNA, 19 nt, Artificial Sequence
  Description of Artificial Sequence: Synthetic oligonucleotide
cugcuacuaaugaguugaa

SEQ ID NO: 2142853 - RNA, 19 nt, Artificial Sequence
  Description of Artificial Sequence: Synthetic oligonucleotide
uugcgcuggucacccugua

SEQ ID NO: 2142854 - RNA, 19 nt, Artificial Sequence
  Description of Artificial Sequence: Synthetic oligonucleotide
caguguuacccauucucuu

SEQ ID NO: 2142855 - RNA, 19 nt, Artificial Sequence
  Description of Artificial Sequence: Synthetic oligonucleotide
ggcuggacacugccagggc

SEQ ID NO: 2142856 - RNA, 19 nt, Artificial Sequence
  Description of Artificial Sequence: Synthetic oligonucleotide
cuguuuaaaugagggacuu

SEQ ID NO: 2142857 - RNA, 19 nt, Artificial Sequence
  Description of Artificial Sequence: Synthetic oligonucleotide
cuucaagacuagacagcau

SEQ ID NO: 2142858 - RNA, 19 nt, Artificial Sequence
  Description of Artificial Sequence: Synthetic oligonucleotide
gcucaauuacaguaccauu

SEQ ID NO: 2142859 - RNA, 19 nt, Artificial Sequence
  Description of Artificial Sequence: Synthetic oligonucleotide
cauauucuggaugcucaau

SEQ ID NO: 2142860 - RNA, 19 nt, Artificial Sequence
  Description of Artificial Sequence: Synthetic oligonucleotide
ggucguccuuagccagucc

SEQ ID NO: 2142861 - RNA, 19 nt, Artificial Sequence
  Description of Artificial Sequence: Synthetic oligonucleotide
gcggacauacgauacgauu

SEQ ID NO: 2142862 - RNA, 19 nt, Artificial Sequence
  Description of Artificial Sequence: Synthetic oligonucleotide
gagggaaauucuacucauu

SEQ ID NO: 2142863 - RNA, 19 nt, Artificial Sequence
  Description of Artificial Sequence: Synthetic oligonucleotide
cuccuagggcaggggacuc

SEQ ID NO: 2142864 - RNA, 19 nt, Artificial Sequence
  Description of Artificial Sequence: Synthetic oligonucleotide
gcuuuguuucaggcuggac

SEQ ID NO: 2142865 - RNA, 19 nt, Artificial Sequence
  Description of Artificial Sequence: Synthetic oligonucleotide
gccugcggaaggcggcugc

SEQ ID NO: 2142866 - RNA, 19 nt, Artificial Sequence
  Description of Artificial Sequence: Synthetic oligonucleotide
acuagacagcauggcucuu

SEQ ID NO: 2142867 - RNA, 19 nt, Artificial Sequence
  Description of Artificial Sequence: Synthetic oligonucleotide
acccggugacuuucuccua

SEQ ID NO: 2142868 - RNA, 19 nt, Artificial Sequence
  Description of Artificial Sequence: Synthetic oligonucleotide
guuuacccggugacuuucu

SEQ ID NO: 2142869 - RNA, 19 nt, Artificial Sequence
  Description of Artificial Sequence: Synthetic oligonucleotide
cuggucguccuuagccagu

SEQ ID NO: 2142870 - RNA, 19 nt, Artificial Sequence
  Description of Artificial Sequence: Synthetic oligonucleotide
ggcggcugcgggagaaggc

SEQ ID NO: 2142871 - RNA, 19 nt, Artificial Sequence
  Description of Artificial Sequence: Synthetic oligonucleotide
cguaaucaucagcgauccc

SEQ ID NO: 2142872 - RNA, 19 nt, Artificial Sequence
  Description of Artificial Sequence: Synthetic oligonucleotide
cugcgggagaaggcgggca

SEQ ID NO: 2142873 - RNA, 19 nt, Artificial Sequence
  Description of Artificial Sequence: Synthetic oligonucleotide
gcugcgggagaaggcgggc

SEQ ID NO: 2142874 - RNA, 19 nt, Artificial Sequence
  Description of Artificial Sequence: Synthetic oligonucleotide
ggcuuacugcuugaccugu

SEQ ID NO: 2142875 - RNA, 19 nt, Artificial Sequence
  Description of Artificial Sequence: Synthetic oligonucleotide
caguggugagggucuuccu

SEQ ID NO: 2142876 - RNA, 19 nt, Artificial Sequence
  Description of Artificial Sequence: Synthetic oligonucleotide
cgauacgauuccuuuuccu

SEQ ID NO: 2142877 - RNA, 19 nt, Artificial Sequence
  Description of Artificial Sequence: Synthetic oligonucleotide
cgguggaaacggccugcgg

SEQ ID NO: 2142878 - RNA, 19 nt, Artificial Sequence
  Description of Artificial Sequence: Synthetic oligonucleotide
cacauggcacugggcagcu

SEQ ID NO: 2142879 - RNA, 19 nt, Artificial Sequence
  Description of Artificial Sequence: Synthetic oligonucleotide
ggacacugccagggcuuac

SEQ ID NO: 2142880 - RNA, 19 nt, Artificial Sequence
  Description of Artificial Sequence: Synthetic oligonucleotide
cgaucccuuggacaguggu

SEQ ID NO: 2142881 - RNA, 19 nt, Artificial Sequence
  Description of Artificial Sequence: Synthetic oligonucleotide
gggcuucuggauagacaua

SEQ ID NO: 2142882 - RNA, 19 nt, Artificial Sequence
  Description of Artificial Sequence: Synthetic oligonucleotide
gcuuacugcuugaccuguu

SEQ ID NO: 2142883 - RNA, 19 nt, Artificial Sequence
  Description of Artificial Sequence: Synthetic oligonucleotide
aacuucaaaaucuccagag

SEQ ID NO: 2142884 - RNA, 19 nt, Artificial Sequence
  Description of Artificial Sequence: Synthetic oligonucleotide
accgaugaaaucuaugccc

SEQ ID NO: 2142885 - RNA, 19 nt, Artificial Sequence
  Description of Artificial Sequence: Synthetic oligonucleotide
ucauccaggaugaacauag

SEQ ID NO: 2142886 - RNA, 19 nt, Artificial Sequence
  Description of Artificial Sequence: Synthetic oligonucleotide
aaagugaucccaaucuucc

SEQ ID NO: 2142887 - RNA, 19 nt, Artificial Sequence
  Description of Artificial Sequence: Synthetic oligonucleotide
ggaccaaucagauugaggg

SEQ ID NO: 2142888 - RNA, 19 nt, Artificial Sequence
  Description of Artificial Sequence: Synthetic oligonucleotide
uacuuguuaagccaggccc

SEQ ID NO: 2142889 - RNA, 19 nt, Artificial Sequence
  Description of Artificial Sequence: Synthetic oligonucleotide
aagagcauaauacccagca

SEQ ID NO: 2142890 - RNA, 19 nt, Artificial Sequence
  Description of Artificial Sequence: Synthetic oligonucleotide
ucaacaggggcucaaagug

SEQ ID NO: 2142891 - RNA, 19 nt, Artificial Sequence
  Description of Artificial Sequence: Synthetic oligonucleotide
aauacaggcauccuacgca

SEQ ID NO: 2142892 - RNA, 19 nt, Artificial Sequence
  Description of Artificial Sequence: Synthetic oligonucleotide
auaccauccauucagcaag

SEQ ID NO: 2142893 - RNA, 19 nt, Artificial Sequence
  Description of Artificial Sequence: Synthetic oligonucleotide
acauuuucaguggauagcc

SEQ ID NO: 2142894 - RNA, 19 nt, Artificial Sequence
  Description of Artificial Sequence: Synthetic oligonucleotide
aauccggagacuucgaaga

SEQ ID NO: 2142895 - RNA, 19 nt, Artificial Sequence
  Description of Artificial Sequence: Synthetic oligonucleotide
aaaacuucucaauccggag

SEQ ID NO: 2142896 - RNA, 19 nt, Artificial Sequence
  Description of Artificial Sequence: Synthetic oligonucleotide
uggacugcuggucaguugg

SEQ ID NO: 2142897 - RNA, 19 nt, Artificial Sequence
  Description of Artificial Sequence: Synthetic oligonucleotide
uguacagcaugaauccugg

SEQ ID NO: 2142898 - RNA, 19 nt, Artificial Sequence
  Description of Artificial Sequence: Synthetic oligonucleotide
agcauugcggauuccauac

SEQ ID NO: 2142899 - RNA, 19 nt, Artificial Sequence
  Description of Artificial Sequence: Synthetic oligonucleotide
ucaguggauagccauauac

SEQ ID NO: 2142900 - RNA, 19 nt, Artificial Sequence
  Description of Artificial Sequence: Synthetic oligonucleotide
uucccauuccgguaaaugg

SEQ ID NO: 2142901 - RNA, 19 nt, Artificial Sequence
  Description of Artificial Sequence: Synthetic oligonucleotide
cauagcaaggcguuuauac

SEQ ID NO: 2142902 - RNA, 19 nt, Artificial Sequence
  Description of Artificial Sequence: Synthetic oligonucleotide
ugaaaauagguuuuggguu

SEQ ID NO: 2142903 - RNA, 19 nt, Artificial Sequence
  Description of Artificial Sequence: Synthetic oligonucleotide
uuuuggguucuucucaaag

SEQ ID NO: 2142904 - RNA, 19 nt, Artificial Sequence
  Description of Artificial Sequence: Synthetic oligonucleotide
uucccagacauuuucagug

SEQ ID NO: 2142905 - RNA, 19 nt, Artificial Sequence
  Description of Artificial Sequence: Synthetic oligonucleotide
aaaucuaugcccuucucua

SEQ ID NO: 2142906 - RNA, 19 nt, Artificial Sequence
  Description of Artificial Sequence: Synthetic oligonucleotide
aaaacagaguuggaaagug

SEQ ID NO: 2142907 - RNA, 19 nt, Artificial Sequence
  Description of Artificial Sequence: Synthetic oligonucleotide
uccaauacaggcauccuac

SEQ ID NO: 2142908 - RNA, 19 nt, Artificial Sequence
  Description of Artificial Sequence: Synthetic oligonucleotide
agccauauaccauccauuc

SEQ ID NO: 2142909 - RNA, 19 nt, Artificial Sequence
  Description of Artificial Sequence: Synthetic oligonucleotide
uccaaagcgcugcaaaucc

SEQ ID NO: 2142910 - RNA, 19 nt, Artificial Sequence
  Description of Artificial Sequence: Synthetic oligonucleotide
uuuauacaccccauucugc

SEQ ID NO: 2142911 - RNA, 19 nt, Artificial Sequence
  Description of Artificial Sequence: Synthetic oligonucleotide
aguggauagccauauacca

SEQ ID NO: 2142912 - RNA, 19 nt, Artificial Sequence
  Description of Artificial Sequence: Synthetic oligonucleotide
auagcccacgcucaucucc

SEQ ID NO: 2142913 - RNA, 19 nt, Artificial Sequence
  Description of Artificial Sequence: Synthetic oligonucleotide
aaacuucucaauccggaga

SEQ ID NO: 2142914 - RNA, 19 nt, Artificial Sequence
  Description of Artificial Sequence: Synthetic oligonucleotide
guuuauacaccccauucug

SEQ ID NO: 2142915 - RNA, 19 nt, Artificial Sequence
  Description of Artificial Sequence: Synthetic oligonucleotide
agcgcugcaaauccaauuc

SEQ ID NO: 2142916 - RNA, 19 nt, Artificial Sequence
  Description of Artificial Sequence: Synthetic oligonucleotide
uccaggaugaacauagcaa

SEQ ID NO: 2142917 - RNA, 19 nt, Artificial Sequence
  Description of Artificial Sequence: Synthetic oligonucleotide
uguacuacaggagacucgc

SEQ ID NO: 2142918 - RNA, 19 nt, Artificial Sequence
  Description of Artificial Sequence: Synthetic oligonucleotide
uacuacaggagacucgccc

SEQ ID NO: 2142919 - RNA, 19 nt, Artificial Sequence
  Description of Artificial Sequence: Synthetic oligonucleotide
uacagcaugaauccuggcu

SEQ ID NO: 2142920 - RNA, 19 nt, Artificial Sequence
  Description of Artificial Sequence: Synthetic oligonucleotide
aggccacaagucuaggucc

SEQ ID NO: 2142921 - RNA, 19 nt, Artificial Sequence
  Description of Artificial Sequence: Synthetic oligonucleotide
uguuaagccaggcccaaca

SEQ ID NO: 2142922 - RNA, 19 nt, Artificial Sequence
  Description of Artificial Sequence: Synthetic oligonucleotide
aaaguagcccuguacuaca

SEQ ID NO: 2142923 - RNA, 19 nt, Artificial Sequence
  Description of Artificial Sequence: Synthetic oligonucleotide
cauguacuuguuaagccag

SEQ ID NO: 2142924 - RNA, 19 nt, Artificial Sequence
  Description of Artificial Sequence: Synthetic oligonucleotide
ucucaauccggagacuucg

SEQ ID NO: 2142925 - RNA, 19 nt, Artificial Sequence
  Description of Artificial Sequence: Synthetic oligonucleotide
ugcaaauccaauucccaga

SEQ ID NO: 2142926 - RNA, 19 nt, Artificial Sequence
  Description of Artificial Sequence: Synthetic oligonucleotide
uccaacacucaucacuuca

SEQ ID NO: 2142927 - RNA, 19 nt, Artificial Sequence
  Description of Artificial Sequence: Synthetic oligonucleotide
agggcaauucaccaacuuc

SEQ ID NO: 2142928 - RNA, 19 nt, Artificial Sequence
  Description of Artificial Sequence: Synthetic oligonucleotide
auacaccccauucugcuuc

SEQ ID NO: 2142929 - RNA, 19 nt, Artificial Sequence
  Description of Artificial Sequence: Synthetic oligonucleotide
uucucuaacuucacucgag

SEQ ID NO: 2142930 - RNA, 19 nt, Artificial Sequence
  Description of Artificial Sequence: Synthetic oligonucleotide
ucgauggggauguacagca

SEQ ID NO: 2142931 - RNA, 19 nt, Artificial Sequence
  Description of Artificial Sequence: Synthetic oligonucleotide
aucuaugcccuucucuaac

SEQ ID NO: 2142932 - RNA, 19 nt, Artificial Sequence
  Description of Artificial Sequence: Synthetic oligonucleotide
uauaccauccauucagcaa

SEQ ID NO: 2142933 - RNA, 19 nt, Artificial Sequence
  Description of Artificial Sequence: Synthetic oligonucleotide
auaauacccagcauugcgg

SEQ ID NO: 2142934 - RNA, 19 nt, Artificial Sequence
  Description of Artificial Sequence: Synthetic oligonucleotide
gguguuuaagucuugcccc

SEQ ID NO: 2142935 - RNA, 19 nt, Artificial Sequence
  Description of Artificial Sequence: Synthetic oligonucleotide
uggaaaguggucuggaguc

SEQ ID NO: 2142936 - RNA, 19 nt, Artificial Sequence
  Description of Artificial Sequence: Synthetic oligonucleotide
uggauagccauauaccauc

SEQ ID NO: 2142937 - RNA, 19 nt, Artificial Sequence
  Description of Artificial Sequence: Synthetic oligonucleotide
ucggaucccauuugcauag

SEQ ID NO: 2142938 - RNA, 19 nt, Artificial Sequence
  Description of Artificial Sequence: Synthetic oligonucleotide
cagagucuccaauacaggc

SEQ ID NO: 2142939 - RNA, 19 nt, Artificial Sequence
  Description of Artificial Sequence: Synthetic oligonucleotide
uagcaaggcguuuauacac

SEQ ID NO: 2142940 - RNA, 19 nt, Artificial Sequence
  Description of Artificial Sequence: Synthetic oligonucleotide
uacucgauggggauguaca

SEQ ID NO: 2142941 - RNA, 19 nt, Artificial Sequence
  Description of Artificial Sequence: Synthetic oligonucleotide
uucccuuagguucugaauu

SEQ ID NO: 2142942 - RNA, 19 nt, Artificial Sequence
  Description of Artificial Sequence: Synthetic oligonucleotide
aauagguuuuggguucuuc

SEQ ID NO: 2142943 - RNA, 19 nt, Artificial Sequence
  Description of Artificial Sequence: Synthetic oligonucleotide
auagguuuuggguucuucu

SEQ ID NO: 2142944 - RNA, 19 nt, Artificial Sequence
  Description of Artificial Sequence: Synthetic oligonucleotide
gagggaacucaacaggggc

SEQ ID NO: 2142945 - RNA, 19 nt, Artificial Sequence
  Description of Artificial Sequence: Synthetic oligonucleotide
uuuccaacugguucuugcc

SEQ ID NO: 2142946 - RNA, 19 nt, Artificial Sequence
  Description of Artificial Sequence: Synthetic oligonucleotide
ucucuaacuucacucgaga

SEQ ID NO: 2142947 - RNA, 19 nt, Artificial Sequence
  Description of Artificial Sequence: Synthetic oligonucleotide
auagcaaggcguuuauaca

SEQ ID NO: 2142948 - RNA, 19 nt, Artificial Sequence
  Description of Artificial Sequence: Synthetic oligonucleotide
uaauacccagcauugcgga

SEQ ID NO: 2142949 - RNA, 19 nt, Artificial Sequence
  Description of Artificial Sequence: Synthetic oligonucleotide
ccauauaccauccauucag

SEQ ID NO: 2142950 - RNA, 19 nt, Artificial Sequence
  Description of Artificial Sequence: Synthetic oligonucleotide
acaagucuagguccguguc

SEQ ID NO: 2142951 - RNA, 19 nt, Artificial Sequence
  Description of Artificial Sequence: Synthetic oligonucleotide
cauauaccauccauucagc

SEQ ID NO: 2142952 - RNA, 19 nt, Artificial Sequence
  Description of Artificial Sequence: Synthetic oligonucleotide
ugaauccuggcucuccugu

SEQ ID NO: 2142953 - RNA, 19 nt, Artificial Sequence
  Description of Artificial Sequence: Synthetic oligonucleotide
aaggucucagggcaauuca

SEQ ID NO: 2142954 - RNA, 19 nt, Artificial Sequence
  Description of Artificial Sequence: Synthetic oligonucleotide
acauccacagcccgaggac

SEQ ID NO: 2142955 - RNA, 19 nt, Artificial Sequence
  Description of Artificial Sequence: Synthetic oligonucleotide
uguccaacacucaucacuu

SEQ ID NO: 2142956 - RNA, 19 nt, Artificial Sequence
  Description of Artificial Sequence: Synthetic oligonucleotide
ucccagacauuuucagugg

SEQ ID NO: 2142957 - RNA, 19 nt, Artificial Sequence
  Description of Artificial Sequence: Synthetic oligonucleotide
gucauaggggcauaggaca

SEQ ID NO: 2142958 - RNA, 19 nt, Artificial Sequence
  Description of Artificial Sequence: Synthetic oligonucleotide
aaguggucuggagucauag

SEQ ID NO: 2142959 - RNA, 19 nt, Artificial Sequence
  Description of Artificial Sequence: Synthetic oligonucleotide
cuggucaguuggaagaaag

SEQ ID NO: 2142960 - RNA, 19 nt, Artificial Sequence
  Description of Artificial Sequence: Synthetic oligonucleotide
caauacaggcauccuacgc

SEQ ID NO: 2142961 - RNA, 19 nt, Artificial Sequence
  Description of Artificial Sequence: Synthetic oligonucleotide
ccgaggaccaaucagauug

SEQ ID NO: 2142962 - RNA, 19 nt, Artificial Sequence
  Description of Artificial Sequence: Synthetic oligonucleotide
auauaccauccauucagca

SEQ ID NO: 2142963 - RNA, 19 nt, Artificial Sequence
  Description of Artificial Sequence: Synthetic oligonucleotide
gagucauaggggcauagga

SEQ ID NO: 2142964 - RNA, 19 nt, Artificial Sequence
  Description of Artificial Sequence: Synthetic oligonucleotide
ugucuuuuggcauguacuu

SEQ ID NO: 2142965 - RNA, 19 nt, Artificial Sequence
  Description of Artificial Sequence: Synthetic oligonucleotide
cagcauacuucccauuccg

SEQ ID NO: 2142966 - RNA, 19 nt, Artificial Sequence
  Description of Artificial Sequence: Synthetic oligonucleotide
uguacuuguuaagccaggc

SEQ ID NO: 2142967 - RNA, 19 nt, Artificial Sequence
  Description of Artificial Sequence: Synthetic oligonucleotide
ggucauacucaucacucgg

SEQ ID NO: 2142968 - RNA, 19 nt, Artificial Sequence
  Description of Artificial Sequence: Synthetic oligonucleotide
aaucuaugcccuucucuaa

SEQ ID NO: 2142969 - RNA, 19 nt, Artificial Sequence
  Description of Artificial Sequence: Synthetic oligonucleotide
aucccaaucuucccuuagg

SEQ ID NO: 2142970 - RNA, 19 nt, Artificial Sequence
  Description of Artificial Sequence: Synthetic oligonucleotide
ggguguuuaagucuugccc

SEQ ID NO: 2142971 - RNA, 19 nt, Artificial Sequence
  Description of Artificial Sequence: Synthetic oligonucleotide
ucauacucaucacucggau

SEQ ID NO: 2142972 - RNA, 19 nt, Artificial Sequence
  Description of Artificial Sequence: Synthetic oligonucleotide
acagcacauccacagcccg

SEQ ID NO: 2142973 - RNA, 19 nt, Artificial Sequence
  Description of Artificial Sequence: Synthetic oligonucleotide
ucccaaucuucccuuaggu

SEQ ID NO: 2142974 - RNA, 19 nt, Artificial Sequence
  Description of Artificial Sequence: Synthetic oligonucleotide
caauccggagacuucgaag

SEQ ID NO: 2142975 - RNA, 19 nt, Artificial Sequence
  Description of Artificial Sequence: Synthetic oligonucleotide
aggcauccuacgcaggagg

SEQ ID NO: 2142976 - RNA, 19 nt, Artificial Sequence
  Description of Artificial Sequence: Synthetic oligonucleotide
agaaaggugcggcugcucu

SEQ ID NO: 2142977 - RNA, 19 nt, Artificial Sequence
  Description of Artificial Sequence: Synthetic oligonucleotide
auccaggaugaacauagca

SEQ ID NO: 2142978 - RNA, 19 nt, Artificial Sequence
  Description of Artificial Sequence: Synthetic oligonucleotide
gaucccauuugcauagccc

SEQ ID NO: 2142979 - RNA, 19 nt, Artificial Sequence
  Description of Artificial Sequence: Synthetic oligonucleotide
gaccaaucagauugagggc

SEQ ID NO: 2142980 - RNA, 19 nt, Artificial Sequence
  Description of Artificial Sequence: Synthetic oligonucleotide
ccuugcaaaacagaguugg

SEQ ID NO: 2142981 - RNA, 19 nt, Artificial Sequence
  Description of Artificial Sequence: Synthetic oligonucleotide
ccaaucuucccuuagguuc

SEQ ID NO: 2142982 - RNA, 19 nt, Artificial Sequence
  Description of Artificial Sequence: Synthetic oligonucleotide
gucaguuggaagaaaggug

SEQ ID NO: 2142983 - RNA, 19 nt, Artificial Sequence
  Description of Artificial Sequence: Synthetic oligonucleotide
acuacaggagacucgccca

SEQ ID NO: 2142984 - RNA, 19 nt, Artificial Sequence
  Description of Artificial Sequence: Synthetic oligonucleotide
augaaaucuaugcccuucu

SEQ ID NO: 2142985 - RNA, 19 nt, Artificial Sequence
  Description of Artificial Sequence: Synthetic oligonucleotide
aggggcauaggacaacuca

SEQ ID NO: 2142986 - RNA, 19 nt, Artificial Sequence
  Description of Artificial Sequence: Synthetic oligonucleotide
cucagggcaauucaccaac

SEQ ID NO: 2142987 - RNA, 19 nt, Artificial Sequence
  Description of Artificial Sequence: Synthetic oligonucleotide
agcaaggcguuuauacacc

SEQ ID NO: 2142988 - RNA, 19 nt, Artificial Sequence
  Description of Artificial Sequence: Synthetic oligonucleotide
aaaauagguuuuggguucu

SEQ ID NO: 2142989 - RNA, 19 nt, Artificial Sequence
  Description of Artificial Sequence: Synthetic oligonucleotide
uuuucaguggauagccaua

SEQ ID NO: 2142990 - RNA, 19 nt, Artificial Sequence
  Description of Artificial Sequence: Synthetic oligonucleotide
cuguacuacaggagacucg

SEQ ID NO: 2142991 - RNA, 19 nt, Artificial Sequence
  Description of Artificial Sequence: Synthetic oligonucleotide
aggagacucgcccaugaug

SEQ ID NO: 2142992 - RNA, 19 nt, Artificial Sequence
  Description of Artificial Sequence: Synthetic oligonucleotide
uugcaaaacagaguuggaa

SEQ ID NO: 2142993 - RNA, 19 nt, Artificial Sequence
  Description of Artificial Sequence: Synthetic oligonucleotide
aggagggaacucaacaggg

SEQ ID NO: 2142994 - RNA, 19 nt, Artificial Sequence
  Description of Artificial Sequence: Synthetic oligonucleotide
uugcggauuccauacuucu

SEQ ID NO: 2142995 - RNA, 19 nt, Artificial Sequence
  Description of Artificial Sequence: Synthetic oligonucleotide
gaaaucuaugcccuucucu

SEQ ID NO: 2142996 - RNA, 19 nt, Artificial Sequence
  Description of Artificial Sequence: Synthetic oligonucleotide
guacuuguuaagccaggcc

SEQ ID NO: 2142997 - RNA, 19 nt, Artificial Sequence
  Description of Artificial Sequence: Synthetic oligonucleotide
agggcauuccgaccgauga

SEQ ID NO: 2142998 - RNA, 19 nt, Artificial Sequence
  Description of Artificial Sequence: Synthetic oligonucleotide
ggaacuuuccagcuccucc

SEQ ID NO: 2142999 - RNA, 19 nt, Artificial Sequence
  Description of Artificial Sequence: Synthetic oligonucleotide
guuaagccaggcccaacag

SEQ ID NO: 2143000 - RNA, 19 nt, Artificial Sequence
  Description of Artificial Sequence: Synthetic oligonucleotide
ucuggagggcguccaaagc

SEQ ID NO: 2143001 - RNA, 19 nt, Artificial Sequence
  Description of Artificial Sequence: Synthetic oligonucleotide
aaucuccagagucuccaau

SEQ ID NO: 2143002 - RNA, 19 nt, Artificial Sequence
  Description of Artificial Sequence: Synthetic oligonucleotide
guuggaaaguggucuggag

SEQ ID NO: 2143003 - RNA, 19 nt, Artificial Sequence
  Description of Artificial Sequence: Synthetic oligonucleotide
ucuaugcccuucucuaacu

SEQ ID NO: 2143004 - RNA, 19 nt, Artificial Sequence
  Description of Artificial Sequence: Synthetic oligonucleotide
uaaauggguucuccccacc

SEQ ID NO: 2143005 - RNA, 19 nt, Artificial Sequence
  Description of Artificial Sequence: Synthetic oligonucleotide
aguagcccuguacuacagg

SEQ ID NO: 2143006 - RNA, 19 nt, Artificial Sequence
  Description of Artificial Sequence: Synthetic oligonucleotide
uagguuuuggguucuucuc

SEQ ID NO: 2143007 - RNA, 19 nt, Artificial Sequence
  Description of Artificial Sequence: Synthetic oligonucleotide
acucaacaggggcucaaag

SEQ ID NO: 2143008 - RNA, 19 nt, Artificial Sequence
  Description of Artificial Sequence: Synthetic oligonucleotide
cucuaacuucacucgagac

SEQ ID NO: 2143009 - RNA, 19 nt, Artificial Sequence
  Description of Artificial Sequence: Synthetic oligonucleotide
ucauaggggcauaggacaa

SEQ ID NO: 2143010 - RNA, 19 nt, Artificial Sequence
  Description of Artificial Sequence: Synthetic oligonucleotide
auggguucuccccaccaag

SEQ ID NO: 2143011 - RNA, 19 nt, Artificial Sequence
  Description of Artificial Sequence: Synthetic oligonucleotide
ucaucacuucauuguagac

SEQ ID NO: 2143012 - RNA, 19 nt, Artificial Sequence
  Description of Artificial Sequence: Synthetic oligonucleotide
agcccuguacuacaggaga

SEQ ID NO: 2143013 - RNA, 19 nt, Artificial Sequence
  Description of Artificial Sequence: Synthetic oligonucleotide
ugcccucagugaaaauagg

SEQ ID NO: 2143014 - RNA, 19 nt, Artificial Sequence
  Description of Artificial Sequence: Synthetic oligonucleotide
ggcauguacuuguuaagcc

SEQ ID NO: 2143015 - RNA, 19 nt, Artificial Sequence
  Description of Artificial Sequence: Synthetic oligonucleotide
ggagacucgcccaugaugc

SEQ ID NO: 2143016 - RNA, 19 nt, Artificial Sequence
  Description of Artificial Sequence: Synthetic oligonucleotide
uagcccuguacuacaggag

SEQ ID NO: 2143017 - RNA, 19 nt, Artificial Sequence
  Description of Artificial Sequence: Synthetic oligonucleotide
cucaaagugaucccaaucu

SEQ ID NO: 2143018 - RNA, 19 nt, Artificial Sequence
  Description of Artificial Sequence: Synthetic oligonucleotide
guagcccuguacuacagga

SEQ ID NO: 2143019 - RNA, 19 nt, Artificial Sequence
  Description of Artificial Sequence: Synthetic oligonucleotide
aacugguucuugcccucag

SEQ ID NO: 2143020 - RNA, 19 nt, Artificial Sequence
  Description of Artificial Sequence: Synthetic oligonucleotide
cauuccgguaaauggguuc

SEQ ID NO: 2143021 - RNA, 19 nt, Artificial Sequence
  Description of Artificial Sequence: Synthetic oligonucleotide
agggcguccaaagcgcugc

SEQ ID NO: 2143022 - RNA, 19 nt, Artificial Sequence
  Description of Artificial Sequence: Synthetic oligonucleotide
uggguucuucucaaagccu

SEQ ID NO: 2143023 - RNA, 19 nt, Artificial Sequence
  Description of Artificial Sequence: Synthetic oligonucleotide
aagucuagguccgugucau

SEQ ID NO: 2143024 - RNA, 19 nt, Artificial Sequence
  Description of Artificial Sequence: Synthetic oligonucleotide
uccuugcaaaacagaguug

SEQ ID NO: 2143025 - RNA, 19 nt, Artificial Sequence
  Description of Artificial Sequence: Synthetic oligonucleotide
uuucaguggauagccauau

SEQ ID NO: 2143026 - RNA, 19 nt, Artificial Sequence
  Description of Artificial Sequence: Synthetic oligonucleotide
auguacagcaugaauccug

SEQ ID NO: 2143027 - RNA, 19 nt, Artificial Sequence
  Description of Artificial Sequence: Synthetic oligonucleotide
ucaugucuggugugaaggu

SEQ ID NO: 2143028 - RNA, 19 nt, Artificial Sequence
  Description of Artificial Sequence: Synthetic oligonucleotide
auugcggauuccauacuuc

SEQ ID NO: 2143029 - RNA, 19 nt, Artificial Sequence
  Description of Artificial Sequence: Synthetic oligonucleotide
ucaauccggagacuucgaa

SEQ ID NO: 2143030 - RNA, 19 nt, Artificial Sequence
  Description of Artificial Sequence: Synthetic oligonucleotide
ggugcggcugcucuggagg

SEQ ID NO: 2143031 - RNA, 19 nt, Artificial Sequence
  Description of Artificial Sequence: Synthetic oligonucleotide
aagcgcugcaaauccaauu

SEQ ID NO: 2143032 - RNA, 19 nt, Artificial Sequence
  Description of Artificial Sequence: Synthetic oligonucleotide
uggugaggguguuuaaguc

SEQ ID NO: 2143033 - RNA, 19 nt, Artificial Sequence
  Description of Artificial Sequence: Synthetic oligonucleotide
acagaguuggaaagugguc

SEQ ID NO: 2143034 - RNA, 19 nt, Artificial Sequence
  Description of Artificial Sequence: Synthetic oligonucleotide
aucacucggaucccauuug

SEQ ID NO: 2143035 - RNA, 19 nt, Artificial Sequence
  Description of Artificial Sequence: Synthetic oligonucleotide
auacucgauggggauguac

SEQ ID NO: 2143036 - RNA, 19 nt, Artificial Sequence
  Description of Artificial Sequence: Synthetic oligonucleotide
uagguccgugucaugguca

SEQ ID NO: 2143037 - RNA, 19 nt, Artificial Sequence
  Description of Artificial Sequence: Synthetic oligonucleotide
gagacuucgaagagcauaa

SEQ ID NO: 2143038 - RNA, 19 nt, Artificial Sequence
  Description of Artificial Sequence: Synthetic oligonucleotide
gaguuggaaaguggucugg

SEQ ID NO: 2143039 - RNA, 19 nt, Artificial Sequence
  Description of Artificial Sequence: Synthetic oligonucleotide
aauacccagcauugcggau

SEQ ID NO: 2143040 - RNA, 19 nt, Artificial Sequence
  Description of Artificial Sequence: Synthetic oligonucleotide
gaugaacauagcaaggcgu

SEQ ID NO: 2143041 - RNA, 19 nt, Artificial Sequence
  Description of Artificial Sequence: Synthetic oligonucleotide
acuucacucgagacucucc

SEQ ID NO: 2143042 - RNA, 19 nt, Artificial Sequence
  Description of Artificial Sequence: Synthetic oligonucleotide
cucaucuccuugcaaaaca

SEQ ID NO: 2143043 - RNA, 19 nt, Artificial Sequence
  Description of Artificial Sequence: Synthetic oligonucleotide
gaaaggugcggcugcucug

SEQ ID NO: 2143044 - RNA, 19 nt, Artificial Sequence
  Description of Artificial Sequence: Synthetic oligonucleotide
cuucuguccaacacucauc

SEQ ID NO: 2143045 - RNA, 19 nt, Artificial Sequence
  Description of Artificial Sequence: Synthetic oligonucleotide
cagugaaaauagguuuugg

SEQ ID NO: 2143046 - RNA, 19 nt, Artificial Sequence
  Description of Artificial Sequence: Synthetic oligonucleotide
acaacucagacagcacauc

SEQ ID NO: 2143047 - RNA, 19 nt, Artificial Sequence
  Description of Artificial Sequence: Synthetic oligonucleotide
guagacaugcagagcauac

SEQ ID NO: 2143048 - RNA, 19 nt, Artificial Sequence
  Description of Artificial Sequence: Synthetic oligonucleotide
ggucuggagucauaggggc

SEQ ID NO: 2143049 - RNA, 19 nt, Artificial Sequence
  Description of Artificial Sequence: Synthetic oligonucleotide
uuuuggcauguacuuguua

SEQ ID NO: 2143050 - RNA, 19 nt, Artificial Sequence
  Description of Artificial Sequence: Synthetic oligonucleotide
gacuucgaagagcauaaua

SEQ ID NO: 2143051 - RNA, 19 nt, Artificial Sequence
  Description of Artificial Sequence: Synthetic oligonucleotide
ucuagguccgugucauggu

SEQ ID NO: 2143052 - RNA, 19 nt, Artificial Sequence
  Description of Artificial Sequence: Synthetic oligonucleotide
agacucuccuccacauucc

SEQ ID NO: 2143053 - RNA, 19 nt, Artificial Sequence
  Description of Artificial Sequence: Synthetic oligonucleotide
aagaaaggugcggcugcuc

SEQ ID NO: 2143054 - RNA, 19 nt, Artificial Sequence
  Description of Artificial Sequence: Synthetic oligonucleotide
auuccgguaaauggguucu

SEQ ID NO: 2143055 - RNA, 19 nt, Artificial Sequence
  Description of Artificial Sequence: Synthetic oligonucleotide
aaucagauugagggcugug

SEQ ID NO: 2143056 - RNA, 19 nt, Artificial Sequence
  Description of Artificial Sequence: Synthetic oligonucleotide
ugagggcuguguauuucca

SEQ ID NO: 2143057 - RNA, 19 nt, Artificial Sequence
  Description of Artificial Sequence: Synthetic oligonucleotide
acaguggacugcuggucag

SEQ ID NO: 2143058 - RNA, 19 nt, Artificial Sequence
  Description of Artificial Sequence: Synthetic oligonucleotide
acgcucaucuccuugcaaa

SEQ ID NO: 2143059 - RNA, 19 nt, Artificial Sequence
  Description of Artificial Sequence: Synthetic oligonucleotide
aggaccaaucagauugagg

SEQ ID NO: 2143060 - RNA, 19 nt, Artificial Sequence
  Description of Artificial Sequence: Synthetic oligonucleotide
ucuucccuuagguucugaa

SEQ ID NO: 2143061 - RNA, 19 nt, Artificial Sequence
  Description of Artificial Sequence: Synthetic oligonucleotide
agacucgcccaugaugcac

SEQ ID NO: 2143062 - RNA, 19 nt, Artificial Sequence
  Description of Artificial Sequence: Synthetic oligonucleotide
agcacauccacagcccgag

SEQ ID NO: 2143063 - RNA, 19 nt, Artificial Sequence
  Description of Artificial Sequence: Synthetic oligonucleotide
uccgguaaauggguucucc

SEQ ID NO: 2143064 - RNA, 19 nt, Artificial Sequence
  Description of Artificial Sequence: Synthetic oligonucleotide
acucaucacuucauuguag

SEQ ID NO: 2143065 - RNA, 19 nt, Artificial Sequence
  Description of Artificial Sequence: Synthetic oligonucleotide
agaguucaucccugccagg

SEQ ID NO: 2143066 - RNA, 19 nt, Artificial Sequence
  Description of Artificial Sequence: Synthetic oligonucleotide
caaggcguuuauacacccc

SEQ ID NO: 2143067 - RNA, 19 nt, Artificial Sequence
  Description of Artificial Sequence: Synthetic oligonucleotide
cauacuucuguccaacacu

SEQ ID NO: 2143068 - RNA, 19 nt, Artificial Sequence
  Description of Artificial Sequence: Synthetic oligonucleotide
ucucagggcaauucaccaa

SEQ ID NO: 2143069 - RNA, 19 nt, Artificial Sequence
  Description of Artificial Sequence: Synthetic oligonucleotide
agagcauaauacccagcau

SEQ ID NO: 2143070 - RNA, 19 nt, Artificial Sequence
  Description of Artificial Sequence: Synthetic oligonucleotide
ggauuccauacuucugucc

SEQ ID NO: 2143071 - RNA, 19 nt, Artificial Sequence
  Description of Artificial Sequence: Synthetic oligonucleotide
uccggagacuucgaagagc

SEQ ID NO: 2143072 - RNA, 19 nt, Artificial Sequence
  Description of Artificial Sequence: Synthetic oligonucleotide
gaaggucucagggcaauuc

SEQ ID NO: 2143073 - RNA, 19 nt, Artificial Sequence
  Description of Artificial Sequence: Synthetic oligonucleotide
ucagggcaauucaccaacu

SEQ ID NO: 2143074 - RNA, 19 nt, Artificial Sequence
  Description of Artificial Sequence: Synthetic oligonucleotide
cauuccgaccgaugaaauc

SEQ ID NO: 2143075 - RNA, 19 nt, Artificial Sequence
  Description of Artificial Sequence: Synthetic oligonucleotide
uguagacaugcagagcaua

SEQ ID NO: 2143076 - RNA, 19 nt, Artificial Sequence
  Description of Artificial Sequence: Synthetic oligonucleotide
gauagccauauaccaucca

SEQ ID NO: 2143077 - RNA, 19 nt, Artificial Sequence
  Description of Artificial Sequence: Synthetic oligonucleotide
auccggagacuucgaagag

SEQ ID NO: 2143078 - RNA, 19 nt, Artificial Sequence
  Description of Artificial Sequence: Synthetic oligonucleotide
acgacaggccagcagaguu

SEQ ID NO: 2143079 - RNA, 19 nt, Artificial Sequence
  Description of Artificial Sequence: Synthetic oligonucleotide
acuuguuaagccaggccca

SEQ ID NO: 2143080 - RNA, 19 nt, Artificial Sequence
  Description of Artificial Sequence: Synthetic oligonucleotide
uuguagacaugcagagcau

SEQ ID NO: 2143081 - RNA, 19 nt, Artificial Sequence
  Description of Artificial Sequence: Synthetic oligonucleotide
uacgcaggagggaacucaa

SEQ ID NO: 2143082 - RNA, 19 nt, Artificial Sequence
  Description of Artificial Sequence: Synthetic oligonucleotide
aaguagcccuguacuacag

SEQ ID NO: 2143083 - RNA, 19 nt, Artificial Sequence
  Description of Artificial Sequence: Synthetic oligonucleotide
ggacaacucagacagcaca

SEQ ID NO: 2143084 - RNA, 19 nt, Artificial Sequence
  Description of Artificial Sequence: Synthetic oligonucleotide
gaguucaucccugccagga

SEQ ID NO: 2143085 - RNA, 19 nt, Artificial Sequence
  Description of Artificial Sequence: Synthetic oligonucleotide
agcauacuucccauuccgg

SEQ ID NO: 2143086 - RNA, 19 nt, Artificial Sequence
  Description of Artificial Sequence: Synthetic oligonucleotide
uagcccacgcucaucuccu

SEQ ID NO: 2143087 - RNA, 19 nt, Artificial Sequence
  Description of Artificial Sequence: Synthetic oligonucleotide
ucccuuagguucugaauuu

SEQ ID NO: 2143088 - RNA, 19 nt, Artificial Sequence
  Description of Artificial Sequence: Synthetic oligonucleotide
auaggggcauaggacaacu

SEQ ID NO: 2143089 - RNA, 19 nt, Artificial Sequence
  Description of Artificial Sequence: Synthetic oligonucleotide
gggcaauucaccaacuuca

SEQ ID NO: 2143090 - RNA, 19 nt, Artificial Sequence
  Description of Artificial Sequence: Synthetic oligonucleotide
accaaggccacaagucuag

SEQ ID NO: 2143091 - RNA, 19 nt, Artificial Sequence
  Description of Artificial Sequence: Synthetic oligonucleotide
caacgacaggccagcagag

SEQ ID NO: 2143092 - RNA, 19 nt, Artificial Sequence
  Description of Artificial Sequence: Synthetic oligonucleotide
uuccaggugacauccucua

SEQ ID NO: 2143093 - RNA, 19 nt, Artificial Sequence
  Description of Artificial Sequence: Synthetic oligonucleotide
ucgagacucuccuccacau

SEQ ID NO: 2143094 - RNA, 19 nt, Artificial Sequence
  Description of Artificial Sequence: Synthetic oligonucleotide
cugucuuuuggcauguacu

SEQ ID NO: 2143095 - RNA, 19 nt, Artificial Sequence
  Description of Artificial Sequence: Synthetic oligonucleotide
ggacaaaguagcccuguac

SEQ ID NO: 2143096 - RNA, 19 nt, Artificial Sequence
  Description of Artificial Sequence: Synthetic oligonucleotide
cuagguccgugucaugguc

SEQ ID NO: 2143097 - RNA, 19 nt, Artificial Sequence
  Description of Artificial Sequence: Synthetic oligonucleotide
gguucuugcccucagugaa

SEQ ID NO: 2143098 - RNA, 19 nt, Artificial Sequence
  Description of Artificial Sequence: Synthetic oligonucleotide
aguuggaaaguggucugga

SEQ ID NO: 2143099 - RNA, 19 nt, Artificial Sequence
  Description of Artificial Sequence: Synthetic oligonucleotide
cugccaggacaaaguagcc

SEQ ID NO: 2143100 - RNA, 19 nt, Artificial Sequence
  Description of Artificial Sequence: Synthetic oligonucleotide
augaacauagcaaggcguu

SEQ ID NO: 2143101 - RNA, 19 nt, Artificial Sequence
  Description of Artificial Sequence: Synthetic oligonucleotide
aggacaacucagacagcac

SEQ ID NO: 2143102 - RNA, 19 nt, Artificial Sequence
  Description of Artificial Sequence: Synthetic oligonucleotide
gcguuuauacaccccauuc

SEQ ID NO: 2143103 - RNA, 19 nt, Artificial Sequence
  Description of Artificial Sequence: Synthetic oligonucleotide
gcugcugucuuuuggcaug

SEQ ID NO: 2143104 - RNA, 19 nt, Artificial Sequence
  Description of Artificial Sequence: Synthetic oligonucleotide
aggugacauccucuagcag

SEQ ID NO: 2143105 - RNA, 19 nt, Artificial Sequence
  Description of Artificial Sequence: Synthetic oligonucleotide
cuugcaaaacagaguugga

SEQ ID NO: 2143106 - RNA, 19 nt, Artificial Sequence
  Description of Artificial Sequence: Synthetic oligonucleotide
gaggaccaaucagauugag

SEQ ID NO: 2143107 - RNA, 19 nt, Artificial Sequence
  Description of Artificial Sequence: Synthetic oligonucleotide
agcauacucgauggggaug

SEQ ID NO: 2143108 - RNA, 19 nt, Artificial Sequence
  Description of Artificial Sequence: Synthetic oligonucleotide
cuugcccucagugaaaaua

SEQ ID NO: 2143109 - RNA, 19 nt, Artificial Sequence
  Description of Artificial Sequence: Synthetic oligonucleotide
uccuacgcaggagggaacu

SEQ ID NO: 2143110 - RNA, 19 nt, Artificial Sequence
  Description of Artificial Sequence: Synthetic oligonucleotide
caucccugccaggacaaag

SEQ ID NO: 2143111 - RNA, 19 nt, Artificial Sequence
  Description of Artificial Sequence: Synthetic oligonucleotide
uaacuucacucgagacucu

SEQ ID NO: 2143112 - RNA, 19 nt, Artificial Sequence
  Description of Artificial Sequence: Synthetic oligonucleotide
caugucuggugugaagguc

SEQ ID NO: 2143113 - RNA, 19 nt, Artificial Sequence
  Description of Artificial Sequence: Synthetic oligonucleotide
ggggcauaggacaacucag

SEQ ID NO: 2143114 - RNA, 19 nt, Artificial Sequence
  Description of Artificial Sequence: Synthetic oligonucleotide
gacaggccagcagaguuca

SEQ ID NO: 2143115 - RNA, 19 nt, Artificial Sequence
  Description of Artificial Sequence: Synthetic oligonucleotide
gcauaggacaacucagaca

SEQ ID NO: 2143116 - RNA, 19 nt, Artificial Sequence
  Description of Artificial Sequence: Synthetic oligonucleotide
aacgacaggccagcagagu

SEQ ID NO: 2143117 - RNA, 19 nt, Artificial Sequence
  Description of Artificial Sequence: Synthetic oligonucleotide
gguggugaggguguuuaag

SEQ ID NO: 2143118 - RNA, 19 nt, Artificial Sequence
  Description of Artificial Sequence: Synthetic oligonucleotide
caagucuagguccguguca

SEQ ID NO: 2143119 - RNA, 19 nt, Artificial Sequence
  Description of Artificial Sequence: Synthetic oligonucleotide
ccaauacaggcauccuacg

SEQ ID NO: 2143120 - RNA, 19 nt, Artificial Sequence
  Description of Artificial Sequence: Synthetic oligonucleotide
gcaaggcguuuauacaccc

SEQ ID NO: 2143121 - RNA, 19 nt, Artificial Sequence
  Description of Artificial Sequence: Synthetic oligonucleotide
ggaucccauuugcauagcc

SEQ ID NO: 2143122 - RNA, 19 nt, Artificial Sequence
  Description of Artificial Sequence: Synthetic oligonucleotide
cccauucugcuucuguugc

SEQ ID NO: 2143123 - RNA, 19 nt, Artificial Sequence
  Description of Artificial Sequence: Synthetic oligonucleotide
uugcagcagggcauuccga

SEQ ID NO: 2143124 - RNA, 19 nt, Artificial Sequence
  Description of Artificial Sequence: Synthetic oligonucleotide
ggagggaacucaacagggg

SEQ ID NO: 2143125 - RNA, 19 nt, Artificial Sequence
  Description of Artificial Sequence: Synthetic oligonucleotide
augaugcacuucaugucug

SEQ ID NO: 2143126 - RNA, 19 nt, Artificial Sequence
  Description of Artificial Sequence: Synthetic oligonucleotide
cagcccgaggaccaaucag

SEQ ID NO: 2143127 - RNA, 19 nt, Artificial Sequence
  Description of Artificial Sequence: Synthetic oligonucleotide
uuccgaccgaugaaaucua

SEQ ID NO: 2143128 - RNA, 19 nt, Artificial Sequence
  Description of Artificial Sequence: Synthetic oligonucleotide
aggaacuuuccagcuccuc

SEQ ID NO: 2143129 - RNA, 19 nt, Artificial Sequence
  Description of Artificial Sequence: Synthetic oligonucleotide
ugaacauagcaaggcguuu

SEQ ID NO: 2143130 - RNA, 19 nt, Artificial Sequence
  Description of Artificial Sequence: Synthetic oligonucleotide
aaagcgcugcaaauccaau

SEQ ID NO: 2143131 - RNA, 19 nt, Artificial Sequence
  Description of Artificial Sequence: Synthetic oligonucleotide
ugugugggucauacucauc

SEQ ID NO: 2143132 - RNA, 19 nt, Artificial Sequence
  Description of Artificial Sequence: Synthetic oligonucleotide
caaucuucccuuagguucu

SEQ ID NO: 2143133 - RNA, 19 nt, Artificial Sequence
  Description of Artificial Sequence: Synthetic oligonucleotide
gucauacucaucacucgga

SEQ ID NO: 2143134 - RNA, 19 nt, Artificial Sequence
  Description of Artificial Sequence: Synthetic oligonucleotide
auacccagcauugcggauu

SEQ ID NO: 2143135 - RNA, 19 nt, Artificial Sequence
  Description of Artificial Sequence: Synthetic oligonucleotide
aacucaacaggggcucaaa

SEQ ID NO: 2143136 - RNA, 19 nt, Artificial Sequence
  Description of Artificial Sequence: Synthetic oligonucleotide
ggucuugccagcauacuuc

SEQ ID NO: 2143137 - RNA, 19 nt, Artificial Sequence
  Description of Artificial Sequence: Synthetic oligonucleotide
guccaaagcgcugcaaauc

SEQ ID NO: 2143138 - RNA, 19 nt, Artificial Sequence
  Description of Artificial Sequence: Synthetic oligonucleotide
ucaucacucggaucccauu

SEQ ID NO: 2143139 - RNA, 19 nt, Artificial Sequence
  Description of Artificial Sequence: Synthetic oligonucleotide
gccagcauacuucccauuc

SEQ ID NO: 2143140 - RNA, 19 nt, Artificial Sequence
  Description of Artificial Sequence: Synthetic oligonucleotide
ugcccuucucuaacuucac

SEQ ID NO: 2143141 - RNA, 19 nt, Artificial Sequence
  Description of Artificial Sequence: Synthetic oligonucleotide
uugcauagcccacgcucau

SEQ ID NO: 2143142 - RNA, 19 nt, Artificial Sequence
  Description of Artificial Sequence: Synthetic oligonucleotide
ucuguugcagcagggcauu

SEQ ID NO: 2143143 - RNA, 19 nt, Artificial Sequence
  Description of Artificial Sequence: Synthetic oligonucleotide
ggagucauaggggcauagg

SEQ ID NO: 2143144 - RNA, 19 nt, Artificial Sequence
  Description of Artificial Sequence: Synthetic oligonucleotide
uccgaccgaugaaaucuau

SEQ ID NO: 2143145 - RNA, 19 nt, Artificial Sequence
  Description of Artificial Sequence: Synthetic oligonucleotide
uucaguggauagccauaua

SEQ ID NO: 2143146 - RNA, 19 nt, Artificial Sequence
  Description of Artificial Sequence: Synthetic oligonucleotide
ggauagccauauaccaucc

SEQ ID NO: 2143147 - RNA, 19 nt, Artificial Sequence
  Description of Artificial Sequence: Synthetic oligonucleotide
cuccacccaacgacaggcc

SEQ ID NO: 2143148 - RNA, 19 nt, Artificial Sequence
  Description of Artificial Sequence: Synthetic oligonucleotide
cauaggggcauaggacaac

SEQ ID NO: 2143149 - RNA, 19 nt, Artificial Sequence
  Description of Artificial Sequence: Synthetic oligonucleotide
ccaacgacaggccagcaga

SEQ ID NO: 2143150 - RNA, 19 nt, Artificial Sequence
  Description of Artificial Sequence: Synthetic oligonucleotide
uaggggcauaggacaacuc

SEQ ID NO: 2143151 - RNA, 19 nt, Artificial Sequence
  Description of Artificial Sequence: Synthetic oligonucleotide
caacaguggacugcugguc

SEQ ID NO: 2143152 - RNA, 19 nt, Artificial Sequence
  Description of Artificial Sequence: Synthetic oligonucleotide
uacaggagacucgcccaug

SEQ ID NO: 2143153 - RNA, 19 nt, Artificial Sequence
  Description of Artificial Sequence: Synthetic oligonucleotide
uccgugucauggucaucca

SEQ ID NO: 2143154 - RNA, 19 nt, Artificial Sequence
  Description of Artificial Sequence: Synthetic oligonucleotide
caaaacagaguuggaaagu

SEQ ID NO: 2143155 - RNA, 19 nt, Artificial Sequence
  Description of Artificial Sequence: Synthetic oligonucleotide
cacccaacgacaggccagc

SEQ ID NO: 2143156 - RNA, 19 nt, Artificial Sequence
  Description of Artificial Sequence: Synthetic oligonucleotide
ccagcauacuucccauucc

SEQ ID NO: 2143157 - RNA, 19 nt, Artificial Sequence
  Description of Artificial Sequence: Synthetic oligonucleotide
cgguaaauggguucucccc

SEQ ID NO: 2143158 - RNA, 19 nt, Artificial Sequence
  Description of Artificial Sequence: Synthetic oligonucleotide
gguuuuggguucuucucaa

SEQ ID NO: 2143159 - RNA, 19 nt, Artificial Sequence
  Description of Artificial Sequence: Synthetic oligonucleotide
ccgguaaauggguucuccc

SEQ ID NO: 2143160 - RNA, 19 nt, Artificial Sequence
  Description of Artificial Sequence: Synthetic oligonucleotide
guggacugcuggucaguug

SEQ ID NO: 2143161 - RNA, 19 nt, Artificial Sequence
  Description of Artificial Sequence: Synthetic oligonucleotide
cuucacucgagacucuccu

SEQ ID NO: 2143162 - RNA, 19 nt, Artificial Sequence
  Description of Artificial Sequence: Synthetic oligonucleotide
acugguggucuugccagca

SEQ ID NO: 2143163 - RNA, 19 nt, Artificial Sequence
  Description of Artificial Sequence: Synthetic oligonucleotide
cucgagacucuccuccaca

SEQ ID NO: 2143164 - RNA, 19 nt, Artificial Sequence
  Description of Artificial Sequence: Synthetic oligonucleotide
cacucaucacuucauugua

SEQ ID NO: 2143165 - RNA, 19 nt, Artificial Sequence
  Description of Artificial Sequence: Synthetic oligonucleotide
ggcauccuacgcaggaggg

SEQ ID NO: 2143166 - RNA, 19 nt, Artificial Sequence
  Description of Artificial Sequence: Synthetic oligonucleotide
agguccgugucauggucau

SEQ ID NO: 2143167 - RNA, 19 nt, Artificial Sequence
  Description of Artificial Sequence: Synthetic oligonucleotide
ggagacuucgaagagcaua

SEQ ID NO: 2143168 - RNA, 19 nt, Artificial Sequence
  Description of Artificial Sequence: Synthetic oligonucleotide
cauccuacgcaggagggaa

SEQ ID NO: 2143169 - RNA, 19 nt, Artificial Sequence
  Description of Artificial Sequence: Synthetic oligonucleotide
cacagcccgaggaccaauc

SEQ ID NO: 2143170 - RNA, 19 nt, Artificial Sequence
  Description of Artificial Sequence: Synthetic oligonucleotide
ggguucuccccaccaaggc

SEQ ID NO: 2143171 - RNA, 19 nt, Artificial Sequence
  Description of Artificial Sequence: Synthetic oligonucleotide
gacaacucagacagcacau

SEQ ID NO: 2143172 - RNA, 19 nt, Artificial Sequence
  Description of Artificial Sequence: Synthetic oligonucleotide
aggugcggcugcucuggag

SEQ ID NO: 2143173 - RNA, 19 nt, Artificial Sequence
  Description of Artificial Sequence: Synthetic oligonucleotide
cuacgcaggagggaacuca

SEQ ID NO: 2143174 - RNA, 19 nt, Artificial Sequence
  Description of Artificial Sequence: Synthetic oligonucleotide
gauguacagcaugaauccu

SEQ ID NO: 2143175 - RNA, 19 nt, Artificial Sequence
  Description of Artificial Sequence: Synthetic oligonucleotide
ggccacaagucuagguccg

SEQ ID NO: 2143176 - RNA, 19 nt, Artificial Sequence
  Description of Artificial Sequence: Synthetic oligonucleotide
auccuacgcaggagggaac

SEQ ID NO: 2143177 - RNA, 19 nt, Artificial Sequence
  Description of Artificial Sequence: Synthetic oligonucleotide
gagacucgcccaugaugca

SEQ ID NO: 2143178 - RNA, 19 nt, Artificial Sequence
  Description of Artificial Sequence: Synthetic oligonucleotide
cccauuugcauagcccacg

SEQ ID NO: 2143179 - RNA, 19 nt, Artificial Sequence
  Description of Artificial Sequence: Synthetic oligonucleotide
agucuagguccgugucaug

SEQ ID NO: 2143180 - RNA, 19 nt, Artificial Sequence
  Description of Artificial Sequence: Synthetic oligonucleotide
cacucggaucccauuugca

SEQ ID NO: 2143181 - RNA, 19 nt, Artificial Sequence
  Description of Artificial Sequence: Synthetic oligonucleotide
uggcucuccuguguggguc

SEQ ID NO: 2143182 - RNA, 19 nt, Artificial Sequence
  Description of Artificial Sequence: Synthetic oligonucleotide
aaauagguuuuggguucuu

SEQ ID NO: 2143183 - RNA, 19 nt, Artificial Sequence
  Description of Artificial Sequence: Synthetic oligonucleotide
agucuccaauacaggcauc

SEQ ID NO: 2143184 - RNA, 19 nt, Artificial Sequence
  Description of Artificial Sequence: Synthetic oligonucleotide
cacuucaugucugguguga

SEQ ID NO: 2143185 - RNA, 19 nt, Artificial Sequence
  Description of Artificial Sequence: Synthetic oligonucleotide
cauagcccacgcucaucuc

SEQ ID NO: 2143186 - RNA, 19 nt, Artificial Sequence
  Description of Artificial Sequence: Synthetic oligonucleotide
ccacccaacgacaggccag

SEQ ID NO: 2143187 - RNA, 19 nt, Artificial Sequence
  Description of Artificial Sequence: Synthetic oligonucleotide
aaaguggucuggagucaua

SEQ ID NO: 2143188 - RNA, 19 nt, Artificial Sequence
  Description of Artificial Sequence: Synthetic oligonucleotide
caggcccaacaguggacug

SEQ ID NO: 2143189 - RNA, 19 nt, Artificial Sequence
  Description of Artificial Sequence: Synthetic oligonucleotide
caccaaggccacaagucua

SEQ ID NO: 2143190 - RNA, 19 nt, Artificial Sequence
  Description of Artificial Sequence: Synthetic oligonucleotide
gagcauacucgauggggau

SEQ ID NO: 2143191 - RNA, 19 nt, Artificial Sequence
  Description of Artificial Sequence: Synthetic oligonucleotide
cagcauugcggauuccaua

SEQ ID NO: 2143192 - RNA, 19 nt, Artificial Sequence
  Description of Artificial Sequence: Synthetic oligonucleotide
gagggcguccaaagcgcug

SEQ ID NO: 2143193 - RNA, 19 nt, Artificial Sequence
  Description of Artificial Sequence: Synthetic oligonucleotide
aguggacugcuggucaguu

SEQ ID NO: 2143194 - RNA, 19 nt, Artificial Sequence
  Description of Artificial Sequence: Synthetic oligonucleotide
ccuguacuacaggagacuc

SEQ ID NO: 2143195 - RNA, 19 nt, Artificial Sequence
  Description of Artificial Sequence: Synthetic oligonucleotide
acgcaggagggaacucaac

SEQ ID NO: 2143196 - RNA, 19 nt, Artificial Sequence
  Description of Artificial Sequence: Synthetic oligonucleotide
ggcauuccgaccgaugaaa

SEQ ID NO: 2143197 - RNA, 19 nt, Artificial Sequence
  Description of Artificial Sequence: Synthetic oligonucleotide
guacuacaggagacucgcc

SEQ ID NO: 2143198 - RNA, 19 nt, Artificial Sequence
  Description of Artificial Sequence: Synthetic oligonucleotide
gaacucaacaggggcucaa

SEQ ID NO: 2143199 - RNA, 19 nt, Artificial Sequence
  Description of Artificial Sequence: Synthetic oligonucleotide
ccgaccgaugaaaucuaug

SEQ ID NO: 2143200 - RNA, 19 nt, Artificial Sequence
  Description of Artificial Sequence: Synthetic oligonucleotide
cuuguuaagccaggcccaa

SEQ ID NO: 2143201 - RNA, 19 nt, Artificial Sequence
  Description of Artificial Sequence: Synthetic oligonucleotide
gcauagcccacgcucaucu

SEQ ID NO: 2143202 - RNA, 19 nt, Artificial Sequence
  Description of Artificial Sequence: Synthetic oligonucleotide
ugaaggucucagggcaauu

SEQ ID NO: 2143203 - RNA, 19 nt, Artificial Sequence
  Description of Artificial Sequence: Synthetic oligonucleotide
cagauugagggcuguguau

SEQ ID NO: 2143204 - RNA, 19 nt, Artificial Sequence
  Description of Artificial Sequence: Synthetic oligonucleotide
gcaauucaccaacuucaaa

SEQ ID NO: 2143205 - RNA, 19 nt, Artificial Sequence
  Description of Artificial Sequence: Synthetic oligonucleotide
cauugcggauuccauacuu

SEQ ID NO: 2143206 - RNA, 19 nt, Artificial Sequence
  Description of Artificial Sequence: Synthetic oligonucleotide
gaagaaaggugcggcugcu

SEQ ID NO: 2143207 - RNA, 19 nt, Artificial Sequence
  Description of Artificial Sequence: Synthetic oligonucleotide
gcacuucaugucuggugug

SEQ ID NO: 2143208 - RNA, 19 nt, Artificial Sequence
  Description of Artificial Sequence: Synthetic oligonucleotide
ugcggcugcucuggagggc

SEQ ID NO: 2143209 - RNA, 19 nt, Artificial Sequence
  Description of Artificial Sequence: Synthetic oligonucleotide
acauagcaaggcguuuaua

SEQ ID NO: 2143210 - RNA, 19 nt, Artificial Sequence
  Description of Artificial Sequence: Synthetic oligonucleotide
caucacucggaucccauuu

SEQ ID NO: 2143211 - RNA, 19 nt, Artificial Sequence
  Description of Artificial Sequence: Synthetic oligonucleotide
ggaaaguggucuggaguca

SEQ ID NO: 2143212 - RNA, 19 nt, Artificial Sequence
  Description of Artificial Sequence: Synthetic oligonucleotide
gcggcugcucuggagggcg

SEQ ID NO: 2143213 - RNA, 19 nt, Artificial Sequence
  Description of Artificial Sequence: Synthetic oligonucleotide
cagcaugaauccuggcucu

SEQ ID NO: 2143214 - RNA, 19 nt, Artificial Sequence
  Description of Artificial Sequence: Synthetic oligonucleotide
cccaacgacaggccagcag

SEQ ID NO: 2143215 - RNA, 19 nt, Artificial Sequence
  Description of Artificial Sequence: Synthetic oligonucleotide
uuccgguaaauggguucuc

SEQ ID NO: 2143216 - RNA, 19 nt, Artificial Sequence
  Description of Artificial Sequence: Synthetic oligonucleotide
ccgaugaaaucuaugcccu

SEQ ID NO: 2143217 - RNA, 19 nt, Artificial Sequence
  Description of Artificial Sequence: Synthetic oligonucleotide
cuucucaauccggagacuu

SEQ ID NO: 2143218 - RNA, 19 nt, Artificial Sequence
  Description of Artificial Sequence: Synthetic oligonucleotide
gcucaucuccuugcaaaac

SEQ ID NO: 2143219 - RNA, 19 nt, Artificial Sequence
  Description of Artificial Sequence: Synthetic oligonucleotide
gcguccaaagcgcugcaaa

SEQ ID NO: 2143220 - RNA, 19 nt, Artificial Sequence
  Description of Artificial Sequence: Synthetic oligonucleotide
agacuucgaagagcauaau

SEQ ID NO: 2143221 - RNA, 19 nt, Artificial Sequence
  Description of Artificial Sequence: Synthetic oligonucleotide
cugugugggucauacucau

SEQ ID NO: 2143222 - RNA, 19 nt, Artificial Sequence
  Description of Artificial Sequence: Synthetic oligonucleotide
gcauacucgauggggaugu

SEQ ID NO: 2143223 - RNA, 19 nt, Artificial Sequence
  Description of Artificial Sequence: Synthetic oligonucleotide
acccagcauugcggauucc

SEQ ID NO: 2143224 - RNA, 19 nt, Artificial Sequence
  Description of Artificial Sequence: Synthetic oligonucleotide
aggcguuuauacaccccau

SEQ ID NO: 2143225 - RNA, 19 nt, Artificial Sequence
  Description of Artificial Sequence: Synthetic oligonucleotide
ccgugucauggucauccag

SEQ ID NO: 2143226 - RNA, 19 nt, Artificial Sequence
  Description of Artificial Sequence: Synthetic oligonucleotide
uccacagcccgaggaccaa

SEQ ID NO: 2143227 - RNA, 19 nt, Artificial Sequence
  Description of Artificial Sequence: Synthetic oligonucleotide
ggggauguacagcaugaau

SEQ ID NO: 2143228 - RNA, 19 nt, Artificial Sequence
  Description of Artificial Sequence: Synthetic oligonucleotide
gcccuguacuacaggagac

SEQ ID NO: 2143229 - RNA, 19 nt, Artificial Sequence
  Description of Artificial Sequence: Synthetic oligonucleotide
cacgcucaucuccuugcaa

SEQ ID NO: 2143230 - RNA, 19 nt, Artificial Sequence
  Description of Artificial Sequence: Synthetic oligonucleotide
cguuuauacaccccauucu

SEQ ID NO: 2143231 - RNA, 19 nt, Artificial Sequence
  Description of Artificial Sequence: Synthetic oligonucleotide
cuuuuggcauguacuuguu

SEQ ID NO: 2143232 - RNA, 19 nt, Artificial Sequence
  Description of Artificial Sequence: Synthetic oligonucleotide
caacugguucuugcccuca

SEQ ID NO: 2143233 - RNA, 19 nt, Artificial Sequence
  Description of Artificial Sequence: Synthetic oligonucleotide
gcccacgcucaucuccuug

SEQ ID NO: 2143234 - RNA, 19 nt, Artificial Sequence
  Description of Artificial Sequence: Synthetic oligonucleotide
cuacaggagacucgcccau

SEQ ID NO: 2143235 - RNA, 19 nt, Artificial Sequence
  Description of Artificial Sequence: Synthetic oligonucleotide
cggauuccauacuucuguc

SEQ ID NO: 2143236 - RNA, 19 nt, Artificial Sequence
  Description of Artificial Sequence: Synthetic oligonucleotide
cuaugcccuucucuaacuu

SEQ ID NO: 2143237 - RNA, 19 nt, Artificial Sequence
  Description of Artificial Sequence: Synthetic oligonucleotide
cccuuagguucugaauuuc

SEQ ID NO: 2143238 - RNA, 19 nt, Artificial Sequence
  Description of Artificial Sequence: Synthetic oligonucleotide
cgacaggccagcagaguuc

SEQ ID NO: 2143239 - RNA, 19 nt, Artificial Sequence
  Description of Artificial Sequence: Synthetic oligonucleotide
gggcauuccgaccgaugaa

SEQ ID NO: 2143240 - RNA, 19 nt, Artificial Sequence
  Description of Artificial Sequence: Synthetic oligonucleotide
ccaacaguggacugcuggu

SEQ ID NO: 2143241 - RNA, 19 nt, Artificial Sequence
  Description of Artificial Sequence: Synthetic oligonucleotide
ggaacucaacaggggcuca

SEQ ID NO: 2143242 - RNA, 19 nt, Artificial Sequence
  Description of Artificial Sequence: Synthetic oligonucleotide
caccccauucugcuucugu

SEQ ID NO: 2143243 - RNA, 19 nt, Artificial Sequence
  Description of Artificial Sequence: Synthetic oligonucleotide
cccauuccgguaaaugggu

SEQ ID NO: 2143244 - RNA, 19 nt, Artificial Sequence
  Description of Artificial Sequence: Synthetic oligonucleotide
ggcguuuauacaccccauu

SEQ ID NO: 2143245 - RNA, 19 nt, Artificial Sequence
  Description of Artificial Sequence: Synthetic oligonucleotide
caaucagauugagggcugu

SEQ ID NO: 2143246 - RNA, 19 nt, Artificial Sequence
  Description of Artificial Sequence: Synthetic oligonucleotide
cauccucuagcagcaggcu

SEQ ID NO: 2143247 - RNA, 19 nt, Artificial Sequence
  Description of Artificial Sequence: Synthetic oligonucleotide
ggcucaaagugaucccaau

SEQ ID NO: 2143248 - RNA, 19 nt, Artificial Sequence
  Description of Artificial Sequence: Synthetic oligonucleotide
ugcugucuuuuggcaugua

SEQ ID NO: 2143249 - RNA, 19 nt, Artificial Sequence
  Description of Artificial Sequence: Synthetic oligonucleotide
cugcucuggagggcgucca

SEQ ID NO: 2143250 - RNA, 19 nt, Artificial Sequence
  Description of Artificial Sequence: Synthetic oligonucleotide
gggcucaaagugaucccaa

SEQ ID NO: 2143251 - RNA, 19 nt, Artificial Sequence
  Description of Artificial Sequence: Synthetic oligonucleotide
acccaacgacaggccagca

SEQ ID NO: 2143252 - RNA, 19 nt, Artificial Sequence
  Description of Artificial Sequence: Synthetic oligonucleotide
agcccacgcucaucuccuu

SEQ ID NO: 2143253 - RNA, 19 nt, Artificial Sequence
  Description of Artificial Sequence: Synthetic oligonucleotide
cgaggaccaaucagauuga

SEQ ID NO: 2143254 - RNA, 19 nt, Artificial Sequence
  Description of Artificial Sequence: Synthetic oligonucleotide
gccaggcccaacaguggac

SEQ ID NO: 2143255 - RNA, 19 nt, Artificial Sequence
  Description of Artificial Sequence: Synthetic oligonucleotide
cuggcucuccugugugggu

SEQ ID NO: 2143256 - RNA, 19 nt, Artificial Sequence
  Description of Artificial Sequence: Synthetic oligonucleotide
ggguggugaggguguuuaa

SEQ ID NO: 2143257 - RNA, 19 nt, Artificial Sequence
  Description of Artificial Sequence: Synthetic oligonucleotide
cugcugucuuuuggcaugu

SEQ ID NO: 2143258 - RNA, 19 nt, Artificial Sequence
  Description of Artificial Sequence: Synthetic oligonucleotide
cauggucauccaggaugaa

SEQ ID NO: 2143259 - RNA, 19 nt, Artificial Sequence
  Description of Artificial Sequence: Synthetic oligonucleotide
ccuacgcaggagggaacuc

SEQ ID NO: 2143260 - RNA, 19 nt, Artificial Sequence
  Description of Artificial Sequence: Synthetic oligonucleotide
cuccugugugggucauacu

SEQ ID NO: 2143261 - RNA, 19 nt, Artificial Sequence
  Description of Artificial Sequence: Synthetic oligonucleotide
ccacgcucaucuccuugca

SEQ ID NO: 2143262 - RNA, 19 nt, Artificial Sequence
  Description of Artificial Sequence: Synthetic oligonucleotide
cccaaucuucccuuagguu

SEQ ID NO: 2143263 - RNA, 19 nt, Artificial Sequence
  Description of Artificial Sequence: Synthetic oligonucleotide
gcauuccgaccgaugaaau

SEQ ID NO: 2143264 - RNA, 19 nt, Artificial Sequence
  Description of Artificial Sequence: Synthetic oligonucleotide
gggcguccaaagcgcugca

SEQ ID NO: 2143265 - RNA, 19 nt, Artificial Sequence
  Description of Artificial Sequence: Synthetic oligonucleotide
caguggacugcuggucagu

SEQ ID NO: 2143266 - RNA, 19 nt, Artificial Sequence
  Description of Artificial Sequence: Synthetic oligonucleotide
cauacucgauggggaugua

SEQ ID NO: 2143267 - RNA, 19 nt, Artificial Sequence
  Description of Artificial Sequence: Synthetic oligonucleotide
ggcguccaaagcgcugcaa

SEQ ID NO: 2143268 - RNA, 19 nt, Artificial Sequence
  Description of Artificial Sequence: Synthetic oligonucleotide
cguccaaagcgcugcaaau

SEQ ID NO: 2143269 - RNA, 19 nt, Artificial Sequence
  Description of Artificial Sequence: Synthetic oligonucleotide
ccauuccgguaaauggguu

SEQ ID NO: 2143270 - RNA, 19 nt, Artificial Sequence
  Description of Artificial Sequence: Synthetic oligonucleotide
cggaucccauuugcauagc

SEQ ID NO: 2143271 - RNA, 19 nt, Artificial Sequence
  Description of Artificial Sequence: Synthetic oligonucleotide
gccacaagucuagguccgu

SEQ ID NO: 2143272 - RNA, 19 nt, Artificial Sequence
  Description of Artificial Sequence: Synthetic oligonucleotide
cgaugaaaucuaugcccuu

SEQ ID NO: 2143273 - RNA, 19 nt, Artificial Sequence
  Description of Artificial Sequence: Synthetic oligonucleotide
cccgaggaccaaucagauu

SEQ ID NO: 2143274 - RNA, 19 nt, Artificial Sequence
  Description of Artificial Sequence: Synthetic oligonucleotide
gcagggcauuccgaccgau

SEQ ID NO: 2143275 - RNA, 19 nt, Artificial Sequence
  Description of Artificial Sequence: Synthetic oligonucleotide
cgauggggauguacagcau

SEQ ID NO: 2143276 - RNA, 19 nt, Artificial Sequence
  Description of Artificial Sequence: Synthetic oligonucleotide
ccacagcccgaggaccaau

SEQ ID NO: 2143277 - RNA, 19 nt, Artificial Sequence
  Description of Artificial Sequence: Synthetic oligonucleotide
cggagacuucgaagagcau

SEQ ID NO: 2143278 - RNA, 19 nt, Artificial Sequence
  Description of Artificial Sequence: Synthetic oligonucleotide
acuauauucagcugcagcc

SEQ ID NO: 2143279 - RNA, 19 nt, Artificial Sequence
  Description of Artificial Sequence: Synthetic oligonucleotide
aaaugcuccaguuccuucc

SEQ ID NO: 2143280 - RNA, 19 nt, Artificial Sequence
  Description of Artificial Sequence: Synthetic oligonucleotide
agucaguacacauacaucu

SEQ ID NO: 2143281 - RNA, 19 nt, Artificial Sequence
  Description of Artificial Sequence: Synthetic oligonucleotide
uacacauacaucuacugug

SEQ ID NO: 2143282 - RNA, 19 nt, Artificial Sequence
  Description of Artificial Sequence: Synthetic oligonucleotide
acaugauccacuuccaggg

SEQ ID NO: 2143283 - RNA, 19 nt, Artificial Sequence
  Description of Artificial Sequence: Synthetic oligonucleotide
cucaaaaugcuccaguucc

SEQ ID NO: 2143284 - RNA, 19 nt, Artificial Sequence
  Description of Artificial Sequence: Synthetic oligonucleotide
aaguccuugggagugacgc

SEQ ID NO: 2143285 - RNA, 19 nt, Artificial Sequence
  Description of Artificial Sequence: Synthetic oligonucleotide
cucgucuagaccuagcucg

SEQ ID NO: 2143286 - RNA, 19 nt, Artificial Sequence
  Description of Artificial Sequence: Synthetic oligonucleotide
aguuccuuccagcagggcc

SEQ ID NO: 2143287 - RNA, 19 nt, Artificial Sequence
  Description of Artificial Sequence: Synthetic oligonucleotide
ucugacacuaucuccagcc

SEQ ID NO: 2143288 - RNA, 19 nt, Artificial Sequence
  Description of Artificial Sequence: Synthetic oligonucleotide
caaaguauagggcaccucc

SEQ ID NO: 2143289 - RNA, 19 nt, Artificial Sequence
  Description of Artificial Sequence: Synthetic oligonucleotide
uguccgacugcucaaaaug

SEQ ID NO: 2143290 - RNA, 19 nt, Artificial Sequence
  Description of Artificial Sequence: Synthetic oligonucleotide
aucaguaccccauaguugu

SEQ ID NO: 2143291 - RNA, 19 nt, Artificial Sequence
  Description of Artificial Sequence: Synthetic oligonucleotide
accggcacccgguagaugc

SEQ ID NO: 2143292 - RNA, 19 nt, Artificial Sequence
  Description of Artificial Sequence: Synthetic oligonucleotide
cauacaucuacuguggcag

SEQ ID NO: 2143293 - RNA, 19 nt, Artificial Sequence
  Description of Artificial Sequence: Synthetic oligonucleotide
gaagccgucaccaaagccc

SEQ ID NO: 2143294 - RNA, 19 nt, Artificial Sequence
  Description of Artificial Sequence: Synthetic oligonucleotide
accaaagcccucaucaucc

SEQ ID NO: 2143295 - RNA, 19 nt, Artificial Sequence
  Description of Artificial Sequence: Synthetic oligonucleotide
uaucaguaccccauaguug

SEQ ID NO: 2143296 - RNA, 19 nt, Artificial Sequence
  Description of Artificial Sequence: Synthetic oligonucleotide
cacaugauccacuuccagg

SEQ ID NO: 2143297 - RNA, 19 nt, Artificial Sequence
  Description of Artificial Sequence: Synthetic oligonucleotide
cucagcauuaucguagugg

SEQ ID NO: 2143298 - RNA, 19 nt, Artificial Sequence
  Description of Artificial Sequence: Synthetic oligonucleotide
cuucccuugggcauguccg

SEQ ID NO: 2143299 - RNA, 19 nt, Artificial Sequence
  Description of Artificial Sequence: Synthetic oligonucleotide
caauuggccaccacggugc

SEQ ID NO: 2143300 - RNA, 19 nt, Artificial Sequence
  Description of Artificial Sequence: Synthetic oligonucleotide
aaccccaccgagaacaccg

SEQ ID NO: 2143301 - RNA, 19 nt, Artificial Sequence
  Description of Artificial Sequence: Synthetic oligonucleotide
uguaucaguaccccauagu

SEQ ID NO: 2143302 - RNA, 19 nt, Artificial Sequence
  Description of Artificial Sequence: Synthetic oligonucleotide
aaguauagggcaccuccug

SEQ ID NO: 2143303 - RNA, 19 nt, Artificial Sequence
  Description of Artificial Sequence: Synthetic oligonucleotide
gaaacgcaggugcagcccg

SEQ ID NO: 2143304 - RNA, 19 nt, Artificial Sequence
  Description of Artificial Sequence: Synthetic oligonucleotide
ugcacuauauucagcugca

SEQ ID NO: 2143305 - RNA, 19 nt, Artificial Sequence
  Description of Artificial Sequence: Synthetic oligonucleotide
agccagaugacaagguucc

SEQ ID NO: 2143306 - RNA, 19 nt, Artificial Sequence
  Description of Artificial Sequence: Synthetic oligonucleotide
uauauucagcugcagccac

SEQ ID NO: 2143307 - RNA, 19 nt, Artificial Sequence
  Description of Artificial Sequence: Synthetic oligonucleotide
aguacccaggggccgagcc

SEQ ID NO: 2143308 - RNA, 19 nt, Artificial Sequence
  Description of Artificial Sequence: Synthetic oligonucleotide
uuaucguaguggcagccca

SEQ ID NO: 2143309 - RNA, 19 nt, Artificial Sequence
  Description of Artificial Sequence: Synthetic oligonucleotide
uagcucguguaucaguacc

SEQ ID NO: 2143310 - RNA, 19 nt, Artificial Sequence
  Description of Artificial Sequence: Synthetic oligonucleotide
aagucaguacacauacauc

SEQ ID NO: 2143311 - RNA, 19 nt, Artificial Sequence
  Description of Artificial Sequence: Synthetic oligonucleotide
ggugagcucagcauuaucg

SEQ ID NO: 2143312 - RNA, 19 nt, Artificial Sequence
  Description of Artificial Sequence: Synthetic oligonucleotide
auuaucguaguggcagccc

SEQ ID NO: 2143313 - RNA, 19 nt, Artificial Sequence
  Description of Artificial Sequence: Synthetic oligonucleotide
cacuauauucagcugcagc

SEQ ID NO: 2143314 - RNA, 19 nt, Artificial Sequence
  Description of Artificial Sequence: Synthetic oligonucleotide
gagcucagcauuaucguag

SEQ ID NO: 2143315 - RNA, 19 nt, Artificial Sequence
  Description of Artificial Sequence: Synthetic oligonucleotide
aguugcuggaaguccuugg

SEQ ID NO: 2143316 - RNA, 19 nt, Artificial Sequence
  Description of Artificial Sequence: Synthetic oligonucleotide
agcuguagaugucaggccu

SEQ ID NO: 2143317 - RNA, 19 nt, Artificial Sequence
  Description of Artificial Sequence: Synthetic oligonucleotide
caagguuccagcguucucc

SEQ ID NO: 2143318 - RNA, 19 nt, Artificial Sequence
  Description of Artificial Sequence: Synthetic oligonucleotide
guaagcuguagaugucagg

SEQ ID NO: 2143319 - RNA, 19 nt, Artificial Sequence
  Description of Artificial Sequence: Synthetic oligonucleotide
gaccacaaaggcacggugg

SEQ ID NO: 2143320 - RNA, 19 nt, Artificial Sequence
  Description of Artificial Sequence: Synthetic oligonucleotide
accacggugcaggauaccc

SEQ ID NO: 2143321 - RNA, 19 nt, Artificial Sequence
  Description of Artificial Sequence: Synthetic oligonucleotide
ugcucaagcuccuccaaga

SEQ ID NO: 2143322 - RNA, 19 nt, Artificial Sequence
  Description of Artificial Sequence: Synthetic oligonucleotide
aacaccggcacccgguaga

SEQ ID NO: 2143323 - RNA, 19 nt, Artificial Sequence
  Description of Artificial Sequence: Synthetic oligonucleotide
ucguguaucaguaccccau

SEQ ID NO: 2143324 - RNA, 19 nt, Artificial Sequence
  Description of Artificial Sequence: Synthetic oligonucleotide
ugacacuaucuccagccac

SEQ ID NO: 2143325 - RNA, 19 nt, Artificial Sequence
  Description of Artificial Sequence: Synthetic oligonucleotide
acgacguagcugcugcucg

SEQ ID NO: 2143326 - RNA, 19 nt, Artificial Sequence
  Description of Artificial Sequence: Synthetic oligonucleotide
accguagucacgacguagc

SEQ ID NO: 2143327 - RNA, 19 nt, Artificial Sequence
  Description of Artificial Sequence: Synthetic oligonucleotide
aaaggcacgguggcuauca

SEQ ID NO: 2143328 - RNA, 19 nt, Artificial Sequence
  Description of Artificial Sequence: Synthetic oligonucleotide
uccugcaguaagcuguaga

SEQ ID NO: 2143329 - RNA, 19 nt, Artificial Sequence
  Description of Artificial Sequence: Synthetic oligonucleotide
aguauagggcaccuccugu

SEQ ID NO: 2143330 - RNA, 19 nt, Artificial Sequence
  Description of Artificial Sequence: Synthetic oligonucleotide
aguuguucaugguguuggg

SEQ ID NO: 2143331 - RNA, 19 nt, Artificial Sequence
  Description of Artificial Sequence: Synthetic oligonucleotide
ugauccacuuccaggggcu

SEQ ID NO: 2143332 - RNA, 19 nt, Artificial Sequence
  Description of Artificial Sequence: Synthetic oligonucleotide
gugcaauuggccaccacgg

SEQ ID NO: 2143333 - RNA, 19 nt, Artificial Sequence
  Description of Artificial Sequence: Synthetic oligonucleotide
aggucuggcuucuggcagc

SEQ ID NO: 2143334 - RNA, 19 nt, Artificial Sequence
  Description of Artificial Sequence: Synthetic oligonucleotide
caagaguugcuggaagucc

SEQ ID NO: 2143335 - RNA, 19 nt, Artificial Sequence
  Description of Artificial Sequence: Synthetic oligonucleotide
augacaagguuccagcguu

SEQ ID NO: 2143336 - RNA, 19 nt, Artificial Sequence
  Description of Artificial Sequence: Synthetic oligonucleotide
ucuagguccuggcccagug

SEQ ID NO: 2143337 - RNA, 19 nt, Artificial Sequence
  Description of Artificial Sequence: Synthetic oligonucleotide
aaaguauagggcaccuccu

SEQ ID NO: 2143338 - RNA, 19 nt, Artificial Sequence
  Description of Artificial Sequence: Synthetic oligonucleotide
aggagcggaccguagucac

SEQ ID NO: 2143339 - RNA, 19 nt, Artificial Sequence
  Description of Artificial Sequence: Synthetic oligonucleotide
agcucguguaucaguaccc

SEQ ID NO: 2143340 - RNA, 19 nt, Artificial Sequence
  Description of Artificial Sequence: Synthetic oligonucleotide
ugagggugagcucagcauu

SEQ ID NO: 2143341 - RNA, 19 nt, Artificial Sequence
  Description of Artificial Sequence: Synthetic oligonucleotide
uccgacugcucaaaaugcu

SEQ ID NO: 2143342 - RNA, 19 nt, Artificial Sequence
  Description of Artificial Sequence: Synthetic oligonucleotide
agaccuagcucguguauca

SEQ ID NO: 2143343 - RNA, 19 nt, Artificial Sequence
  Description of Artificial Sequence: Synthetic oligonucleotide
uggcuaucaagcuggcccc

SEQ ID NO: 2143344 - RNA, 19 nt, Artificial Sequence
  Description of Artificial Sequence: Synthetic oligonucleotide
auacaucuacuguggcagg

SEQ ID NO: 2143345 - RNA, 19 nt, Artificial Sequence
  Description of Artificial Sequence: Synthetic oligonucleotide
ucggacagcagacgcccgg

SEQ ID NO: 2143346 - RNA, 19 nt, Artificial Sequence
  Description of Artificial Sequence: Synthetic oligonucleotide
uagcgcgccacguacaggu

SEQ ID NO: 2143347 - RNA, 19 nt, Artificial Sequence
  Description of Artificial Sequence: Synthetic oligonucleotide
uaucguaguggcagcccag

SEQ ID NO: 2143348 - RNA, 19 nt, Artificial Sequence
  Description of Artificial Sequence: Synthetic oligonucleotide
uguugggccuucccuuggg

SEQ ID NO: 2143349 - RNA, 19 nt, Artificial Sequence
  Description of Artificial Sequence: Synthetic oligonucleotide
gucccggaaacgcaggugc

SEQ ID NO: 2143350 - RNA, 19 nt, Artificial Sequence
  Description of Artificial Sequence: Synthetic oligonucleotide
guauagggcaccuccugug

SEQ ID NO: 2143351 - RNA, 19 nt, Artificial Sequence
  Description of Artificial Sequence: Synthetic oligonucleotide
agaccuugcccagagccac

SEQ ID NO: 2143352 - RNA, 19 nt, Artificial Sequence
  Description of Artificial Sequence: Synthetic oligonucleotide
gacgcccggagccagauga

SEQ ID NO: 2143353 - RNA, 19 nt, Artificial Sequence
  Description of Artificial Sequence: Synthetic oligonucleotide
aguaccccauaguuguuca

SEQ ID NO: 2143354 - RNA, 19 nt, Artificial Sequence
  Description of Artificial Sequence: Synthetic oligonucleotide
ucaagucaguacacauaca

SEQ ID NO: 2143355 - RNA, 19 nt, Artificial Sequence
  Description of Artificial Sequence: Synthetic oligonucleotide
guagcugcugcucgucccg

SEQ ID NO: 2143356 - RNA, 19 nt, Artificial Sequence
  Description of Artificial Sequence: Synthetic oligonucleotide
ggugguuucggacagcaga

SEQ ID NO: 2143357 - RNA, 19 nt, Artificial Sequence
  Description of Artificial Sequence: Synthetic oligonucleotide
agcugauuccugccccagc

SEQ ID NO: 2143358 - RNA, 19 nt, Artificial Sequence
  Description of Artificial Sequence: Synthetic oligonucleotide
uaccccauaguuguucaug

SEQ ID NO: 2143359 - RNA, 19 nt, Artificial Sequence
  Description of Artificial Sequence: Synthetic oligonucleotide
ggaaccagacucaagucag

SEQ ID NO: 2143360 - RNA, 19 nt, Artificial Sequence
  Description of Artificial Sequence: Synthetic oligonucleotide
aucguaguggcagcccagc

SEQ ID NO: 2143361 - RNA, 19 nt, Artificial Sequence
  Description of Artificial Sequence: Synthetic oligonucleotide
guguaucaguaccccauag

SEQ ID NO: 2143362 - RNA, 19 nt, Artificial Sequence
  Description of Artificial Sequence: Synthetic oligonucleotide
uacaucuacuguggcaggc

SEQ ID NO: 2143363 - RNA, 19 nt, Artificial Sequence
  Description of Artificial Sequence: Synthetic oligonucleotide
gcguacuugaccacaaagg

SEQ ID NO: 2143364 - RNA, 19 nt, Artificial Sequence
  Description of Artificial Sequence: Synthetic oligonucleotide
cguacuugaccacaaaggc

SEQ ID NO: 2143365 - RNA, 19 nt, Artificial Sequence
  Description of Artificial Sequence: Synthetic oligonucleotide
augguguugggccuucccu

SEQ ID NO: 2143366 - RNA, 19 nt, Artificial Sequence
  Description of Artificial Sequence: Synthetic oligonucleotide
cucgcugggcgguaggagc

SEQ ID NO: 2143367 - RNA, 19 nt, Artificial Sequence
  Description of Artificial Sequence: Synthetic oligonucleotide
cagacucaagucaguacac

SEQ ID NO: 2143368 - RNA, 19 nt, Artificial Sequence
  Description of Artificial Sequence: Synthetic oligonucleotide
aucuacuguggcaggcucc

SEQ ID NO: 2143369 - RNA, 19 nt, Artificial Sequence
  Description of Artificial Sequence: Synthetic oligonucleotide
cauuaucguaguggcagcc

SEQ ID NO: 2143370 - RNA, 19 nt, Artificial Sequence
  Description of Artificial Sequence: Synthetic oligonucleotide
gucgaagccgucaccaaag

SEQ ID NO: 2143371 - RNA, 19 nt, Artificial Sequence
  Description of Artificial Sequence: Synthetic oligonucleotide
gguuucggacagcagacgc

SEQ ID NO: 2143372 - RNA, 19 nt, Artificial Sequence
  Description of Artificial Sequence: Synthetic oligonucleotide
ugagcucagcauuaucgua

SEQ ID NO: 2143373 - RNA, 19 nt, Artificial Sequence
  Description of Artificial Sequence: Synthetic oligonucleotide
cacauacaucuacuguggc

SEQ ID NO: 2143374 - RNA, 19 nt, Artificial Sequence
  Description of Artificial Sequence: Synthetic oligonucleotide
ugcaauuggccaccacggu

SEQ ID NO: 2143375 - RNA, 19 nt, Artificial Sequence
  Description of Artificial Sequence: Synthetic oligonucleotide
ucuagaccuagcucgugua

SEQ ID NO: 2143376 - RNA, 19 nt, Artificial Sequence
  Description of Artificial Sequence: Synthetic oligonucleotide
ucgaagccgucaccaaagc

SEQ ID NO: 2143377 - RNA, 19 nt, Artificial Sequence
  Description of Artificial Sequence: Synthetic oligonucleotide
agccacaaacucaggggcc

SEQ ID NO: 2143378 - RNA, 19 nt, Artificial Sequence
  Description of Artificial Sequence: Synthetic oligonucleotide
cacggugcaggauacccug

SEQ ID NO: 2143379 - RNA, 19 nt, Artificial Sequence
  Description of Artificial Sequence: Synthetic oligonucleotide
acaagguuccagcguucuc

SEQ ID NO: 2143380 - RNA, 19 nt, Artificial Sequence
  Description of Artificial Sequence: Synthetic oligonucleotide
ccggagaugcacuauauuc

SEQ ID NO: 2143381 - RNA, 19 nt, Artificial Sequence
  Description of Artificial Sequence: Synthetic oligonucleotide
gaugacaagguuccagcgu

SEQ ID NO: 2143382 - RNA, 19 nt, Artificial Sequence
  Description of Artificial Sequence: Synthetic oligonucleotide
uugggcauguccgacugcu

SEQ ID NO: 2143383 - RNA, 19 nt, Artificial Sequence
  Description of Artificial Sequence: Synthetic oligonucleotide
auaguuguucaugguguug

SEQ ID NO: 2143384 - RNA, 19 nt, Artificial Sequence
  Description of Artificial Sequence: Synthetic oligonucleotide
gaccguagucacgacguag

SEQ ID NO: 2143385 - RNA, 19 nt, Artificial Sequence
  Description of Artificial Sequence: Synthetic oligonucleotide
caagucaguacacauacau

SEQ ID NO: 2143386 - RNA, 19 nt, Artificial Sequence
  Description of Artificial Sequence: Synthetic oligonucleotide
guaucaguaccccauaguu

SEQ ID NO: 2143387 - RNA, 19 nt, Artificial Sequence
  Description of Artificial Sequence: Synthetic oligonucleotide
uccugccccagccugcggc

SEQ ID NO: 2143388 - RNA, 19 nt, Artificial Sequence
  Description of Artificial Sequence: Synthetic oligonucleotide
uucuggcagcacaugggac

SEQ ID NO: 2143389 - RNA, 19 nt, Artificial Sequence
  Description of Artificial Sequence: Synthetic oligonucleotide
agcucuagguccuggccca

SEQ ID NO: 2143390 - RNA, 19 nt, Artificial Sequence
  Description of Artificial Sequence: Synthetic oligonucleotide
ucccgaagcggugucacca

SEQ ID NO: 2143391 - RNA, 19 nt, Artificial Sequence
  Description of Artificial Sequence: Synthetic oligonucleotide
ugguuucggacagcagacg

SEQ ID NO: 2143392 - RNA, 19 nt, Artificial Sequence
  Description of Artificial Sequence: Synthetic oligonucleotide
cucauccugcaguaagcug

SEQ ID NO: 2143393 - RNA, 19 nt, Artificial Sequence
  Description of Artificial Sequence: Synthetic oligonucleotide
guuguucaugguguugggc

SEQ ID NO: 2143394 - RNA, 19 nt, Artificial Sequence
  Description of Artificial Sequence: Synthetic oligonucleotide
ucgucuagaccuagcucgu

SEQ ID NO: 2143395 - RNA, 19 nt, Artificial Sequence
  Description of Artificial Sequence: Synthetic oligonucleotide
cgugcaauuggccaccacg

SEQ ID NO: 2143396 - RNA, 19 nt, Artificial Sequence
  Description of Artificial Sequence: Synthetic oligonucleotide
gcaauuggccaccacggug

SEQ ID NO: 2143397 - RNA, 19 nt, Artificial Sequence
  Description of Artificial Sequence: Synthetic oligonucleotide
aagccgucaccaaagcccu

SEQ ID NO: 2143398 - RNA, 19 nt, Artificial Sequence
  Description of Artificial Sequence: Synthetic oligonucleotide
guaguggcagcccagcucu

SEQ ID NO: 2143399 - RNA, 19 nt, Artificial Sequence
  Description of Artificial Sequence: Synthetic oligonucleotide
gagaugcacuauauucagc

SEQ ID NO: 2143400 - RNA, 19 nt, Artificial Sequence
  Description of Artificial Sequence: Synthetic oligonucleotide
ugcucgucccggaaacgca

SEQ ID NO: 2143401 - RNA, 19 nt, Artificial Sequence
  Description of Artificial Sequence: Synthetic oligonucleotide
gguaggagcuggcaaugag

SEQ ID NO: 2143402 - RNA, 19 nt, Artificial Sequence
  Description of Artificial Sequence: Synthetic oligonucleotide
agcucagcauuaucguagu

SEQ ID NO: 2143403 - RNA, 19 nt, Artificial Sequence
  Description of Artificial Sequence: Synthetic oligonucleotide
cuagcucguguaucaguac

SEQ ID NO: 2143404 - RNA, 19 nt, Artificial Sequence
  Description of Artificial Sequence: Synthetic oligonucleotide
aagaccuugcccagagcca

SEQ ID NO: 2143405 - RNA, 19 nt, Artificial Sequence
  Description of Artificial Sequence: Synthetic oligonucleotide
agaaggcccucaaagcuug

SEQ ID NO: 2143406 - RNA, 19 nt, Artificial Sequence
  Description of Artificial Sequence: Synthetic oligonucleotide
uucggacagcagacgcccg

SEQ ID NO: 2143407 - RNA, 19 nt, Artificial Sequence
  Description of Artificial Sequence: Synthetic oligonucleotide
caugguguugggccuuccc

SEQ ID NO: 2143408 - RNA, 19 nt, Artificial Sequence
  Description of Artificial Sequence: Synthetic oligonucleotide
guccgacugcucaaaaugc

SEQ ID NO: 2143409 - RNA, 19 nt, Artificial Sequence
  Description of Artificial Sequence: Synthetic oligonucleotide
uggcccagugcguacuuga

SEQ ID NO: 2143410 - RNA, 19 nt, Artificial Sequence
  Description of Artificial Sequence: Synthetic oligonucleotide
gggaaccagacucaaguca

SEQ ID NO: 2143411 - RNA, 19 nt, Artificial Sequence
  Description of Artificial Sequence: Synthetic oligonucleotide
agccccgugcaauuggcca

SEQ ID NO: 2143412 - RNA, 19 nt, Artificial Sequence
  Description of Artificial Sequence: Synthetic oligonucleotide
ugggagugacgcagccgcg

SEQ ID NO: 2143413 - RNA, 19 nt, Artificial Sequence
  Description of Artificial Sequence: Synthetic oligonucleotide
accuagcucguguaucagu

SEQ ID NO: 2143414 - RNA, 19 nt, Artificial Sequence
  Description of Artificial Sequence: Synthetic oligonucleotide
gugguuucggacagcagac

SEQ ID NO: 2143415 - RNA, 19 nt, Artificial Sequence
  Description of Artificial Sequence: Synthetic oligonucleotide
cuugggagugacgcagccg

SEQ ID NO: 2143416 - RNA, 19 nt, Artificial Sequence
  Description of Artificial Sequence: Synthetic oligonucleotide
ccagacucaagucaguaca

SEQ ID NO: 2143417 - RNA, 19 nt, Artificial Sequence
  Description of Artificial Sequence: Synthetic oligonucleotide
auguccgacugcucaaaau

SEQ ID NO: 2143418 - RNA, 19 nt, Artificial Sequence
  Description of Artificial Sequence: Synthetic oligonucleotide
ucgcugggcgguaggagcu

SEQ ID NO: 2143419 - RNA, 19 nt, Artificial Sequence
  Description of Artificial Sequence: Synthetic oligonucleotide
gaacaccggcacccgguag

SEQ ID NO: 2143420 - RNA, 19 nt, Artificial Sequence
  Description of Artificial Sequence: Synthetic oligonucleotide
gaaguccuugggagugacg

SEQ ID NO: 2143421 - RNA, 19 nt, Artificial Sequence
  Description of Artificial Sequence: Synthetic oligonucleotide
gauuccugccccagccugc

SEQ ID NO: 2143422 - RNA, 19 nt, Artificial Sequence
  Description of Artificial Sequence: Synthetic oligonucleotide
cuccugugaagaccuugcc

SEQ ID NO: 2143423 - RNA, 19 nt, Artificial Sequence
  Description of Artificial Sequence: Synthetic oligonucleotide
agacucaagucaguacaca

SEQ ID NO: 2143424 - RNA, 19 nt, Artificial Sequence
  Description of Artificial Sequence: Synthetic oligonucleotide
agugacgcagccgcggcug

SEQ ID NO: 2143425 - RNA, 19 nt, Artificial Sequence
  Description of Artificial Sequence: Synthetic oligonucleotide
caucagggcugcaggugcc

SEQ ID NO: 2143426 - RNA, 19 nt, Artificial Sequence
  Description of Artificial Sequence: Synthetic oligonucleotide
ucguaguggcagcccagcu

SEQ ID NO: 2143427 - RNA, 19 nt, Artificial Sequence
  Description of Artificial Sequence: Synthetic oligonucleotide
auuccugccccagccugcg

SEQ ID NO: 2143428 - RNA, 19 nt, Artificial Sequence
  Description of Artificial Sequence: Synthetic oligonucleotide
agcggugucaccaguggcu

SEQ ID NO: 2143429 - RNA, 19 nt, Artificial Sequence
  Description of Artificial Sequence: Synthetic oligonucleotide
cuggcagcacaugggacag

SEQ ID NO: 2143430 - RNA, 19 nt, Artificial Sequence
  Description of Artificial Sequence: Synthetic oligonucleotide
acaaaggcacgguggcuau

SEQ ID NO: 2143431 - RNA, 19 nt, Artificial Sequence
  Description of Artificial Sequence: Synthetic oligonucleotide
uugcacccggagaugcacu

SEQ ID NO: 2143432 - RNA, 19 nt, Artificial Sequence
  Description of Artificial Sequence: Synthetic oligonucleotide
uccucccgggucgaagccg

SEQ ID NO: 2143433 - RNA, 19 nt, Artificial Sequence
  Description of Artificial Sequence: Synthetic oligonucleotide
auagggcaccuccugugaa

SEQ ID NO: 2143434 - RNA, 19 nt, Artificial Sequence
  Description of Artificial Sequence: Synthetic oligonucleotide
acuggagaaggcccucaaa

SEQ ID NO: 2143435 - RNA, 19 nt, Artificial Sequence
  Description of Artificial Sequence: Synthetic oligonucleotide
caguaagcuguagauguca

SEQ ID NO: 2143436 - RNA, 19 nt, Artificial Sequence
  Description of Artificial Sequence: Synthetic oligonucleotide
gacacuaucuccagccacu

SEQ ID NO: 2143437 - RNA, 19 nt, Artificial Sequence
  Description of Artificial Sequence: Synthetic oligonucleotide
ucgucccggaaacgcaggu

SEQ ID NO: 2143438 - RNA, 19 nt, Artificial Sequence
  Description of Artificial Sequence: Synthetic oligonucleotide
gagcggaccguagucacga

SEQ ID NO: 2143439 - RNA, 19 nt, Artificial Sequence
  Description of Artificial Sequence: Synthetic oligonucleotide
gacgucucaccuccugcuc

SEQ ID NO: 2143440 - RNA, 19 nt, Artificial Sequence
  Description of Artificial Sequence: Synthetic oligonucleotide
cgacugcucaaaaugcucc

SEQ ID NO: 2143441 - RNA, 19 nt, Artificial Sequence
  Description of Artificial Sequence: Synthetic oligonucleotide
caagcuccuccaagaguug

SEQ ID NO: 2143442 - RNA, 19 nt, Artificial Sequence
  Description of Artificial Sequence: Synthetic oligonucleotide
acacuaucuccagccacug

SEQ ID NO: 2143443 - RNA, 19 nt, Artificial Sequence
  Description of Artificial Sequence: Synthetic oligonucleotide
agagccacauugaggguga

SEQ ID NO: 2143444 - RNA, 19 nt, Artificial Sequence
  Description of Artificial Sequence: Synthetic oligonucleotide
ccucaaagcuugcacccgg

SEQ ID NO: 2143445 - RNA, 19 nt, Artificial Sequence
  Description of Artificial Sequence: Synthetic oligonucleotide
ggcagaaccccaccgagaa

SEQ ID NO: 2143446 - RNA, 19 nt, Artificial Sequence
  Description of Artificial Sequence: Synthetic oligonucleotide
gcauuaucguaguggcagc

SEQ ID NO: 2143447 - RNA, 19 nt, Artificial Sequence
  Description of Artificial Sequence: Synthetic oligonucleotide
gaccuagcucguguaucag

SEQ ID NO: 2143448 - RNA, 19 nt, Artificial Sequence
  Description of Artificial Sequence: Synthetic oligonucleotide
uggcucgucuagaccuagc

SEQ ID NO: 2143449 - RNA, 19 nt, Artificial Sequence
  Description of Artificial Sequence: Synthetic oligonucleotide
gcggcgacgucucaccucc

SEQ ID NO: 2143450 - RNA, 19 nt, Artificial Sequence
  Description of Artificial Sequence: Synthetic oligonucleotide
guuccagcguucuccagua

SEQ ID NO: 2143451 - RNA, 19 nt, Artificial Sequence
  Description of Artificial Sequence: Synthetic oligonucleotide
ggugcaggauacccuggcc

SEQ ID NO: 2143452 - RNA, 19 nt, Artificial Sequence
  Description of Artificial Sequence: Synthetic oligonucleotide
ugcacccggagaugcacua

SEQ ID NO: 2143453 - RNA, 19 nt, Artificial Sequence
  Description of Artificial Sequence: Synthetic oligonucleotide
caguaccccauaguuguuc

SEQ ID NO: 2143454 - RNA, 19 nt, Artificial Sequence
  Description of Artificial Sequence: Synthetic oligonucleotide
cucguguaucaguacccca

SEQ ID NO: 2143455 - RNA, 19 nt, Artificial Sequence
  Description of Artificial Sequence: Synthetic oligonucleotide
auauucagcugcagccaca

SEQ ID NO: 2143456 - RNA, 19 nt, Artificial Sequence
  Description of Artificial Sequence: Synthetic oligonucleotide
gcggaccguagucacgacg

SEQ ID NO: 2143457 - RNA, 19 nt, Artificial Sequence
  Description of Artificial Sequence: Synthetic oligonucleotide
agucacgacguagcugcug

SEQ ID NO: 2143458 - RNA, 19 nt, Artificial Sequence
  Description of Artificial Sequence: Synthetic oligonucleotide
agcggaccguagucacgac

SEQ ID NO: 2143459 - RNA, 19 nt, Artificial Sequence
  Description of Artificial Sequence: Synthetic oligonucleotide
ucaguaccccauaguuguu

SEQ ID NO: 2143460 - RNA, 19 nt, Artificial Sequence
  Description of Artificial Sequence: Synthetic oligonucleotide
cugacacuaucuccagcca

SEQ ID NO: 2143461 - RNA, 19 nt, Artificial Sequence
  Description of Artificial Sequence: Synthetic oligonucleotide
ggaaacgcaggugcagccc

SEQ ID NO: 2143462 - RNA, 19 nt, Artificial Sequence
  Description of Artificial Sequence: Synthetic oligonucleotide
cugcaggugccuggaagag

SEQ ID NO: 2143463 - RNA, 19 nt, Artificial Sequence
  Description of Artificial Sequence: Synthetic oligonucleotide
gggcauguccgacugcuca

SEQ ID NO: 2143464 - RNA, 19 nt, Artificial Sequence
  Description of Artificial Sequence: Synthetic oligonucleotide
caccgagaacaccggcacc

SEQ ID NO: 2143465 - RNA, 19 nt, Artificial Sequence
  Description of Artificial Sequence: Synthetic oligonucleotide
ucacgacguagcugcugcu

SEQ ID NO: 2143466 - RNA, 19 nt, Artificial Sequence
  Description of Artificial Sequence: Synthetic oligonucleotide
caggauacccuggcccacc

SEQ ID NO: 2143467 - RNA, 19 nt, Artificial Sequence
  Description of Artificial Sequence: Synthetic oligonucleotide
accacaugauccacuucca

SEQ ID NO: 2143468 - RNA, 19 nt, Artificial Sequence
  Description of Artificial Sequence: Synthetic oligonucleotide
agugcguacuugaccacaa

SEQ ID NO: 2143469 - RNA, 19 nt, Artificial Sequence
  Description of Artificial Sequence: Synthetic oligonucleotide
gccuggcagaaccccaccg

SEQ ID NO: 2143470 - RNA, 19 nt, Artificial Sequence
  Description of Artificial Sequence: Synthetic oligonucleotide
ugcggcgacgucucaccuc

SEQ ID NO: 2143471 - RNA, 19 nt, Artificial Sequence
  Description of Artificial Sequence: Synthetic oligonucleotide
ccauaguuguucauggugu

SEQ ID NO: 2143472 - RNA, 19 nt, Artificial Sequence
  Description of Artificial Sequence: Synthetic oligonucleotide
ggagugacgcagccgcggc

SEQ ID NO: 2143473 - RNA, 19 nt, Artificial Sequence
  Description of Artificial Sequence: Synthetic oligonucleotide
uagucacgacguagcugcu

SEQ ID NO: 2143474 - RNA, 19 nt, Artificial Sequence
  Description of Artificial Sequence: Synthetic oligonucleotide
cacgacguagcugcugcuc

SEQ ID NO: 2143475 - RNA, 19 nt, Artificial Sequence
  Description of Artificial Sequence: Synthetic oligonucleotide
cuccucccgggucgaagcc

SEQ ID NO: 2143476 - RNA, 19 nt, Artificial Sequence
  Description of Artificial Sequence: Synthetic oligonucleotide
guagcgcgccacguacagg

SEQ ID NO: 2143477 - RNA, 19 nt, Artificial Sequence
  Description of Artificial Sequence: Synthetic oligonucleotide
cucccgaagcggugucacc

SEQ ID NO: 2143478 - RNA, 19 nt, Artificial Sequence
  Description of Artificial Sequence: Synthetic oligonucleotide
gggagugacgcagccgcgg

SEQ ID NO: 2143479 - RNA, 19 nt, Artificial Sequence
  Description of Artificial Sequence: Synthetic oligonucleotide
ccaccgagaacaccggcac

SEQ ID NO: 2143480 - RNA, 19 nt, Artificial Sequence
  Description of Artificial Sequence: Synthetic oligonucleotide
ccgacugcucaaaaugcuc

SEQ ID NO: 2143481 - RNA, 19 nt, Artificial Sequence
  Description of Artificial Sequence: Synthetic oligonucleotide
aaacgcaggugcagcccgu

SEQ ID NO: 2143482 - RNA, 19 nt, Artificial Sequence
  Description of Artificial Sequence: Synthetic oligonucleotide
ggcuccaucagggcugcag

SEQ ID NO: 2143483 - RNA, 19 nt, Artificial Sequence
  Description of Artificial Sequence: Synthetic oligonucleotide
ugggcauguccgacugcuc

SEQ ID NO: 2143484 - RNA, 19 nt, Artificial Sequence
  Description of Artificial Sequence: Synthetic oligonucleotide
ccacaugauccacuuccag

SEQ ID NO: 2143485 - RNA, 19 nt, Artificial Sequence
  Description of Artificial Sequence: Synthetic oligonucleotide
gcucguguaucaguacccc

SEQ ID NO: 2143486 - RNA, 19 nt, Artificial Sequence
  Description of Artificial Sequence: Synthetic oligonucleotide
gacaagguuccagcguucu

SEQ ID NO: 2143487 - RNA, 19 nt, Artificial Sequence
  Description of Artificial Sequence: Synthetic oligonucleotide
gagggugagcucagcauua

SEQ ID NO: 2143488 - RNA, 19 nt, Artificial Sequence
  Description of Artificial Sequence: Synthetic oligonucleotide
ucccuugggcauguccgac

SEQ ID NO: 2143489 - RNA, 19 nt, Artificial Sequence
  Description of Artificial Sequence: Synthetic oligonucleotide
uucaugguguugggccuuc

SEQ ID NO: 2143490 - RNA, 19 nt, Artificial Sequence
  Description of Artificial Sequence: Synthetic oligonucleotide
ggugccuggaagaggcccc

SEQ ID NO: 2143491 - RNA, 19 nt, Artificial Sequence
  Description of Artificial Sequence: Synthetic oligonucleotide
gagaacaccggcacccggu

SEQ ID NO: 2143492 - RNA, 19 nt, Artificial Sequence
  Description of Artificial Sequence: Synthetic oligonucleotide
acggugcaggauacccugg

SEQ ID NO: 2143493 - RNA, 19 nt, Artificial Sequence
  Description of Artificial Sequence: Synthetic oligonucleotide
ccugcggcgacgucucacc

SEQ ID NO: 2143494 - RNA, 19 nt, Artificial Sequence
  Description of Artificial Sequence: Synthetic oligonucleotide
gcgacgucucaccuccugc

SEQ ID NO: 2143495 - RNA, 19 nt, Artificial Sequence
  Description of Artificial Sequence: Synthetic oligonucleotide
ccaagaguugcuggaaguc

SEQ ID NO: 2143496 - RNA, 19 nt, Artificial Sequence
  Description of Artificial Sequence: Synthetic oligonucleotide
ucaugguguugggccuucc

SEQ ID NO: 2143497 - RNA, 19 nt, Artificial Sequence
  Description of Artificial Sequence: Synthetic oligonucleotide
ucccgggucgaagccguca

SEQ ID NO: 2143498 - RNA, 19 nt, Artificial Sequence
  Description of Artificial Sequence: Synthetic oligonucleotide
ccuagcucguguaucagua

SEQ ID NO: 2143499 - RNA, 19 nt, Artificial Sequence
  Description of Artificial Sequence: Synthetic oligonucleotide
guggcucgucuagaccuag

SEQ ID NO: 2143500 - RNA, 19 nt, Artificial Sequence
  Description of Artificial Sequence: Synthetic oligonucleotide
gcucgucuagaccuagcuc

SEQ ID NO: 2143501 - RNA, 19 nt, Artificial Sequence
  Description of Artificial Sequence: Synthetic oligonucleotide
gagccccgugcaauuggcc

SEQ ID NO: 2143502 - RNA, 19 nt, Artificial Sequence
  Description of Artificial Sequence: Synthetic oligonucleotide
ccggagccagaugacaagg

SEQ ID NO: 2143503 - RNA, 19 nt, Artificial Sequence
  Description of Artificial Sequence: Synthetic oligonucleotide
gcaggagcggaccguaguc

SEQ ID NO: 2143504 - RNA, 19 nt, Artificial Sequence
  Description of Artificial Sequence: Synthetic oligonucleotide
ggucgaagccgucaccaaa

SEQ ID NO: 2143505 - RNA, 19 nt, Artificial Sequence
  Description of Artificial Sequence: Synthetic oligonucleotide
cagccugcggcgacgucuc

SEQ ID NO: 2143506 - RNA, 19 nt, Artificial Sequence
  Description of Artificial Sequence: Synthetic oligonucleotide
gccaccacggugcaggaua

SEQ ID NO: 2143507 - RNA, 19 nt, Artificial Sequence
  Description of Artificial Sequence: Synthetic oligonucleotide
gaagcgcucccgaagcggu

SEQ ID NO: 2143508 - RNA, 19 nt, Artificial Sequence
  Description of Artificial Sequence: Synthetic oligonucleotide
gaaggcccucaaagcuugc

SEQ ID NO: 2143509 - RNA, 19 nt, Artificial Sequence
  Description of Artificial Sequence: Synthetic oligonucleotide
auacccuggcccaccacau

SEQ ID NO: 2143510 - RNA, 19 nt, Artificial Sequence
  Description of Artificial Sequence: Synthetic oligonucleotide
ugcgcaggagcggaccgua

SEQ ID NO: 2143511 - RNA, 19 nt, Artificial Sequence
  Description of Artificial Sequence: Synthetic oligonucleotide
cagugcguacuugaccaca

SEQ ID NO: 2143512 - RNA, 19 nt, Artificial Sequence
  Description of Artificial Sequence: Synthetic oligonucleotide
ggagcggaccguagucacg

SEQ ID NO: 2143513 - RNA, 19 nt, Artificial Sequence
  Description of Artificial Sequence: Synthetic oligonucleotide
aagcgcucccgaagcggug

SEQ ID NO: 2143514 - RNA, 19 nt, Artificial Sequence
  Description of Artificial Sequence: Synthetic oligonucleotide
cauguccgacugcucaaaa

SEQ ID NO: 2143515 - RNA, 19 nt, Artificial Sequence
  Description of Artificial Sequence: Synthetic oligonucleotide
gccgcggcugcgcaggagc

SEQ ID NO: 2143516 - RNA, 19 nt, Artificial Sequence
  Description of Artificial Sequence: Synthetic oligonucleotide
accccaccgagaacaccgg

SEQ ID NO: 2143517 - RNA, 19 nt, Artificial Sequence
  Description of Artificial Sequence: Synthetic oligonucleotide
ggcgacgucucaccuccug

SEQ ID NO: 2143518 - RNA, 19 nt, Artificial Sequence
  Description of Artificial Sequence: Synthetic oligonucleotide
cgaagccgucaccaaagcc

SEQ ID NO: 2143519 - RNA, 19 nt, Artificial Sequence
  Description of Artificial Sequence: Synthetic oligonucleotide
caggagcggaccguaguca

SEQ ID NO: 2143520 - RNA, 19 nt, Artificial Sequence
  Description of Artificial Sequence: Synthetic oligonucleotide
ccugcaguaagcuguagau

SEQ ID NO: 2143521 - RNA, 19 nt, Artificial Sequence
  Description of Artificial Sequence: Synthetic oligonucleotide
cccguagcgcgccacguac

SEQ ID NO: 2143522 - RNA, 19 nt, Artificial Sequence
  Description of Artificial Sequence: Synthetic oligonucleotide
aggugguuucggacagcag

SEQ ID NO: 2143523 - RNA, 19 nt, Artificial Sequence
  Description of Artificial Sequence: Synthetic oligonucleotide
gagggcuuuucuggcagcu

SEQ ID NO: 2143524 - RNA, 19 nt, Artificial Sequence
  Description of Artificial Sequence: Synthetic oligonucleotide
gcucagcauuaucguagug

SEQ ID NO: 2143525 - RNA, 19 nt, Artificial Sequence
  Description of Artificial Sequence: Synthetic oligonucleotide
agacgcccggagccagaug

SEQ ID NO: 2143526 - RNA, 19 nt, Artificial Sequence
  Description of Artificial Sequence: Synthetic oligonucleotide
gguggcuaucaagcuggcc

SEQ ID NO: 2143527 - RNA, 19 nt, Artificial Sequence
  Description of Artificial Sequence: Synthetic oligonucleotide
ggcucgucuagaccuagcu

SEQ ID NO: 2143528 - RNA, 19 nt, Artificial Sequence
  Description of Artificial Sequence: Synthetic oligonucleotide
cgaagcggugucaccagug

SEQ ID NO: 2143529 - RNA, 19 nt, Artificial Sequence
  Description of Artificial Sequence: Synthetic oligonucleotide
ccggaaacgcaggugcagc

SEQ ID NO: 2143530 - RNA, 19 nt, Artificial Sequence
  Description of Artificial Sequence: Synthetic oligonucleotide
cuagaccuagcucguguau

SEQ ID NO: 2143531 - RNA, 19 nt, Artificial Sequence
  Description of Artificial Sequence: Synthetic oligonucleotide
acccggagaugcacuauau

SEQ ID NO: 2143532 - RNA, 19 nt, Artificial Sequence
  Description of Artificial Sequence: Synthetic oligonucleotide
ggcauguccgacugcucaa

SEQ ID NO: 2143533 - RNA, 19 nt, Artificial Sequence
  Description of Artificial Sequence: Synthetic oligonucleotide
cguaguggcagcccagcuc

SEQ ID NO: 2143534 - RNA, 19 nt, Artificial Sequence
  Description of Artificial Sequence: Synthetic oligonucleotide
ccgagccccgugcaauugg

SEQ ID NO: 2143535 - RNA, 19 nt, Artificial Sequence
  Description of Artificial Sequence: Synthetic oligonucleotide
acgcccggagccagaugac

SEQ ID NO: 2143536 - RNA, 19 nt, Artificial Sequence
  Description of Artificial Sequence: Synthetic oligonucleotide
gccccgugcaauuggccac

SEQ ID NO: 2143537 - RNA, 19 nt, Artificial Sequence
  Description of Artificial Sequence: Synthetic oligonucleotide
gcugcucgucccggaaacg

SEQ ID NO: 2143538 - RNA, 19 nt, Artificial Sequence
  Description of Artificial Sequence: Synthetic oligonucleotide
caguuccuuccagcagggc

SEQ ID NO: 2143539 - RNA, 19 nt, Artificial Sequence
  Description of Artificial Sequence: Synthetic oligonucleotide
cacccggagaugcacuaua

SEQ ID NO: 2143540 - RNA, 19 nt, Artificial Sequence
  Description of Artificial Sequence: Synthetic oligonucleotide
guccuggcccagugcguac

SEQ ID NO: 2143541 - RNA, 19 nt, Artificial Sequence
  Description of Artificial Sequence: Synthetic oligonucleotide
gcaguaagcuguagauguc

SEQ ID NO: 2143542 - RNA, 19 nt, Artificial Sequence
  Description of Artificial Sequence: Synthetic oligonucleotide
caaaggcacgguggcuauc

SEQ ID NO: 2143543 - RNA, 19 nt, Artificial Sequence
  Description of Artificial Sequence: Synthetic oligonucleotide
gugcguacuugaccacaaa

SEQ ID NO: 2143544 - RNA, 19 nt, Artificial Sequence
  Description of Artificial Sequence: Synthetic oligonucleotide
gucucaccuccugcucaag

SEQ ID NO: 2143545 - RNA, 19 nt, Artificial Sequence
  Description of Artificial Sequence: Synthetic oligonucleotide
cguagcgcgccacguacag

SEQ ID NO: 2143546 - RNA, 19 nt, Artificial Sequence
  Description of Artificial Sequence: Synthetic oligonucleotide
cuggcccagugcguacuug

SEQ ID NO: 2143547 - RNA, 19 nt, Artificial Sequence
  Description of Artificial Sequence: Synthetic oligonucleotide
gcgguaggagcuggcaaug

SEQ ID NO: 2143548 - RNA, 19 nt, Artificial Sequence
  Description of Artificial Sequence: Synthetic oligonucleotide
ccaccacggugcaggauac

SEQ ID NO: 2143549 - RNA, 19 nt, Artificial Sequence
  Description of Artificial Sequence: Synthetic oligonucleotide
cccgaagcggugucaccag

SEQ ID NO: 2143550 - RNA, 19 nt, Artificial Sequence
  Description of Artificial Sequence: Synthetic oligonucleotide
acaccggcacccgguagau

SEQ ID NO: 2143551 - RNA, 19 nt, Artificial Sequence
  Description of Artificial Sequence: Synthetic oligonucleotide
aguggcucgucuagaccua

SEQ ID NO: 2143552 - RNA, 19 nt, Artificial Sequence
  Description of Artificial Sequence: Synthetic oligonucleotide
ggcgguaggagcuggcaau

SEQ ID NO: 2143553 - RNA, 19 nt, Artificial Sequence
  Description of Artificial Sequence: Synthetic oligonucleotide
caccaacaccucuggggaa

SEQ ID NO: 2143554 - RNA, 19 nt, Artificial Sequence
  Description of Artificial Sequence: Synthetic oligonucleotide
gagugacgcagccgcggcu

SEQ ID NO: 2143555 - RNA, 19 nt, Artificial Sequence
  Description of Artificial Sequence: Synthetic oligonucleotide
gccgucaccaaagcccuca

SEQ ID NO: 2143556 - RNA, 19 nt, Artificial Sequence
  Description of Artificial Sequence: Synthetic oligonucleotide
ccuggcagaaccccaccga

SEQ ID NO: 2143557 - RNA, 19 nt, Artificial Sequence
  Description of Artificial Sequence: Synthetic oligonucleotide
caccacggugcaggauacc

SEQ ID NO: 2143558 - RNA, 19 nt, Artificial Sequence
  Description of Artificial Sequence: Synthetic oligonucleotide
gcagaaccccaccgagaac

SEQ ID NO: 2143559 - RNA, 19 nt, Artificial Sequence
  Description of Artificial Sequence: Synthetic oligonucleotide
cgagaacaccggcacccgg

SEQ ID NO: 2143560 - RNA, 19 nt, Artificial Sequence
  Description of Artificial Sequence: Synthetic oligonucleotide
ccagugcguacuugaccac

SEQ ID NO: 2143561 - RNA, 19 nt, Artificial Sequence
  Description of Artificial Sequence: Synthetic oligonucleotide
ccaaaguauagggcaccuc

SEQ ID NO: 2143562 - RNA, 19 nt, Artificial Sequence
  Description of Artificial Sequence: Synthetic oligonucleotide
cgagccccgugcaauuggc

SEQ ID NO: 2143563 - RNA, 19 nt, Artificial Sequence
  Description of Artificial Sequence: Synthetic oligonucleotide
cugcugcucgucccggaaa

SEQ ID NO: 2143564 - RNA, 19 nt, Artificial Sequence
  Description of Artificial Sequence: Synthetic oligonucleotide
cagcguucuccaguaccca

SEQ ID NO: 2143565 - RNA, 19 nt, Artificial Sequence
  Description of Artificial Sequence: Synthetic oligonucleotide
ccggcacccgguagaugcg

SEQ ID NO: 2143566 - RNA, 19 nt, Artificial Sequence
  Description of Artificial Sequence: Synthetic oligonucleotide
caguacccaggggccgagc

SEQ ID NO: 2143567 - RNA, 19 nt, Artificial Sequence
  Description of Artificial Sequence: Synthetic oligonucleotide
ggcaggcuccucccggguc

SEQ ID NO: 2143568 - RNA, 19 nt, Artificial Sequence
  Description of Artificial Sequence: Synthetic oligonucleotide
ccgagaacaccggcacccg

SEQ ID NO: 2143569 - RNA, 19 nt, Artificial Sequence
  Description of Artificial Sequence: Synthetic oligonucleotide
agccgucaccaaagcccuc

SEQ ID NO: 2143570 - RNA, 19 nt, Artificial Sequence
  Description of Artificial Sequence: Synthetic oligonucleotide
cccgggucgaagccgucac

SEQ ID NO: 2143571 - RNA, 19 nt, Artificial Sequence
  Description of Artificial Sequence: Synthetic oligonucleotide
gcggugucaccaguggcuc

SEQ ID NO: 2143572 - RNA, 19 nt, Artificial Sequence
  Description of Artificial Sequence: Synthetic oligonucleotide
caccaguggcucgucuaga

SEQ ID NO: 2143573 - RNA, 19 nt, Artificial Sequence
  Description of Artificial Sequence: Synthetic oligonucleotide
guaccccauaguuguucau

SEQ ID NO: 2143574 - RNA, 19 nt, Artificial Sequence
  Description of Artificial Sequence: Synthetic oligonucleotide
gcaggauacccuggcccac

SEQ ID NO: 2143575 - RNA, 19 nt, Artificial Sequence
  Description of Artificial Sequence: Synthetic oligonucleotide
cacaugggacagagguggu

SEQ ID NO: 2143576 - RNA, 19 nt, Artificial Sequence
  Description of Artificial Sequence: Synthetic oligonucleotide
cuacuguggcaggcuccuc

SEQ ID NO: 2143577 - RNA, 19 nt, Artificial Sequence
  Description of Artificial Sequence: Synthetic oligonucleotide
ccccaccgagaacaccggc

SEQ ID NO: 2143578 - RNA, 19 nt, Artificial Sequence
  Description of Artificial Sequence: Synthetic oligonucleotide
gggucgaagccgucaccaa

SEQ ID NO: 2143579 - RNA, 19 nt, Artificial Sequence
  Description of Artificial Sequence: Synthetic oligonucleotide
ccccgugcaauuggccacc

SEQ ID NO: 2143580 - RNA, 19 nt, Artificial Sequence
  Description of Artificial Sequence: Synthetic oligonucleotide
agccgcggcugcgcaggag

SEQ ID NO: 2143581 - RNA, 19 nt, Artificial Sequence
  Description of Artificial Sequence: Synthetic oligonucleotide
gcacgguggcuaucaagcu

SEQ ID NO: 2143582 - RNA, 19 nt, Artificial Sequence
  Description of Artificial Sequence: Synthetic oligonucleotide
gcauguccgacugcucaaa

SEQ ID NO: 2143583 - RNA, 19 nt, Artificial Sequence
  Description of Artificial Sequence: Synthetic oligonucleotide
ccgggucgaagccgucacc

SEQ ID NO: 2143584 - RNA, 19 nt, Artificial Sequence
  Description of Artificial Sequence: Synthetic oligonucleotide
agccugcggcgacgucuca

SEQ ID NO: 2143585 - RNA, 19 nt, Artificial Sequence
  Description of Artificial Sequence: Synthetic oligonucleotide
cucccgggucgaagccguc

SEQ ID NO: 2143586 - RNA, 19 nt, Artificial Sequence
  Description of Artificial Sequence: Synthetic oligonucleotide
ggaccguagucacgacgua

SEQ ID NO: 2143587 - RNA, 19 nt, Artificial Sequence
  Description of Artificial Sequence: Synthetic oligonucleotide
caccggcacccgguagaug

SEQ ID NO: 2143588 - RNA, 19 nt, Artificial Sequence
  Description of Artificial Sequence: Synthetic oligonucleotide
gccugcggcgacgucucac

SEQ ID NO: 2143589 - RNA, 19 nt, Artificial Sequence
  Description of Artificial Sequence: Synthetic oligonucleotide
cguguaucaguaccccaua

SEQ ID NO: 2143590 - RNA, 19 nt, Artificial Sequence
  Description of Artificial Sequence: Synthetic oligonucleotide
ccaguacccaggggccgag

SEQ ID NO: 2143591 - RNA, 19 nt, Artificial Sequence
  Description of Artificial Sequence: Synthetic oligonucleotide
gccagaugacaagguucca

SEQ ID NO: 2143592 - RNA, 19 nt, Artificial Sequence
  Description of Artificial Sequence: Synthetic oligonucleotide
cgggucgaagccgucacca

SEQ ID NO: 2143593 - RNA, 19 nt, Artificial Sequence
  Description of Artificial Sequence: Synthetic oligonucleotide
ccucauccugcaguaagcu

SEQ ID NO: 2143594 - RNA, 19 nt, Artificial Sequence
  Description of Artificial Sequence: Synthetic oligonucleotide
agcuggcaaugagggcuuu

SEQ ID NO: 2143595 - RNA, 19 nt, Artificial Sequence
  Description of Artificial Sequence: Synthetic oligonucleotide
cgucccggaaacgcaggug

SEQ ID NO: 2143596 - RNA, 19 nt, Artificial Sequence
  Description of Artificial Sequence: Synthetic oligonucleotide
cugcggcgacgucucaccu

SEQ ID NO: 2143597 - RNA, 19 nt, Artificial Sequence
  Description of Artificial Sequence: Synthetic oligonucleotide
ccgugcaauuggccaccac

SEQ ID NO: 2143598 - RNA, 19 nt, Artificial Sequence
  Description of Artificial Sequence: Synthetic oligonucleotide
ccguagcgcgccacguaca

SEQ ID NO: 2143599 - RNA, 19 nt, Artificial Sequence
  Description of Artificial Sequence: Synthetic oligonucleotide
gcgcaggagcggaccguag

SEQ ID NO: 2143600 - RNA, 19 nt, Artificial Sequence
  Description of Artificial Sequence: Synthetic oligonucleotide
cgguggcuaucaagcuggc

SEQ ID NO: 2143601 - RNA, 19 nt, Artificial Sequence
  Description of Artificial Sequence: Synthetic oligonucleotide
ccacggugcaggauacccu

SEQ ID NO: 2143602 - RNA, 19 nt, Artificial Sequence
  Description of Artificial Sequence: Synthetic oligonucleotide
agcgcgccacguacagguu

SEQ ID NO: 2143603 - RNA, 19 nt, Artificial Sequence
  Description of Artificial Sequence: Synthetic oligonucleotide
cgucuagaccuagcucgug

SEQ ID NO: 2143604 - RNA, 19 nt, Artificial Sequence
  Description of Artificial Sequence: Synthetic oligonucleotide
ccccgccacacucugggua

SEQ ID NO: 2143605 - RNA, 19 nt, Artificial Sequence
  Description of Artificial Sequence: Synthetic oligonucleotide
gccucgcugggcgguagga

SEQ ID NO: 2143606 - RNA, 19 nt, Artificial Sequence
  Description of Artificial Sequence: Synthetic oligonucleotide
cucuagguccuggcccagu

SEQ ID NO: 2143607 - RNA, 19 nt, Artificial Sequence
  Description of Artificial Sequence: Synthetic oligonucleotide
cgacgucucaccuccugcu

SEQ ID NO: 2143608 - RNA, 19 nt, Artificial Sequence
  Description of Artificial Sequence: Synthetic oligonucleotide
ccguagucacgacguagcu

SEQ ID NO: 2143609 - RNA, 19 nt, Artificial Sequence
  Description of Artificial Sequence: Synthetic oligonucleotide
cccuugggcauguccgacu

SEQ ID NO: 2143610 - RNA, 19 nt, Artificial Sequence
  Description of Artificial Sequence: Synthetic oligonucleotide
cggcacccgguagaugcgc

SEQ ID NO: 2143611 - RNA, 19 nt, Artificial Sequence
  Description of Artificial Sequence: Synthetic oligonucleotide
gcccguagcgcgccacgua

SEQ ID NO: 2143612 - RNA, 19 nt, Artificial Sequence
  Description of Artificial Sequence: Synthetic oligonucleotide
ccucccgggucgaagccgu

SEQ ID NO: 2143613 - RNA, 19 nt, Artificial Sequence
  Description of Artificial Sequence: Synthetic oligonucleotide
cagacgcccggagccagau

SEQ ID NO: 2143614 - RNA, 19 nt, Artificial Sequence
  Description of Artificial Sequence: Synthetic oligonucleotide
gcagacgcccggagccaga

SEQ ID NO: 2143615 - RNA, 19 nt, Artificial Sequence
  Description of Artificial Sequence: Synthetic oligonucleotide
gcccaccacaugauccacu

SEQ ID NO: 2143616 - RNA, 19 nt, Artificial Sequence
  Description of Artificial Sequence: Synthetic oligonucleotide
aggcuccucccgggucgaa

SEQ ID NO: 2143617 - RNA, 19 nt, Artificial Sequence
  Description of Artificial Sequence: Synthetic oligonucleotide
cccggagaugcacuauauu

SEQ ID NO: 2143618 - RNA, 19 nt, Artificial Sequence
  Description of Artificial Sequence: Synthetic oligonucleotide
gggccgagccccgugcaau

SEQ ID NO: 2143619 - RNA, 19 nt, Artificial Sequence
  Description of Artificial Sequence: Synthetic oligonucleotide
ggccgagccccgugcaauu

SEQ ID NO: 2143620 - RNA, 19 nt, Artificial Sequence
  Description of Artificial Sequence: Synthetic oligonucleotide
cggacagcagacgcccgga

SEQ ID NO: 2143621 - RNA, 19 nt, Artificial Sequence
  Description of Artificial Sequence: Synthetic oligonucleotide
cgguaggagcuggcaauga

SEQ ID NO: 2143622 - RNA, 19 nt, Artificial Sequence
  Description of Artificial Sequence: Synthetic oligonucleotide
ccgaagcggugucaccagu

SEQ ID NO: 2143623 - RNA, 19 nt, Artificial Sequence
  Description of Artificial Sequence: Synthetic oligonucleotide
cgcaggagcggaccguagu

SEQ ID NO: 2143624 - RNA, 19 nt, Artificial Sequence
  Description of Artificial Sequence: Synthetic oligonucleotide
caggccucgcugggcggua

SEQ ID NO: 2143625 - RNA, 19 nt, Artificial Sequence
  Description of Artificial Sequence: Synthetic oligonucleotide
gcuggcaaugagggcuuuu

SEQ ID NO: 2143626 - RNA, 19 nt, Artificial Sequence
  Description of Artificial Sequence: Synthetic oligonucleotide
cgacguagcugcugcucgu

SEQ ID NO: 2143627 - RNA, 19 nt, Artificial Sequence
  Description of Artificial Sequence: Synthetic oligonucleotide
cgcccggagccagaugaca

SEQ ID NO: 2143628 - RNA, 19 nt, Artificial Sequence
  Description of Artificial Sequence: Synthetic oligonucleotide
caccuccugugaagaccuu

SEQ ID NO: 2143629 - RNA, 19 nt, Artificial Sequence
  Description of Artificial Sequence: Synthetic oligonucleotide
gcacccggagaugcacuau

SEQ ID NO: 2143630 - RNA, 19 nt, Artificial Sequence
  Description of Artificial Sequence: Synthetic oligonucleotide
cccgugcaauuggccacca

SEQ ID NO: 2143631 - RNA, 19 nt, Artificial Sequence
  Description of Artificial Sequence: Synthetic oligonucleotide
cggcugcgcaggagcggac

SEQ ID NO: 2143632 - RNA, 19 nt, Artificial Sequence
  Description of Artificial Sequence: Synthetic oligonucleotide
ccgucaccaaagcccucau

SEQ ID NO: 2143633 - RNA, 19 nt, Artificial Sequence
  Description of Artificial Sequence: Synthetic oligonucleotide
ccuggcccagugcguacuu

SEQ ID NO: 2143634 - RNA, 19 nt, Artificial Sequence
  Description of Artificial Sequence: Synthetic oligonucleotide
gggcuccaucagggcugca

SEQ ID NO: 2143635 - RNA, 19 nt, Artificial Sequence
  Description of Artificial Sequence: Synthetic oligonucleotide
gaaguauucaauuaacucg

SEQ ID NO: 2143636 - RNA, 19 nt, Artificial Sequence
  Description of Artificial Sequence: Synthetic oligonucleotide
aauuccuccguucucaacc

SEQ ID NO: 2143637 - RNA, 19 nt, Artificial Sequence
  Description of Artificial Sequence: Synthetic oligonucleotide
aaacuugaaacuuucugcg

SEQ ID NO: 2143638 - RNA, 19 nt, Artificial Sequence
  Description of Artificial Sequence: Synthetic oligonucleotide
gaagguauggcauaggucc

SEQ ID NO: 2143639 - RNA, 19 nt, Artificial Sequence
  Description of Artificial Sequence: Synthetic oligonucleotide
aagacugaugaaucgaagg

SEQ ID NO: 2143640 - RNA, 19 nt, Artificial Sequence
  Description of Artificial Sequence: Synthetic oligonucleotide
agccguacaaacuugaaac

SEQ ID NO: 2143641 - RNA, 19 nt, Artificial Sequence
  Description of Artificial Sequence: Synthetic oligonucleotide
gugauauacacacugaacc

SEQ ID NO: 2143642 - RNA, 19 nt, Artificial Sequence
  Description of Artificial Sequence: Synthetic oligonucleotide
uauucaauuaacucguggu

SEQ ID NO: 2143643 - RNA, 19 nt, Artificial Sequence
  Description of Artificial Sequence: Synthetic oligonucleotide
agguccgcaauuuuguucc

SEQ ID NO: 2143644 - RNA, 19 nt, Artificial Sequence
  Description of Artificial Sequence: Synthetic oligonucleotide
aacuaugacaagaucugcc

SEQ ID NO: 2143645 - RNA, 19 nt, Artificial Sequence
  Description of Artificial Sequence: Synthetic oligonucleotide
uuaauaauuccuccguucu

SEQ ID NO: 2143646 - RNA, 19 nt, Artificial Sequence
  Description of Artificial Sequence: Synthetic oligonucleotide
auaaaucaggcugagacuc

SEQ ID NO: 2143647 - RNA, 19 nt, Artificial Sequence
  Description of Artificial Sequence: Synthetic oligonucleotide
cuacauaggguuucuaugg

SEQ ID NO: 2143648 - RNA, 19 nt, Artificial Sequence
  Description of Artificial Sequence: Synthetic oligonucleotide
uuacauuuggaguaaucag

SEQ ID NO: 2143649 - RNA, 19 nt, Artificial Sequence
  Description of Artificial Sequence: Synthetic oligonucleotide
ugauugagugggaagagcc

SEQ ID NO: 2143650 - RNA, 19 nt, Artificial Sequence
  Description of Artificial Sequence: Synthetic oligonucleotide
uacauuuggaguaaucaga

SEQ ID NO: 2143651 - RNA, 19 nt, Artificial Sequence
  Description of Artificial Sequence: Synthetic oligonucleotide
gaguucaucgcuuacagca

SEQ ID NO: 2143652 - RNA, 19 nt, Artificial Sequence
  Description of Artificial Sequence: Synthetic oligonucleotide
auucaauuaacucgugguc

SEQ ID NO: 2143653 - RNA, 19 nt, Artificial Sequence
  Description of Artificial Sequence: Synthetic oligonucleotide
auuuuguuccuugacaagg

SEQ ID NO: 2143654 - RNA, 19 nt, Artificial Sequence
  Description of Artificial Sequence: Synthetic oligonucleotide
acuuucugcgaccacauag

SEQ ID NO: 2143655 - RNA, 19 nt, Artificial Sequence
  Description of Artificial Sequence: Synthetic oligonucleotide
aaguauaguccacccacgg

SEQ ID NO: 2143656 - RNA, 19 nt, Artificial Sequence
  Description of Artificial Sequence: Synthetic oligonucleotide
ucuucuuacauuuggagua

SEQ ID NO: 2143657 - RNA, 19 nt, Artificial Sequence
  Description of Artificial Sequence: Synthetic oligonucleotide
uguuccuugacaaggauau

SEQ ID NO: 2143658 - RNA, 19 nt, Artificial Sequence
  Description of Artificial Sequence: Synthetic oligonucleotide
aauuaacucgugguccucc

SEQ ID NO: 2143659 - RNA, 19 nt, Artificial Sequence
  Description of Artificial Sequence: Synthetic oligonucleotide
uuaggaucgccuuucaucu

SEQ ID NO: 2143660 - RNA, 19 nt, Artificial Sequence
  Description of Artificial Sequence: Synthetic oligonucleotide
aucgccuuucaucugagac

SEQ ID NO: 2143661 - RNA, 19 nt, Artificial Sequence
  Description of Artificial Sequence: Synthetic oligonucleotide
guuucuauggcacugguga

SEQ ID NO: 2143662 - RNA, 19 nt, Artificial Sequence
  Description of Artificial Sequence: Synthetic oligonucleotide
ucuggaguaggcaugaguc

SEQ ID NO: 2143663 - RNA, 19 nt, Artificial Sequence
  Description of Artificial Sequence: Synthetic oligonucleotide
auuuggaguaaucagagua

SEQ ID NO: 2143664 - RNA, 19 nt, Artificial Sequence
  Description of Artificial Sequence: Synthetic oligonucleotide
aacagcaggguaaucaagg

SEQ ID NO: 2143665 - RNA, 19 nt, Artificial Sequence
  Description of Artificial Sequence: Synthetic oligonucleotide
aaacuuaucugggacaucu

SEQ ID NO: 2143666 - RNA, 19 nt, Artificial Sequence
  Description of Artificial Sequence: Synthetic oligonucleotide
aauaauuccuccguucuca

SEQ ID NO: 2143667 - RNA, 19 nt, Artificial Sequence
  Description of Artificial Sequence: Synthetic oligonucleotide
ggauaaaucaggcugagac

SEQ ID NO: 2143668 - RNA, 19 nt, Artificial Sequence
  Description of Artificial Sequence: Synthetic oligonucleotide
ucccggauaaaucaggcug

SEQ ID NO: 2143669 - RNA, 19 nt, Artificial Sequence
  Description of Artificial Sequence: Synthetic oligonucleotide
ugauguagccaacagcagc

SEQ ID NO: 2143670 - RNA, 19 nt, Artificial Sequence
  Description of Artificial Sequence: Synthetic oligonucleotide
uucaauuaacucguggucc

SEQ ID NO: 2143671 - RNA, 19 nt, Artificial Sequence
  Description of Artificial Sequence: Synthetic oligonucleotide
caugagucaaaauucucgc

SEQ ID NO: 2143672 - RNA, 19 nt, Artificial Sequence
  Description of Artificial Sequence: Synthetic oligonucleotide
uuuggaguaaucagaguac

SEQ ID NO: 2143673 - RNA, 19 nt, Artificial Sequence
  Description of Artificial Sequence: Synthetic oligonucleotide
ugugauauacacacugaac

SEQ ID NO: 2143674 - RNA, 19 nt, Artificial Sequence
  Description of Artificial Sequence: Synthetic oligonucleotide
gugagauucgcucucaggc

SEQ ID NO: 2143675 - RNA, 19 nt, Artificial Sequence
  Description of Artificial Sequence: Synthetic oligonucleotide
aucagaguacuccagggag

SEQ ID NO: 2143676 - RNA, 19 nt, Artificial Sequence
  Description of Artificial Sequence: Synthetic oligonucleotide
ugcucauagguacagcuug

SEQ ID NO: 2143677 - RNA, 19 nt, Artificial Sequence
  Description of Artificial Sequence: Synthetic oligonucleotide
cacagugacaggaacauug

SEQ ID NO: 2143678 - RNA, 19 nt, Artificial Sequence
  Description of Artificial Sequence: Synthetic oligonucleotide
acuacauaggguuucuaug

SEQ ID NO: 2143679 - RNA, 19 nt, Artificial Sequence
  Description of Artificial Sequence: Synthetic oligonucleotide
gacaagaucugccuucucc

SEQ ID NO: 2143680 - RNA, 19 nt, Artificial Sequence
  Description of Artificial Sequence: Synthetic oligonucleotide
uuguuaauaauuccuccgu

SEQ ID NO: 2143681 - RNA, 19 nt, Artificial Sequence
  Description of Artificial Sequence: Synthetic oligonucleotide
guauucaauuaacucgugg

SEQ ID NO: 2143682 - RNA, 19 nt, Artificial Sequence
  Description of Artificial Sequence: Synthetic oligonucleotide
agggagguaagacugauga

SEQ ID NO: 2143683 - RNA, 19 nt, Artificial Sequence
  Description of Artificial Sequence: Synthetic oligonucleotide
aaucaugaucuucuuacau

SEQ ID NO: 2143684 - RNA, 19 nt, Artificial Sequence
  Description of Artificial Sequence: Synthetic oligonucleotide
guaaucagaguacuccagg

SEQ ID NO: 2143685 - RNA, 19 nt, Artificial Sequence
  Description of Artificial Sequence: Synthetic oligonucleotide
uaggcaugagucaaaauuc

SEQ ID NO: 2143686 - RNA, 19 nt, Artificial Sequence
  Description of Artificial Sequence: Synthetic oligonucleotide
agcaggguaaucaaggacg

SEQ ID NO: 2143687 - RNA, 19 nt, Artificial Sequence
  Description of Artificial Sequence: Synthetic oligonucleotide
gaugaaucgaaggaagagc

SEQ ID NO: 2143688 - RNA, 19 nt, Artificial Sequence
  Description of Artificial Sequence: Synthetic oligonucleotide
uccuucagcaccaacuaug

SEQ ID NO: 2143689 - RNA, 19 nt, Artificial Sequence
  Description of Artificial Sequence: Synthetic oligonucleotide
caucgcuuacagcagaugg

SEQ ID NO: 2143690 - RNA, 19 nt, Artificial Sequence
  Description of Artificial Sequence: Synthetic oligonucleotide
uuguuuugggcuuuggcac

SEQ ID NO: 2143691 - RNA, 19 nt, Artificial Sequence
  Description of Artificial Sequence: Synthetic oligonucleotide
ucagaguacuccagggagg

SEQ ID NO: 2143692 - RNA, 19 nt, Artificial Sequence
  Description of Artificial Sequence: Synthetic oligonucleotide
auagguacagcuugaugag

SEQ ID NO: 2143693 - RNA, 19 nt, Artificial Sequence
  Description of Artificial Sequence: Synthetic oligonucleotide
uguugauugagugggaaga

SEQ ID NO: 2143694 - RNA, 19 nt, Artificial Sequence
  Description of Artificial Sequence: Synthetic oligonucleotide
aaguccguaaacagcaggg

SEQ ID NO: 2143695 - RNA, 19 nt, Artificial Sequence
  Description of Artificial Sequence: Synthetic oligonucleotide
ucuucccggauaaaucagg

SEQ ID NO: 2143696 - RNA, 19 nt, Artificial Sequence
  Description of Artificial Sequence: Synthetic oligonucleotide
uaagacugaugaaucgaag

SEQ ID NO: 2143697 - RNA, 19 nt, Artificial Sequence
  Description of Artificial Sequence: Synthetic oligonucleotide
acuaugacaagaucugccu

SEQ ID NO: 2143698 - RNA, 19 nt, Artificial Sequence
  Description of Artificial Sequence: Synthetic oligonucleotide
acuugaaguauucaauuaa

SEQ ID NO: 2143699 - RNA, 19 nt, Artificial Sequence
  Description of Artificial Sequence: Synthetic oligonucleotide
aggguaaucaaggacgggg

SEQ ID NO: 2143700 - RNA, 19 nt, Artificial Sequence
  Description of Artificial Sequence: Synthetic oligonucleotide
ucugcucauagguacagcu

SEQ ID NO: 2143701 - RNA, 19 nt, Artificial Sequence
  Description of Artificial Sequence: Synthetic oligonucleotide
ucaugaucuucuuacauuu

SEQ ID NO: 2143702 - RNA, 19 nt, Artificial Sequence
  Description of Artificial Sequence: Synthetic oligonucleotide
uauggcacuggugagauuc

SEQ ID NO: 2143703 - RNA, 19 nt, Artificial Sequence
  Description of Artificial Sequence: Synthetic oligonucleotide
cacacagccaucugguugg

SEQ ID NO: 2143704 - RNA, 19 nt, Artificial Sequence
  Description of Artificial Sequence: Synthetic oligonucleotide
guuaauaauuccuccguuc

SEQ ID NO: 2143705 - RNA, 19 nt, Artificial Sequence
  Description of Artificial Sequence: Synthetic oligonucleotide
aguauaguccacccacggg

SEQ ID NO: 2143706 - RNA, 19 nt, Artificial Sequence
  Description of Artificial Sequence: Synthetic oligonucleotide
agacugaugaaucgaagga

SEQ ID NO: 2143707 - RNA, 19 nt, Artificial Sequence
  Description of Artificial Sequence: Synthetic oligonucleotide
uaugacaagaucugccuuc

SEQ ID NO: 2143708 - RNA, 19 nt, Artificial Sequence
  Description of Artificial Sequence: Synthetic oligonucleotide
agaacuccagcaaagugcg

SEQ ID NO: 2143709 - RNA, 19 nt, Artificial Sequence
  Description of Artificial Sequence: Synthetic oligonucleotide
guuaggaucgccuuucauc

SEQ ID NO: 2143710 - RNA, 19 nt, Artificial Sequence
  Description of Artificial Sequence: Synthetic oligonucleotide
aggaguccacacuacauag

SEQ ID NO: 2143711 - RNA, 19 nt, Artificial Sequence
  Description of Artificial Sequence: Synthetic oligonucleotide
ucugugauauacacacuga

SEQ ID NO: 2143712 - RNA, 19 nt, Artificial Sequence
  Description of Artificial Sequence: Synthetic oligonucleotide
uggcauagggcuuuggcca

SEQ ID NO: 2143713 - RNA, 19 nt, Artificial Sequence
  Description of Artificial Sequence: Synthetic oligonucleotide
cuuguuuugggcuuuggca

SEQ ID NO: 2143714 - RNA, 19 nt, Artificial Sequence
  Description of Artificial Sequence: Synthetic oligonucleotide
caucuuguugauugagugg

SEQ ID NO: 2143715 - RNA, 19 nt, Artificial Sequence
  Description of Artificial Sequence: Synthetic oligonucleotide
uccguaaacagcaggguaa

SEQ ID NO: 2143716 - RNA, 19 nt, Artificial Sequence
  Description of Artificial Sequence: Synthetic oligonucleotide
acuuaucugggacaucuug

SEQ ID NO: 2143717 - RNA, 19 nt, Artificial Sequence
  Description of Artificial Sequence: Synthetic oligonucleotide
agagcucuccaccagacga

SEQ ID NO: 2143718 - RNA, 19 nt, Artificial Sequence
  Description of Artificial Sequence: Synthetic oligonucleotide
guacuuaaacuuaucuggg

SEQ ID NO: 2143719 - RNA, 19 nt, Artificial Sequence
  Description of Artificial Sequence: Synthetic oligonucleotide
ucgcuuacagcagauggcg

SEQ ID NO: 2143720 - RNA, 19 nt, Artificial Sequence
  Description of Artificial Sequence: Synthetic oligonucleotide
acaaggauauucuccugag

SEQ ID NO: 2143721 - RNA, 19 nt, Artificial Sequence
  Description of Artificial Sequence: Synthetic oligonucleotide
ugaggaaaagcuccccucu

SEQ ID NO: 2143722 - RNA, 19 nt, Artificial Sequence
  Description of Artificial Sequence: Synthetic oligonucleotide
aaggaagagcucuccacca

SEQ ID NO: 2143723 - RNA, 19 nt, Artificial Sequence
  Description of Artificial Sequence: Synthetic oligonucleotide
aacuugaaacuuucugcga

SEQ ID NO: 2143724 - RNA, 19 nt, Artificial Sequence
  Description of Artificial Sequence: Synthetic oligonucleotide
uacauaggguuucuauggc

SEQ ID NO: 2143725 - RNA, 19 nt, Artificial Sequence
  Description of Artificial Sequence: Synthetic oligonucleotide
ugagauucgcucucaggcc

SEQ ID NO: 2143726 - RNA, 19 nt, Artificial Sequence
  Description of Artificial Sequence: Synthetic oligonucleotide
aagugcggauggcagcuac

SEQ ID NO: 2143727 - RNA, 19 nt, Artificial Sequence
  Description of Artificial Sequence: Synthetic oligonucleotide
auacacacugaaccgcuuc

SEQ ID NO: 2143728 - RNA, 19 nt, Artificial Sequence
  Description of Artificial Sequence: Synthetic oligonucleotide
acauuuggaguaaucagag

SEQ ID NO: 2143729 - RNA, 19 nt, Artificial Sequence
  Description of Artificial Sequence: Synthetic oligonucleotide
uuguugauugagugggaag

SEQ ID NO: 2143730 - RNA, 19 nt, Artificial Sequence
  Description of Artificial Sequence: Synthetic oligonucleotide
aaauucucgccccaucuuu

SEQ ID NO: 2143731 - RNA, 19 nt, Artificial Sequence
  Description of Artificial Sequence: Synthetic oligonucleotide
cuuacauuuggaguaauca

SEQ ID NO: 2143732 - RNA, 19 nt, Artificial Sequence
  Description of Artificial Sequence: Synthetic oligonucleotide
cauagaagggcuuguuuug

SEQ ID NO: 2143733 - RNA, 19 nt, Artificial Sequence
  Description of Artificial Sequence: Synthetic oligonucleotide
aaaagcuccccucucucaa

SEQ ID NO: 2143734 - RNA, 19 nt, Artificial Sequence
  Description of Artificial Sequence: Synthetic oligonucleotide
acaagaucugccuucucca

SEQ ID NO: 2143735 - RNA, 19 nt, Artificial Sequence
  Description of Artificial Sequence: Synthetic oligonucleotide
uaaucaaggacggggaagu

SEQ ID NO: 2143736 - RNA, 19 nt, Artificial Sequence
  Description of Artificial Sequence: Synthetic oligonucleotide
uccguucucaaccacuccu

SEQ ID NO: 2143737 - RNA, 19 nt, Artificial Sequence
  Description of Artificial Sequence: Synthetic oligonucleotide
uacuuaaacuuaucuggga

SEQ ID NO: 2143738 - RNA, 19 nt, Artificial Sequence
  Description of Artificial Sequence: Synthetic oligonucleotide
uugguuccgaucuuguuaa

SEQ ID NO: 2143739 - RNA, 19 nt, Artificial Sequence
  Description of Artificial Sequence: Synthetic oligonucleotide
gacaaggauauucuccuga

SEQ ID NO: 2143740 - RNA, 19 nt, Artificial Sequence
  Description of Artificial Sequence: Synthetic oligonucleotide
aacuccagcaaagugcgga

SEQ ID NO: 2143741 - RNA, 19 nt, Artificial Sequence
  Description of Artificial Sequence: Synthetic oligonucleotide
uauaguccacccacgggug

SEQ ID NO: 2143742 - RNA, 19 nt, Artificial Sequence
  Description of Artificial Sequence: Synthetic oligonucleotide
agaucugccuucuccauga

SEQ ID NO: 2143743 - RNA, 19 nt, Artificial Sequence
  Description of Artificial Sequence: Synthetic oligonucleotide
cuuaaacuuaucugggaca

SEQ ID NO: 2143744 - RNA, 19 nt, Artificial Sequence
  Description of Artificial Sequence: Synthetic oligonucleotide
gaaguauaguccacccacg

SEQ ID NO: 2143745 - RNA, 19 nt, Artificial Sequence
  Description of Artificial Sequence: Synthetic oligonucleotide
gucagcacacccaaguccg

SEQ ID NO: 2143746 - RNA, 19 nt, Artificial Sequence
  Description of Artificial Sequence: Synthetic oligonucleotide
uccgaucuuguuaauaauu

SEQ ID NO: 2143747 - RNA, 19 nt, Artificial Sequence
  Description of Artificial Sequence: Synthetic oligonucleotide
ugaagguauggcauagguc

SEQ ID NO: 2143748 - RNA, 19 nt, Artificial Sequence
  Description of Artificial Sequence: Synthetic oligonucleotide
ucaaggacggggaaguaua

SEQ ID NO: 2143749 - RNA, 19 nt, Artificial Sequence
  Description of Artificial Sequence: Synthetic oligonucleotide
uauggcauagguccgcaau

SEQ ID NO: 2143750 - RNA, 19 nt, Artificial Sequence
  Description of Artificial Sequence: Synthetic oligonucleotide
gaaacuuucugcgaccaca

SEQ ID NO: 2143751 - RNA, 19 nt, Artificial Sequence
  Description of Artificial Sequence: Synthetic oligonucleotide
agacuugaaguauucaauu

SEQ ID NO: 2143752 - RNA, 19 nt, Artificial Sequence
  Description of Artificial Sequence: Synthetic oligonucleotide
acuggugagauucgcucuc

SEQ ID NO: 2143753 - RNA, 19 nt, Artificial Sequence
  Description of Artificial Sequence: Synthetic oligonucleotide
uccaccagacgacacggcc

SEQ ID NO: 2143754 - RNA, 19 nt, Artificial Sequence
  Description of Artificial Sequence: Synthetic oligonucleotide
ggaguaaucagaguacucc

SEQ ID NO: 2143755 - RNA, 19 nt, Artificial Sequence
  Description of Artificial Sequence: Synthetic oligonucleotide
uucuucccggauaaaucag

SEQ ID NO: 2143756 - RNA, 19 nt, Artificial Sequence
  Description of Artificial Sequence: Synthetic oligonucleotide
gauugagugggaagagccg

SEQ ID NO: 2143757 - RNA, 19 nt, Artificial Sequence
  Description of Artificial Sequence: Synthetic oligonucleotide
uuccuugacaaggauauuc

SEQ ID NO: 2143758 - RNA, 19 nt, Artificial Sequence
  Description of Artificial Sequence: Synthetic oligonucleotide
ugaugaagguauggcauag

SEQ ID NO: 2143759 - RNA, 19 nt, Artificial Sequence
  Description of Artificial Sequence: Synthetic oligonucleotide
uccccuuugucucucuuca

SEQ ID NO: 2143760 - RNA, 19 nt, Artificial Sequence
  Description of Artificial Sequence: Synthetic oligonucleotide
caauuuuguuccuugacaa

SEQ ID NO: 2143761 - RNA, 19 nt, Artificial Sequence
  Description of Artificial Sequence: Synthetic oligonucleotide
ugagacucugugauauaca

SEQ ID NO: 2143762 - RNA, 19 nt, Artificial Sequence
  Description of Artificial Sequence: Synthetic oligonucleotide
uccgcaauuuuguuccuug

SEQ ID NO: 2143763 - RNA, 19 nt, Artificial Sequence
  Description of Artificial Sequence: Synthetic oligonucleotide
aagcuccccucucucaauc

SEQ ID NO: 2143764 - RNA, 19 nt, Artificial Sequence
  Description of Artificial Sequence: Synthetic oligonucleotide
gaguaaucagaguacucca

SEQ ID NO: 2143765 - RNA, 19 nt, Artificial Sequence
  Description of Artificial Sequence: Synthetic oligonucleotide
ucuuacauuuggaguaauc

SEQ ID NO: 2143766 - RNA, 19 nt, Artificial Sequence
  Description of Artificial Sequence: Synthetic oligonucleotide
gugacaggaacauugaggu

SEQ ID NO: 2143767 - RNA, 19 nt, Artificial Sequence
  Description of Artificial Sequence: Synthetic oligonucleotide
uauucuccugaggaaaagc

SEQ ID NO: 2143768 - RNA, 19 nt, Artificial Sequence
  Description of Artificial Sequence: Synthetic oligonucleotide
aucgcuuacagcagauggc

SEQ ID NO: 2143769 - RNA, 19 nt, Artificial Sequence
  Description of Artificial Sequence: Synthetic oligonucleotide
gacgacacggccacggagg

SEQ ID NO: 2143770 - RNA, 19 nt, Artificial Sequence
  Description of Artificial Sequence: Synthetic oligonucleotide
gcaugagucaaaauucucg

SEQ ID NO: 2143771 - RNA, 19 nt, Artificial Sequence
  Description of Artificial Sequence: Synthetic oligonucleotide
caaguccguaaacagcagg

SEQ ID NO: 2143772 - RNA, 19 nt, Artificial Sequence
  Description of Artificial Sequence: Synthetic oligonucleotide
uaauaauuccuccguucuc

SEQ ID NO: 2143773 - RNA, 19 nt, Artificial Sequence
  Description of Artificial Sequence: Synthetic oligonucleotide
auagaagggcuuguuuugg

SEQ ID NO: 2143774 - RNA, 19 nt, Artificial Sequence
  Description of Artificial Sequence: Synthetic oligonucleotide
cuucccggauaaaucaggc

SEQ ID NO: 2143775 - RNA, 19 nt, Artificial Sequence
  Description of Artificial Sequence: Synthetic oligonucleotide
guggcauagggcuuuggcc

SEQ ID NO: 2143776 - RNA, 19 nt, Artificial Sequence
  Description of Artificial Sequence: Synthetic oligonucleotide
caagaacuccagcaaagug

SEQ ID NO: 2143777 - RNA, 19 nt, Artificial Sequence
  Description of Artificial Sequence: Synthetic oligonucleotide
guaaucaaggacggggaag

SEQ ID NO: 2143778 - RNA, 19 nt, Artificial Sequence
  Description of Artificial Sequence: Synthetic oligonucleotide
uccccucucucaaucauga

SEQ ID NO: 2143779 - RNA, 19 nt, Artificial Sequence
  Description of Artificial Sequence: Synthetic oligonucleotide
agcaccaacuaugacaaga

SEQ ID NO: 2143780 - RNA, 19 nt, Artificial Sequence
  Description of Artificial Sequence: Synthetic oligonucleotide
ucaaaauucucgccccauc

SEQ ID NO: 2143781 - RNA, 19 nt, Artificial Sequence
  Description of Artificial Sequence: Synthetic oligonucleotide
aucgaaggaagagcucucc

SEQ ID NO: 2143782 - RNA, 19 nt, Artificial Sequence
  Description of Artificial Sequence: Synthetic oligonucleotide
cacugaaccgcuucuuggc

SEQ ID NO: 2143783 - RNA, 19 nt, Artificial Sequence
  Description of Artificial Sequence: Synthetic oligonucleotide
guuccgaucuuguuaauaa

SEQ ID NO: 2143784 - RNA, 19 nt, Artificial Sequence
  Description of Artificial Sequence: Synthetic oligonucleotide
aaaucaggcugagacucug

SEQ ID NO: 2143785 - RNA, 19 nt, Artificial Sequence
  Description of Artificial Sequence: Synthetic oligonucleotide
gauaaaucaggcugagacu

SEQ ID NO: 2143786 - RNA, 19 nt, Artificial Sequence
  Description of Artificial Sequence: Synthetic oligonucleotide
ucgccuuucaucugagacu

SEQ ID NO: 2143787 - RNA, 19 nt, Artificial Sequence
  Description of Artificial Sequence: Synthetic oligonucleotide
guaggcaugagucaaaauu

SEQ ID NO: 2143788 - RNA, 19 nt, Artificial Sequence
  Description of Artificial Sequence: Synthetic oligonucleotide
acauaggguuucuauggca

SEQ ID NO: 2143789 - RNA, 19 nt, Artificial Sequence
  Description of Artificial Sequence: Synthetic oligonucleotide
aagguauggcauagguccg

SEQ ID NO: 2143790 - RNA, 19 nt, Artificial Sequence
  Description of Artificial Sequence: Synthetic oligonucleotide
gacggggaaguauagucca

SEQ ID NO: 2143791 - RNA, 19 nt, Artificial Sequence
  Description of Artificial Sequence: Synthetic oligonucleotide
gagguaagacugaugaauc

SEQ ID NO: 2143792 - RNA, 19 nt, Artificial Sequence
  Description of Artificial Sequence: Synthetic oligonucleotide
aguaaucagaguacuccag

SEQ ID NO: 2143793 - RNA, 19 nt, Artificial Sequence
  Description of Artificial Sequence: Synthetic oligonucleotide
uugaaacuuucugcgacca

SEQ ID NO: 2143794 - RNA, 19 nt, Artificial Sequence
  Description of Artificial Sequence: Synthetic oligonucleotide
cagagugucugccuuguac

SEQ ID NO: 2143795 - RNA, 19 nt, Artificial Sequence
  Description of Artificial Sequence: Synthetic oligonucleotide
agauggcgucagcacaccc

SEQ ID NO: 2143796 - RNA, 19 nt, Artificial Sequence
  Description of Artificial Sequence: Synthetic oligonucleotide
uugauugagugggaagagc

SEQ ID NO: 2143797 - RNA, 19 nt, Artificial Sequence
  Description of Artificial Sequence: Synthetic oligonucleotide
uagggcuuuggccauuuuc

SEQ ID NO: 2143798 - RNA, 19 nt, Artificial Sequence
  Description of Artificial Sequence: Synthetic oligonucleotide
gaugaagguauggcauagg

SEQ ID NO: 2143799 - RNA, 19 nt, Artificial Sequence
  Description of Artificial Sequence: Synthetic oligonucleotide
gacuugaaguauucaauua

SEQ ID NO: 2143800 - RNA, 19 nt, Artificial Sequence
  Description of Artificial Sequence: Synthetic oligonucleotide
uaaaucaggcugagacucu

SEQ ID NO: 2143801 - RNA, 19 nt, Artificial Sequence
  Description of Artificial Sequence: Synthetic oligonucleotide
ccaacuaugacaagaucug

SEQ ID NO: 2143802 - RNA, 19 nt, Artificial Sequence
  Description of Artificial Sequence: Synthetic oligonucleotide
ucgaaggaagagcucucca

SEQ ID NO: 2143803 - RNA, 19 nt, Artificial Sequence
  Description of Artificial Sequence: Synthetic oligonucleotide
ugaguucaucgcuuacagc

SEQ ID NO: 2143804 - RNA, 19 nt, Artificial Sequence
  Description of Artificial Sequence: Synthetic oligonucleotide
uaacucgugguccuccauc

SEQ ID NO: 2143805 - RNA, 19 nt, Artificial Sequence
  Description of Artificial Sequence: Synthetic oligonucleotide
ucucgccccaucuuugaug

SEQ ID NO: 2143806 - RNA, 19 nt, Artificial Sequence
  Description of Artificial Sequence: Synthetic oligonucleotide
cuuucugcgaccacauaga

SEQ ID NO: 2143807 - RNA, 19 nt, Artificial Sequence
  Description of Artificial Sequence: Synthetic oligonucleotide
guugguuccgaucuuguua

SEQ ID NO: 2143808 - RNA, 19 nt, Artificial Sequence
  Description of Artificial Sequence: Synthetic oligonucleotide
aguggacucugcucauagg

SEQ ID NO: 2143809 - RNA, 19 nt, Artificial Sequence
  Description of Artificial Sequence: Synthetic oligonucleotide
guugauugagugggaagag

SEQ ID NO: 2143810 - RNA, 19 nt, Artificial Sequence
  Description of Artificial Sequence: Synthetic oligonucleotide
acaggaacauugagguggc

SEQ ID NO: 2143811 - RNA, 19 nt, Artificial Sequence
  Description of Artificial Sequence: Synthetic oligonucleotide
uuucugcgaccacauagaa

SEQ ID NO: 2143812 - RNA, 19 nt, Artificial Sequence
  Description of Artificial Sequence: Synthetic oligonucleotide
aggaaaagcuccccucucu

SEQ ID NO: 2143813 - RNA, 19 nt, Artificial Sequence
  Description of Artificial Sequence: Synthetic oligonucleotide
auugagugggaagagccgu

SEQ ID NO: 2143814 - RNA, 19 nt, Artificial Sequence
  Description of Artificial Sequence: Synthetic oligonucleotide
gaaucgaaggaagagcucu

SEQ ID NO: 2143815 - RNA, 19 nt, Artificial Sequence
  Description of Artificial Sequence: Synthetic oligonucleotide
aggaucgccuuucaucuga

SEQ ID NO: 2143816 - RNA, 19 nt, Artificial Sequence
  Description of Artificial Sequence: Synthetic oligonucleotide
uggaguaaucagaguacuc

SEQ ID NO: 2143817 - RNA, 19 nt, Artificial Sequence
  Description of Artificial Sequence: Synthetic oligonucleotide
cugagacucugugauauac

SEQ ID NO: 2143818 - RNA, 19 nt, Artificial Sequence
  Description of Artificial Sequence: Synthetic oligonucleotide
ugaugaguucaucgcuuac

SEQ ID NO: 2143819 - RNA, 19 nt, Artificial Sequence
  Description of Artificial Sequence: Synthetic oligonucleotide
uagguccgcaauuuuguuc

SEQ ID NO: 2143820 - RNA, 19 nt, Artificial Sequence
  Description of Artificial Sequence: Synthetic oligonucleotide
acggguguuccucuuugag

SEQ ID NO: 2143821 - RNA, 19 nt, Artificial Sequence
  Description of Artificial Sequence: Synthetic oligonucleotide
ucucaaccacuccuucagc

SEQ ID NO: 2143822 - RNA, 19 nt, Artificial Sequence
  Description of Artificial Sequence: Synthetic oligonucleotide
ucuuguugauugaguggga

SEQ ID NO: 2143823 - RNA, 19 nt, Artificial Sequence
  Description of Artificial Sequence: Synthetic oligonucleotide
gaaaagcuccccucucuca

SEQ ID NO: 2143824 - RNA, 19 nt, Artificial Sequence
  Description of Artificial Sequence: Synthetic oligonucleotide
uggaguaggcaugagucaa

SEQ ID NO: 2143825 - RNA, 19 nt, Artificial Sequence
  Description of Artificial Sequence: Synthetic oligonucleotide
cauguuaggaucgccuuuc

SEQ ID NO: 2143826 - RNA, 19 nt, Artificial Sequence
  Description of Artificial Sequence: Synthetic oligonucleotide
aggaagagcucuccaccag

SEQ ID NO: 2143827 - RNA, 19 nt, Artificial Sequence
  Description of Artificial Sequence: Synthetic oligonucleotide
auauacacacugaaccgcu

SEQ ID NO: 2143828 - RNA, 19 nt, Artificial Sequence
  Description of Artificial Sequence: Synthetic oligonucleotide
uccuccguucucaaccacu

SEQ ID NO: 2143829 - RNA, 19 nt, Artificial Sequence
  Description of Artificial Sequence: Synthetic oligonucleotide
auauucuccugaggaaaag

SEQ ID NO: 2143830 - RNA, 19 nt, Artificial Sequence
  Description of Artificial Sequence: Synthetic oligonucleotide
agguauggcauagguccgc

SEQ ID NO: 2143831 - RNA, 19 nt, Artificial Sequence
  Description of Artificial Sequence: Synthetic oligonucleotide
ugcgaccacauagaagggc

SEQ ID NO: 2143832 - RNA, 19 nt, Artificial Sequence
  Description of Artificial Sequence: Synthetic oligonucleotide
uacagcuugaugaguucau

SEQ ID NO: 2143833 - RNA, 19 nt, Artificial Sequence
  Description of Artificial Sequence: Synthetic oligonucleotide
uugaugaguucaucgcuua

SEQ ID NO: 2143834 - RNA, 19 nt, Artificial Sequence
  Description of Artificial Sequence: Synthetic oligonucleotide
gaagagccguacaaacuug

SEQ ID NO: 2143835 - RNA, 19 nt, Artificial Sequence
  Description of Artificial Sequence: Synthetic oligonucleotide
caacuaugacaagaucugc

SEQ ID NO: 2143836 - RNA, 19 nt, Artificial Sequence
  Description of Artificial Sequence: Synthetic oligonucleotide
acugaaccgcuucuuggcu

SEQ ID NO: 2143837 - RNA, 19 nt, Artificial Sequence
  Description of Artificial Sequence: Synthetic oligonucleotide
agacgacacggccacggag

SEQ ID NO: 2143838 - RNA, 19 nt, Artificial Sequence
  Description of Artificial Sequence: Synthetic oligonucleotide
cucaggacaacucuggagu

SEQ ID NO: 2143839 - RNA, 19 nt, Artificial Sequence
  Description of Artificial Sequence: Synthetic oligonucleotide
uguagccaacagcagcauc

SEQ ID NO: 2143840 - RNA, 19 nt, Artificial Sequence
  Description of Artificial Sequence: Synthetic oligonucleotide
agucaaaauucucgcccca

SEQ ID NO: 2143841 - RNA, 19 nt, Artificial Sequence
  Description of Artificial Sequence: Synthetic oligonucleotide
aagagccguacaaacuuga

SEQ ID NO: 2143842 - RNA, 19 nt, Artificial Sequence
  Description of Artificial Sequence: Synthetic oligonucleotide
auuccuccguucucaacca

SEQ ID NO: 2143843 - RNA, 19 nt, Artificial Sequence
  Description of Artificial Sequence: Synthetic oligonucleotide
uucaucgcuuacagcagau

SEQ ID NO: 2143844 - RNA, 19 nt, Artificial Sequence
  Description of Artificial Sequence: Synthetic oligonucleotide
gacugaugaaucgaaggaa

SEQ ID NO: 2143845 - RNA, 19 nt, Artificial Sequence
  Description of Artificial Sequence: Synthetic oligonucleotide
uuuggcacacacagccauc

SEQ ID NO: 2143846 - RNA, 19 nt, Artificial Sequence
  Description of Artificial Sequence: Synthetic oligonucleotide
acacccaaguccguaaaca

SEQ ID NO: 2143847 - RNA, 19 nt, Artificial Sequence
  Description of Artificial Sequence: Synthetic oligonucleotide
caacucuggaguaggcaug

SEQ ID NO: 2143848 - RNA, 19 nt, Artificial Sequence
  Description of Artificial Sequence: Synthetic oligonucleotide
caucuuugaugaagguaug

SEQ ID NO: 2143849 - RNA, 19 nt, Artificial Sequence
  Description of Artificial Sequence: Synthetic oligonucleotide
gaguacuccagggagguaa

SEQ ID NO: 2143850 - RNA, 19 nt, Artificial Sequence
  Description of Artificial Sequence: Synthetic oligonucleotide
uggacucugcucauaggua

SEQ ID NO: 2143851 - RNA, 19 nt, Artificial Sequence
  Description of Artificial Sequence: Synthetic oligonucleotide
uguuaggaucgccuuucau

SEQ ID NO: 2143852 - RNA, 19 nt, Artificial Sequence
  Description of Artificial Sequence: Synthetic oligonucleotide
gauauucuccugaggaaaa

SEQ ID NO: 2143853 - RNA, 19 nt, Artificial Sequence
  Description of Artificial Sequence: Synthetic oligonucleotide
ggacucugcucauagguac

SEQ ID NO: 2143854 - RNA, 19 nt, Artificial Sequence
  Description of Artificial Sequence: Synthetic oligonucleotide
aguucaucgcuuacagcag

SEQ ID NO: 2143855 - RNA, 19 nt, Artificial Sequence
  Description of Artificial Sequence: Synthetic oligonucleotide
uggugagauucgcucucag

SEQ ID NO: 2143856 - RNA, 19 nt, Artificial Sequence
  Description of Artificial Sequence: Synthetic oligonucleotide
acucgugguccuccaucgc

SEQ ID NO: 2143857 - RNA, 19 nt, Artificial Sequence
  Description of Artificial Sequence: Synthetic oligonucleotide
gaccacauagaagggcuug

SEQ ID NO: 2143858 - RNA, 19 nt, Artificial Sequence
  Description of Artificial Sequence: Synthetic oligonucleotide
cuuugucucucuucaagaa

SEQ ID NO: 2143859 - RNA, 19 nt, Artificial Sequence
  Description of Artificial Sequence: Synthetic oligonucleotide
caaggacggggaaguauag

SEQ ID NO: 2143860 - RNA, 19 nt, Artificial Sequence
  Description of Artificial Sequence: Synthetic oligonucleotide
gaggaguccacacuacaua

SEQ ID NO: 2143861 - RNA, 19 nt, Artificial Sequence
  Description of Artificial Sequence: Synthetic oligonucleotide
uucccggauaaaucaggcu

SEQ ID NO: 2143862 - RNA, 19 nt, Artificial Sequence
  Description of Artificial Sequence: Synthetic oligonucleotide
gagccguacaaacuugaaa

SEQ ID NO: 2143863 - RNA, 19 nt, Artificial Sequence
  Description of Artificial Sequence: Synthetic oligonucleotide
cugaaccgcuucuuggcug

SEQ ID NO: 2143864 - RNA, 19 nt, Artificial Sequence
  Description of Artificial Sequence: Synthetic oligonucleotide
ccgaucuuguuaauaauuc

SEQ ID NO: 2143865 - RNA, 19 nt, Artificial Sequence
  Description of Artificial Sequence: Synthetic oligonucleotide
gguggcauagggcuuuggc

SEQ ID NO: 2143866 - RNA, 19 nt, Artificial Sequence
  Description of Artificial Sequence: Synthetic oligonucleotide
cuucaagaacuccagcaaa

SEQ ID NO: 2143867 - RNA, 19 nt, Artificial Sequence
  Description of Artificial Sequence: Synthetic oligonucleotide
cugugauauacacacugaa

SEQ ID NO: 2143868 - RNA, 19 nt, Artificial Sequence
  Description of Artificial Sequence: Synthetic oligonucleotide
uaauuccuccguucucaac

SEQ ID NO: 2143869 - RNA, 19 nt, Artificial Sequence
  Description of Artificial Sequence: Synthetic oligonucleotide
aggaacauugagguggcau

SEQ ID NO: 2143870 - RNA, 19 nt, Artificial Sequence
  Description of Artificial Sequence: Synthetic oligonucleotide
auaauuccuccguucucaa

SEQ ID NO: 2143871 - RNA, 19 nt, Artificial Sequence
  Description of Artificial Sequence: Synthetic oligonucleotide
uucgcucucaggcccugga

SEQ ID NO: 2143872 - RNA, 19 nt, Artificial Sequence
  Description of Artificial Sequence: Synthetic oligonucleotide
guucucaaccacuccuuca

SEQ ID NO: 2143873 - RNA, 19 nt, Artificial Sequence
  Description of Artificial Sequence: Synthetic oligonucleotide
ucaggacaacucuggagua

SEQ ID NO: 2143874 - RNA, 19 nt, Artificial Sequence
  Description of Artificial Sequence: Synthetic oligonucleotide
uccacacuacauaggguuu

SEQ ID NO: 2143875 - RNA, 19 nt, Artificial Sequence
  Description of Artificial Sequence: Synthetic oligonucleotide
guaagacugaugaaucgaa

SEQ ID NO: 2143876 - RNA, 19 nt, Artificial Sequence
  Description of Artificial Sequence: Synthetic oligonucleotide
gucugccuuguacuuaaac

SEQ ID NO: 2143877 - RNA, 19 nt, Artificial Sequence
  Description of Artificial Sequence: Synthetic oligonucleotide
gacaacucuggaguaggca

SEQ ID NO: 2143878 - RNA, 19 nt, Artificial Sequence
  Description of Artificial Sequence: Synthetic oligonucleotide
gaggaaaagcuccccucuc

SEQ ID NO: 2143879 - RNA, 19 nt, Artificial Sequence
  Description of Artificial Sequence: Synthetic oligonucleotide
auggcgucagcacacccaa

SEQ ID NO: 2143880 - RNA, 19 nt, Artificial Sequence
  Description of Artificial Sequence: Synthetic oligonucleotide
uauacacacugaaccgcuu

SEQ ID NO: 2143881 - RNA, 19 nt, Artificial Sequence
  Description of Artificial Sequence: Synthetic oligonucleotide
ucgugguccuccaucgcuc

SEQ ID NO: 2143882 - RNA, 19 nt, Artificial Sequence
  Description of Artificial Sequence: Synthetic oligonucleotide
ggggaaguauaguccaccc

SEQ ID NO: 2143883 - RNA, 19 nt, Artificial Sequence
  Description of Artificial Sequence: Synthetic oligonucleotide
guucaucgcuuacagcaga

SEQ ID NO: 2143884 - RNA, 19 nt, Artificial Sequence
  Description of Artificial Sequence: Synthetic oligonucleotide
uuaacucgugguccuccau

SEQ ID NO: 2143885 - RNA, 19 nt, Artificial Sequence
  Description of Artificial Sequence: Synthetic oligonucleotide
ugagugggaagagccguac

SEQ ID NO: 2143886 - RNA, 19 nt, Artificial Sequence
  Description of Artificial Sequence: Synthetic oligonucleotide
ggcagcuacagcugaggcc

SEQ ID NO: 2143887 - RNA, 19 nt, Artificial Sequence
  Description of Artificial Sequence: Synthetic oligonucleotide
aggcaugagucaaaauucu

SEQ ID NO: 2143888 - RNA, 19 nt, Artificial Sequence
  Description of Artificial Sequence: Synthetic oligonucleotide
caucugguugguuccgauc

SEQ ID NO: 2143889 - RNA, 19 nt, Artificial Sequence
  Description of Artificial Sequence: Synthetic oligonucleotide
guccacacuacauaggguu

SEQ ID NO: 2143890 - RNA, 19 nt, Artificial Sequence
  Description of Artificial Sequence: Synthetic oligonucleotide
aguaggcaugagucaaaau

SEQ ID NO: 2143891 - RNA, 19 nt, Artificial Sequence
  Description of Artificial Sequence: Synthetic oligonucleotide
uuacagcagauggcgucag

SEQ ID NO: 2143892 - RNA, 19 nt, Artificial Sequence
  Description of Artificial Sequence: Synthetic oligonucleotide
aggacccucaggacaacuc

SEQ ID NO: 2143893 - RNA, 19 nt, Artificial Sequence
  Description of Artificial Sequence: Synthetic oligonucleotide
uugagugggaagagccgua

SEQ ID NO: 2143894 - RNA, 19 nt, Artificial Sequence
  Description of Artificial Sequence: Synthetic oligonucleotide
auaguccacccacgggugu

SEQ ID NO: 2143895 - RNA, 19 nt, Artificial Sequence
  Description of Artificial Sequence: Synthetic oligonucleotide
aucaaggacggggaaguau

SEQ ID NO: 2143896 - RNA, 19 nt, Artificial Sequence
  Description of Artificial Sequence: Synthetic oligonucleotide
gcaggguaaucaaggacgg

SEQ ID NO: 2143897 - RNA, 19 nt, Artificial Sequence
  Description of Artificial Sequence: Synthetic oligonucleotide
aguccguaaacagcagggu

SEQ ID NO: 2143898 - RNA, 19 nt, Artificial Sequence
  Description of Artificial Sequence: Synthetic oligonucleotide
ggguguuccucuuugaggu

SEQ ID NO: 2143899 - RNA, 19 nt, Artificial Sequence
  Description of Artificial Sequence: Synthetic oligonucleotide
gcuuacagcagauggcguc

SEQ ID NO: 2143900 - RNA, 19 nt, Artificial Sequence
  Description of Artificial Sequence: Synthetic oligonucleotide
auagguccgcaauuuuguu

SEQ ID NO: 2143901 - RNA, 19 nt, Artificial Sequence
  Description of Artificial Sequence: Synthetic oligonucleotide
gcaaagugcggauggcagc

SEQ ID NO: 2143902 - RNA, 19 nt, Artificial Sequence
  Description of Artificial Sequence: Synthetic oligonucleotide
aggccauguuaggaucgcc

SEQ ID NO: 2143903 - RNA, 19 nt, Artificial Sequence
  Description of Artificial Sequence: Synthetic oligonucleotide
cugcgaccacauagaaggg

SEQ ID NO: 2143904 - RNA, 19 nt, Artificial Sequence
  Description of Artificial Sequence: Synthetic oligonucleotide
ggaacauugagguggcaua

SEQ ID NO: 2143905 - RNA, 19 nt, Artificial Sequence
  Description of Artificial Sequence: Synthetic oligonucleotide
cugccuuguacuuaaacuu

SEQ ID NO: 2143906 - RNA, 19 nt, Artificial Sequence
  Description of Artificial Sequence: Synthetic oligonucleotide
cacacccaaguccguaaac

SEQ ID NO: 2143907 - RNA, 19 nt, Artificial Sequence
  Description of Artificial Sequence: Synthetic oligonucleotide
gcauagguccgcaauuuug

SEQ ID NO: 2143908 - RNA, 19 nt, Artificial Sequence
  Description of Artificial Sequence: Synthetic oligonucleotide
caccaacuaugacaagauc

SEQ ID NO: 2143909 - RNA, 19 nt, Artificial Sequence
  Description of Artificial Sequence: Synthetic oligonucleotide
auguuaggaucgccuuuca

SEQ ID NO: 2143910 - RNA, 19 nt, Artificial Sequence
  Description of Artificial Sequence: Synthetic oligonucleotide
ggaguccacacuacauagg

SEQ ID NO: 2143911 - RNA, 19 nt, Artificial Sequence
  Description of Artificial Sequence: Synthetic oligonucleotide
ugagguggcauagggcuuu

SEQ ID NO: 2143912 - RNA, 19 nt, Artificial Sequence
  Description of Artificial Sequence: Synthetic oligonucleotide
ggacggggaaguauagucc

SEQ ID NO: 2143913 - RNA, 19 nt, Artificial Sequence
  Description of Artificial Sequence: Synthetic oligonucleotide
guccguaaacagcagggua

SEQ ID NO: 2143914 - RNA, 19 nt, Artificial Sequence
  Description of Artificial Sequence: Synthetic oligonucleotide
ucugguugguuccgaucuu

SEQ ID NO: 2143915 - RNA, 19 nt, Artificial Sequence
  Description of Artificial Sequence: Synthetic oligonucleotide
ggagguaagacugaugaau

SEQ ID NO: 2143916 - RNA, 19 nt, Artificial Sequence
  Description of Artificial Sequence: Synthetic oligonucleotide
gaggccauguuaggaucgc

SEQ ID NO: 2143917 - RNA, 19 nt, Artificial Sequence
  Description of Artificial Sequence: Synthetic oligonucleotide
cuccguucucaaccacucc

SEQ ID NO: 2143918 - RNA, 19 nt, Artificial Sequence
  Description of Artificial Sequence: Synthetic oligonucleotide
acggaggaguccacacuac

SEQ ID NO: 2143919 - RNA, 19 nt, Artificial Sequence
  Description of Artificial Sequence: Synthetic oligonucleotide
uggcauagguccgcaauuu

SEQ ID NO: 2143920 - RNA, 19 nt, Artificial Sequence
  Description of Artificial Sequence: Synthetic oligonucleotide
cuugaugaguucaucgcuu

SEQ ID NO: 2143921 - RNA, 19 nt, Artificial Sequence
  Description of Artificial Sequence: Synthetic oligonucleotide
agcuccccucucucaauca

SEQ ID NO: 2143922 - RNA, 19 nt, Artificial Sequence
  Description of Artificial Sequence: Synthetic oligonucleotide
ggaagagccguacaaacuu

SEQ ID NO: 2143923 - RNA, 19 nt, Artificial Sequence
  Description of Artificial Sequence: Synthetic oligonucleotide
acgacacggccacggagga

SEQ ID NO: 2143924 - RNA, 19 nt, Artificial Sequence
  Description of Artificial Sequence: Synthetic oligonucleotide
acggccacggaggagucca

SEQ ID NO: 2143925 - RNA, 19 nt, Artificial Sequence
  Description of Artificial Sequence: Synthetic oligonucleotide
gaacuccagcaaagugcgg

SEQ ID NO: 2143926 - RNA, 19 nt, Artificial Sequence
  Description of Artificial Sequence: Synthetic oligonucleotide
gagcucuccaccagacgac

SEQ ID NO: 2143927 - RNA, 19 nt, Artificial Sequence
  Description of Artificial Sequence: Synthetic oligonucleotide
guuuugggcuuuggcacac

SEQ ID NO: 2143928 - RNA, 19 nt, Artificial Sequence
  Description of Artificial Sequence: Synthetic oligonucleotide
acggggaaguauaguccac

SEQ ID NO: 2143929 - RNA, 19 nt, Artificial Sequence
  Description of Artificial Sequence: Synthetic oligonucleotide
cacuacauaggguuucuau

SEQ ID NO: 2143930 - RNA, 19 nt, Artificial Sequence
  Description of Artificial Sequence: Synthetic oligonucleotide
caggguaaucaaggacggg

SEQ ID NO: 2143931 - RNA, 19 nt, Artificial Sequence
  Description of Artificial Sequence: Synthetic oligonucleotide
aguccacccacggguguuc

SEQ ID NO: 2143932 - RNA, 19 nt, Artificial Sequence
  Description of Artificial Sequence: Synthetic oligonucleotide
gacuucagagugucugccu

SEQ ID NO: 2143933 - RNA, 19 nt, Artificial Sequence
  Description of Artificial Sequence: Synthetic oligonucleotide
cacggaggaguccacacua

SEQ ID NO: 2143934 - RNA, 19 nt, Artificial Sequence
  Description of Artificial Sequence: Synthetic oligonucleotide
agccaucugguugguuccg

SEQ ID NO: 2143935 - RNA, 19 nt, Artificial Sequence
  Description of Artificial Sequence: Synthetic oligonucleotide
gguaaucaaggacggggaa

SEQ ID NO: 2143936 - RNA, 19 nt, Artificial Sequence
  Description of Artificial Sequence: Synthetic oligonucleotide
gaucgccuuucaucugaga

SEQ ID NO: 2143937 - RNA, 19 nt, Artificial Sequence
  Description of Artificial Sequence: Synthetic oligonucleotide
gggaaguauaguccaccca

SEQ ID NO: 2143938 - RNA, 19 nt, Artificial Sequence
  Description of Artificial Sequence: Synthetic oligonucleotide
aaucaaggacggggaagua

SEQ ID NO: 2143939 - RNA, 19 nt, Artificial Sequence
  Description of Artificial Sequence: Synthetic oligonucleotide
uggaguggacucugcucau

SEQ ID NO: 2143940 - RNA, 19 nt, Artificial Sequence
  Description of Artificial Sequence: Synthetic oligonucleotide
cuuuggcacacacagccau

SEQ ID NO: 2143941 - RNA, 19 nt, Artificial Sequence
  Description of Artificial Sequence: Synthetic oligonucleotide
agcucuccaccagacgaca

SEQ ID NO: 2143942 - RNA, 19 nt, Artificial Sequence
  Description of Artificial Sequence: Synthetic oligonucleotide
uggcgucagcacacccaag

SEQ ID NO: 2143943 - RNA, 19 nt, Artificial Sequence
  Description of Artificial Sequence: Synthetic oligonucleotide
ccuuguacuuaaacuuauc

SEQ ID NO: 2143944 - RNA, 19 nt, Artificial Sequence
  Description of Artificial Sequence: Synthetic oligonucleotide
aacuuaucugggacaucuu

SEQ ID NO: 2143945 - RNA, 19 nt, Artificial Sequence
  Description of Artificial Sequence: Synthetic oligonucleotide
ccagacgacacggccacgg

SEQ ID NO: 2143946 - RNA, 19 nt, Artificial Sequence
  Description of Artificial Sequence: Synthetic oligonucleotide
ucagagugucugccuugua

SEQ ID NO: 2143947 - RNA, 19 nt, Artificial Sequence
  Description of Artificial Sequence: Synthetic oligonucleotide
aaccgcuucuuggcugcca

SEQ ID NO: 2143948 - RNA, 19 nt, Artificial Sequence
  Description of Artificial Sequence: Synthetic oligonucleotide
agcgagugccaggauggcu

SEQ ID NO: 2143949 - RNA, 19 nt, Artificial Sequence
  Description of Artificial Sequence: Synthetic oligonucleotide
gccauuuucuucccggaua

SEQ ID NO: 2143950 - RNA, 19 nt, Artificial Sequence
  Description of Artificial Sequence: Synthetic oligonucleotide
gcagauggcgucagcacac

SEQ ID NO: 2143951 - RNA, 19 nt, Artificial Sequence
  Description of Artificial Sequence: Synthetic oligonucleotide
ggguaaucaaggacgggga

SEQ ID NO: 2143952 - RNA, 19 nt, Artificial Sequence
  Description of Artificial Sequence: Synthetic oligonucleotide
cauuuggaguaaucagagu

SEQ ID NO: 2143953 - RNA, 19 nt, Artificial Sequence
  Description of Artificial Sequence: Synthetic oligonucleotide
cagauggcgucagcacacc

SEQ ID NO: 2143954 - RNA, 19 nt, Artificial Sequence
  Description of Artificial Sequence: Synthetic oligonucleotide
caaagugcggauggcagcu

SEQ ID NO: 2143955 - RNA, 19 nt, Artificial Sequence
  Description of Artificial Sequence: Synthetic oligonucleotide
ccuccguucucaaccacuc

SEQ ID NO: 2143956 - RNA, 19 nt, Artificial Sequence
  Description of Artificial Sequence: Synthetic oligonucleotide
gugggaagagccguacaaa

SEQ ID NO: 2143957 - RNA, 19 nt, Artificial Sequence
  Description of Artificial Sequence: Synthetic oligonucleotide
ggauggcuggaguggacuc

SEQ ID NO: 2143958 - RNA, 19 nt, Artificial Sequence
  Description of Artificial Sequence: Synthetic oligonucleotide
ugucugccuuguacuuaaa

SEQ ID NO: 2143959 - RNA, 19 nt, Artificial Sequence
  Description of Artificial Sequence: Synthetic oligonucleotide
agagccguacaaacuugaa

SEQ ID NO: 2143960 - RNA, 19 nt, Artificial Sequence
  Description of Artificial Sequence: Synthetic oligonucleotide
cucuggaguaggcaugagu

SEQ ID NO: 2143961 - RNA, 19 nt, Artificial Sequence
  Description of Artificial Sequence: Synthetic oligonucleotide
ccuuucaucugagacuuga

SEQ ID NO: 2143962 - RNA, 19 nt, Artificial Sequence
  Description of Artificial Sequence: Synthetic oligonucleotide
aaagugcggauggcagcua

SEQ ID NO: 2143963 - RNA, 19 nt, Artificial Sequence
  Description of Artificial Sequence: Synthetic oligonucleotide
ggcgucagcacacccaagu

SEQ ID NO: 2143964 - RNA, 19 nt, Artificial Sequence
  Description of Artificial Sequence: Synthetic oligonucleotide
gccacggaggaguccacac

SEQ ID NO: 2143965 - RNA, 19 nt, Artificial Sequence
  Description of Artificial Sequence: Synthetic oligonucleotide
cuaugacaagaucugccuu

SEQ ID NO: 2143966 - RNA, 19 nt, Artificial Sequence
  Description of Artificial Sequence: Synthetic oligonucleotide
cucgugguccuccaucgcu

SEQ ID NO: 2143967 - RNA, 19 nt, Artificial Sequence
  Description of Artificial Sequence: Synthetic oligonucleotide
uaguccacccacggguguu

SEQ ID NO: 2143968 - RNA, 19 nt, Artificial Sequence
  Description of Artificial Sequence: Synthetic oligonucleotide
gccguacaaacuugaaacu

SEQ ID NO: 2143969 - RNA, 19 nt, Artificial Sequence
  Description of Artificial Sequence: Synthetic oligonucleotide
guauggcauagguccgcaa

SEQ ID NO: 2143970 - RNA, 19 nt, Artificial Sequence
  Description of Artificial Sequence: Synthetic oligonucleotide
aggcugagacucugugaua

SEQ ID NO: 2143971 - RNA, 19 nt, Artificial Sequence
  Description of Artificial Sequence: Synthetic oligonucleotide
ggacaacucuggaguaggc

SEQ ID NO: 2143972 - RNA, 19 nt, Artificial Sequence
  Description of Artificial Sequence: Synthetic oligonucleotide
cagaguacuccagggaggu

SEQ ID NO: 2143973 - RNA, 19 nt, Artificial Sequence
  Description of Artificial Sequence: Synthetic oligonucleotide
ggaucgccuuucaucugag

SEQ ID NO: 2143974 - RNA, 19 nt, Artificial Sequence
  Description of Artificial Sequence: Synthetic oligonucleotide
gaaccgcuucuuggcugcc

SEQ ID NO: 2143975 - RNA, 19 nt, Artificial Sequence
  Description of Artificial Sequence: Synthetic oligonucleotide
cacggguguuccucuuuga

SEQ ID NO: 2143976 - RNA, 19 nt, Artificial Sequence
  Description of Artificial Sequence: Synthetic oligonucleotide
gggagguaagacugaugaa

SEQ ID NO: 2143977 - RNA, 19 nt, Artificial Sequence
  Description of Artificial Sequence: Synthetic oligonucleotide
gagguggcauagggcuuug

SEQ ID NO: 2143978 - RNA, 19 nt, Artificial Sequence
  Description of Artificial Sequence: Synthetic oligonucleotide
gguauggcauagguccgca

SEQ ID NO: 2143979 - RNA, 19 nt, Artificial Sequence
  Description of Artificial Sequence: Synthetic oligonucleotide
ccacacuacauaggguuuc

SEQ ID NO: 2143980 - RNA, 19 nt, Artificial Sequence
  Description of Artificial Sequence: Synthetic oligonucleotide
ggcugagacucugugauau

SEQ ID NO: 2143981 - RNA, 19 nt, Artificial Sequence
  Description of Artificial Sequence: Synthetic oligonucleotide
gcgucagcacacccaaguc

SEQ ID NO: 2143982 - RNA, 19 nt, Artificial Sequence
  Description of Artificial Sequence: Synthetic oligonucleotide
ccacggguguuccucuuug

SEQ ID NO: 2143983 - RNA, 19 nt, Artificial Sequence
  Description of Artificial Sequence: Synthetic oligonucleotide
cuggugagauucgcucuca

SEQ ID NO: 2143984 - RNA, 19 nt, Artificial Sequence
  Description of Artificial Sequence: Synthetic oligonucleotide
ccaccagacgacacggcca

SEQ ID NO: 2143985 - RNA, 19 nt, Artificial Sequence
  Description of Artificial Sequence: Synthetic oligonucleotide
gucaaaauucucgccccau

SEQ ID NO: 2143986 - RNA, 19 nt, Artificial Sequence
  Description of Artificial Sequence: Synthetic oligonucleotide
acacuacauaggguuucua

SEQ ID NO: 2143987 - RNA, 19 nt, Artificial Sequence
  Description of Artificial Sequence: Synthetic oligonucleotide
cagacgacacggccacgga

SEQ ID NO: 2143988 - RNA, 19 nt, Artificial Sequence
  Description of Artificial Sequence: Synthetic oligonucleotide
gcgaccacauagaagggcu

SEQ ID NO: 2143989 - RNA, 19 nt, Artificial Sequence
  Description of Artificial Sequence: Synthetic oligonucleotide
ggcccuggagugucucccc

SEQ ID NO: 2143990 - RNA, 19 nt, Artificial Sequence
  Description of Artificial Sequence: Synthetic oligonucleotide
cugcucauagguacagcuu

SEQ ID NO: 2143991 - RNA, 19 nt, Artificial Sequence
  Description of Artificial Sequence: Synthetic oligonucleotide
gggaagagccguacaaacu

SEQ ID NO: 2143992 - RNA, 19 nt, Artificial Sequence
  Description of Artificial Sequence: Synthetic oligonucleotide
cacggccacggaggagucc

SEQ ID NO: 2143993 - RNA, 19 nt, Artificial Sequence
  Description of Artificial Sequence: Synthetic oligonucleotide
cacacuacauaggguuucu

SEQ ID NO: 2143994 - RNA, 19 nt, Artificial Sequence
  Description of Artificial Sequence: Synthetic oligonucleotide
ggaguaggcaugagucaaa

SEQ ID NO: 2143995 - RNA, 19 nt, Artificial Sequence
  Description of Artificial Sequence: Synthetic oligonucleotide
ggaggaguccacacuacau

SEQ ID NO: 2143996 - RNA, 19 nt, Artificial Sequence
  Description of Artificial Sequence: Synthetic oligonucleotide
agaguacuccagggaggua

SEQ ID NO: 2143997 - RNA, 19 nt, Artificial Sequence
  Description of Artificial Sequence: Synthetic oligonucleotide
ccgcaauuuuguuccuuga

SEQ ID NO: 2143998 - RNA, 19 nt, Artificial Sequence
  Description of Artificial Sequence: Synthetic oligonucleotide
gcuacagcugaggccaugu

SEQ ID NO: 2143999 - RNA, 19 nt, Artificial Sequence
  Description of Artificial Sequence: Synthetic oligonucleotide
ccugaggaaaagcuccccu

SEQ ID NO: 2144000 - RNA, 19 nt, Artificial Sequence
  Description of Artificial Sequence: Synthetic oligonucleotide
ggguuucuauggcacuggu

SEQ ID NO: 2144001 - RNA, 19 nt, Artificial Sequence
  Description of Artificial Sequence: Synthetic oligonucleotide
gagugccaggauggcugga

SEQ ID NO: 2144002 - RNA, 19 nt, Artificial Sequence
  Description of Artificial Sequence: Synthetic oligonucleotide
ccacccacggguguuccuc

SEQ ID NO: 2144003 - RNA, 19 nt, Artificial Sequence
  Description of Artificial Sequence: Synthetic oligonucleotide
cagcacacccaaguccgua

SEQ ID NO: 2144004 - RNA, 19 nt, Artificial Sequence
  Description of Artificial Sequence: Synthetic oligonucleotide
gccuuguacuuaaacuuau

SEQ ID NO: 2144005 - RNA, 19 nt, Artificial Sequence
  Description of Artificial Sequence: Synthetic oligonucleotide
ggcauagggcuuuggccau

SEQ ID NO: 2144006 - RNA, 19 nt, Artificial Sequence
  Description of Artificial Sequence: Synthetic oligonucleotide
cacccacggguguuccucu

SEQ ID NO: 2144007 - RNA, 19 nt, Artificial Sequence
  Description of Artificial Sequence: Synthetic oligonucleotide
caggaacauugagguggca

SEQ ID NO: 2144008 - RNA, 19 nt, Artificial Sequence
  Description of Artificial Sequence: Synthetic oligonucleotide
ccguacaaacuugaaacuu

SEQ ID NO: 2144009 - RNA, 19 nt, Artificial Sequence
  Description of Artificial Sequence: Synthetic oligonucleotide
cauagggcuuuggccauuu

SEQ ID NO: 2144010 - RNA, 19 nt, Artificial Sequence
  Description of Artificial Sequence: Synthetic oligonucleotide
ggccacggaggaguccaca

SEQ ID NO: 2144011 - RNA, 19 nt, Artificial Sequence
  Description of Artificial Sequence: Synthetic oligonucleotide
caggacccucaggacaacu

SEQ ID NO: 2144012 - RNA, 19 nt, Artificial Sequence
  Description of Artificial Sequence: Synthetic oligonucleotide
gccuuucaucugagacuug

SEQ ID NO: 2144013 - RNA, 19 nt, Artificial Sequence
  Description of Artificial Sequence: Synthetic oligonucleotide
gguccgcaauuuuguuccu

SEQ ID NO: 2144014 - RNA, 19 nt, Artificial Sequence
  Description of Artificial Sequence: Synthetic oligonucleotide
cagcagcauccagcaccac

SEQ ID NO: 2144015 - RNA, 19 nt, Artificial Sequence
  Description of Artificial Sequence: Synthetic oligonucleotide
ccauguuaggaucgccuuu

SEQ ID NO: 2144016 - RNA, 19 nt, Artificial Sequence
  Description of Artificial Sequence: Synthetic oligonucleotide
gguccugcccagucugcuu

SEQ ID NO: 2144017 - RNA, 19 nt, Artificial Sequence
  Description of Artificial Sequence: Synthetic oligonucleotide
ccacggaggaguccacacu

SEQ ID NO: 2144018 - RNA, 19 nt, Artificial Sequence
  Description of Artificial Sequence: Synthetic oligonucleotide
ccguucucaaccacuccuu

SEQ ID NO: 2144019 - RNA, 19 nt, Artificial Sequence
  Description of Artificial Sequence: Synthetic oligonucleotide
ccaggacccucaggacaac

SEQ ID NO: 2144020 - RNA, 19 nt, Artificial Sequence
  Description of Artificial Sequence: Synthetic oligonucleotide
cggauaaaucaggcugaga

SEQ ID NO: 2144021 - RNA, 19 nt, Artificial Sequence
  Description of Artificial Sequence: Synthetic oligonucleotide
ccaucugguugguuccgau

SEQ ID NO: 2144022 - RNA, 19 nt, Artificial Sequence
  Description of Artificial Sequence: Synthetic oligonucleotide
ccguaaacagcaggguaau

SEQ ID NO: 2144023 - RNA, 19 nt, Artificial Sequence
  Description of Artificial Sequence: Synthetic oligonucleotide
ccuggagugucuccccuuu

SEQ ID NO: 2144024 - RNA, 19 nt, Artificial Sequence
  Description of Artificial Sequence: Synthetic oligonucleotide
gcauagggcuuuggccauu

SEQ ID NO: 2144025 - RNA, 19 nt, Artificial Sequence
  Description of Artificial Sequence: Synthetic oligonucleotide
cccacggguguuccucuuu

SEQ ID NO: 2144026 - RNA, 19 nt, Artificial Sequence
  Description of Artificial Sequence: Synthetic oligonucleotide
ccccucucucaaucaugau

SEQ ID NO: 2144027 - RNA, 19 nt, Artificial Sequence
  Description of Artificial Sequence: Synthetic oligonucleotide
uacauagagaaauaaauag

SEQ ID NO: 2144028 - RNA, 19 nt, Artificial Sequence
  Description of Artificial Sequence: Synthetic oligonucleotide
aauaaauagacaacacacc

SEQ ID NO: 2144029 - RNA, 19 nt, Artificial Sequence
  Description of Artificial Sequence: Synthetic oligonucleotide
aaauauugcacucgugugg

SEQ ID NO: 2144030 - RNA, 19 nt, Artificial Sequence
  Description of Artificial Sequence: Synthetic oligonucleotide
uuuacauagagaaauaaau

SEQ ID NO: 2144031 - RNA, 19 nt, Artificial Sequence
  Description of Artificial Sequence: Synthetic oligonucleotide
aaauagacaacacaccuga

SEQ ID NO: 2144032 - RNA, 19 nt, Artificial Sequence
  Description of Artificial Sequence: Synthetic oligonucleotide
ugcauauuugcucagacca

SEQ ID NO: 2144033 - RNA, 19 nt, Artificial Sequence
  Description of Artificial Sequence: Synthetic oligonucleotide
ugaaauauugcacucgugu

SEQ ID NO: 2144034 - RNA, 19 nt, Artificial Sequence
  Description of Artificial Sequence: Synthetic oligonucleotide
auucuuuccaucuugggag

SEQ ID NO: 2144035 - RNA, 19 nt, Artificial Sequence
  Description of Artificial Sequence: Synthetic oligonucleotide
aacagaaagccucagggug

SEQ ID NO: 2144036 - RNA, 19 nt, Artificial Sequence
  Description of Artificial Sequence: Synthetic oligonucleotide
auaaauagacaacacaccu

SEQ ID NO: 2144037 - RNA, 19 nt, Artificial Sequence
  Description of Artificial Sequence: Synthetic oligonucleotide
uuagugagagaaaugaagu

SEQ ID NO: 2144038 - RNA, 19 nt, Artificial Sequence
  Description of Artificial Sequence: Synthetic oligonucleotide
aacugggacagauacuugg

SEQ ID NO: 2144039 - RNA, 19 nt, Artificial Sequence
  Description of Artificial Sequence: Synthetic oligonucleotide
aaugaaauauugcacucgu

SEQ ID NO: 2144040 - RNA, 19 nt, Artificial Sequence
  Description of Artificial Sequence: Synthetic oligonucleotide
agagaaaugaagucccugg

SEQ ID NO: 2144041 - RNA, 19 nt, Artificial Sequence
  Description of Artificial Sequence: Synthetic oligonucleotide
ugagcaauuagugagagaa

SEQ ID NO: 2144042 - RNA, 19 nt, Artificial Sequence
  Description of Artificial Sequence: Synthetic oligonucleotide
uauucuuuccaucuuggga

SEQ ID NO: 2144043 - RNA, 19 nt, Artificial Sequence
  Description of Artificial Sequence: Synthetic oligonucleotide
auacaauauuuacauagag

SEQ ID NO: 2144044 - RNA, 19 nt, Artificial Sequence
  Description of Artificial Sequence: Synthetic oligonucleotide
ugagcagugacuuccaaca

SEQ ID NO: 2144045 - RNA, 19 nt, Artificial Sequence
  Description of Artificial Sequence: Synthetic oligonucleotide
uaaauagacaacacaccug

SEQ ID NO: 2144046 - RNA, 19 nt, Artificial Sequence
  Description of Artificial Sequence: Synthetic oligonucleotide
ucguguggagaacagaaag

SEQ ID NO: 2144047 - RNA, 19 nt, Artificial Sequence
  Description of Artificial Sequence: Synthetic oligonucleotide
gaaaugaagucccuggaac

SEQ ID NO: 2144048 - RNA, 19 nt, Artificial Sequence
  Description of Artificial Sequence: Synthetic oligonucleotide
gagcaugugcgcuacaagg

SEQ ID NO: 2144049 - RNA, 19 nt, Artificial Sequence
  Description of Artificial Sequence: Synthetic oligonucleotide
gaaauauugcacucgugug

SEQ ID NO: 2144050 - RNA, 19 nt, Artificial Sequence
  Description of Artificial Sequence: Synthetic oligonucleotide
ggaaauauggcuuggauuc

SEQ ID NO: 2144051 - RNA, 19 nt, Artificial Sequence
  Description of Artificial Sequence: Synthetic oligonucleotide
aggacaaaggccuucgguc

SEQ ID NO: 2144052 - RNA, 19 nt, Artificial Sequence
  Description of Artificial Sequence: Synthetic oligonucleotide
auuagugagagaaaugaag

SEQ ID NO: 2144053 - RNA, 19 nt, Artificial Sequence
  Description of Artificial Sequence: Synthetic oligonucleotide
auggcuuggauucuaaucu

SEQ ID NO: 2144054 - RNA, 19 nt, Artificial Sequence
  Description of Artificial Sequence: Synthetic oligonucleotide
auucuaaucucucgagaac

SEQ ID NO: 2144055 - RNA, 19 nt, Artificial Sequence
  Description of Artificial Sequence: Synthetic oligonucleotide
agcagagggagaaagaaac

SEQ ID NO: 2144056 - RNA, 19 nt, Artificial Sequence
  Description of Artificial Sequence: Synthetic oligonucleotide
agcagugacuuccaacacc

SEQ ID NO: 2144057 - RNA, 19 nt, Artificial Sequence
  Description of Artificial Sequence: Synthetic oligonucleotide
gaaugaaauauugcacucg

SEQ ID NO: 2144058 - RNA, 19 nt, Artificial Sequence
  Description of Artificial Sequence: Synthetic oligonucleotide
agaacuucgaggagaagcc

SEQ ID NO: 2144059 - RNA, 19 nt, Artificial Sequence
  Description of Artificial Sequence: Synthetic oligonucleotide
gagaacuucgaggagaagc

SEQ ID NO: 2144060 - RNA, 19 nt, Artificial Sequence
  Description of Artificial Sequence: Synthetic oligonucleotide
acucuugucgcacacccac

SEQ ID NO: 2144061 - RNA, 19 nt, Artificial Sequence
  Description of Artificial Sequence: Synthetic oligonucleotide
cucaccaucuuccugauuc

SEQ ID NO: 2144062 - RNA, 19 nt, Artificial Sequence
  Description of Artificial Sequence: Synthetic oligonucleotide
uugggagaagaaagggucg

SEQ ID NO: 2144063 - RNA, 19 nt, Artificial Sequence
  Description of Artificial Sequence: Synthetic oligonucleotide
aaugggguacccuugguua

SEQ ID NO: 2144064 - RNA, 19 nt, Artificial Sequence
  Description of Artificial Sequence: Synthetic oligonucleotide
gugagcgggaccuuggugg

SEQ ID NO: 2144065 - RNA, 19 nt, Artificial Sequence
  Description of Artificial Sequence: Synthetic oligonucleotide
aucgcuuccgaugaccucc

SEQ ID NO: 2144066 - RNA, 19 nt, Artificial Sequence
  Description of Artificial Sequence: Synthetic oligonucleotide
gauucuaaucucucgagaa

SEQ ID NO: 2144067 - RNA, 19 nt, Artificial Sequence
  Description of Artificial Sequence: Synthetic oligonucleotide
agaggggacccacacacac

SEQ ID NO: 2144068 - RNA, 19 nt, Artificial Sequence
  Description of Artificial Sequence: Synthetic oligonucleotide
aaucucucgagaacugugg

SEQ ID NO: 2144069 - RNA, 19 nt, Artificial Sequence
  Description of Artificial Sequence: Synthetic oligonucleotide
agguacuagggaaauaugg

SEQ ID NO: 2144070 - RNA, 19 nt, Artificial Sequence
  Description of Artificial Sequence: Synthetic oligonucleotide
acuuuccugguacaugagg

SEQ ID NO: 2144071 - RNA, 19 nt, Artificial Sequence
  Description of Artificial Sequence: Synthetic oligonucleotide
uuauccuggggccaccaag

SEQ ID NO: 2144072 - RNA, 19 nt, Artificial Sequence
  Description of Artificial Sequence: Synthetic oligonucleotide
uauggcuuggauucuaauc

SEQ ID NO: 2144073 - RNA, 19 nt, Artificial Sequence
  Description of Artificial Sequence: Synthetic oligonucleotide
auagccuauucuuuccauc

SEQ ID NO: 2144074 - RNA, 19 nt, Artificial Sequence
  Description of Artificial Sequence: Synthetic oligonucleotide
aggggacccacacacacac

SEQ ID NO: 2144075 - RNA, 19 nt, Artificial Sequence
  Description of Artificial Sequence: Synthetic oligonucleotide
gaaacauccagaaggcggc

SEQ ID NO: 2144076 - RNA, 19 nt, Artificial Sequence
  Description of Artificial Sequence: Synthetic oligonucleotide
ucuaaucucucgagaacug

SEQ ID NO: 2144077 - RNA, 19 nt, Artificial Sequence
  Description of Artificial Sequence: Synthetic oligonucleotide
aagaaagggucgcuggacu

SEQ ID NO: 2144078 - RNA, 19 nt, Artificial Sequence
  Description of Artificial Sequence: Synthetic oligonucleotide
aaggccuucgguccauggg

SEQ ID NO: 2144079 - RNA, 19 nt, Artificial Sequence
  Description of Artificial Sequence: Synthetic oligonucleotide
gguacaugaggcuaggaug

SEQ ID NO: 2144080 - RNA, 19 nt, Artificial Sequence
  Description of Artificial Sequence: Synthetic oligonucleotide
acuagggaaauauggcuug

SEQ ID NO: 2144081 - RNA, 19 nt, Artificial Sequence
  Description of Artificial Sequence: Synthetic oligonucleotide
uuugagcaauuagugagag

SEQ ID NO: 2144082 - RNA, 19 nt, Artificial Sequence
  Description of Artificial Sequence: Synthetic oligonucleotide
uggauucuaaucucucgag

SEQ ID NO: 2144083 - RNA, 19 nt, Artificial Sequence
  Description of Artificial Sequence: Synthetic oligonucleotide
uucuaaucucucgagaacu

SEQ ID NO: 2144084 - RNA, 19 nt, Artificial Sequence
  Description of Artificial Sequence: Synthetic oligonucleotide
acccuugucacgaaggugg

SEQ ID NO: 2144085 - RNA, 19 nt, Artificial Sequence
  Description of Artificial Sequence: Synthetic oligonucleotide
caauuagugagagaaauga

SEQ ID NO: 2144086 - RNA, 19 nt, Artificial Sequence
  Description of Artificial Sequence: Synthetic oligonucleotide
uccaacaccagcccuggug

SEQ ID NO: 2144087 - RNA, 19 nt, Artificial Sequence
  Description of Artificial Sequence: Synthetic oligonucleotide
aagaaacauccagaaggcg

SEQ ID NO: 2144088 - RNA, 19 nt, Artificial Sequence
  Description of Artificial Sequence: Synthetic oligonucleotide
ccuuugagcaauuagugag

SEQ ID NO: 2144089 - RNA, 19 nt, Artificial Sequence
  Description of Artificial Sequence: Synthetic oligonucleotide
cacacacacacacacacac

SEQ ID NO: 2144090 - RNA, 19 nt, Artificial Sequence
  Description of Artificial Sequence: Synthetic oligonucleotide
gacguuugggagcaugugc

SEQ ID NO: 2144091 - RNA, 19 nt, Artificial Sequence
  Description of Artificial Sequence: Synthetic oligonucleotide
uuccugauucccuagcugu

SEQ ID NO: 2144092 - RNA, 19 nt, Artificial Sequence
  Description of Artificial Sequence: Synthetic oligonucleotide
auacuuggcaggccugagc

SEQ ID NO: 2144093 - RNA, 19 nt, Artificial Sequence
  Description of Artificial Sequence: Synthetic oligonucleotide
ucuugucgcacacccaccc

SEQ ID NO: 2144094 - RNA, 19 nt, Artificial Sequence
  Description of Artificial Sequence: Synthetic oligonucleotide
uagccuauucuuuccaucu

SEQ ID NO: 2144095 - RNA, 19 nt, Artificial Sequence
  Description of Artificial Sequence: Synthetic oligonucleotide
gaugggacagccaggaaug

SEQ ID NO: 2144096 - RNA, 19 nt, Artificial Sequence
  Description of Artificial Sequence: Synthetic oligonucleotide
gacagucggagguacuagg

SEQ ID NO: 2144097 - RNA, 19 nt, Artificial Sequence
  Description of Artificial Sequence: Synthetic oligonucleotide
cucucgagaacuguggugc

SEQ ID NO: 2144098 - RNA, 19 nt, Artificial Sequence
  Description of Artificial Sequence: Synthetic oligonucleotide
acauagagaaauaaauaga

SEQ ID NO: 2144099 - RNA, 19 nt, Artificial Sequence
  Description of Artificial Sequence: Synthetic oligonucleotide
auggguauagccuauucuu

SEQ ID NO: 2144100 - RNA, 19 nt, Artificial Sequence
  Description of Artificial Sequence: Synthetic oligonucleotide
uugcauauuugcucagacc

SEQ ID NO: 2144101 - RNA, 19 nt, Artificial Sequence
  Description of Artificial Sequence: Synthetic oligonucleotide
cuauucuuuccaucuuggg

SEQ ID NO: 2144102 - RNA, 19 nt, Artificial Sequence
  Description of Artificial Sequence: Synthetic oligonucleotide
uacuagggaaauauggcuu

SEQ ID NO: 2144103 - RNA, 19 nt, Artificial Sequence
  Description of Artificial Sequence: Synthetic oligonucleotide
guguggagaacagaaagcc

SEQ ID NO: 2144104 - RNA, 19 nt, Artificial Sequence
  Description of Artificial Sequence: Synthetic oligonucleotide
agcaugugcgcuacaaggc

SEQ ID NO: 2144105 - RNA, 19 nt, Artificial Sequence
  Description of Artificial Sequence: Synthetic oligonucleotide
caacacaccugauuucugc

SEQ ID NO: 2144106 - RNA, 19 nt, Artificial Sequence
  Description of Artificial Sequence: Synthetic oligonucleotide
gugagagaaaugaaguccc

SEQ ID NO: 2144107 - RNA, 19 nt, Artificial Sequence
  Description of Artificial Sequence: Synthetic oligonucleotide
cuuccgaugaccuccagga

SEQ ID NO: 2144108 - RNA, 19 nt, Artificial Sequence
  Description of Artificial Sequence: Synthetic oligonucleotide
ugguacaugaggcuaggau

SEQ ID NO: 2144109 - RNA, 19 nt, Artificial Sequence
  Description of Artificial Sequence: Synthetic oligonucleotide
uucugcucacuccugugcc

SEQ ID NO: 2144110 - RNA, 19 nt, Artificial Sequence
  Description of Artificial Sequence: Synthetic oligonucleotide
agcaauuagugagagaaau

SEQ ID NO: 2144111 - RNA, 19 nt, Artificial Sequence
  Description of Artificial Sequence: Synthetic oligonucleotide
cacacacacacacacacuc

SEQ ID NO: 2144112 - RNA, 19 nt, Artificial Sequence
  Description of Artificial Sequence: Synthetic oligonucleotide
uguggagaacagaaagccu

SEQ ID NO: 2144113 - RNA, 19 nt, Artificial Sequence
  Description of Artificial Sequence: Synthetic oligonucleotide
uucccuagcugugagcggg

SEQ ID NO: 2144114 - RNA, 19 nt, Artificial Sequence
  Description of Artificial Sequence: Synthetic oligonucleotide
acagccaggaaugggguac

SEQ ID NO: 2144115 - RNA, 19 nt, Artificial Sequence
  Description of Artificial Sequence: Synthetic oligonucleotide
uuccuagcuuggcuggugg

SEQ ID NO: 2144116 - RNA, 19 nt, Artificial Sequence
  Description of Artificial Sequence: Synthetic oligonucleotide
cagaccaguuccuagcuug

SEQ ID NO: 2144117 - RNA, 19 nt, Artificial Sequence
  Description of Artificial Sequence: Synthetic oligonucleotide
auagacaacacaccugauu

SEQ ID NO: 2144118 - RNA, 19 nt, Artificial Sequence
  Description of Artificial Sequence: Synthetic oligonucleotide
uggagaacagaaagccuca

SEQ ID NO: 2144119 - RNA, 19 nt, Artificial Sequence
  Description of Artificial Sequence: Synthetic oligonucleotide
uagugagagaaaugaaguc

SEQ ID NO: 2144120 - RNA, 19 nt, Artificial Sequence
  Description of Artificial Sequence: Synthetic oligonucleotide
aaacauccagaaggcggcc

SEQ ID NO: 2144121 - RNA, 19 nt, Artificial Sequence
  Description of Artificial Sequence: Synthetic oligonucleotide
uugaggacaaaggccuucg

SEQ ID NO: 2144122 - RNA, 19 nt, Artificial Sequence
  Description of Artificial Sequence: Synthetic oligonucleotide
aagggagggagguccuagg

SEQ ID NO: 2144123 - RNA, 19 nt, Artificial Sequence
  Description of Artificial Sequence: Synthetic oligonucleotide
gacccacacacacacacac

SEQ ID NO: 2144124 - RNA, 19 nt, Artificial Sequence
  Description of Artificial Sequence: Synthetic oligonucleotide
aggaaugggguacccuugg

SEQ ID NO: 2144125 - RNA, 19 nt, Artificial Sequence
  Description of Artificial Sequence: Synthetic oligonucleotide
uuggugggacguuugggag

SEQ ID NO: 2144126 - RNA, 19 nt, Artificial Sequence
  Description of Artificial Sequence: Synthetic oligonucleotide
uuuccaucuugggagaaga

SEQ ID NO: 2144127 - RNA, 19 nt, Artificial Sequence
  Description of Artificial Sequence: Synthetic oligonucleotide
auggaggcagcucagcaca

SEQ ID NO: 2144128 - RNA, 19 nt, Artificial Sequence
  Description of Artificial Sequence: Synthetic oligonucleotide
uauuugcucagaccaguuc

SEQ ID NO: 2144129 - RNA, 19 nt, Artificial Sequence
  Description of Artificial Sequence: Synthetic oligonucleotide
cucucuccagagaacuucg

SEQ ID NO: 2144130 - RNA, 19 nt, Artificial Sequence
  Description of Artificial Sequence: Synthetic oligonucleotide
acauccagaaggcggcccg

SEQ ID NO: 2144131 - RNA, 19 nt, Artificial Sequence
  Description of Artificial Sequence: Synthetic oligonucleotide
acguuugggagcaugugcg

SEQ ID NO: 2144132 - RNA, 19 nt, Artificial Sequence
  Description of Artificial Sequence: Synthetic oligonucleotide
gauggaggcagcucagcac

SEQ ID NO: 2144133 - RNA, 19 nt, Artificial Sequence
  Description of Artificial Sequence: Synthetic oligonucleotide
cuccagagaacuucgagga

SEQ ID NO: 2144134 - RNA, 19 nt, Artificial Sequence
  Description of Artificial Sequence: Synthetic oligonucleotide
ucaucgcuuccgaugaccu

SEQ ID NO: 2144135 - RNA, 19 nt, Artificial Sequence
  Description of Artificial Sequence: Synthetic oligonucleotide
ucucucgagaacuguggug

SEQ ID NO: 2144136 - RNA, 19 nt, Artificial Sequence
  Description of Artificial Sequence: Synthetic oligonucleotide
gguacuagggaaauauggc

SEQ ID NO: 2144137 - RNA, 19 nt, Artificial Sequence
  Description of Artificial Sequence: Synthetic oligonucleotide
accuccaggaaugaaauau

SEQ ID NO: 2144138 - RNA, 19 nt, Artificial Sequence
  Description of Artificial Sequence: Synthetic oligonucleotide
uugguggucaucgcuuccg

SEQ ID NO: 2144139 - RNA, 19 nt, Artificial Sequence
  Description of Artificial Sequence: Synthetic oligonucleotide
acacacacacacucuuguc

SEQ ID NO: 2144140 - RNA, 19 nt, Artificial Sequence
  Description of Artificial Sequence: Synthetic oligonucleotide
ugcucagaccaguuccuag

SEQ ID NO: 2144141 - RNA, 19 nt, Artificial Sequence
  Description of Artificial Sequence: Synthetic oligonucleotide
ugagagaaaugaagucccu

SEQ ID NO: 2144142 - RNA, 19 nt, Artificial Sequence
  Description of Artificial Sequence: Synthetic oligonucleotide
uccagagaacuucgaggag

SEQ ID NO: 2144143 - RNA, 19 nt, Artificial Sequence
  Description of Artificial Sequence: Synthetic oligonucleotide
gagagaaaugaagucccug

SEQ ID NO: 2144144 - RNA, 19 nt, Artificial Sequence
  Description of Artificial Sequence: Synthetic oligonucleotide
auugcacucguguggagaa

SEQ ID NO: 2144145 - RNA, 19 nt, Artificial Sequence
  Description of Artificial Sequence: Synthetic oligonucleotide
uccccacagaaauacaaua

SEQ ID NO: 2144146 - RNA, 19 nt, Artificial Sequence
  Description of Artificial Sequence: Synthetic oligonucleotide
ggauguggguacaagaggc

SEQ ID NO: 2144147 - RNA, 19 nt, Artificial Sequence
  Description of Artificial Sequence: Synthetic oligonucleotide
cagccuaggagcucucucc

SEQ ID NO: 2144148 - RNA, 19 nt, Artificial Sequence
  Description of Artificial Sequence: Synthetic oligonucleotide
ugugagcgggaccuuggug

SEQ ID NO: 2144149 - RNA, 19 nt, Artificial Sequence
  Description of Artificial Sequence: Synthetic oligonucleotide
cuuugagcaauuagugaga

SEQ ID NO: 2144150 - RNA, 19 nt, Artificial Sequence
  Description of Artificial Sequence: Synthetic oligonucleotide
uauagccuauucuuuccau

SEQ ID NO: 2144151 - RNA, 19 nt, Artificial Sequence
  Description of Artificial Sequence: Synthetic oligonucleotide
cuuggugggacguuuggga

SEQ ID NO: 2144152 - RNA, 19 nt, Artificial Sequence
  Description of Artificial Sequence: Synthetic oligonucleotide
uccuaggaagccuuggcuu

SEQ ID NO: 2144153 - RNA, 19 nt, Artificial Sequence
  Description of Artificial Sequence: Synthetic oligonucleotide
uccaucuugggagaagaaa

SEQ ID NO: 2144154 - RNA, 19 nt, Artificial Sequence
  Description of Artificial Sequence: Synthetic oligonucleotide
gaagaaagggucgcuggac

SEQ ID NO: 2144155 - RNA, 19 nt, Artificial Sequence
  Description of Artificial Sequence: Synthetic oligonucleotide
ccuauucuuuccaucuugg

SEQ ID NO: 2144156 - RNA, 19 nt, Artificial Sequence
  Description of Artificial Sequence: Synthetic oligonucleotide
caguuccuagcuuggcugg

SEQ ID NO: 2144157 - RNA, 19 nt, Artificial Sequence
  Description of Artificial Sequence: Synthetic oligonucleotide
uggguauagccuauucuuu

SEQ ID NO: 2144158 - RNA, 19 nt, Artificial Sequence
  Description of Artificial Sequence: Synthetic oligonucleotide
agggaaauauggcuuggau

SEQ ID NO: 2144159 - RNA, 19 nt, Artificial Sequence
  Description of Artificial Sequence: Synthetic oligonucleotide
ugugccccuggguacuggg

SEQ ID NO: 2144160 - RNA, 19 nt, Artificial Sequence
  Description of Artificial Sequence: Synthetic oligonucleotide
ucgguccauggguauagcc

SEQ ID NO: 2144161 - RNA, 19 nt, Artificial Sequence
  Description of Artificial Sequence: Synthetic oligonucleotide
ugggagaagaaagggucgc

SEQ ID NO: 2144162 - RNA, 19 nt, Artificial Sequence
  Description of Artificial Sequence: Synthetic oligonucleotide
gauguggguacaagaggcc

SEQ ID NO: 2144163 - RNA, 19 nt, Artificial Sequence
  Description of Artificial Sequence: Synthetic oligonucleotide
aggcccuuugagcaauuag

SEQ ID NO: 2144164 - RNA, 19 nt, Artificial Sequence
  Description of Artificial Sequence: Synthetic oligonucleotide
guacuagggaaauauggcu

SEQ ID NO: 2144165 - RNA, 19 nt, Artificial Sequence
  Description of Artificial Sequence: Synthetic oligonucleotide
acagucggagguacuaggg

SEQ ID NO: 2144166 - RNA, 19 nt, Artificial Sequence
  Description of Artificial Sequence: Synthetic oligonucleotide
cuugucacgaaggugggga

SEQ ID NO: 2144167 - RNA, 19 nt, Artificial Sequence
  Description of Artificial Sequence: Synthetic oligonucleotide
ugucgcacacccacccuug

SEQ ID NO: 2144168 - RNA, 19 nt, Artificial Sequence
  Description of Artificial Sequence: Synthetic oligonucleotide
ugauucccuagcugugagc

SEQ ID NO: 2144169 - RNA, 19 nt, Artificial Sequence
  Description of Artificial Sequence: Synthetic oligonucleotide
uccuagcuuggcugguggg

SEQ ID NO: 2144170 - RNA, 19 nt, Artificial Sequence
  Description of Artificial Sequence: Synthetic oligonucleotide
aggagaagccugaucccgc

SEQ ID NO: 2144171 - RNA, 19 nt, Artificial Sequence
  Description of Artificial Sequence: Synthetic oligonucleotide
ggugcuuguuucuucacuc

SEQ ID NO: 2144172 - RNA, 19 nt, Artificial Sequence
  Description of Artificial Sequence: Synthetic oligonucleotide
ccauaaaacuuccccacag

SEQ ID NO: 2144173 - RNA, 19 nt, Artificial Sequence
  Description of Artificial Sequence: Synthetic oligonucleotide
cauaaaacuuccccacaga

SEQ ID NO: 2144174 - RNA, 19 nt, Artificial Sequence
  Description of Artificial Sequence: Synthetic oligonucleotide
aucucucgagaacuguggu

SEQ ID NO: 2144175 - RNA, 19 nt, Artificial Sequence
  Description of Artificial Sequence: Synthetic oligonucleotide
aaauauggcuuggauucua

SEQ ID NO: 2144176 - RNA, 19 nt, Artificial Sequence
  Description of Artificial Sequence: Synthetic oligonucleotide
auucccuagcugugagcgg

SEQ ID NO: 2144177 - RNA, 19 nt, Artificial Sequence
  Description of Artificial Sequence: Synthetic oligonucleotide
ggggauugcauauuugcuc

SEQ ID NO: 2144178 - RNA, 19 nt, Artificial Sequence
  Description of Artificial Sequence: Synthetic oligonucleotide
ggacuuuccugguacauga

SEQ ID NO: 2144179 - RNA, 19 nt, Artificial Sequence
  Description of Artificial Sequence: Synthetic oligonucleotide
cuagggaaauauggcuugg

SEQ ID NO: 2144180 - RNA, 19 nt, Artificial Sequence
  Description of Artificial Sequence: Synthetic oligonucleotide
cacaccgucagccgucacc

SEQ ID NO: 2144181 - RNA, 19 nt, Artificial Sequence
  Description of Artificial Sequence: Synthetic oligonucleotide
uucgaggagaagccugauc

SEQ ID NO: 2144182 - RNA, 19 nt, Artificial Sequence
  Description of Artificial Sequence: Synthetic oligonucleotide
accaagagaggcccuuuga

SEQ ID NO: 2144183 - RNA, 19 nt, Artificial Sequence
  Description of Artificial Sequence: Synthetic oligonucleotide
aauauggcuuggauucuaa

SEQ ID NO: 2144184 - RNA, 19 nt, Artificial Sequence
  Description of Artificial Sequence: Synthetic oligonucleotide
caagaggccagaggggacc

SEQ ID NO: 2144185 - RNA, 19 nt, Artificial Sequence
  Description of Artificial Sequence: Synthetic oligonucleotide
gagaacuguggugcagcgg

SEQ ID NO: 2144186 - RNA, 19 nt, Artificial Sequence
  Description of Artificial Sequence: Synthetic oligonucleotide
gguacccuugguuauccug

SEQ ID NO: 2144187 - RNA, 19 nt, Artificial Sequence
  Description of Artificial Sequence: Synthetic oligonucleotide
gauacuuggcaggccugag

SEQ ID NO: 2144188 - RNA, 19 nt, Artificial Sequence
  Description of Artificial Sequence: Synthetic oligonucleotide
cuuccaacaccagcccugg

SEQ ID NO: 2144189 - RNA, 19 nt, Artificial Sequence
  Description of Artificial Sequence: Synthetic oligonucleotide
gauugcauauuugcucaga

SEQ ID NO: 2144190 - RNA, 19 nt, Artificial Sequence
  Description of Artificial Sequence: Synthetic oligonucleotide
gagguacuagggaaauaug

SEQ ID NO: 2144191 - RNA, 19 nt, Artificial Sequence
  Description of Artificial Sequence: Synthetic oligonucleotide
acagaaagccucaggguga

SEQ ID NO: 2144192 - RNA, 19 nt, Artificial Sequence
  Description of Artificial Sequence: Synthetic oligonucleotide
agccucagggugaugggac

SEQ ID NO: 2144193 - RNA, 19 nt, Artificial Sequence
  Description of Artificial Sequence: Synthetic oligonucleotide
gggacccacacacacacac

SEQ ID NO: 2144194 - RNA, 19 nt, Artificial Sequence
  Description of Artificial Sequence: Synthetic oligonucleotide
uggcuuggauucuaaucuc

SEQ ID NO: 2144195 - RNA, 19 nt, Artificial Sequence
  Description of Artificial Sequence: Synthetic oligonucleotide
ccagaggggacccacacac

SEQ ID NO: 2144196 - RNA, 19 nt, Artificial Sequence
  Description of Artificial Sequence: Synthetic oligonucleotide
auauugcacucguguggag

SEQ ID NO: 2144197 - RNA, 19 nt, Artificial Sequence
  Description of Artificial Sequence: Synthetic oligonucleotide
caggaaugggguacccuug

SEQ ID NO: 2144198 - RNA, 19 nt, Artificial Sequence
  Description of Artificial Sequence: Synthetic oligonucleotide
ccaacaccagcccuggugc

SEQ ID NO: 2144199 - RNA, 19 nt, Artificial Sequence
  Description of Artificial Sequence: Synthetic oligonucleotide
cuugguggucaucgcuucc

SEQ ID NO: 2144200 - RNA, 19 nt, Artificial Sequence
  Description of Artificial Sequence: Synthetic oligonucleotide
uugucgcacacccacccuu

SEQ ID NO: 2144201 - RNA, 19 nt, Artificial Sequence
  Description of Artificial Sequence: Synthetic oligonucleotide
agaaagggucgcuggacuu

SEQ ID NO: 2144202 - RNA, 19 nt, Artificial Sequence
  Description of Artificial Sequence: Synthetic oligonucleotide
ggagcagcuaggaugggcc

SEQ ID NO: 2144203 - RNA, 19 nt, Artificial Sequence
  Description of Artificial Sequence: Synthetic oligonucleotide
auauggcuuggauucuaau

SEQ ID NO: 2144204 - RNA, 19 nt, Artificial Sequence
  Description of Artificial Sequence: Synthetic oligonucleotide
aagccugaucccgccuugg

SEQ ID NO: 2144205 - RNA, 19 nt, Artificial Sequence
  Description of Artificial Sequence: Synthetic oligonucleotide
gcacaggaugggcacaccg

SEQ ID NO: 2144206 - RNA, 19 nt, Artificial Sequence
  Description of Artificial Sequence: Synthetic oligonucleotide
gucaucgcuuccgaugacc

SEQ ID NO: 2144207 - RNA, 19 nt, Artificial Sequence
  Description of Artificial Sequence: Synthetic oligonucleotide
cccacacacacacacacac

SEQ ID NO: 2144208 - RNA, 19 nt, Artificial Sequence
  Description of Artificial Sequence: Synthetic oligonucleotide
ggauucuaaucucucgaga

SEQ ID NO: 2144209 - RNA, 19 nt, Artificial Sequence
  Description of Artificial Sequence: Synthetic oligonucleotide
uagggaaauauggcuugga

SEQ ID NO: 2144210 - RNA, 19 nt, Artificial Sequence
  Description of Artificial Sequence: Synthetic oligonucleotide
ggguauagccuauucuuuc

SEQ ID NO: 2144211 - RNA, 19 nt, Artificial Sequence
  Description of Artificial Sequence: Synthetic oligonucleotide
gccuauucuuuccaucuug

SEQ ID NO: 2144212 - RNA, 19 nt, Artificial Sequence
  Description of Artificial Sequence: Synthetic oligonucleotide
gagcagugacuuccaacac

SEQ ID NO: 2144213 - RNA, 19 nt, Artificial Sequence
  Description of Artificial Sequence: Synthetic oligonucleotide
agacagucggagguacuag

SEQ ID NO: 2144214 - RNA, 19 nt, Artificial Sequence
  Description of Artificial Sequence: Synthetic oligonucleotide
ucucgagaacuguggugca

SEQ ID NO: 2144215 - RNA, 19 nt, Artificial Sequence
  Description of Artificial Sequence: Synthetic oligonucleotide
cucuugucgcacacccacc

SEQ ID NO: 2144216 - RNA, 19 nt, Artificial Sequence
  Description of Artificial Sequence: Synthetic oligonucleotide
agccugaucccgccuuggg

SEQ ID NO: 2144217 - RNA, 19 nt, Artificial Sequence
  Description of Artificial Sequence: Synthetic oligonucleotide
cccuugguuauccuggggc

SEQ ID NO: 2144218 - RNA, 19 nt, Artificial Sequence
  Description of Artificial Sequence: Synthetic oligonucleotide
guacaugaggcuaggaugu

SEQ ID NO: 2144219 - RNA, 19 nt, Artificial Sequence
  Description of Artificial Sequence: Synthetic oligonucleotide
acacccacccuugucacga

SEQ ID NO: 2144220 - RNA, 19 nt, Artificial Sequence
  Description of Artificial Sequence: Synthetic oligonucleotide
agccuaggagcucucucca

SEQ ID NO: 2144221 - RNA, 19 nt, Artificial Sequence
  Description of Artificial Sequence: Synthetic oligonucleotide
gcuuccgaugaccuccagg

SEQ ID NO: 2144222 - RNA, 19 nt, Artificial Sequence
  Description of Artificial Sequence: Synthetic oligonucleotide
agcuaggaugggccugggg

SEQ ID NO: 2144223 - RNA, 19 nt, Artificial Sequence
  Description of Artificial Sequence: Synthetic oligonucleotide
ccaagagaggcccuuugag

SEQ ID NO: 2144224 - RNA, 19 nt, Artificial Sequence
  Description of Artificial Sequence: Synthetic oligonucleotide
agauacuuggcaggccuga

SEQ ID NO: 2144225 - RNA, 19 nt, Artificial Sequence
  Description of Artificial Sequence: Synthetic oligonucleotide
gcaauuagugagagaaaug

SEQ ID NO: 2144226 - RNA, 19 nt, Artificial Sequence
  Description of Artificial Sequence: Synthetic oligonucleotide
ccuugguuauccuggggcc

SEQ ID NO: 2144227 - RNA, 19 nt, Artificial Sequence
  Description of Artificial Sequence: Synthetic oligonucleotide
aauagacaacacaccugau

SEQ ID NO: 2144228 - RNA, 19 nt, Artificial Sequence
  Description of Artificial Sequence: Synthetic oligonucleotide
ugguggucaucgcuuccga

SEQ ID NO: 2144229 - RNA, 19 nt, Artificial Sequence
  Description of Artificial Sequence: Synthetic oligonucleotide
ucccuggugggagacaguc

SEQ ID NO: 2144230 - RNA, 19 nt, Artificial Sequence
  Description of Artificial Sequence: Synthetic oligonucleotide
ggagcaugugcgcuacaag

SEQ ID NO: 2144231 - RNA, 19 nt, Artificial Sequence
  Description of Artificial Sequence: Synthetic oligonucleotide
gguccuaggaagccuuggc

SEQ ID NO: 2144232 - RNA, 19 nt, Artificial Sequence
  Description of Artificial Sequence: Synthetic oligonucleotide
aagggucgcuggacuuucc

SEQ ID NO: 2144233 - RNA, 19 nt, Artificial Sequence
  Description of Artificial Sequence: Synthetic oligonucleotide
ggagaagaaagggucgcug

SEQ ID NO: 2144234 - RNA, 19 nt, Artificial Sequence
  Description of Artificial Sequence: Synthetic oligonucleotide
ucagaccaguuccuagcuu

SEQ ID NO: 2144235 - RNA, 19 nt, Artificial Sequence
  Description of Artificial Sequence: Synthetic oligonucleotide
agguccuaggaagccuugg

SEQ ID NO: 2144236 - RNA, 19 nt, Artificial Sequence
  Description of Artificial Sequence: Synthetic oligonucleotide
uagcuuggcuggugggcag

SEQ ID NO: 2144237 - RNA, 19 nt, Artificial Sequence
  Description of Artificial Sequence: Synthetic oligonucleotide
augggguacccuugguuau

SEQ ID NO: 2144238 - RNA, 19 nt, Artificial Sequence
  Description of Artificial Sequence: Synthetic oligonucleotide
cagagaacuucgaggagaa

SEQ ID NO: 2144239 - RNA, 19 nt, Artificial Sequence
  Description of Artificial Sequence: Synthetic oligonucleotide
ugggacguuugggagcaug

SEQ ID NO: 2144240 - RNA, 19 nt, Artificial Sequence
  Description of Artificial Sequence: Synthetic oligonucleotide
gacuuuccugguacaugag

SEQ ID NO: 2144241 - RNA, 19 nt, Artificial Sequence
  Description of Artificial Sequence: Synthetic oligonucleotide
ccuaggaagccuuggcuug

SEQ ID NO: 2144242 - RNA, 19 nt, Artificial Sequence
  Description of Artificial Sequence: Synthetic oligonucleotide
uugucacgaagguggggaa

SEQ ID NO: 2144243 - RNA, 19 nt, Artificial Sequence
  Description of Artificial Sequence: Synthetic oligonucleotide
cacacccacccuugucacg

SEQ ID NO: 2144244 - RNA, 19 nt, Artificial Sequence
  Description of Artificial Sequence: Synthetic oligonucleotide
gaucccgccuuggggauug

SEQ ID NO: 2144245 - RNA, 19 nt, Artificial Sequence
  Description of Artificial Sequence: Synthetic oligonucleotide
cauggguauagccuauucu

SEQ ID NO: 2144246 - RNA, 19 nt, Artificial Sequence
  Description of Artificial Sequence: Synthetic oligonucleotide
uggguacaagaggccagag

SEQ ID NO: 2144247 - RNA, 19 nt, Artificial Sequence
  Description of Artificial Sequence: Synthetic oligonucleotide
cugcucacuccugugcccc

SEQ ID NO: 2144248 - RNA, 19 nt, Artificial Sequence
  Description of Artificial Sequence: Synthetic oligonucleotide
caccugauuucugcuuucc

SEQ ID NO: 2144249 - RNA, 19 nt, Artificial Sequence
  Description of Artificial Sequence: Synthetic oligonucleotide
ggagaagccugaucccgcc

SEQ ID NO: 2144250 - RNA, 19 nt, Artificial Sequence
  Description of Artificial Sequence: Synthetic oligonucleotide
gcccuuugagcaauuagug

SEQ ID NO: 2144251 - RNA, 19 nt, Artificial Sequence
  Description of Artificial Sequence: Synthetic oligonucleotide
acacacacacacacucuug

SEQ ID NO: 2144252 - RNA, 19 nt, Artificial Sequence
  Description of Artificial Sequence: Synthetic oligonucleotide
ggugaugggacagccagga

SEQ ID NO: 2144253 - RNA, 19 nt, Artificial Sequence
  Description of Artificial Sequence: Synthetic oligonucleotide
cuguggugcagcggcagag

SEQ ID NO: 2144254 - RNA, 19 nt, Artificial Sequence
  Description of Artificial Sequence: Synthetic oligonucleotide
agggucgcuggacuuuccu

SEQ ID NO: 2144255 - RNA, 19 nt, Artificial Sequence
  Description of Artificial Sequence: Synthetic oligonucleotide
uuguuucuucacucaccau

SEQ ID NO: 2144256 - RNA, 19 nt, Artificial Sequence
  Description of Artificial Sequence: Synthetic oligonucleotide
ugucacgaagguggggaaa

SEQ ID NO: 2144257 - RNA, 19 nt, Artificial Sequence
  Description of Artificial Sequence: Synthetic oligonucleotide
ucggagguacuagggaaau

SEQ ID NO: 2144258 - RNA, 19 nt, Artificial Sequence
  Description of Artificial Sequence: Synthetic oligonucleotide
cgcggaacagccuuucugc

SEQ ID NO: 2144259 - RNA, 19 nt, Artificial Sequence
  Description of Artificial Sequence: Synthetic oligonucleotide
acaacacaccugauuucug

SEQ ID NO: 2144260 - RNA, 19 nt, Artificial Sequence
  Description of Artificial Sequence: Synthetic oligonucleotide
gccugaucccgccuugggg

SEQ ID NO: 2144261 - RNA, 19 nt, Artificial Sequence
  Description of Artificial Sequence: Synthetic oligonucleotide
uugggagcaugugcgcuac

SEQ ID NO: 2144262 - RNA, 19 nt, Artificial Sequence
  Description of Artificial Sequence: Synthetic oligonucleotide
agcgggaccuuggugguca

SEQ ID NO: 2144263 - RNA, 19 nt, Artificial Sequence
  Description of Artificial Sequence: Synthetic oligonucleotide
ugcuuucccuggugggaga

SEQ ID NO: 2144264 - RNA, 19 nt, Artificial Sequence
  Description of Artificial Sequence: Synthetic oligonucleotide
gagacagucggagguacua

SEQ ID NO: 2144265 - RNA, 19 nt, Artificial Sequence
  Description of Artificial Sequence: Synthetic oligonucleotide
ucgcuuccgaugaccucca

SEQ ID NO: 2144266 - RNA, 19 nt, Artificial Sequence
  Description of Artificial Sequence: Synthetic oligonucleotide
cacacucuugucgcacacc

SEQ ID NO: 2144267 - RNA, 19 nt, Artificial Sequence
  Description of Artificial Sequence: Synthetic oligonucleotide
cuagcuuggcuggugggca

SEQ ID NO: 2144268 - RNA, 19 nt, Artificial Sequence
  Description of Artificial Sequence: Synthetic oligonucleotide
gguccauggguauagccua

SEQ ID NO: 2144269 - RNA, 19 nt, Artificial Sequence
  Description of Artificial Sequence: Synthetic oligonucleotide
agcagcuaggaugggccug

SEQ ID NO: 2144270 - RNA, 19 nt, Artificial Sequence
  Description of Artificial Sequence: Synthetic oligonucleotide
acacacacacacacacucu

SEQ ID NO: 2144271 - RNA, 19 nt, Artificial Sequence
  Description of Artificial Sequence: Synthetic oligonucleotide
acccacccuugucacgaag

SEQ ID NO: 2144272 - RNA, 19 nt, Artificial Sequence
  Description of Artificial Sequence: Synthetic oligonucleotide
gaccaguuccuagcuuggc

SEQ ID NO: 2144273 - RNA, 19 nt, Artificial Sequence
  Description of Artificial Sequence: Synthetic oligonucleotide
gcaugugcgcuacaaggca

SEQ ID NO: 2144274 - RNA, 19 nt, Artificial Sequence
  Description of Artificial Sequence: Synthetic oligonucleotide
gcuaggauguggguacaag

SEQ ID NO: 2144275 - RNA, 19 nt, Artificial Sequence
  Description of Artificial Sequence: Synthetic oligonucleotide
cuuggcaggccugagcaaa

SEQ ID NO: 2144276 - RNA, 19 nt, Artificial Sequence
  Description of Artificial Sequence: Synthetic oligonucleotide
agccuauucuuuccaucuu

SEQ ID NO: 2144277 - RNA, 19 nt, Artificial Sequence
  Description of Artificial Sequence: Synthetic oligonucleotide
ucgcacacccacccuuguc

SEQ ID NO: 2144278 - RNA, 19 nt, Artificial Sequence
  Description of Artificial Sequence: Synthetic oligonucleotide
cacacacacacacucuugu

SEQ ID NO: 2144279 - RNA, 19 nt, Artificial Sequence
  Description of Artificial Sequence: Synthetic oligonucleotide
gucacgaagguggggaaaa

SEQ ID NO: 2144280 - RNA, 19 nt, Artificial Sequence
  Description of Artificial Sequence: Synthetic oligonucleotide
aacaccagcccuggugcuu

SEQ ID NO: 2144281 - RNA, 19 nt, Artificial Sequence
  Description of Artificial Sequence: Synthetic oligonucleotide
agaaggcggcccgcggaac

SEQ ID NO: 2144282 - RNA, 19 nt, Artificial Sequence
  Description of Artificial Sequence: Synthetic oligonucleotide
guuccuagcuuggcuggug

SEQ ID NO: 2144283 - RNA, 19 nt, Artificial Sequence
  Description of Artificial Sequence: Synthetic oligonucleotide
ucccuagcugugagcggga

SEQ ID NO: 2144284 - RNA, 19 nt, Artificial Sequence
  Description of Artificial Sequence: Synthetic oligonucleotide
guccuaggaagccuuggcu

SEQ ID NO: 2144285 - RNA, 19 nt, Artificial Sequence
  Description of Artificial Sequence: Synthetic oligonucleotide
aagccuuggcuugguggga

SEQ ID NO: 2144286 - RNA, 19 nt, Artificial Sequence
  Description of Artificial Sequence: Synthetic oligonucleotide
acacacacacacacacaca

SEQ ID NO: 2144287 - RNA, 19 nt, Artificial Sequence
  Description of Artificial Sequence: Synthetic oligonucleotide
acacacacacacacacacu

SEQ ID NO: 2144288 - RNA, 19 nt, Artificial Sequence
  Description of Artificial Sequence: Synthetic oligonucleotide
caucgcuuccgaugaccuc

SEQ ID NO: 2144289 - RNA, 19 nt, Artificial Sequence
  Description of Artificial Sequence: Synthetic oligonucleotide
cagccagcccucccucugg

SEQ ID NO: 2144290 - RNA, 19 nt, Artificial Sequence
  Description of Artificial Sequence: Synthetic oligonucleotide
gagcaauuagugagagaaa

SEQ ID NO: 2144291 - RNA, 19 nt, Artificial Sequence
  Description of Artificial Sequence: Synthetic oligonucleotide
gaugaccuccaggaaugaa

SEQ ID NO: 2144292 - RNA, 19 nt, Artificial Sequence
  Description of Artificial Sequence: Synthetic oligonucleotide
cacccuugucacgaaggug

SEQ ID NO: 2144293 - RNA, 19 nt, Artificial Sequence
  Description of Artificial Sequence: Synthetic oligonucleotide
uucgguccauggguauagc

SEQ ID NO: 2144294 - RNA, 19 nt, Artificial Sequence
  Description of Artificial Sequence: Synthetic oligonucleotide
acuuggcaggccugagcaa

SEQ ID NO: 2144295 - RNA, 19 nt, Artificial Sequence
  Description of Artificial Sequence: Synthetic oligonucleotide
aguuccuagcuuggcuggu

SEQ ID NO: 2144296 - RNA, 19 nt, Artificial Sequence
  Description of Artificial Sequence: Synthetic oligonucleotide
ccagcccucccucuggagc

SEQ ID NO: 2144297 - RNA, 19 nt, Artificial Sequence
  Description of Artificial Sequence: Synthetic oligonucleotide
ugggguacccuugguuauc

SEQ ID NO: 2144298 - RNA, 19 nt, Artificial Sequence
  Description of Artificial Sequence: Synthetic oligonucleotide
ccagagaacuucgaggaga

SEQ ID NO: 2144299 - RNA, 19 nt, Artificial Sequence
  Description of Artificial Sequence: Synthetic oligonucleotide
ugugcgcuacaaggcauuu

SEQ ID NO: 2144300 - RNA, 19 nt, Artificial Sequence
  Description of Artificial Sequence: Synthetic oligonucleotide
ccuagcuuggcuggugggc

SEQ ID NO: 2144301 - RNA, 19 nt, Artificial Sequence
  Description of Artificial Sequence: Synthetic oligonucleotide
ugguuauccuggggccacc

SEQ ID NO: 2144302 - RNA, 19 nt, Artificial Sequence
  Description of Artificial Sequence: Synthetic oligonucleotide
cccuuugagcaauuaguga

SEQ ID NO: 2144303 - RNA, 19 nt, Artificial Sequence
  Description of Artificial Sequence: Synthetic oligonucleotide
cuaaucucucgagaacugu

SEQ ID NO: 2144304 - RNA, 19 nt, Artificial Sequence
  Description of Artificial Sequence: Synthetic oligonucleotide
cugugggaccagccagccc

SEQ ID NO: 2144305 - RNA, 19 nt, Artificial Sequence
  Description of Artificial Sequence: Synthetic oligonucleotide
gucggagguacuagggaaa

SEQ ID NO: 2144306 - RNA, 19 nt, Artificial Sequence
  Description of Artificial Sequence: Synthetic oligonucleotide
gaggggacccacacacaca

SEQ ID NO: 2144307 - RNA, 19 nt, Artificial Sequence
  Description of Artificial Sequence: Synthetic oligonucleotide
cagccaggaaugggguacc

SEQ ID NO: 2144308 - RNA, 19 nt, Artificial Sequence
  Description of Artificial Sequence: Synthetic oligonucleotide
uugcucagaccaguuccua

SEQ ID NO: 2144309 - RNA, 19 nt, Artificial Sequence
  Description of Artificial Sequence: Synthetic oligonucleotide
gaacuucgaggagaagccu

SEQ ID NO: 2144310 - RNA, 19 nt, Artificial Sequence
  Description of Artificial Sequence: Synthetic oligonucleotide
ugcucacuccugugccccu

SEQ ID NO: 2144311 - RNA, 19 nt, Artificial Sequence
  Description of Artificial Sequence: Synthetic oligonucleotide
cgagaacuguggugcagcg

SEQ ID NO: 2144312 - RNA, 19 nt, Artificial Sequence
  Description of Artificial Sequence: Synthetic oligonucleotide
uugcacucguguggagaac

SEQ ID NO: 2144313 - RNA, 19 nt, Artificial Sequence
  Description of Artificial Sequence: Synthetic oligonucleotide
cacaggaugggcacaccgu

SEQ ID NO: 2144314 - RNA, 19 nt, Artificial Sequence
  Description of Artificial Sequence: Synthetic oligonucleotide
guuugggagcaugugcgcu

SEQ ID NO: 2144315 - RNA, 19 nt, Artificial Sequence
  Description of Artificial Sequence: Synthetic oligonucleotide
ccacagaaauacaauauuu

SEQ ID NO: 2144316 - RNA, 19 nt, Artificial Sequence
  Description of Artificial Sequence: Synthetic oligonucleotide
ccuagcugugagcgggacc

SEQ ID NO: 2144317 - RNA, 19 nt, Artificial Sequence
  Description of Artificial Sequence: Synthetic oligonucleotide
gggguacccuugguuaucc

SEQ ID NO: 2144318 - RNA, 19 nt, Artificial Sequence
  Description of Artificial Sequence: Synthetic oligonucleotide
guuauccuggggccaccaa

SEQ ID NO: 2144319 - RNA, 19 nt, Artificial Sequence
  Description of Artificial Sequence: Synthetic oligonucleotide
ccauggguauagccuauuc

SEQ ID NO: 2144320 - RNA, 19 nt, Artificial Sequence
  Description of Artificial Sequence: Synthetic oligonucleotide
agccagcccucccucugga

SEQ ID NO: 2144321 - RNA, 19 nt, Artificial Sequence
  Description of Artificial Sequence: Synthetic oligonucleotide
cacucuugucgcacaccca

SEQ ID NO: 2144322 - RNA, 19 nt, Artificial Sequence
  Description of Artificial Sequence: Synthetic oligonucleotide
ggccagaggggacccacac

SEQ ID NO: 2144323 - RNA, 19 nt, Artificial Sequence
  Description of Artificial Sequence: Synthetic oligonucleotide
cacacacacacacacucuu

SEQ ID NO: 2144324 - RNA, 19 nt, Artificial Sequence
  Description of Artificial Sequence: Synthetic oligonucleotide
caugugcgcuacaaggcau

SEQ ID NO: 2144325 - RNA, 19 nt, Artificial Sequence
  Description of Artificial Sequence: Synthetic oligonucleotide
gccuaggagcucucuccag

SEQ ID NO: 2144326 - RNA, 19 nt, Artificial Sequence
  Description of Artificial Sequence: Synthetic oligonucleotide
gaaagggucgcuggacuuu

SEQ ID NO: 2144327 - RNA, 19 nt, Artificial Sequence
  Description of Artificial Sequence: Synthetic oligonucleotide
acccacacacacacacaca

SEQ ID NO: 2144328 - RNA, 19 nt, Artificial Sequence
  Description of Artificial Sequence: Synthetic oligonucleotide
gagcagcuaggaugggccu

SEQ ID NO: 2144329 - RNA, 19 nt, Artificial Sequence
  Description of Artificial Sequence: Synthetic oligonucleotide
gccuuggcuuggugggacg

SEQ ID NO: 2144330 - RNA, 19 nt, Artificial Sequence
  Description of Artificial Sequence: Synthetic oligonucleotide
ccgcggaacagccuuucug

SEQ ID NO: 2144331 - RNA, 19 nt, Artificial Sequence
  Description of Artificial Sequence: Synthetic oligonucleotide
cuggugggagacagucgga

SEQ ID NO: 2144332 - RNA, 19 nt, Artificial Sequence
  Description of Artificial Sequence: Synthetic oligonucleotide
cccuggugggagacagucg

SEQ ID NO: 2144333 - RNA, 19 nt, Artificial Sequence
  Description of Artificial Sequence: Synthetic oligonucleotide
cgcuggacuuuccugguac

SEQ ID NO: 2144334 - RNA, 19 nt, Artificial Sequence
  Description of Artificial Sequence: Synthetic oligonucleotide
gcuggacuuuccugguaca

SEQ ID NO: 2144335 - RNA, 19 nt, Artificial Sequence
  Description of Artificial Sequence: Synthetic oligonucleotide
augugcgcuacaaggcauu

SEQ ID NO: 2144336 - RNA, 19 nt, Artificial Sequence
  Description of Artificial Sequence: Synthetic oligonucleotide
cacucguguggagaacaga

SEQ ID NO: 2144337 - RNA, 19 nt, Artificial Sequence
  Description of Artificial Sequence: Synthetic oligonucleotide
caaaggccuucgguccaug

SEQ ID NO: 2144338 - RNA, 19 nt, Artificial Sequence
  Description of Artificial Sequence: Synthetic oligonucleotide
agaaagccucagggugaug

SEQ ID NO: 2144339 - RNA, 19 nt, Artificial Sequence
  Description of Artificial Sequence: Synthetic oligonucleotide
agcuuggcuggugggcaga

SEQ ID NO: 2144340 - RNA, 19 nt, Artificial Sequence
  Description of Artificial Sequence: Synthetic oligonucleotide
cagaaggcggcccgcggaa

SEQ ID NO: 2144341 - RNA, 19 nt, Artificial Sequence
  Description of Artificial Sequence: Synthetic oligonucleotide
ccagccuaggagcucucuc

SEQ ID NO: 2144342 - RNA, 19 nt, Artificial Sequence
  Description of Artificial Sequence: Synthetic oligonucleotide
cuggagcagcuaggauggg

SEQ ID NO: 2144343 - RNA, 19 nt, Artificial Sequence
  Description of Artificial Sequence: Synthetic oligonucleotide
caccgucagccgucaccag

SEQ ID NO: 2144344 - RNA, 19 nt, Artificial Sequence
  Description of Artificial Sequence: Synthetic oligonucleotide
ccuugucacgaaggugggg

SEQ ID NO: 2144345 - RNA, 19 nt, Artificial Sequence
  Description of Artificial Sequence: Synthetic oligonucleotide
agcucagcagagggagaaa

SEQ ID NO: 2144346 - RNA, 19 nt, Artificial Sequence
  Description of Artificial Sequence: Synthetic oligonucleotide
ggucaucgcuuccgaugac

SEQ ID NO: 2144347 - RNA, 19 nt, Artificial Sequence
  Description of Artificial Sequence: Synthetic oligonucleotide
gcuuucccuggugggagac

SEQ ID NO: 2144348 - RNA, 19 nt, Artificial Sequence
  Description of Artificial Sequence: Synthetic oligonucleotide
agcucucuccagagaacuu

SEQ ID NO: 2144349 - RNA, 19 nt, Artificial Sequence
  Description of Artificial Sequence: Synthetic oligonucleotide
gguuauccuggggccacca

SEQ ID NO: 2144350 - RNA, 19 nt, Artificial Sequence
  Description of Artificial Sequence: Synthetic oligonucleotide
ccacacacacacacacaca

SEQ ID NO: 2144351 - RNA, 19 nt, Artificial Sequence
  Description of Artificial Sequence: Synthetic oligonucleotide
ggacccacacacacacaca

SEQ ID NO: 2144352 - RNA, 19 nt, Artificial Sequence
  Description of Artificial Sequence: Synthetic oligonucleotide
ugaucccgccuuggggauu

SEQ ID NO: 2144353 - RNA, 19 nt, Artificial Sequence
  Description of Artificial Sequence: Synthetic oligonucleotide
ggaaugggguacccuuggu

SEQ ID NO: 2144354 - RNA, 19 nt, Artificial Sequence
  Description of Artificial Sequence: Synthetic oligonucleotide
aucccgccuuggggauugc

SEQ ID NO: 2144355 - RNA, 19 nt, Artificial Sequence
  Description of Artificial Sequence: Synthetic oligonucleotide
ccagaaggcggcccgcgga

SEQ ID NO: 2144356 - RNA, 19 nt, Artificial Sequence
  Description of Artificial Sequence: Synthetic oligonucleotide
ggcggcccgcggaacagcc

SEQ ID NO: 2144357 - RNA, 19 nt, Artificial Sequence
  Description of Artificial Sequence: Synthetic oligonucleotide
aggccagaggggacccaca

SEQ ID NO: 2144358 - RNA, 19 nt, Artificial Sequence
  Description of Artificial Sequence: Synthetic oligonucleotide
gagcgggaccuuggugguc

SEQ ID NO: 2144359 - RNA, 19 nt, Artificial Sequence
  Description of Artificial Sequence: Synthetic oligonucleotide
cuggacuuuccugguacau

SEQ ID NO: 2144360 - RNA, 19 nt, Artificial Sequence
  Description of Artificial Sequence: Synthetic oligonucleotide
ucccuggaacugggacaga

SEQ ID NO: 2144361 - RNA, 19 nt, Artificial Sequence
  Description of Artificial Sequence: Synthetic oligonucleotide
cugugagcgggaccuuggu

SEQ ID NO: 2144362 - RNA, 19 nt, Artificial Sequence
  Description of Artificial Sequence: Synthetic oligonucleotide
gucgcacacccacccuugu

SEQ ID NO: 2144363 - RNA, 19 nt, Artificial Sequence
  Description of Artificial Sequence: Synthetic oligonucleotide
cugaucccgccuuggggau

SEQ ID NO: 2144364 - RNA, 19 nt, Artificial Sequence
  Description of Artificial Sequence: Synthetic oligonucleotide
gugcagcggcagagcagcc

SEQ ID NO: 2144365 - RNA, 19 nt, Artificial Sequence
  Description of Artificial Sequence: Synthetic oligonucleotide
cgguccauggguauagccu

SEQ ID NO: 2144366 - RNA, 19 nt, Artificial Sequence
  Description of Artificial Sequence: Synthetic oligonucleotide
caaagggagggagguccua

SEQ ID NO: 2144367 - RNA, 19 nt, Artificial Sequence
  Description of Artificial Sequence: Synthetic oligonucleotide
gggagaagaaagggucgcu

SEQ ID NO: 2144368 - RNA, 19 nt, Artificial Sequence
  Description of Artificial Sequence: Synthetic oligonucleotide
gguggucaucgcuuccgau

SEQ ID NO: 2144369 - RNA, 19 nt, Artificial Sequence
  Description of Artificial Sequence: Synthetic oligonucleotide
cacucaccaucuuccugau

SEQ ID NO: 2144370 - RNA, 19 nt, Artificial Sequence
  Description of Artificial Sequence: Synthetic oligonucleotide
gggcacaccgucagccguc

SEQ ID NO: 2144371 - RNA, 19 nt, Artificial Sequence
  Description of Artificial Sequence: Synthetic oligonucleotide
ccgccuuggggauugcaua

SEQ ID NO: 2144372 - RNA, 19 nt, Artificial Sequence
  Description of Artificial Sequence: Synthetic oligonucleotide
gggagguccuaggaagccu

SEQ ID NO: 2144373 - RNA, 19 nt, Artificial Sequence
  Description of Artificial Sequence: Synthetic oligonucleotide
ggcuaggauguggguacaa

SEQ ID NO: 2144374 - RNA, 19 nt, Artificial Sequence
  Description of Artificial Sequence: Synthetic oligonucleotide
guccauggguauagccuau

SEQ ID NO: 2144375 - RNA, 19 nt, Artificial Sequence
  Description of Artificial Sequence: Synthetic oligonucleotide
ccacccuugucacgaaggu

SEQ ID NO: 2144376 - RNA, 19 nt, Artificial Sequence
  Description of Artificial Sequence: Synthetic oligonucleotide
ggccuucgguccaugggua

SEQ ID NO: 2144377 - RNA, 19 nt, Artificial Sequence
  Description of Artificial Sequence: Synthetic oligonucleotide
gcaaagggagggagguccu

SEQ ID NO: 2144378 - RNA, 19 nt, Artificial Sequence
  Description of Artificial Sequence: Synthetic oligonucleotide
accagcccuggugcuuguu

SEQ ID NO: 2144379 - RNA, 19 nt, Artificial Sequence
  Description of Artificial Sequence: Synthetic oligonucleotide
cccuagcugugagcgggac

SEQ ID NO: 2144380 - RNA, 19 nt, Artificial Sequence
  Description of Artificial Sequence: Synthetic oligonucleotide
ggguacccuugguuauccu

SEQ ID NO: 2144381 - RNA, 19 nt, Artificial Sequence
  Description of Artificial Sequence: Synthetic oligonucleotide
gugcgcuacaaggcauuuu

SEQ ID NO: 2144382 - RNA, 19 nt, Artificial Sequence
  Description of Artificial Sequence: Synthetic oligonucleotide
ggggacccacacacacaca

SEQ ID NO: 2144383 - RNA, 19 nt, Artificial Sequence
  Description of Artificial Sequence: Synthetic oligonucleotide
cccgccuuggggauugcau

SEQ ID NO: 2144384 - RNA, 19 nt, Artificial Sequence
  Description of Artificial Sequence: Synthetic oligonucleotide
gccuucgguccauggguau

SEQ ID NO: 2144385 - RNA, 19 nt, Artificial Sequence
  Description of Artificial Sequence: Synthetic oligonucleotide
gcacaccgucagccgucac

SEQ ID NO: 2144386 - RNA, 19 nt, Artificial Sequence
  Description of Artificial Sequence: Synthetic oligonucleotide
gcccgcggaacagccuuuc

SEQ ID NO: 2144387 - RNA, 19 nt, Artificial Sequence
  Description of Artificial Sequence: Synthetic oligonucleotide
cccuggaacugggacagau

SEQ ID NO: 2144388 - RNA, 19 nt, Artificial Sequence
  Description of Artificial Sequence: Synthetic oligonucleotide
gccaccaagagaggcccuu

SEQ ID NO: 2144389 - RNA, 19 nt, Artificial Sequence
  Description of Artificial Sequence: Synthetic oligonucleotide
cgccuuggggauugcauau

SEQ ID NO: 2144390 - RNA, 19 nt, Artificial Sequence
  Description of Artificial Sequence: Synthetic oligonucleotide
ccagucccugugggaccag

SEQ ID NO: 2144391 - RNA, 19 nt, Artificial Sequence
  Description of Artificial Sequence: Synthetic oligonucleotide
cgaugaccuccaggaauga

SEQ ID NO: 2144392 - RNA, 19 nt, Artificial Sequence
  Description of Artificial Sequence: Synthetic oligonucleotide
cgcuuccgaugaccuccag

SEQ ID NO: 2144393 - RNA, 19 nt, Artificial Sequence
  Description of Artificial Sequence: Synthetic oligonucleotide
gccuuggggauugcauauu

SEQ ID NO: 2144394 - RNA, 19 nt, Artificial Sequence
  Description of Artificial Sequence: Synthetic oligonucleotide
cggagguacuagggaaaua

SEQ ID NO: 2144395 - RNA, 19 nt, Artificial Sequence
  Description of Artificial Sequence: Synthetic oligonucleotide
cccgcggaacagccuuucu

SEQ ID NO: 2144396 - RNA, 19 nt, Artificial Sequence
  Description of Artificial Sequence: Synthetic oligonucleotide
cccagccuaggagcucucu

SEQ ID NO: 2144397 - RNA, 19 nt, Artificial Sequence
  Description of Artificial Sequence: Synthetic oligonucleotide
gugggacguuugggagcau

SEQ ID NO: 2144398 - RNA, 19 nt, Artificial Sequence
  Description of Artificial Sequence: Synthetic oligonucleotide
gcgggaccuugguggucau

SEQ ID NO: 2144399 - RNA, 19 nt, Artificial Sequence
  Description of Artificial Sequence: Synthetic oligonucleotide
gcggcccgcggaacagccu

SEQ ID NO: 2144400 - RNA, 19 nt, Artificial Sequence
  Description of Artificial Sequence: Synthetic oligonucleotide
cggcccgcggaacagccuu

SEQ ID NO: 2144401 - RNA, 19 nt, Artificial Sequence
  Description of Artificial Sequence: Synthetic oligonucleotide
ggcccgcggaacagccuuu

SEQ ID NO: 2144402 - RNA, 19 nt, Artificial Sequence
  Description of Artificial Sequence: Synthetic oligonucleotide
ucacauaaaacccaaaugg

SEQ ID NO: 2144403 - RNA, 19 nt, Artificial Sequence
  Description of Artificial Sequence: Synthetic oligonucleotide
aauuuuaugccacauacag

SEQ ID NO: 2144404 - RNA, 19 nt, Artificial Sequence
  Description of Artificial Sequence: Synthetic oligonucleotide
aaaugcacgaccaagaccc

SEQ ID NO: 2144405 - RNA, 19 nt, Artificial Sequence
  Description of Artificial Sequence: Synthetic oligonucleotide
uuuuaugccacauacagca

SEQ ID NO: 2144406 - RNA, 19 nt, Artificial Sequence
  Description of Artificial Sequence: Synthetic oligonucleotide
gaugauuuauccuuucccg

SEQ ID NO: 2144407 - RNA, 19 nt, Artificial Sequence
  Description of Artificial Sequence: Synthetic oligonucleotide
uaagaccucacauaaaacc

SEQ ID NO: 2144408 - RNA, 19 nt, Artificial Sequence
  Description of Artificial Sequence: Synthetic oligonucleotide
aaaacucgcauuuacaaaa

SEQ ID NO: 2144409 - RNA, 19 nt, Artificial Sequence
  Description of Artificial Sequence: Synthetic oligonucleotide
aaaauguuucuagagcuac

SEQ ID NO: 2144410 - RNA, 19 nt, Artificial Sequence
  Description of Artificial Sequence: Synthetic oligonucleotide
aagaccucacauaaaaccc

SEQ ID NO: 2144411 - RNA, 19 nt, Artificial Sequence
  Description of Artificial Sequence: Synthetic oligonucleotide
aacugaaaauacugcagac

SEQ ID NO: 2144412 - RNA, 19 nt, Artificial Sequence
  Description of Artificial Sequence: Synthetic oligonucleotide
aauagacuaagcgacccgc

SEQ ID NO: 2144413 - RNA, 19 nt, Artificial Sequence
  Description of Artificial Sequence: Synthetic oligonucleotide
acaauuguuaggaaaaugg

SEQ ID NO: 2144414 - RNA, 19 nt, Artificial Sequence
  Description of Artificial Sequence: Synthetic oligonucleotide
auacugcagacacaaaugc

SEQ ID NO: 2144415 - RNA, 19 nt, Artificial Sequence
  Description of Artificial Sequence: Synthetic oligonucleotide
uuguuaggaaaauggaugg

SEQ ID NO: 2144416 - RNA, 19 nt, Artificial Sequence
  Description of Artificial Sequence: Synthetic oligonucleotide
uaaacaaccagcaaaugau

SEQ ID NO: 2144417 - RNA, 19 nt, Artificial Sequence
  Description of Artificial Sequence: Synthetic oligonucleotide
accagcaaaugauuuaacc

SEQ ID NO: 2144418 - RNA, 19 nt, Artificial Sequence
  Description of Artificial Sequence: Synthetic oligonucleotide
uguaacugaaaauacugca

SEQ ID NO: 2144419 - RNA, 19 nt, Artificial Sequence
  Description of Artificial Sequence: Synthetic oligonucleotide
uguaggauauaaaacuagc

SEQ ID NO: 2144420 - RNA, 19 nt, Artificial Sequence
  Description of Artificial Sequence: Synthetic oligonucleotide
ucuauuuucugguuguacc

SEQ ID NO: 2144421 - RNA, 19 nt, Artificial Sequence
  Description of Artificial Sequence: Synthetic oligonucleotide
aaauggauggccaugacca

SEQ ID NO: 2144422 - RNA, 19 nt, Artificial Sequence
  Description of Artificial Sequence: Synthetic oligonucleotide
ugcuguaggauauaaaacu

SEQ ID NO: 2144423 - RNA, 19 nt, Artificial Sequence
  Description of Artificial Sequence: Synthetic oligonucleotide
ugauuuauccuuucccgcg

SEQ ID NO: 2144424 - RNA, 19 nt, Artificial Sequence
  Description of Artificial Sequence: Synthetic oligonucleotide
ugaugauuuauccuuuccc

SEQ ID NO: 2144425 - RNA, 19 nt, Artificial Sequence
  Description of Artificial Sequence: Synthetic oligonucleotide
auaaacaaccagcaaauga

SEQ ID NO: 2144426 - RNA, 19 nt, Artificial Sequence
  Description of Artificial Sequence: Synthetic oligonucleotide
augacgaaugguuagucgg

SEQ ID NO: 2144427 - RNA, 19 nt, Artificial Sequence
  Description of Artificial Sequence: Synthetic oligonucleotide
augauuuauccuuucccgc

SEQ ID NO: 2144428 - RNA, 19 nt, Artificial Sequence
  Description of Artificial Sequence: Synthetic oligonucleotide
uuugucugaugauuuaucc

SEQ ID NO: 2144429 - RNA, 19 nt, Artificial Sequence
  Description of Artificial Sequence: Synthetic oligonucleotide
accacugacagacaugacg

SEQ ID NO: 2144430 - RNA, 19 nt, Artificial Sequence
  Description of Artificial Sequence: Synthetic oligonucleotide
uauuaucacaauuguuagg

SEQ ID NO: 2144431 - RNA, 19 nt, Artificial Sequence
  Description of Artificial Sequence: Synthetic oligonucleotide
cuuaguacgcuuuaugcug

SEQ ID NO: 2144432 - RNA, 19 nt, Artificial Sequence
  Description of Artificial Sequence: Synthetic oligonucleotide
auuguuaggaaaauggaug

SEQ ID NO: 2144433 - RNA, 19 nt, Artificial Sequence
  Description of Artificial Sequence: Synthetic oligonucleotide
augaggugagauuuccucc

SEQ ID NO: 2144434 - RNA, 19 nt, Artificial Sequence
  Description of Artificial Sequence: Synthetic oligonucleotide
ugggaaacaguucuacuag

SEQ ID NO: 2144435 - RNA, 19 nt, Artificial Sequence
  Description of Artificial Sequence: Synthetic oligonucleotide
uucgcguccaccuuggcag

SEQ ID NO: 2144436 - RNA, 19 nt, Artificial Sequence
  Description of Artificial Sequence: Synthetic oligonucleotide
aaugguuagucggacuugg

SEQ ID NO: 2144437 - RNA, 19 nt, Artificial Sequence
  Description of Artificial Sequence: Synthetic oligonucleotide
acaaaugcacgaccaagac

SEQ ID NO: 2144438 - RNA, 19 nt, Artificial Sequence
  Description of Artificial Sequence: Synthetic oligonucleotide
acggaauagacuaagcgac

SEQ ID NO: 2144439 - RNA, 19 nt, Artificial Sequence
  Description of Artificial Sequence: Synthetic oligonucleotide
cacuuaguacgcuuuaugc

SEQ ID NO: 2144440 - RNA, 19 nt, Artificial Sequence
  Description of Artificial Sequence: Synthetic oligonucleotide
aaccccgucacggagcugc

SEQ ID NO: 2144441 - RNA, 19 nt, Artificial Sequence
  Description of Artificial Sequence: Synthetic oligonucleotide
gauuuauccuuucccgcgg

SEQ ID NO: 2144442 - RNA, 19 nt, Artificial Sequence
  Description of Artificial Sequence: Synthetic oligonucleotide
ugacagacaugacgaaugg

SEQ ID NO: 2144443 - RNA, 19 nt, Artificial Sequence
  Description of Artificial Sequence: Synthetic oligonucleotide
acauacucaaaauguccac

SEQ ID NO: 2144444 - RNA, 19 nt, Artificial Sequence
  Description of Artificial Sequence: Synthetic oligonucleotide
uccucaauuccacugacuc

SEQ ID NO: 2144445 - RNA, 19 nt, Artificial Sequence
  Description of Artificial Sequence: Synthetic oligonucleotide
gcauuuacaaaauaguuga

SEQ ID NO: 2144446 - RNA, 19 nt, Artificial Sequence
  Description of Artificial Sequence: Synthetic oligonucleotide
uuaugccacauacagcaca

SEQ ID NO: 2144447 - RNA, 19 nt, Artificial Sequence
  Description of Artificial Sequence: Synthetic oligonucleotide
aauuguuaggaaaauggau

SEQ ID NO: 2144448 - RNA, 19 nt, Artificial Sequence
  Description of Artificial Sequence: Synthetic oligonucleotide
uaucacaauuguuaggaaa

SEQ ID NO: 2144449 - RNA, 19 nt, Artificial Sequence
  Description of Artificial Sequence: Synthetic oligonucleotide
augauuuaaccucuuaaaa

SEQ ID NO: 2144450 - RNA, 19 nt, Artificial Sequence
  Description of Artificial Sequence: Synthetic oligonucleotide
agaaacacgagaccagaug

SEQ ID NO: 2144451 - RNA, 19 nt, Artificial Sequence
  Description of Artificial Sequence: Synthetic oligonucleotide
acuuaguacgcuuuaugcu

SEQ ID NO: 2144452 - RNA, 19 nt, Artificial Sequence
  Description of Artificial Sequence: Synthetic oligonucleotide
ugucugaugauuuauccuu

SEQ ID NO: 2144453 - RNA, 19 nt, Artificial Sequence
  Description of Artificial Sequence: Synthetic oligonucleotide
uauuccucuggauuguaca

SEQ ID NO: 2144454 - RNA, 19 nt, Artificial Sequence
  Description of Artificial Sequence: Synthetic oligonucleotide
uagacuaagcgacccgccg

SEQ ID NO: 2144455 - RNA, 19 nt, Artificial Sequence
  Description of Artificial Sequence: Synthetic oligonucleotide
gaugaggugagauuuccuc

SEQ ID NO: 2144456 - RNA, 19 nt, Artificial Sequence
  Description of Artificial Sequence: Synthetic oligonucleotide
acauacagcacauacucaa

SEQ ID NO: 2144457 - RNA, 19 nt, Artificial Sequence
  Description of Artificial Sequence: Synthetic oligonucleotide
gaauagacuaagcgacccg

SEQ ID NO: 2144458 - RNA, 19 nt, Artificial Sequence
  Description of Artificial Sequence: Synthetic oligonucleotide
cuguaggauauaaaacuag

SEQ ID NO: 2144459 - RNA, 19 nt, Artificial Sequence
  Description of Artificial Sequence: Synthetic oligonucleotide
ugauugagcauucuauuuu

SEQ ID NO: 2144460 - RNA, 19 nt, Artificial Sequence
  Description of Artificial Sequence: Synthetic oligonucleotide
agacuaagcgacccgccgc

SEQ ID NO: 2144461 - RNA, 19 nt, Artificial Sequence
  Description of Artificial Sequence: Synthetic oligonucleotide
auacucaaaauguccaccu

SEQ ID NO: 2144462 - RNA, 19 nt, Artificial Sequence
  Description of Artificial Sequence: Synthetic oligonucleotide
cagaucuguagucugcugg

SEQ ID NO: 2144463 - RNA, 19 nt, Artificial Sequence
  Description of Artificial Sequence: Synthetic oligonucleotide
gauugagcauucuauuuuc

SEQ ID NO: 2144464 - RNA, 19 nt, Artificial Sequence
  Description of Artificial Sequence: Synthetic oligonucleotide
gauuguacacgaagggagg

SEQ ID NO: 2144465 - RNA, 19 nt, Artificial Sequence
  Description of Artificial Sequence: Synthetic oligonucleotide
caaaauguccaccuuucac

SEQ ID NO: 2144466 - RNA, 19 nt, Artificial Sequence
  Description of Artificial Sequence: Synthetic oligonucleotide
auuuauccuuucccgcggc

SEQ ID NO: 2144467 - RNA, 19 nt, Artificial Sequence
  Description of Artificial Sequence: Synthetic oligonucleotide
caugacgaaugguuagucg

SEQ ID NO: 2144468 - RNA, 19 nt, Artificial Sequence
  Description of Artificial Sequence: Synthetic oligonucleotide
uuucccuaagaccucacau

SEQ ID NO: 2144469 - RNA, 19 nt, Artificial Sequence
  Description of Artificial Sequence: Synthetic oligonucleotide
acaguucuacuagaaacac

SEQ ID NO: 2144470 - RNA, 19 nt, Artificial Sequence
  Description of Artificial Sequence: Synthetic oligonucleotide
guaggauauaaaacuagcc

SEQ ID NO: 2144471 - RNA, 19 nt, Artificial Sequence
  Description of Artificial Sequence: Synthetic oligonucleotide
auuguacacgaagggaggc

SEQ ID NO: 2144472 - RNA, 19 nt, Artificial Sequence
  Description of Artificial Sequence: Synthetic oligonucleotide
agacaugacgaaugguuag

SEQ ID NO: 2144473 - RNA, 19 nt, Artificial Sequence
  Description of Artificial Sequence: Synthetic oligonucleotide
uugggaaacaguucuacua

SEQ ID NO: 2144474 - RNA, 19 nt, Artificial Sequence
  Description of Artificial Sequence: Synthetic oligonucleotide
uuuugucugaugauuuauc

SEQ ID NO: 2144475 - RNA, 19 nt, Artificial Sequence
  Description of Artificial Sequence: Synthetic oligonucleotide
guacgcuuuaugcuguagg

SEQ ID NO: 2144476 - RNA, 19 nt, Artificial Sequence
  Description of Artificial Sequence: Synthetic oligonucleotide
uagucugcuggucagccgc

SEQ ID NO: 2144477 - RNA, 19 nt, Artificial Sequence
  Description of Artificial Sequence: Synthetic oligonucleotide
ucccuaagaccucacauaa

SEQ ID NO: 2144478 - RNA, 19 nt, Artificial Sequence
  Description of Artificial Sequence: Synthetic oligonucleotide
uccugauugagcauucuau

SEQ ID NO: 2144479 - RNA, 19 nt, Artificial Sequence
  Description of Artificial Sequence: Synthetic oligonucleotide
uugagcauucuauuuucug

SEQ ID NO: 2144480 - RNA, 19 nt, Artificial Sequence
  Description of Artificial Sequence: Synthetic oligonucleotide
ucgcauuuacaaaauaguu

SEQ ID NO: 2144481 - RNA, 19 nt, Artificial Sequence
  Description of Artificial Sequence: Synthetic oligonucleotide
acucgcauuuacaaaauag

SEQ ID NO: 2144482 - RNA, 19 nt, Artificial Sequence
  Description of Artificial Sequence: Synthetic oligonucleotide
acgaccaagaccccaaaca

SEQ ID NO: 2144483 - RNA, 19 nt, Artificial Sequence
  Description of Artificial Sequence: Synthetic oligonucleotide
uacgcuuuaugcuguagga

SEQ ID NO: 2144484 - RNA, 19 nt, Artificial Sequence
  Description of Artificial Sequence: Synthetic oligonucleotide
gaaacacgagaccagaugu

SEQ ID NO: 2144485 - RNA, 19 nt, Artificial Sequence
  Description of Artificial Sequence: Synthetic oligonucleotide
uuaguacgcuuuaugcugu

SEQ ID NO: 2144486 - RNA, 19 nt, Artificial Sequence
  Description of Artificial Sequence: Synthetic oligonucleotide
caaaugcacgaccaagacc

SEQ ID NO: 2144487 - RNA, 19 nt, Artificial Sequence
  Description of Artificial Sequence: Synthetic oligonucleotide
uuuugggaaacaguucuac

SEQ ID NO: 2144488 - RNA, 19 nt, Artificial Sequence
  Description of Artificial Sequence: Synthetic oligonucleotide
augcuguaggauauaaaac

SEQ ID NO: 2144489 - RNA, 19 nt, Artificial Sequence
  Description of Artificial Sequence: Synthetic oligonucleotide
gacuaagcgacccgccgcg

SEQ ID NO: 2144490 - RNA, 19 nt, Artificial Sequence
  Description of Artificial Sequence: Synthetic oligonucleotide
ugguuagucggacuuggcu

SEQ ID NO: 2144491 - RNA, 19 nt, Artificial Sequence
  Description of Artificial Sequence: Synthetic oligonucleotide
acacuuaguacgcuuuaug

SEQ ID NO: 2144492 - RNA, 19 nt, Artificial Sequence
  Description of Artificial Sequence: Synthetic oligonucleotide
gaccagauguaacugaaaa

SEQ ID NO: 2144493 - RNA, 19 nt, Artificial Sequence
  Description of Artificial Sequence: Synthetic oligonucleotide
acucacaauuuuaugccac

SEQ ID NO: 2144494 - RNA, 19 nt, Artificial Sequence
  Description of Artificial Sequence: Synthetic oligonucleotide
agcacauacucaaaauguc

SEQ ID NO: 2144495 - RNA, 19 nt, Artificial Sequence
  Description of Artificial Sequence: Synthetic oligonucleotide
cuaagaccucacauaaaac

SEQ ID NO: 2144496 - RNA, 19 nt, Artificial Sequence
  Description of Artificial Sequence: Synthetic oligonucleotide
ugacgaaugguuagucgga

SEQ ID NO: 2144497 - RNA, 19 nt, Artificial Sequence
  Description of Artificial Sequence: Synthetic oligonucleotide
cugaugauuuauccuuucc

SEQ ID NO: 2144498 - RNA, 19 nt, Artificial Sequence
  Description of Artificial Sequence: Synthetic oligonucleotide
cacggaauagacuaagcga

SEQ ID NO: 2144499 - RNA, 19 nt, Artificial Sequence
  Description of Artificial Sequence: Synthetic oligonucleotide
caauuguuaggaaaaugga

SEQ ID NO: 2144500 - RNA, 19 nt, Artificial Sequence
  Description of Artificial Sequence: Synthetic oligonucleotide
uccucuggauuguacacga

SEQ ID NO: 2144501 - RNA, 19 nt, Artificial Sequence
  Description of Artificial Sequence: Synthetic oligonucleotide
cacauacucaaaaugucca

SEQ ID NO: 2144502 - RNA, 19 nt, Artificial Sequence
  Description of Artificial Sequence: Synthetic oligonucleotide
gcacggaauagacuaagcg

SEQ ID NO: 2144503 - RNA, 19 nt, Artificial Sequence
  Description of Artificial Sequence: Synthetic oligonucleotide
aucacaauuguuaggaaaa

SEQ ID NO: 2144504 - RNA, 19 nt, Artificial Sequence
  Description of Artificial Sequence: Synthetic oligonucleotide
uuuucccuaagaccucaca

SEQ ID NO: 2144505 - RNA, 19 nt, Artificial Sequence
  Description of Artificial Sequence: Synthetic oligonucleotide
gaaacaguucuacuagaaa

SEQ ID NO: 2144506 - RNA, 19 nt, Artificial Sequence
  Description of Artificial Sequence: Synthetic oligonucleotide
uacggaauguuauggugac

SEQ ID NO: 2144507 - RNA, 19 nt, Artificial Sequence
  Description of Artificial Sequence: Synthetic oligonucleotide
caguucuacuagaaacacg

SEQ ID NO: 2144508 - RNA, 19 nt, Artificial Sequence
  Description of Artificial Sequence: Synthetic oligonucleotide
agccgcuucagccuguuug

SEQ ID NO: 2144509 - RNA, 19 nt, Artificial Sequence
  Description of Artificial Sequence: Synthetic oligonucleotide
augucgaaccccgucacgg

SEQ ID NO: 2144510 - RNA, 19 nt, Artificial Sequence
  Description of Artificial Sequence: Synthetic oligonucleotide
acacaaaugcacgaccaag

SEQ ID NO: 2144511 - RNA, 19 nt, Artificial Sequence
  Description of Artificial Sequence: Synthetic oligonucleotide
caaaugguucccaauccuc

SEQ ID NO: 2144512 - RNA, 19 nt, Artificial Sequence
  Description of Artificial Sequence: Synthetic oligonucleotide
acucaaaauguccaccuuu

SEQ ID NO: 2144513 - RNA, 19 nt, Artificial Sequence
  Description of Artificial Sequence: Synthetic oligonucleotide
ucacagccucuccugauug

SEQ ID NO: 2144514 - RNA, 19 nt, Artificial Sequence
  Description of Artificial Sequence: Synthetic oligonucleotide
uaagcgacccgccgcgggg

SEQ ID NO: 2144515 - RNA, 19 nt, Artificial Sequence
  Description of Artificial Sequence: Synthetic oligonucleotide
agauguaacugaaaauacu

SEQ ID NO: 2144516 - RNA, 19 nt, Artificial Sequence
  Description of Artificial Sequence: Synthetic oligonucleotide
uguagucugcuggucagcc

SEQ ID NO: 2144517 - RNA, 19 nt, Artificial Sequence
  Description of Artificial Sequence: Synthetic oligonucleotide
auagacuaagcgacccgcc

SEQ ID NO: 2144518 - RNA, 19 nt, Artificial Sequence
  Description of Artificial Sequence: Synthetic oligonucleotide
cuacggaauguuaugguga

SEQ ID NO: 2144519 - RNA, 19 nt, Artificial Sequence
  Description of Artificial Sequence: Synthetic oligonucleotide
uuuauccuuucccgcggcc

SEQ ID NO: 2144520 - RNA, 19 nt, Artificial Sequence
  Description of Artificial Sequence: Synthetic oligonucleotide
aacacgagaccagauguaa

SEQ ID NO: 2144521 - RNA, 19 nt, Artificial Sequence
  Description of Artificial Sequence: Synthetic oligonucleotide
acuagaaacacgagaccag

SEQ ID NO: 2144522 - RNA, 19 nt, Artificial Sequence
  Description of Artificial Sequence: Synthetic oligonucleotide
gaugucgaaccccgucacg

SEQ ID NO: 2144523 - RNA, 19 nt, Artificial Sequence
  Description of Artificial Sequence: Synthetic oligonucleotide
ucggacuuggcuucuuucu

SEQ ID NO: 2144524 - RNA, 19 nt, Artificial Sequence
  Description of Artificial Sequence: Synthetic oligonucleotide
uucuccgucucuccguucu

SEQ ID NO: 2144525 - RNA, 19 nt, Artificial Sequence
  Description of Artificial Sequence: Synthetic oligonucleotide
acgaagggaggcaggaacc

SEQ ID NO: 2144526 - RNA, 19 nt, Artificial Sequence
  Description of Artificial Sequence: Synthetic oligonucleotide
cacaaaugcacgaccaaga

SEQ ID NO: 2144527 - RNA, 19 nt, Artificial Sequence
  Description of Artificial Sequence: Synthetic oligonucleotide
acagacaugacgaaugguu

SEQ ID NO: 2144528 - RNA, 19 nt, Artificial Sequence
  Description of Artificial Sequence: Synthetic oligonucleotide
acaaccagcaaaugauuua

SEQ ID NO: 2144529 - RNA, 19 nt, Artificial Sequence
  Description of Artificial Sequence: Synthetic oligonucleotide
uucccuaagaccucacaua

SEQ ID NO: 2144530 - RNA, 19 nt, Artificial Sequence
  Description of Artificial Sequence: Synthetic oligonucleotide
agcaaaugauuuaaccucu

SEQ ID NO: 2144531 - RNA, 19 nt, Artificial Sequence
  Description of Artificial Sequence: Synthetic oligonucleotide
cacgaagggaggcaggaac

SEQ ID NO: 2144532 - RNA, 19 nt, Artificial Sequence
  Description of Artificial Sequence: Synthetic oligonucleotide
gacucacaauuuuaugcca

SEQ ID NO: 2144533 - RNA, 19 nt, Artificial Sequence
  Description of Artificial Sequence: Synthetic oligonucleotide
uuuaugccacauacagcac

SEQ ID NO: 2144534 - RNA, 19 nt, Artificial Sequence
  Description of Artificial Sequence: Synthetic oligonucleotide
guuagucggacuuggcuuc

SEQ ID NO: 2144535 - RNA, 19 nt, Artificial Sequence
  Description of Artificial Sequence: Synthetic oligonucleotide
aacaaccagcaaaugauuu

SEQ ID NO: 2144536 - RNA, 19 nt, Artificial Sequence
  Description of Artificial Sequence: Synthetic oligonucleotide
cacaauuguuaggaaaaug

SEQ ID NO: 2144537 - RNA, 19 nt, Artificial Sequence
  Description of Artificial Sequence: Synthetic oligonucleotide
acaugacgaaugguuaguc

SEQ ID NO: 2144538 - RNA, 19 nt, Artificial Sequence
  Description of Artificial Sequence: Synthetic oligonucleotide
uaaaacccaaaugguuccc

SEQ ID NO: 2144539 - RNA, 19 nt, Artificial Sequence
  Description of Artificial Sequence: Synthetic oligonucleotide
ucucuccguucucugcagg

SEQ ID NO: 2144540 - RNA, 19 nt, Artificial Sequence
  Description of Artificial Sequence: Synthetic oligonucleotide
ucugguucuccgucucucc

SEQ ID NO: 2144541 - RNA, 19 nt, Artificial Sequence
  Description of Artificial Sequence: Synthetic oligonucleotide
aaauguuucuagagcuacu

SEQ ID NO: 2144542 - RNA, 19 nt, Artificial Sequence
  Description of Artificial Sequence: Synthetic oligonucleotide
aggugagauuuccucccac

SEQ ID NO: 2144543 - RNA, 19 nt, Artificial Sequence
  Description of Artificial Sequence: Synthetic oligonucleotide
aacccaaaugguucccaau

SEQ ID NO: 2144544 - RNA, 19 nt, Artificial Sequence
  Description of Artificial Sequence: Synthetic oligonucleotide
aaugcacgaccaagacccc

SEQ ID NO: 2144545 - RNA, 19 nt, Artificial Sequence
  Description of Artificial Sequence: Synthetic oligonucleotide
auauuccucuggauuguac

SEQ ID NO: 2144546 - RNA, 19 nt, Artificial Sequence
  Description of Artificial Sequence: Synthetic oligonucleotide
aacucgcauuuacaaaaua

SEQ ID NO: 2144547 - RNA, 19 nt, Artificial Sequence
  Description of Artificial Sequence: Synthetic oligonucleotide
uccgcgcugaccuuccucu

SEQ ID NO: 2144548 - RNA, 19 nt, Artificial Sequence
  Description of Artificial Sequence: Synthetic oligonucleotide
aggaaccacugacagacau

SEQ ID NO: 2144549 - RNA, 19 nt, Artificial Sequence
  Description of Artificial Sequence: Synthetic oligonucleotide
uagaaacacgagaccagau

SEQ ID NO: 2144550 - RNA, 19 nt, Artificial Sequence
  Description of Artificial Sequence: Synthetic oligonucleotide
uccaccuuucacagcauua

SEQ ID NO: 2144551 - RNA, 19 nt, Artificial Sequence
  Description of Artificial Sequence: Synthetic oligonucleotide
gagcauucuauuuucuggu

SEQ ID NO: 2144552 - RNA, 19 nt, Artificial Sequence
  Description of Artificial Sequence: Synthetic oligonucleotide
acagcauuauuaucacaau

SEQ ID NO: 2144553 - RNA, 19 nt, Artificial Sequence
  Description of Artificial Sequence: Synthetic oligonucleotide
ggccaugaccaucagagac

SEQ ID NO: 2144554 - RNA, 19 nt, Artificial Sequence
  Description of Artificial Sequence: Synthetic oligonucleotide
ucgaaccccgucacggagc

SEQ ID NO: 2144555 - RNA, 19 nt, Artificial Sequence
  Description of Artificial Sequence: Synthetic oligonucleotide
augggaugaggugagauuu

SEQ ID NO: 2144556 - RNA, 19 nt, Artificial Sequence
  Description of Artificial Sequence: Synthetic oligonucleotide
ggaauagacuaagcgaccc

SEQ ID NO: 2144557 - RNA, 19 nt, Artificial Sequence
  Description of Artificial Sequence: Synthetic oligonucleotide
cucgcauuuacaaaauagu

SEQ ID NO: 2144558 - RNA, 19 nt, Artificial Sequence
  Description of Artificial Sequence: Synthetic oligonucleotide
ugcacgaccaagaccccaa

SEQ ID NO: 2144559 - RNA, 19 nt, Artificial Sequence
  Description of Artificial Sequence: Synthetic oligonucleotide
agacacaaaugcacgacca

SEQ ID NO: 2144560 - RNA, 19 nt, Artificial Sequence
  Description of Artificial Sequence: Synthetic oligonucleotide
ugaccuuccucuugggcau

SEQ ID NO: 2144561 - RNA, 19 nt, Artificial Sequence
  Description of Artificial Sequence: Synthetic oligonucleotide
aaacaaccagcaaaugauu

SEQ ID NO: 2144562 - RNA, 19 nt, Artificial Sequence
  Description of Artificial Sequence: Synthetic oligonucleotide
gaaugguuagucggacuug

SEQ ID NO: 2144563 - RNA, 19 nt, Artificial Sequence
  Description of Artificial Sequence: Synthetic oligonucleotide
ugcgcugccagccgccacc

SEQ ID NO: 2144564 - RNA, 19 nt, Artificial Sequence
  Description of Artificial Sequence: Synthetic oligonucleotide
ucaauuccacugacucaca

SEQ ID NO: 2144565 - RNA, 19 nt, Artificial Sequence
  Description of Artificial Sequence: Synthetic oligonucleotide
agaccccaaacacuuagua

SEQ ID NO: 2144566 - RNA, 19 nt, Artificial Sequence
  Description of Artificial Sequence: Synthetic oligonucleotide
uuauccuuucccgcggccu

SEQ ID NO: 2144567 - RNA, 19 nt, Artificial Sequence
  Description of Artificial Sequence: Synthetic oligonucleotide
ccaauccucaauuccacug

SEQ ID NO: 2144568 - RNA, 19 nt, Artificial Sequence
  Description of Artificial Sequence: Synthetic oligonucleotide
aaacucgcauuuacaaaau

SEQ ID NO: 2144569 - RNA, 19 nt, Artificial Sequence
  Description of Artificial Sequence: Synthetic oligonucleotide
aggcagaucuguagucugc

SEQ ID NO: 2144570 - RNA, 19 nt, Artificial Sequence
  Description of Artificial Sequence: Synthetic oligonucleotide
cuguuugcccuuugcuccc

SEQ ID NO: 2144571 - RNA, 19 nt, Artificial Sequence
  Description of Artificial Sequence: Synthetic oligonucleotide
accaagaccccaaacacuu

SEQ ID NO: 2144572 - RNA, 19 nt, Artificial Sequence
  Description of Artificial Sequence: Synthetic oligonucleotide
cucacaauuuuaugccaca

SEQ ID NO: 2144573 - RNA, 19 nt, Artificial Sequence
  Description of Artificial Sequence: Synthetic oligonucleotide
ucacaauuguuaggaaaau

SEQ ID NO: 2144574 - RNA, 19 nt, Artificial Sequence
  Description of Artificial Sequence: Synthetic oligonucleotide
acacgagaccagauguaac

SEQ ID NO: 2144575 - RNA, 19 nt, Artificial Sequence
  Description of Artificial Sequence: Synthetic oligonucleotide
cuaagcgacccgccgcggg

SEQ ID NO: 2144576 - RNA, 19 nt, Artificial Sequence
  Description of Artificial Sequence: Synthetic oligonucleotide
agaccucacauaaaaccca

SEQ ID NO: 2144577 - RNA, 19 nt, Artificial Sequence
  Description of Artificial Sequence: Synthetic oligonucleotide
acgaaugguuagucggacu

SEQ ID NO: 2144578 - RNA, 19 nt, Artificial Sequence
  Description of Artificial Sequence: Synthetic oligonucleotide
acugacagacaugacgaau

SEQ ID NO: 2144579 - RNA, 19 nt, Artificial Sequence
  Description of Artificial Sequence: Synthetic oligonucleotide
aguuuucccuaagaccuca

SEQ ID NO: 2144580 - RNA, 19 nt, Artificial Sequence
  Description of Artificial Sequence: Synthetic oligonucleotide
gucgaaccccgucacggag

SEQ ID NO: 2144581 - RNA, 19 nt, Artificial Sequence
  Description of Artificial Sequence: Synthetic oligonucleotide
cuuggccgcuccauccgcg

SEQ ID NO: 2144582 - RNA, 19 nt, Artificial Sequence
  Description of Artificial Sequence: Synthetic oligonucleotide
acgagaccagauguaacug

SEQ ID NO: 2144583 - RNA, 19 nt, Artificial Sequence
  Description of Artificial Sequence: Synthetic oligonucleotide
gacgaaugguuagucggac

SEQ ID NO: 2144584 - RNA, 19 nt, Artificial Sequence
  Description of Artificial Sequence: Synthetic oligonucleotide
accuuucacagcauuauua

SEQ ID NO: 2144585 - RNA, 19 nt, Artificial Sequence
  Description of Artificial Sequence: Synthetic oligonucleotide
acggaauguuauggugacc

SEQ ID NO: 2144586 - RNA, 19 nt, Artificial Sequence
  Description of Artificial Sequence: Synthetic oligonucleotide
caccgcacggaauagacua

SEQ ID NO: 2144587 - RNA, 19 nt, Artificial Sequence
  Description of Artificial Sequence: Synthetic oligonucleotide
ugucgaaccccgucacgga

SEQ ID NO: 2144588 - RNA, 19 nt, Artificial Sequence
  Description of Artificial Sequence: Synthetic oligonucleotide
uggccgacagccucgcgga

SEQ ID NO: 2144589 - RNA, 19 nt, Artificial Sequence
  Description of Artificial Sequence: Synthetic oligonucleotide
ccuaagaccucacauaaaa

SEQ ID NO: 2144590 - RNA, 19 nt, Artificial Sequence
  Description of Artificial Sequence: Synthetic oligonucleotide
ugggaugaggugagauuuc

SEQ ID NO: 2144591 - RNA, 19 nt, Artificial Sequence
  Description of Artificial Sequence: Synthetic oligonucleotide
ucuaccucagaggcuggac

SEQ ID NO: 2144592 - RNA, 19 nt, Artificial Sequence
  Description of Artificial Sequence: Synthetic oligonucleotide
uuugcuccccucuucccuu

SEQ ID NO: 2144593 - RNA, 19 nt, Artificial Sequence
  Description of Artificial Sequence: Synthetic oligonucleotide
ggaaaauggauggccauga

SEQ ID NO: 2144594 - RNA, 19 nt, Artificial Sequence
  Description of Artificial Sequence: Synthetic oligonucleotide
cucagaggcuggacucugg

SEQ ID NO: 2144595 - RNA, 19 nt, Artificial Sequence
  Description of Artificial Sequence: Synthetic oligonucleotide
acagggcaaggaccgagga

SEQ ID NO: 2144596 - RNA, 19 nt, Artificial Sequence
  Description of Artificial Sequence: Synthetic oligonucleotide
uccguucucugcaggcaga

SEQ ID NO: 2144597 - RNA, 19 nt, Artificial Sequence
  Description of Artificial Sequence: Synthetic oligonucleotide
ugguucuccgucucuccgu

SEQ ID NO: 2144598 - RNA, 19 nt, Artificial Sequence
  Description of Artificial Sequence: Synthetic oligonucleotide
aguacgcuuuaugcuguag

SEQ ID NO: 2144599 - RNA, 19 nt, Artificial Sequence
  Description of Artificial Sequence: Synthetic oligonucleotide
augguuagucggacuuggc

SEQ ID NO: 2144600 - RNA, 19 nt, Artificial Sequence
  Description of Artificial Sequence: Synthetic oligonucleotide
gagacaguucugacagggc

SEQ ID NO: 2144601 - RNA, 19 nt, Artificial Sequence
  Description of Artificial Sequence: Synthetic oligonucleotide
uauccuuucccgcggccuu

SEQ ID NO: 2144602 - RNA, 19 nt, Artificial Sequence
  Description of Artificial Sequence: Synthetic oligonucleotide
cccaaaugguucccaaucc

SEQ ID NO: 2144603 - RNA, 19 nt, Artificial Sequence
  Description of Artificial Sequence: Synthetic oligonucleotide
aaacacgagaccagaugua

SEQ ID NO: 2144604 - RNA, 19 nt, Artificial Sequence
  Description of Artificial Sequence: Synthetic oligonucleotide
uccgucucuccguucucug

SEQ ID NO: 2144605 - RNA, 19 nt, Artificial Sequence
  Description of Artificial Sequence: Synthetic oligonucleotide
cagacaugacgaaugguua

SEQ ID NO: 2144606 - RNA, 19 nt, Artificial Sequence
  Description of Artificial Sequence: Synthetic oligonucleotide
ccagauguaacugaaaaua

SEQ ID NO: 2144607 - RNA, 19 nt, Artificial Sequence
  Description of Artificial Sequence: Synthetic oligonucleotide
auccgcgcugaccuuccuc

SEQ ID NO: 2144608 - RNA, 19 nt, Artificial Sequence
  Description of Artificial Sequence: Synthetic oligonucleotide
cacgagaccagauguaacu

SEQ ID NO: 2144609 - RNA, 19 nt, Artificial Sequence
  Description of Artificial Sequence: Synthetic oligonucleotide
aaccacugacagacaugac

SEQ ID NO: 2144610 - RNA, 19 nt, Artificial Sequence
  Description of Artificial Sequence: Synthetic oligonucleotide
ggaauguuauggugacccc

SEQ ID NO: 2144611 - RNA, 19 nt, Artificial Sequence
  Description of Artificial Sequence: Synthetic oligonucleotide
cauuauuaucacaauuguu

SEQ ID NO: 2144612 - RNA, 19 nt, Artificial Sequence
  Description of Artificial Sequence: Synthetic oligonucleotide
gcauuauuaucacaauugu

SEQ ID NO: 2144613 - RNA, 19 nt, Artificial Sequence
  Description of Artificial Sequence: Synthetic oligonucleotide
ccucuacggaauguuaugg

SEQ ID NO: 2144614 - RNA, 19 nt, Artificial Sequence
  Description of Artificial Sequence: Synthetic oligonucleotide
cgugcgaugucgaaccccg

SEQ ID NO: 2144615 - RNA, 19 nt, Artificial Sequence
  Description of Artificial Sequence: Synthetic oligonucleotide
gucucuccguucucugcag

SEQ ID NO: 2144616 - RNA, 19 nt, Artificial Sequence
  Description of Artificial Sequence: Synthetic oligonucleotide
uggccaugaccaucagaga

SEQ ID NO: 2144617 - RNA, 19 nt, Artificial Sequence
  Description of Artificial Sequence: Synthetic oligonucleotide
ugggagggaggcgcgugcg

SEQ ID NO: 2144618 - RNA, 19 nt, Artificial Sequence
  Description of Artificial Sequence: Synthetic oligonucleotide
guacacgaagggaggcagg

SEQ ID NO: 2144619 - RNA, 19 nt, Artificial Sequence
  Description of Artificial Sequence: Synthetic oligonucleotide
ucgcguccaccuuggcagg

SEQ ID NO: 2144620 - RNA, 19 nt, Artificial Sequence
  Description of Artificial Sequence: Synthetic oligonucleotide
cacgaccaagaccccaaac

SEQ ID NO: 2144621 - RNA, 19 nt, Artificial Sequence
  Description of Artificial Sequence: Synthetic oligonucleotide
gucggacuuggcuucuuuc

SEQ ID NO: 2144622 - RNA, 19 nt, Artificial Sequence
  Description of Artificial Sequence: Synthetic oligonucleotide
uuuucggcuucgcguccac

SEQ ID NO: 2144623 - RNA, 19 nt, Artificial Sequence
  Description of Artificial Sequence: Synthetic oligonucleotide
cuucgcguccaccuuggca

SEQ ID NO: 2144624 - RNA, 19 nt, Artificial Sequence
  Description of Artificial Sequence: Synthetic oligonucleotide
gcgcgugcgaugucgaacc

SEQ ID NO: 2144625 - RNA, 19 nt, Artificial Sequence
  Description of Artificial Sequence: Synthetic oligonucleotide
accaucagagacaguucug

SEQ ID NO: 2144626 - RNA, 19 nt, Artificial Sequence
  Description of Artificial Sequence: Synthetic oligonucleotide
ggaggcgcgugcgaugucg

SEQ ID NO: 2144627 - RNA, 19 nt, Artificial Sequence
  Description of Artificial Sequence: Synthetic oligonucleotide
gacaugacgaaugguuagu

SEQ ID NO: 2144628 - RNA, 19 nt, Artificial Sequence
  Description of Artificial Sequence: Synthetic oligonucleotide
gagggaggcgcgugcgaug

SEQ ID NO: 2144629 - RNA, 19 nt, Artificial Sequence
  Description of Artificial Sequence: Synthetic oligonucleotide
ggaaacaguucuacuagaa

SEQ ID NO: 2144630 - RNA, 19 nt, Artificial Sequence
  Description of Artificial Sequence: Synthetic oligonucleotide
gggaaacaguucuacuaga

SEQ ID NO: 2144631 - RNA, 19 nt, Artificial Sequence
  Description of Artificial Sequence: Synthetic oligonucleotide
uuagucggacuuggcuucu

SEQ ID NO: 2144632 - RNA, 19 nt, Artificial Sequence
  Description of Artificial Sequence: Synthetic oligonucleotide
cugauugagcauucuauuu

SEQ ID NO: 2144633 - RNA, 19 nt, Artificial Sequence
  Description of Artificial Sequence: Synthetic oligonucleotide
gcgcugaccuuccucuugg

SEQ ID NO: 2144634 - RNA, 19 nt, Artificial Sequence
  Description of Artificial Sequence: Synthetic oligonucleotide
acgcuuuaugcuguaggau

SEQ ID NO: 2144635 - RNA, 19 nt, Artificial Sequence
  Description of Artificial Sequence: Synthetic oligonucleotide
cgaccaagaccccaaacac

SEQ ID NO: 2144636 - RNA, 19 nt, Artificial Sequence
  Description of Artificial Sequence: Synthetic oligonucleotide
caauuccacugacucacaa

SEQ ID NO: 2144637 - RNA, 19 nt, Artificial Sequence
  Description of Artificial Sequence: Synthetic oligonucleotide
uccauccgcgcugaccuuc

SEQ ID NO: 2144638 - RNA, 19 nt, Artificial Sequence
  Description of Artificial Sequence: Synthetic oligonucleotide
cugggagggaggcgcgugc

SEQ ID NO: 2144639 - RNA, 19 nt, Artificial Sequence
  Description of Artificial Sequence: Synthetic oligonucleotide
ggaaccacugacagacaug

SEQ ID NO: 2144640 - RNA, 19 nt, Artificial Sequence
  Description of Artificial Sequence: Synthetic oligonucleotide
acuaagcgacccgccgcgg

SEQ ID NO: 2144641 - RNA, 19 nt, Artificial Sequence
  Description of Artificial Sequence: Synthetic oligonucleotide
aaggaccgaggaguguuuu

SEQ ID NO: 2144642 - RNA, 19 nt, Artificial Sequence
  Description of Artificial Sequence: Synthetic oligonucleotide
gguuagucggacuuggcuu

SEQ ID NO: 2144643 - RNA, 19 nt, Artificial Sequence
  Description of Artificial Sequence: Synthetic oligonucleotide
cucuacggaauguuauggu

SEQ ID NO: 2144644 - RNA, 19 nt, Artificial Sequence
  Description of Artificial Sequence: Synthetic oligonucleotide
agggaggcgcgugcgaugu

SEQ ID NO: 2144645 - RNA, 19 nt, Artificial Sequence
  Description of Artificial Sequence: Synthetic oligonucleotide
gcgaugucgaaccccguca

SEQ ID NO: 2144646 - RNA, 19 nt, Artificial Sequence
  Description of Artificial Sequence: Synthetic oligonucleotide
cauuuacaaaauaguugau

SEQ ID NO: 2144647 - RNA, 19 nt, Artificial Sequence
  Description of Artificial Sequence: Synthetic oligonucleotide
agucggacuuggcuucuuu

SEQ ID NO: 2144648 - RNA, 19 nt, Artificial Sequence
  Description of Artificial Sequence: Synthetic oligonucleotide
cggaauagacuaagcgacc

SEQ ID NO: 2144649 - RNA, 19 nt, Artificial Sequence
  Description of Artificial Sequence: Synthetic oligonucleotide
uaguacgcuuuaugcugua

SEQ ID NO: 2144650 - RNA, 19 nt, Artificial Sequence
  Description of Artificial Sequence: Synthetic oligonucleotide
cccucuacggaauguuaug

SEQ ID NO: 2144651 - RNA, 19 nt, Artificial Sequence
  Description of Artificial Sequence: Synthetic oligonucleotide
ucguggcggcgcugggagg

SEQ ID NO: 2144652 - RNA, 19 nt, Artificial Sequence
  Description of Artificial Sequence: Synthetic oligonucleotide
ggcgcugggagggaggcgc

SEQ ID NO: 2144653 - RNA, 19 nt, Artificial Sequence
  Description of Artificial Sequence: Synthetic oligonucleotide
cuaccucagaggcuggacu

SEQ ID NO: 2144654 - RNA, 19 nt, Artificial Sequence
  Description of Artificial Sequence: Synthetic oligonucleotide
cccuuugcuccccucuucc

SEQ ID NO: 2144655 - RNA, 19 nt, Artificial Sequence
  Description of Artificial Sequence: Synthetic oligonucleotide
ucggcuucgcguccaccuu

SEQ ID NO: 2144656 - RNA, 19 nt, Artificial Sequence
  Description of Artificial Sequence: Synthetic oligonucleotide
ggugagauuuccucccacu

SEQ ID NO: 2144657 - RNA, 19 nt, Artificial Sequence
  Description of Artificial Sequence: Synthetic oligonucleotide
gcuccauccgcgcugaccu

SEQ ID NO: 2144658 - RNA, 19 nt, Artificial Sequence
  Description of Artificial Sequence: Synthetic oligonucleotide
cuccugauugagcauucua

SEQ ID NO: 2144659 - RNA, 19 nt, Artificial Sequence
  Description of Artificial Sequence: Synthetic oligonucleotide
gugagauuuccucccacuu

SEQ ID NO: 2144660 - RNA, 19 nt, Artificial Sequence
  Description of Artificial Sequence: Synthetic oligonucleotide
augcacgaccaagacccca

SEQ ID NO: 2144661 - RNA, 19 nt, Artificial Sequence
  Description of Artificial Sequence: Synthetic oligonucleotide
ucgcggagcggcgcuuggg

SEQ ID NO: 2144662 - RNA, 19 nt, Artificial Sequence
  Description of Artificial Sequence: Synthetic oligonucleotide
guuuucccuaagaccucac

SEQ ID NO: 2144663 - RNA, 19 nt, Artificial Sequence
  Description of Artificial Sequence: Synthetic oligonucleotide
agaccagauguaacugaaa

SEQ ID NO: 2144664 - RNA, 19 nt, Artificial Sequence
  Description of Artificial Sequence: Synthetic oligonucleotide
acagccucgcggagcggcg

SEQ ID NO: 2144665 - RNA, 19 nt, Artificial Sequence
  Description of Artificial Sequence: Synthetic oligonucleotide
gucacggagcugcgcugcc

SEQ ID NO: 2144666 - RNA, 19 nt, Artificial Sequence
  Description of Artificial Sequence: Synthetic oligonucleotide
uggccgcuccauccgcgcu

SEQ ID NO: 2144667 - RNA, 19 nt, Artificial Sequence
  Description of Artificial Sequence: Synthetic oligonucleotide
cuuggccgacagccucgcg

SEQ ID NO: 2144668 - RNA, 19 nt, Artificial Sequence
  Description of Artificial Sequence: Synthetic oligonucleotide
cacagccucuccugauuga

SEQ ID NO: 2144669 - RNA, 19 nt, Artificial Sequence
  Description of Artificial Sequence: Synthetic oligonucleotide
ccucaauuccacugacuca

SEQ ID NO: 2144670 - RNA, 19 nt, Artificial Sequence
  Description of Artificial Sequence: Synthetic oligonucleotide
ggcuucgcguccaccuugg

SEQ ID NO: 2144671 - RNA, 19 nt, Artificial Sequence
  Description of Artificial Sequence: Synthetic oligonucleotide
cucgcggagcggcgcuugg

SEQ ID NO: 2144672 - RNA, 19 nt, Artificial Sequence
  Description of Artificial Sequence: Synthetic oligonucleotide
ccucuucccuuuuguuugc

SEQ ID NO: 2144673 - RNA, 19 nt, Artificial Sequence
  Description of Artificial Sequence: Synthetic oligonucleotide
gccaccgcacggaauagac

SEQ ID NO: 2144674 - RNA, 19 nt, Artificial Sequence
  Description of Artificial Sequence: Synthetic oligonucleotide
ccucacauaaaacccaaau

SEQ ID NO: 2144675 - RNA, 19 nt, Artificial Sequence
  Description of Artificial Sequence: Synthetic oligonucleotide
cgcuuuaugcuguaggaua

SEQ ID NO: 2144676 - RNA, 19 nt, Artificial Sequence
  Description of Artificial Sequence: Synthetic oligonucleotide
gcuggucagccgcuucagc

SEQ ID NO: 2144677 - RNA, 19 nt, Artificial Sequence
  Description of Artificial Sequence: Synthetic oligonucleotide
caccuuggcaggggcgggc

SEQ ID NO: 2144678 - RNA, 19 nt, Artificial Sequence
  Description of Artificial Sequence: Synthetic oligonucleotide
guucuccgucucuccguuc

SEQ ID NO: 2144679 - RNA, 19 nt, Artificial Sequence
  Description of Artificial Sequence: Synthetic oligonucleotide
ggcgcgugcgaugucgaac

SEQ ID NO: 2144680 - RNA, 19 nt, Artificial Sequence
  Description of Artificial Sequence: Synthetic oligonucleotide
cgagaccagauguaacuga

SEQ ID NO: 2144681 - RNA, 19 nt, Artificial Sequence
  Description of Artificial Sequence: Synthetic oligonucleotide
gucacagccucuccugauu

SEQ ID NO: 2144682 - RNA, 19 nt, Artificial Sequence
  Description of Artificial Sequence: Synthetic oligonucleotide
gccgccaccgcacggaaua

SEQ ID NO: 2144683 - RNA, 19 nt, Artificial Sequence
  Description of Artificial Sequence: Synthetic oligonucleotide
ggccgcuccauccgcgcug

SEQ ID NO: 2144684 - RNA, 19 nt, Artificial Sequence
  Description of Artificial Sequence: Synthetic oligonucleotide
ccgagacagucacagccuc

SEQ ID NO: 2144685 - RNA, 19 nt, Artificial Sequence
  Description of Artificial Sequence: Synthetic oligonucleotide
ccauccgcgcugaccuucc

SEQ ID NO: 2144686 - RNA, 19 nt, Artificial Sequence
  Description of Artificial Sequence: Synthetic oligonucleotide
ccaaaugguucccaauccu

SEQ ID NO: 2144687 - RNA, 19 nt, Artificial Sequence
  Description of Artificial Sequence: Synthetic oligonucleotide
ccgcacggaauagacuaag

SEQ ID NO: 2144688 - RNA, 19 nt, Artificial Sequence
  Description of Artificial Sequence: Synthetic oligonucleotide
accgcacggaauagacuaa

SEQ ID NO: 2144689 - RNA, 19 nt, Artificial Sequence
  Description of Artificial Sequence: Synthetic oligonucleotide
gaggcgcgugcgaugucga

SEQ ID NO: 2144690 - RNA, 19 nt, Artificial Sequence
  Description of Artificial Sequence: Synthetic oligonucleotide
cgaugucgaaccccgucac

SEQ ID NO: 2144691 - RNA, 19 nt, Artificial Sequence
  Description of Artificial Sequence: Synthetic oligonucleotide
uggcggcgcugggagggag

SEQ ID NO: 2144692 - RNA, 19 nt, Artificial Sequence
  Description of Artificial Sequence: Synthetic oligonucleotide
gggcaaggaccgaggagug

SEQ ID NO: 2144693 - RNA, 19 nt, Artificial Sequence
  Description of Artificial Sequence: Synthetic oligonucleotide
gcgugcgaugucgaacccc

SEQ ID NO: 2144694 - RNA, 19 nt, Artificial Sequence
  Description of Artificial Sequence: Synthetic oligonucleotide
gccgacagccucgcggagc

SEQ ID NO: 2144695 - RNA, 19 nt, Artificial Sequence
  Description of Artificial Sequence: Synthetic oligonucleotide
gcaucguggcggcgcuggg

SEQ ID NO: 2144696 - RNA, 19 nt, Artificial Sequence
  Description of Artificial Sequence: Synthetic oligonucleotide
aggggcgggcuuggccgac

SEQ ID NO: 2144697 - RNA, 19 nt, Artificial Sequence
  Description of Artificial Sequence: Synthetic oligonucleotide
caucguggcggcgcuggga

SEQ ID NO: 2144698 - RNA, 19 nt, Artificial Sequence
  Description of Artificial Sequence: Synthetic oligonucleotide
cuccccucuucccuuuugu

SEQ ID NO: 2144699 - RNA, 19 nt, Artificial Sequence
  Description of Artificial Sequence: Synthetic oligonucleotide
gcaggcagaucuguagucu

SEQ ID NO: 2144700 - RNA, 19 nt, Artificial Sequence
  Description of Artificial Sequence: Synthetic oligonucleotide
uccuuucccgcggccuuuu

SEQ ID NO: 2144701 - RNA, 19 nt, Artificial Sequence
  Description of Artificial Sequence: Synthetic oligonucleotide
cagccucgcggagcggcgc

SEQ ID NO: 2144702 - RNA, 19 nt, Artificial Sequence
  Description of Artificial Sequence: Synthetic oligonucleotide
ccaaacacuuaguacgcuu

SEQ ID NO: 2144703 - RNA, 19 nt, Artificial Sequence
  Description of Artificial Sequence: Synthetic oligonucleotide
ggcagaucuguagucugcu

SEQ ID NO: 2144704 - RNA, 19 nt, Artificial Sequence
  Description of Artificial Sequence: Synthetic oligonucleotide
gaccuuccucuugggcauc

SEQ ID NO: 2144705 - RNA, 19 nt, Artificial Sequence
  Description of Artificial Sequence: Synthetic oligonucleotide
accccgucacggagcugcg

SEQ ID NO: 2144706 - RNA, 19 nt, Artificial Sequence
  Description of Artificial Sequence: Synthetic oligonucleotide
gcugggagggaggcgcgug

SEQ ID NO: 2144707 - RNA, 19 nt, Artificial Sequence
  Description of Artificial Sequence: Synthetic oligonucleotide
auccuuucccgcggccuuu

SEQ ID NO: 2144708 - RNA, 19 nt, Artificial Sequence
  Description of Artificial Sequence: Synthetic oligonucleotide
gcccuuugcuccccucuuc

SEQ ID NO: 2144709 - RNA, 19 nt, Artificial Sequence
  Description of Artificial Sequence: Synthetic oligonucleotide
uagucggacuuggcuucuu

SEQ ID NO: 2144710 - RNA, 19 nt, Artificial Sequence
  Description of Artificial Sequence: Synthetic oligonucleotide
gcaaggaccgaggaguguu

SEQ ID NO: 2144711 - RNA, 19 nt, Artificial Sequence
  Description of Artificial Sequence: Synthetic oligonucleotide
ccucagaggcuggacucug

SEQ ID NO: 2144712 - RNA, 19 nt, Artificial Sequence
  Description of Artificial Sequence: Synthetic oligonucleotide
cgcggagcggcgcuugggc

SEQ ID NO: 2144713 - RNA, 19 nt, Artificial Sequence
  Description of Artificial Sequence: Synthetic oligonucleotide
gcuuggccgacagccucgc

SEQ ID NO: 2144714 - RNA, 19 nt, Artificial Sequence
  Description of Artificial Sequence: Synthetic oligonucleotide
gaaccccgucacggagcug

SEQ ID NO: 2144715 - RNA, 19 nt, Artificial Sequence
  Description of Artificial Sequence: Synthetic oligonucleotide
ggaugaggugagauuuccu

SEQ ID NO: 2144716 - RNA, 19 nt, Artificial Sequence
  Description of Artificial Sequence: Synthetic oligonucleotide
cgucacggagcugcgcugc

SEQ ID NO: 2144717 - RNA, 19 nt, Artificial Sequence
  Description of Artificial Sequence: Synthetic oligonucleotide
caaggaccgaggaguguuu

SEQ ID NO: 2144718 - RNA, 19 nt, Artificial Sequence
  Description of Artificial Sequence: Synthetic oligonucleotide
gguucuccgucucuccguu

SEQ ID NO: 2144719 - RNA, 19 nt, Artificial Sequence
  Description of Artificial Sequence: Synthetic oligonucleotide
cgaaugguuagucggacuu

SEQ ID NO: 2144720 - RNA, 19 nt, Artificial Sequence
  Description of Artificial Sequence: Synthetic oligonucleotide
gcuucgcguccaccuuggc

SEQ ID NO: 2144721 - RNA, 19 nt, Artificial Sequence
  Description of Artificial Sequence: Synthetic oligonucleotide
ggccgacagccucgcggag

SEQ ID NO: 2144722 - RNA, 19 nt, Artificial Sequence
  Description of Artificial Sequence: Synthetic oligonucleotide
gcggcgcuugggcuccgcc

SEQ ID NO: 2144723 - RNA, 19 nt, Artificial Sequence
  Description of Artificial Sequence: Synthetic oligonucleotide
cuccgucucuccguucucu

SEQ ID NO: 2144724 - RNA, 19 nt, Artificial Sequence
  Description of Artificial Sequence: Synthetic oligonucleotide
cgcuccauccgcgcugacc

SEQ ID NO: 2144725 - RNA, 19 nt, Artificial Sequence
  Description of Artificial Sequence: Synthetic oligonucleotide
ccaccuuggcaggggcggg

SEQ ID NO: 2144726 - RNA, 19 nt, Artificial Sequence
  Description of Artificial Sequence: Synthetic oligonucleotide
ggcgggcuuggccgacagc

SEQ ID NO: 2144727 - RNA, 19 nt, Artificial Sequence
  Description of Artificial Sequence: Synthetic oligonucleotide
cggagcggcgcuugggcuc

SEQ ID NO: 2144728 - RNA, 19 nt, Artificial Sequence
  Description of Artificial Sequence: Synthetic oligonucleotide
gcacgaccaagaccccaaa

SEQ ID NO: 2144729 - RNA, 19 nt, Artificial Sequence
  Description of Artificial Sequence: Synthetic oligonucleotide
cggcuucgcguccaccuug

SEQ ID NO: 2144730 - RNA, 19 nt, Artificial Sequence
  Description of Artificial Sequence: Synthetic oligonucleotide
ccccucuacggaauguuau

SEQ ID NO: 2144731 - RNA, 19 nt, Artificial Sequence
  Description of Artificial Sequence: Synthetic oligonucleotide
ggcgcuugggcuccgccuu

SEQ ID NO: 2144732 - RNA, 19 nt, Artificial Sequence
  Description of Artificial Sequence: Synthetic oligonucleotide
cccaauccucaauuccacu

SEQ ID NO: 2144733 - RNA, 19 nt, Artificial Sequence
  Description of Artificial Sequence: Synthetic oligonucleotide
gcuccgccuuggccgcucc

SEQ ID NO: 2144734 - RNA, 19 nt, Artificial Sequence
  Description of Artificial Sequence: Synthetic oligonucleotide
cccgucacggagcugcgcu

SEQ ID NO: 2144735 - RNA, 19 nt, Artificial Sequence
  Description of Artificial Sequence: Synthetic oligonucleotide
ccaagaccccaaacacuua

SEQ ID NO: 2144736 - RNA, 19 nt, Artificial Sequence
  Description of Artificial Sequence: Synthetic oligonucleotide
cagccgccaccgcacggaa

SEQ ID NO: 2144737 - RNA, 19 nt, Artificial Sequence
  Description of Artificial Sequence: Synthetic oligonucleotide
ccagccgccaccgcacgga

SEQ ID NO: 2144738 - RNA, 19 nt, Artificial Sequence
  Description of Artificial Sequence: Synthetic oligonucleotide
cuccgccuuggccgcucca

SEQ ID NO: 2144739 - RNA, 19 nt, Artificial Sequence
  Description of Artificial Sequence: Synthetic oligonucleotide
ccgccuuggccgcuccauc

SEQ ID NO: 2144740 - RNA, 19 nt, Artificial Sequence
  Description of Artificial Sequence: Synthetic oligonucleotide
cgcgugcgaugucgaaccc

SEQ ID NO: 2144741 - RNA, 19 nt, Artificial Sequence
  Description of Artificial Sequence: Synthetic oligonucleotide
ccucuggauuguacacgaa

SEQ ID NO: 2144742 - RNA, 19 nt, Artificial Sequence
  Description of Artificial Sequence: Synthetic oligonucleotide
agccgccaccgcacggaau

SEQ ID NO: 2144743 - RNA, 19 nt, Artificial Sequence
  Description of Artificial Sequence: Synthetic oligonucleotide
gccgcuccauccgcgcuga

SEQ ID NO: 2144744 - RNA, 19 nt, Artificial Sequence
  Description of Artificial Sequence: Synthetic oligonucleotide
ggcaaggaccgaggagugu

SEQ ID NO: 2144745 - RNA, 19 nt, Artificial Sequence
  Description of Artificial Sequence: Synthetic oligonucleotide
ccaccgcacggaauagacu

SEQ ID NO: 2144746 - RNA, 19 nt, Artificial Sequence
  Description of Artificial Sequence: Synthetic oligonucleotide
ccgccaccgcacggaauag

SEQ ID NO: 2144747 - RNA, 19 nt, Artificial Sequence
  Description of Artificial Sequence: Synthetic oligonucleotide
gccucuccugauugagcau

SEQ ID NO: 2144748 - RNA, 19 nt, Artificial Sequence
  Description of Artificial Sequence: Synthetic oligonucleotide
gggaggcgcgugcgauguc

SEQ ID NO: 2144749 - RNA, 19 nt, Artificial Sequence
  Description of Artificial Sequence: Synthetic oligonucleotide
cauccgcgcugaccuuccu

SEQ ID NO: 2144750 - RNA, 19 nt, Artificial Sequence
  Description of Artificial Sequence: Synthetic oligonucleotide
cgaaccccgucacggagcu

SEQ ID NO: 2144751 - RNA, 19 nt, Artificial Sequence
  Description of Artificial Sequence: Synthetic oligonucleotide
ccccgucacggagcugcgc

SEQ ID NO: 2144752 - RNA, 19 nt, Artificial Sequence
  Description of Artificial Sequence: Synthetic oligonucleotide
gugcgaugucgaaccccgu

SEQ ID NO: 2144753 - RNA, 19 nt, Artificial Sequence
  Description of Artificial Sequence: Synthetic oligonucleotide
gggcaucguggcggcgcug

SEQ ID NO: 2144754 - RNA, 19 nt, Artificial Sequence
  Description of Artificial Sequence: Synthetic oligonucleotide
ggcuccgccuuggccgcuc

SEQ ID NO: 2144755 - RNA, 19 nt, Artificial Sequence
  Description of Artificial Sequence: Synthetic oligonucleotide
cuccauccgcgcugaccuu

SEQ ID NO: 2144756 - RNA, 19 nt, Artificial Sequence
  Description of Artificial Sequence: Synthetic oligonucleotide
ggggcgggcuuggccgaca

SEQ ID NO: 2144757 - RNA, 19 nt, Artificial Sequence
  Description of Artificial Sequence: Synthetic oligonucleotide
cgacagccucgcggagcgg

SEQ ID NO: 2144758 - RNA, 19 nt, Artificial Sequence
  Description of Artificial Sequence: Synthetic oligonucleotide
cgccaccgcacggaauaga

SEQ ID NO: 2144759 - RNA, 19 nt, Artificial Sequence
  Description of Artificial Sequence: Synthetic oligonucleotide
cagccgcuucagccuguuu

SEQ ID NO: 2144760 - RNA, 19 nt, Artificial Sequence
  Description of Artificial Sequence: Synthetic oligonucleotide
ccgcuccauccgcgcugac

SEQ ID NO: 2144761 - RNA, 19 nt, Artificial Sequence
  Description of Artificial Sequence: Synthetic oligonucleotide
ccgcgcugaccuuccucuu

SEQ ID NO: 2144762 - RNA, 19 nt, Artificial Sequence
  Description of Artificial Sequence: Synthetic oligonucleotide
gccucgcggagcggcgcuu

SEQ ID NO: 2144763 - RNA, 19 nt, Artificial Sequence
  Description of Artificial Sequence: Synthetic oligonucleotide
cgcugggagggaggcgcgu

SEQ ID NO: 2144764 - RNA, 19 nt, Artificial Sequence
  Description of Artificial Sequence: Synthetic oligonucleotide
aauuucuaagauuucaagg

SEQ ID NO: 2144765 - RNA, 19 nt, Artificial Sequence
  Description of Artificial Sequence: Synthetic oligonucleotide
uguaacgacaucaaaaggc

SEQ ID NO: 2144766 - RNA, 19 nt, Artificial Sequence
  Description of Artificial Sequence: Synthetic oligonucleotide
agaaucuugacucaggauc

SEQ ID NO: 2144767 - RNA, 19 nt, Artificial Sequence
  Description of Artificial Sequence: Synthetic oligonucleotide
aacuagaaccuguugaugg

SEQ ID NO: 2144768 - RNA, 19 nt, Artificial Sequence
  Description of Artificial Sequence: Synthetic oligonucleotide
aaaguuugaaaguuuagca

SEQ ID NO: 2144769 - RNA, 19 nt, Artificial Sequence
  Description of Artificial Sequence: Synthetic oligonucleotide
uaagauuucaaggagauca

SEQ ID NO: 2144770 - RNA, 19 nt, Artificial Sequence
  Description of Artificial Sequence: Synthetic oligonucleotide
uaaucuuacacaauuuucc

SEQ ID NO: 2144771 - RNA, 19 nt, Artificial Sequence
  Description of Artificial Sequence: Synthetic oligonucleotide
uuuauaaagucuuaacuca

SEQ ID NO: 2144772 - RNA, 19 nt, Artificial Sequence
  Description of Artificial Sequence: Synthetic oligonucleotide
uccauuuagagaaugaaca

SEQ ID NO: 2144773 - RNA, 19 nt, Artificial Sequence
  Description of Artificial Sequence: Synthetic oligonucleotide
guugauaaugcuuuguagg

SEQ ID NO: 2144774 - RNA, 19 nt, Artificial Sequence
  Description of Artificial Sequence: Synthetic oligonucleotide
uguuuauaaagucuuaacu

SEQ ID NO: 2144775 - RNA, 19 nt, Artificial Sequence
  Description of Artificial Sequence: Synthetic oligonucleotide
cauuuuagaaucuugacuc

SEQ ID NO: 2144776 - RNA, 19 nt, Artificial Sequence
  Description of Artificial Sequence: Synthetic oligonucleotide
aaaauagucuuuuggaagu

SEQ ID NO: 2144777 - RNA, 19 nt, Artificial Sequence
  Description of Artificial Sequence: Synthetic oligonucleotide
agaaugaacaucaaaauag

SEQ ID NO: 2144778 - RNA, 19 nt, Artificial Sequence
  Description of Artificial Sequence: Synthetic oligonucleotide
uacuuguuuaaccugauca

SEQ ID NO: 2144779 - RNA, 19 nt, Artificial Sequence
  Description of Artificial Sequence: Synthetic oligonucleotide
ucuguaacgacaucaaaag

SEQ ID NO: 2144780 - RNA, 19 nt, Artificial Sequence
  Description of Artificial Sequence: Synthetic oligonucleotide
ucuuguuucaacuaauuac

SEQ ID NO: 2144781 - RNA, 19 nt, Artificial Sequence
  Description of Artificial Sequence: Synthetic oligonucleotide
ucgaaguuuagauucauag

SEQ ID NO: 2144782 - RNA, 19 nt, Artificial Sequence
  Description of Artificial Sequence: Synthetic oligonucleotide
aauuacuggaguucgagga

SEQ ID NO: 2144783 - RNA, 19 nt, Artificial Sequence
  Description of Artificial Sequence: Synthetic oligonucleotide
  modified_base (3)..(3): a, c, u, g, unknown or other
ggnuaaauugaauugaugc

SEQ ID NO: 2144784 - RNA, 19 nt, Artificial Sequence
  Description of Artificial Sequence: Synthetic oligonucleotide
agaaacaauagcuugacaa

SEQ ID NO: 2144785 - RNA, 19 nt, Artificial Sequence
  Description of Artificial Sequence: Synthetic oligonucleotide
aaucuugaauuuugcuucc

SEQ ID NO: 2144786 - RNA, 19 nt, Artificial Sequence
  Description of Artificial Sequence: Synthetic oligonucleotide
uccaauuuguugauaaugc

SEQ ID NO: 2144787 - RNA, 19 nt, Artificial Sequence
  Description of Artificial Sequence: Synthetic oligonucleotide
aguacaucaaucuugaauu

SEQ ID NO: 2144788 - RNA, 19 nt, Artificial Sequence
  Description of Artificial Sequence: Synthetic oligonucleotide
cugaccaccacacacagcg

SEQ ID NO: 2144789 - RNA, 19 nt, Artificial Sequence
  Description of Artificial Sequence: Synthetic oligonucleotide
ucauugauaaucuuacaca

SEQ ID NO: 2144790 - RNA, 19 nt, Artificial Sequence
  Description of Artificial Sequence: Synthetic oligonucleotide
uguuucaacuaauuacugg

SEQ ID NO: 2144791 - RNA, 19 nt, Artificial Sequence
  Description of Artificial Sequence: Synthetic oligonucleotide
aaauugaauugaugcuugc

SEQ ID NO: 2144792 - RNA, 19 nt, Artificial Sequence
  Description of Artificial Sequence: Synthetic oligonucleotide
aguuugaaaguuuagcaug

SEQ ID NO: 2144793 - RNA, 19 nt, Artificial Sequence
  Description of Artificial Sequence: Synthetic oligonucleotide
auugaugcuugcuacuagc

SEQ ID NO: 2144794 - RNA, 19 nt, Artificial Sequence
  Description of Artificial Sequence: Synthetic oligonucleotide
aacugucuaguucuaagag

SEQ ID NO: 2144795 - RNA, 19 nt, Artificial Sequence
  Description of Artificial Sequence: Synthetic oligonucleotide
uaacaguacaucaaucuug

SEQ ID NO: 2144796 - RNA, 19 nt, Artificial Sequence
  Description of Artificial Sequence: Synthetic oligonucleotide
  modified_base (7)..(7): a, c, u, g, unknown or other
uuguggnuaaauugaauug

SEQ ID NO: 2144797 - RNA, 19 nt, Artificial Sequence
  Description of Artificial Sequence: Synthetic oligonucleotide
acugucuaguucuaagagc

SEQ ID NO: 2144798 - RNA, 19 nt, Artificial Sequence
  Description of Artificial Sequence: Synthetic oligonucleotide
uaaauugaauugaugcuug

SEQ ID NO: 2144799 - RNA, 19 nt, Artificial Sequence
  Description of Artificial Sequence: Synthetic oligonucleotide
uuuagaaucuugacucagg

SEQ ID NO: 2144800 - RNA, 19 nt, Artificial Sequence
  Description of Artificial Sequence: Synthetic oligonucleotide
aacuaauuacuggaguucg

SEQ ID NO: 2144801 - RNA, 19 nt, Artificial Sequence
  Description of Artificial Sequence: Synthetic oligonucleotide
aaggagaucacuuguaaaa

SEQ ID NO: 2144802 - RNA, 19 nt, Artificial Sequence
  Description of Artificial Sequence: Synthetic oligonucleotide
gaaguuuagauucauagua

SEQ ID NO: 2144803 - RNA, 19 nt, Artificial Sequence
  Description of Artificial Sequence: Synthetic oligonucleotide
ucuuacacaauuuuccaac

SEQ ID NO: 2144804 - RNA, 19 nt, Artificial Sequence
  Description of Artificial Sequence: Synthetic oligonucleotide
agugagaaacaauagcuug

SEQ ID NO: 2144805 - RNA, 19 nt, Artificial Sequence
  Description of Artificial Sequence: Synthetic oligonucleotide
  modified_base (12)..(12): a, c, u, g, unknown or other
gaggauuguggnuaaauug

SEQ ID NO: 2144806 - RNA, 19 nt, Artificial Sequence
  Description of Artificial Sequence: Synthetic oligonucleotide
uuuaaccugaucauucaca

SEQ ID NO: 2144807 - RNA, 19 nt, Artificial Sequence
  Description of Artificial Sequence: Synthetic oligonucleotide
ugaacaucaaaauagucuu

SEQ ID NO: 2144808 - RNA, 19 nt, Artificial Sequence
  Description of Artificial Sequence: Synthetic oligonucleotide
aaucuuacacaauuuucca

SEQ ID NO: 2144809 - RNA, 19 nt, Artificial Sequence
  Description of Artificial Sequence: Synthetic oligonucleotide
uugauaaucuuacacaauu

SEQ ID NO: 2144810 - RNA, 19 nt, Artificial Sequence
  Description of Artificial Sequence: Synthetic oligonucleotide
agcgcuuguaauuugaugu

SEQ ID NO: 2144811 - RNA, 19 nt, Artificial Sequence
  Description of Artificial Sequence: Synthetic oligonucleotide
uuguaaaagcuugaaaugc

SEQ ID NO: 2144812 - RNA, 19 nt, Artificial Sequence
  Description of Artificial Sequence: Synthetic oligonucleotide
uuggaagugagaaacaaua

SEQ ID NO: 2144813 - RNA, 19 nt, Artificial Sequence
  Description of Artificial Sequence: Synthetic oligonucleotide
uguugauaaugcuuuguag

SEQ ID NO: 2144814 - RNA, 19 nt, Artificial Sequence
  Description of Artificial Sequence: Synthetic oligonucleotide
caaucuugaauuuugcuuc

SEQ ID NO: 2144815 - RNA, 19 nt, Artificial Sequence
  Description of Artificial Sequence: Synthetic oligonucleotide
uguuaagaauacaauuuac

SEQ ID NO: 2144816 - RNA, 19 nt, Artificial Sequence
  Description of Artificial Sequence: Synthetic oligonucleotide
uucuaagagcuccuggagg

SEQ ID NO: 2144817 - RNA, 19 nt, Artificial Sequence
  Description of Artificial Sequence: Synthetic oligonucleotide
aaaagcuugaaaugcugga

SEQ ID NO: 2144818 - RNA, 19 nt, Artificial Sequence
  Description of Artificial Sequence: Synthetic oligonucleotide
uuuccaacugugcugacca

SEQ ID NO: 2144819 - RNA, 19 nt, Artificial Sequence
  Description of Artificial Sequence: Synthetic oligonucleotide
aaguuugaaaguuuagcau

SEQ ID NO: 2144820 - RNA, 19 nt, Artificial Sequence
  Description of Artificial Sequence: Synthetic oligonucleotide
cucauugauaaucuuacac

SEQ ID NO: 2144821 - RNA, 19 nt, Artificial Sequence
  Description of Artificial Sequence: Synthetic oligonucleotide
uucugauugacugucaucu

SEQ ID NO: 2144822 - RNA, 19 nt, Artificial Sequence
  Description of Artificial Sequence: Synthetic oligonucleotide
aaugaacaucaaaauaguc

SEQ ID NO: 2144823 - RNA, 19 nt, Artificial Sequence
  Description of Artificial Sequence: Synthetic oligonucleotide
aauggcauccaaaaucauc

SEQ ID NO: 2144824 - RNA, 19 nt, Artificial Sequence
  Description of Artificial Sequence: Synthetic oligonucleotide
ugcuacuagcaccugaaag

SEQ ID NO: 2144825 - RNA, 19 nt, Artificial Sequence
  Description of Artificial Sequence: Synthetic oligonucleotide
uuucaacuaauuacuggag

SEQ ID NO: 2144826 - RNA, 19 nt, Artificial Sequence
  Description of Artificial Sequence: Synthetic oligonucleotide
ugauugacugucaucuucc

SEQ ID NO: 2144827 - RNA, 19 nt, Artificial Sequence
  Description of Artificial Sequence: Synthetic oligonucleotide
aauucugagagcugauaca

SEQ ID NO: 2144828 - RNA, 19 nt, Artificial Sequence
  Description of Artificial Sequence: Synthetic oligonucleotide
auuuagagaaugaacauca

SEQ ID NO: 2144829 - RNA, 19 nt, Artificial Sequence
  Description of Artificial Sequence: Synthetic oligonucleotide
ucuaagauuucaaggagau

SEQ ID NO: 2144830 - RNA, 19 nt, Artificial Sequence
  Description of Artificial Sequence: Synthetic oligonucleotide
aacucauguucugugggcc

SEQ ID NO: 2144831 - RNA, 19 nt, Artificial Sequence
  Description of Artificial Sequence: Synthetic oligonucleotide
ucaaucuugaauuuugcuu

SEQ ID NO: 2144832 - RNA, 19 nt, Artificial Sequence
  Description of Artificial Sequence: Synthetic oligonucleotide
acuagaaccuguugauggc

SEQ ID NO: 2144833 - RNA, 19 nt, Artificial Sequence
  Description of Artificial Sequence: Synthetic oligonucleotide
ugaaaguacuuuuaauuuc

SEQ ID NO: 2144834 - RNA, 19 nt, Artificial Sequence
  Description of Artificial Sequence: Synthetic oligonucleotide
uauaaagucuuaacucaug

SEQ ID NO: 2144835 - RNA, 19 nt, Artificial Sequence
  Description of Artificial Sequence: Synthetic oligonucleotide
  modified_base (8)..(8): a, c, u, g, unknown or other
auuguggnuaaauugaauu

SEQ ID NO: 2144836 - RNA, 19 nt, Artificial Sequence
  Description of Artificial Sequence: Synthetic oligonucleotide
uguucugugggccugcucu

SEQ ID NO: 2144837 - RNA, 19 nt, Artificial Sequence
  Description of Artificial Sequence: Synthetic oligonucleotide
auaaagucuuaacucaugu

SEQ ID NO: 2144838 - RNA, 19 nt, Artificial Sequence
  Description of Artificial Sequence: Synthetic oligonucleotide
uaauuacuggaguucgagg

SEQ ID NO: 2144839 - RNA, 19 nt, Artificial Sequence
  Description of Artificial Sequence: Synthetic oligonucleotide
aauuuuccaacugugcuga

SEQ ID NO: 2144840 - RNA, 19 nt, Artificial Sequence
  Description of Artificial Sequence: Synthetic oligonucleotide
ugaacugucuaguucuaag

SEQ ID NO: 2144841 - RNA, 19 nt, Artificial Sequence
  Description of Artificial Sequence: Synthetic oligonucleotide
  modified_base (6)..(6): a, c, u, g, unknown or other
uguggnuaaauugaauuga

SEQ ID NO: 2144842 - RNA, 19 nt, Artificial Sequence
  Description of Artificial Sequence: Synthetic oligonucleotide
aguaucucuggucaacuag

SEQ ID NO: 2144843 - RNA, 19 nt, Artificial Sequence
  Description of Artificial Sequence: Synthetic oligonucleotide
uugauaaugcuuuguaggu

SEQ ID NO: 2144844 - RNA, 19 nt, Artificial Sequence
  Description of Artificial Sequence: Synthetic oligonucleotide
auaaucuuacacaauuuuc

SEQ ID NO: 2144845 - RNA, 19 nt, Artificial Sequence
  Description of Artificial Sequence: Synthetic oligonucleotide
aauuuguugauaaugcuuu

SEQ ID NO: 2144846 - RNA, 19 nt, Artificial Sequence
  Description of Artificial Sequence: Synthetic oligonucleotide
uugaauuuugcuuccuuga

SEQ ID NO: 2144847 - RNA, 19 nt, Artificial Sequence
  Description of Artificial Sequence: Synthetic oligonucleotide
caaaguuugaaaguuuagc

SEQ ID NO: 2144848 - RNA, 19 nt, Artificial Sequence
  Description of Artificial Sequence: Synthetic oligonucleotide
ugugcugaccaccacacac

SEQ ID NO: 2144849 - RNA, 19 nt, Artificial Sequence
  Description of Artificial Sequence: Synthetic oligonucleotide
uugaauugaugcuugcuac

SEQ ID NO: 2144850 - RNA, 19 nt, Artificial Sequence
  Description of Artificial Sequence: Synthetic oligonucleotide
uuguuuaaccugaucauuc

SEQ ID NO: 2144851 - RNA, 19 nt, Artificial Sequence
  Description of Artificial Sequence: Synthetic oligonucleotide
uuucucacagcguuguuca

SEQ ID NO: 2144852 - RNA, 19 nt, Artificial Sequence
  Description of Artificial Sequence: Synthetic oligonucleotide
  modified_base (4)..(4): a, c, u, g, unknown or other
uggnuaaauugaauugaug

SEQ ID NO: 2144853 - RNA, 19 nt, Artificial Sequence
  Description of Artificial Sequence: Synthetic oligonucleotide
augaacaucaaaauagucu

SEQ ID NO: 2144854 - RNA, 19 nt, Artificial Sequence
  Description of Artificial Sequence: Synthetic oligonucleotide
caauuucuaagauuucaag

SEQ ID NO: 2144855 - RNA, 19 nt, Artificial Sequence
  Description of Artificial Sequence: Synthetic oligonucleotide
uucaacuaauuacuggagu

SEQ ID NO: 2144856 - RNA, 19 nt, Artificial Sequence
  Description of Artificial Sequence: Synthetic oligonucleotide
ucuaagagcuccuggaggu

SEQ ID NO: 2144857 - RNA, 19 nt, Artificial Sequence
  Description of Artificial Sequence: Synthetic oligonucleotide
uuagagaaugaacaucaaa

SEQ ID NO: 2144858 - RNA, 19 nt, Artificial Sequence
  Description of Artificial Sequence: Synthetic oligonucleotide
  modified_base (2)..(2): a, c, u, g, unknown or other
gnuaaauugaauugaugcu

SEQ ID NO: 2144859 - RNA, 19 nt, Artificial Sequence
  Description of Artificial Sequence: Synthetic oligonucleotide
uguauggaguuuucgaagu

SEQ ID NO: 2144860 - RNA, 19 nt, Artificial Sequence
  Description of Artificial Sequence: Synthetic oligonucleotide
ucuuaacucauguucugug

SEQ ID NO: 2144861 - RNA, 19 nt, Artificial Sequence
  Description of Artificial Sequence: Synthetic oligonucleotide
uacauuuuagaaucuugac

SEQ ID NO: 2144862 - RNA, 19 nt, Artificial Sequence
  Description of Artificial Sequence: Synthetic oligonucleotide
aggaugaacugucuaguuc

SEQ ID NO: 2144863 - RNA, 19 nt, Artificial Sequence
  Description of Artificial Sequence: Synthetic oligonucleotide
aaaguuuagcauguugcug

SEQ ID NO: 2144864 - RNA, 19 nt, Artificial Sequence
  Description of Artificial Sequence: Synthetic oligonucleotide
auucaguucggggauagac

SEQ ID NO: 2144865 - RNA, 19 nt, Artificial Sequence
  Description of Artificial Sequence: Synthetic oligonucleotide
auaacuuggugaggcaucc

SEQ ID NO: 2144866 - RNA, 19 nt, Artificial Sequence
  Description of Artificial Sequence: Synthetic oligonucleotide
uuauaaagucuuaacucau

SEQ ID NO: 2144867 - RNA, 19 nt, Artificial Sequence
  Description of Artificial Sequence: Synthetic oligonucleotide
uuaaccugaucauucacau

SEQ ID NO: 2144868 - RNA, 19 nt, Artificial Sequence
  Description of Artificial Sequence: Synthetic oligonucleotide
uuuguguauggaguuuucg

SEQ ID NO: 2144869 - RNA, 19 nt, Artificial Sequence
  Description of Artificial Sequence: Synthetic oligonucleotide
uguguauggaguuuucgaa

SEQ ID NO: 2144870 - RNA, 19 nt, Artificial Sequence
  Description of Artificial Sequence: Synthetic oligonucleotide
aguucuaagagcuccugga

SEQ ID NO: 2144871 - RNA, 19 nt, Artificial Sequence
  Description of Artificial Sequence: Synthetic oligonucleotide
gaucacuuguaaaagcuug

SEQ ID NO: 2144872 - RNA, 19 nt, Artificial Sequence
  Description of Artificial Sequence: Synthetic oligonucleotide
agagcugauacauuuuaga

SEQ ID NO: 2144873 - RNA, 19 nt, Artificial Sequence
  Description of Artificial Sequence: Synthetic oligonucleotide
uaguucuaagagcuccugg

SEQ ID NO: 2144874 - RNA, 19 nt, Artificial Sequence
  Description of Artificial Sequence: Synthetic oligonucleotide
ugugguuuguuucuucuuc

SEQ ID NO: 2144875 - RNA, 19 nt, Artificial Sequence
  Description of Artificial Sequence: Synthetic oligonucleotide
uucauuucuccaagccugg

SEQ ID NO: 2144876 - RNA, 19 nt, Artificial Sequence
  Description of Artificial Sequence: Synthetic oligonucleotide
auugaauugaugcuugcua

SEQ ID NO: 2144877 - RNA, 19 nt, Artificial Sequence
  Description of Artificial Sequence: Synthetic oligonucleotide
ucaacuagaaccuguugau

SEQ ID NO: 2144878 - RNA, 19 nt, Artificial Sequence
  Description of Artificial Sequence: Synthetic oligonucleotide
gaucaguccuccaaaauac

SEQ ID NO: 2144879 - RNA, 19 nt, Artificial Sequence
  Description of Artificial Sequence: Synthetic oligonucleotide
ucuucuuucuuguuucaac

SEQ ID NO: 2144880 - RNA, 19 nt, Artificial Sequence
  Description of Artificial Sequence: Synthetic oligonucleotide
guaacgacaucaaaaggcc

SEQ ID NO: 2144881 - RNA, 19 nt, Artificial Sequence
  Description of Artificial Sequence: Synthetic oligonucleotide
caauuuuccaacugugcug

SEQ ID NO: 2144882 - RNA, 19 nt, Artificial Sequence
  Description of Artificial Sequence: Synthetic oligonucleotide
uuguuucaacuaauuacug

SEQ ID NO: 2144883 - RNA, 19 nt, Artificial Sequence
  Description of Artificial Sequence: Synthetic oligonucleotide
uguuuaaccugaucauuca

SEQ ID NO: 2144884 - RNA, 19 nt, Artificial Sequence
  Description of Artificial Sequence: Synthetic oligonucleotide
aacaguacaucaaucuuga

SEQ ID NO: 2144885 - RNA, 19 nt, Artificial Sequence
  Description of Artificial Sequence: Synthetic oligonucleotide
gucaacuagaaccuguuga

SEQ ID NO: 2144886 - RNA, 19 nt, Artificial Sequence
  Description of Artificial Sequence: Synthetic oligonucleotide
ggaagugagaaacaauagc

SEQ ID NO: 2144887 - RNA, 19 nt, Artificial Sequence
  Description of Artificial Sequence: Synthetic oligonucleotide
auuucuccaagccugguau

SEQ ID NO: 2144888 - RNA, 19 nt, Artificial Sequence
  Description of Artificial Sequence: Synthetic oligonucleotide
aagucuuaacucauguucu

SEQ ID NO: 2144889 - RNA, 19 nt, Artificial Sequence
  Description of Artificial Sequence: Synthetic oligonucleotide
ucaaggagaucacuuguaa

SEQ ID NO: 2144890 - RNA, 19 nt, Artificial Sequence
  Description of Artificial Sequence: Synthetic oligonucleotide
aguuuagauucauaguaau

SEQ ID NO: 2144891 - RNA, 19 nt, Artificial Sequence
  Description of Artificial Sequence: Synthetic oligonucleotide
cauugauaaucuuacacaa

SEQ ID NO: 2144892 - RNA, 19 nt, Artificial Sequence
  Description of Artificial Sequence: Synthetic oligonucleotide
ucaguucggggauagacuc

SEQ ID NO: 2144893 - RNA, 19 nt, Artificial Sequence
  Description of Artificial Sequence: Synthetic oligonucleotide
ggauagacuccauuuagag

SEQ ID NO: 2144894 - RNA, 19 nt, Artificial Sequence
  Description of Artificial Sequence: Synthetic oligonucleotide
uuuauaacuuggugaggca

SEQ ID NO: 2144895 - RNA, 19 nt, Artificial Sequence
  Description of Artificial Sequence: Synthetic oligonucleotide
uuguugauaaugcuuugua

SEQ ID NO: 2144896 - RNA, 19 nt, Artificial Sequence
  Description of Artificial Sequence: Synthetic oligonucleotide
agcugauacauuuuagaau

SEQ ID NO: 2144897 - RNA, 19 nt, Artificial Sequence
  Description of Artificial Sequence: Synthetic oligonucleotide
cuaauuacuggaguucgag

SEQ ID NO: 2144898 - RNA, 19 nt, Artificial Sequence
  Description of Artificial Sequence: Synthetic oligonucleotide
aagcgcuuguaauuugaug

SEQ ID NO: 2144899 - RNA, 19 nt, Artificial Sequence
  Description of Artificial Sequence: Synthetic oligonucleotide
uucaguucggggauagacu

SEQ ID NO: 2144900 - RNA, 19 nt, Artificial Sequence
  Description of Artificial Sequence: Synthetic oligonucleotide
aucaaucuugaauuuugcu

SEQ ID NO: 2144901 - RNA, 19 nt, Artificial Sequence
  Description of Artificial Sequence: Synthetic oligonucleotide
gccuuuauaacuuggugag

SEQ ID NO: 2144902 - RNA, 19 nt, Artificial Sequence
  Description of Artificial Sequence: Synthetic oligonucleotide
ucaccuaacaguacaucaa

SEQ ID NO: 2144903 - RNA, 19 nt, Artificial Sequence
  Description of Artificial Sequence: Synthetic oligonucleotide
cugaaaguaucucugguca

SEQ ID NO: 2144904 - RNA, 19 nt, Artificial Sequence
  Description of Artificial Sequence: Synthetic oligonucleotide
agcaccugaaaguaucucu

SEQ ID NO: 2144905 - RNA, 19 nt, Artificial Sequence
  Description of Artificial Sequence: Synthetic oligonucleotide
uuuggaagugagaaacaau

SEQ ID NO: 2144906 - RNA, 19 nt, Artificial Sequence
  Description of Artificial Sequence: Synthetic oligonucleotide
agucuuuuggaagugagaa

SEQ ID NO: 2144907 - RNA, 19 nt, Artificial Sequence
  Description of Artificial Sequence: Synthetic oligonucleotide
ugauaaucuuacacaauuu

SEQ ID NO: 2144908 - RNA, 19 nt, Artificial Sequence
  Description of Artificial Sequence: Synthetic oligonucleotide
uacugcagguacaauggca

SEQ ID NO: 2144909 - RNA, 19 nt, Artificial Sequence
  Description of Artificial Sequence: Synthetic oligonucleotide
aaaguaucucuggucaacu

SEQ ID NO: 2144910 - RNA, 19 nt, Artificial Sequence
  Description of Artificial Sequence: Synthetic oligonucleotide
uugaugcuugcuacuagca

SEQ ID NO: 2144911 - RNA, 19 nt, Artificial Sequence
  Description of Artificial Sequence: Synthetic oligonucleotide
cuguaacgacaucaaaagg

SEQ ID NO: 2144912 - RNA, 19 nt, Artificial Sequence
  Description of Artificial Sequence: Synthetic oligonucleotide
  modified_base (11)..(11): a, c, u, g, unknown or other
aggauuguggnuaaauuga

SEQ ID NO: 2144913 - RNA, 19 nt, Artificial Sequence
  Description of Artificial Sequence: Synthetic oligonucleotide
gaacugucuaguucuaaga

SEQ ID NO: 2144914 - RNA, 19 nt, Artificial Sequence
  Description of Artificial Sequence: Synthetic oligonucleotide
uuuguugauaaugcuuugu

SEQ ID NO: 2144915 - RNA, 19 nt, Artificial Sequence
  Description of Artificial Sequence: Synthetic oligonucleotide
aaagcuugaaaugcuggaa

SEQ ID NO: 2144916 - RNA, 19 nt, Artificial Sequence
  Description of Artificial Sequence: Synthetic oligonucleotide
ugaugcuugcuacuagcac

SEQ ID NO: 2144917 - RNA, 19 nt, Artificial Sequence
  Description of Artificial Sequence: Synthetic oligonucleotide
cauuuagagaaugaacauc

SEQ ID NO: 2144918 - RNA, 19 nt, Artificial Sequence
  Description of Artificial Sequence: Synthetic oligonucleotide
cuuuucaccuaacaguaca

SEQ ID NO: 2144919 - RNA, 19 nt, Artificial Sequence
  Description of Artificial Sequence: Synthetic oligonucleotide
aaguuuagauucauaguaa

SEQ ID NO: 2144920 - RNA, 19 nt, Artificial Sequence
  Description of Artificial Sequence: Synthetic oligonucleotide
uaauuucuuuacugcaggu

SEQ ID NO: 2144921 - RNA, 19 nt, Artificial Sequence
  Description of Artificial Sequence: Synthetic oligonucleotide
guucuaagagcuccuggag

SEQ ID NO: 2144922 - RNA, 19 nt, Artificial Sequence
  Description of Artificial Sequence: Synthetic oligonucleotide
uuuucaccuaacaguacau

SEQ ID NO: 2144923 - RNA, 19 nt, Artificial Sequence
  Description of Artificial Sequence: Synthetic oligonucleotide
gauaaucuuacacaauuuu

SEQ ID NO: 2144924 - RNA, 19 nt, Artificial Sequence
  Description of Artificial Sequence: Synthetic oligonucleotide
acaauagcuugacaaaguu

SEQ ID NO: 2144925 - RNA, 19 nt, Artificial Sequence
  Description of Artificial Sequence: Synthetic oligonucleotide
uggaguuuucgaaguuuag

SEQ ID NO: 2144926 - RNA, 19 nt, Artificial Sequence
  Description of Artificial Sequence: Synthetic oligonucleotide
uggugaggcauccagguuu

SEQ ID NO: 2144927 - RNA, 19 nt, Artificial Sequence
  Description of Artificial Sequence: Synthetic oligonucleotide
ugcugaccaccacacacag

SEQ ID NO: 2144928 - RNA, 19 nt, Artificial Sequence
  Description of Artificial Sequence: Synthetic oligonucleotide
aguugauucuguaacgaca

SEQ ID NO: 2144929 - RNA, 19 nt, Artificial Sequence
  Description of Artificial Sequence: Synthetic oligonucleotide
ccugguauacacuucauuc

SEQ ID NO: 2144930 - RNA, 19 nt, Artificial Sequence
  Description of Artificial Sequence: Synthetic oligonucleotide
guaaaagcuugaaaugcug

SEQ ID NO: 2144931 - RNA, 19 nt, Artificial Sequence
  Description of Artificial Sequence: Synthetic oligonucleotide
aggagaucacuuguaaaag

SEQ ID NO: 2144932 - RNA, 19 nt, Artificial Sequence
  Description of Artificial Sequence: Synthetic oligonucleotide
gaguugauucuguaacgac

SEQ ID NO: 2144933 - RNA, 19 nt, Artificial Sequence
  Description of Artificial Sequence: Synthetic oligonucleotide
gaaaguuuagcauguugcu

SEQ ID NO: 2144934 - RNA, 19 nt, Artificial Sequence
  Description of Artificial Sequence: Synthetic oligonucleotide
uuacugcagguacaauggc

SEQ ID NO: 2144935 - RNA, 19 nt, Artificial Sequence
  Description of Artificial Sequence: Synthetic oligonucleotide
gaguuuucgaaguuuagau

SEQ ID NO: 2144936 - RNA, 19 nt, Artificial Sequence
  Description of Artificial Sequence: Synthetic oligonucleotide
uuuagagaaugaacaucaa

SEQ ID NO: 2144937 - RNA, 19 nt, Artificial Sequence
  Description of Artificial Sequence: Synthetic oligonucleotide
uguuguuuauaaagucuua

SEQ ID NO: 2144938 - RNA, 19 nt, Artificial Sequence
  Description of Artificial Sequence: Synthetic oligonucleotide
uuauaacuuggugaggcau

SEQ ID NO: 2144939 - RNA, 19 nt, Artificial Sequence
  Description of Artificial Sequence: Synthetic oligonucleotide
auagucuuuuggaagugag

SEQ ID NO: 2144940 - RNA, 19 nt, Artificial Sequence
  Description of Artificial Sequence: Synthetic oligonucleotide
cugauugacugucaucuuc

SEQ ID NO: 2144941 - RNA, 19 nt, Artificial Sequence
  Description of Artificial Sequence: Synthetic oligonucleotide
uuuuccaacugugcugacc

SEQ ID NO: 2144942 - RNA, 19 nt, Artificial Sequence
  Description of Artificial Sequence: Synthetic oligonucleotide
aguuuucgaaguuuagauu

SEQ ID NO: 2144943 - RNA, 19 nt, Artificial Sequence
  Description of Artificial Sequence: Synthetic oligonucleotide
uucaaggagaucacuugua

SEQ ID NO: 2144944 - RNA, 19 nt, Artificial Sequence
  Description of Artificial Sequence: Synthetic oligonucleotide
aggccuuuauaacuuggug

SEQ ID NO: 2144945 - RNA, 19 nt, Artificial Sequence
  Description of Artificial Sequence: Synthetic oligonucleotide
uacuggaguucgaggauug

SEQ ID NO: 2144946 - RNA, 19 nt, Artificial Sequence
  Description of Artificial Sequence: Synthetic oligonucleotide
acagcgaggaugaacuguc

SEQ ID NO: 2144947 - RNA, 19 nt, Artificial Sequence
  Description of Artificial Sequence: Synthetic oligonucleotide
guuuaaccugaucauucac

SEQ ID NO: 2144948 - RNA, 19 nt, Artificial Sequence
  Description of Artificial Sequence: Synthetic oligonucleotide
aguaagcgcuuguaauuug

SEQ ID NO: 2144949 - RNA, 19 nt, Artificial Sequence
  Description of Artificial Sequence: Synthetic oligonucleotide
uaacgacaucaaaaggccu

SEQ ID NO: 2144950 - RNA, 19 nt, Artificial Sequence
  Description of Artificial Sequence: Synthetic oligonucleotide
cugucuaguucuaagagcu

SEQ ID NO: 2144951 - RNA, 19 nt, Artificial Sequence
  Description of Artificial Sequence: Synthetic oligonucleotide
uguuuucaguaugaaagua

SEQ ID NO: 2144952 - RNA, 19 nt, Artificial Sequence
  Description of Artificial Sequence: Synthetic oligonucleotide
ucauucaguucggggauag

SEQ ID NO: 2144953 - RNA, 19 nt, Artificial Sequence
  Description of Artificial Sequence: Synthetic oligonucleotide
auuacuggaguucgaggau

SEQ ID NO: 2144954 - RNA, 19 nt, Artificial Sequence
  Description of Artificial Sequence: Synthetic oligonucleotide
ugucuuuguguauggaguu

SEQ ID NO: 2144955 - RNA, 19 nt, Artificial Sequence
  Description of Artificial Sequence: Synthetic oligonucleotide
aacgacaucaaaaggccuu

SEQ ID NO: 2144956 - RNA, 19 nt, Artificial Sequence
  Description of Artificial Sequence: Synthetic oligonucleotide
gagagcugauacauuuuag

SEQ ID NO: 2144957 - RNA, 19 nt, Artificial Sequence
  Description of Artificial Sequence: Synthetic oligonucleotide
aagugagaaacaauagcuu

SEQ ID NO: 2144958 - RNA, 19 nt, Artificial Sequence
  Description of Artificial Sequence: Synthetic oligonucleotide
uccuuacucugucuuugug

SEQ ID NO: 2144959 - RNA, 19 nt, Artificial Sequence
  Description of Artificial Sequence: Synthetic oligonucleotide
acacacagcgaggaugaac

SEQ ID NO: 2144960 - RNA, 19 nt, Artificial Sequence
  Description of Artificial Sequence: Synthetic oligonucleotide
ucuugaauuuugcuuccuu

SEQ ID NO: 2144961 - RNA, 19 nt, Artificial Sequence
  Description of Artificial Sequence: Synthetic oligonucleotide
  modified_base (17)..(17): a, c, u, g, unknown or other
aguucgaggauuguggnua

SEQ ID NO: 2144962 - RNA, 19 nt, Artificial Sequence
  Description of Artificial Sequence: Synthetic oligonucleotide
  modified_base (14)..(14): a, c, u, g, unknown or other
ucgaggauuguggnuaaau

SEQ ID NO: 2144963 - RNA, 19 nt, Artificial Sequence
  Description of Artificial Sequence: Synthetic oligonucleotide
ugauaaugcuuuguagguc

SEQ ID NO: 2144964 - RNA, 19 nt, Artificial Sequence
  Description of Artificial Sequence: Synthetic oligonucleotide
cugaucauucacauccuca

SEQ ID NO: 2144965 - RNA, 19 nt, Artificial Sequence
  Description of Artificial Sequence: Synthetic oligonucleotide
ggggauagacuccauuuag

SEQ ID NO: 2144966 - RNA, 19 nt, Artificial Sequence
  Description of Artificial Sequence: Synthetic oligonucleotide
uccaacugugcugaccacc

SEQ ID NO: 2144967 - RNA, 19 nt, Artificial Sequence
  Description of Artificial Sequence: Synthetic oligonucleotide
acacaauuuuccaacugug

SEQ ID NO: 2144968 - RNA, 19 nt, Artificial Sequence
  Description of Artificial Sequence: Synthetic oligonucleotide
ggccuuuauaacuugguga

SEQ ID NO: 2144969 - RNA, 19 nt, Artificial Sequence
  Description of Artificial Sequence: Synthetic oligonucleotide
uucuuuacugcagguacaa

SEQ ID NO: 2144970 - RNA, 19 nt, Artificial Sequence
  Description of Artificial Sequence: Synthetic oligonucleotide
uuucuccguguaaucaguc

SEQ ID NO: 2144971 - RNA, 19 nt, Artificial Sequence
  Description of Artificial Sequence: Synthetic oligonucleotide
uugaccaguaagcgcuugu

SEQ ID NO: 2144972 - RNA, 19 nt, Artificial Sequence
  Description of Artificial Sequence: Synthetic oligonucleotide
uagaaucuugacucaggau

SEQ ID NO: 2144973 - RNA, 19 nt, Artificial Sequence
  Description of Artificial Sequence: Synthetic oligonucleotide
cuucaggcccuaauacuug

SEQ ID NO: 2144974 - RNA, 19 nt, Artificial Sequence
  Description of Artificial Sequence: Synthetic oligonucleotide
gaaugaacaucaaaauagu

SEQ ID NO: 2144975 - RNA, 19 nt, Artificial Sequence
  Description of Artificial Sequence: Synthetic oligonucleotide
uauggaguuuucgaaguuu

SEQ ID NO: 2144976 - RNA, 19 nt, Artificial Sequence
  Description of Artificial Sequence: Synthetic oligonucleotide
ugauacauuuuagaaucuu

SEQ ID NO: 2144977 - RNA, 19 nt, Artificial Sequence
  Description of Artificial Sequence: Synthetic oligonucleotide
aguuuagcauguugcugcu

SEQ ID NO: 2144978 - RNA, 19 nt, Artificial Sequence
  Description of Artificial Sequence: Synthetic oligonucleotide
aauacuuguuuaaccugau

SEQ ID NO: 2144979 - RNA, 19 nt, Artificial Sequence
  Description of Artificial Sequence: Synthetic oligonucleotide
cccuaauacuuguuuaacc

SEQ ID NO: 2144980 - RNA, 19 nt, Artificial Sequence
  Description of Artificial Sequence: Synthetic oligonucleotide
aaguaucucuggucaacua

SEQ ID NO: 2144981 - RNA, 19 nt, Artificial Sequence
  Description of Artificial Sequence: Synthetic oligonucleotide
uucaccuguuguuuauaaa

SEQ ID NO: 2144982 - RNA, 19 nt, Artificial Sequence
  Description of Artificial Sequence: Synthetic oligonucleotide
acauccucauugauaaucu

SEQ ID NO: 2144983 - RNA, 19 nt, Artificial Sequence
  Description of Artificial Sequence: Synthetic oligonucleotide
gauucuguaacgacaucaa

SEQ ID NO: 2144984 - RNA, 19 nt, Artificial Sequence
  Description of Artificial Sequence: Synthetic oligonucleotide
ucuuuguguauggaguuuu

SEQ ID NO: 2144985 - RNA, 19 nt, Artificial Sequence
  Description of Artificial Sequence: Synthetic oligonucleotide
uaagcgcuuguaauuugau

SEQ ID NO: 2144986 - RNA, 19 nt, Artificial Sequence
  Description of Artificial Sequence: Synthetic oligonucleotide
accuaacaguacaucaauc

SEQ ID NO: 2144987 - RNA, 19 nt, Artificial Sequence
  Description of Artificial Sequence: Synthetic oligonucleotide
uucaggcccuaauacuugu

SEQ ID NO: 2144988 - RNA, 19 nt, Artificial Sequence
  Description of Artificial Sequence: Synthetic oligonucleotide
uucgaaguuuagauucaua

SEQ ID NO: 2144989 - RNA, 19 nt, Artificial Sequence
  Description of Artificial Sequence: Synthetic oligonucleotide
ugacugucaucuuccuuac

SEQ ID NO: 2144990 - RNA, 19 nt, Artificial Sequence
  Description of Artificial Sequence: Synthetic oligonucleotide
gugagaaacaauagcuuga

SEQ ID NO: 2144991 - RNA, 19 nt, Artificial Sequence
  Description of Artificial Sequence: Synthetic oligonucleotide
cuugcuacuagcaccugaa

SEQ ID NO: 2144992 - RNA, 19 nt, Artificial Sequence
  Description of Artificial Sequence: Synthetic oligonucleotide
agcuuuucaccuaacagua

SEQ ID NO: 2144993 - RNA, 19 nt, Artificial Sequence
  Description of Artificial Sequence: Synthetic oligonucleotide
auucuguaacgacaucaaa

SEQ ID NO: 2144994 - RNA, 19 nt, Artificial Sequence
  Description of Artificial Sequence: Synthetic oligonucleotide
cacacagcgaggaugaacu

SEQ ID NO: 2144995 - RNA, 19 nt, Artificial Sequence
  Description of Artificial Sequence: Synthetic oligonucleotide
uuucaccuaacaguacauc

SEQ ID NO: 2144996 - RNA, 19 nt, Artificial Sequence
  Description of Artificial Sequence: Synthetic oligonucleotide
uacaucaaucuugaauuuu

SEQ ID NO: 2144997 - RNA, 19 nt, Artificial Sequence
  Description of Artificial Sequence: Synthetic oligonucleotide
cagcguuguucauuucucc

SEQ ID NO: 2144998 - RNA, 19 nt, Artificial Sequence
  Description of Artificial Sequence: Synthetic oligonucleotide
aaccuguugauggcugucu

SEQ ID NO: 2144999 - RNA, 19 nt, Artificial Sequence
  Description of Artificial Sequence: Synthetic oligonucleotide
gcgaggaugaacugucuag

SEQ ID NO: 2145000 - RNA, 19 nt, Artificial Sequence
  Description of Artificial Sequence: Synthetic oligonucleotide
cuuuuggaagugagaaaca

SEQ ID NO: 2145001 - RNA, 19 nt, Artificial Sequence
  Description of Artificial Sequence: Synthetic oligonucleotide
uagcuugacaaaguuugaa

SEQ ID NO: 2145002 - RNA, 19 nt, Artificial Sequence
  Description of Artificial Sequence: Synthetic oligonucleotide
gagaaacaauagcuugaca

SEQ ID NO: 2145003 - RNA, 19 nt, Artificial Sequence
  Description of Artificial Sequence: Synthetic oligonucleotide
auuuuccaacugugcugac

SEQ ID NO: 2145004 - RNA, 19 nt, Artificial Sequence
  Description of Artificial Sequence: Synthetic oligonucleotide
gcuacuagcaccugaaagu

SEQ ID NO: 2145005 - RNA, 19 nt, Artificial Sequence
  Description of Artificial Sequence: Synthetic oligonucleotide
uggucaacuagaaccuguu

SEQ ID NO: 2145006 - RNA, 19 nt, Artificial Sequence
  Description of Artificial Sequence: Synthetic oligonucleotide
uccaagccugguauacacu

SEQ ID NO: 2145007 - RNA, 19 nt, Artificial Sequence
  Description of Artificial Sequence: Synthetic oligonucleotide
cuuuguguauggaguuuuc

SEQ ID NO: 2145008 - RNA, 19 nt, Artificial Sequence
  Description of Artificial Sequence: Synthetic oligonucleotide
aguucggggauagacucca

SEQ ID NO: 2145009 - RNA, 19 nt, Artificial Sequence
  Description of Artificial Sequence: Synthetic oligonucleotide
acucauguucugugggccu

SEQ ID NO: 2145010 - RNA, 19 nt, Artificial Sequence
  Description of Artificial Sequence: Synthetic oligonucleotide
gaauugaugcuugcuacua

SEQ ID NO: 2145011 - RNA, 19 nt, Artificial Sequence
  Description of Artificial Sequence: Synthetic oligonucleotide
auugauaaucuuacacaau

SEQ ID NO: 2145012 - RNA, 19 nt, Artificial Sequence
  Description of Artificial Sequence: Synthetic oligonucleotide
ucuuccuuacucugucuuu

SEQ ID NO: 2145013 - RNA, 19 nt, Artificial Sequence
  Description of Artificial Sequence: Synthetic oligonucleotide
aggaucaguccuccaaaau

SEQ ID NO: 2145014 - RNA, 19 nt, Artificial Sequence
  Description of Artificial Sequence: Synthetic oligonucleotide
uggagguuucucacagcgu

SEQ ID NO: 2145015 - RNA, 19 nt, Artificial Sequence
  Description of Artificial Sequence: Synthetic oligonucleotide
aucacuuguaaaagcuuga

SEQ ID NO: 2145016 - RNA, 19 nt, Artificial Sequence
  Description of Artificial Sequence: Synthetic oligonucleotide
gaggcauccagguuucugu

SEQ ID NO: 2145017 - RNA, 19 nt, Artificial Sequence
  Description of Artificial Sequence: Synthetic oligonucleotide
gacucaggaucaguccucc

SEQ ID NO: 2145018 - RNA, 19 nt, Artificial Sequence
  Description of Artificial Sequence: Synthetic oligonucleotide
ugucuaguucuaagagcuc

SEQ ID NO: 2145019 - RNA, 19 nt, Artificial Sequence
  Description of Artificial Sequence: Synthetic oligonucleotide
cugucuuuguguauggagu

SEQ ID NO: 2145020 - RNA, 19 nt, Artificial Sequence
  Description of Artificial Sequence: Synthetic oligonucleotide
agaauacaauuuacacaag

SEQ ID NO: 2145021 - RNA, 19 nt, Artificial Sequence
  Description of Artificial Sequence: Synthetic oligonucleotide
ggaucaguccuccaaaaua

SEQ ID NO: 2145022 - RNA, 19 nt, Artificial Sequence
  Description of Artificial Sequence: Synthetic oligonucleotide
uuccuuacucugucuuugu

SEQ ID NO: 2145023 - RNA, 19 nt, Artificial Sequence
  Description of Artificial Sequence: Synthetic oligonucleotide
ucuggucaacuagaaccug

SEQ ID NO: 2145024 - RNA, 19 nt, Artificial Sequence
  Description of Artificial Sequence: Synthetic oligonucleotide
uacuagcaccugaaaguau

SEQ ID NO: 2145025 - RNA, 19 nt, Artificial Sequence
  Description of Artificial Sequence: Synthetic oligonucleotide
uugauucuguaacgacauc

SEQ ID NO: 2145026 - RNA, 19 nt, Artificial Sequence
  Description of Artificial Sequence: Synthetic oligonucleotide
gauuucaaggagaucacuu

SEQ ID NO: 2145027 - RNA, 19 nt, Artificial Sequence
  Description of Artificial Sequence: Synthetic oligonucleotide
caguacaucaaucuugaau

SEQ ID NO: 2145028 - RNA, 19 nt, Artificial Sequence
  Description of Artificial Sequence: Synthetic oligonucleotide
agacuccauuuagagaaug

SEQ ID NO: 2145029 - RNA, 19 nt, Artificial Sequence
  Description of Artificial Sequence: Synthetic oligonucleotide
caacuagaaccuguugaug

SEQ ID NO: 2145030 - RNA, 19 nt, Artificial Sequence
  Description of Artificial Sequence: Synthetic oligonucleotide
ccuaauacuuguuuaaccu

SEQ ID NO: 2145031 - RNA, 19 nt, Artificial Sequence
  Description of Artificial Sequence: Synthetic oligonucleotide
gaccaguaagcgcuuguaa

SEQ ID NO: 2145032 - RNA, 19 nt, Artificial Sequence
  Description of Artificial Sequence: Synthetic oligonucleotide
agguuucucacagcguugu

SEQ ID NO: 2145033 - RNA, 19 nt, Artificial Sequence
  Description of Artificial Sequence: Synthetic oligonucleotide
guaagcgcuuguaauuuga

SEQ ID NO: 2145034 - RNA, 19 nt, Artificial Sequence
  Description of Artificial Sequence: Synthetic oligonucleotide
uuacuggaguucgaggauu

SEQ ID NO: 2145035 - RNA, 19 nt, Artificial Sequence
  Description of Artificial Sequence: Synthetic oligonucleotide
caaggagaucacuuguaaa

SEQ ID NO: 2145036 - RNA, 19 nt, Artificial Sequence
  Description of Artificial Sequence: Synthetic oligonucleotide
uucggggauagacuccauu

SEQ ID NO: 2145037 - RNA, 19 nt, Artificial Sequence
  Description of Artificial Sequence: Synthetic oligonucleotide
gagguuucucacagcguug

SEQ ID NO: 2145038 - RNA, 19 nt, Artificial Sequence
  Description of Artificial Sequence: Synthetic oligonucleotide
guugauucuguaacgacau

SEQ ID NO: 2145039 - RNA, 19 nt, Artificial Sequence
  Description of Artificial Sequence: Synthetic oligonucleotide
caguucggggauagacucc

SEQ ID NO: 2145040 - RNA, 19 nt, Artificial Sequence
  Description of Artificial Sequence: Synthetic oligonucleotide
aggcccuaauacuuguuua

SEQ ID NO: 2145041 - RNA, 19 nt, Artificial Sequence
  Description of Artificial Sequence: Synthetic oligonucleotide
ucugauugacugucaucuu

SEQ ID NO: 2145042 - RNA, 19 nt, Artificial Sequence
  Description of Artificial Sequence: Synthetic oligonucleotide
uugcuacuagcaccugaaa

SEQ ID NO: 2145043 - RNA, 19 nt, Artificial Sequence
  Description of Artificial Sequence: Synthetic oligonucleotide
cuaagauuucaaggagauc

SEQ ID NO: 2145044 - RNA, 19 nt, Artificial Sequence
  Description of Artificial Sequence: Synthetic oligonucleotide
cuguuguuuauaaagucuu

SEQ ID NO: 2145045 - RNA, 19 nt, Artificial Sequence
  Description of Artificial Sequence: Synthetic oligonucleotide
accaccacacacagcgagg

SEQ ID NO: 2145046 - RNA, 19 nt, Artificial Sequence
  Description of Artificial Sequence: Synthetic oligonucleotide
cacuuguaaaagcuugaaa

SEQ ID NO: 2145047 - RNA, 19 nt, Artificial Sequence
  Description of Artificial Sequence: Synthetic oligonucleotide
uuacucugucuuuguguau

SEQ ID NO: 2145048 - RNA, 19 nt, Artificial Sequence
  Description of Artificial Sequence: Synthetic oligonucleotide
cucaggaucaguccuccaa

SEQ ID NO: 2145049 - RNA, 19 nt, Artificial Sequence
  Description of Artificial Sequence: Synthetic oligonucleotide
uccuugaguugauucugua

SEQ ID NO: 2145050 - RNA, 19 nt, Artificial Sequence
  Description of Artificial Sequence: Synthetic oligonucleotide
acuaauuacuggaguucga

SEQ ID NO: 2145051 - RNA, 19 nt, Artificial Sequence
  Description of Artificial Sequence: Synthetic oligonucleotide
uggcauccaaaaucaucaa

SEQ ID NO: 2145052 - RNA, 19 nt, Artificial Sequence
  Description of Artificial Sequence: Synthetic oligonucleotide
agcgaggaugaacugucua

SEQ ID NO: 2145053 - RNA, 19 nt, Artificial Sequence
  Description of Artificial Sequence: Synthetic oligonucleotide
auagcuugacaaaguuuga

SEQ ID NO: 2145054 - RNA, 19 nt, Artificial Sequence
  Description of Artificial Sequence: Synthetic oligonucleotide
ucucacagcguuguucauu

SEQ ID NO: 2145055 - RNA, 19 nt, Artificial Sequence
  Description of Artificial Sequence: Synthetic oligonucleotide
  modified_base (16)..(16): a, c, u, g, unknown or other
guucgaggauuguggnuaa

SEQ ID NO: 2145056 - RNA, 19 nt, Artificial Sequence
  Description of Artificial Sequence: Synthetic oligonucleotide
  modified_base (19)..(19): a, c, u, g, unknown or other
ggaguucgaggauuguggn

SEQ ID NO: 2145057 - RNA, 19 nt, Artificial Sequence
  Description of Artificial Sequence: Synthetic oligonucleotide
acacagcgaggaugaacug

SEQ ID NO: 2145058 - RNA, 19 nt, Artificial Sequence
  Description of Artificial Sequence: Synthetic oligonucleotide
  modified_base (10)..(10): a, c, u, g, unknown or other
ggauuguggnuaaauugaa

SEQ ID NO: 2145059 - RNA, 19 nt, Artificial Sequence
  Description of Artificial Sequence: Synthetic oligonucleotide
ugaccaguaagcgcuugua

SEQ ID NO: 2145060 - RNA, 19 nt, Artificial Sequence
  Description of Artificial Sequence: Synthetic oligonucleotide
agaucacuuguaaaagcuu

SEQ ID NO: 2145061 - RNA, 19 nt, Artificial Sequence
  Description of Artificial Sequence: Synthetic oligonucleotide
  modified_base (9)..(9): a, c, u, g, unknown or other
gauuguggnuaaauugaau

SEQ ID NO: 2145062 - RNA, 19 nt, Artificial Sequence
  Description of Artificial Sequence: Synthetic oligonucleotide
cuacuagcaccugaaagua

SEQ ID NO: 2145063 - RNA, 19 nt, Artificial Sequence
  Description of Artificial Sequence: Synthetic oligonucleotide
uuagcauguugcugcucuu

SEQ ID NO: 2145064 - RNA, 19 nt, Artificial Sequence
  Description of Artificial Sequence: Synthetic oligonucleotide
gguucagcuuuucaccuaa

SEQ ID NO: 2145065 - RNA, 19 nt, Artificial Sequence
  Description of Artificial Sequence: Synthetic oligonucleotide
aucaguccuccaaaauacu

SEQ ID NO: 2145066 - RNA, 19 nt, Artificial Sequence
  Description of Artificial Sequence: Synthetic oligonucleotide
gaaccuguugauggcuguc

SEQ ID NO: 2145067 - RNA, 19 nt, Artificial Sequence
  Description of Artificial Sequence: Synthetic oligonucleotide
cacagcguuguucauuucu

SEQ ID NO: 2145068 - RNA, 19 nt, Artificial Sequence
  Description of Artificial Sequence: Synthetic oligonucleotide
agguacaauggcauccaaa

SEQ ID NO: 2145069 - RNA, 19 nt, Artificial Sequence
  Description of Artificial Sequence: Synthetic oligonucleotide
uagcaccugaaaguaucuc

SEQ ID NO: 2145070 - RNA, 19 nt, Artificial Sequence
  Description of Artificial Sequence: Synthetic oligonucleotide
cguuguucauuucuccaag

SEQ ID NO: 2145071 - RNA, 19 nt, Artificial Sequence
  Description of Artificial Sequence: Synthetic oligonucleotide
ucuuuacugcagguacaau

SEQ ID NO: 2145072 - RNA, 19 nt, Artificial Sequence
  Description of Artificial Sequence: Synthetic oligonucleotide
ggcccuaauacuuguuuaa

SEQ ID NO: 2145073 - RNA, 19 nt, Artificial Sequence
  Description of Artificial Sequence: Synthetic oligonucleotide
uuccaacugugcugaccac

SEQ ID NO: 2145074 - RNA, 19 nt, Artificial Sequence
  Description of Artificial Sequence: Synthetic oligonucleotide
uccguguaaucagucuuuu

SEQ ID NO: 2145075 - RNA, 19 nt, Artificial Sequence
  Description of Artificial Sequence: Synthetic oligonucleotide
augaacugucuaguucuaa

SEQ ID NO: 2145076 - RNA, 19 nt, Artificial Sequence
  Description of Artificial Sequence: Synthetic oligonucleotide
acaguacaucaaucuugaa

SEQ ID NO: 2145077 - RNA, 19 nt, Artificial Sequence
  Description of Artificial Sequence: Synthetic oligonucleotide
ccuuuauaacuuggugagg

SEQ ID NO: 2145078 - RNA, 19 nt, Artificial Sequence
  Description of Artificial Sequence: Synthetic oligonucleotide
  modified_base (5)..(5): a, c, u, g, unknown or other
guggnuaaauugaauugau

SEQ ID NO: 2145079 - RNA, 19 nt, Artificial Sequence
  Description of Artificial Sequence: Synthetic oligonucleotide
cuggucaacuagaaccugu

SEQ ID NO: 2145080 - RNA, 19 nt, Artificial Sequence
  Description of Artificial Sequence: Synthetic oligonucleotide
caauagcuugacaaaguuu

SEQ ID NO: 2145081 - RNA, 19 nt, Artificial Sequence
  Description of Artificial Sequence: Synthetic oligonucleotide
acgacaucaaaaggccuuu

SEQ ID NO: 2145082 - RNA, 19 nt, Artificial Sequence
  Description of Artificial Sequence: Synthetic oligonucleotide
gaggaugaacugucuaguu

SEQ ID NO: 2145083 - RNA, 19 nt, Artificial Sequence
  Description of Artificial Sequence: Synthetic oligonucleotide
ggagguuucucacagcguu

SEQ ID NO: 2145084 - RNA, 19 nt, Artificial Sequence
  Description of Artificial Sequence: Synthetic oligonucleotide
cucacagcguuguucauuu

SEQ ID NO: 2145085 - RNA, 19 nt, Artificial Sequence
  Description of Artificial Sequence: Synthetic oligonucleotide
guacaauggcauccaaaau

SEQ ID NO: 2145086 - RNA, 19 nt, Artificial Sequence
  Description of Artificial Sequence: Synthetic oligonucleotide
gaugaacugucuaguucua

SEQ ID NO: 2145087 - RNA, 19 nt, Artificial Sequence
  Description of Artificial Sequence: Synthetic oligonucleotide
  modified_base (18)..(18): a, c, u, g, unknown or other
gaguucgaggauuguggnu

SEQ ID NO: 2145088 - RNA, 19 nt, Artificial Sequence
  Description of Artificial Sequence: Synthetic oligonucleotide
gcuugcuacuagcaccuga

SEQ ID NO: 2145089 - RNA, 19 nt, Artificial Sequence
  Description of Artificial Sequence: Synthetic oligonucleotide
ccaacugugcugaccacca

SEQ ID NO: 2145090 - RNA, 19 nt, Artificial Sequence
  Description of Artificial Sequence: Synthetic oligonucleotide
gucuuaacucauguucugu

SEQ ID NO: 2145091 - RNA, 19 nt, Artificial Sequence
  Description of Artificial Sequence: Synthetic oligonucleotide
gcguuguucauuucuccaa

SEQ ID NO: 2145092 - RNA, 19 nt, Artificial Sequence
  Description of Artificial Sequence: Synthetic oligonucleotide
caacugugcugaccaccac

SEQ ID NO: 2145093 - RNA, 19 nt, Artificial Sequence
  Description of Artificial Sequence: Synthetic oligonucleotide
caccuaacaguacaucaau

SEQ ID NO: 2145094 - RNA, 19 nt, Artificial Sequence
  Description of Artificial Sequence: Synthetic oligonucleotide
gcccuaauacuuguuuaac

SEQ ID NO: 2145095 - RNA, 19 nt, Artificial Sequence
  Description of Artificial Sequence: Synthetic oligonucleotide
cuagaaccuguugauggcu

SEQ ID NO: 2145096 - RNA, 19 nt, Artificial Sequence
  Description of Artificial Sequence: Synthetic oligonucleotide
ccaauuuguugauaaugcu

SEQ ID NO: 2145097 - RNA, 19 nt, Artificial Sequence
  Description of Artificial Sequence: Synthetic oligonucleotide
auaaugcuuuguaggucuu

SEQ ID NO: 2145098 - RNA, 19 nt, Artificial Sequence
  Description of Artificial Sequence: Synthetic oligonucleotide
  modified_base (15)..(15): a, c, u, g, unknown or other
uucgaggauuguggnuaaa

SEQ ID NO: 2145099 - RNA, 19 nt, Artificial Sequence
  Description of Artificial Sequence: Synthetic oligonucleotide
uguaggucuucaggcccua

SEQ ID NO: 2145100 - RNA, 19 nt, Artificial Sequence
  Description of Artificial Sequence: Synthetic oligonucleotide
ccuuacucugucuuugugu

SEQ ID NO: 2145101 - RNA, 19 nt, Artificial Sequence
  Description of Artificial Sequence: Synthetic oligonucleotide
guauggaguuuucgaaguu

SEQ ID NO: 2145102 - RNA, 19 nt, Artificial Sequence
  Description of Artificial Sequence: Synthetic oligonucleotide
ugcuugcuacuagcaccug

SEQ ID NO: 2145103 - RNA, 19 nt, Artificial Sequence
  Description of Artificial Sequence: Synthetic oligonucleotide
gcagguacaauggcaucca

SEQ ID NO: 2145104 - RNA, 19 nt, Artificial Sequence
  Description of Artificial Sequence: Synthetic oligonucleotide
gcuuuucaccuaacaguac

SEQ ID NO: 2145105 - RNA, 19 nt, Artificial Sequence
  Description of Artificial Sequence: Synthetic oligonucleotide
ccauuuagagaaugaacau

SEQ ID NO: 2145106 - RNA, 19 nt, Artificial Sequence
  Description of Artificial Sequence: Synthetic oligonucleotide
cacagcgaggaugaacugu

SEQ ID NO: 2145107 - RNA, 19 nt, Artificial Sequence
  Description of Artificial Sequence: Synthetic oligonucleotide
ccucauugauaaucuuaca

SEQ ID NO: 2145108 - RNA, 19 nt, Artificial Sequence
  Description of Artificial Sequence: Synthetic oligonucleotide
cucugucuuuguguaugga

SEQ ID NO: 2145109 - RNA, 19 nt, Artificial Sequence
  Description of Artificial Sequence: Synthetic oligonucleotide
gguauacacuucauucagu

SEQ ID NO: 2145110 - RNA, 19 nt, Artificial Sequence
  Description of Artificial Sequence: Synthetic oligonucleotide
caucuuccuuacucugucu

SEQ ID NO: 2145111 - RNA, 19 nt, Artificial Sequence
  Description of Artificial Sequence: Synthetic oligonucleotide
cuccguguaaucagucuuu

SEQ ID NO: 2145112 - RNA, 19 nt, Artificial Sequence
  Description of Artificial Sequence: Synthetic oligonucleotide
cgaaguuuagauucauagu

SEQ ID NO: 2145113 - RNA, 19 nt, Artificial Sequence
  Description of Artificial Sequence: Synthetic oligonucleotide
caguaagcgcuuguaauuu

SEQ ID NO: 2145114 - RNA, 19 nt, Artificial Sequence
  Description of Artificial Sequence: Synthetic oligonucleotide
cugugcugaccaccacaca

SEQ ID NO: 2145115 - RNA, 19 nt, Artificial Sequence
  Description of Artificial Sequence: Synthetic oligonucleotide
ccaguaagcgcuuguaauu

SEQ ID NO: 2145116 - RNA, 19 nt, Artificial Sequence
  Description of Artificial Sequence: Synthetic oligonucleotide
cauucaguucggggauaga

SEQ ID NO: 2145117 - RNA, 19 nt, Artificial Sequence
  Description of Artificial Sequence: Synthetic oligonucleotide
agccugguauacacuucau

SEQ ID NO: 2145118 - RNA, 19 nt, Artificial Sequence
  Description of Artificial Sequence: Synthetic oligonucleotide
ccaagccugguauacacuu

SEQ ID NO: 2145119 - RNA, 19 nt, Artificial Sequence
  Description of Artificial Sequence: Synthetic oligonucleotide
gucuuuguguauggaguuu

SEQ ID NO: 2145120 - RNA, 19 nt, Artificial Sequence
  Description of Artificial Sequence: Synthetic oligonucleotide
gcgcuuguaauuugauguu

SEQ ID NO: 2145121 - RNA, 19 nt, Artificial Sequence
  Description of Artificial Sequence: Synthetic oligonucleotide
guaggucuucaggcccuaa

SEQ ID NO: 2145122 - RNA, 19 nt, Artificial Sequence
  Description of Artificial Sequence: Synthetic oligonucleotide
gccugguauacacuucauu

SEQ ID NO: 2145123 - RNA, 19 nt, Artificial Sequence
  Description of Artificial Sequence: Synthetic oligonucleotide
cagcgaggaugaacugucu

SEQ ID NO: 2145124 - RNA, 19 nt, Artificial Sequence
  Description of Artificial Sequence: Synthetic oligonucleotide
  modified_base (13)..(13): a, c, u, g, unknown or other
cgaggauuguggnuaaauu

SEQ ID NO: 2145125 - RNA, 19 nt, Artificial Sequence
  Description of Artificial Sequence: Synthetic oligonucleotide
cuaagagcuccuggagguu

SEQ ID NO: 2145126 - RNA, 19 nt, Artificial Sequence
  Description of Artificial Sequence: Synthetic oligonucleotide
cggggauagacuccauuua

SEQ ID NO: 2145127 - RNA, 19 nt, Artificial Sequence
  Description of Artificial Sequence: Synthetic oligonucleotide
cauguucugugggccugcu

SEQ ID NO: 2145128 - RNA, 19 nt, Artificial Sequence
  Description of Artificial Sequence: Synthetic oligonucleotide
cgaggaugaacugucuagu

SEQ ID NO: 2145129 - RNA, 19 nt, Artificial Sequence
  Description of Artificial Sequence: Synthetic oligonucleotide
gguuucucacagcguuguu

SEQ ID NO: 2145130 - RNA, 19 nt, Artificial Sequence
  Description of Artificial Sequence: Synthetic oligonucleotide
ccugcucuccagaucuuuu

SEQ ID NO: 2145131 - RNA, 19 nt, Artificial Sequence
  Description of Artificial Sequence: Synthetic oligonucleotide
cugucuuugcugggcucau

SEQ ID NO: 2145132 - RNA, 19 nt, Artificial Sequence
  Description of Artificial Sequence: Synthetic oligonucleotide
guucggggauagacuccau

SEQ ID NO: 2145133 - RNA, 19 nt, Artificial Sequence
  Description of Artificial Sequence: Synthetic oligonucleotide
cgacaucaaaaggccuuua

SEQ ID NO: 2145134 - RNA, 19 nt, Artificial Sequence
  Description of Artificial Sequence: Synthetic oligonucleotide
  modified_base (1)..(1): a, c, u, g, unknown or other
nuaaauugaauugaugcuu

SEQ ID NO: 2145135 - RNA, 19 nt, Artificial Sequence
  Description of Artificial Sequence: Synthetic oligonucleotide
aagaauguggcucugcagg

SEQ ID NO: 2145136 - RNA, 19 nt, Artificial Sequence
  Description of Artificial Sequence: Synthetic oligonucleotide
uuauuuucacaaacgaacg

SEQ ID NO: 2145137 - RNA, 19 nt, Artificial Sequence
  Description of Artificial Sequence: Synthetic oligonucleotide
aacgcuaugccucaugagg

SEQ ID NO: 2145138 - RNA, 19 nt, Artificial Sequence
  Description of Artificial Sequence: Synthetic oligonucleotide
auugcaaacgucuugccac

SEQ ID NO: 2145139 - RNA, 19 nt, Artificial Sequence
  Description of Artificial Sequence: Synthetic oligonucleotide
aaacgaacgccuuuucgcc

SEQ ID NO: 2145140 - RNA, 19 nt, Artificial Sequence
  Description of Artificial Sequence: Synthetic oligonucleotide
gacaugccgacucagaugg

SEQ ID NO: 2145141 - RNA, 19 nt, Artificial Sequence
  Description of Artificial Sequence: Synthetic oligonucleotide
ugugaaucaggacaugccg

SEQ ID NO: 2145142 - RNA, 19 nt, Artificial Sequence
  Description of Artificial Sequence: Synthetic oligonucleotide
auuuucacaaacgaacgcc

SEQ ID NO: 2145143 - RNA, 19 nt, Artificial Sequence
  Description of Artificial Sequence: Synthetic oligonucleotide
ucccuucugacauagauag

SEQ ID NO: 2145144 - RNA, 19 nt, Artificial Sequence
  Description of Artificial Sequence: Synthetic oligonucleotide
caugcucacacacaaaugg

SEQ ID NO: 2145145 - RNA, 19 nt, Artificial Sequence
  Description of Artificial Sequence: Synthetic oligonucleotide
uguuucauugcaaacgucu

SEQ ID NO: 2145146 - RNA, 19 nt, Artificial Sequence
  Description of Artificial Sequence: Synthetic oligonucleotide
uuucuuaaaggccugcgug

SEQ ID NO: 2145147 - RNA, 19 nt, Artificial Sequence
  Description of Artificial Sequence: Synthetic oligonucleotide
cuuaagguagucuuugcgc

SEQ ID NO: 2145148 - RNA, 19 nt, Artificial Sequence
  Description of Artificial Sequence: Synthetic oligonucleotide
uucaauguguuucuucaag

SEQ ID NO: 2145149 - RNA, 19 nt, Artificial Sequence
  Description of Artificial Sequence: Synthetic oligonucleotide
aaguacaccauccuuucug

SEQ ID NO: 2145150 - RNA, 19 nt, Artificial Sequence
  Description of Artificial Sequence: Synthetic oligonucleotide
aaauggacgcuguuccucg

SEQ ID NO: 2145151 - RNA, 19 nt, Artificial Sequence
  Description of Artificial Sequence: Synthetic oligonucleotide
ugaaucgugagucuucaug

SEQ ID NO: 2145152 - RNA, 19 nt, Artificial Sequence
  Description of Artificial Sequence: Synthetic oligonucleotide
uguguugaauuucugauua

SEQ ID NO: 2145153 - RNA, 19 nt, Artificial Sequence
  Description of Artificial Sequence: Synthetic oligonucleotide
aaagaacaucccuucugac

SEQ ID NO: 2145154 - RNA, 19 nt, Artificial Sequence
  Description of Artificial Sequence: Synthetic oligonucleotide
uuuguguugaauuucugau

SEQ ID NO: 2145155 - RNA, 19 nt, Artificial Sequence
  Description of Artificial Sequence: Synthetic oligonucleotide
uauuuucacaaacgaacgc

SEQ ID NO: 2145156 - RNA, 19 nt, Artificial Sequence
  Description of Artificial Sequence: Synthetic oligonucleotide
ucaaguucgauuuuguguu

SEQ ID NO: 2145157 - RNA, 19 nt, Artificial Sequence
  Description of Artificial Sequence: Synthetic oligonucleotide
aagaacaucccuucugaca

SEQ ID NO: 2145158 - RNA, 19 nt, Artificial Sequence
  Description of Artificial Sequence: Synthetic oligonucleotide
caaacgaacgccuuuucgc

SEQ ID NO: 2145159 - RNA, 19 nt, Artificial Sequence
  Description of Artificial Sequence: Synthetic oligonucleotide
aaagaauguggcucugcag

SEQ ID NO: 2145160 - RNA, 19 nt, Artificial Sequence
  Description of Artificial Sequence: Synthetic oligonucleotide
ucugauuacagccauuauu

SEQ ID NO: 2145161 - RNA, 19 nt, Artificial Sequence
  Description of Artificial Sequence: Synthetic oligonucleotide
aucgugagucuucaugugc

SEQ ID NO: 2145162 - RNA, 19 nt, Artificial Sequence
  Description of Artificial Sequence: Synthetic oligonucleotide
uuaagguagucuuugcgcu

SEQ ID NO: 2145163 - RNA, 19 nt, Artificial Sequence
  Description of Artificial Sequence: Synthetic oligonucleotide
acauagauagcccucguga

SEQ ID NO: 2145164 - RNA, 19 nt, Artificial Sequence
  Description of Artificial Sequence: Synthetic oligonucleotide
agaaguacaccauccuuuc

SEQ ID NO: 2145165 - RNA, 19 nt, Artificial Sequence
  Description of Artificial Sequence: Synthetic oligonucleotide
agugugaaucaggacaugc

SEQ ID NO: 2145166 - RNA, 19 nt, Artificial Sequence
  Description of Artificial Sequence: Synthetic oligonucleotide
uagucacacacaaauggcc

SEQ ID NO: 2145167 - RNA, 19 nt, Artificial Sequence
  Description of Artificial Sequence: Synthetic oligonucleotide
uuuucacaaacgaacgccu

SEQ ID NO: 2145168 - RNA, 19 nt, Artificial Sequence
  Description of Artificial Sequence: Synthetic oligonucleotide
auagucacacacaaauggc

SEQ ID NO: 2145169 - RNA, 19 nt, Artificial Sequence
  Description of Artificial Sequence: Synthetic oligonucleotide
uuugcguucaauguguuuc

SEQ ID NO: 2145170 - RNA, 19 nt, Artificial Sequence
  Description of Artificial Sequence: Synthetic oligonucleotide
uuuuaggagggaaguaccc

SEQ ID NO: 2145171 - RNA, 19 nt, Artificial Sequence
  Description of Artificial Sequence: Synthetic oligonucleotide
agaacaucccuucugacau

SEQ ID NO: 2145172 - RNA, 19 nt, Artificial Sequence
  Description of Artificial Sequence: Synthetic oligonucleotide
agaugguagucucugauga

SEQ ID NO: 2145173 - RNA, 19 nt, Artificial Sequence
  Description of Artificial Sequence: Synthetic oligonucleotide
uucgauuuuguguugaauu

SEQ ID NO: 2145174 - RNA, 19 nt, Artificial Sequence
  Description of Artificial Sequence: Synthetic oligonucleotide
acaaacgaacgccuuuucg

SEQ ID NO: 2145175 - RNA, 19 nt, Artificial Sequence
  Description of Artificial Sequence: Synthetic oligonucleotide
cuuuuaggagggaaguacc

SEQ ID NO: 2145176 - RNA, 19 nt, Artificial Sequence
  Description of Artificial Sequence: Synthetic oligonucleotide
ucauguuugcguucaaugu

SEQ ID NO: 2145177 - RNA, 19 nt, Artificial Sequence
  Description of Artificial Sequence: Synthetic oligonucleotide
ugcgcaucuagcuuccagg

SEQ ID NO: 2145178 - RNA, 19 nt, Artificial Sequence
  Description of Artificial Sequence: Synthetic oligonucleotide
uucuuaaaggccugcgugc

SEQ ID NO: 2145179 - RNA, 19 nt, Artificial Sequence
  Description of Artificial Sequence: Synthetic oligonucleotide
uucaugugccgcuucagcc

SEQ ID NO: 2145180 - RNA, 19 nt, Artificial Sequence
  Description of Artificial Sequence: Synthetic oligonucleotide
uguguuuucagcugcuggu

SEQ ID NO: 2145181 - RNA, 19 nt, Artificial Sequence
  Description of Artificial Sequence: Synthetic oligonucleotide
ucaauguguuucuucaagu

SEQ ID NO: 2145182 - RNA, 19 nt, Artificial Sequence
  Description of Artificial Sequence: Synthetic oligonucleotide
caaacgucuugccacagcc

SEQ ID NO: 2145183 - RNA, 19 nt, Artificial Sequence
  Description of Artificial Sequence: Synthetic oligonucleotide
cucguggaaggaaagaaug

SEQ ID NO: 2145184 - RNA, 19 nt, Artificial Sequence
  Description of Artificial Sequence: Synthetic oligonucleotide
guugaaggcaguuguguag

SEQ ID NO: 2145185 - RNA, 19 nt, Artificial Sequence
  Description of Artificial Sequence: Synthetic oligonucleotide
uguugaauuucugauuaca

SEQ ID NO: 2145186 - RNA, 19 nt, Artificial Sequence
  Description of Artificial Sequence: Synthetic oligonucleotide
uaacuggcgccacagucgg

SEQ ID NO: 2145187 - RNA, 19 nt, Artificial Sequence
  Description of Artificial Sequence: Synthetic oligonucleotide
ucucucaugugcuucagaa

SEQ ID NO: 2145188 - RNA, 19 nt, Artificial Sequence
  Description of Artificial Sequence: Synthetic oligonucleotide
ugcacagaugcgcaucuag

SEQ ID NO: 2145189 - RNA, 19 nt, Artificial Sequence
  Description of Artificial Sequence: Synthetic oligonucleotide
caugugcugcuuaagguag

SEQ ID NO: 2145190 - RNA, 19 nt, Artificial Sequence
  Description of Artificial Sequence: Synthetic oligonucleotide
agccaucaugcucacacac

SEQ ID NO: 2145191 - RNA, 19 nt, Artificial Sequence
  Description of Artificial Sequence: Synthetic oligonucleotide
uucgccagugugaaucagg

SEQ ID NO: 2145192 - RNA, 19 nt, Artificial Sequence
  Description of Artificial Sequence: Synthetic oligonucleotide
uuugccacaaaagaacauc

SEQ ID NO: 2145193 - RNA, 19 nt, Artificial Sequence
  Description of Artificial Sequence: Synthetic oligonucleotide
uguuucuuaaaggccugcg

SEQ ID NO: 2145194 - RNA, 19 nt, Artificial Sequence
  Description of Artificial Sequence: Synthetic oligonucleotide
aaucgugagucuucaugug

SEQ ID NO: 2145195 - RNA, 19 nt, Artificial Sequence
  Description of Artificial Sequence: Synthetic oligonucleotide
agucuuugcgcuugaaugu

SEQ ID NO: 2145196 - RNA, 19 nt, Artificial Sequence
  Description of Artificial Sequence: Synthetic oligonucleotide
aacaucccuucugacauag

SEQ ID NO: 2145197 - RNA, 19 nt, Artificial Sequence
  Description of Artificial Sequence: Synthetic oligonucleotide
aacgucuugccacagccau

SEQ ID NO: 2145198 - RNA, 19 nt, Artificial Sequence
  Description of Artificial Sequence: Synthetic oligonucleotide
ugaaucaggacaugccgac

SEQ ID NO: 2145199 - RNA, 19 nt, Artificial Sequence
  Description of Artificial Sequence: Synthetic oligonucleotide
cugcgugcaaccuucaaac

SEQ ID NO: 2145200 - RNA, 19 nt, Artificial Sequence
  Description of Artificial Sequence: Synthetic oligonucleotide
guagucucugaugaaagcc

SEQ ID NO: 2145201 - RNA, 19 nt, Artificial Sequence
  Description of Artificial Sequence: Synthetic oligonucleotide
ugucuucuggcauacugca

SEQ ID NO: 2145202 - RNA, 19 nt, Artificial Sequence
  Description of Artificial Sequence: Synthetic oligonucleotide
uguguagguccuccaacag

SEQ ID NO: 2145203 - RNA, 19 nt, Artificial Sequence
  Description of Artificial Sequence: Synthetic oligonucleotide
uugugagcuucucucaugu

SEQ ID NO: 2145204 - RNA, 19 nt, Artificial Sequence
  Description of Artificial Sequence: Synthetic oligonucleotide
uuaggagggaaguacccac

SEQ ID NO: 2145205 - RNA, 19 nt, Artificial Sequence
  Description of Artificial Sequence: Synthetic oligonucleotide
gaaagaauguggcucugca

SEQ ID NO: 2145206 - RNA, 19 nt, Artificial Sequence
  Description of Artificial Sequence: Synthetic oligonucleotide
ucaggaucgugcacaacgc

SEQ ID NO: 2145207 - RNA, 19 nt, Artificial Sequence
  Description of Artificial Sequence: Synthetic oligonucleotide
cucuuugugagcuucucuc

SEQ ID NO: 2145208 - RNA, 19 nt, Artificial Sequence
  Description of Artificial Sequence: Synthetic oligonucleotide
ugaggcuuuguuucauugc

SEQ ID NO: 2145209 - RNA, 19 nt, Artificial Sequence
  Description of Artificial Sequence: Synthetic oligonucleotide
ucgugcacaacgcuaugcc

SEQ ID NO: 2145210 - RNA, 19 nt, Artificial Sequence
  Description of Artificial Sequence: Synthetic oligonucleotide
uucaaacccgcauguauac

SEQ ID NO: 2145211 - RNA, 19 nt, Artificial Sequence
  Description of Artificial Sequence: Synthetic oligonucleotide
uccgucuuuccugaggccg

SEQ ID NO: 2145212 - RNA, 19 nt, Artificial Sequence
  Description of Artificial Sequence: Synthetic oligonucleotide
ucaugcucacacacaaaug

SEQ ID NO: 2145213 - RNA, 19 nt, Artificial Sequence
  Description of Artificial Sequence: Synthetic oligonucleotide
ucugacauagauagcccuc

SEQ ID NO: 2145214 - RNA, 19 nt, Artificial Sequence
  Description of Artificial Sequence: Synthetic oligonucleotide
gaggcuuuguuucauugca

SEQ ID NO: 2145215 - RNA, 19 nt, Artificial Sequence
  Description of Artificial Sequence: Synthetic oligonucleotide
guaacuggcgccacagucg

SEQ ID NO: 2145216 - RNA, 19 nt, Artificial Sequence
  Description of Artificial Sequence: Synthetic oligonucleotide
ucuuugugagcuucucuca

SEQ ID NO: 2145217 - RNA, 19 nt, Artificial Sequence
  Description of Artificial Sequence: Synthetic oligonucleotide
cacacaaauggccucuccc

SEQ ID NO: 2145218 - RNA, 19 nt, Artificial Sequence
  Description of Artificial Sequence: Synthetic oligonucleotide
cuucugacauagauagccc

SEQ ID NO: 2145219 - RNA, 19 nt, Artificial Sequence
  Description of Artificial Sequence: Synthetic oligonucleotide
ucgugagucuucaugugcu

SEQ ID NO: 2145220 - RNA, 19 nt, Artificial Sequence
  Description of Artificial Sequence: Synthetic oligonucleotide
ugccacaaaagaacauccc

SEQ ID NO: 2145221 - RNA, 19 nt, Artificial Sequence
  Description of Artificial Sequence: Synthetic oligonucleotide
acccacugaggcgagaggc

SEQ ID NO: 2145222 - RNA, 19 nt, Artificial Sequence
  Description of Artificial Sequence: Synthetic oligonucleotide
gaaucgugagucuucaugu

SEQ ID NO: 2145223 - RNA, 19 nt, Artificial Sequence
  Description of Artificial Sequence: Synthetic oligonucleotide
ucgauuuuguguugaauuu

SEQ ID NO: 2145224 - RNA, 19 nt, Artificial Sequence
  Description of Artificial Sequence: Synthetic oligonucleotide
uggacgcuguuccucgugg

SEQ ID NO: 2145225 - RNA, 19 nt, Artificial Sequence
  Description of Artificial Sequence: Synthetic oligonucleotide
uuugugagcuucucucaug

SEQ ID NO: 2145226 - RNA, 19 nt, Artificial Sequence
  Description of Artificial Sequence: Synthetic oligonucleotide
cuucccacaucccuccugg

SEQ ID NO: 2145227 - RNA, 19 nt, Artificial Sequence
  Description of Artificial Sequence: Synthetic oligonucleotide
ucccacaucccuccugggg

SEQ ID NO: 2145228 - RNA, 19 nt, Artificial Sequence
  Description of Artificial Sequence: Synthetic oligonucleotide
uuacuuugagcuucacccu

SEQ ID NO: 2145229 - RNA, 19 nt, Artificial Sequence
  Description of Artificial Sequence: Synthetic oligonucleotide
acacacaaauggccucucc

SEQ ID NO: 2145230 - RNA, 19 nt, Artificial Sequence
  Description of Artificial Sequence: Synthetic oligonucleotide
acgcuaugccucaugaggc

SEQ ID NO: 2145231 - RNA, 19 nt, Artificial Sequence
  Description of Artificial Sequence: Synthetic oligonucleotide
acaacgcuaugccucauga

SEQ ID NO: 2145232 - RNA, 19 nt, Artificial Sequence
  Description of Artificial Sequence: Synthetic oligonucleotide
ucguggaaggaaagaaugu

SEQ ID NO: 2145233 - RNA, 19 nt, Artificial Sequence
  Description of Artificial Sequence: Synthetic oligonucleotide
aguacaccauccuuucuga

SEQ ID NO: 2145234 - RNA, 19 nt, Artificial Sequence
  Description of Artificial Sequence: Synthetic oligonucleotide
gacauagauagcccucgug

SEQ ID NO: 2145235 - RNA, 19 nt, Artificial Sequence
  Description of Artificial Sequence: Synthetic oligonucleotide
ggaaguacccacugaggcg

SEQ ID NO: 2145236 - RNA, 19 nt, Artificial Sequence
  Description of Artificial Sequence: Synthetic oligonucleotide
gcuuaagguagucuuugcg

SEQ ID NO: 2145237 - RNA, 19 nt, Artificial Sequence
  Description of Artificial Sequence: Synthetic oligonucleotide
aucgugcacaacgcuaugc

SEQ ID NO: 2145238 - RNA, 19 nt, Artificial Sequence
  Description of Artificial Sequence: Synthetic oligonucleotide
gaaguacccacugaggcga

SEQ ID NO: 2145239 - RNA, 19 nt, Artificial Sequence
  Description of Artificial Sequence: Synthetic oligonucleotide
cugacauagauagcccucg

SEQ ID NO: 2145240 - RNA, 19 nt, Artificial Sequence
  Description of Artificial Sequence: Synthetic oligonucleotide
gaaggagcagaugaaucug

SEQ ID NO: 2145241 - RNA, 19 nt, Artificial Sequence
  Description of Artificial Sequence: Synthetic oligonucleotide
aggcgagaggccaagcucc

SEQ ID NO: 2145242 - RNA, 19 nt, Artificial Sequence
  Description of Artificial Sequence: Synthetic oligonucleotide
uacuuugagcuucacccuc

SEQ ID NO: 2145243 - RNA, 19 nt, Artificial Sequence
  Description of Artificial Sequence: Synthetic oligonucleotide
ucgccagugugaaucagga

SEQ ID NO: 2145244 - RNA, 19 nt, Artificial Sequence
  Description of Artificial Sequence: Synthetic oligonucleotide
gggaaguacccacugaggc

SEQ ID NO: 2145245 - RNA, 19 nt, Artificial Sequence
  Description of Artificial Sequence: Synthetic oligonucleotide
caaccuucaaacccgcaug

SEQ ID NO: 2145246 - RNA, 19 nt, Artificial Sequence
  Description of Artificial Sequence: Synthetic oligonucleotide
uugaaugucuucuggcaua

SEQ ID NO: 2145247 - RNA, 19 nt, Artificial Sequence
  Description of Artificial Sequence: Synthetic oligonucleotide
aacgaacgccuuuucgcca

SEQ ID NO: 2145248 - RNA, 19 nt, Artificial Sequence
  Description of Artificial Sequence: Synthetic oligonucleotide
ucugaaucgugagucuuca

SEQ ID NO: 2145249 - RNA, 19 nt, Artificial Sequence
  Description of Artificial Sequence: Synthetic oligonucleotide
guuguaacuggcgccacag

SEQ ID NO: 2145250 - RNA, 19 nt, Artificial Sequence
  Description of Artificial Sequence: Synthetic oligonucleotide
gagucugccucuuguuucc

SEQ ID NO: 2145251 - RNA, 19 nt, Artificial Sequence
  Description of Artificial Sequence: Synthetic oligonucleotide
ucuuaaaggccugcgugca

SEQ ID NO: 2145252 - RNA, 19 nt, Artificial Sequence
  Description of Artificial Sequence: Synthetic oligonucleotide
uuaaaggccugcgugcaac

SEQ ID NO: 2145253 - RNA, 19 nt, Artificial Sequence
  Description of Artificial Sequence: Synthetic oligonucleotide
uucugaaucgugagucuuc

SEQ ID NO: 2145254 - RNA, 19 nt, Artificial Sequence
  Description of Artificial Sequence: Synthetic oligonucleotide
cagaugcgcaucuagcuuc

SEQ ID NO: 2145255 - RNA, 19 nt, Artificial Sequence
  Description of Artificial Sequence: Synthetic oligonucleotide
uucacaaacgaacgccuuu

SEQ ID NO: 2145256 - RNA, 19 nt, Artificial Sequence
  Description of Artificial Sequence: Synthetic oligonucleotide
uuuucgccagugugaauca

SEQ ID NO: 2145257 - RNA, 19 nt, Artificial Sequence
  Description of Artificial Sequence: Synthetic oligonucleotide
cugauuacagccauuauuu

SEQ ID NO: 2145258 - RNA, 19 nt, Artificial Sequence
  Description of Artificial Sequence: Synthetic oligonucleotide
ugcacaacgcuaugccuca

SEQ ID NO: 2145259 - RNA, 19 nt, Artificial Sequence
  Description of Artificial Sequence: Synthetic oligonucleotide
ucauugcaaacgucuugcc

SEQ ID NO: 2145260 - RNA, 19 nt, Artificial Sequence
  Description of Artificial Sequence: Synthetic oligonucleotide
aacgcguccgcgaugguca

SEQ ID NO: 2145261 - RNA, 19 nt, Artificial Sequence
  Description of Artificial Sequence: Synthetic oligonucleotide
ugucucggacagaaguaca

SEQ ID NO: 2145262 - RNA, 19 nt, Artificial Sequence
  Description of Artificial Sequence: Synthetic oligonucleotide
uggcucgccagugugcugg

SEQ ID NO: 2145263 - RNA, 19 nt, Artificial Sequence
  Description of Artificial Sequence: Synthetic oligonucleotide
acuggcgccacagucgggg

SEQ ID NO: 2145264 - RNA, 19 nt, Artificial Sequence
  Description of Artificial Sequence: Synthetic oligonucleotide
ugcuuaagguagucuuugc

SEQ ID NO: 2145265 - RNA, 19 nt, Artificial Sequence
  Description of Artificial Sequence: Synthetic oligonucleotide
acagaaguacaccauccuu

SEQ ID NO: 2145266 - RNA, 19 nt, Artificial Sequence
  Description of Artificial Sequence: Synthetic oligonucleotide
aaguucgauuuuguguuga

SEQ ID NO: 2145267 - RNA, 19 nt, Artificial Sequence
  Description of Artificial Sequence: Synthetic oligonucleotide
uagcuuccaggcuuuguug

SEQ ID NO: 2145268 - RNA, 19 nt, Artificial Sequence
  Description of Artificial Sequence: Synthetic oligonucleotide
aaccuucaugugccgcuuc

SEQ ID NO: 2145269 - RNA, 19 nt, Artificial Sequence
  Description of Artificial Sequence: Synthetic oligonucleotide
cagaugguagucucugaug

SEQ ID NO: 2145270 - RNA, 19 nt, Artificial Sequence
  Description of Artificial Sequence: Synthetic oligonucleotide
auacugcacagcugacuuc

SEQ ID NO: 2145271 - RNA, 19 nt, Artificial Sequence
  Description of Artificial Sequence: Synthetic oligonucleotide
uugucucggacagaaguac

SEQ ID NO: 2145272 - RNA, 19 nt, Artificial Sequence
  Description of Artificial Sequence: Synthetic oligonucleotide
agaguggcucgccagugug

SEQ ID NO: 2145273 - RNA, 19 nt, Artificial Sequence
  Description of Artificial Sequence: Synthetic oligonucleotide
guguagguccuccaacagc

SEQ ID NO: 2145274 - RNA, 19 nt, Artificial Sequence
  Description of Artificial Sequence: Synthetic oligonucleotide
acgaacgcguccgcgaugg

SEQ ID NO: 2145275 - RNA, 19 nt, Artificial Sequence
  Description of Artificial Sequence: Synthetic oligonucleotide
acgaacgccuuuucgccag

SEQ ID NO: 2145276 - RNA, 19 nt, Artificial Sequence
  Description of Artificial Sequence: Synthetic oligonucleotide
augaaucugcuggggagcg

SEQ ID NO: 2145277 - RNA, 19 nt, Artificial Sequence
  Description of Artificial Sequence: Synthetic oligonucleotide
acgccuuuucgccagugug

SEQ ID NO: 2145278 - RNA, 19 nt, Artificial Sequence
  Description of Artificial Sequence: Synthetic oligonucleotide
ucucggacagaaguacacc

SEQ ID NO: 2145279 - RNA, 19 nt, Artificial Sequence
  Description of Artificial Sequence: Synthetic oligonucleotide
aagaguggcucgccagugu

SEQ ID NO: 2145280 - RNA, 19 nt, Artificial Sequence
  Description of Artificial Sequence: Synthetic oligonucleotide
aacgccuuuucgccagugu

SEQ ID NO: 2145281 - RNA, 19 nt, Artificial Sequence
  Description of Artificial Sequence: Synthetic oligonucleotide
agucacacacaaauggccu

SEQ ID NO: 2145282 - RNA, 19 nt, Artificial Sequence
  Description of Artificial Sequence: Synthetic oligonucleotide
uugcguucaauguguuucu

SEQ ID NO: 2145283 - RNA, 19 nt, Artificial Sequence
  Description of Artificial Sequence: Synthetic oligonucleotide
auguuugcguucaaugugu

SEQ ID NO: 2145284 - RNA, 19 nt, Artificial Sequence
  Description of Artificial Sequence: Synthetic oligonucleotide
acaaauggacgcuguuccu

SEQ ID NO: 2145285 - RNA, 19 nt, Artificial Sequence
  Description of Artificial Sequence: Synthetic oligonucleotide
cucggacagaaguacacca

SEQ ID NO: 2145286 - RNA, 19 nt, Artificial Sequence
  Description of Artificial Sequence: Synthetic oligonucleotide
ugcgugcaaccuucaaacc

SEQ ID NO: 2145287 - RNA, 19 nt, Artificial Sequence
  Description of Artificial Sequence: Synthetic oligonucleotide
gguagucucugaugaaagc

SEQ ID NO: 2145288 - RNA, 19 nt, Artificial Sequence
  Description of Artificial Sequence: Synthetic oligonucleotide
gaggcgagaggccaagcuc

SEQ ID NO: 2145289 - RNA, 19 nt, Artificial Sequence
  Description of Artificial Sequence: Synthetic oligonucleotide
cucugaugaaagccuugcc

SEQ ID NO: 2145290 - RNA, 19 nt, Artificial Sequence
  Description of Artificial Sequence: Synthetic oligonucleotide
ucggacagaaguacaccau

SEQ ID NO: 2145291 - RNA, 19 nt, Artificial Sequence
  Description of Artificial Sequence: Synthetic oligonucleotide
ugccacagccaucaugcuc

SEQ ID NO: 2145292 - RNA, 19 nt, Artificial Sequence
  Description of Artificial Sequence: Synthetic oligonucleotide
agaugcgcaucuagcuucc

SEQ ID NO: 2145293 - RNA, 19 nt, Artificial Sequence
  Description of Artificial Sequence: Synthetic oligonucleotide
acagaugcgcaucuagcuu

SEQ ID NO: 2145294 - RNA, 19 nt, Artificial Sequence
  Description of Artificial Sequence: Synthetic oligonucleotide
auagcccucgugaaccuuc

SEQ ID NO: 2145295 - RNA, 19 nt, Artificial Sequence
  Description of Artificial Sequence: Synthetic oligonucleotide
ugauuacagccauuauuuu

SEQ ID NO: 2145296 - RNA, 19 nt, Artificial Sequence
  Description of Artificial Sequence: Synthetic oligonucleotide
uacccacugaggcgagagg

SEQ ID NO: 2145297 - RNA, 19 nt, Artificial Sequence
  Description of Artificial Sequence: Synthetic oligonucleotide
ugacauagauagcccucgu

SEQ ID NO: 2145298 - RNA, 19 nt, Artificial Sequence
  Description of Artificial Sequence: Synthetic oligonucleotide
cauugcaaacgucuugcca

SEQ ID NO: 2145299 - RNA, 19 nt, Artificial Sequence
  Description of Artificial Sequence: Synthetic oligonucleotide
uuacagccauuauuuucac

SEQ ID NO: 2145300 - RNA, 19 nt, Artificial Sequence
  Description of Artificial Sequence: Synthetic oligonucleotide
aaacccgcauguauacugu

SEQ ID NO: 2145301 - RNA, 19 nt, Artificial Sequence
  Description of Artificial Sequence: Synthetic oligonucleotide
cugcuuaagguagucuuug

SEQ ID NO: 2145302 - RNA, 19 nt, Artificial Sequence
  Description of Artificial Sequence: Synthetic oligonucleotide
gcgugcaaccuucaaaccc

SEQ ID NO: 2145303 - RNA, 19 nt, Artificial Sequence
  Description of Artificial Sequence: Synthetic oligonucleotide
augcgcaucuagcuuccag

SEQ ID NO: 2145304 - RNA, 19 nt, Artificial Sequence
  Description of Artificial Sequence: Synthetic oligonucleotide
aauggacgcuguuccucgu

SEQ ID NO: 2145305 - RNA, 19 nt, Artificial Sequence
  Description of Artificial Sequence: Synthetic oligonucleotide
cauagauagcccucgugaa

SEQ ID NO: 2145306 - RNA, 19 nt, Artificial Sequence
  Description of Artificial Sequence: Synthetic oligonucleotide
aacgaacgcguccgcgaug

SEQ ID NO: 2145307 - RNA, 19 nt, Artificial Sequence
  Description of Artificial Sequence: Synthetic oligonucleotide
agggaaguacccacugagg

SEQ ID NO: 2145308 - RNA, 19 nt, Artificial Sequence
  Description of Artificial Sequence: Synthetic oligonucleotide
uucugauuacagccauuau

SEQ ID NO: 2145309 - RNA, 19 nt, Artificial Sequence
  Description of Artificial Sequence: Synthetic oligonucleotide
uuuccugaggccgcuuuac

SEQ ID NO: 2145310 - RNA, 19 nt, Artificial Sequence
  Description of Artificial Sequence: Synthetic oligonucleotide
caaauggacgcuguuccuc

SEQ ID NO: 2145311 - RNA, 19 nt, Artificial Sequence
  Description of Artificial Sequence: Synthetic oligonucleotide
gaagaguggcucgccagug

SEQ ID NO: 2145312 - RNA, 19 nt, Artificial Sequence
  Description of Artificial Sequence: Synthetic oligonucleotide
gcugacuuccucuuuguga

SEQ ID NO: 2145313 - RNA, 19 nt, Artificial Sequence
  Description of Artificial Sequence: Synthetic oligonucleotide
ugugagcuucucucaugug

SEQ ID NO: 2145314 - RNA, 19 nt, Artificial Sequence
  Description of Artificial Sequence: Synthetic oligonucleotide
uuucugaaucgugagucuu

SEQ ID NO: 2145315 - RNA, 19 nt, Artificial Sequence
  Description of Artificial Sequence: Synthetic oligonucleotide
caacgcuaugccucaugag

SEQ ID NO: 2145316 - RNA, 19 nt, Artificial Sequence
  Description of Artificial Sequence: Synthetic oligonucleotide
gaugguagucucugaugaa

SEQ ID NO: 2145317 - RNA, 19 nt, Artificial Sequence
  Description of Artificial Sequence: Synthetic oligonucleotide
guacccacugaggcgagag

SEQ ID NO: 2145318 - RNA, 19 nt, Artificial Sequence
  Description of Artificial Sequence: Synthetic oligonucleotide
guguugaauuucugauuac

SEQ ID NO: 2145319 - RNA, 19 nt, Artificial Sequence
  Description of Artificial Sequence: Synthetic oligonucleotide
cugaggccgcuuuacuuug

SEQ ID NO: 2145320 - RNA, 19 nt, Artificial Sequence
  Description of Artificial Sequence: Synthetic oligonucleotide
aaggccugcgugcaaccuu

SEQ ID NO: 2145321 - RNA, 19 nt, Artificial Sequence
  Description of Artificial Sequence: Synthetic oligonucleotide
ggcuuuguuguaacuggcg

SEQ ID NO: 2145322 - RNA, 19 nt, Artificial Sequence
  Description of Artificial Sequence: Synthetic oligonucleotide
agcugacuuccucuuugug

SEQ ID NO: 2145323 - RNA, 19 nt, Artificial Sequence
  Description of Artificial Sequence: Synthetic oligonucleotide
gaucgugcacaacgcuaug

SEQ ID NO: 2145324 - RNA, 19 nt, Artificial Sequence
  Description of Artificial Sequence: Synthetic oligonucleotide
gcuccgucuuuccugaggc

SEQ ID NO: 2145325 - RNA, 19 nt, Artificial Sequence
  Description of Artificial Sequence: Synthetic oligonucleotide
cucgccagugugcuggcac

SEQ ID NO: 2145326 - RNA, 19 nt, Artificial Sequence
  Description of Artificial Sequence: Synthetic oligonucleotide
aaacgucuugccacagcca

SEQ ID NO: 2145327 - RNA, 19 nt, Artificial Sequence
  Description of Artificial Sequence: Synthetic oligonucleotide
uuguaacuggcgccacagu

SEQ ID NO: 2145328 - RNA, 19 nt, Artificial Sequence
  Description of Artificial Sequence: Synthetic oligonucleotide
cagguugaaggcaguugug

SEQ ID NO: 2145329 - RNA, 19 nt, Artificial Sequence
  Description of Artificial Sequence: Synthetic oligonucleotide
gugcacaacgcuaugccuc

SEQ ID NO: 2145330 - RNA, 19 nt, Artificial Sequence
  Description of Artificial Sequence: Synthetic oligonucleotide
guuucuuaaaggccugcgu

SEQ ID NO: 2145331 - RNA, 19 nt, Artificial Sequence
  Description of Artificial Sequence: Synthetic oligonucleotide
cuugucucggacagaagua

SEQ ID NO: 2145332 - RNA, 19 nt, Artificial Sequence
  Description of Artificial Sequence: Synthetic oligonucleotide
ggccgcuuuacuuugagcu

SEQ ID NO: 2145333 - RNA, 19 nt, Artificial Sequence
  Description of Artificial Sequence: Synthetic oligonucleotide
uguuugcguucaauguguu

SEQ ID NO: 2145334 - RNA, 19 nt, Artificial Sequence
  Description of Artificial Sequence: Synthetic oligonucleotide
ucuagcuuccaggcuuugu

SEQ ID NO: 2145335 - RNA, 19 nt, Artificial Sequence
  Description of Artificial Sequence: Synthetic oligonucleotide
ugcaaccuucaaacccgca

SEQ ID NO: 2145336 - RNA, 19 nt, Artificial Sequence
  Description of Artificial Sequence: Synthetic oligonucleotide
acgcuguuccucguggaag

SEQ ID NO: 2145337 - RNA, 19 nt, Artificial Sequence
  Description of Artificial Sequence: Synthetic oligonucleotide
cacugauguguuuucagcu

SEQ ID NO: 2145338 - RNA, 19 nt, Artificial Sequence
  Description of Artificial Sequence: Synthetic oligonucleotide
cagaugaaucugcugggga

SEQ ID NO: 2145339 - RNA, 19 nt, Artificial Sequence
  Description of Artificial Sequence: Synthetic oligonucleotide
uaugccucaugaggcuuug

SEQ ID NO: 2145340 - RNA, 19 nt, Artificial Sequence
  Description of Artificial Sequence: Synthetic oligonucleotide
agauagcccucgugaaccu

SEQ ID NO: 2145341 - RNA, 19 nt, Artificial Sequence
  Description of Artificial Sequence: Synthetic oligonucleotide
uuucgccagugugaaucag

SEQ ID NO: 2145342 - RNA, 19 nt, Artificial Sequence
  Description of Artificial Sequence: Synthetic oligonucleotide
ugcaaacgucuugccacag

SEQ ID NO: 2145343 - RNA, 19 nt, Artificial Sequence
  Description of Artificial Sequence: Synthetic oligonucleotide
gucucggacagaaguacac

SEQ ID NO: 2145344 - RNA, 19 nt, Artificial Sequence
  Description of Artificial Sequence: Synthetic oligonucleotide
ugccgacucagaugguagu

SEQ ID NO: 2145345 - RNA, 19 nt, Artificial Sequence
  Description of Artificial Sequence: Synthetic oligonucleotide
auggacgcuguuccucgug

SEQ ID NO: 2145346 - RNA, 19 nt, Artificial Sequence
  Description of Artificial Sequence: Synthetic oligonucleotide
cugggugaggcaaagugcu

SEQ ID NO: 2145347 - RNA, 19 nt, Artificial Sequence
  Description of Artificial Sequence: Synthetic oligonucleotide
augccgacucagaugguag

SEQ ID NO: 2145348 - RNA, 19 nt, Artificial Sequence
  Description of Artificial Sequence: Synthetic oligonucleotide
aacccgcauguauacuguu

SEQ ID NO: 2145349 - RNA, 19 nt, Artificial Sequence
  Description of Artificial Sequence: Synthetic oligonucleotide
aguggcucgccagugugcu

SEQ ID NO: 2145350 - RNA, 19 nt, Artificial Sequence
  Description of Artificial Sequence: Synthetic oligonucleotide
guccgcgauggucagggac

SEQ ID NO: 2145351 - RNA, 19 nt, Artificial Sequence
  Description of Artificial Sequence: Synthetic oligonucleotide
cacaacgcuaugccucaug

SEQ ID NO: 2145352 - RNA, 19 nt, Artificial Sequence
  Description of Artificial Sequence: Synthetic oligonucleotide
cagaaguacaccauccuuu

SEQ ID NO: 2145353 - RNA, 19 nt, Artificial Sequence
  Description of Artificial Sequence: Synthetic oligonucleotide
ccaagcuccgucuuuccug

SEQ ID NO: 2145354 - RNA, 19 nt, Artificial Sequence
  Description of Artificial Sequence: Synthetic oligonucleotide
cacagaugcgcaucuagcu

SEQ ID NO: 2145355 - RNA, 19 nt, Artificial Sequence
  Description of Artificial Sequence: Synthetic oligonucleotide
ugccucuuguuuccuuuua

SEQ ID NO: 2145356 - RNA, 19 nt, Artificial Sequence
  Description of Artificial Sequence: Synthetic oligonucleotide
acugaggcgagaggccaag

SEQ ID NO: 2145357 - RNA, 19 nt, Artificial Sequence
  Description of Artificial Sequence: Synthetic oligonucleotide
aggccugcgugcaaccuuc

SEQ ID NO: 2145358 - RNA, 19 nt, Artificial Sequence
  Description of Artificial Sequence: Synthetic oligonucleotide
gccgcaacgaacgcguccg

SEQ ID NO: 2145359 - RNA, 19 nt, Artificial Sequence
  Description of Artificial Sequence: Synthetic oligonucleotide
gucuuugcgcuugaauguc

SEQ ID NO: 2145360 - RNA, 19 nt, Artificial Sequence
  Description of Artificial Sequence: Synthetic oligonucleotide
gccgcuucagccugcuggg

SEQ ID NO: 2145361 - RNA, 19 nt, Artificial Sequence
  Description of Artificial Sequence: Synthetic oligonucleotide
ggaaagaauguggcucugc

SEQ ID NO: 2145362 - RNA, 19 nt, Artificial Sequence
  Description of Artificial Sequence: Synthetic oligonucleotide
gcgcaucuagcuuccaggc

SEQ ID NO: 2145363 - RNA, 19 nt, Artificial Sequence
  Description of Artificial Sequence: Synthetic oligonucleotide
aagcuccgucuuuccugag

SEQ ID NO: 2145364 - RNA, 19 nt, Artificial Sequence
  Description of Artificial Sequence: Synthetic oligonucleotide
gaacgcguccgcgaugguc

SEQ ID NO: 2145365 - RNA, 19 nt, Artificial Sequence
  Description of Artificial Sequence: Synthetic oligonucleotide
gacgcuguuccucguggaa

SEQ ID NO: 2145366 - RNA, 19 nt, Artificial Sequence
  Description of Artificial Sequence: Synthetic oligonucleotide
ugaaucugcuggggagcgc

SEQ ID NO: 2145367 - RNA, 19 nt, Artificial Sequence
  Description of Artificial Sequence: Synthetic oligonucleotide
uccaugucuuugccacaaa

SEQ ID NO: 2145368 - RNA, 19 nt, Artificial Sequence
  Description of Artificial Sequence: Synthetic oligonucleotide
ggcgcgucggggcaggacc

SEQ ID NO: 2145369 - RNA, 19 nt, Artificial Sequence
  Description of Artificial Sequence: Synthetic oligonucleotide
gaguggcucgccagugugc

SEQ ID NO: 2145370 - RNA, 19 nt, Artificial Sequence
  Description of Artificial Sequence: Synthetic oligonucleotide
caccugaagaguggcucgc

SEQ ID NO: 2145371 - RNA, 19 nt, Artificial Sequence
  Description of Artificial Sequence: Synthetic oligonucleotide
aggaucgugcacaacgcua

SEQ ID NO: 2145372 - RNA, 19 nt, Artificial Sequence
  Description of Artificial Sequence: Synthetic oligonucleotide
gcaguuguguagguccucc

SEQ ID NO: 2145373 - RNA, 19 nt, Artificial Sequence
  Description of Artificial Sequence: Synthetic oligonucleotide
gguugaaggcaguugugua

SEQ ID NO: 2145374 - RNA, 19 nt, Artificial Sequence
  Description of Artificial Sequence: Synthetic oligonucleotide
gccacagucggggaaggag

SEQ ID NO: 2145375 - RNA, 19 nt, Artificial Sequence
  Description of Artificial Sequence: Synthetic oligonucleotide
gcaaacgucuugccacagc

SEQ ID NO: 2145376 - RNA, 19 nt, Artificial Sequence
  Description of Artificial Sequence: Synthetic oligonucleotide
uguuuccuuuuaggaggga

SEQ ID NO: 2145377 - RNA, 19 nt, Artificial Sequence
  Description of Artificial Sequence: Synthetic oligonucleotide
gcguccgcgauggucaggg

SEQ ID NO: 2145378 - RNA, 19 nt, Artificial Sequence
  Description of Artificial Sequence: Synthetic oligonucleotide
gcaacgaacgcguccgcga

SEQ ID NO: 2145379 - RNA, 19 nt, Artificial Sequence
  Description of Artificial Sequence: Synthetic oligonucleotide
cuugcacagaugcgcaucu

SEQ ID NO: 2145380 - RNA, 19 nt, Artificial Sequence
  Description of Artificial Sequence: Synthetic oligonucleotide
gagaggccaagcuccgucu

SEQ ID NO: 2145381 - RNA, 19 nt, Artificial Sequence
  Description of Artificial Sequence: Synthetic oligonucleotide
gaacgccuuuucgccagug

SEQ ID NO: 2145382 - RNA, 19 nt, Artificial Sequence
  Description of Artificial Sequence: Synthetic oligonucleotide
uugccacagccaucaugcu

SEQ ID NO: 2145383 - RNA, 19 nt, Artificial Sequence
  Description of Artificial Sequence: Synthetic oligonucleotide
cgcuguuccucguggaagg

SEQ ID NO: 2145384 - RNA, 19 nt, Artificial Sequence
  Description of Artificial Sequence: Synthetic oligonucleotide
ugggugaggcaaagugcuu

SEQ ID NO: 2145385 - RNA, 19 nt, Artificial Sequence
  Description of Artificial Sequence: Synthetic oligonucleotide
ccaucaugcucacacacaa

SEQ ID NO: 2145386 - RNA, 19 nt, Artificial Sequence
  Description of Artificial Sequence: Synthetic oligonucleotide
acgucuugccacagccauc

SEQ ID NO: 2145387 - RNA, 19 nt, Artificial Sequence
  Description of Artificial Sequence: Synthetic oligonucleotide
agaggccaagcuccgucuu

SEQ ID NO: 2145388 - RNA, 19 nt, Artificial Sequence
  Description of Artificial Sequence: Synthetic oligonucleotide
cagaagcucuguccauguc

SEQ ID NO: 2145389 - RNA, 19 nt, Artificial Sequence
  Description of Artificial Sequence: Synthetic oligonucleotide
cuuugccacaaaagaacau

SEQ ID NO: 2145390 - RNA, 19 nt, Artificial Sequence
  Description of Artificial Sequence: Synthetic oligonucleotide
uguggcucugcagguugaa

SEQ ID NO: 2145391 - RNA, 19 nt, Artificial Sequence
  Description of Artificial Sequence: Synthetic oligonucleotide
agguagucuuugcgcuuga

SEQ ID NO: 2145392 - RNA, 19 nt, Artificial Sequence
  Description of Artificial Sequence: Synthetic oligonucleotide
gggugaggcaaagugcuuc

SEQ ID NO: 2145393 - RNA, 19 nt, Artificial Sequence
  Description of Artificial Sequence: Synthetic oligonucleotide
cuuugugagcuucucucau

SEQ ID NO: 2145394 - RNA, 19 nt, Artificial Sequence
  Description of Artificial Sequence: Synthetic oligonucleotide
ggagggaaguacccacuga

SEQ ID NO: 2145395 - RNA, 19 nt, Artificial Sequence
  Description of Artificial Sequence: Synthetic oligonucleotide
cuggccgcaacgaacgcgu

SEQ ID NO: 2145396 - RNA, 19 nt, Artificial Sequence
  Description of Artificial Sequence: Synthetic oligonucleotide
cuuccaggcuuuguuguaa

SEQ ID NO: 2145397 - RNA, 19 nt, Artificial Sequence
  Description of Artificial Sequence: Synthetic oligonucleotide
gaacaucccuucugacaua

SEQ ID NO: 2145398 - RNA, 19 nt, Artificial Sequence
  Description of Artificial Sequence: Synthetic oligonucleotide
gugcaaccuucaaacccgc

SEQ ID NO: 2145399 - RNA, 19 nt, Artificial Sequence
  Description of Artificial Sequence: Synthetic oligonucleotide
aacuggcgccacagucggg

SEQ ID NO: 2145400 - RNA, 19 nt, Artificial Sequence
  Description of Artificial Sequence: Synthetic oligonucleotide
ccugucaggaucgugcaca

SEQ ID NO: 2145401 - RNA, 19 nt, Artificial Sequence
  Description of Artificial Sequence: Synthetic oligonucleotide
cuucagccugcugggugag

SEQ ID NO: 2145402 - RNA, 19 nt, Artificial Sequence
  Description of Artificial Sequence: Synthetic oligonucleotide
ggccgcaacgaacgcgucc

SEQ ID NO: 2145403 - RNA, 19 nt, Artificial Sequence
  Description of Artificial Sequence: Synthetic oligonucleotide
ugucaggaucgugcacaac

SEQ ID NO: 2145404 - RNA, 19 nt, Artificial Sequence
  Description of Artificial Sequence: Synthetic oligonucleotide
caguuguguagguccucca

SEQ ID NO: 2145405 - RNA, 19 nt, Artificial Sequence
  Description of Artificial Sequence: Synthetic oligonucleotide
caugccgacucagauggua

SEQ ID NO: 2145406 - RNA, 19 nt, Artificial Sequence
  Description of Artificial Sequence: Synthetic oligonucleotide
cgauuuuguguugaauuuc

SEQ ID NO: 2145407 - RNA, 19 nt, Artificial Sequence
  Description of Artificial Sequence: Synthetic oligonucleotide
aggcaguuguguagguccu

SEQ ID NO: 2145408 - RNA, 19 nt, Artificial Sequence
  Description of Artificial Sequence: Synthetic oligonucleotide
cccucauagucacacacaa

SEQ ID NO: 2145409 - RNA, 19 nt, Artificial Sequence
  Description of Artificial Sequence: Synthetic oligonucleotide
ggcgccacagucggggaag

SEQ ID NO: 2145410 - RNA, 19 nt, Artificial Sequence
  Description of Artificial Sequence: Synthetic oligonucleotide
ugcguucaauguguuucuu

SEQ ID NO: 2145411 - RNA, 19 nt, Artificial Sequence
  Description of Artificial Sequence: Synthetic oligonucleotide
gcaaagugcuucccacauc

SEQ ID NO: 2145412 - RNA, 19 nt, Artificial Sequence
  Description of Artificial Sequence: Synthetic oligonucleotide
ccgucuuuccugaggccgc

SEQ ID NO: 2145413 - RNA, 19 nt, Artificial Sequence
  Description of Artificial Sequence: Synthetic oligonucleotide
ccucgugaaccuucaugug

SEQ ID NO: 2145414 - RNA, 19 nt, Artificial Sequence
  Description of Artificial Sequence: Synthetic oligonucleotide
gacucagaugguagucucu

SEQ ID NO: 2145415 - RNA, 19 nt, Artificial Sequence
  Description of Artificial Sequence: Synthetic oligonucleotide
ggcaaagugcuucccacau

SEQ ID NO: 2145416 - RNA, 19 nt, Artificial Sequence
  Description of Artificial Sequence: Synthetic oligonucleotide
cacacacaaauggccucuc

SEQ ID NO: 2145417 - RNA, 19 nt, Artificial Sequence
  Description of Artificial Sequence: Synthetic oligonucleotide
ccgcuuuacuuugagcuuc

SEQ ID NO: 2145418 - RNA, 19 nt, Artificial Sequence
  Description of Artificial Sequence: Synthetic oligonucleotide
gacccucacuggccgcaac

SEQ ID NO: 2145419 - RNA, 19 nt, Artificial Sequence
  Description of Artificial Sequence: Synthetic oligonucleotide
gcuugcacagaugcgcauc

SEQ ID NO: 2145420 - RNA, 19 nt, Artificial Sequence
  Description of Artificial Sequence: Synthetic oligonucleotide
cugaggcgagaggccaagc

SEQ ID NO: 2145421 - RNA, 19 nt, Artificial Sequence
  Description of Artificial Sequence: Synthetic oligonucleotide
cggacagaaguacaccauc

SEQ ID NO: 2145422 - RNA, 19 nt, Artificial Sequence
  Description of Artificial Sequence: Synthetic oligonucleotide
guucgauuuuguguugaau

SEQ ID NO: 2145423 - RNA, 19 nt, Artificial Sequence
  Description of Artificial Sequence: Synthetic oligonucleotide
acgcguccgcgauggucag

SEQ ID NO: 2145424 - RNA, 19 nt, Artificial Sequence
  Description of Artificial Sequence: Synthetic oligonucleotide
gucggggaaggagcagaug

SEQ ID NO: 2145425 - RNA, 19 nt, Artificial Sequence
  Description of Artificial Sequence: Synthetic oligonucleotide
guuugcguucaauguguuu

SEQ ID NO: 2145426 - RNA, 19 nt, Artificial Sequence
  Description of Artificial Sequence: Synthetic oligonucleotide
acccgcauguauacuguuu

SEQ ID NO: 2145427 - RNA, 19 nt, Artificial Sequence
  Description of Artificial Sequence: Synthetic oligonucleotide
ccugcgugcaaccuucaaa

SEQ ID NO: 2145428 - RNA, 19 nt, Artificial Sequence
  Description of Artificial Sequence: Synthetic oligonucleotide
cuuugcgcuugaaugucuu

SEQ ID NO: 2145429 - RNA, 19 nt, Artificial Sequence
  Description of Artificial Sequence: Synthetic oligonucleotide
cccuucugacauagauagc

SEQ ID NO: 2145430 - RNA, 19 nt, Artificial Sequence
  Description of Artificial Sequence: Synthetic oligonucleotide
ccacaucccuccuggggac

SEQ ID NO: 2145431 - RNA, 19 nt, Artificial Sequence
  Description of Artificial Sequence: Synthetic oligonucleotide
cgacucagaugguagucuc

SEQ ID NO: 2145432 - RNA, 19 nt, Artificial Sequence
  Description of Artificial Sequence: Synthetic oligonucleotide
cuucagaagcucuguccau

SEQ ID NO: 2145433 - RNA, 19 nt, Artificial Sequence
  Description of Artificial Sequence: Synthetic oligonucleotide
uugcacagaugcgcaucua

SEQ ID NO: 2145434 - RNA, 19 nt, Artificial Sequence
  Description of Artificial Sequence: Synthetic oligonucleotide
guggcucgccagugugcug

SEQ ID NO: 2145435 - RNA, 19 nt, Artificial Sequence
  Description of Artificial Sequence: Synthetic oligonucleotide
caucccuccuggggacacc

SEQ ID NO: 2145436 - RNA, 19 nt, Artificial Sequence
  Description of Artificial Sequence: Synthetic oligonucleotide
caggaucgugcacaacgcu

SEQ ID NO: 2145437 - RNA, 19 nt, Artificial Sequence
  Description of Artificial Sequence: Synthetic oligonucleotide
gaugcgcaucuagcuucca

SEQ ID NO: 2145438 - RNA, 19 nt, Artificial Sequence
  Description of Artificial Sequence: Synthetic oligonucleotide
ccuucaaacccgcauguau

SEQ ID NO: 2145439 - RNA, 19 nt, Artificial Sequence
  Description of Artificial Sequence: Synthetic oligonucleotide
uggccgcaacgaacgcguc

SEQ ID NO: 2145440 - RNA, 19 nt, Artificial Sequence
  Description of Artificial Sequence: Synthetic oligonucleotide
cuaugccucaugaggcuuu

SEQ ID NO: 2145441 - RNA, 19 nt, Artificial Sequence
  Description of Artificial Sequence: Synthetic oligonucleotide
ggaucgugcacaacgcuau

SEQ ID NO: 2145442 - RNA, 19 nt, Artificial Sequence
  Description of Artificial Sequence: Synthetic oligonucleotide
ggacgcuguuccucgugga

SEQ ID NO: 2145443 - RNA, 19 nt, Artificial Sequence
  Description of Artificial Sequence: Synthetic oligonucleotide
gaggccaagcuccgucuuu

SEQ ID NO: 2145444 - RNA, 19 nt, Artificial Sequence
  Description of Artificial Sequence: Synthetic oligonucleotide
cagcugacuuccucuuugu

SEQ ID NO: 2145445 - RNA, 19 nt, Artificial Sequence
  Description of Artificial Sequence: Synthetic oligonucleotide
ggcauacugcacagcugac

SEQ ID NO: 2145446 - RNA, 19 nt, Artificial Sequence
  Description of Artificial Sequence: Synthetic oligonucleotide
caacgaacgcguccgcgau

SEQ ID NO: 2145447 - RNA, 19 nt, Artificial Sequence
  Description of Artificial Sequence: Synthetic oligonucleotide
acaucccuucugacauaga

SEQ ID NO: 2145448 - RNA, 19 nt, Artificial Sequence
  Description of Artificial Sequence: Synthetic oligonucleotide
ccgugugcuugcacagaug

SEQ ID NO: 2145449 - RNA, 19 nt, Artificial Sequence
  Description of Artificial Sequence: Synthetic oligonucleotide
cgccuuuucgccaguguga

SEQ ID NO: 2145450 - RNA, 19 nt, Artificial Sequence
  Description of Artificial Sequence: Synthetic oligonucleotide
cgcaacgaacgcguccgcg

SEQ ID NO: 2145451 - RNA, 19 nt, Artificial Sequence
  Description of Artificial Sequence: Synthetic oligonucleotide
cuggcgccacagucgggga

SEQ ID NO: 2145452 - RNA, 19 nt, Artificial Sequence
  Description of Artificial Sequence: Synthetic oligonucleotide
ggcaguuguguagguccuc

SEQ ID NO: 2145453 - RNA, 19 nt, Artificial Sequence
  Description of Artificial Sequence: Synthetic oligonucleotide
acaugccgacucagauggu

SEQ ID NO: 2145454 - RNA, 19 nt, Artificial Sequence
  Description of Artificial Sequence: Synthetic oligonucleotide
ggcucgccagugugcuggc

SEQ ID NO: 2145455 - RNA, 19 nt, Artificial Sequence
  Description of Artificial Sequence: Synthetic oligonucleotide
ccucguggaaggaaagaau

SEQ ID NO: 2145456 - RNA, 19 nt, Artificial Sequence
  Description of Artificial Sequence: Synthetic oligonucleotide
cuuugagcuucacccucuu

SEQ ID NO: 2145457 - RNA, 19 nt, Artificial Sequence
  Description of Artificial Sequence: Synthetic oligonucleotide
guguuucuucaaguucgau

SEQ ID NO: 2145458 - RNA, 19 nt, Artificial Sequence
  Description of Artificial Sequence: Synthetic oligonucleotide
cugaaucgugagucuucau

SEQ ID NO: 2145459 - RNA, 19 nt, Artificial Sequence
  Description of Artificial Sequence: Synthetic oligonucleotide
gccgcuuuacuuugagcuu

SEQ ID NO: 2145460 - RNA, 19 nt, Artificial Sequence
  Description of Artificial Sequence: Synthetic oligonucleotide
cccgcauguauacuguuuu

SEQ ID NO: 2145461 - RNA, 19 nt, Artificial Sequence
  Description of Artificial Sequence: Synthetic oligonucleotide
uggggagcgcggggcgcgu

SEQ ID NO: 2145462 - RNA, 19 nt, Artificial Sequence
  Description of Artificial Sequence: Synthetic oligonucleotide
gccagugugcuggcacuga

SEQ ID NO: 2145463 - RNA, 19 nt, Artificial Sequence
  Description of Artificial Sequence: Synthetic oligonucleotide
cacagccaucaugcucaca

SEQ ID NO: 2145464 - RNA, 19 nt, Artificial Sequence
  Description of Artificial Sequence: Synthetic oligonucleotide
cgugcacaacgcuaugccu

SEQ ID NO: 2145465 - RNA, 19 nt, Artificial Sequence
  Description of Artificial Sequence: Synthetic oligonucleotide
ggggagucugccucuuguu

SEQ ID NO: 2145466 - RNA, 19 nt, Artificial Sequence
  Description of Artificial Sequence: Synthetic oligonucleotide
gccugcgugcaaccuucaa

SEQ ID NO: 2145467 - RNA, 19 nt, Artificial Sequence
  Description of Artificial Sequence: Synthetic oligonucleotide
ccgcaacgaacgcguccgc

SEQ ID NO: 2145468 - RNA, 19 nt, Artificial Sequence
  Description of Artificial Sequence: Synthetic oligonucleotide
gcuaugccucaugaggcuu

SEQ ID NO: 2145469 - RNA, 19 nt, Artificial Sequence
  Description of Artificial Sequence: Synthetic oligonucleotide
cugcagguugaaggcaguu

SEQ ID NO: 2145470 - RNA, 19 nt, Artificial Sequence
  Description of Artificial Sequence: Synthetic oligonucleotide
cccgugugcuugcacagau

SEQ ID NO: 2145471 - RNA, 19 nt, Artificial Sequence
  Description of Artificial Sequence: Synthetic oligonucleotide
cgcuaugccucaugaggcu

SEQ ID NO: 2145472 - RNA, 19 nt, Artificial Sequence
  Description of Artificial Sequence: Synthetic oligonucleotide
cugcugggugaggcaaagu

SEQ ID NO: 2145473 - RNA, 19 nt, Artificial Sequence
  Description of Artificial Sequence: Synthetic oligonucleotide
gggcgcgucggggcaggac

SEQ ID NO: 2145474 - RNA, 19 nt, Artificial Sequence
  Description of Artificial Sequence: Synthetic oligonucleotide
cgucggggcaggacccuca

SEQ ID NO: 2145475 - RNA, 19 nt, Artificial Sequence
  Description of Artificial Sequence: Synthetic oligonucleotide
ccgcgauggucagggacga

SEQ ID NO: 2145476 - RNA, 19 nt, Artificial Sequence
  Description of Artificial Sequence: Synthetic oligonucleotide
cgcaucuagcuuccaggcu

SEQ ID NO: 2145477 - RNA, 19 nt, Artificial Sequence
  Description of Artificial Sequence: Synthetic oligonucleotide
ggccugcgugcaaccuuca

SEQ ID NO: 2145478 - RNA, 19 nt, Artificial Sequence
  Description of Artificial Sequence: Synthetic oligonucleotide
gcggggcgcgucggggcag

SEQ ID NO: 2145479 - RNA, 19 nt, Artificial Sequence
  Description of Artificial Sequence: Synthetic oligonucleotide
gcgucggggcaggacccuc

SEQ ID NO: 2145480 - RNA, 19 nt, Artificial Sequence
  Description of Artificial Sequence: Synthetic oligonucleotide
gcucgccagugugcuggca

SEQ ID NO: 2145481 - RNA, 19 nt, Artificial Sequence
  Description of Artificial Sequence: Synthetic oligonucleotide
ccccgugugcuugcacaga

SEQ ID NO: 2145482 - RNA, 19 nt, Artificial Sequence
  Description of Artificial Sequence: Synthetic oligonucleotide
cgcguccgcgauggucagg

SEQ ID NO: 2145483 - RNA, 19 nt, Artificial Sequence
  Description of Artificial Sequence: Synthetic oligonucleotide
gcacaacgcuaugccucau

SEQ ID NO: 2145484 - RNA, 19 nt, Artificial Sequence
  Description of Artificial Sequence: Synthetic oligonucleotide
cguccgcgauggucaggga

SEQ ID NO: 2145485 - RNA, 19 nt, Artificial Sequence
  Description of Artificial Sequence: Synthetic oligonucleotide
ggggcgcgucggggcagga

SEQ ID NO: 2145486 - RNA, 19 nt, Artificial Sequence
  Description of Artificial Sequence: Synthetic oligonucleotide
cgaacgccuuuucgccagu

SEQ ID NO: 2145487 - RNA, 19 nt, Artificial Sequence
  Description of Artificial Sequence: Synthetic oligonucleotide
ccgcuucagccugcugggu

SEQ ID NO: 2145488 - RNA, 19 nt, Artificial Sequence
  Description of Artificial Sequence: Synthetic oligonucleotide
cgaacgcguccgcgauggu

SEQ ID NO: 2145489 - RNA, 19 nt, Artificial Sequence
  Description of Artificial Sequence: Synthetic oligonucleotide
agugguauuggucacaucc

SEQ ID NO: 2145490 - RNA, 19 nt, Artificial Sequence
  Description of Artificial Sequence: Synthetic oligonucleotide
aguacaaugagguugauga

SEQ ID NO: 2145491 - RNA, 19 nt, Artificial Sequence
  Description of Artificial Sequence: Synthetic oligonucleotide
uuauugacagacaaggaag

SEQ ID NO: 2145492 - RNA, 19 nt, Artificial Sequence
  Description of Artificial Sequence: Synthetic oligonucleotide
acagguaucgguuugucac

SEQ ID NO: 2145493 - RNA, 19 nt, Artificial Sequence
  Description of Artificial Sequence: Synthetic oligonucleotide
gaaagcguucuucacaucg

SEQ ID NO: 2145494 - RNA, 19 nt, Artificial Sequence
  Description of Artificial Sequence: Synthetic oligonucleotide
aaagucguucuccuuggcc

SEQ ID NO: 2145495 - RNA, 19 nt, Artificial Sequence
  Description of Artificial Sequence: Synthetic oligonucleotide
cauggaaguagacagaggc

SEQ ID NO: 2145496 - RNA, 19 nt, Artificial Sequence
  Description of Artificial Sequence: Synthetic oligonucleotide
acagacuuuauugacagac

SEQ ID NO: 2145497 - RNA, 19 nt, Artificial Sequence
  Description of Artificial Sequence: Synthetic oligonucleotide
uuuguaaauggacagacuu

SEQ ID NO: 2145498 - RNA, 19 nt, Artificial Sequence
  Description of Artificial Sequence: Synthetic oligonucleotide
ucuauacagaaagacaucc

SEQ ID NO: 2145499 - RNA, 19 nt, Artificial Sequence
  Description of Artificial Sequence: Synthetic oligonucleotide
cuucucaccacccacagcc

SEQ ID NO: 2145500 - RNA, 19 nt, Artificial Sequence
  Description of Artificial Sequence: Synthetic oligonucleotide
ugcaaggcggucaaagucg

SEQ ID NO: 2145501 - RNA, 19 nt, Artificial Sequence
  Description of Artificial Sequence: Synthetic oligonucleotide
aggaccacaccauacuucc

SEQ ID NO: 2145502 - RNA, 19 nt, Artificial Sequence
  Description of Artificial Sequence: Synthetic oligonucleotide
gauguaguaggcuucuugc

SEQ ID NO: 2145503 - RNA, 19 nt, Artificial Sequence
  Description of Artificial Sequence: Synthetic oligonucleotide
aauggacagacuuuauuga

SEQ ID NO: 2145504 - RNA, 19 nt, Artificial Sequence
  Description of Artificial Sequence: Synthetic oligonucleotide
uguaguaggcuucuugcag

SEQ ID NO: 2145505 - RNA, 19 nt, Artificial Sequence
  Description of Artificial Sequence: Synthetic oligonucleotide
ucagcugugacagguaucg

SEQ ID NO: 2145506 - RNA, 19 nt, Artificial Sequence
  Description of Artificial Sequence: Synthetic oligonucleotide
cauauugcagugcaaggcg

SEQ ID NO: 2145507 - RNA, 19 nt, Artificial Sequence
  Description of Artificial Sequence: Synthetic oligonucleotide
cuugaucucguccaggacc

SEQ ID NO: 2145508 - RNA, 19 nt, Artificial Sequence
  Description of Artificial Sequence: Synthetic oligonucleotide
agcaaacaugcgcacagcc

SEQ ID NO: 2145509 - RNA, 19 nt, Artificial Sequence
  Description of Artificial Sequence: Synthetic oligonucleotide
ugacaguacaaugagguug

SEQ ID NO: 2145510 - RNA, 19 nt, Artificial Sequence
  Description of Artificial Sequence: Synthetic oligonucleotide
uggaaguagacagaggcag

SEQ ID NO: 2145511 - RNA, 19 nt, Artificial Sequence
  Description of Artificial Sequence: Synthetic oligonucleotide
accacgauggcaucccucc

SEQ ID NO: 2145512 - RNA, 19 nt, Artificial Sequence
  Description of Artificial Sequence: Synthetic oligonucleotide
aaucgucauggccaugcac

SEQ ID NO: 2145513 - RNA, 19 nt, Artificial Sequence
  Description of Artificial Sequence: Synthetic oligonucleotide
guagucagcaaacaugcgc

SEQ ID NO: 2145514 - RNA, 19 nt, Artificial Sequence
  Description of Artificial Sequence: Synthetic oligonucleotide
auggacagacuuuauugac

SEQ ID NO: 2145515 - RNA, 19 nt, Artificial Sequence
  Description of Artificial Sequence: Synthetic oligonucleotide
ucaguggcaagguagucag

SEQ ID NO: 2145516 - RNA, 19 nt, Artificial Sequence
  Description of Artificial Sequence: Synthetic oligonucleotide
ugcucuauacagaaagaca

SEQ ID NO: 2145517 - RNA, 19 nt, Artificial Sequence
  Description of Artificial Sequence: Synthetic oligonucleotide
uauugacagacaaggaagu

SEQ ID NO: 2145518 - RNA, 19 nt, Artificial Sequence
  Description of Artificial Sequence: Synthetic oligonucleotide
ugcugugacaguacaauga

SEQ ID NO: 2145519 - RNA, 19 nt, Artificial Sequence
  Description of Artificial Sequence: Synthetic oligonucleotide
ucaaagucguucuccuugg

SEQ ID NO: 2145520 - RNA, 19 nt, Artificial Sequence
  Description of Artificial Sequence: Synthetic oligonucleotide
aggaucugaaucgucaugg

SEQ ID NO: 2145521 - RNA, 19 nt, Artificial Sequence
  Description of Artificial Sequence: Synthetic oligonucleotide
ucgguuugucaccucaggg

SEQ ID NO: 2145522 - RNA, 19 nt, Artificial Sequence
  Description of Artificial Sequence: Synthetic oligonucleotide
agacaaggaagugaggacg

SEQ ID NO: 2145523 - RNA, 19 nt, Artificial Sequence
  Description of Artificial Sequence: Synthetic oligonucleotide
guauuggucacauccacac

SEQ ID NO: 2145524 - RNA, 19 nt, Artificial Sequence
  Description of Artificial Sequence: Synthetic oligonucleotide
gucacauccacacuccugc

SEQ ID NO: 2145525 - RNA, 19 nt, Artificial Sequence
  Description of Artificial Sequence: Synthetic oligonucleotide
gacuggacagcuucacucg

SEQ ID NO: 2145526 - RNA, 19 nt, Artificial Sequence
  Description of Artificial Sequence: Synthetic oligonucleotide
augcucuauacagaaagac

SEQ ID NO: 2145527 - RNA, 19 nt, Artificial Sequence
  Description of Artificial Sequence: Synthetic oligonucleotide
uguaaauggacagacuuua

SEQ ID NO: 2145528 - RNA, 19 nt, Artificial Sequence
  Description of Artificial Sequence: Synthetic oligonucleotide
gaucugaaucgucauggcc

SEQ ID NO: 2145529 - RNA, 19 nt, Artificial Sequence
  Description of Artificial Sequence: Synthetic oligonucleotide
ugaaucgucauggccaugc

SEQ ID NO: 2145530 - RNA, 19 nt, Artificial Sequence
  Description of Artificial Sequence: Synthetic oligonucleotide
gguaucuccaccucaggcg

SEQ ID NO: 2145531 - RNA, 19 nt, Artificial Sequence
  Description of Artificial Sequence: Synthetic oligonucleotide
agauguaguaggcuucuug

SEQ ID NO: 2145532 - RNA, 19 nt, Artificial Sequence
  Description of Artificial Sequence: Synthetic oligonucleotide
uaugcucuauacagaaaga

SEQ ID NO: 2145533 - RNA, 19 nt, Artificial Sequence
  Description of Artificial Sequence: Synthetic oligonucleotide
uuuuguaaauggacagacu

SEQ ID NO: 2145534 - RNA, 19 nt, Artificial Sequence
  Description of Artificial Sequence: Synthetic oligonucleotide
augcacucgaggcugucgc

SEQ ID NO: 2145535 - RNA, 19 nt, Artificial Sequence
  Description of Artificial Sequence: Synthetic oligonucleotide
ugcgauguaugcucuauac

SEQ ID NO: 2145536 - RNA, 19 nt, Artificial Sequence
  Description of Artificial Sequence: Synthetic oligonucleotide
agacuuuauugacagacaa

SEQ ID NO: 2145537 - RNA, 19 nt, Artificial Sequence
  Description of Artificial Sequence: Synthetic oligonucleotide
uagcugccgauguagaaag

SEQ ID NO: 2145538 - RNA, 19 nt, Artificial Sequence
  Description of Artificial Sequence: Synthetic oligonucleotide
agccuguccagcuugagga

SEQ ID NO: 2145539 - RNA, 19 nt, Artificial Sequence
  Description of Artificial Sequence: Synthetic oligonucleotide
ucgucuaccucuccggagc

SEQ ID NO: 2145540 - RNA, 19 nt, Artificial Sequence
  Description of Artificial Sequence: Synthetic oligonucleotide
ucggcagucucccagcggc

SEQ ID NO: 2145541 - RNA, 19 nt, Artificial Sequence
  Description of Artificial Sequence: Synthetic oligonucleotide
aaggaagugaggacgacgu

SEQ ID NO: 2145542 - RNA, 19 nt, Artificial Sequence
  Description of Artificial Sequence: Synthetic oligonucleotide
cagaaagacaucccucucc

SEQ ID NO: 2145543 - RNA, 19 nt, Artificial Sequence
  Description of Artificial Sequence: Synthetic oligonucleotide
gaaguagacagaggcagcc

SEQ ID NO: 2145544 - RNA, 19 nt, Artificial Sequence
  Description of Artificial Sequence: Synthetic oligonucleotide
uguagaaagcguucuucac

SEQ ID NO: 2145545 - RNA, 19 nt, Artificial Sequence
  Description of Artificial Sequence: Synthetic oligonucleotide
uucacaucgaacagcucgu

SEQ ID NO: 2145546 - RNA, 19 nt, Artificial Sequence
  Description of Artificial Sequence: Synthetic oligonucleotide
acuggacagcuucacucgc

SEQ ID NO: 2145547 - RNA, 19 nt, Artificial Sequence
  Description of Artificial Sequence: Synthetic oligonucleotide
guaguaggcuucuugcagc

SEQ ID NO: 2145548 - RNA, 19 nt, Artificial Sequence
  Description of Artificial Sequence: Synthetic oligonucleotide
auguaugcucuauacagaa

SEQ ID NO: 2145549 - RNA, 19 nt, Artificial Sequence
  Description of Artificial Sequence: Synthetic oligonucleotide
ggacagacuuuauugacag

SEQ ID NO: 2145550 - RNA, 19 nt, Artificial Sequence
  Description of Artificial Sequence: Synthetic oligonucleotide
uggccauugagcagcagca

SEQ ID NO: 2145551 - RNA, 19 nt, Artificial Sequence
  Description of Artificial Sequence: Synthetic oligonucleotide
guagaaagcguucuucaca

SEQ ID NO: 2145552 - RNA, 19 nt, Artificial Sequence
  Description of Artificial Sequence: Synthetic oligonucleotide
aucugaaucgucauggcca

SEQ ID NO: 2145553 - RNA, 19 nt, Artificial Sequence
  Description of Artificial Sequence: Synthetic oligonucleotide
cuugcagcuucucaccacc

SEQ ID NO: 2145554 - RNA, 19 nt, Artificial Sequence
  Description of Artificial Sequence: Synthetic oligonucleotide
guaucuccaccucaggcgc

SEQ ID NO: 2145555 - RNA, 19 nt, Artificial Sequence
  Description of Artificial Sequence: Synthetic oligonucleotide
uuguaaauggacagacuuu

SEQ ID NO: 2145556 - RNA, 19 nt, Artificial Sequence
  Description of Artificial Sequence: Synthetic oligonucleotide
ugguauuggucacauccac

SEQ ID NO: 2145557 - RNA, 19 nt, Artificial Sequence
  Description of Artificial Sequence: Synthetic oligonucleotide
gaggacgacgucuggcacg

SEQ ID NO: 2145558 - RNA, 19 nt, Artificial Sequence
  Description of Artificial Sequence: Synthetic oligonucleotide
aucgguuugucaccucagg

SEQ ID NO: 2145559 - RNA, 19 nt, Artificial Sequence
  Description of Artificial Sequence: Synthetic oligonucleotide
uaucgguuugucaccucag

SEQ ID NO: 2145560 - RNA, 19 nt, Artificial Sequence
  Description of Artificial Sequence: Synthetic oligonucleotide
acgucuggcacgaagcugg

SEQ ID NO: 2145561 - RNA, 19 nt, Artificial Sequence
  Description of Artificial Sequence: Synthetic oligonucleotide
ugggagagcacuugucagc

SEQ ID NO: 2145562 - RNA, 19 nt, Artificial Sequence
  Description of Artificial Sequence: Synthetic oligonucleotide
uccacacuccugcucaucu

SEQ ID NO: 2145563 - RNA, 19 nt, Artificial Sequence
  Description of Artificial Sequence: Synthetic oligonucleotide
caugcgcacagccuggagc

SEQ ID NO: 2145564 - RNA, 19 nt, Artificial Sequence
  Description of Artificial Sequence: Synthetic oligonucleotide
agaggcagccaugagcagg

SEQ ID NO: 2145565 - RNA, 19 nt, Artificial Sequence
  Description of Artificial Sequence: Synthetic oligonucleotide
agcugugacagguaucggu

SEQ ID NO: 2145566 - RNA, 19 nt, Artificial Sequence
  Description of Artificial Sequence: Synthetic oligonucleotide
cucugugcgauguaugcuc

SEQ ID NO: 2145567 - RNA, 19 nt, Artificial Sequence
  Description of Artificial Sequence: Synthetic oligonucleotide
uauugcagugcaaggcggu

SEQ ID NO: 2145568 - RNA, 19 nt, Artificial Sequence
  Description of Artificial Sequence: Synthetic oligonucleotide
acgacgucuggcacgaagc

SEQ ID NO: 2145569 - RNA, 19 nt, Artificial Sequence
  Description of Artificial Sequence: Synthetic oligonucleotide
ugugcauccuucagcugug

SEQ ID NO: 2145570 - RNA, 19 nt, Artificial Sequence
  Description of Artificial Sequence: Synthetic oligonucleotide
agcucgucuaccucuccgg

SEQ ID NO: 2145571 - RNA, 19 nt, Artificial Sequence
  Description of Artificial Sequence: Synthetic oligonucleotide
aaagugguauuggucacau

SEQ ID NO: 2145572 - RNA, 19 nt, Artificial Sequence
  Description of Artificial Sequence: Synthetic oligonucleotide
cugugacaguacaaugagg

SEQ ID NO: 2145573 - RNA, 19 nt, Artificial Sequence
  Description of Artificial Sequence: Synthetic oligonucleotide
aaacaugcgcacagccugg

SEQ ID NO: 2145574 - RNA, 19 nt, Artificial Sequence
  Description of Artificial Sequence: Synthetic oligonucleotide
gacgacgucuggcacgaag

SEQ ID NO: 2145575 - RNA, 19 nt, Artificial Sequence
  Description of Artificial Sequence: Synthetic oligonucleotide
ugcgcugaguggcaggcug

SEQ ID NO: 2145576 - RNA, 19 nt, Artificial Sequence
  Description of Artificial Sequence: Synthetic oligonucleotide
auauugcagugcaaggcgg

SEQ ID NO: 2145577 - RNA, 19 nt, Artificial Sequence
  Description of Artificial Sequence: Synthetic oligonucleotide
guucuccuuggccugauac

SEQ ID NO: 2145578 - RNA, 19 nt, Artificial Sequence
  Description of Artificial Sequence: Synthetic oligonucleotide
cuugccuaggugcugugac

SEQ ID NO: 2145579 - RNA, 19 nt, Artificial Sequence
  Description of Artificial Sequence: Synthetic oligonucleotide
aucgucauggccaugcacu

SEQ ID NO: 2145580 - RNA, 19 nt, Artificial Sequence
  Description of Artificial Sequence: Synthetic oligonucleotide
acaucgaacagcucgucua

SEQ ID NO: 2145581 - RNA, 19 nt, Artificial Sequence
  Description of Artificial Sequence: Synthetic oligonucleotide
caaggaagugaggacgacg

SEQ ID NO: 2145582 - RNA, 19 nt, Artificial Sequence
  Description of Artificial Sequence: Synthetic oligonucleotide
aguagacagaggcagccau

SEQ ID NO: 2145583 - RNA, 19 nt, Artificial Sequence
  Description of Artificial Sequence: Synthetic oligonucleotide
gcugugacaguacaaugag

SEQ ID NO: 2145584 - RNA, 19 nt, Artificial Sequence
  Description of Artificial Sequence: Synthetic oligonucleotide
gauguaugcucuauacaga

SEQ ID NO: 2145585 - RNA, 19 nt, Artificial Sequence
  Description of Artificial Sequence: Synthetic oligonucleotide
ucgaacagcucgucuaccu

SEQ ID NO: 2145586 - RNA, 19 nt, Artificial Sequence
  Description of Artificial Sequence: Synthetic oligonucleotide
ugcgcagggcugcaucugg

SEQ ID NO: 2145587 - RNA, 19 nt, Artificial Sequence
  Description of Artificial Sequence: Synthetic oligonucleotide
uccuugaugaagggauggg

SEQ ID NO: 2145588 - RNA, 19 nt, Artificial Sequence
  Description of Artificial Sequence: Synthetic oligonucleotide
cagacaaggaagugaggac

SEQ ID NO: 2145589 - RNA, 19 nt, Artificial Sequence
  Description of Artificial Sequence: Synthetic oligonucleotide
gaggaucugaaucgucaug

SEQ ID NO: 2145590 - RNA, 19 nt, Artificial Sequence
  Description of Artificial Sequence: Synthetic oligonucleotide
ugaugagggucucggggug

SEQ ID NO: 2145591 - RNA, 19 nt, Artificial Sequence
  Description of Artificial Sequence: Synthetic oligonucleotide
ucugugcgauguaugcucu

SEQ ID NO: 2145592 - RNA, 19 nt, Artificial Sequence
  Description of Artificial Sequence: Synthetic oligonucleotide
agugcaaggcggucaaagu

SEQ ID NO: 2145593 - RNA, 19 nt, Artificial Sequence
  Description of Artificial Sequence: Synthetic oligonucleotide
ucugaaucgucauggccau

SEQ ID NO: 2145594 - RNA, 19 nt, Artificial Sequence
  Description of Artificial Sequence: Synthetic oligonucleotide
uaggugcugugacaguaca

SEQ ID NO: 2145595 - RNA, 19 nt, Artificial Sequence
  Description of Artificial Sequence: Synthetic oligonucleotide
uccacuucccugucgggac

SEQ ID NO: 2145596 - RNA, 19 nt, Artificial Sequence
  Description of Artificial Sequence: Synthetic oligonucleotide
aagugguauuggucacauc

SEQ ID NO: 2145597 - RNA, 19 nt, Artificial Sequence
  Description of Artificial Sequence: Synthetic oligonucleotide
cagguaucgguuugucacc

SEQ ID NO: 2145598 - RNA, 19 nt, Artificial Sequence
  Description of Artificial Sequence: Synthetic oligonucleotide
cacgauggcaucccuccgg

SEQ ID NO: 2145599 - RNA, 19 nt, Artificial Sequence
  Description of Artificial Sequence: Synthetic oligonucleotide
auugacagacaaggaagug

SEQ ID NO: 2145600 - RNA, 19 nt, Artificial Sequence
  Description of Artificial Sequence: Synthetic oligonucleotide
aaagcguucuucacaucga

SEQ ID NO: 2145601 - RNA, 19 nt, Artificial Sequence
  Description of Artificial Sequence: Synthetic oligonucleotide
aacagcucgucuaccucuc

SEQ ID NO: 2145602 - RNA, 19 nt, Artificial Sequence
  Description of Artificial Sequence: Synthetic oligonucleotide
ucuaccucuccggagccgc

SEQ ID NO: 2145603 - RNA, 19 nt, Artificial Sequence
  Description of Artificial Sequence: Synthetic oligonucleotide
gccaugagcaggaaagugg

SEQ ID NO: 2145604 - RNA, 19 nt, Artificial Sequence
  Description of Artificial Sequence: Synthetic oligonucleotide
guaucgguuugucaccuca

SEQ ID NO: 2145605 - RNA, 19 nt, Artificial Sequence
  Description of Artificial Sequence: Synthetic oligonucleotide
ugaugcacugcugguagcu

SEQ ID NO: 2145606 - RNA, 19 nt, Artificial Sequence
  Description of Artificial Sequence: Synthetic oligonucleotide
caucgaacagcucgucuac

SEQ ID NO: 2145607 - RNA, 19 nt, Artificial Sequence
  Description of Artificial Sequence: Synthetic oligonucleotide
acacccucggcagucuccc

SEQ ID NO: 2145608 - RNA, 19 nt, Artificial Sequence
  Description of Artificial Sequence: Synthetic oligonucleotide
accagggguaucuccaccu

SEQ ID NO: 2145609 - RNA, 19 nt, Artificial Sequence
  Description of Artificial Sequence: Synthetic oligonucleotide
cugguagcugccgauguag

SEQ ID NO: 2145610 - RNA, 19 nt, Artificial Sequence
  Description of Artificial Sequence: Synthetic oligonucleotide
agaaagcguucuucacauc

SEQ ID NO: 2145611 - RNA, 19 nt, Artificial Sequence
  Description of Artificial Sequence: Synthetic oligonucleotide
gugcaaggcggucaaaguc

SEQ ID NO: 2145612 - RNA, 19 nt, Artificial Sequence
  Description of Artificial Sequence: Synthetic oligonucleotide
aucgaacagcucgucuacc

SEQ ID NO: 2145613 - RNA, 19 nt, Artificial Sequence
  Description of Artificial Sequence: Synthetic oligonucleotide
agacaucccucuccacuuc

SEQ ID NO: 2145614 - RNA, 19 nt, Artificial Sequence
  Description of Artificial Sequence: Synthetic oligonucleotide
cuaggugcugugacaguac

SEQ ID NO: 2145615 - RNA, 19 nt, Artificial Sequence
  Description of Artificial Sequence: Synthetic oligonucleotide
gcauauugcagugcaaggc

SEQ ID NO: 2145616 - RNA, 19 nt, Artificial Sequence
  Description of Artificial Sequence: Synthetic oligonucleotide
gagcaggaaagugguauug

SEQ ID NO: 2145617 - RNA, 19 nt, Artificial Sequence
  Description of Artificial Sequence: Synthetic oligonucleotide
ugaggacgacgucuggcac

SEQ ID NO: 2145618 - RNA, 19 nt, Artificial Sequence
  Description of Artificial Sequence: Synthetic oligonucleotide
gacagguaucgguuuguca

SEQ ID NO: 2145619 - RNA, 19 nt, Artificial Sequence
  Description of Artificial Sequence: Synthetic oligonucleotide
aggaggaucugaaucguca

SEQ ID NO: 2145620 - RNA, 19 nt, Artificial Sequence
  Description of Artificial Sequence: Synthetic oligonucleotide
gcugccgauguagaaagcg

SEQ ID NO: 2145621 - RNA, 19 nt, Artificial Sequence
  Description of Artificial Sequence: Synthetic oligonucleotide
agucguucuccuuggccug

SEQ ID NO: 2145622 - RNA, 19 nt, Artificial Sequence
  Description of Artificial Sequence: Synthetic oligonucleotide
ggacuggacagcuucacuc

SEQ ID NO: 2145623 - RNA, 19 nt, Artificial Sequence
  Description of Artificial Sequence: Synthetic oligonucleotide
aggaagugaggacgacguc

SEQ ID NO: 2145624 - RNA, 19 nt, Artificial Sequence
  Description of Artificial Sequence: Synthetic oligonucleotide
aggcgcugggcgcauauug

SEQ ID NO: 2145625 - RNA, 19 nt, Artificial Sequence
  Description of Artificial Sequence: Synthetic oligonucleotide
caggaccacaccauacuuc

SEQ ID NO: 2145626 - RNA, 19 nt, Artificial Sequence
  Description of Artificial Sequence: Synthetic oligonucleotide
ugcgccucguugaugcacu

SEQ ID NO: 2145627 - RNA, 19 nt, Artificial Sequence
  Description of Artificial Sequence: Synthetic oligonucleotide
auugcagugcaaggcgguc

SEQ ID NO: 2145628 - RNA, 19 nt, Artificial Sequence
  Description of Artificial Sequence: Synthetic oligonucleotide
cugcaucuggguuuugguc

SEQ ID NO: 2145629 - RNA, 19 nt, Artificial Sequence
  Description of Artificial Sequence: Synthetic oligonucleotide
uucagcugugacagguauc

SEQ ID NO: 2145630 - RNA, 19 nt, Artificial Sequence
  Description of Artificial Sequence: Synthetic oligonucleotide
cagugcaaggcggucaaag

SEQ ID NO: 2145631 - RNA, 19 nt, Artificial Sequence
  Description of Artificial Sequence: Synthetic oligonucleotide
ugaggaggaucugaaucgu

SEQ ID NO: 2145632 - RNA, 19 nt, Artificial Sequence
  Description of Artificial Sequence: Synthetic oligonucleotide
gucauggccaugcacucga

SEQ ID NO: 2145633 - RNA, 19 nt, Artificial Sequence
  Description of Artificial Sequence: Synthetic oligonucleotide
gaagggauggguccugugu

SEQ ID NO: 2145634 - RNA, 19 nt, Artificial Sequence
  Description of Artificial Sequence: Synthetic oligonucleotide
gucgggacuggacagcuuc

SEQ ID NO: 2145635 - RNA, 19 nt, Artificial Sequence
  Description of Artificial Sequence: Synthetic oligonucleotide
cuugcgcugaguggcaggc

SEQ ID NO: 2145636 - RNA, 19 nt, Artificial Sequence
  Description of Artificial Sequence: Synthetic oligonucleotide
ggguaucuccaccucaggc

SEQ ID NO: 2145637 - RNA, 19 nt, Artificial Sequence
  Description of Artificial Sequence: Synthetic oligonucleotide
agcguucuucacaucgaac

SEQ ID NO: 2145638 - RNA, 19 nt, Artificial Sequence
  Description of Artificial Sequence: Synthetic oligonucleotide
cucgucuaccucuccggag

SEQ ID NO: 2145639 - RNA, 19 nt, Artificial Sequence
  Description of Artificial Sequence: Synthetic oligonucleotide
uuccgggcuagguccagcc

SEQ ID NO: 2145640 - RNA, 19 nt, Artificial Sequence
  Description of Artificial Sequence: Synthetic oligonucleotide
acaaggaagugaggacgac

SEQ ID NO: 2145641 - RNA, 19 nt, Artificial Sequence
  Description of Artificial Sequence: Synthetic oligonucleotide
agcggccuugcgcugagug

SEQ ID NO: 2145642 - RNA, 19 nt, Artificial Sequence
  Description of Artificial Sequence: Synthetic oligonucleotide
uucccugucgggacuggac

SEQ ID NO: 2145643 - RNA, 19 nt, Artificial Sequence
  Description of Artificial Sequence: Synthetic oligonucleotide
gguugacccaggcaguggc

SEQ ID NO: 2145644 - RNA, 19 nt, Artificial Sequence
  Description of Artificial Sequence: Synthetic oligonucleotide
cacuccugcucaucucacg

SEQ ID NO: 2145645 - RNA, 19 nt, Artificial Sequence
  Description of Artificial Sequence: Synthetic oligonucleotide
auggcaucccuccgguucu

SEQ ID NO: 2145646 - RNA, 19 nt, Artificial Sequence
  Description of Artificial Sequence: Synthetic oligonucleotide
cagacuuuauugacagaca

SEQ ID NO: 2145647 - RNA, 19 nt, Artificial Sequence
  Description of Artificial Sequence: Synthetic oligonucleotide
gcuagguccagccugucca

SEQ ID NO: 2145648 - RNA, 19 nt, Artificial Sequence
  Description of Artificial Sequence: Synthetic oligonucleotide
cuggguuuuggucauggaa

SEQ ID NO: 2145649 - RNA, 19 nt, Artificial Sequence
  Description of Artificial Sequence: Synthetic oligonucleotide
ugugcgauguaugcucuau

SEQ ID NO: 2145650 - RNA, 19 nt, Artificial Sequence
  Description of Artificial Sequence: Synthetic oligonucleotide
cagcucgucuaccucuccg

SEQ ID NO: 2145651 - RNA, 19 nt, Artificial Sequence
  Description of Artificial Sequence: Synthetic oligonucleotide
uccgguucucaguggcaag

SEQ ID NO: 2145652 - RNA, 19 nt, Artificial Sequence
  Description of Artificial Sequence: Synthetic oligonucleotide
ugagaguggcauccucauc

SEQ ID NO: 2145653 - RNA, 19 nt, Artificial Sequence
  Description of Artificial Sequence: Synthetic oligonucleotide
gaugaagggauggguccug

SEQ ID NO: 2145654 - RNA, 19 nt, Artificial Sequence
  Description of Artificial Sequence: Synthetic oligonucleotide
caugcacucgaggcugucg

SEQ ID NO: 2145655 - RNA, 19 nt, Artificial Sequence
  Description of Artificial Sequence: Synthetic oligonucleotide
uggccugauacuccuugau

SEQ ID NO: 2145656 - RNA, 19 nt, Artificial Sequence
  Description of Artificial Sequence: Synthetic oligonucleotide
augagggucucgggguggc

SEQ ID NO: 2145657 - RNA, 19 nt, Artificial Sequence
  Description of Artificial Sequence: Synthetic oligonucleotide
ggaaagugguauuggucac

SEQ ID NO: 2145658 - RNA, 19 nt, Artificial Sequence
  Description of Artificial Sequence: Synthetic oligonucleotide
acgguccagcuccaccacg

SEQ ID NO: 2145659 - RNA, 19 nt, Artificial Sequence
  Description of Artificial Sequence: Synthetic oligonucleotide
ucgucauggccaugcacuc

SEQ ID NO: 2145660 - RNA, 19 nt, Artificial Sequence
  Description of Artificial Sequence: Synthetic oligonucleotide
uugcagugcaaggcgguca

SEQ ID NO: 2145661 - RNA, 19 nt, Artificial Sequence
  Description of Artificial Sequence: Synthetic oligonucleotide
acgauggcaucccuccggu

SEQ ID NO: 2145662 - RNA, 19 nt, Artificial Sequence
  Description of Artificial Sequence: Synthetic oligonucleotide
ucucguccaggaccacacc

SEQ ID NO: 2145663 - RNA, 19 nt, Artificial Sequence
  Description of Artificial Sequence: Synthetic oligonucleotide
cacacuccugcucaucuca
